United States Patent Application Publication US 2020/0157537 A1 - sequence listing, part 16

SEQ ID NO: 32513 - DNA, 1212 bp, Mus musculus
atggctttagcttggggctgttccctgtgaatctagggtataacgccctctcctggagctccctactaccctggagggctgctgcatggcgcctctttgtgtaaactgtgggggctgtcatggagcttgaggctgctgtccactgtgtccatccacatgctatttataatgcttactcctgatctgtgagataaagtgagcaccgcaggcctcccacggtcacggccagaggccagagttagatgcagacctctgtcttctccacgaccactgtagaggcactacttttctagaacttgccagcttaggagccagttaagtcagctttgtttcctgtcagcggcagctcccacggctcatcacaccgtctttcgtcagaaccgccttgtaggaacttgtgtgtttcctgaagctggtcctcaaggactgtagtcacccaggcccactatgctcataaagaagtcccgtggccctgacagaacccagaagatgcaggcccagagccaccagagacctgtggctcttacagcctgagagttggtgatcaggggtggatgcacagactcaggggaaaatgtgaagtgccgtgcatggctgccacgtgtcccctgctttgcctgaactgtctgtcctcctccacccacagaactatgtggtgctgctggacaccacgctccccagatcccagtacgactacgtcctgccgcaagtctctttcactgcagtgggctaccacaagcacatcactctggttttcagtcccacggtaagtacgagtgggaagttaaaaaaaatccttagatggaggccgtgatcacagcatctcctcctgccacatcactttcccatgttggagctccgtggacacctttcttcctctgtgcactgacgcctgctgttgggcaactagttgtgagcaagcagaatggtttaggtcactggcttggtgtttgaggaggagggacaccgtttccctttaacctgtggcattacattccttcatgaggaggaacatttagcaatgcagaggacacgggagtgtggaagtgtcagcaggcatgaataaacaggaagcaggtgacaagatggccgtggggaaagaccctggtcagtttatcagcccctgtagtaggccccttcactgctgccatcaaaaaccagtgcgttccacattcaggagatcatttcagttgcctctggaagcttgtgtgt

SEQ ID NO: 32514 - DNA, 1389 bp, Mus musculus
tcatgggaagtcggggggcaggagataggctatgggagggtgcccggtgtcatggaagttgtagaaggttaaggttggaggagacgaggcaaattcctacatcttcttccagtgatgtcatttccaatcctcagggaggtgttgcctgtagagagtcacagcctctgtaaaacctctctgccagccttctgcaggcccggggctcccataaggggatgcacggcgccttccaggtgttcatggtctctctcattccagctcattcctttgctgctgcagctgacgagtcgtcttcagggagtcagagcccttggccaggcggcctctgacagcagcggcccagaagacatgaagagacaaaccaagaaacagaagaccagacgcacgtgaggaagaaggaggccccgtctcctgcagatgacacagccagggctgccgcctgcctggggacaaaggcacatgctcactcacttcaggcaggccctgggccctgtcacccttgtgttggtgtcctgcctgtctgtcctctcctgtgtagccctgtggtgcaatgcgacgaatggaccctcctgtcaccctgctgaacacaatttattttctgagttgaagataatttattattattatttttgtcagagaagtatttaagctgagctggtggcgtgagaacataatctaatcttccacattcgtttgcaagaagagtccaggaaacatggcgttggtctgctgtgccttctggactttccccaaaccgccccctgcactcgaggcccgtgccagaagctgcagcaacatctgtccctcccagaagggtctgtcaacagctggatgaataaagtcagccactcgtttgtgttgtaacttggcatagtgtggggtgcatacagagcgggtgggcattcagccccagcgacagaggctgtggggactgccctgtgtggcacagccaacctgtggctgagctcagctcactgtggtccctggatgtacgtcctgtatcttagagaagccagaagaactctgttgtgctgggctttaaaagtatttcacttcttggggaggggtgtctgtccgtctgtgtatatctgtgtcaactggccacttgacacgcatgtgggtttgcttgctgcacaggggaggtgagcctcatgagcctctggaacagatgagacataatctatacggtgtgtggatatgggtatccattctaactctccaagtgacagcacagtgaacaccccccttaagtactaatggggcgtttaattgacactctataaaggctgaaagcctgtgggagacaactagatgtcagtgggctctgtccctctgcaaaggtagccataggactttgtgtattccaggtggccgccaggtgggcgtcgg

SEQ ID NO: 32515 - DNA, 1132 bp, Mus musculus
caggggaactgacatcctcttctggcctctgtaggcaccagacacacatatggtgaaacacttgcacacataaagtaaaaataaatgtctgggaaggttttcgaagggaacactccatcatttgagacgtttgcagacatagcaaccaatgtctgtatgcagacctgattcagatcctgatgtacaatcctcacacagccgccattttgagatggtcagggaagccttttccctcgcagcttatcaccaaggaggatgtcgtcttggttgactgcagctttctgctgggctgcattggtctcagtggtcacagctgctgctttataaagccagctgtctctttacattaggaatgctggctatggagtggtccaaaggatcaggccttgatgttggtgttagctggtggcgccatggtgtgcacatctgcataggattttgtctgtgcacttccagtggggtttaggatgtggatttgtagacccacgaggccattttactgaaataaggcgctgtactgtcttgtagtcacaaatagccatgtatttgaccatggagaatctggatttgccttggtggggtagaaagacactaccctgagtgtggactgaacaccagtgttttctctactacttattccccatgtgactttggctggatcccagcctcttttctgagcctcggtttccccatctagtgaataggtgtggattcatggtcttcaaggttcctttcaggttagctgagagcttggcagcactccagaggtgtggctgtgggctagtgcctgggacctttaaaggaagttttcctactacattggaattttctctcgtggtcttagatagtctcaaagactggatttgtgattgttcgatggtaatctctgtggctggtcatgggcctcctgaggcagccaagctcccgggtgggactcacattggctgagatggttgggaatttcccacagcacgagtgtcaagtggcagtctggtctaacgctgacatacattttctctgttcccttctgctctgctgggaagcgactggcagtgtgttccagtgggggactggcttggcatcttctggtcgacgcctgtgccctgggcagaatctcccactgtttttgaca

SEQ ID NO: 32516 - DNA, 1180 bp, Mus musculus
cttatatcttgggtatcctaggtttggggctaatatccacttatcagtgaatacatattgcacacacacacttatacacacacactcatgcatgcacacatacacacacaagacatatatacacacatacacacacatgcccacatgtccctgtgcacacacatgcacaacacatataaatatacacacagatacacaacacatatctacacacacacttatacacacacactcatgcatgcacacatatacacacaagacatatatatacacatatatacacacatgcccacatgtccctgtgcacacacacatacacataagcacatacatacacaccacatatagacacacatatacaacatacatacatatacacatacatgcatacatatccctgtgtgtgcaaatacacaaacatacacagaagcacacacacatctctcacctagcaataaatataaaagcattatgtgtgagtatgttgggtgtgggggggtgtcaagctgcactgagttcatccaggagtcacagaatagtttgtagacgaatgattctgagactaagtttgctcttttctttggacagtgcctgagagagaaggttgtttgtgtcgctgctggactgaggcatgccttagccactacaggtaatcactcagcctttattctcaagtgagcccatctgagcaatggagcgtcaggaggagactttgtagggagcactgggaagggtcctgccctgctgtagctccaactgaaagcagagagcatgaagtacaagtctctggggggcttttagccagtgggaggaagggagcgagctgcctggttcttcttgttgtagacgtggaattgtcataatttcatcctcccatttactcctcacagccaaggagcaaaagtgtgagctaaagtctttttgaactccatgcagagtttgtggaagcacttgtgagtgaggcagggagagctagagacagaccatcagtgtagatgtcgcagtgagctgtgccgtcttcccgctggattccaacgtttgttgattaaaaagcttcaagtgagctgacttctgtacgtgagtgggcagagggaccagcagcgtgtatgggggtgtggggcaggtggcactgagtaagtagggctctggcctggcttgaagggtcctagggtctaggaaa

SEQ ID NO: 32517 - DNA, 1222 bp, Mus musculus
atattttcttccattccaggttgctggttcattctgttgatcccttcctccctcccctcccctcccccctccccccaacactgggcattgaacccgaggcctcatctgtgcatggccaacattctaattccctgagtcatgatgccccacccactctgctggcttcagcctgcgtcgtttgatcactgcatcagtgttgtgaatcctcttaagtgtacagagtttttaatttgctattaagaacgcatgaggacaactgaatttgtatgtttctttcttgggatttcagagcgctgatacaaggcatgcttgagaagtgtgaccgcttcctctggtcgcagcaggcctagttggggatctactttgaccaagtggaatcctgctctcgaccctgcagaggtctttggcacagaagggaagaggacaccccaaaacatgctgctgcagctgctgatgtctcatcaccgcctggccagcccttggcttttgtggctctgtgacctcagagtttctcaaggaagcagtgggctgaccttcactggaagcagcctggaggtgctccctgctgggtcggattctttgtgtacaccatgaatcagggaattggtttctactgatgcagatctgtagggagcagaagctttggtacaggaagacataactaatattgtaaactggagttcaatactttttcttactgagttaggacctggaacaatgacatcattcctgttggcttatgtaataaatactgaagatccaaactagagttttaaataagactgcccatatctgagttgagctcagtttcaagtatttttccagtatgtatttgatattctctaatctaagcctatacgtactgactaatcctggaaatatattatctgtaagttttggagagtgggtgacccaaacgctcacgccctctcttttattttttttatcgggttatgcactttttccttcattcctttctctttttttgtcttaatttataaccctcgctagcctggaacatgtaggtataccaggctgtctcgactttaaatatctactgcctctgcctcctgaatgttagaattaagggtttgtgccatcacatatactttaaaattttattttaaaaagccatagcaagagaaagccacgcactaacataaatgataacaaatgattatattagccaagccatgtaactggattgtcatttatgaagctt

SEQ ID NO: 32518 - DNA, 1144 bp, Mus musculus
atgtctttgggctgagagggaggcagggtgcagcacactgttagtctcagcattctggagggagaggcaggcagatctcttgagagttcaaggccagcctggtctacattgtgatttcaagacagccaggaccacacagagaagccctgtaacctagtctcatggggccaggggagtatttaacagttctgtaagtattataaagctaatatttataaattaaaatttaaattttactcttgcagaattacaagtaactaatgctgtttcgttcttctttttttttaagatttatttatgtaatgtatgtaaaggagagggcatcggatcccattacagatggtttcgagccaccatgtggttgctgggaattgaactcaggatctctggaagagcagtcggtgctcttaactgctgagccatctctccagcccctttagttcttacccaaatgttattccacatttgattttatagagaatcagctgttgggaaggaatttttctttttctttttctttttttttaaatccctttgagccaatgtttcactatatgtaaccctggctgtcatgaaactcactaaatagaacagactgactaggaacttgcagccatagttttgcctccacctcttatatgctgaccattttattcagtctgcagatgcacacaaaacagcagcttacctgggaagtcataggacgtgtcagaaacagttctctgttgtcatcttatgggacccagggattaaattgaggtcgtcaagtcactcaatgcaaaaatacatatttattgtaggtaatcagggaagaaaacaatcaacttgttgtctgtccttctagtcatacatacatgcagaacatacatgtcataggtagttagctctgatgtcaacccggacagaaacctggttctatttattggatgctttataaaaacctgtaatgtcctcctgtattatctgccattgcttcctcctcaagatagcttccccctctttctctttctctctttctttctctgaaacagcgtcttacagtgtcacacactggctttgaactctgatcctcctgccttacactcctaagttctatgattacagacattagatagcacaccatttggattcctttactaaaagt

SEQ ID NO: 32519 - DNA, 1205 bp, Mus musculus
ttagctacactgtgcgtatacagactcagttttgtatggactgtgtttctaaaacagctcattttaaagcgtaaatgcctctgaatgtagttgcaaagtttaggaattttactcatgatcttgaagtgagtaactatgagtaattttattggtataatatatttaaaaaataatactttggccaggtggtgggggtgcacgcctttgatcccagcactcaggaggcagaggcaggtgaatttctgagttcgaggccagcctggtctacagagtgagttccaggacagccagggctacacagagaaaccctgtctcaaaaaaaaaaaattaaaaagtaaaaaataaataaataaaataataataatgctttgactaattggacatgaattatgtagtaaagatgttaatagactcctgatccatggtcaacagggacaaaatcatgtgttttgagtttcccatcatgcaaatgtcttgtctgtgttttgtagtggatatcttgacctacgtggcttggaaaatcagtggctttcccaaaaaccgagtaattggaagtggttgcaatctggattcagcgcggttccgttacctgatgggagagaggctgggggttcacgcgctgagctgtcacggctgggtcctgggagaacatggcgactccagtggtaagtctttaataccagtttcttcgctctttgaaaacaaaaacctagcataaaaatggctctaggcatttttctttcttcttttttttaaaaaaagatttattttatgtatgtgagtacattgttgctatcttcagacacaccagaagagggcaccagatcccccttaaagatggttgtgagccaccatgtggctgcagtccgtgctcctggccactgagccacttctccaggctccaggcatttcttttctaccagcccagcctttgtcttccgaggatggggatttcaggcgtgagtgagccaccatcacgcctattgactcgttcattcatcttcatgccaaggacttgggaacctcatgtgtgctagcacacagtccaccgagccttgccttcagcccctggacatgttgagcactttgagcatgttgtcttaggacaactttagtcacttgtttcgttcagcagtttactcttgacttgaaatgcctgcccctgctgggattagggagatcgggggtgggggaaaccctgttag

SEQ ID NO: 32520 - DNA, 1421 bp, Mus musculus
tggacaactctgcaatagaatagcattgacactcaacttgttttataagccaagccgtggtaaaactttgaatcccagacctcgggtgatagaggcaggtagatctatctaaaagaagaagtctttatacttgtaaaggtctaaatcccaaggaatattaggaggtatggacaaaatagatgtaatctctgtcattctgtgtccagggtctctatggaatcaatgaggatgtcttcctcagtgtcccatgtatcctgggacaaaatggaatctcggatgttgtgaaggtgacactgactcctgaggaagaggcccgcctgaagaagagcgcagacaccctctggggaatccagaaggagctgcagttctaaagtcttccccgtgtcctagcacttcactgtccaggctgcagcagggcttctaggcagaccacacccttctcgtctgagctgtggttagtacagtggtgttgagatggtgtggggaaacatctcactccccacagctctgccctgctgccaagtggtacttgtgtagtggtgacctggttagtgtgacagtcccactgtctctgagacacactgccaactgcaggcttcgattacccctgtgagcctgctgcattgctgccctgcaccaaacatgcctaggccgacgagttcccagttaagtcgtataacctggctccagtgtgtacgtccatgatgcatatcttgtgcataaatgttgtacaggatattttatatattatatgtgtctgtagtgtgcattgcaatattatgtgagatgtaagatctgcatatggatgatggaaccaaccacccaagtgtcatgccaaataaaaccttgaacagtgatggctctgctcttttattaagatgaagttgggtagctggtcagtttgatttcagggtcagaggcatgtggatggatctcctgcctttcagcgagcctggttacctagttccaggacagctggagctatgtagtgacacctgtatcaagattaaaaaagaaagttaagttggtggcgtggggactggagagatttagagcactgactcctctcccagaggtccaattcctagcaatcatctggtggctgacctatgccgtccgatgccctcttctggctgaagacaactacagtgtactcaagaagctgattgagctgaaagactgagttgctaagacacagggtccccaggacactcctctcagcactggggaggtagagacctagatagagcttgttggctccttagaattggtactcaggaaatccagatctgacaagggcacactatgaccacatgcagttcttggaattgcagctcaggttttgtccattatggtgggaagcatgcaggttctgaaggcagctggaagaactaacggggccttgggtattgaaaccccgc

SEQ ID NO: 32521 - DNA, 1185 bp, Mus musculus
cagagaaaccctgtctcgaaaaaccaaaaaaaaaaaaaaaaaaaaaagtaggcttgggctggggctacacctccgggaatggctcatccctaatgtgtgcaaagccctggattccatcctcagcactgcaaaggtaaagccaggccctgcaatatagtagagtttttaaaagttataatgtgcaattggtttcaaaggttgctgtatatatttaggattgctagatgctgtctggcatcatgactggatcaacgcgtttctgaaatgttaacattttcctccttcctagcacgtccgcctcctgtcccgtaaacagttccagctaagggcactaatgcaaaaggcaaggaagactgcgggccttagtgacctctactgacatgtgctgtcagctggagaccgacctctccgtaaagcattcttttcttcttctttttctcatcagtagaacccacaataagttattgcagtttatcattcaagtgttaaatattttgaatcaataatatattttctgtttcctttgggtaaaaactggcttttattaatgcactttctaccctctgtaagcgtctgtgctgtgctgggactgactgggctaaataaaatttgttgcataatttttctctttcttggacttgagataagatgcacaaaagaagcctggcttctcattaataaacaaggcacagtgttcatcttaagttgcagttcagtattctgtaggttaaagataagttccctttagtgtagaatgtcatgcagagaaatgtatatattggaggatatgtttatttcattctagaaccaactgaaccatggttcaaaacttttttaatcaagaattcaattcccgccatttgcattaggcagctcacaactgtattctagctttggggatccaatattgtcttctggtctctgtggccactacactcatatgtacatagacatagatacatactttaaaaaaaaaaaaaaacttgggaaaatgtagtaagactgtttcaaataaacaaacactgagcatgctgggtgatttaaaggaagtactctttgcaaacgtattttaattgttgaggaaaaaatgtgttaaaatgtcaggtgatctctaattgatttcttcaaagctttcctcagattccaccgtcactgccaactctgaccttgtgacagccacactag

SEQ ID NO: 32522 - DNA, 1231 bp, Mus musculus
taaaatgagcatcataatagccaaccatttcagtttaagaatgtagtgccgatgtaatgcagagcctgcagccaccacctgcaatgcgttgtagctctgaaaatcaaatccttcccatagatgggaggaatttctcctatgggaatttcttgtttcatgattgtccatggggagagactttattttggactgtgtctggcagtccagttggcagtaccatgtatctctttcacaattactttcattttggggaattttcgtcattccttcccacattccaccaatatattattggaagtattagtccgatgctccaaataccgtctgaggttgagttgtagatgtgtcatagcaaataatcgtgtacaaatcagtataaagttatgcatggactgttctgttttcaggctgaagttgataaaaacatagaacttttgaaaaagaaggatgaagaactaagttctgctctggagaaaatggaaaatcaatctgaaaataatgatattgatgaagttatcattcccacagccccactgtataaacagattctaaatctgtatgcagaggaaaatgctattgaagacactatcttttaccttggagaagctttgcggcggggagtcatagacctggatgtgttcctgaaagtaagtacccttccttcagctgccagggctttgggatctgctgcagattcagtcacaccacctacatttgagcttattgcccacccccattttgttttgtttttagtcccataatggtcttagagttggataattttagattagttttcccagatcagatagttctagaaagaagtgggtaccctttttaatgcaggttatctctggcttgctaatagtgtacagcccgaagtcttagtaagctttgcttattgcccaaggagaatatggttttaggaataataaccagatactcagtatatttgacctcattcctggtgagaacactcaggtgagtggctaaaccttgtgccttggatctaatgtaagcagtgtgagtggccgagcgtacactagtgatcacaaagaaggttctaccactgccttctggctgggtggcaaggcatatgaaaagatgaatacggagacaggaaaagtaaactgttctgagacgctgagtagggttaacgttagtaccgtttctcctcagcccttctcttgttgttctcttagtaaagggacagtttgaaaacttgtaccaagca

SEQ ID NO: 32523 - DNA, 1196 bp, Mus musculus
ttacaagacggtgataaatatgaattagtaaaagggaacatgaaacagtttgaagtaaagtgacgttaggtcttgaaaacagttgtaagagtagaagtgtctcggtaaaatcctcctcttcaagttctacagagacaaatggtagtcacagcctagggaggagtcccagggccaataagacctttaggctctatttcctgcttccttcctcagcttcagctgcctggtgctgtgccaggcgtccgtcccccactggccagatggtcgcttgcagtggttcatgagctctcattgcatctgctgcttccttttcacgaccatgcattcacttagctagttcctgcttacctccagcaagcactcagcactaggtaagttcatgcatgtgttgtaagcattagcacacggtcgtacccccatgtctgtgctatcatcatcgccatgctagttacattacatgcctgtgtttcacaacacaatcatctcctgcagcccggaatgctttgtccatcttggattgaacaaatgatcctcacaccaccttggtgtaaccaaaaaatcaatcacttattctctatcaagttggattattggcaggacatttgcttaagagctactctttttttattattattatatattttctttatttacatttcaaatgttatcccctttcctagtttcccctcagaaaatccccatccctttccccctccccctgctccccaacccacctggcattcccctatactggggcatagagccttcacaggaccaagggcctctcctcccattgatgactgactaggccatcctctgctctctatatagctagagccacaagttccaccatgtgttttctttgattggtggtatagttccaaggagctctgggggtactagttagttcatattgatgttccttctatggggcttcagtccccttcagaagagctacaattttttaagtgtgctattaaaatcatatataaagcaaagattactgcagtagtatttcagcagtctgagggttggatctcagagtgtgttatctcttttggcacagatttgttttatataatagcaaaaatcaattctaaaagcagtatttttattttattaattttttatcagacaggatctcatatacccaggatatcattaaacttgctatatggatgaaaatgacctttgaa

SEQ ID NO: 32524 - DNA, 1152 bp, Mus musculus
tcagtgggaatttgggtccacagatggagctaggtttcagctttaaggttctggccactcacctcttaccttcgcagaggtcctctgagagtgtgggtttgcagatactcagtgaatgcttgtggtttgggtggacacttgtcaggatcagcgcaagagatgctgagctgtcctttcttcttttcttcacagcctcggattcacacagaacctggcagatttctttcagtgtggctgctttggcttagtgaagccctgcatcatagattggacatcccagtacaccatggttttccacccagccaaagagaaagtccttcgctctgtatgaaaaaaaaagcacctcaaaatgcactctgacttgtttttgtttatgctggtgctcttattgctgaaagtgaagtgagatattcagctaccacggtcaaaggataagggatacagtcttcagcaagagtggaccttccgtcagacccagaaagatggcctgttactgagcaatttggcaagcagcttttaaaaacatatgaaaatattttccccaagaacatgagttacttttgaaaaaaacctaatagtcactgattatggataaaataaagtattttcaaatactatattggctttttaaaaatagtactctttaaacttgtaatttttgataagttatttgtctttgttgtatctataaatatgtaaagaatatttaaatagatgtatctgttttgctttcacacttaataaaaacatttttttatacttgagacttagtttctaatgcttcacatctttagagtcttggaaagatgggagagagacatagtgaagttaattatcagtcggtcagtgattgtatctactgatttcctgttccagagagaatgctgcatccacctaactcttgctgtagattgcacggctctcccagttacttttctcactgattcctccctgttcttgtcacaggggaaagctaagcttctcctcatggcctgtccaccccagaatgatgctgttctgtgtaccagtgtcactctgggccactggtcagttcttcaagggtctctccttcctccatattctaggtcttcacagatggaaagtgcatttcatgtatctgtgagttattccacagtgacttgttgagctatt

SEQ ID NO: 32525 - DNA, 1198 bp, Mus musculus
ccaggctccctgaaaagatgaaaatcactaaggaagacgcctcatgtcaacctctggcctccagtgcctggatgtgtcacacgcatccacacaagaatacttaggagcaatgtggttccatgatgttccataaatcttctctttcagtgaacccaggaagaaagtgaaagtaaacctagcaagatctgggcactacaaaccactggctcccctggaccctacagtgaacactgagctagaactgcttacaccgtcccttatccagcccctgggcgtggtccccctgatccctagcccattgtcatctgcagtgcctgtgatcctacctcaggccccttcgggcccatcctatgccatctacttacaacctgcccaagcccaaatgttgacaccaccccctggcctgagcccaaccgtctgccccacccagccctctaatgctactggatccaaagaccctacagacgcccctgctgagaagacggccacagacgccgccacaaccggaagcttgcagccagcaccagaaaggcatggtgctaagcatcgaagcaaggagacgaccggagatcggggtacaaagaggatgatcaccgcggaggacagtggtcccagttctgtaaagaaacctaaagaggacctgaaagcgcttgagaacgtccccacccccacggtgagtatagcctcaggtgcgatggtgctttttaagttgtagcaatcccgaggctgactccacaagaagaattcggtggcttgtgaagtttaccaaagcaaaaaactgtctctcagaagacaaagaatgatcccttagcatcccctatccaaatgaggtcccaggcagctaatcctcacatggatgacagcagggacatttttaaaccttgagaggaaaagctgactgtctctctttttaaagcgtcacaagtggctgtccctaagtccttttctccgttcccattactggaacacaaacacctgtcatgagagtcataaatagtttctaagcagttgtcaccacaactgcagggatacacaggcctccctcctgtaactcatgccttctgagtcattccccagtgtctgcttgaagtcatgtacctggcatctgttggctgggagagaatttgcccaccccatcttttccttcctcaaatttcccacgttttccttgtaagccgaaccgtcaagctgatcttat

SEQ ID NO: 32526 - DNA, 2207 bp, Mus musculus
atgggtcatcaatcgcactctttctcattccactctccactcagcttgacccagcaggcacataatggcctcctgcccatgtgccagaagctgggccagatctggtggttgcccacatctggtagtgggaactcgagggttggatctggaaacgaagagtaattctatggagggcagtccctggagttgagccagggagcccccgcgcggggcaagccgcagcagtgaagagaccggagaactgatgagtactcctggggtggatggcagtgatggctgctgagtgcttgcgtggtgcaggcgtgtcgttgcacttgctctttggagcacagactggcaaacttttcaaaagaatcagattcaaatatttgaggtcttatgggccaaagatttctgtcacaactgttcagcgttgctttagtggcatgaaaagtggccagagaccacaaaaggatgtggctgtgtcccacgaactttcctaacagaaacaggtgcccagctggcattagtccaggccacagcttgccagcaccacctaataatgtgtttgatattgtccccctcttatggatggtgaggctgagtgtggcggcctgaaagagaatggctcatgcttgaatgcttggcccctagttaggaaaactaggtttgggaaggattaagagatgtggccttggggctggagagatggctcagcgcttaaagagcactgactgctcttccagaggtcctgagttcaattcccagcaactgcatggtggctcacaaccatatgtaatggtatctgatgtcctcttctgatatgtctgaagacagctacatatatcagctacatatataaacatacactgcctcccactctttgagggttgaggtcattctgggaagagtatatgcatgtatgtatgcatatatgtgtgcagaggtgtatatgcacacttggaaagaaggtggcttaatcctggcttccaggtggaatgtgtaaacagcctgcctactttaaagtatgatagctacctagggagggacaaagtgggtcacttattagagtcctgacccgagttctgcttctcactcagctgagtccttgggcacatggctttatatttctgtatgttcctgtggtccctcccacatggctggtgagatgcctctgggttttgagagattcctatgggcgctgcccttgactgggaagtgtgcaggtcagctttccaccactatgacaaaatacttgagagaaatcaacgtagaagaaggacttatctggggtccagctcaaggtttcagttctggtaaataaacagaaggaagcccagaaaggttgggcaacttactgcgtgggtgatttacccaatggtattcagataacaaggtggagctagccttgggtcttgatctttctttaaatttgaattatttcagcctaactaactagagaaatgagcctataggatgtcatggggggggatggataacctaacatatagactttattcagagaaacagtgttgaagaatgtgttggggaatctagaaaactcagtttgggctccccttattggctctgcagcttactgtggcattgaatgcagtatttatccttctacgcttctgttttctctgctgacaagtgaccactgcaatgacgaggatcagatgagtccatatatttagcatggttaggggaggcttcaagtgtagcagaccttgcattgccctggctgatgttggttacactccagttctgggttaggaacctgccttcagctgggcatcttggtacactcctgcactcccagcacttgagagacagaagcaggtgggtctctgtgagctcaaggcaatcttggcctgcatagtgagttccatgacacccagggctatttagggaaaccctgtctcaaagatttaaaaaaaaaaaaaaacttgccttcaaatgcgttggctgattcagtatcatcatagctaagaaacatacatgcaggtttcatctcacagataagaaatattctgccgggcgtggtgatgcacacctttaatcccagcactcgggaggcagaggcaggcagatttctgagttcgaggccagcctggtctacaaagtgagttccagaacagccagggctatacagagaaaccctgtctcgaaaaaccaagaagaaagaaaggaagggaagggaagggaagggaggggaggagagggga

SEQ ID NO: 32527 - DNA, 1177 bp, Mus musculus
ctctttctcggtggccctacttcaccgccttgaggtcagtgtagcctctggccattggcagctgatgttaaaaatgctacataaaaggttggatgttcagcttctgtatggaataaatatttcattccttgccacagctttttatgcatgcctcgaggcaaatgcattttaatatctaaaaagtaccatctggaatttaaaattcttcccactctgttcaaatttcttctcatataggaagtattttgcagaagtcctgatgggggctggttcttacactctcgccccacacgcaaagcctgaattcgagttaaggagccgtgggtttgaaaagatggctgggtagaggagagaaagcattcggatgcagtggtggctactttggcatgctttgtgcggctcgaggctcagaatgtggacttggcaaatcgagctagaccatagtacctctgctagtgccagagagtggtctagtatccacagccttgcccggatcacaggctcagtcttgagaaggacactcattctttcagcggtattcttttcgagcagatcctcctggcccttgccagccagctggccaaccagccagccagttctgacttgcttggtacatctactgcaaccccgtggggagtcttgactgatctgtggtttaggagtcattttaatggaccttcgggagttaaactcaggtagggctgaagaagcccgtggaacgtggaaaagaaaggttgccaagaatcctcattttatttaaactgtctgtgcaaaggtgttcttgcacattggttcttaaacctccaatacacgttaagcaaggaccttaagttttatttatgaaaacaaacaagcaggttgactacgctaagtcacttccattttagacaagggagggccggttgcgtccaaaattcggttttcctaaacacatttaaaacgtcatggcagtttcaaccacgccatcgatttgacaaggtttgcctttccccacatttatgcctctggtgacgagaacctctctattgtcttgcagagatcaggaatgggaacctcaaggccattctaggcctcttcttcagcctctcccgatacaagcagcagcagcagcagcagcagcaacagcctgagaagcagcccctctcctcatctcctctgccacctgccgggtctcagg

SEQ ID NO: 32528 - DNA, 1091 bp, Mus musculus
gcgccacccagggacacccatacatcacatgtctctgttttccacatggtgctcgccttcccgagaggtattctgtctattccagtgcacccctccccctgttcccggcccatcatccctcccacccacccccacccccacccccatgatctgtgagagcaagtgaagatgcaagaatgtgagtgagcagatggggctagcaacacagaaaagcgcgcctgtttccttcgtctgtctaaatggtcaggtttctgtccgcaaacactgtgtactgtacaagtagttctttggagaactatcaacccctgcctgtgtctgcctttcttcctggttgattgtgaaggccccttttccccaacccccactcccttgaccagaattagtcctttggtgaaagcaagaactaagtagagtttgcctcctccctcagcctgggttttcagtgtccactgtcacagttctgggccctcgacacctccttccggggttgtgtgggcatccatatcctttcagatagaggaggactagttctcctcctgtgggtgagccatggacctcgcctttccttcttgtctctgagagctgagaaccccacagcatcaccttgggcaccccagaccccagttgcaggaggagttgacgatgccccctcaccaaaagctggcactttcctcagatccaatgtgacacagcttagccagggaggggcggccacccttcccagaaacccggccagccgtgcctccgtcccgatgagccttgcctgacctcttcggtgctgaccgcccccatgcaatgccttactggttttgtgctgaccgtgtccattcacatgagtgttgtgcctgcctggggttgtgtgtgtgtgtgtgtgtgtgtgtgtgtgtgtgtgtgtgtgtgtgtgtgtgtgtgtgtcttccccatcgaagtaaacagggctataagtcatctatccatgaagagaacacaagttgccgacctctcatctcagagagtcatctatgtggatgtatgattgggggggggggagggggagggagggagggagagagagagagagagagagagagagagagagatgttttttaggc

SEQ ID NO: 32529 - DNA, 1211 bp, Mus musculus
tgctgtaagcccagacccagcctgcctttgctactagtgtggatgtgagtgtgtcttctgttgttttgtttgtaataaaagtttcaaaccacgtgtctagcctgtgaccagggccaaaccctgagccttccagtgcccctgaagggtagcccttctcagtcttgtctcccagcaacggccgtacactctcatactgtgaatttgggaggtaggaaaatcgaacccctcctcaacatagttttctcagtcaccttaggagtacaccgcaccaacattgcttaaaactgtttccttagcaacaccctctccccactctccacgcccagatgtctctcccagcccacccaggatcgcaacagcagcctgtgtacccattgctgcctgacttggttctgtagccccagagtgcctcctggctcagccaccttcccgaaacactgggaagtggggctgtctgaaaggcacatttccgactgggtcatgattttccttttaagttgctcgaccttggacaaaatgactttgtacccatttagaactctgtctgcaatgcttccattttgcctttttctatagataggctacttttgaaatcctatgcaatgccgctgctgaggtaccagggggagccaaaagttttcttcccaggaggccaagaattctacagaagtccttttaacttaaggttgggggtggggtgggagtgtgacaagggcaagactcacccagatcttcctctgaccttggggacattttaaattttattgtttaatgctcgactttaaaattctgtgtgctcaaattccaaccctggcaaatctacttcaaaagcaaaaacagtccaactttgcggatatcgaatgggaggtttgctgttttgacctgcttgtctcgagccgagcggtttatgaaacatgttctataagatgtacattttttttttcattgtaacatagaaattgtaaatattcgatgaaactgctgcattttgatgacttttttctagccatttttaaagagaaaactaggaattgagtattttgtgtacggtatgttccccaccacaccaccaccacccctccatccctctcccccctctatttaattctcatttgtcatcaggtttttgggtttgagaacaatccgctggagatctgccccatgtcatagagaataaagctgatgattgtaccagtcttaaattattcatg

SEQ ID NO: 32530 - DNA, 1100 bp, Mus musculus
aacactatgctgggttcagagggaggggaaagaggctcaactagggaacttttgtgacttgagagaaaccaaatatatcagagagagctttattacccagaagcctctgggtaaatttggggtattcagtgttgtctaaaacggttgtggtgtaacgccagagggagggagctcctcttgggacttgctgaggagtccccctgaggaatctgccaaaggacaggtttagggaccctggggaagggggtagaggcagagggagggggacagagaaggacagaaagagagaggaagaggaggaaaggccagccagggtcacaagggaagagagagagggagagagtaaatggagaaagagagagggaaggtgaggagaggaatggaggggaagggagggggtaggctgttgctaggtaactgttgggtggagcctggaggaagtgctaacattcagtattttgacctcctctgagactgttccaggagactctatgcttgtctcttcaggttgttcgcctctgctgaggaaacgttttcacactgtaagttggagcatcaatttaatattgatagtatggtccataaacatggtgagtatctcttagcataaaggcaggtttgcttgtgaagtttagattgaccctttttccagaccctttctttcctttgtgtgtagttccccccagctgatgttagctgtcttcctcagttgtgctctactgtgtgcattgaggcaggacctctcacttgaacctggagctcgctgacccagctgctctagctagcagctttcttgaatgatccctggcttctgcctctcaagcattaacagtacaaaaggctgccacctctgcctggtgttttatgtggtgctgagaatcgcaatcatggccttatgccttctgtgtaagtgctctcacccattttgccacagttctgacaatctgagtttgtatcccagaactcacacagaggtggaagaagacagccagtattctttgacctccacttgtgcagggtagcacacttacatatacacatcacactctccctcccccatatagcgtaccccccacatgcatgataataaataaattctt

SEQ ID NO: 32531 - DNA, 1192 bp, Mus musculus
tgcacatcacatctaagtaagattttttttttacttttaccctttcacatactgccctccatgctcattcttgatgcacccagcaggataacctgtgagtgtcactatatgactttgaattggtcatttagcttttttgaaatttactttccctgtgtctgaaataggaataactaattgcacctcaggttgttttgagcatgagatatgatgtactgtgtgcacacttgaaagctaatgtaaactctagacttccttctggtgtggttcagtgtatgcatgcatacatatgttcaatttagccagctaagcaaaagcatactccatgagatcaaatcaatggacctggatagcaagcatgcaaaaagtgcttttaacaagttcctcacttgaccatggtaggcacttaggcctgtttctttccaacctgtttggccccgctgtgttgctgtgacgaggcctgataatgatgtctgttcaccctttagatgtagaagatctttatgagcctgtgtctactccattctcataccccaatggactcagtgaaagcgcatctgttgttgagaagttgaagcacatggaagcgcgggcgctgtctgctgaggctgccttggctcgggcgcgtgaggatctgcagaagatgaagtgagtcctttttccaaccaatccctgttgtatgtaggtggctcaggatagataatagttcctggtaaggacaccgggatgttagacactcagtgtggattcctcctctaggagtattaaagacatgcaacattcatgctgtaccgtagaatgtttatgtacgtgtagaagcttcattattgctttgcacatgtggctgttctcatgtccttctaaaggtatttcctgcctttcactttccttatttctagttggtttctccactttcattgtcctagtttttcagaaatggaagggttattatttttttaggttttagaaaaatacaacattgaaatgttttttaaaaaaccaaaatgtgacagtagtgtagaatttaacaaagaaccagatagccggggacagtttttttccccactcacaggtattctcttggagtccctcatttcctgggggacttgttaggttagatgttagtgtgcaggtggccgcagacctacacatgtgtagtcatagcatgtgttcctcccagtgtctgcctgct

SEQ ID NO: 32532 - DNA, 1230 bp, Mus musculus
gaatgtgggcagccaccctgttgtaactcagaactcttagtgtgtcctgtgaacctctctgctgaatgaatgctcatgctactccctgatttaaactacccactgaattcaggtagtgctgtctgtgtgcacaacaatgaaagctctctagatagtgcatgctttgggaagtggactttgaggtggtctatcaggtgcataccaggctgtgtggcaacatcttgtggctctgcctagtggatgccagtagtgttttccaccctgacctccactgtgtgactgagagagacaaagtctatcaaggctgctactcccaattagctgtgcaacattccagggaactgcaggactgatgaagtttctctttcattagggaagaaagagtatactaaaaagtagggtgtaggtgcagattctgtacttgctaccatgagaaccatttgggtcctcttcatccccaagtttccagggtttactttatatatacaatgacagagctacacaacagcagaaggtacttgctgaaagagctgccagctactctgattggtctcttgtggtcccattcctgacattcatcttttcttttctgtacagggctattttcttctttttgagtcgatgttggattctgtcctttatgctaagagtaaatacttggcaaaagggggatcgggtaagtgcaacatttcaattttaatctgacctcaagatggtacaaccaaatgagcctttgaatatcgagcacactgtgtatggctgagtcttagtagagaacaaagatgttcccattagaaggagccttggtcacttaagatacggggagtccaaggtcatagtttcttaggacatcttctattaaaagtaagtttgtttaataaaaaacataaggactatgtttttaatagtagtgggaagtttttagtattcaaattaaaatgtatcagaagcatcatttcagtttttaaccttttgtcatttactctgttttccttgcttaattttagccaaaggccaatagcctgtgttatgctgagttggagactatttgctttaatggcaaattttccttacctcactaacttatgagcgtctctactctgtgatttagtgtttagaaaggttttaaatacctcccacctgtaagtttactataagatccctatcaacttggagccttttttctgtgtctgtgttttttcccatatctcgttctggtttcatcctggt

SEQ ID NO: 32533 - DNA, 1200 bp, Mus musculus
ctaaataagccagccttaaaaacaacaacaataaaacatggcaataaatcatttggtttttatcagttttttaaatctctattcatttcttttggcgaatcattaatgttcaaaggacaatgatttagttagttatcctaactacttcaggctagctgtgtataagagacaggggactaaaaatgtttgagagctctataaaatgagtgagaattctaaaaaacctagctatgcctcagccatcctcgtaaaaagactgcagcctgatagggcacagtgtgatcagcatggtgagtggtggactcaaggtgtatctgctcaaaaccacccagcaaatctgtattgcattctgtagaccaggcaccaggaatatactagtgaacaaggcaagtgtccaggaatacacttatgaaagcagctagctacatttgtgaaggtaccataggtatttgagacacagagatttgttatagaagctcattttagcctcatggctctctagggtagtctgtgtctgaaaacctccgctctgtgattctgtttggcagaagtatcagcagcatttccatcctctcttagtgtctaagatgtaatgaacttaaagggtaagtattggatttgctttggactcagtgtgaattagccctcaaagatcaataaaactccacattctttgcaaaagcaacagagcacacaattggcctaatggtgatttatttcaataatcaatgtcttgtttttaggactttgtaagtttaatttaatgccagttttgaaaacagattaagtctacttaatccattatcaaggagaacggaacagtagcatttaagttttaaagaaacagaggtggaattgggctgcagagatgtcttggtggttaatagcatgtgctggtcttgccaaggatctaggtttggttcccagcagtcacatacagcagctcattccccactgtaactccagctgaggggatctgtgcccttttctggtttgcacaggcatcaggcacatgtgctgaaatgactgaggtaaggccatcctagtctgactccattttgtgtttgcttagacagttctcagccctctacctcctgccccctacagtcatgtctgtcatggcagcacatttaaggtctccatggccttgagtattgttcagatgttttaaccaaaataattggcaaggtatgtctaaaa

SEQ ID NO: 32534 - DNA, 1163 bp, Mus musculus
gcaggtggatctctgagttcacagctagcctgttctacatagagaagtccaggccagtcagcctatacagagagaccctgcattcagttttaaaagaaaaaagaaagaaaggaaaaaataaatgtgaataaggtatttctccaactaagaatgtataaaataagatttcatccagaatccatttgactaagaacaaaatccactaggtttttgttttatttacaaactagttctaaaaataactgcaaatagcttggtgggagactggcctcccagatagagggtttagttacagaaaacttcctttcaatgtgtggtgtttctttacctctgaaaatagtgtacagttttgttaacacaacttacacaacaattttgtgttaaaaatcctgatctgcttcatgtttaaatttgaaaatatgcttgtgatcaggctttttatacatacagtgagctcgctcaagctctgacataaacagtaagctttctcgggctcttacacacacagtgaacttcctcaggctcttacacacacagtaagcttcctcaggctcttgcacacacagtgaacttgctcaggctcttacacacacagtgagcttcctcaggctcttgcacacacagtgagcttcctcaggctcttgcacacacagtgaacttgctcaggctcttgcacacacagtgagcttcctcaggctgtttctctctatcccccaagagcttgctgcacagtcctagcagcatcagttatttatatctgcctgacactgactaattactcttatctagcccactgtgccagccactgctttggcactttagataggcatggacaattgaagggggctcagcagtatgaattatgtgtttaccactgtgacccttcacactatttaattaacttcagtatgtgcatatagcaccctaatctttgaaattactgctatggaagagaggtcttttgttttatcttcaaacatgagaacagcagccatgtctgcttcttatctaaggcacttcacgtttaatgtgtctaccagtgttgtgagtactggttattatttgaaactgtaaataaagtcagttattttaacaattctatcaggtactttttactggctttatgtttttgagacagtctcaatctctgtggtccagcatct

SEQ ID NO: 32535 - DNA, 1200 bp, Mus musculus
tctgaagcacatccagctgtctgtctttaaagcggaatagggcagtgaccgggatgggcaggctccatgggactgtagcacagctgatcctggccctgcaactactgggtagtaagcctagataaagcagagctcagcggaggatcccgccctcctccctcctcctgcttctgctcctagagatcctagtcacagaagcctgcctggccaggttagctgaggagacttcctctcctgctagactgagagtcatttgaattggcttacttttggaacagtaataatcctgtttttttttaatatagatatacgtttcttactataaattttgtttttaataatgagcagcacaaagcagtgttttactgtagatttcctttctagaggaacaatttttagttacactttttgctgaaatatcaggatatctcaagactagagagccagtggacaaacatcctgtttgcagaggctgtgctgcggtcccctctacccacctgcagctctctctcagctgggcctcttcagtgttcttcagccatggcctagcattgtggggaagtctaacttcaggatgtagcctatgtgtgacagactgctctccaggatggggtagatgttgcctctctaaaatgctgccttttcagatcaggtttgcaccaaggtcatgtatccgtctgctaattctagaaaatcatgttattcgggtcgaaagaatgaaaaatatccaataaatatgcaactattgaaagcttctgcatcacactgaatgttttcatgaagttgtagcatttaacaagtcaaggaacgagttgatttcaagaaaattgtggcttcagcaggccagccaggcatgttttttgcccaaactagacatcagtaggagatcaggctagctctgcagtaggtcagttcccattcagctgcagatctcagtgtgggcgtggcctcttccctagccccttcatggagttgctggtttatgttactacagttcaggtgttcaggtcactgcctcggtaagtggatggagctgacagtattggctcccacctaacacaagaggggagtgaagattacaacatgaaggaactgtactttcattgaaggggagctaacctaccagattatgtattttgttttgcagtattggaatttaactctgggctaactgagctatgccccagccttcctttcttt

SEQ ID NO: 32536 - DNA, 1245 bp, Mus musculus
cctgccccttaaggtggaaggaccggggtctcaagtgcaattgtgtgtataaggtcagtctcagggctctgtcgcccctctttctgatggaagaagtgtaacagaacctctaagagcttttaaccagagaaatgtcgagacatgtcagtcatccagcactgtcatggagcccagcctaagtcatttgcaaagactgaaactagctcttagatctcatcagtgcttgctgtcttcttgtaaggagaccagtttgtggtgagaagcatggtcagtggttgcctggtgcatactcagtgcaccctgttttggttcactgccctttgggctgctaaattcttcatttgaattgcctatagttgctcttgcatccccatgtctgagtttggtaattgctcacggagctaatgctacctcccagcccccatctacagaaggctcccagctccttgtctgctttggattttgtgtgggctcccaggtttatgagaataacaggttaactcgatagtattcagggaccctgttttctcagttgagacaggtaaaacctgagtgaagtaaattgaggtaaggtttataatctgtgtagaaaagctacttgggaaaggaataaatgtatttttagtggcagccatgagagaacagctccctcctaggactcatgactggtcacggcagagaaggcaggcacagcaagacagaggttacaaggactttgctttttaaaatcgaaaacatggagcgaatgaagcaactggaggtccatctgtgcaggaggagggttgactaaaaggtaatttttaaatttgtctactttaaccatggctaaacatttactgccctgcttaaagggatttaggaaactgctactttgtagctgattatcttagtttagaaagttccaagagaatcagcagacaccctggtagacaagagtcaagcatagtaacacactcctgtgatcctactgatcaaaactaaggcaggaagattgcaagtttaaggccagcctgggccatagaatggtacagtttgacacagccccaaggctggtgttgatctttggtaccagctggtagtgctattttgcaaaactgtagagacttcaggtgggactggatctggaagtaggcctctgaagccaagactttgcagatcttgtccagggcccctttcttgggagcaggcccttgcagaggctccctgcaagcacatgggacctaaagactatttatggaccctttg

SEQ ID NO: 32537 - DNA, 1127 bp, Mus musculus
agcctacctccatcttaggcttatagtaaagacaaactaggattattttgtttttgattaaagccctgtttctcaaggattgggctaagctcaacttgtaaccttaactacaaatggttctatattgcatggtccaggaaatgacaaccgtgtctttatttcaaaaagttataataaccatatgacaaccctacatttgtttcaaatggttgctataattgtttcaaatggtagtcagaaaaggtagttaccttgtttggctacctgtttttatgactactctgttatgactaccttgcaatcatgtcttcattttaggaggtcattatgactaacttgttatagttatgttctggtcctgtaaccctgcctattttgcatgccaaatctcccattagaaaaccttgcaccactgagctacaaaatccttgtcttcctcatattcaatgctgaattcttgaaccccatcttaggaggaggcagcccatatacatgggaaaaaaagcttgctttaactagttggtctatggtctttctcctcactttgggattaaaaaaaggagaaatgatgtgattatattttaagtaaaatatgtttaaaatgggcatttataaattataatcacaacagtaaatttgcaagaaaagaaaggaacccatggaaacgaaacctttgctttatggtgaaaatagatgctggttaactgtggctgaaaaatcaatgtgcttatcaagagatgagcatcattgagtgggaatcttctgagaaatctttagtattccctcaaggtcagcacactgaaggtaaagtcaagaggagggcaaggctatatctctagctggcagctaaagttggtgattttggtggcatgagaactgcaggattgaaggggtcatggagcatagctgaaccctggtacactgtggcagtgttggaatctcccagaagaaaggccatctgggaaggtgtagtctcagtttccatgtagaacaaagactggagggatcatggagagaagttgaggcttgtcactatgagaagacaggaaaggccattggtgaagacacagcttcacctacagtggggacactagcatattgctgatgacaagaccatgggacaacca

SEQ ID NO: 32538 - DNA, 1229 bp, Mus musculus
acccaacctcccactcctcaggtacctctaactattacccccgcgattcctacaagacagaggatgtttaacctagtgagaggagccttttatgcccttaacagaactgatccaagcgctactgaggactgctggctatgcctgtccttgggtccgccttattatgaaggaattgccttcaatggagatttcaacagaaccagcagccatacttcctgctcttggggtacaggacaaaaactgaccctgactgaagtatccgcgaggaatccaggtctctgtataggtaccccaccttccactcacaaacacctatgcggacaaattcagtccgtgtccagaacggaagctaattactatcttgtaccttccccggttagatggtgggcttgcaatacaggacttactccctgtgtatcaactaaggtttttaattcatctcatgatttttgtgtcatgatccagctgttaccccgcatatattatcaccctgcatccagtttagaagaaagctatgctggccggcggtcaaaaagaaaaccaattactttaaccctggctgcattcatgggaataggtatggcagtaggagtggggacgggagtgtcagctttgatagaaggaagacagagaattcagtctttgagggatgctgtcaatgaagacctagcggcaatagagaagtccattgacgctttagaaaaatctttgacctccctgtctgaggtagttttacagaacaggagaggtcttgatttgttgttcctaaaggaaggaggactgtgtgctgcccttaaagaagagtgctgcttctatgcagatcatacaggaatagttaaagactctatgcagaaactgagagaaagattagagcgaagaaaacgggaacgggatgctcaacgggggtggtttgagtcgtggtttgaatcacgaccatcttggataacttctttaatttccgctgtagccggaccaatccttatgatatgcttagctttagttttcggcccttgtataataaatagaggaatggctttcatccagagtaaaattgatacagtaaaactcatggttcttcaaaggcaatatcaacctatagttcaggtagatgaagagttaggggacaccaatctctaaaattctatgattagaattagtctaaacagaagaagaggggaatgaaaggaaataaaactgtaattcatgtaatgtatgttaaatagcccaaa

SEQ ID NO: 32539 - DNA, 1203 bp, Mus musculus
tgtatattaatagtcaatgccatatctctgagctcgcaattgcttaaattgttcatccctcagatactattaattctcaaatttacaattgcttatgcatatttctagataataaataaataaataatgctcatgtgactcttaataactttgcaagccttctagttacaactgctccttaagaaaattgattaagagtgcaattagtcactgcccctttacagccatgtatttaaaatattttgtcaactagttattaattcaaaagtttaggtattgtaaaattttaaaactttaacttcttaaaagacaaaaaagagaaaaattgtatccccgtgcatactatttagtgcattcccatgcacactattgaagtcttacctttattttcaaaatctaatattttaatgtcaaagagtttaataaatgctttatagtatcttaaagggatctacttattggcttatagattaatcctaaaacagctaccttattagaaaagggaaaaacaggttttctccacagaacgctgcagaagcatattagtaaattcgtgtgacgagctggtaggtaagttgactcatgttctgattgaattgactaaaaaactaaattaaattcatgttttagatccatccttacttgtcatttttccagtttagactagcttctagccttttaactttatggcaatagtactattcagagactgtatattcagacttagtaaaattagtcatttaatagagtcataatgatttttctcttttcttcagtgtgaccagccattctaactcaatctcagactggtctaatattcagtccaatgttagagattcctatattctaaattacctagcaaagttaattcagagcacatcccccacttcccctagatccctaacctcagaaggattgctggccttacagctagtagaaaaagctattaaagagcaattggtcacttaatacattggtaaaatagaaggaccccctgactaacgaatggaagggtccagatccagttctaatttggggtagggactcagtttgtgttttttcacgagatgaagatagagcgcagtggctgccagataaattaatttgttagatgaacacagattctaaatcttctaaagtatcaccttgaggactaaaattcctcttttgcttaaaagtcagcttgaggactcaggctccgaa

SEQ ID NO: 32540 - DNA, 1162 bp, Mus musculus
taggcaggtctcttgggttgaaggccagcctggtctgtatgagaaagtatagcccatgtagaaagggctacatagtgagaccctttttaaaaaggaaagagatcacaagtctatgacctggagtgtctaaagtggtcacagtgtgtaacagacttgtacgagctaggggtgggacattttcagtataaatgtatttaatgctctgaacttacatattaagtggctaagatagttgtgaacatgtgaagtcagaggctgagggaagagggcatgagtctgaggtgttgctaggctgcatgggaagacctatcaaacacaagagactaggctgaattgtgttagaagaacaaatccagttagaggctgcttggtaaggtactgctttgttccagtggctggtgggactcttgtcttctttccatttaaatgttgaagttcagaacatagacggatttgacttttttcatttatgcagtatttatcctattagtagccaaaggagaataaaataattctctcattctttcttgcttatttgggagtagaggtgggaacgcatgtgccacagcatgcctgtggaggtcggaggacttgaagaacttggtaggatcaaagtcaggttatcaggttaacaggcttggcagcactatctccactaagccaagtagccagccccattttctcattcttggttgacatcttacaatggtactgtgtagccagtgcagccatatgcctctgccttggctgtgtcaggttcaaaatctgatcttcattcaaggagatgtcttagtttgcatttgctttcagttgctgataaatacattgaccaaaagcaactagaggaaaaaggggattatttggcttaaacttaaacacttgaacttacaagtccatcattgagggaaactaaagtaggaatttaaggcaggaacctaacggcacgaactgaaacagacagcatggaggaatgctgcttgatgtcttattctttgtagcttgctcagcttactttattaaacaacctaaggccacatgcctagggtgacaccacccagagggactggaaccttccacatcaatcattagtcaagaaaatgtcccacagacttgcttatgggcaatctgatggaagcctcttcttaagtgaggttccctcttc

SEQ ID NO: 32541 - DNA, 1148 bp, Mus musculus
tggagtagtagctgagagcccacatctgatggcacagccactaggcagaggtaaaactctggaaatgacataggtctttagaaacctcacctcagagcctttcccccaatgatacacttcttctaacaaagctatgcacagtccttctcaaacacttccaccaactggggaccaagtatttaatcttgtgaacctggggctatcatcattcaaactaccgcagattataatatacttacatcaattccctcttccaagtcctctttccaaagcctcccaaatacttgctctttcaaattcaagttcatttcctttttctttactctctctttctctctctttaaatatataataaattttgtatttttcagggctaaccgtttggtactggatagccaatttttgtgttcttccctgggaagacgatttcttccgttctcagcctttcttagttgtgtaggggtcaggcctccctcataagcgttccccttttcatgttagcttatctatttgtgtcatccctgttcaggtcacatttaggcagccatgttgatgagactttgtgggtatgcttctctgacatttataggagacacaatctcactgcaaactctctgttcttttataatcattatgactacttttccacaatcctgagccttagtgcaggaattatgttatagatatatcatttgggactaagctctataactctgtgttctgattggttctgtttttctgtaatggtctcttgtctgttgcaaagagaagttttctctctctttaaagattcatttatttattttatgtatgagtgttctatctgcatgtacgtttgcatgccagaagagggcatcagatcacattatagatggttgtgagccaccttgtggtcgctgggaattgaactcaggatctctggaagagcagacaatgctctttaaccaccaaggtatctctccagccctgagacattttcttgacaaggggtgagaactgcacttacctgtgagaatttagttagggaatatatgagtttaataaaaactggcagttacaggttttcctctgagatccatgacttcattagttctgggtagttggctaggtttccagtacctggcataattcccctcctgttgagtggg

SEQ ID NO: 32542 - DNA, 1208 bp, Mus musculus
taagaaaaaatttcctctgtatgaagataagatatatcaataaatatgtagataaatatattgatgacctagattcatgtattgttatatttaattcttctgttcttttcctaacagcaaaattatattatggactatcagttaagattggaaatagttaaaacaacacaaagccaaaatttataaaataatccaaacttattacagaccactcttttgccataatttgaagaaacataattaggttagtgctaaatttaaataatatatgtatttttgatcaattattagataatcagataccagttttgtaatgaaaaataagttgtcaaaagtagttacctgcttccttctataggagaactaggaactgtcaaattaggaacaggactagtactgaagtattttctttcttttatgaggagggaaatgacttgtatatgagctctcatgatcattttgtgaaaacctcaccttattttatatcatttaggtttgaggattgcgtcaccttgtctcctgtacaagcagtttctctgttcggtgatcaatgtcactcacaggaacttaagtaactaacgaaatgagcctggggcgtggaaaatatgatttttatattggtctgggattggctatgacctccagcattttcattggagggagtttcattttgaaaaaaaaaggccttctgcgacttgccaggaaaggctcaatgagagcaggtaagttatgtcctttaggtatcaaaaagtacatatatactcatacattcaggttctttgagtatagacacactgtcttcattctttgtgattatatttgaatatttgcattgctcaagagatttctaaatatttaatagataatcagataccagttttgtaatgaaaaaaataagttgtcaaaagtagttaactgcttccttttatagttactgtcaaaataggaatgggaccagtgccaaaggagtttccaaggtttaagtttcattatatctgtgcaggaggaaatttgatccatgaatagaaccaggcttttattaaagactgggatattttatacgtgatagaacttgtgacttctgctttagatgtttttcttgatgatgtgaaattgaacaaaggaaagaacggtcttgcctgatttgcgttttccagtaattgacctgaatggtgtgtgttgtttcctccaaatttacagatgtgtta

SEQ ID NO: 32543 - DNA, 1104 bp, Mus musculus
tacagggtgtatctttttatgttgtgtatatatatctgtgtgtctgtatcttattctgtatgaataagactagggatatgaacttaaaaatcatacagtgtttttgaatacggttctgaataaggaacggagaaaaagacttcatactgcagctctagctttggactgtgttactaacaaatcagaggtgacaagacatggtatatattttaatagcatagtcaaatcaagtaaattgagcttcatattaaaggatgttacttgtcagaagttaatattgaaggatttatgttcttctgtagctgagagcagatgtccttacagccataggtttaatggtgtaactgtgcccatcttctctctagggaagaaggtgattgatgtggctgcaggctccacgcactgccttgctctgacagaagacagtgaggtgcacagctgggggagcaatgatcagtgccagcactttgacactttgcgtgtgaccaagccagaaccgactgcactcccaggactggacagcaaacacatagttggaatcgcttgtgggcctgcccaggtactgactacatagtgagctttggtgtcatgtacagttttattttattttctaaatgcttactcctagtatgtagaaatacccgggtttgtgtgtcatccttctatcttgcagtcgttccacaacaaattactacatttagttctttcagccttttcttctgtacattgtagagacagcatattcttcttctctcttcctcctaccctctatctttagctctttagtgttggttgtcagttgcttcttttttttgggacatactctaaatggatgctgaaatttgttcaaaaaatttttttttctgacattatgtaagttaagtagttttcatattggaacgttccagttatcaaatattgactaatctctgcattactgctataactattggtcatggtgttttatccttctaatgtttataagttttacttgataatatattgttatttgtgtgtgtgtgtgtgtgtgcactcctcagggttactggcatccagctttctttgtgctcttgcttgatttctatgaggctaaagccgggcgtg

SEQ ID NO: 32544 - DNA, 1163 bp, Mus musculus
gcagggactgaagctactcctccaagctgtgtttgggcatcttattctaatcaggggcaatttatactcattttagtattccttcctgtgttctctgctcaaaggatctccatatgccatccttcagcaggcgccgaaagcagacttgcaaaggcagtgtagtgatgtggtacattttgacttttagaacagatgacatttatatttgaagtactgctctggagggaaaaaaatgagttttgctttcaaacgtttttatagaactctacctttttgagcacgatctgctctcattttgtgtcattgatgttctggtagggctttattagatctttggcatctgatcagtttggaatgagagtgtccttgctgcctgcagatccatctcatacatttggtgggtaacttctgtatgatctatgcttctggtaattatttcatgtaaagttctttcctttgctttttaacagaaatccttcattttttactttctcttcccttacttagaaacattgcttctcagactgtagccagactgaaagatgttgctcgccgcatttcctcatgtctggactttgagcagcagagttgtgaaagatcggcttcactggatctgttgctgcgctttcaacgcctgctcattagtaaactttacccaggagagaagattggtccaatctcagatacttccagtaagttattttaagacatgaagatgtcttatacatttggagcttttaaattttgtttttgttttgtttggtatgctctgactgtgtatccagatgtggttcttaaattatactaaatgtacaaattctgaaagctacgtttttagtctacttttttgagcatatatatatatatatatatatgctaatcactttaaaaatatgaatttataaaaattcatttttacatatgtgactcctttccctgcatgtatatatatggagcacatgtatgtttggtactcacagaggtcagaagagggcttcaggtttcctggcactggagttatggttgtaagctgccatgtgggtgctctttccagtggtggagcatcattattttacttaattgtctaagcatttcagttttcaaggttatcaggcatgtaaccaaattcattatccctctagttctatgatacaaaaaagagc

SEQ ID NO: 32545 - DNA, 1165 bp, Mus musculus
ttgtaattcttttttacctcattatctgatacattcagacagaggtttatttactttgttttgtctggttcttctagttgggaaaggctagctgaaaaatttaatttaccattagtggacatgtaaatactttacagatttgacatttagctctgcattcatataagcatttttatttttattttataatttggggtttatagagattgatccaggggcattctgccaggcaagcactctcccacagaactgttccttaagatcctaaacacagttctaataagagtgttttctacccagacattaatcccagcacttgggaggcagagacaggcaggcttttttaaaagccacttttgatattaaccagctcttttaatttaaagggacttaaaaaatagtatagctagaagctccttgctatgtaattctcttagtttctcaaacatggaggctctgactagtcgcacaagtgtgactctgtttgattacatgccatagggcagtctgcagtgttttgtggccgttctggaaagcagctgaaacgatgtcacagcagtcagcctggaatgctcctggacagctggtcccgaatggtgaaaagcctgaacgtttcatcctctgtaaaccaggcttctcgtctcattgatggcagtgagccctgctggcagtcatctgggtcacaaggaaaggtaatgtttggtgggatgtgtcaggaaatactctgatttggaaggtggatcgtagacctttgcagtgaactgaggaacctgcagctttcctaatactctctcaaaattcactttatatttcagttcataaataattttcaagttacagagtagtatgttgtgtattgctagattttaaacagaatgaacaacaaattttattaaatggccaattgataaaaggttcactgttttttgttatatttttatatatgaagtattagttcttattatacttctggctagaaatttttctaacttacagataagttttagggattacactaaaactgtgtgtgctgacagggcagatatgagacaggatggagaaggtgggggcattatcttattctaactatagtatttctgtgacttagtataaaatgactgtctctagccagaagtctataaatatattatatatggggcttaga

SEQ ID NO: 32546 - DNA, 1121 bp, Mus musculus
aaacctttgacagccttcccctgcatgaatgttgcaggtggccggcatgctacagccttaaccgtggatgggaaggtgttttcatggggtgaaggtgatgatgggaaacttggacacttcagcagaatgtaagatttctttcttcaatctcacccattaacagggaactattaagtagtaataatagtgtattttcagttattttgcagaaaattaatgttataatttatttattaaaataaatattaaattttttaaaacctggattagatatgttgtgattttacatactcttttaaggtttgatagttagagtgatgtatacatatattttttgttgaccaaagatgggccacctctgtgaaaagacgtttgatgaggagtgtttactcttaccttaggaactgtgacaagccaaggctcatagaggctctgaaaaccaagcgtatcagggacatagcctgcgggagttctcatagtgcagccctgacatccagtggggaactgtacacttggggccttggagagtatggccgattgggacatggggataatacaacacagctgaagcccaaaatggtgagtatacacatttttattgcttttaaataatatatagcaaagataagccttaagtctaggtttttaaagacttgaacgttattgactttgttttctcagttcccatgcttcattctgttttaaatttgtcattgagtaggtaaaagtccttcttggtcaccgagtaatccaggttgcgtgtggaagcagagatgcacagacactggctctgaccgatgaaggtaagagctggttgtgatggtaggtttctggccgggtatgaatgttacgaactatttacccgaggtatttattttttaaacctaggtttggtgttttcttggggtgatggtgattttggaaaattgggccgaggaggaagtgaaggctgtaatattccccagaacattgagagactaaatggccagggggtgtgccagattgagtgtggagctcagttttccttggcactcaccaagtcaggagtggtgtggacgtggtacgtgaacttcctcagtgttattgccaaatgtggagtgtgtggcaagccttgtgcacag

SEQ ID NO: 32547 - DNA, 1193 bp, Mus musculus
tctacattttcttaatacttttatttctagccaaatatatgggttctgtaaagataatgtgaacacagtaaaataaatgcagggttttacttattctcaccacagtctcttacgaatattccctaccaacaggtcttggataaatacaaccctcctgatcacttcctcccagaatcctacacatgcttctttctgctcaagctgcccaggtattcctgtaagcaggtgcttgaggaaaagctgaagtatgccatccacttttgcaaatccatagacacagatgactatgctcgcatagctctcactggagagcccgctgccgatgacagcagtgaggactcagataatgaggacgccgactcttttgcttcagactctacacaagactacttgacaggacactaagatggaaacgccatcaggaaaagatgtggctgaacaagcaggaagagtcctgctgtgtaaattgtaaatgtcgagtgcacttgatgaagaataccactccttaaaatgtgtggaagagagagagagagactgactgactcagagaactgtgtggtaggacaacagcaagatgagcctgtgcatgaagaactcacggggcacttccccacaatgctgcattaccgataggacctagtgtttactacagtgtaaatgtttatatggacacagaacagcatcactaaataaagcctttctacttgtgggtgcaatagattccttctttttcctttgcagtgtcatcttgattgtatattgaaaatactgtgtaatgatgaaatcatattataaatatttcaactaattttactctgaatttgtttattaaaagctttttgaacattaaattattatttcttcaatgcatttagaagttagaacagaaaacaaaaatgccagtcaggcctcttctccccaggtgtaccattttagcatatgcattatgtgattggaattgaggcattttagtggacaatatcataatttctatcatggaaagtgtatttaatgtctgtgtcatgtatatgccaaaattttaatcccctataaataaaacatgtgtcacaaaactgtaggctgaatttcttaaccaattagactagcacatgtggatctgctacaaccaaaccatactctgtgacaaagcactgaggcatttattaagatagctgctctcaggacccgagggg

SEQ ID NO: 32548 - DNA, 1151 bp, Mus musculus
acccaccacacacatgcacatacaccccaacccaactgcacatactcatatacacacactcacaagaaaggaggaggatttgtggtggggggatggttctataagtaagaaattggctgtgcaagcagaaggctgcattcttaccctagcactcatgtaaaagccagaactgcttctatacacctgtaactccagagctggtgagggcagaagtgagaagggaggggcactggagacaggaaggtccctctgtccattgatccttggctcagtcgacagctagcctagctacttgatgagctctgagttccagaagaggctgtttcagaagctaaagttgagagaagtaaaggaagtcattttgtgtcaacctctgatcttcacacatacgtgtgtgtttgtgtatagaggtaacatcctccctccctttcccctttttcctctcagggttcttgttttagaaagagaacgctcatctgcatatctatctatctatctatctatctatctgtctgtctgtctgtctgtctatctatctatctatctatctatctatctatctatctatctatctactatctatctgtctatctcatcttcctacctgttatatatccagcatctatctttctacctgttatctatctatccagaatatatctatcttcatatctgtgtctactttgtagcatttatctgcctatctctgtttatctatccagcatctatctgtgcaactatcttttccctatggtttgtcttacttaccattatattatattgcatgagtttattttatgattgataactcatgcccacacttgagaactcatcttataaaatgaaagtttaattgcatggataattttcaccacatcctaaggaagttaacccatagaggccattggaggtttaacttgcaagaacacttctgctgtggaaaaagttagctgttggaacatttaggtcacagagtgttttgtgagaacttggacaaatcctttctttatggcttttttttttattattacttttcttttttctctgaacaaatacctgagaagaagcaacttaggaagagaagggttcatgcctgtttagacctagccatttgtgatggagagatcttggaggcagggctatgagccaca

SEQ ID NO: 32549 - DNA, 1103 bp, Mus musculus
ttaaagtgaattgtaaaatgggctttgttaaagagagagagagagagagagagagagagagagagagagagagagagagagagagatcctataaattctagagtgctttatcatagaatactgttctttcccttcagcttgctaagatgaaaactgcaaaggcgcaggctttggacaagttttgacagtatagagtatgtgatttgcaatgacagcggttctttaatgtttcataatcaaggacgattacagaaacctaaaccttggtatatgttccaccactccaagaggaccaagagctcaaggcccatatgtgccacacagaaaggacctcttttcaaataaaacaagacagataaggtgattaaagatctagagagatctcattattcctgaatgttagttccaattatctggtgatggtatgggatgggagtgaggttgaaaatgtgccacatgccagcattttaacaaatgtcttaaagaatatatgattataccttaatgacattcggaggtaaatgaactttggaaaaggtaactggttcctgatgttctgacttctaatgagctgttaggaaaagtgtaggatattatttcccttcatccctggggcagagttccagggagctccttttcaggggtttgtgttgcatgtgggctccagtttctcacatttctgacagttctgtaatatttatgagctgagcagttcacgaaaccactttcttgaaaaaaaattcgcttttgtctaacacactttaaaattgtttcttgagcttaatagaaccattagtctttaaatgagcctgtcctcttcataaaggtggcttatctgcatctaatgcaaaaatacttttaaaaaaatttgtcaaaaaaggaactgaaattataattatgctatttctttgattttctctcctctatacaaactctttcatgcacctttatttgctctgtctcaaatttgtggattctatttctttagttgttggtatacacacacacacacacacatatgttcttatggcagactatttggtattggacagccaggtgggaaagaggtctttcctggtcaacccaatttttcccacccccag

SEQ ID NO: 32550 - DNA, 1276 bp, Mus musculus
ttctcaccaattcaataaacctttagttttctcaatagtactgtctttccaaaacgaaatgcttcgcagagggcccatggtgttgacgccttgatgacagccctttattagtcatttccagatatgtctgtgacaattcagtagcccttctctatcagtcccagcagaaaaaagactcaccagagtggaattatctttaattgaatgaaagtcactcctgctcaccaatcccgggacagttgagtggttgtgttgccaatgccgtgacaccctcactgcccctgaatctcaaatgaactaaagagtatatcataataatgttcccactaggctttaagtgacatgtccatctgcagtattgtgtgttttgatgccaacacggggacatcttcagttgttcccatcaaaagcagttctcttgttttgaaacacggagttgacaatttcaccaatgagatcatctcagaggggtcaggcacattgtagctgtaggtgtttgaaccacggaaacacattctgaaaagatgtgtccattgttgaatctccttgcttaaaagcataagcctactataattcatattttaaccctccacctaaaaataaaaagagttcatatttctggccattttctgtaagccaactgaaccaatggtaaaatattttgttacttttggaatgaactctgacttcatgtcagtgtgaactttccatcacagtaacattgactctttgggcaaagaactgccctggtggagtaaatttcccaggacactggtgagtgtaccttggactgattacctcttctactgcattgaaaggtgccatgttttcctgaatgactaaatccccctcaccttgtaagtgacctcccagagtggctcatgcaccatagctctcctagggacggcccacaaacatgtcattcgtgactcatttttctacttcccaagtcagtagatgtgttcaaggtaagtacaggattgttctcgtaggaataggcggttgctgtcctgattggtattcccgtcgatttcatttcattgtaaagattaaacttaaacccggttttgcttaagcacattgatgtaattttttggtattatttgacatgaaaaaaaaaacagcaaaattgagtgacagatacaatatgaaacttgttgaatgaattcaaatttattaaaaaaggactaactgataaatgtgaagactgattttttttctcttcctttccatctgttaatgaatacttttttaatccaaccttgtttaagtacac

SEQ ID NO: 32551 - DNA, 1176 bp, Mus musculus
cctgagttcacaatcctcctgcctcaaccttttaagtactgggatcacatacatgctaccctatcccacaatgcagttaaatatttatgtaccaaaataacccattttaaagcagcaaaaccagatgctatggtgcgttcattttggggggatgttgtctcattattaaattatattcaacaactttttaattacaaggagctgcttaaaattggatacaataatacaaaggatattaagtacaagatattaagttctctaggcattgcttttggctgcatcctgtcagatttgctgtgctgcattttgcattcatttcaaagtatccaaatttattttggtggcttctctttgattcattggttatttaacaatgcccatatatttatgcttccctcaaagttgctattgctgttaccatcgtttataaatgtattccaataaattccacatggtgtggaatttgcctcttatacttattgaggctgctttactgttcaccatgccttgggagctgcattgtgttgcatttgcacatgagaaaaatgtgagtttactgctgttgggcagagtagtctatagccgtatcaggccgactggcttatgattttgttcattctgtttaagttcttgccacatgatgatgatgatggtagtggtggtgactaatttttgttgttagtggaggcatgaaaacttcagttattgttgaatccctatgctgttgattttgccatttgtttctggtgttttggagtttatttgatgcatctggtgtgtaattacggtgacctctctatagagtgcccctttatcattacagagtttcttttgtctctactctctgtgttcgctttcaaatagccggtctagataactttctcgatgccatatacatttttttatttgtttttgaacgtcatctgtcttttatactgaacatgtttgatgttttaaaacaagccgttcttgctctttatcagagtttgacccgtttacactaactgtctgtaccaagaatgtggaatttaagtgcattcattatgtcatacatttctgttcctttgtttctcctttcttgctttattttgctaaacatatgtttcctagaataccattctaaccacttggttttgttttgttttgttttgtttttctatcttttgaggcataact

SEQ ID NO: 32552 - DNA, 1987 bp, Mus musculus
caccttcctgctgcacctgggtattgaaaccaaaacctgggtgagagccaggggcaaggccacacaccacaaggggctggtattatgagacatgtccttcccagcaggtgttttgcacatatagaaggctacaatgctgccctacctatgtcataaaaaggaaaataacacacactcaaagttgctggcctagctttgagtgacccaccaccaactgtcctgagcagctgtttatctacctgccttcttgtctccttcgctgctctgcttttgcctagccctctcctcttgccctcatgctcctgtcccaggctgctccactaaggcccactggccagcaatggcaagaatcttcgctaagacctggaaggcacacccttaaccgtccctgataaactcatgttgctcacactgttgctactcttaatgtgaagtaaatgccctttctctctggttccttttagacctggctcaactggttagcctgtggcttcagtacctttttgtttttctccgtggctctgatttacaacacttcctgtgccacatgctaccctccatctaacccttactggaccatgcagacattactgggtgaccctctgttctacttgacttgtctcatcgcacctattgctgcattgttgcccaggtgagtagctgagttggtaaagccaagtgataaggaagtgtagaatatacacagcccctggccttgctgtgcttgaacctcggtgagtctcatgaagctcagccatggcccggtttagaatctgattggttttttgtgtgtgtgtcttctttctagattgtttttcaaagccctccaggggagtcttttccccacccaactccagctaggacgccagttggccaagaaacccctcaacaaattcagtgatcccaaagagacttttgctcagggacagccacctggacactcagaaaccgagctttcagaaaggaagaccatgggaccttttgagactctccctagagactgtgcctctcaagcttcccagttcacacagcagctgacctgttccccagaagccagcggggaacccagtgcagtggatacaaacatgccattaagagagaacaccttgctggaaggacttggctctcaggcctcagggtcctccatgcccagaggggctatttcagaagtatgtcctggggattctaagagacaatccaccagtgctagtcagactgcccgtttgtcgtcactcttccatctgcccagctttggctccctaaattggatctcctcgctgtcactggccagtgggctgggaagtgtcttgcaattgtctggaagtagtttacagatggataagcaggatggtgagtttctatccaacccaccacagccagagcaggacctgcacagcttccagggacaagtcacgggctacttatagtatcacctccgaagggccacagccaaatgtggtgacaaagaaatccttgaaatggcctttttattattatgtaacaaatgttaattttatttatgtttattatttgcacagaagagttctagaaagatgtattttttaaatgtttccaagacatatataggaagccagaggtaccaaaaagaaagtttattttttaaaagttctaagtagagtatacttaagaaaaataagaacacatatctttatctatctatatataaagtttaaagaagagtgacacttgaaaagtgtgtctagatttattttttcatctcatttttgtaaggaaaagcaatgtgcattgtttcttcaacacacatgaccctcactttctgccagcagacataaacatacagttagtccggtgaagcctggggtagctgtggcgggtgtggacacaggacagggaggaaagaagacagacggaagggcatgtgacctttgaggcaaatacctccattgtcttccaatgttactaacagtgaacagaaagtgaaaccttgaggaaaacccatgtgacg

SEQ ID NO: 32553 - DNA, 1212 bp, Mus musculus
ctaattaggtttgtttgttattattgataatattactgttaatggatttatattatatttatatgcagctattaaaaacatcagtgttctgatttttgcaactggagatgagttttaagaggtggtcttttaagtactttcaaatacggaaaaacaatataaaaatataaaaatagtcctctaagtcttttgatgttctcttcagaaaggcttaggataatagagttttggttttgacagttactttttcttactgataaaaataaagacaatgttatgttaggcatgatgtctcacatctgtaaaccaacaattgagaggctaaggaaggattgtggcaagcctagactaagaggcgagaccttgtctcaaaaaagttatcaatcagagatgtcatagaatgtgtaattgaaaacttttttctttaattaattaattaattaatatttttgggaggcagggtttctttgtgtagccatggctgtcctggagctagctgtattgaccaggctggcctcagactatgtttccagaatccttaagtctgtttggcctatttataaaataccaaagactggtcaacaccccccttccccccaactccaaaaaatgtatctcacagtcaaggacactgagaaatcttaagatcagaactaattttcattgtaaatttgagtagtgttaggaggactaaggactgaacctagggcctctcaagttctaggaactgctctaccacttcctagtcctctgtacacactccagctcagaccttgaaatgggagtcctgccgccttccataggagctgtgattgcaggccagtatcactatgtctctgtatctctgtctctgtttattagggtttttgtttgtttgtttttgtttgttctttttttgattttattatatgagagtccacattggtgtggtgtctgtaggggtgagaagagagtgttggaactgctgtgactgggatatagacagttgttaattgccatgtgggctctagaaattgaacccaggtcctctggaagagcaacaagtgcttttaatttaacttttgaatcatctctccagccttccctatatttccctccccttcctttcttttttcttttgtctttttcccctccccgcttccctttcttgtgtcagtgtctctcactagcctctgaagctaggtaaatagtcgaagctggcctctaactcaa

SEQ ID NO: 32554 - DNA, 1136 bp, Mus musculus
cagttaatcactctgaggctgcttattgttattcttctattttgatcttgtagagctaaagtcagtggaatgtaagggtacagttgattgttgtattttgtgagccatatagtactacattgaaaagtagggattattatctttatcagaaatgcctgggaccagactatgtttcaaatttaagaatttttcagattttggcatgttcctatagactttactgtttgaacatacctagtctgaaaattcaaaatcggaaatattcctaaatccagcccttttttatttgctgccatgatgatttaaaacattctggattttggagtagttttggattgagaatatacctcattttctcaaatgaagagaccatttaagaaaacaatatactgaagaatagttcataaaggttttcctgtgataattattcttctaattttatattgactactgatttaaagctttgaagataatgacttgaacaatgaattgggtttatgctagtgttctaactaaaggtttgtttaatttattagaattattaagcctacgttcagatcaagttagcagctagactggtgtgacaacctgtttttaatcagtgactcaaagctgttatcaccctgatgtcaccgaatggccacagcttgtaaaaggtaattttgaatgttattttacagtcttagaaaggctgtcattgtaagatgaattatgtgctataaaaatgacaaaaatgcataggtagcaggaatattgctaagaataaaagacctaagaacggagccatttcttcatttaacctcctttctcagatatttattatagtgcatttcttacttacccttcagttcatgaagataagtaatcatcaaagacctgtttttctgcatagattaataagaaaatatgtcttaagtattttgaagattacagtgtggacattttaagagatatgtggaaaatatcttaagtattatttttaatattttatgtggcaggagtttcagtgcttctccagaaatgttgcacctttagtaaaatgagtgtactttttctcctagagagttacagtggagttaaaagtgcacctttacctccttaaaaggatggatttactaggtcatgttccagtgttc

SEQ ID NO: 32555 - DNA, 1188 bp, Mus musculus
tattacaacataaatgttctttttctttccattttctagatgtgatttacctaactgaagagaaagtatatgaaatttatgaattttgtagagagagtgaggattattcccctttaattcgtgtaattggaagaatattttctagtgctgaggcactggttctgagctttcggaaagtcaaacagcacacaaaggaggaattgaaatctcttcaagaaaaggatgaagacaaggatgaagatgaaaaggaaaaagctgcatgttctgctgctgctatggaagaagactcagaagcatcttcttcaaggatgggtgatagttcacagggagacaacaatgtacaaaaattaggtcctgatgatgtgactgtggatattgatgctattagaagggtctacagcagtttgctcgctaatgaaaaattagaaactgccttcctgaatgcacttgtatatctgtcacctaacgtggaatgtgatttgacatatcataatgtgtatactcgagatcctaattatctcaatttgttcattattgtaatggagaatagtaatctccacagtcctgaatatctggaaatggcgttgccattattttgcaaagctatgtgtaagctaccccttgaagctcaaggaaaactgattaggctgtggtctaaatacagtgctgaccagattcggagaatgatggaaacatttcagcaacttattacctacaaagtcataagcaatgaatttaatagccgaaatctagtgaatgatgatgatgccattgttgctgcttcaaagtgtttgaaaatggtttactatgcaaatgtagtgggaggggatgtggacacaaatcataatgaggaagatgatgaagaacccatacctgagtccagcgaattaacacttcaggagcttctgggagatgaaagaagaaataagaaaggtcctcgagtggatccactagaaaccgaacttggcgttaaaactctagactgtcgaaaaccacttatctcctttgaagaattcattaatgaaccactgaatgatgttctagaaatggacaaagattatacctttttcaaagttgaaacagagaacaaattctcttttatgacatgtccctttatattgaatgctgtcacaaagaatctgggattatattatgacaatagaattcgcatgtacagtgaaagaagaa

SEQ ID NO: 32556 - DNA, 1135 bp, Mus musculus
gacttatgtttattcttcaagagttgctaatgcttttttaagcactgaaccaactctctgaaatctaatttttaaacatagtaacaaaaaaaatactgctgaaggttttcttggggtggagggtgggtattaaaactagtccaaaagctaattgtgtttcatttgtatagaatatgctttcttgttaatattcctacaggaatttgtcaatctctattcagactacattctcaataaatctgtagaaaaacaattcaaggcatttcgcagaggttttcatatggtgactaatgaatcgcccttaaaatacttattcagaccagaagaaattgaattgcttatatgtggaagccgggtaagaaagacatatacaaaaaaggtcttttttttgtttgtttgtttttgtttgtttttttttttgttttgggtgttttgttttgttttttgttttggtgtactatggatgttaaggtgcttttttttccccctataattttcagaatctagatttccaggcactagaagaaactacagagtatgacggtggctatacgagggaatctgttgtgattaggtaaggtgtttaattcttaaaaaggaagattttattcatcaaacatgtagatgtgtgcttttgtgtcctgtatctgtaggtactggttaccaaacaagtaagctcaaaaatagacctgtattaatatttccaattttcatgcagtctaatgctttatttcatgaattaaatgatttaagtctcatattttctcaaccctttgccttatttttggtcatgtgtaagatggcacattatttagtctttaagatacttgggaagaaccatgtatactagtgattctgaacaattcttaggacagtattaccactaacatcgttctctagtcaaatgcccttatttctacttctgtaatatgctactatccaattctgaaagatctttccccccatcttctaatgtgactgatcaaaatgcagagtagtctttttggcatccactatgatgtcataggtatttaaacagttatctttttgtagatcacttgagctataagactcaaatatgttaacaatagaatgaatattaactgtgtctagtaatgatacattatcattgtta

SEQ ID NO: 32557 - DNA, 4283 bp, Mus musculus
atagacagaggccctttttttttcccctcttctactttcaaataagaaaattgactttggtaacagttgtaagaatatttgagtgcatgtatgtactgcatttcactatgtaaaggctgctaatccaggaatatttcactgaaaatgtacttgcaataatactagtagtctccatttgccacagtaaagaagtcttgtttttaacccttgagagccttgcagagttgggctacagcttcctgaaaggctcacttttccatcccaactcatagacaccttgtatggatactctcctgattgtacttagaagtactcctctgaacttcctgttcaacccaaagttttttctcttgcctcatattttgtgggtctcatatctcatatcatatcagacccgtgtttccaggacatcatcctggtacctctaagtcattatatagtacaaaacagtaccgataaaaacaaaattcttactcttgtatctcctagttatttcttgttacttcctttagaactgtcaattttttggcctggggagatggcttagtgggtaaaggtgctcactatataaaacttgacctgaagactctgcctagactccacataaacatggaaggaaagagcaactccacaaagttgtttcctggcctttccatgtttaccatagcttttgctgtttcctaccctctcacagtttatgtgcatatatatgcatgttgtcagttattgtctctcagacctatttaattgtactttatttcaggccccaatcctttgatttactcaggttatcttcctgactctgaactacttctaattcttttcattctcaaaaagcatttttttttctgatttgtatgagtacttcccctttgaatagtttgtacaggtggatttctgcataatttactagtgcatcctgttcagcatccctttcatcactactcaaaattcctttttagattaactttatacaactcacatattctttcagttggaattttgaaagtatcatactcataaagacttctattagttacagtgtgccttcatagtgtaatagcagcctacatatccctggtcacagcctggtggatcatatttatttgaacagttgaggaggccttcagaagtgcgttcccttccttctttcctgtgttttagctttgatattgtcccactattattattattttttttaaagcatcttctcttttgtatggaatctgagtaaattcacagtggaaactaccttgtactgatctttctgtctcttaggcagtaggcagataagcattaatcaagaaatatacacatacatttattgaatagagtttctggaatcactgtattatatctgccccagggtaaaaaagacagtaagttggaaaagactagatggttgaaagcaagacagttttgtaactctacatcctgtcttctggtgtactcttgaccaccgtctttatgccactcatactcttccagcagtcatggcaactgataccttaattcgttctgttattactgactagtctctcaaattttcatagaggaatcctccagatgctgttctctgtaaatatatgtgagtcatatttaacattttcttatactttgctgctcaaattcctgtaaattctgacaagaattttcaatgactgctaaagatctgtgcacatggtccttcattttcacaaagccaataaatatctgtaacttgagaggttatacaccttactaaaagtcatacaggcaggaaaagggatgacaaatggtaaggttgcgtccacatgaccacctaaaatttgtcatcttcctttttgcaaaaacaaacatgactaaattaaacaacaaattaagattattatgctgacatgcatggaaccttggatcattattatgatttttcattacccagaaacacatagaaaatgataaggaatgtatctggaatatagtacacactggttggggttgtagccttcagtcaaatgactctgaattttagtttggcactgccattcccttgacttggattatacccactcctaccttatctctggttgtgtggtttcagtgaaattaccatgcagctggtagataacatcttggaagacatcctgagaacagttctcccaacgttgcttgttaacttaaaaaaagagagagagagattagaaatgtctgtaatgaagacttattttctaaaacctgaccttatatcgtccacctttaaatggaagagatgtgttttctcacatcttttagatataattcacatagtataaaaattcgccattttaaaaagtgtaaaatttgtggttatagtatattcacagagttgtgaaattgtctttataaaattccagagcatttcatcgctgtaaaaagttttctgtacccattaagagtgactgcctgttcttaactccaacccctggcaactactcgtcttcgtatgcctatgaatttgcctattttggtcatttcatgttaatggagtcatacaattatgtggcctttttgtctgtttcgccaccttccacaaagcaatgagttcaaactgcatcaatgttgtagcatgtactggtactgtttcttttgtggctgaatattgtcattgtattgatatgctgtatttttttgcttgtccacttggttgtgcatacatgtgttctttctgctttttgcatattatgaatacaactatgaacactttgtgtacatgttttcatttctcctactgtcttttaagtatcttatggttttggttcttaaatttaggtctttgattcatttttgcatgtggtacattttagggatccagtttcattctctaatatgtggatatctagtagaacaatacctaattgttacaaagactattagtaatttccttatgagtaggcttgctatctttgtcaaaaacacgtacaaatgaccataaatatggctaattttggattcttgaactttgtcccattgtcctatgtgtgtctcttcctatgccagtaccatactgtcttaattactgtagccctagagtaagttttgaatttaggatgtgttagttctctagctttgttctacatcaagataattttacctgttctgggtcccttgcattccacatggattttagaatctatttgttaatttctacataaaaagcacctgtgattttgattgttcttgtgttgaatcgatacatcagattgacgtatgttggtattttaacagtattaaattttataatccataaatatggagtgtctttccatttatttaggtgtgtaatttctttcaatgctattttatagatttcagtgtatacatcttggcttttttgagttaaatgtttttcacttgatccttttacaaacaactttttttttaatatttgtttggattactcattgctacatctagaaagaattcatttttatgtattaaccttatatactgtagctattctgagctgattctgtttttaattttttatacaagattgtgcatctctgaatataaatacttttgtttcctctccaatctggattctttttatttgatttccctgcctaagtgccctggctagcacgtccaatatgatattaaattgaagtggcaagagtgtacatctttttcttgtttctgattgtagtggaaaagcattaggtctttcaccattaaatatgatgttagctgtgggattttcatagatgttgcaagttgagaaatattccatctattcctaccttactgagtctttttttaaatcaagaaaagggttttgaattttgtcaaatgcttcttctgtatctaataaggttgtcatgtagttttgtcctttattctattgatatgttgtattacattgatggaattttgtattgaaagaaccttgcattcctggaattaccccacttgtctatgctacataaaccattttctatgctgctggatttggtttgctagtattttgtttagcatatttgcacctgtattcataaaagatactggcctgtagttttcttgttatctttgtctggttgttatcagggtattactgatactggtctccaaatatgcctggagctttccaactgttcttaaatccagtgaggtgtgtttgaaataatatactttgaaagttattctgtggtctttagattctggatgacatgggagaggtaattgactcttgaaaggattccaaggtaagacatgtctaaagtgccatttgacagtagaataaaatgcagttaacaccagtcttgagt

SEQ ID NO: 32558 - DNA, 1202 bp, Mus musculus
caatgaaaattgaaataactaaacaaaacagaaaactgacagcccaaatcagaacactaaagagtaatattacaaattacctctctaagtaaaatcattttgaataaatgagataataatctcatgtcattcaaaatatattatatttttataataaaaatgcataaatgatgctctttgataatgaaataatagttgtgctttttttcctgtgttctctctcaggtggttaccgaattgaatagccgttggttctacagccactataatgatctgaaaagttgaatgtgttgcatgaacactttcaggaatcataatagaactcagctaattagatagagactggaatgttgatttgaagacaattactttataaagattttctcattgctgcttttgcattatcccaagaagtggagacactactacatggataagaactgtatgattgaattgactttggaatcatctcagtattgtcataagtatgaagtgtatttcatggtacttttgaagttagttatagaattttttcaattgatttttctatttttcaaagggtttaggtaatatgtagcatagtctgacttgagtggtaacattttagaaatataccaggtactgttagggcaatattgtgtgaagatttacttttatagtgcatgccaaattttgggttttctggtacattttattggattttatttattaatatttgttataagagcagctgattatgggttaagatgatagtattacagttatgtgtcaaaattctattactttgaactacattggcttggtatatcaagtctacatttgattaaatgtagacttagcaggattaatgaatttggccattaaaactacaggaattttagtcaacattcctctcatatttgtgtatttatgtatgtatgtatgtatgtacaggaattttagtcaacattcctctcatttgtatatgtatgtatgtatgtatttatttatttatttattatcaaatcatgctgttcatttctgctcattgtttgagtttccatgctaattatctattattcataagtacatttataaataagtctgtaagcaggtcatcatgtatgtcagataaaatactgtgttttctactctctgttttattactaagttgtatatgaattatgcattaaatacagaatgttctctcttatgtcatagtt

SEQ ID NO: 32559 - DNA, 1161 bp, Mus musculus
gatttccagtatatactcatatagatatagatatagctagatagatatgtatataagtagatagatagatagatacatacatacatacataattctttcaaatgtacagacggatactttaaatagtaacataatttaaataaaaacttggagtgttcaagaagataatttagctgttatgcacaccaactgtatttattaatgaccttaggtctgttcccatctatcagttgctgcctacaactacagctccggtgtacatcttgcctcagacacctgtcccatgtacaggtacatgcacttgaatgtaaagtaagatgctagggtcaaagctaaatttacaacatacagtacattttcagaggacttaagttaggatttcggcagctaatcacatctatcttttgtagtatctgaaacctctgctctatgagggctcaatggaaaatggatagaagcatttggtattaaatataaattgttttttttgttcaagaccaggctaattctcatttttttttccgtatacatcctactctatattgggtactttatttttcaggtgctcatgatgactagtccgaacctgtgaacttctgagaaaatttacagttctgaaaactagaggtaagaaaggatttgagtttttttcccccattaggtcaagaaaggtaatacaatttgaaacattcccatgcattctaattttctgagttaaattaatttctttgtgattggtgtggaaattgggcctcccatatactaaaccaagtgttgcataaagaaacaacaactgtagtttgaatcagtttatttttaaaaattgttgagaggtgtagtaggctatcatcaaataccctatgtggttgaggataaaggtaaacgtctgattgcatgccttccagtctcatacactgggactagagatatacttactcattcctgaactatgcagttgcaggaattgacgcatttgttctttccttaaaagtaccagctaacaatattttcagacctttcatcttaataaaataatgattccatacatggatgcacattatcctttagttaattgtcttaatatattccaatactccaatagttacttcacctatatcttagttaaaaaaaatgcattaacagggctggaaagaagatggc

SEQ ID NO: 32560 - DNA, 1223 bp, Mus musculus
aaggaattgtaagaatatgtattatttgttgcaattttagagttatctcctaatatttcatcatttgtgattctcaaatgtaatttgattttttttgttggacagtaagatagccaaataccagatctacgaaaagaacataaggattgcagcttaaggtgaatgtaatttaacagtgaaatattctctagaagaggggtgttgtattataaattaaaaaaagaaacaagttgccttcttgtagacatactttagttcatactaaaagagatagttaagaaattcctgattatgcatatgttgtgtcattaaggaaattaatacttttgtatcataatatgtattattttacagtaataattgaagatttgtgcaagtcaattaaactatacatgcttggaaattgccacatgggaccatcttgaatgaacagtttatgcaaacagaaaacatgttcaggaagaatgttaaaattttaacacttgtaaatagaaagaagatgacatttgcctgtctttgtaatttatgagggtatttgcaaataagcatcaaaacaagaagaaaatattaaaaagacattttgtgccaggacatcatggtagtgctggattgcctatccaactctgtataaaggtttttcaaacaatttgtgaagaatgttagtatcttcagagtcttctgcatcagcaaagagtagtgcattaactaatggaaaagagaagataaaatttctggtaagtattagtgacacatatgagtgaaatataatgttttagctaggatttaatgctgtgaagagacaccatgaatgtgagtatccttataaaggggaataattggtgctgtcttacagttttagaaaattagttcattttttgtcataatggggaacatggcattgtactggcagatatggtgttggaggagctgagaattctgcatcttgatcagtaggcagcaaggagtgaccatgtgccctgctgggcattgctttagtataggatacctgaaaacctgcccctgcaaacaggccacatgtcctaataatgtcatttcctatgaactgaacatacaacacatgaatctatgtgacaagtcctgttaaatgtatcacacgtagaaactaaaaagtattcagcaataaatattggtaatgtcagtcatgcttatgaatatagcatgctgtatcttatgtttttgttatgtctcatttaggatgagtt

SEQ ID NO: 32561 - DNA, 1280 bp, Mus musculus
aggggtgatctatgtgacaacttcacatagttttactccaataagaagttaataaatattgtgagtgaattcaatgttaacacactatacccttaatatgctaatacatatctaaaagatacaaaatcatttaaattgaataagaaatttctggccaactttgttttcagatttattttatatacaaatacacagttatttatatcacagaaaaatttttatattttaaattggaattggacactgaaataaaagattagaactttggtggtcaacagaatatattatatggattcttaagtagtatgatacagcaacatttctctgttaagggttaattaggaaatgctaagcagaggaaaggtattcttttttaaattggaattgctggatcatactttgaaattgccaatttagtcaagcccatctgtcagtctaactttcagcttgtttttgcctgtatttattttaaatcagacctgacaggattgataactgaaaaataatagagtcctatctttgtagaaacaaaagtaccttcaactgccaaaaacacatggcattactctatatgtttaatgagtagaatgtttgaactgtgtgtagtgactttgtttaaagaacttgcttaatagagaccatgttaacacattatatttcttgtatttatggatagctgtatttaaaaacatttggccagttttcaggtttttaagttgttctgtatgaaaagacatctttatttttgctgttaaatgttactggacatttatgtaaggctcattgtggtggtgtgatagtaaaagctgaattacctgagcattttattaaaagctctctctctctctctctctccctctctccctctccctctccctccctctctctctctccatatatatatatatatatatatatatatatatatatatatatataaatagtttgtatattctttaatggcatcaaggtagttatttctgaggataattcaagtacaagaattatagggtcactgttttctgaaaagtatgtatgctatataaatgacattgaagtttcattttatttttctaatcactaaaatgtgtgatataatttatttttccaaattatcaaggtatatcagaattccatgctttgtagttatctgatacatggcaaaaatggaactttctaattcgtacgacttttataccaatcatctagtagttgcagaaatattgagactcataatttttaaatttataaatatattgcaattcctattgtcttttaca

SEQ ID NO: 32562 - DNA, 1853 bp, Mus musculus
gttagacataagggtgttaaatgaatcactttgaaggtgggtaaaaataccacagggtagatagtttgctttgttagaattggctattttttttatgctgaggtttaaacccaagggcattgtatatagtttctttcttagggtcaaactgacaagtcaggctgtgtggatctgtttggtttcattgttttgttttgtttgggtttttgtttctttgttttgccttttgacactgggtctcattatgtaactgagtcacactggcatccaattcataatattcctgccttgctgttgcaagtgcttattttataggctcgccacacacctattttttcattcactcactcattcattagtgtgtatctgtgtgcccccaccccctaccgcactccaaaggacatactttctgtttaccttacaactaactacatacttagccaggccagactatattatttttaagctgtttatctagctcggagttttatgtgaagcaatagctttgtaatgaacgtgttctcctaaatcttgaggtttttctctaacacaggcctctaaaactcatgtttctactatatcagtaccatgtaaccatataccactttccatttttacagtttttttttaaagtcccttctgaaggactttggctggacttatgatgagctatgtttactgagcatgatgaaatgatgctcaaaatgattactctgaagtctagccaaagtgtcagtttaagaacttaggtaacaacttaagttctgggaatatgaaacaagatttttttcaaggagactggagctgtagatttttccaatatagcaaaattggttttaaacctatttcattttatttttgtaaagtgcctttgtgtttctaacaccatagctttttcacctttctttctatataataaattctagaaataaagaacttggaagttagtgtatcgctcagttacccaaaatgtaccctgtgtgatagtttcctgagcatgttcctagccattttgaatgtattgttccttgatttttttttataagataggaattttatgttttttcccaaatgctgaggataatccagagaggttaatctatctttattatcataaagcattgatggagtagtcactctgtaattgccaatactgaatatgagaaatatttggtaaattttgtttaattttttgctagtgagatcacgtactattcctgttttcaaacacgtggttgggtggtgtcaggataatcatctgcataccagtttgattttgttcctctgaagtgtgagtttccctgagctttgtatgttagctactgctgtagtgattgcttgttgtgtggtatccttctgcctttgtaatacttacttctggatctttgcatatctacatgcatacacagcaatagatttattttcctatataattataaaacaattcttaatctgttggttatggcaaatttattgctgtgatatagctttgttttaaatatatgataactttattggcataatttagtaaaacatgtgaaatgatgattataatatcttacatggttcagcgataaactagaaagatacttttgtaggactttactttttggttaattagtaaaaatcagttagattttgacctatttgttaggttaaggtgttttaaatggaatgatcttataaaataactaatcacagggataatttctataatgtacttggtaaatgattttatagaatttatgggagacatgtcaatgtttgagtagttaagaatagtgttaaacaaggggctataatgtgtattaaatataaatagaaaaagtcatcattttaaagtacatttgaga

SEQ ID NO: 32563 - DNA, 1210 bp, Mus musculus
tacggcggcctaagaaggtatcacaattccctggaactagaggtgtagacagtgttttaagagagcttatgttttaggagaactgaactagggtcctgtgcaaaagcatagtagcatctcataaacagagccaattatcttcctgttttcagtttttaaaactatcaattaaggtaggcatggtggctcttgcctttaatttcaccaatcaggaggaaaaggcaagtcgacctatgtaagttccaggccagtcagcctaaattaggagtttcaggctagtcagtgctatgtagagactctgtgtcagaaaagaattagccaattaaaaatatacaactaaattagacacctgttgactactccaataataaccatgaaatccttgtaccaatggtcctatcctaacagggttcacagcagaataggaatgaattttcttcagcatcctgtatcgcaccttttgacactgaaagctagccagcatttaggaagcttctggcacaatccagttggatatgtctgctctctgcaaataaattatgtagttatcttaagcgatgggtgcttgttatcaggttttggttggaaatgtaaaacaattacatcagtgtatgttatactgaggaggagatagtctgcaccacactgtaccaactcaagggaggtaattcacacctgacagtgggtgctttgtttgatacgttatgggtttggaaaggaacatcttcaaacccatgtaactaaaaatgaatgttttatttcacatacacacacacgtatatatatatatatatatatatatatatgtacttggaaagtttgattgatcagatttctgcattgatagaaagttgtaagccatcatttggatgcaaggaccagaaataggtcttttaagactattgaaccatcacttcagaccatttattttattgatttcagttctctggaggtctttatatattctagacagtttgcttctgtcggatatgacaagcaaaggtattttgcaattctgagagctctctatgtattctacgatgtgtccttttctgtacagaagctatttagttttgtgagtttgcagtattgattgttggatttgttttctgcattaccagagttttattattctttgcagtttggtctatttccctgtgaatttcattttctttatagctgaaaaagaaattgccagcaattagcattg

SEQ ID NO: 32564 - DNA, 1210 bp, Mus musculus; identical to SEQ ID NO: 32563

SEQ ID NO: 32565 - DNA, 1100 bp, Mus musculus
tatagaatgcagagtctgagtgctgtaacaataggtacttctttttttgttgtttatttgtctttgttttttagttttcgaggcagggtttctctgtgtagcactggcactggccgtcctgaaactcagagatctacctgcctctgcctcccacctgcagggattaaaggtgtgggccaccactggctgactgtttatttcttatgagactacttgacatttgttttggcatttgggagcagatactgcagatatttattactgtttctgcagatattatactgtttctgtagataatatactgcagatattattgctgtttcatatcctttatactaaaggactttttttccccaaaattgtagacaataggcaacacagcagtaaaatattttaattaaatcacatatataatacatacacacatatatatatataatacacacacacacacacacacacacacacatatatatccttccaaagtgatctgaaaaatacagtgcaattaaaagacatgattaaaatgatttttttgagatagggtctcactatgtagctctgtctgttctggatcttactatatagaccaggctggacccaaaatcactgatagcctcctgcctctaggatacaagatgagtaccactatacctggctaagaatgctttcttaaaataggagaaaataagaaaatattgactcataaaagttgtttatagtgtgtaaactttcaacaactatcttgcaaatggggaaggatgtcttgggtttttctgttttgaggagtggtctattagatgggccttggactggaaattacagcacttttaccttaggttcttcagaatcataggttatgtgctaatagaatataaatctcttggtatttgtttgttcatttcttctgattttatttcctgtttctcagaggttttaccaggtatctctggtggtcttacaattcactctgtacaccagattgacttcaaatttatggcaatccaattgtcactgccttctgagtacttacattatagttatgtgacaggaaatgcctcttgtgttttgctaattttttttctatagagcaataatat

SEQ ID NO: 32566 - DNA, 1100 bp, Mus musculus; identical to SEQ ID NO: 32565

SEQ ID NO: 32567 - DNA, 1244 bp, Mus musculus
gccatggcagccatggatggccagagatgagactggacgccactgggctggagcagggggcagtccagggttgtggggacacagatgagggctgggaggggaggaacgcaagagggcggggggtttcttcacgatcgcactggaagattttataagagttttgggggggggggggacagtaaacgtcctgagccacttgggttcttcaggagtttctcttagggaaagtttttttttcctctttttaatatataactataatatatatgaatataaatttagctaatgtttgtgagagtggggcctgcacacgtgttcctgtcagaggcaaggctcacattccttgccagcacctctttctctgcccaattgaggggaacaaaagggtgttcacagatggagcgagcttgcagccgcgtggctgtgctgctctgtgagaaggcgtgccagccattaggaagccccaccgccaaaggaggtgcacccaggagggtcctcagaatcatggacttctaccccattgctggtagacaattttcatctctgctggtggtggcctcttgttgactctgaaacttgtcaccttgtcaccagctagatgtcaagacttggctgccctctgatgtgggtgcttctgccccttccctgttctaactgtccgacaggctcccagtctctgtgtgtccaggccagaggaccagcactcaggagagtctgcctttggatgagttcccaaattagagtcatcgcaccagggtgcaatttttttttttttttccattttttattaggtatttagctcatttacatttccaatgctataccaaaagacccccttacccacccacccccactcccctacccacccactccccccctttggccctggcgttcccctgtaccggggcacacaaagtctgcgtgtccaatgggcctctctttccagtgatggccgactaggccatcttttgatacatatgcagctagagtcaagagctcaggggtactggttagttcataatgttgttccacctatagggttgaagatccctttagctccttgggtactttctctagctcctccattgggagccctgtgatccatccattagctgactgtgagcatccacttctgtgtttgctaggccccggcatagtctcacaagagacagctacatctgggtcctttcagtaaaatcttgctagtgtatgcaatggtgtcagcatttggaagctgattatgg

SEQ ID NO: 32568 - DNA, 1117 bp, Mus musculus
taaatctcaaatgagattttctaccaaaggtcattaaaaaacagagaattaacagatcaataaagtacaatatgaagccatatatacataattctataaaatatgtcctgaaactacatgtcaggagacattgttaaagtgtaaaacaaatagtgagacccaggaaatgagatagtttgatggaatagtgtttcttcttagagtgtcataatatacacacataaagtttcaccagtgtgattttcaaacatgagatgcaaaataaacaagctaaattgaagctacaaattgcatgtggccttaacagactagaaaatatttgatgaaccaaaggaatggtgagggaatgagacacattttccaaagtgaagaagacactaatttactaccctatacaaaaatgtgtatacttaaatatatatatatatgtatcatatacatgtgtgtagtctcccctcccccagcctgaaacctgcttgctcggggtggagcttcctgctcattcgttctgccacgcccactgccggaacctgaggagccacacacgtgcacctttctactggacccgagattattcggcgggaatcgggtcccctcccccttccttcataactagtgtcgcaacaataaaatttgagctttgatcagaatgaatttgtcttagctccgtttcttctttcgccccgtctagattcctctcttacagctcgagtagccttctcagtcgaaccattcatgttgcgagctgctggcagccacaatattttggcgccagaactgggacctgaagaatggcagagagatgctaagaggaacgctgctgtggagctccacaggaaaggatcttcgtatcagacatcggagcaacggacaggtacacatgctagcactagcttaaaatttcagttttgtaaagtgttgctgaggatgcggtaggatacgaattaagcttgaatcagtgctaacccaatgctggttctgcttgggtcagcagcgtgttaatcggaactagaaacggaaacaggcaggttagccgcagctttttaggaagctgcttaggtggaagaagaaagggtttaaagtcatggatcaggcggttgcccatagttttcaggag

SEQ ID NO: 32569 - DNA, 1139 bp, Mus musculus
accaaaatagagtaaaagtaaataaatgaaaatcaaaataacaatccaaaaacattaagataaaaataacaaaacaaaatgaacagcacccaaaacaaaatctcctgaaataaaaaatgaaacaaaaatgaagtctgctttatgttttacaactattcctgttcctggggcctgatctggaacatgtttgatataatcagtgacactgtttgaatagactgattttttttctttcctatcaacagaaattaattgcaaatactccttggttaggggttgcactttgtctcctttcccttctcatagttggaattttggatggattgaacctattcagctttgtttctgctgccacattctctgggcattcctgtgtctggcagtcctattgtatggatagcattgtttccttgcagtaattcaacaccctgacacttatctttctgctttctctttaacatagatccaagagtcttgaggagagaagtttaatgaagatccatttaacatctacagatgcacagtctctcactatctctacacagggcacttgagaatgccttagataattcttgtgaaagaggagacagccttgttgagaactgagcactgaattgaattatgggtagaacagtatgttggtaggaatcattttatttcagtttccctataggaaaatagcagtagtaggtttttttttttcttttctataacccaattctatctaaactcagattcatgggcacttggatgtataaggtatgaatttatcacatagacttagccctaaaatctaaaacaaacaaaacaaaaacaaataaacaaataaaacccccacaaactactaggtcagtttaacattgactaagtattgtgccagtgtaccctgaataaagttcactaatttacaatgcacattttgtggctgatgatattcaggaattttttcatcttcagttacatgtagtgtgatatgtaagaatatcttcagcattagagtattatcatctggttgctgtttgaagagaataaatcatagcctttcaaatgatttgtgaatttcatgtgcggggctttagtagtgctttgaccaatgactacataaaatttaaattctttttgtccctggagtaattatt

SEQ ID NO: 32570 - DNA, 1431 bp, Mus musculus
tttgccctggtcaaagccctcagcccagaggagctagacagggtggcgctcaacaaccgtatgcccatgacaggcctcctgctcatgatcctgagcctcatctatgtgaagggccgcggggccagagagggtgcggtctggaatgtgctgcgcatcctggggctgaggccctggaagaagcactccaccttcggagacgtgaggaagataatcaccgaggagttcgtccagcagaattacctgaagtaccagcgtgtgccccacatcgagcctcccgagtacgagttcttctgggggtccagagctaaccgtgaaatcaccaagatgcagatcatggagttcctggccagagtcttcaagaaagatccccaggcgtggccttcccgatacagggaggctctggagcaggccagagctctgcgggaggctaatcttgctgcccaggccccccgcagcagtgtctctgaggactaaaaaggtccaggggcacactgatagtttctgacccatactagggctgtgtaagggtggggttgagtcattagagtatcccaaatccacagtgcagtatttcatgtataatttttaagttttccatacagtgcttttgtaccttgtaatgctattcatttgtgtactcgtgtagtgtttaagattgatgcatgtgtgataagtatttggtactttcacttttgtgctttcgtgcatttttgtacaagagatgtgctgtgctaaacttgtgaaatacattgaggtgttctgtatcttgttctttgtatgggactgatgatctgtatcgacaaagaaggccctggagagttagcaggacttaacagcaacgcagacctgagcaagagaaaggtcaaggcctttctccatatgacttcaactggcacaggaagcatccatgtggaatggactgatttgaactggactgttctcagtgtaggcacttagcaccctttacaaaacatgtatgcaaccccaccataaataaacgttaaaatgagcattaaagatactgtgaaataatttcttggggggggggaggaggcatttatttttgatgaaagggggagtgggaatgggtggggatgagaaagattctccctgtgtgcagcataagcaaacacggtgtcctaacacagtgggagaccacacgaccactcagaagaaacttgcagtgctttaatcaatttgtcacataaaaggtataacaacaacaacaaaaaagctcattatcacataacatggggataataacaggtatatggagggcctgccccttttctgttgcattttttaaaatagtctttgatggacactttagcagaataaacccttatcatgcattttcttctttattttgtcctcccaccagccataagaagtaaggaataactgtatcatcacagagcaagaaaaaataaa

SEQ ID NO: 32571 - DNA, 1351 bp, Mus musculus
agtgtgtttttaaaggacacccattcctctttgggttcaaggtcagtttcctgggtgtgttccgtgtagtgggacttcagcacagacactaaccgaattgccttgctgagggatgagcacactgttttgcaaatgctggagtcctttaagggctctcctgccatctctgggagggggtggggtggctggtattgagtgtctgtgcttctggcccgaggccccctccccttccactccttccagcttccagacaaactgcctggagacagtgactgcattccaccttttcccccttgtttctgctgctctactcaagtggggtgacgctgctgatgctaggggcccggatagggggctggggaggcttctcataatgggcactccagggacacagtctcacacaaccgtgtataatgagctctaggggccggctctgcggggaacagctgcagttctctggatagacagagttgatttcctccttctgaccctcccccagctgtgccagctggcctttgtaagggaaggaaacctagtaaaaaatgtgaccttccaaaggggaaagctgcaggctttttgctattgtgactgtgaagtgcttcgaaatactgttcactctgagcaaccgttttcgttttagttttatggagttaatggcttgttcagcatccagatgtggctattgacaatatctactcttcgcaccagagtgactggagttgtggctgtcctgatgataggattttaacttaactgaaataactgtttttgaataaatgtattggttttttttccagaaaaaaaaaagaatgagaagcccaaaagtataaaccaggacattctgtatattttttacgagtctagtgaatgtatacgaaaataaatgagacatgcgttcttagtgtgacaattatacttaagcctaacatttttttccagttatgctagagaaactactagatcaggctgagtgcatgggcctagtgtatagtttagatttactattttcaatgatttttaaaaggtctcagtggtttatttgattatttgaccaaatgtatgtcataagctaatgtactcttgagtttgaaatgcccaatattccttggtttactcctcatgaaatgaattaatgcacagtcaaataacttgggatgcatctcaaggggagactccaaggcctgacactattactgatgctatggtgtgcttacagacaggagcctagcctagctgtcctctgagaggcccaacaagcagctgaaagagtcagattcagatactcacacccaaccaatggacagaagctcgagacgcctgtgtctgaattagggaaagggtggaagaagtt

SEQ ID NO: 32572 - DNA, 1153 bp, Mus musculus
gagttacccagcctgtattcacaggactgccagcacttgatgctgactgacactagggaagctgttcaaggctgtcacagctgcagcatctgagtttgttcctcataatcacaggttcgtttatcacatctcttcaaagaaggacagaaaaaggaaggcattatgtgtgtttcttttgttaagaaagcaaaatgtttgtcacacagagaccagcaggtttcctcttaaattttagacattcatggggaaaatggccacctgaatgcttttagatgcaagaaaaactggtagagcatatccaaattgtcttgatcagttgctaaccatgatgcatcacatgattgggtatgatacagccatcatacccaaaagcatggaacaaaagcaagcatagtaatgaagaaggaagtggatgggtcttaggcagtaaaccaagcacatatgccaggatcctataccaggttttctcccctcactcagtcgtacacatttaagcacgcatgtggtgcaagttcgcgtgcgcacacacacacacacacacacacacacacacctctggtcctcccctctgctctcctgtatcattattgaatcaccatacttccgtgtatgatggggatttaaggaagacgaattcctctcaagcatgtcagaccattgacgttacaacactacattctcatctgtaaagtttgtccctgaggtccatgtagctgagttatgataagtatcacctaaaaatgatgctgctatgtgtgaaggaagttacagctttttattggaccacttccgtagctaccctctgcttcttggaggcccacaggccacaggtttgacatgtgctctgacttgactttattcctttgtcaaactatattagagttttgtgcctatccacttctgttttataagctgctcctcaatgaatagctcccacgatgactgcattcaaatataagaaaaatcaacattgttcagacattgtcttctgtctgtgtttaagttttatacctcagggaaggcgtgttgctttctgaaaaagaacaaaataaaaatgtctcttgcttttgttgtgctcccttgcttgattcacagactagtttgtgttggcttctataaaatgaattttttttattgtgcttaaaatgcttca

SEQ ID NO: 32573 - DNA, 2049 bp, Mus musculus
ttctacagccatacagaaaatagccctttccaaagagggccttcggttctctcttgatgggtgctacgtaggggtggacagtgatgccctcgatgggagtgtggtcctggaggtgccctactgtgtcctgccatgccccttactcacaggacatgagatgcaaaggctccccacctccagcccacaccatggcaaccttgttctgagtccagcattggggcaggtggacaattcaccagagtgcagcctctgggtgcaaaattctgcaccctggcaaccccagtgaggggtggtttagatgtcgggatggatgaggggaggtgacattctctggacccaagagaaatgtggcagaacagagcggttacctttcaagacgaatgaatgcctcggccccactccgtccagaagactggcccttttcttgccagaagcaggtgctacgatggactgcacagggtcacagcatttcctagaggcttcagctgggatctccaccaagcaggggtgccgtccatgtgagactaacctgagcaatagcttggcctcgtctctcagctctgattgtggctttggttacaaggctacctattttgacctctgacaggtgttacccactgtccctcccccctcccctgtcccacttcacaaaaggtcatttggttagagacagtgctggcaggtctatgtgtagctatgttgtgatcgggaagagatactttgtaggtcacccacttttgtcttttttttttttttttttttttttttttttctgtccaaagtttccatctgtccgttctggaagctgtatctttcaaagctaaaatccagatgtttgactcactgttttgaaattaggatggcatgaggaagagccaggtcctgtgactaattttcctgattctgagtcttcgaaggtttgtcctggacacattccagagaatttcgtacccaaacatggatgcacagtccagcttactactgatacaggcctgagcactgctgagggagaggcccttcctcttggtggccagcggtcccagtccaccagggaagggaggtttgattggtttctttgacccatacagagttagtggacttgctctggaactctagcctagcccagcccagtcgtagtgtcccctcccccccctcccccatctcacacagctttaaaaccgtactacttttatttagaaacaaacaggatggcagagaggacacctcccccgcattcctgggggtgggcaggaaacttaggtcaggcctgagagcgggtccggctgtttccctagagtacttactgtgggtaggctgcctgtgctcatttgcccaatgcctgtgggccaggttgcctgtctcagtactgagactctagacttaggagaatcctctcccaggagtagctagttctacgtcccttgtgactcaagacactgcctggtcatctgctccagtggcagacctgacttacaatgtctaccctagtatgtgggtagaaggatctttctgttcccccattgcacactggagaagccctgggtaccgagtgtggggaccccatggacagtaccataaggctccctgctgagccactatgcattgtggggtcagagctcctgtccctccttggtgactgggaatccctgctgtggttttgttggacaggcccaggtgactgcttcccatccaaagccatcggtggaacttctgggggatcctttgccaaaaccccaaggcaaaatccaaggtccaaggccatttccagcagcttcccagttccctttcccataggaacttttttgttgaaacctagctcccaacatgcttccaaaggccatgttccgtctttcctggatcactacagtgaagtattacagttgtacagtttcccaatctggccttggcttgctcggataaaactttgttatgtattttgtaaggcatagattctatattgtaatgtcctatgcaaaagaaaaaaaattaatgaaattgtaaattttattgttttaacatgtatgcatgtttagtgacgtttacattttg

SEQ ID NO: 32574 - DNA, 2553 bp, Mus musculus
ctcgctcagcgactacagccgctccgatgccagcagccccaccatcagcccggccagctcaccctgagcacccgcgcctggaccgcgcctcctcacccctttggtaataggaaagctgagcgaacttgagaagtccacagcaaaacagttttcttcacctcaggtgtcaatttttaacaaaaagaaaaaaaaaatctcaaaaaaaaaattaaaacaaaacaaaaacaccacccacaaattgcacaaatacagctatccacgaagatgagattcagcggtgttgaacccccctctcccccaccccaccccccctttctcagggatgaacgcggtccacgaggtcagtgagggcatgcctttctgccgccttactttgtacatagatttgcactctggagtttctgtgaggtttaggattacattggggcagaacaggacagctggagacagtgatgtggtgtttttgcagaagaccccccccccccccccaaaggcctaggaccctctcttgcctaccactcaattgtggttctctgccctttggcctggctaagagaccggccacctcacagggatgtggtaagccatgacagaccatgggagcacttgcctatggaactgtgaaggacctctgccttctaaggctggtcctgtctgcctgcctgcctgcctgcctacctacctgcttccagaaatccttaggaaaatggaggccagatgcaaaccctgcctggattggcacatcatggctgccaaccacccatggaggcggctgggccctgcctgtcctacacgaaggcacctgggacccttcactatcacactatgttctcagactgggaaatagtaccctgggcacattgtactggacctgcttctccccaaaattgatgttgttttatccggcttcctaagctctcgtgccctgggccactggacaggaccgccacgccccctctctgcctcttcagtctgtgagtgtggcagcgctcacacatcccacaggactgatggtggcaacggcatcgtcagttaccgcctcagagcagcacagcaggtattccaggagatgctattggagagacaaggactgctgctctgggggacaccggatgaaaattgtgggaatgactttctcagaaccttgggtacagacttagcagacccacagttccacactgttgcattacccactcttctgtcctgcttctgcctgccctgcttgagagcacccaaaccgcacccagtctgcagtgtgggtcagggcaggggtgggtggcctgctgctggtcgggacagcaggaatagaaaccaggcctgctctatttctcctggagcctagacctgggctacattggcttcaggtgctgggcctcgtcagcaagaccatgttctggttgctcctttgcagatacttggagtatcatctcctcccaccctgcagaggttcaggcattcttccccttctcccacgaactctggggcccaggaacacaaagccccaggactggatgtgtgtgtgtgtgtgtgtgtgtgtgtgtgtgtgcgcgcgcgcgtgagtgtgtattgggtggtgggtgggtttgggatggacatgggttatcttacagagacctctcttcattttgatgtggagaattggcccttgtgactcagagggtcatagatgggcttcctgggcccagtgtgccttggttgtggccattctgcctccgccccaaccctcacacagtgtgggggtgcagcacaggggaaacccagagaccatgcccagccaagtctacagtttccagctgttgtcatgtggctcccacatggatcttgggcacccctttctaactacctgtgtcagttacaagaggctaacaatggcatatggtggcttctggtggcaccgtaggtgctgagttaggctgtggcattgttgctgccaaaagcaggcgtggtgggtggggggaggtccctgccctggtccagtgtaaagctggtaacagctctgcttgcatttcacctggggaagagagtggggtacgtggccaggaccttgactgaagaagggagccctgggtgcttggggtgtggcgatcttcatgctgagttccaaagtgtagtccctcccaaagtcatttgtgtgaggcagagaaagccacactctgaacacatttcatgtctcaggaattcacattccagattcaggaattttattccaaagtcctttggtgcacctacatccacagttctgaagccagaggcagcagtgtgccccagagaccagccacggtctctccttgggaggagccaggtgtctccttgtggcctacctccccatagagtcacagcaggaggccttctgactccgccactgtctgcacacgggaaggataaaaggactctaagccccatcatcttggaataaaagaaagagctggtttgttttagagcgggttgggggggagggggagggagagtgggcataggctgtttccaaagagagcacttaatttaatttttcctctgaatgacccagggctgttccatctgatagatggaagg

SEQ ID NO: 32575 - DNA, 1153 bp, Mus musculus
tgaataaactctattctatactatactatactatactatactatcctgtggctggtgcctcagggggaagggatacctcagcatgggcccgaggaggcacccctttccctcttacataacatagtccttttctccttatcttttaacaagacaccacagtgggtatcttctctgccccaatgggctgagggtgaaatctagactccttcattgagattggccttgtacatcaacatagacttgggaaatgagaaaggcagtctaagcctcaaggaacacaagagctctgggaaggtgctgcctgtatttctcttcttcccctgtagacagacattccctcatgctcttcctgctgcaggttctcaggtgcagtttggaggaggagacaggggaagagaataaagaatggtaggcagaccaggctggatcagacagtagctttcctgtccttagtgcctcatggacacccagcctggtcatctatcacctggtgcagtctacccactcactctcatataagcattaggaagctaaaactagctaaatatttggcaaggctaggcttggggctgggctactgatttatctggggctcaggtatcatgctatgtcccaggtaacccgaaagggcagacgaccctgtgtggatagccatgagtacttccaaaatgttcaaaaatgtaaagtgttagtagcatatactcaggtgctagaatgaaatgcatagatgtggagagccgtgccgcgagcaatcgccattataagatggcgctggcttccactgcgcctaactagtaaataagccttatgcgcaagtgcaagagtgaactcacgcctagtcactgcccatctcgcggggtagtaatggggtgatgggcgagcaatgaatcaggaactgtcacgccacatcaggtgctgaaacgtcacgctgcgggctatataagcagcgccattttcacgttcggggtcttccctcctgataagtaagcaataaaagctttgccgcagaagattccggttgtcctgagtgtgttcttgctggcggggacaaaagctcgggcaatacatagagaatcctcaagcgttctcaggggacaagacctctgacagcaccacggagagccctttccagcttccggctcactcagtggta

SEQ ID NO: 32576 - DNA, 1126 bp, Mus musculus
acatagccaggaccctgggtggctgggctgccagaggtgacgtggagaagaccagcacctgcccacagactctgagggctcagcatcactaggcagagacctggggtcaagtacaggtgctcaggcagctatggtcatacaggagaacatctcaaactgctgcctgtcagggctggtccttggccttcactgcagatggacctcagcaaccctgttggcgtctgactgtgattagaacccatgttcccagcatctaaccacctttcttttcattgttgccataggaagctgtcaaggaacttgaaaacctcttgtctcagaaaatctattgtcctgacagcagaggccgctggtgggatcgcctggctcttaacctgcaccagcacctgaagcgtctggaagaggtactggcagcataccccgctgcttatttggttcttaatggcaaactctaagtgcttcagcaccggggatggaactcaaggcatagttaaacaaacacttggccactgagctaccaaagcctacgaaagcaccttcctttaattagcttatttgtttgttggaggggtacagtttcactgtgtaactctgtctgtctgtctgtcagaacagagtttcactgtgtagctctggctgtcctagaactcaccatgtatagcaggctggcttcaagtacccagagatccacctgcttctgcttctccgttgctgatgtaaaaggcgtgcaccgtactggccatttattttactttaattaaaatgtaattgcaccacttccccctttccttctcctttcccattaatttctgtgttagtgctatcaccaaaaaagtaatttatggtcctgagaaaaaatagtaaaatgtatggtttttattaatagtgatgtatttctctataacacatggaaaaattactccagataaaaacaaaagcctttaaatatttagtttttataaaaaactttagaaaccactaatataacaaatgtgatagtcaaatcaaaacttaataaatgaaatttccaaatataattagaagatatttttcctttggctaacattctttgatttcttccaacctcatcccctaccccaggaaagcaggggtaattctaacacta

SEQ ID NO: 32577 - DNA, 1205 bp, Mus musculus
tgcttttttgtgatatgaaaaaaggaccacttattttgagacagggtctcactatgtagccctggctggcctggagtactgtgtagattgggcttgtttaaaagtcaaagatctacttacttctgcctctcaagcactgcgattaaaggcatgggccattacattgagcagtcattattattatcattattattgttgttgttattattgagatagggtttcatgtactcctgaaagacctggaactcactaaatagcctgagggtgatctttaacttctgatcctcctgcctcaacctttcaggtgctggtatagccggcatggactaccatgctctgtttttgtggggctagggactgaacccaaggctttatgtaggcaagacaaacattctaccacctgagctgtagccccagataatcacttttgaggttaaaaattaatttctttgctatacttcttactaagcatagaagtagatgtgttattctattgacttatttgcatttcaggcttgggatgacgtagaacgaaaagaaaaacctaaggaggatgcgtatgaatataaaaagcgtttgaccttagaccatgagaagagtaagctaagccttgctgagatttatgagcaggaatatctcaaactcaaccaggtaaggtgacctccaaggcacggttgtgactgaagaaccagatcgtcagccagtcctgatctaacctagctctcagatacctgtttcacagcacatggtaggaatagaggacttccagtgttcccactgagtgtgagcaagttggggcttgctctacaaaagcattgatttatataatcagctattgacttcctggcaattaaaggatgttgtaattctgaagtcatattttcttgatacttgaaataattgatgtattttatttctttatgagatgatctggacctttaggctcttcttgtttgttttgtttttgttttttaaattctaaaattagtttctagttaaatagcagaacaaggccatatcctggggaagacttatttcttcacctgggtttattgggatgaatgacatatgttatctgacctgggccacaggcagagccgctcacttcctattcctgtgcgccccgcgcccccccccccccccccccccggcacctctactatgttgtaattatgacaaagaaaaacaagcaaagaccattttac

SEQ ID NO: 32578 - DNA, 1182 bp, Mus musculus
tttaacaaaagttctatatgattttaataaagtattagagaatggccgaatctctggaagtcctttacagaaacttgagataaacagttttgatgatgagcagatttggcaacaactcgaattgcaaaatgaacctgtcttacaatacttccagaatgcagttagtgagacagttgaggatgaagatatcagccttctcccagaatgtgaagatgaggagtgcgaagaggatgcctcagaggtggaggctgacaaccaggagaacctagagacagacttggatgaagaacaactgtcagacgagggtggtgatgttcctaaagggagggacagagccaaaagctccaggaaatctgacccaaggaaaagtccagttttcagtgatgaagattctgaccttgactttgatattggcaaattggagcagcagaccaagatgcaaatcaagccacctggaaaaccaagagaaaagtctgtcgtagatgataagttcttcaaactgtctgaaatggagagcttcttagaaaaagtagaaaaagaagaggaaaaaagaccagatggtgaagaggaggacgaggaagacattgacctttttgaagacattgattcagatgaaagcgagggagggctgtttgggcggcagaagattaaggtaatgttttggaaaaaaacaaaaactgtttctttaaagtacaagtcatgttttcctacagagaaatgtaatgtgcctcagacctcatttgagcccaaatgaagtaaggaaaaaacaaacaaacataaagaaataaattaaaattaagagctgagccagtggtgcaggagtgtagtaatcctcagaagtgggaggctgaggcaggaagattgtggcttctcaaagccagcctttgctaagttgtgcttcagttgtccttatggttttatggtggtcaactagttgccagtttccctaataactatttctggtggggtagtggtgatgttaggaaccagtttgtgtgtgtaatatacataggcacatgagtatgtttatatatttttttatctttaaacttttcaaaaatgttttttattttagtcaaataaaagtagcagaaatctgaaatacaaagacttctttgatccagttgaaagtgacgaggacataactggggttgatgaagagctgggcccagacgaagagaa

SEQ ID NO: 32579 - DNA, 1261 bp, Mus musculus
gtcctggggcttatcttcatgaaaggcaacaccatcaccgagactgaggtctgggacttcctgcgacggctcggagtgtaccccactaagaaacacttaatttttggcgacccaaagaaactcattaccgaagactttgtgcggcagcgctacttggagtaccggaggataccccacaccgatcctgtggactatgaattacagtggggcccgcgaaccaacctggaaaccagcaagatgaaagttcttaagtttgtggccaaagtccataaccaggaccccaaagactggcccacacaatactgcgaggctttggcagatgaggagagtagggctagacctgcaactgctagtgccccagccacatcctcttgaactctttgagttatggtctgagggactctggagatccagtataaaagaacagggggaatgggggtcggaggaagcttgattctgctacgcataaaggccttggagcgttaggatgtgttgcagggttttttgtttgatttttttattattattattatggtttggagctttaaattttcatttaattgtctttttgtttataaagagttttctaactttctaaacctaaatgaaattgtatgatgccaaacatattcaagaaggaacactttggtaaattgctttgatgttctagacgataaagaaacagggtagctattatcttaatgactagttcctggggaaaaataaaagtctttttaaaattgaaaataaaattgttttagcttcttgtcaacacagctttaaatatacatattctgttgggtgtgagcacttgtggtcccacgaaatctatgtgatgtgttttctagcatttttatattcataatcataattctgttgtcctatgggttctacttaagattcttttctagtataacaaatactatacttttgagtcagttcaccattattattattattgtttccctgttagaaattgcggctaaaaaggaaatgtcatgattccagactttttttttttttccatgataagctaagtcaatggtgttgcagaagtgtgtgaatgtgtattagagcaagttgtaaaaatcgttaggtctccggtttataaaacagtgtcgtgtcgtatcgattaaccaggcctgattgggaaccacactgcccaagtgcagatcctgttccaccagaagaatttagcttgtgtatctgtagaatcaagtgtgcccttaaggtgaataaataggaaacgagataaagctga

SEQ ID NO: 32580 - DNA, 1967 bp, Mus musculus
gaggagtcttcaggaagtaggtgctacagaacttggcaaaataccctttgtttgcagtaactgagtgtgagcagtgtgttcttacatttagctcaaatgggttaacatacagttctatccaaaaagacggtgttaatagttgtgtacactgcagagcaactccagttgtctcagccatgtgattgtctgagtctttataacttttattcctatattaaaagtccagtgaattggataacaaaagagacatctaaaacagctttcagatgattgtagccagcaagtctacttaaaacactaagtttggatagaagtatactatttgaagaaatagaagaaaattctaatatgtgtgtttatatttgttccattaatagcaaaacattgtgggtagcagtctagacaatcatgagtgacatcagaatctttttttcctctcataggtgaccctaaaacctggcaaaacaagtgtcttcctggagatccgaattaccttgttggagccaactgtgtttctgtcctgattgaccacttttaattcttagtgtataggaactggactaagcaatgtgaacgtggattgaacttactaaatctaaatggaaccactctaatgagtattatattttcttagaatttatactgcaattggtagtattaagcatttgttggaactgatgaaggttagcgagcatgcccctgagccacggtcagaaaacatgctacaagctatgtgttattgagtgaagaactgtcaggcattggctagaggttcaaagatatttttgctttgtaatgatttttgtacttttttatggtcactgcttaacttcacatactgatttccgttaaaaataccagccagtaaatgggggtgcatttgagttctgttctttccaaagtacactcaaagtttattatggccttggcctagcatacacattttattttattatgcatgaggtaatgtgcacacattttttacaaatgcacctggaatatataaccagtatagtggatttaacagaaatgtacagcagggggatttataacttggggagggagggtcaaatgaagacaattacttattgtatatgaaaacacatttcttttagggaaggacaccaaagcatgtgagcccggttcatggcctctgaatctataaattaacatatcaccacagacatgtaaccagcaggaatgccttaccctagtgggtttaattcttccatcatttcgctgtgtattactaagtttttatgagttctgtgcatatctagatactgtaccatggaaaagactgagtagattgtggacttgatggtttcagaaatgtgcaaattacctggaagaaaataatggtgtgacttaaaatatttttttgacagggggagtggcagtcttctgttctttgggctgtgcatctgagatgtttgatgctttcaggacgcatgtacataatgcgtgcataccacttttgttcttggtttgtaaattaacttttataaactttacctttttatacataaacagaaccaagtttctaaggctacctttgtattctctcctgtacctcttgagccttgaactttgacctctgcagcaataaagcagcatttctacacatacaaggtcatttttctaagaaaaagaatgcacagagttgttacatttttaagtgctgcatttaaaagatacagttactctagtttgattaaattcttgcaaagtatcccttctgtaaaatttgtgatacaatactgtgccctaaagtgtatttttttactaatagacagtttattatggcacatcagcacgatttctgtttagataatacaccactacattctgttaataatcagtaggtgtgaaaggatttcttttgtggttattaaaaaaaaatctcaaatttctaaatctgcaagaataaaactttttaaaatacagtattagtttggtttatttgc

SEQ ID NO: 32581 - DNA, 1853 bp, Mus musculus
tatgtttatataaattatggtatccataaattttcttcatgatttttatcttcagtgtgaaaatcaaatagaagcagtcattctgtgaattaattttctgctaaatgaatactcatctttaccttacttgtgttggtataggctaaagcataagcatgcctacctatctgtagtgtaaatttttgagctttcacttgagctagctctctctactaatctgctgtgtccccagtagaagtggtagaatataccatttcacattttaaaattataacttaacatgtgtcattgcctaataaaatagaattaaaaacaagcccctgtgctaaaatttacttatgttttaaatgcaggtgtacaggaaggagccgtattctgaagaaatgatgagacaaaaccatattttaaaacaaccagctcttggtcacccagggcagaggccagataaagagccaaatctagcctatgaaccccaacttccatatatagaaaaacaagccagcagagaccttgagcagccgtcatacaggtatgaggtctcaagctacacagaccagttttctcggaactatgaccatcgcctacggtttgaagatcgaatccctacctatgaagaccagtggtcatattatgatgacaaacagccctaccaacctcggccttttgagaatcagcatccccgagacctggactccagacaacatcccgaagaggcttcagaacgaggttatttccagcgttttgaagagccagcccctctgtcgtacgacagtagaacacgctatgagcagctgcctcgaacctctactctacgacatgaagagcagccagcccctgcatatgaggtgcacaacaggtacaggccagaggcacagccctattcttcaacaggccctaagtcatctgagcccaagcagtactttgaccagtacccgcgaagttatgagcaagttccaccaccaggctttacctccaaaacaggccattacgagcctctccatggtgctgcagttgtccctcctctgataccttcctctcaacaaaagccagaagtcctgccctcggctaccaaaccacagcctccacccccaaccctaactgaggaggaggaggatccagcaatgaaaccacagtctgtgctcaccagagtcaaaatgtttgaaaacaaaagatctgcgtctttggagaacaagaaagatgtgaatgacactgccagctttaaggtaagctttaaggtgtgtcttagcccgagtctgtggtaccgactgagcgtcagatgtgtcctaactcccgcttcctcctgatgacagtgtccttgctaactgtctctctcttgttttctgcagcctccggaagtagcatctaaacctccaggtgcttctcttgctggccctaaacctgtccctcagagtcagtttagtgagcacgacaaaacgctctacaggtgggtgtgctgcacggcagtcacgtgagtctgaacaggaatgttggctttctagagagaaactggtgactcgttagtgacggggaagcgtgaggaggaaaaggagctcttactctccaagctgagcagccggctttcctgacaaaccctgagcacagggagagagtttgcatgtgctcctgtgaacaggctttagtcaacagatgttgggaaaagttgggttggtttgtttttaaaataagtgattgaaacaaaaagtctttaagccatattgtctccattttaagtacattcagagtctgaagtgttggtttgtaggagtgaaaggaaactctggctgattgaaatcaccacagttcttcatttagggagcagatgtaaagaactttctgtcattctatgtggagct

SEQ ID NO: 32582 - DNA, 1196 bp, Mus musculus
gtgtcttaaccaagtaaaccattaaaaaatgtagttcataataaataatttctatttgaggatgattgaattattctgttaactttatttaaggttctatagtcttccactattctcattaacagagaaagataaatatgatcagcatttatggcattatgagttaagtcaagtgccagccaatcctttataagtcagaagagtctttgttaactattggaattatataaaagtatatatgggtatatatctgcatcatttcatcatgcacctaatggaggtaccaagataaccttttatctttattcagcataaatggttgaagaacaacaagataaaataatcccagatacacagtgagaattgaggatgaactgggttatatatgctgatgtgggtattagcaggagtatcttcacagaatattttttatgcagattatgttttttttatcccagtagttattaattaatgtgtttcttttgatttcttagtttatcgccgcattgtagaatcagatgtaggagattcattctatattagaacgcattttgaatatgaaaaagaatctccttacggacttagttttaacaaaggagaggtgttccgggtcgtggatactttatacaatggaaagctgggctcttggcttgccattcgaattggcaaaaatcataaggaggtagaacgaggcatcatccctaataagaacaggtatgaacacttagaaactctttaaactgtgaattaagtgatgataggagactgggtgatccaagtttgcaagatctgtattgtttagtgtactcacttgctaccgtctaactgactcgctcaatcaccagacaaactactgattaagcctttgaaatgaaaggtgcatgtgagccttggtcctcaattttggcattctatttcatttcattgtgggttttttttcttgttgtcttttcagtaactctggtttctgtttgctttttctctttatagagctgaacagttagccagtgtacagtacacacttccaaagacagcgggtggtgatcgggcagacttctggaggtttcgaggtcttcgcagctccaagagaaatcttcgaaaaagcagagaggacttgtcagctcagccagttcaaactaagttcccagcttatgaaagggttgttcttcgagaaggtagtttatttcccatagctt

SEQ ID NO: 32583 - DNA, 1650 bp, Mus musculus
atatttaactgtattcttccagaatatggtcttcgattggccagccatatatttgtaaaggaaatttcacaagatagtttggcagcaagagatggtaacattcaagaaggggatgttgtcttgaaggtatagttatattttatattataataaattaaaccagggaacagagtctagagttattgtgtactctctgttggtgtgtgaagtggttttgctgtggagaatcatcagcgcttgtcctgctcctgtgaggtatgggattagcctgagagaattaattactgcaaatatgtatccttcaccgggataattttggtaattgttccagacactattgaagtgctttctagtttgctcataggaatgctttggatgatgtagaaaagtgtaaaggtcttcaagtgacctgacgagtttgtcctttcctgtaacatcagatttaagttttagtgtgtattttgttgtttacttttcaacctatagcttcttttctgttacagataaatggtactgtgacagaaaatatgtcattgacagatgcaaaaacactgatagaaaggtctaaaggcaagttaaaaatggtagtgcaaagagatgagcgggctaccttactgaacgtccctgacctttcggatagtatccattctgctaatgcctcggaaagagatggtgagtatggttctgtttggagcgtcccactgatttgcttcttaaagtatatgaagattggatatgtttgattggaatgatatttttctacaggagagatacctttgcacatacatttgaatgtgtgtttgtgtctgttgtcactacacacaaatactttgtaggtcatgtcattcaccgttgtagtttggtgaccactagagatgatattaacgtttcatatattttatgtgaaatatactcttagcttatttttaatattactagaattctttagtgtagtcatttcatgggaaaatcatctttttatttaacagacatttcagaaattcagtcactagcatcagaccattcaggtcgctcgcatgacaggccaccccgccgcagccagtcacgatctcctgaccaacgttcagagccctccgatcattccacgcagtctccacagcagcccagcaatggcaggtaaaaacaaaatacatttagagttacttataaataagattaggagataaatatttcttttattacttaagattgtgtctatttttcatcctcaacttaaaacttgtataaatagaagacagtccttttttttttctttttaaaaacaagatgctaggtagtacatttagtatgtaggcagccagagaagtgtttctttgtgctcaattctggctggtagcacagaggctctattaacagtataaaaatatgtagacatgggatagactttatttacagtaaccatagttaagagccagcctgtctgtcatggataaagctacagagacgtacatatgtaatagaataatgattcagtgaaaggaggcactccatcactttcagtaacatagacatagcccaggttattcaggggacagagaaacacatgagtgagcttacctctggaagcatagacacttaaacctcacagaacgagaggaaagaaggctgggcaggaagtagtgaagaggt

SEQ ID NO: 32584 - DNA, 1177 bp, Mus musculus
aatggatgctctgtgtcctctttagaagggttatctttcctttcctttatccagtaaaaatatgtttggggatccagggcttgtctgggtaatgatcctaaaaaaatgatccctcttgctgcagagccagccccaaggaggtggccagagaagctgtggcctggccacagttcccctccgaccttggactggttgtcacgcacacttggacagcgtttccgctctttgtctgagcatgcattcatcatcttgttggttgtatgagtctctctcatcctcctctttgcatcccgtcttcatttaaccccaatcttcactcttggggctggttgaggggtgatgggctcagctcccaggcagcctctggagacacagggcacttggcgcaggcagaagcacctcccctagctgatagccctgtgggggactctctcctgacaggaattgataagggcacattatgtaaaatctggagggcagagctttcccttttaggtcagtactcggcctggagctaaaaaggctaatcaacagaagcattttctgtgttcattccagagactttcccaggggcacaataaatctcacaggcctgtttacaggagcattgttatttaacaagccaggcttccgagtttaagagtttttggtttcatccaatctaacccaacccgccacattcatgattcattaccagttactcagactgcgttctgtaaggtaatgtaattttgcatacttaaaaataatcttcacatacaagattaaccttatgcgcgttggaagacgatttaaaagctgtatgtctttcttctctttttaagcctactgggaaagtgtcagtcctggctctaatctcaccagctaaggagaccaactgagctagttcatctcctttactcattcattcattcattcattcattcaggagatgcagcttatcatgtttatacatcattcattcatctgttctttcattcaaaacaatggttcaagcctggctctagaagatgaaaacatgcgtggagctcatgcagccttcaagatgctgcaggtcagcatcagaaggacctggtgctgtctggggagtggtcatttgatctgggtttggtcctaaagaacagagatggtttcagtggagggggaaggattaggggatgtgggcggagcctgatcc

SEQ ID NO: 32585 - DNA, 1286 bp, Mus musculus
aaaattgaagaacctcaaaaaatcacgtacgctaaatgccgaggaagacttctgaaggcttctccttgggcttctatataaccttgttttgacttctgaaatgtattttccctgtcacttaagatattagtacttctaagaaccctagggccacttgtagggctctaatgagttcaacctaagaaggaaaagtgattatttgatataaacaaaattttaatttgttgtgttctgagactaaataggagaagctggagaaatttgcaagctatcaagactccagagacctcagtgataaaatggtgtccattcaaagaggggaacactagcgagaattatcagaaatcatgctttgtttctttctcaaaagatgtgcttccagcctgggggctgtagcttcgtgaccagagcatccgcgttgcatgtatgaggcctgagctccatccccagcagccaccacctctcacccaacaatgacaggaataggctttcaataaaagcccatggcccttttgtaacatggaggggagatgtcttattttctaatacacacatctcaggtatttttatggctgctttactaaagttcacactgaaactcatgcccaaagctggaattgctatttcatttagtgtgcaatcataagagaagtactaatatcctgttagtggcaaaggactatgaaacctcaaagagattttgtacaatctgttatttgcattgtgagttaagagttacagttttaatgcttctaatcataattcattatatttatctttagaaacactaaagtcctaaataaaatgcatcacatggtgtttctagagcctcggtatgttccattgttggacgcttgcctggagttgaaccactgctttcctggggtgtttcacttgtatgttgaatcgagtatatttctgatttttttttttttaaatcaagactgggtttcacgatgtagttctggctggcctagaactcactgagatttgcctgtctgtgcctctggactgcatttctgatatatttaaattatttttattttgtgtgcatgggtattttgtctgttgtctgggcactgcaagagtgtcttgtgcttatagaggtcagaagagggtgccagattcctggaactgtagttctgggtgattgtgagccgcaggtgggtgcagggaatcaaatctaggtcctctggaagagcagccagtgctcctaactgccgactcagctctccagaccctgtagttccgatttcaaccttattgtcttggcacttaattaaaat

SEQ ID NO: 32586 - DNA, 1152 bp, Mus musculus
cgggcttcatttttccatcagtaacttttgctggaaaggacattggattggatttggagagctgtgtgttctggttccagttctgtccaacatgtcctctggtattttgcatagactctgccttatccaagctttagtttgtcctctgtgctaatagctcttgggtctgacctgggcccacattgtctctcaatgagcacttatagttttcatggccatgtgggaagcaggaaggagagacgttttactaatcacaccagttagcaggtcacagccagctggtgacagaaaccctcttagattgcaggtgtcactgaccccaactccaagctgtttgcattctagcacatgtgtccttgctgattgatctcgccaccattgaaaattgcctttcactgttcttttgctcaccatccgtagagaatcagctgttctctcacctcacagaaagtactgaaatccctccttacatgacgaagtgtccaagcaatggtttgtgtagcagacttcctgcagactgtatagaatgtgcgaccaatgtctcctgcacttacgggaagcctgtcacgttcgactgcacagtgaagccctctgttacctgtgtcgtaagtattgtagttcacttttcccaacggcatgcatcataacattaaaagcgtagcctctactggtcagcgctatgatgtaatgatttcactgtggtcttttataactgcactggaaagtatttttaaatcttgcatttggttctaggagtatatctcagcggtaaaacatatgcttagtatatacgaggccctgccctcaacaacctctgactcactgctaatttttttttccaaacatgaaaatcttggggtgagaacagtctgtgcacagatgaaggccagtgcttgggtccctagcaccagggtaaaaccttaggcgtggctgcgtgcacctgtatcccagaggcgggttcaggaggaccttaagaccttgctggcgccgggtgtggtggcgcacacctttaattccagcacttgggaggcagaggcaggcggatttctgagttcgaggccagcctggtctacagagtgagttccaggacagccagggctacacagagaaaccctgtctcaaaaaaaaaaaaaaaaaaaaaaaaaagaaaag

SEQ ID NO: 32587 - DNA, 1176 bp, Mus musculus
tatgtagtccagcctggtcacagacgtacacagaggtacagtcgtacctcaacctcccagtactattgaaccagccatatctcatctaaatttaaaataattttaatctcacagaaaattgcaaaggaaatagagttcccatggcatccttctcatgggccctaactttgtcaacattttacatcatacactgcactgaataactgattggaattatgaaagctttttttgtcgcaactcagcatgggttattcagagtgctcactctaaggagatgtctgtggtttgctccaaacgctgttggttccatggccccctcagataccaaaaccccgggcactcaggtcccctttttatcaaatagtgtagtgcttgcacgtcgcatacatacacccatacatacactcctctaccttctgtcatctgacctgacttaagccatccactgtaaacactgagtgaatacttgtcacttgctgaggtacagtttgtagttgtccagtacagatgcatttgtgttcggctggctgggatgatgaaccttcctttggatactgagcgctgactgctctgctctggggaggggtaggacgctaacagagtcagccgctgtgggtacttgttagccccagtactcgggctcctcccctgggcgctgtgaggtttgctttgagccattccgttatttcccagcagtcttagatcgtagaattaaaggaaacctttaagaaccatgcacagtactaagcctttagggagaagtacctgagattaggtgacttgatttgggtctgacaggtatgtcaagtgcctcaagactcagttcccgcctccagaacagcactcggcaagctgggtccctcagggaggctcatttctgtaacagaaaatgttaggtttcagcatagccgaaaattgtgtgtccttattctcccctgcatcgagactcaactccaggcctcccacatgctgagtccttgctcatcttagcagtcttcttgcctgttgtgaatgtgtggttaaggggttccgtcttcctagaccctttcctacgtggtgggaaccacccaacatcattggacctctgctcttcttttgcagcatcacccttggggggtttggagccgatcgcttctacctgggccagtggcgagaaggcctcggcaagctcttcag

SEQ ID NO: 32588 - DNA, 1100 bp, Mus musculus
ggcactactgtgtaattcagggccctttccagagctccctggggttccctacatcccaagcttctttgtccaccttgtttctttccccatccatcggggcagaaaccagggtatctccttgggtttttctcttccccagtgttggcagccactagggacaatccctgccagcctgcctccagttgcctctcccttaaacccttcccccaagccaggagccacagctcaggccagccccatgcttaagctctgctgacatccatatctgcctggttgccctccctgactcccttctcagccttcccctccaccaacaaccagaaggttctttagagccacaagcctcacattctcccttccccattttcaaagcatcagaggctcgcatgtagtgtggcacacagcccagtgtggggccccatctgcctcctgcgtatccccgagcctagctcctcgctccagcggtgccataactctgatgttctggaagtgttaccctagttctttctgtacctctgctgtttgttattgttcacaatctctctctatgtgatctacccagagagcttcatcaaccggtctactgccatcagggttgagcactgtccacccagaactccatgaagtccatcttctccctggatgacagcatggtgtagtagtatcttaatcatgcctatgcctcctcaggacttagcctgcttcctggcacatagaaggaaggctcagtaaacatgaaacaattccaggatcggtggtttcttgattctactcaccgggttaatgatcccaagggtgtgagtgagggaaaatgccaactttattgtcacagcttctagtgacttccaggtttgtaagtgtcaaggatgtgtacaggttgctacccagtgacatctcttggtaccttggttgggtggcttcttgttctccaggactgggtcttgcgccacaagttcagggttacctgcacgaacttaaaaatcaaagccaaaggacagagctgatatatctggtagtatccagagcccacgtcttaaagtaagtgtgaacccagccgggcgtggtggtgcacgcctttaatcccagcactcgggaggcag

SEQ ID NO: 32589 - DNA, 2037 bp, Mus musculus
tgcattgaaatggctcatgagggagaccctgcatcctgcctggtgtaccatcagtgctggcaaatggagaacagctgaatcttaacaagaccaaaaatctgaccccctccttttccttttctgttgccagccgatgagaccttctgcgagatggtgaagtccaatcggctctgcgaacggaagctcttcatccagttttgctgccgcacctgcctcctggctgggtaggggcaccagctgcccgcagagggcagggtcctcctgtctgcccgtttgcccatctaccttcctacagatggtcagccatagcctgttccttggggtagccctgcatctgacagctgtatctcccccagagctgggttctactgcagcatctctgagcacctgaacaggtggaggtggcccttaaggatatgtggctaaattgacaaaaatccccttgaactctgcttgctggctgcagtctaaagttggactcaaaacaggaacaaaaatgaattgtgagactcatacctgcagcttcggagtggcttctgggaccctagtttactgagacttcaagaccaaagcagaaaaagcgagatgcctggcgtcacatcacgtcctcctcccacatatctgtgtggccgtgacaaatctcagcgagtcggctggcaggaccctatgctgccctcacctatgatgaagggcctcgcttcctccctgtgcatcactggccaccaaacagccggagggacagtttgatcggactgtaaataaaatgggtttcagggcataagatgtatgaccactagagagagaatctatgtctacgcagtcagctccttccgaaacggcagccccggcctggacggcctagcaccaaaccgaaataggtccactcatcctctcttcagcgttctcttctgagtgagccgagctgtccacatggctgttctacctgtgtccctggggcctcctgggcccgagccaccagccatctacagctacagagcctgtgaaggaggatccaaaggagctacttaggattagccaaaagacatctgatggccaggcagttccataaacatgcaaagccagcccctgaatcactagtcgccagccctccatggcacacaactgcttttcaagtgtatttggcctctgcactcgggactctctgttcttgggtggatgctgcgctggtccagtatggtacaagcctacatgatagagctggattgatttttctgccaagcctgtgtgggcattttataagctacgtgttctaatttttaccgatgttaattattttgacaaatatttcatatattttcattgaaatgcgcaaatccgcttgctcagttccctgagctaagggaataacacttgccttaaatttccccaacctcgtctctctccacatggtcctgctctcctctctgactgtaatgtgtttgtcttgtcacctgtaggtggcaaggactcagctgttgtctgttgaatccacacttcaaataagaaatcagtgaagcaaatctaatgttaaccctgagttaataaaagagttaacatcccattgcaaaggggcttgtatttcttttcaagataaataaaactttgagcctcagtgctggccagtgggtgaaatggaaatcactttatgggttcttgatctgtcagatgtctgtattcgttatttttctcattgctataacaaaatagctgacaagaagcaatgtaaggggctagtgagatggctcagcagttggtcaagaacacttggtacacccctttaatcccagcacttggaaggcagagccagatggatctttgtgttcgaggacagcctgatctacaaagtgagttccaggacagccaggctacacagagaaaccctgtctcgaaaaacaaaaataaaataaaatagaacatttgttaatcttgcagaagacccaggttcagtttctagtatccacttggcagctcacaactgaatgtagctacagttccaagaaatccaatttcttcttacctctgtgggcaccaggcaca

SEQ ID NO: 32590 - DNA, 1242 bp, Mus musculus
cactttgtgagctgtctgtaagaagctaccagtatagccaaacaagccgggtaacttgtatctggaaaactgcagtttgcttccaagtaatagacagacttgtcagtagtttctctaaacattggagtaaggcaaaactttttggggtatggtgcggtatggtgtgtgtgtgtgtgtgtttgtgtttgtgagtgtgtgtgtgcgcgtgcgagcagtttgagacaggatctctctacatagccctggctgttctggaactcactatcaccaggctcgattcaaactcagatctgccacaaatcttggaacacaattaacaactatgtgtgcacatgcatgcatgttgatgtatattcattttttaatcaatgtgtatgtgagtgaacaaataatacaaaacttacataacttgacctgtgttctttcagggccgagtgatgagggtgaagaagagatagaagacgacacagtcacaaatgggtcctgagctctgccagatgctctgataagctctcttgggacaagtcttgcattttgagcatggagtaacaaccttgcttgtatcagcaacgtggactctcagctttgctgaatgttcagaacgactggtgataattttttaataggaaccttgaaataacaatgccagttttctacaaatggtaaaataaaggcgacttactgtgctgccggactgtgtgctgtgtatctgcagtgagatgtaaggggatgtttaagttagaagttggagagagtggtgttccggaatagacattattcccactcatgaaatgttacaggttcttcataaaggtaaggcaggaaggcttgaagactagacaaataggcattctttgaccttttaaatcaacatacatgaatatctcacaaatcaatttaaaatgatttgaaaagttttaaatagaaaatggggcttttgcttgagcaaaaataatcttccagcctctgggacagaggcacagaggccatggtttttctgtggggcaggttaaggcacgtttttctcagcatctaggcttcttactgtattctttatctagggaagattttgttgttaaataccagtgcctcagtttccctactctgccttgttgccttgagaacagtgcctcccactgagcctctcacttgcagcctgcaagtcccagcagtcctacctctgccccacagtactgggttgcaggcacgagtgtagacagacccagccttttacctgggttg

SEQ ID NO: 32591 - DNA, 1196 bp, Mus musculus
aggaaaatcttcaggccagaactgctacagttattattcaattttggatgtaatacaatgtttttatctttgtggaatttatttttaggtctgaacttggtattcttttgttccttggccataggacatcacagtggtcctgcatagactaatttttccaagggaggtcttaatccctcattcttctatcatttatccacaccatcctttgtccatcaggataagcccccgtgtagggcagagataactcaagccggtttaactttgttgttgtatctttttcctggaggggcattccatatgtgccccccccaatgttatatatgccacgtattcccctgagtgacaggaggaagaggctttaacctgattgatcggctgccaacctctccagcctgctgagtcttatttctcttttaagtttaccttgttctaattatcttgtgcctgagtaaatggagaggcgagtgcgtgatccaaggatatcttggagcctgagcctcacaaggagatctctggtgtctttatttgagacacaacctccgggcctaaggaagaccctcaagtagagccagataaggatgtctccctaaaagtggggtgagtggtatgcttaggactcccctaggaacgcttagaagctgtcctcttgggagaaggcataagagagtcatacgcttcccatcaatccccaagttgtacaaatattaaaagtccccaagcatgcaacacatggagatcaagaccagaagtggaagaccatgtgacagcgattgtatcgctctgctcagctttgatagatagcggtcaagcagctgtgctggctttgtgactttcactgttcccattagctgtggctgggccagttagtgggtcttaatttacagaggattaaaatgaaaatgtcacccttttctttgtgctccagcgacaccccccagtgaacctctctagaattattgtgagtgaccagaaactcagtgttagggtctgtctgtccctccatccctccctccctcccttccttcctccctcccttccttccttccttccttccttccttccttccttccttccttcttccagttactgtgccacacctccccccatctccagtgttaggttttacacgcactccattttgatttttccctgacctcatcagacctgatttccacttaccatttggttgttta

SEQ ID NO: 32592 - DNA, 1592 bp, Mus musculus
ggtatggtttctgttgtggatttgtttttgagacaaggtcttacttaggcttaggttggccaccagctccatatgtagccaaggtgaccttgatctgttgttcctcttgcctctacctggaccttcacacccttttaaaatgctttcattttgttttgtttttgagacagttaggtcatcttaacttaggacagcttaagtaattgcctactgggatttaaggctgcacaactatcttcacccaccttatttttatgtaatagctgaagtcccttggaaatggccataagatggaatctataccttgcaatttacatgctagatttgtggttatagttttaatataggatgttctcggatttccagccatcaaaatggttctgtttccttttcacttccaggttataaccctctgacgggtgaagggggtggaacctgctcctggagacctggacgcaggggcccatcatctggcggctgaaactaagactcttgttagtgtcgctctgacattagcaaggtgaacctttaaccctcaactcaattgccttacgcacactttcacagtgactggccaaggagaggtggggcttttctctgttctaaactacttgtactttaagggctttggtcagcatgagatatagacattgccattaggccacactctagacaagacagccatggcttttatggctgctggctagttggtaggttgaaggcttcttgctgtttagcagacttcataaagaaggcccagtgatgatactttggggtagaagtccttgctggcaggatggtctctgtgacgggatgcgttgaatgatgtcttccttataaatggtgaacccaccagtgaggattactgatgttcacagttgacggggtttgcttctgtatatttattttatgtacagaactttgtaaaaaaaaaaaaaagttaaatacttaaaaagtaacatttttagcatctttattaaactcaaggaaatttctttgtgagcttgactttgtcagacagtaaacagctttgtatcattcacagtctctggtttttcttatttctcatggctggtagcagatggtgggtgactttacagttgacaagctccttggggttcaggataaagcatcctcacagcaggctgtggtggtgtctagaaccccacactctgggtgcggatccctgcacacctgaggctagcctgaactatgtggtgagttccaggctcaccagagctatctagtgagaccctgctgaaggaaacacgagtgcattgtaataaactgctgaaacatgtttaaaagaaaacaggtaggcctgtaggagcttgcctgtaaatacttcagacaccgagcaatagccagtctgccctatgtagcaaaaccccatcttgccacacaaagacaacaacaaagtcttgcttgagctgctaggattcctgttatgcacatggctcatgtgttgcatccgtgagagacccaactggggatttgctataagacagttgattatgtatgtgtgtatgtgtcactgtttgatttgtttgtttgttctctgtgtgctgtcctggaatttactttgcagacca

SEQ ID NO: 32593 - DNA, 1161 bp, Mus musculus
gtcagtttggtttccagctgtaagtagaacttaacaataccttaccctcccttcacttggggttcttatgaaaatgaatctggagtcagtggagtctccattgaaggaggcaagcagaccaaatttaagcagtcacataatgattcaaaataagcagatacatgcatttctgaaaataattgtcctctaatctgtatttattttaattacagaacatggtccaagacaattcccgggaaggtggagttcttctctagcgagggttcagatacatctatacccattccagtggtgcccctgcggggtgtggatgactcctacccaccccagaagaagtctttcatgatgctcaagtacatgcacgatcactacctggacaagtacgagtggtttatgagggcagacgatgacgtttacatcaagggagatcgtctggagagtttcctgaggagtttgaatagcagcgagcccctcttcctcgggcagacaggactgggcaccacagaagaaatggggaagctggcccttgagcctggagagaacttctgcatgggcgggcctggtgtgattctgagccgggaagtgcttcggagaatggcaccacacattggcaagtgtctccgggaaatgtacaccacccatgaggatgtagaggtggggagatgtgtccggagattcgcaggcgtgcagtgtgtctggtcttatgaggtaagagcagaattctttatgtgggaaaaactgtcaattttgccttttgagctctgagttaatcataggaaactagcaataccagcctcttcagggttagcactggtataagttattggtacatgttttagccttagtttttaatttttagaattctcattacccagattccccctggccttttagactcctgggcctttagagtatgcctctggacttctgatgtcttttaaaataaatgacggcacttggggcttgaaggaaacgtagggtttactgatggtcactgcgacctttttccatgaaacccagaatcatctgatttctgttgattccaggaccttctgcaggagcataggctgctcccttgttttccagctcccaaaggctcccactttcgtctggtcaagatgacctacacagatcagaaacttacgtgttttgaacttataa

SEQ ID NO: 32594 - DNA, 2278 bp, Mus musculus
ttttgcctttactcagaaaacaggtttctggagaaactatgggtttggcatcacttgtatttacaagggagatcttgtcagagtgggtggcttcgatgtctccatccaaggctgggggctggaggatgtggacctctttaacaaggttgtccaggcagggttgaagacattcaggagccaggaggttggagttgttcacatccaccaccctgtcgtctgtgaccctaatctggaccccaaacagtataaaatgtgcttggggtcgaaagcatcgacatttgggtccacgcagcagctggccgaaatgtggctagaaaagaatgaccccagttacagcaaaggtggcagccacggctctgccaggacagcctgactccggccccactgcggagaacgttttttaattgcctaatttatttttaaaaagtttttgtataatcagtttttgaagtccatacaaggatatattttccaagtggttttcttacacaggactccttaaagattgagctttttgaacaaaaatgtgatcaatgtttgccttcgaacacaccttgctgaacactatgtagcaccggcttaatcctgacttgaagcatacctgatgaacaaaactttggtataagaatttttttgtttttggtttttacatttcttttccagacaattcccctgtctctgtagtcctaaggcagaaagctggaacattcctaggaagtctcgtcaccgtgatcagagcactgtaaccctggtcgatgctgagactgttaacttgtctctgggaagtgttctgctgtggctgtcacctgtcacctttgcacaaactccacctttttccttttttttttttttttaactgttttttttaagccatcttgagttccagtcataaagtaggcaacatgatagtagttgtgttgtcactctctccaagacagctttccaaatttgattattcccccacgtgctccacccaccgagggtcgcgcaggctttcccagtgggaggtggagggaagcacagaggtgctcgccccactgaactcccgtggcctcaacggacctggcactgaagtccaagaaggacttggcattttctctgccccaacccttctttttagagggtgcagtattattaagggggacagagtggctgttagcagtgtaatgagtgcgagctaaacagacaaacctctaatggaagtgtgagggaagctggggctctgctctctgtcctgtgctgtggatggagatggctgcttcattttttaattactgggttttctatcttgttatatgaaatacctttaatttatttaatatacccattgttttagatctctgccattttgagtacttgtcagttactagtatttatgtgcacggtgagtgtggttagaatattttatttgcagtaaactgatctccaaagatttccttttgaaaacactttttcctcatccttaatttttacattcccgtcttactaaagattaagtgttctttgataattttggtgctcatgtgttttggggacaaaggtgaaatgagtctgttgtcacaccagggtgtttgttttcaactcacagatccaatgtgccttaagaattggttttcatttagagttcagacagttgatagagttgccatttttaatatacatcgttggagatctgcttatttgtaaatagcctattgcacactcgaacaaataaaccagtggacagtatttttctattgtactctgcagacccattttgtctcattatttgtgttggttgaagacttgagttacatttggagagtaaaacactgaagcacggacttccttccagcctttgcagcgctgagtcggtgcttctgtggctgcagggggagtggcgtggagcgaactcctcaaggaggagctgctgactcccgtgtgaagcccagagggcctcaggccaggccaggcctctgcctggctcttggctacaaatcactttcatctgccaggggatcacctgttaagcagcatcccaggtaaaaaccatcaccaactgatggcttggggttctaggctccatctagccggagaaaaacttgcacatcagttgctgtagattcagaagtcaaaaagtgacctccggtgctattcgccaggttcagtagatgacagttataccctgagagaggcatccacagtgtgacgacacttgggtccagaacaatggcatcatgctcacagaactgctgtaatctgcctagctgccatccagtccctgcaggttgttgggttt

SEQ ID NO: 32595 - DNA, 1225 bp, Mus musculus
gaccatgcaggtctgcccctgaatttgttatcagagaagcagtctgtggccctaggagagaaaacagcccctcataacacagcccgttgactcaaaattcacactgagtcttttgcgcttcttttgaaatttattatttaagcctattactaaaactttataaaatgcatttggcgaatacaccaaagaaaccagctcataaaatatgatcattaacgaactgcaaacctcatcttttgaaaacaagggtgtttctttgtaaatatttgtgtttataaatgtacagcagagttaagagtgtttttttagattatttaattcccatatttctaaactatttactacagaataacccctgcttattagtttgggtgacttgattgtttgttttttttttttttaattcattaccagtcatgcttggagtgacgattctgctggagaggtcagcactctggcagtggctggagtcgcttgtaaagcatgggggagactagcatgacctgtcagactcctccctcgtaagacaccaggaaagcgtagcttaatggccagagtggaccatgagaaagagtttctaacttccctactgaatcacctgttagcccagggtggaattgggacaaggctgtttgcccacaaatttagctttcatgtaactcccagtgtgttgtatcataatatattctgttctttctttgtaacgtaagttttgctttgggtcgatttgaattaaaaaaaaaaatcttaaatctggtttaaaaaaaatactgaatttgtgttttctttctcttctatcttaactttttcacaactccaggtgtttggtaaagtggaataaagctgtatttttcatcagcacattaggtcactggtgactggatgagaaaattattcaaaaacaatgcacatttcaagccatttctttaactctcttttatttacttattttttagtgttttattacatttgtttatttacctacctgctttgtggagctgagaggaaagcctgcaggagtctattctctgctgctctgtgccccgcccaccatggggttcaagcccttcatgtgctgagccccccacccccaccccgcccctcctccctatagagtgcactctgtgaacacaagccagcaaagggcatggtcgtgagtgtatcactccagcacaaaggcttcatgagtcagattcgttatctgccacatcttggcaaaggagac

SEQ ID NO: 32596 - DNA, 1115 bp, Mus musculus
aaggacaatccgtggcacagctgcattgacttctgggctacagctactaagcaccactccccgccacctctcggatgatcgtttccagcactgaaggggactgtgtgctagagtgtgtctaacccgagtgaagcctagggttcaagccttttcaagccttaacatttttcagaaaagtgtacacacacacacacacacacacacacacacacacacgcgcatgtatgcacatgcgctcagcaaactctgccattcctgaatccacactgcacagtgcaatttagtgcatttgtagagttacccaactacagaaagaaatctcagtgagttttgttactaatatgttcagtcttaccctgttatcttcagtagagcagtcactcaaataaatatactactatttggctattctttcaactttgttcatcttagtgttttagaaagcgtaacattttcttagcagacttttgagaaggtagtgtataatctacctgcttaaaacccagagtcagtggtctattgacagtgcctgtaggtggccactagctgttcttcagtaccagactctccttccagaaactggctttcgtcggcttcttctgcagctgcagaaatcgagcctacatggtttccagcctcttccttctagcccactcctctgtttaatgttacattccgtgtcttgactttcgtcagtaacagtttcgtcaagataattccttatcaggatgtagttaagcctcagattccactgtttgggtgcaattgatttgcacttagctcagtgtggggcatttgaaattgttggcattttttttgctagggccagggagtgtccttgactggtcctttttctttttttcatttttttaaacctttgtcagagtttctcccttaattcctagaagtacttgccaagtcaaacagcattttatggatgctgacacattttcttccaaagagcctgcagttgcttcttgtggcctcctgggactgggtgggacagtgccctccccccacttctctcagcagcatattgccaggtggctggctcttccttgtgtgatgtgcttgcccctcccaaggtgacatataaatatcaaactgtagcaaga

SEQ ID NO: 32597 - DNA, 1152 bp, Mus musculus
cacagtgcctcatgctccggcttctccagttggagagaacacttgcccctggctcccctgggcttctgatgcctcctccgaatcccagagccaggtcatgatgcccaaggaaactctcccagtgccagctaatggcccaccttcccggacaccgcagagtctggtagattatgacagctccgaagcttctgaggaggaaaccacaagtgagcatttagcaaacagcaaacagacatctttatgtcaagaaaggtctgaggagatccagggcctgcctaggacatgggaggagcaaaaggaacatagcctggagcctttgctctctgcagagtccagttctcccttctctgccaagggtagagttgctgcagacgggactgtctggcaagtgggattgtttcttcgtacagtgaaatgccttgaggagctacagggagcaatttaccgtttgcaggagaaaaatctctttccatataacccagcggcacttctgaagttgttgaaaggtgtggaggccaagtgtgttaacgtctgagccctgggtaacacagcagcatctgtcctcggctttgttctccttgatagaaagcgtctacctaagataaataaaaacaagcaagaactgcaaacatgcgtgtctgggtctttgccttatggagcatagtagtgtttgagaaaggaccatcccatgacaggtcaactggcccagcttgctacagctgagagtttatgctagttcagactacacggaattcgccatgacaaatgactgcatattctgtagcccaaactaagtaagatttatcttctgagctcaagaggccagaagcttaaaatcaagatgtgcagtgtaatgtcctgggacgctgcacatcttatccatgatgcatctccatctctgcacgctctgcatcgtttgctaccatggttattttctcttctgttttgagcatagctttccagctggagtaacattgtctcgttgtagctttgatttgccctgccctgatcggagacatccactactcctccttgtccaaagatccagtttcaagttgaggaagaaaccctgtcttaaggcagaaaagcctagtcaaatagaagtgtggatgtcaaaacggttagggagacatgttggtgaggctgtgtgtt

SEQ ID NO: 32598 - DNA, 1222 bp, Mus musculus
gaacaaaattcaaagtcctgtatatcttttatcctagatttttaaatactccttttcctgaaaattaaagggtttaaaaatggctgctattttatattgaacaatgttgagcagctacctgcagtttttacttccattttgctttcccccccccgacttccctaaattctgctccttttgatgtttcctcatctgctgtcctgacaactcatcgccagccttcctgcccggcacacaggtattaggcacacacaccgtggcgagcgagcgggcacaggctgtgcagcggagagcgcctcactgaccgttggctagcacgtgttagcagaagccaaaaaagtggggtgatgtttgctctcctctctgtggtctcaacactcggctcttactcagaaaagagtaggcttgctttctgagatgtacggaattgacttacaggcacgttcttcataaggtcagacctgactaaaacaagacagtctcccaacactgaatgtccaagataacccttaccactttgtaaaccatttatagctttgaaagtattaagtgaccctttcatcattatttatgcatgttcatgaacttctgctgtatactggaataggagttaacacattcacatttactgtctattttcttgtgtgccttatgcgatggcttttctgactgtatctcaatagtctttctttctatgcaggtttgtaatcaggacaactactgttttctaaaggaatattacacgaggctcggagtttgtatttaaattacactgaccaagtcacaatgtattccgttttcaggaactgaatatctgactgttaatcttcccccatatgcccagtgtgatctggagcgtatgggtctgacatccttcacccagatgctcatgtgtgaacacatccacatccacggctctcagtggaagccagcctagagcagggaggacactgacagtgttgctttaaactgacttttcttaccctttgagactcatgtgttttgtataagacaccatcacaggaaagttttctcccttcagataacatattttattattaaaaagaaaaacaaaaaaagcttaagttgcactggacatgggaagttccctcaggactctaagtggttctatactgagagtgagtgtcaccgctgtgtcaacacaggtggtcccagtcaaaactccatcctttgagccctaattacatccattgtgttacaa

SEQ ID NO: 32599 - DNA, 1223 bp, Mus musculus
gcattagaatctgaattcagatcccccagaccacagaaaagccaggtacttggtgcatatctgtaaccctaattggtgtaaaggggtaaaggtggaacctggggctccctggccagccagagtagctgacgcagttagcagtaggttcatgagaggccctgcctcaaaaacgacggtggagagctgtggagaaagacggatgatgttttgcttctgatctccatacatgcactcatggttgaacacatttaagaacacagatgtgtacacatgcagcccctttctccaagtctggcaggctgagagaaacgtgcttagcaaggctgaatggtttgcagtctagccccaagttctaggcttcagcatcatctctgtggagatatatatataactaattgtatttacttgaattgtagcagtattgattctctttactttattctttggagttcaatcagaatgcgatttatattacctttggttttggttgtagaggttggcgatttgaaggagctgcagacactagacatttctagcaatcgcttgctagctttacccgagaggcttcacctgtgcctttctctgcagtacctcactgtggaccgcaatcggctatgctgtgtgccgcgccatctctgccagctgcccagcctcaatgagctctccatggctggaaaccatcttgcatctttgcccattggtaagtgttgtggttatatgatgactagacgagccaacacatacaagacaacattgtttccttaactagaacagattagcttagcgtctctctgttgatcctgatgattcctccgtaaagccatttttgacatgagcaacagccattatcgccagatgacaagggaggttattttagtcagggatgatgtcattgcttgtgttgccaggcagggtctccctgtatggccacgctgttttcttgaaccttcatcctcctgccttggcctcccatgtgccaccatgcctagctcagggatcccatacttacaaaatcagtcggtgccttcacagaatgtgccggctatgagaaattactctatgaagggaattaaaatgtgtgtgactgtaagtctgacagagagccttgagcattacgaaaggatgattcccagtacaagcacatctgctaagtcctgtttcctctgctcccttagtcctgtagatttaacccagggtcagacatgctaggcaagctctgtacc

SEQ ID NO: 32600 - DNA, 1164 bp, Mus musculus
atggagaatgcttacatttttttttttttgctattcattatcctctttaagaggtctgtattatggtccttgctattttttaattcaggttttcttgctgagttttaggagtttcctctatattttgagaatgtctttatcaaaaaagaatcactggaaaatattcttccagatttgccattttattctccaggtgctgtcttcatcagggcagaatttgttttatattgaattttcactgtgtatgtttttgtgtgcctagatacatagtgcataggtaaaggtcagaggacaaatttctggagtctcatctcttctacggtgtgtgggctctggagacgaactctggctctcagccatggcagcaagcatctttactcactgagctatctcactggcccagaaaaatcacaattttaatgatatctagcttatcaatcactccatgattggtgttttatctaaaaaattaccataaacccaacgtcaccgaggcactcctacagttttgtgttttactaggtctgtgatccagtgtaagttcgtttttataagcagcgtgagatctatgtctagattcatgttattttgctcgaatgctcagtgactcctacactgtacgtaggaaaggctgtctgctctccgccgagtcgccgttgggctttcatcgaaggtcagtgggtctgactctgagctctgttctgttccactgacctgtctccgcctgagagggcgctaggcttctcctcactcttctcattagtactgttttgactgtttttctccatatgaactcgtgaactactggttagtcaccataaaataactcccctacgttttgattatggcggtgctcagtctcgaggactgatcctctgctgtgtgagcagcatctccacctggctctctcagaactatccttgcgtggctcttgtaggtctgtagttttgtcgtgtgatgatgcttcacccttttgctagagttcagttcagaatcggatttttaagtgaaactgtatgaagatttcaatttgcagcgatggtgatgcaaatggtgttttgttttttatttcaaattcccatttgtctgttattggatgtgtggaagcaatcagccttaccttgctataagtgcctctcaggcccagggtttttaagacaaaac

SEQ ID NO: 32601 - DNA, 1161 bp, Mus musculus
acaacgcttcccgtcaggacttgacagtattttccactctcattccacggatgacctacctaagacctgatttgcctcagctcggtgagcatggctgcaaggcattaagagaggagaagcacgccttgtgtttgatgttcttgggccatgggtctcctctgcatcccctcctgaggcttcttcccaacagcaaaggccctcgctcaccggtctcccttccgtctacaggatctccgaggctgccgggaagtcaaggcaatcggtgaaagccaaagtagcattctgcaccagtgccccccagtacggcatgccagggaagggcaggcacagtgtagcagactgatgcgcccatgtgccgccccaaagaaagctccaagaaagacttggcattgcttgtaggatgctgaacaaacctctctccagctcgaaggtgaagttcagcagccactgcaggtttttaaggctgtttacttcagaatgcaatggcagtaccatgaatcttccacaccccaattgtgaatgccctttggggtgatatggtgctcttggttatcttctttcaccaaggagactctcctctgtcatctctgccgtggctgaaacactcttcccaagttggagcttcttgacaggaaaggagactcacctggtgacaggcagggctcctgctccatccagagccacatctggggcagcgagaccctgcacaaagcctccctcgtatgaaagtaatagtaactgagaagaaactaccaataaagagatgcttgtgctagcagcagtttgtgtgtttgaaatgaagactggagctggcaatgctgccccgggacagagcgcttgcctggactccatggagcctgctatggtttaaatgcgaaatgtctctcataggctcgtatatttgaacacttggttcccattgctgagaggccttgaggcaggagtccagttggatgaactgtgtcactggaggtgggctctgaggtttcttagccttagtcccattttctatgcactctctgcttcctgatggcagactcagtgggactagctggtggtgcctctgccacctgccttcctcaccattgtgtgtgtgtgtgtgtgtgtgtgtgtgtgtgtgtgtgtgtgtgtgtgtgtgtaaatatgcacacacacacccct

SEQ ID NO: 32602 - DNA, 1859 bp, Mus musculus
cccagcatctaggcccccagggcaggctgacagatggcaaaggccccacccgtgtgggccacagattatggacctggagctgtgcaccactgaatttaagaaggatgagtgtgctcatttgggattgttcctttacacatggacattgtttttaaagctcccatctcttaagacttggcatcacataaaaagaaaaagagcctctatagtgcagcagtctgtgagcgcagaatggtagctttcttgagtccgagctgtgcttttgaacccaggccacaaacctgcctgtggggcactgaggatcctagaggatgccatcttcaggtaggggaggagccttcttccctgacccgtgtgtgtttcacggggcatatctcccctctggttccagcaggtgggcaaaggagagtacgatgtttttcattgccaagtataagagaaacacagaacggcttaagatgatcttttcaaacgccttgcacggggtacaggaaggaagcggatttgaatggaaagcctttgttaccctcatgccaactgagctcagggttgtcagcctgagccaggagttactacggctgtggctcgtcatctcttatactgtcagagatgtgcggacttatttttttccataagcagaaaacccgagtgatttgtaagaatgtggccaaggtggtacagccttggtaccataatgcaagacacagtgacaatgtcgagtttattatgagtctaagtgggcttagctggatgtcattgtcctagttcatgaacttgtccatgggcgctggtgtgagcaggttataaataccgtggcacttctactttgaaaaataaatgtcttagaatgaaatactaattttcatttctaagttggaatccccatcgaggcaatgttatggttatgtttgaagaacctaccaggaaggaggagtcctcagctgtcactggttactatgtctccaccattacacccttgacattgtagcagatcaccgccaaagctccctgaggttttagaaatcagtcactctggagtcaaatcaacactgtgggagggcagggagggccccagtctctcccagtttgttattgttgagactacaggagactgaatgtttcttagcttcccactggttgttttgatcgtttgctttacagtgtttatttagaattatctaagaagcctattttgctaacctgttccctacaaagagaactgtcacaagaatgtgtagaaataaagatctgaggggggaaaaaaaacaactgtattgttcttaaagagaatgttttctggctgacttccatgtggttccttcgatgctgatgttccattcctgagtttctttccatgttttgatggtagccatgggttactggatgggtcataaatgttccttagttcctcctgagatcagaacttttccctataggttcaaactaggaagcatgcactaactagcttatatccaagtggatagtttggtggtaactgccatcccagcccggaagactgttgtcagcaggatgagacagccatccattctgcccaggatggaggagggagccaaggtacagttattcctgctgaacccagcattgtctggggctggagctggtcaagtagttactcgaagcacagtttgtaaggctattcatggccatttctcagtatcttaagatatagatatatgcttgaaacaaggagtgggtgactgttcgtctgtctataatctggccttttagcaacaaaaataaaaacatgagtagttgtatttcttctcacttgtgggagttaactgaagtcagtggaagatattactaagactcattgcattggttacatttctgttgct

SEQ ID NO: 32603 - DNA, 1186 bp, Mus musculus
caggttgcccaaattggggttcctcatagtgcatagttttctttcagcagctgcggctgcagggttgcacttggtagtaaaagggcaaaagatcagcatacaaagagcatagcgcccccccccaaagagaagactagaaaagggaagatgattggtccccccacaaacacttctgggcagttctagcatttgaattaggtctcctggtgcccctactctctggaaggattgtgataaggagacaggttggtgaccagtcaggtccccgtgacaaggaaaacctagctctgctcctggggcggtgactccataggatgttttctcggatttctttttgacccccgaatggcctccttatactttgctgagtaaatgttatcagataggatgtagagaaatcttttttgttccatctctcggtgggtttgagataattgggttattctgtgatgtgtctctgttcccttcagaagcctctgaataacgaatcggggaagcttcagagcagaagcagccagaaagtatccagtgttgcttccctcacagacccgggaagggaagcgcagagcagaaacgcccagcggtagacctccttggtagacctcctcacagttgcacagcctgtccagggggcctgaggggcctcctcctcacatcagtgcggatggatcttgccctcttcccccagctgatacctcttcctagctgtccactttatgaacacagcagggctctggcctcgatggccatacgggtttatgaatggaattctgggaatgtatacttttctctgaagaatgtttctgtagcgcaacaaacacttcttgtttgctgaggggtggggggggggggagaaatctttccaaagagtcactggatgccagagatggcgactaggggtgggctggagctcggggtgaagctgttcacactgacaatggacaaaaagtcagagcccctaaccttgccgaagaagtctgtcttgcaggattaatttcactgtaggtttgttgctagctatatagtgactatggcatttggtgcccatgcccttaataatacagggcttatgggtattcagttcttagcctgcgggtctctgagcctcacctgattgcctggcatgagtaggtttcagaccttggaggtggcccaatctcactgggaggcttctgaacttctttgg

SEQ ID NO: 32604 - DNA, 1234 bp, Mus musculus
acaacataaggaactgtattaaagggtcacagcattaggaaggttgagaactgtcgagaaccactgcaccagatagagaaaagtagggcagtttgggtttctttcaggtgtgtatggttccaaagaacaagtttcttaactatacaactcttcttgctttccaagttaaatctgatgaggggctgatgagatgaggtctgaagagatgactcagtggttaagagaagctactgatcttgtggaggccccacagtctatccccagacctcttgaggcagctcacgactgctgtaactccagctctaggggacctaagctatcagagggcagcagcactcaggtgcacatgcctacacatagacacataaaataaatgtaaaaacgagatctctgtatacttctgtaaattaagtgaaaaagatcccaaacggcacagtctctgaattatcaggtgtcagctggcgtactcattagaagcttgccagaagagatcctaaaacatagtctctaccttctgtagcaaggagctgcaatcacagggtggtgaccttccccgtccatctcgtattttcttggcagagtttatgtttttaacccgtgtgcttttaacttttttttgtaggtccagaggtgttatctggaaaagtgggcttctggccctgtttgtgttcatcctgtttctttgcaccgagagaagcccaaacacatacacaaagctgaactcaaaccttcctattgtttttccctagaggacatccccactttcagcttcacttcagggagcacagactgtgtgtggtcttagtgacctctcagctccctggagacagtagctagggtctccttgacttagctgggctttctcaggcattcacgcctgggtgggagtcactttcttctagaggaacccaaacagtaggccttggcagagtgtccttgagacagtatgtgtgagcctgtgtgtcttcccttagaagtatgtgtgactggccttgaaaatgctgtgggctttgaatgaggtttccctgggaagacatggctctcggttgtaacaccgtgtctgcaggtccgtgatcctgcaattaagggacaccatggcttcattttcagggcatctggtttaaaggcacagttaaaagaatttgtgttggtggttcccttaatttctaaaatacggctgtctgtggcttcatccatctggatacttgtattgagtattttattgccacataga

SEQ ID NO: 32605 - DNA, 2344 bp, Mus musculus
ggccctgcccctgtaacggtcagctaggtggagcagatgctgggtgcatacagaagggagacaaagagatttcatttgtgaatctgacctcctgtgtttctcaggtttgtagtagagtggcttttgaaaatcgtggagaataataggggagatgaaatgggctcagaaagattgaggcttcttcacctctcctctcacgtgcccataagcttcatggtggccactcttgtcaggcaatctctgtaccccaaacattttgcaaagaaattaatgttctgtaaagaaaaaaacaaaaatgaataatacccactgtttaaaggaaatcttaggcaaaggtttttctaatacatatttaccctaatgtgttttgtgtgtgtgtgtgttagagagagagagaaaatgagtgtgtgtgtgtgtgtgtgtgtctatatgatctggcggttttagggtggttttgtttgtctaaacctagggtatgcctaatatttgctatttagtgtattttgtaattacctcagtgccttgaaaagtcaacccagttcacttaaattcctttgaaccttttatatgatttgatgctcttcgaactagtacttgagaacgactacttttaagctctcagacgcacttagtttcagttgttggcctaattgcacaatatttttactcatttagacaagtccctaagggcttttgggatagtggcccttgttgtaagtccttccaactagaaaaacttcattaattgaaaaataatctccaattcacactaggttcaaaatgagtcatttttaccaagcatggcttaaagaatttgtttgcagtttttgtgtgtgatgctaggtacagaatcccagggcccctcacacaccagtcaagagtgtgttcccactccgctacacttccttatcctgagaggtcggtcggtgggtttgttttgttatttgagtgacatttcacggagtggcagaagtgtttgctccttccttcctcccggcaggcgtttctgcattatcctcatctgagctagcatgcagttgagtgactgtagccctaagctcattgaactgctcagcactttcccatgtttacaactgtaaaataataataattataatgatgcacccccttcttattattcaggtatcatacaaatgtgtcgttgtcatgcttaagggttagatatgtctgctacgttgtttgtttgagacgtgttgtgattctgcaacgcagcctatcttggagctcactttatagtccctgctggcttcgaactcaagacagccctcctgcctttcccctttgagtgctgggattgcaggcatgagccatccttcctggttcaactatgtgactcttaaggggaaagaactgcactcgttggtccatggaggcaggagaatcgggagctcaaggtcattctcagtcacacataaaatactaggccagcctgggctacctgagaccttgtctccagaaaagaaaaaggggaaaggaaaaaaaagaactaatgtattttaaagttggagaacagccttagacctgcagtggactgatgtctacttttcattttgtaaaatattttgaacatttctatttagcattcataatgctctaaatagaagcagaacactgtagctctcagatcctgggacaggcaggtcatgagggctctgactgtttggggacagtctgtgactcttgatgttttaaatgtagcaattatggccttgaaaaactgtaactctaatattggcatttgttggtcatctcagatgaacccaaactgaccattgctgtgtttgggtgaaacctgatgcttttgcttttttttctctgtttgcttttttctctatcataaaagtatttaattataaaaataagtgcttttcagatttccaccttcaatatattgactgtgggtttctgatgcagcatcagactggagcagcctgtcctttgaggcccagtgtttccatggcctggaaggaccctctcctgccgtcagtaacttctgtagcttctttcctcctagatgttcttccctgtccaccagtgaccaccactacctcttccccttctcctcctcctcctcctcccccctcccccttctccagatttcaggttcccgaagaacgagggagccagaactcatcatcttcatggcttgccttaccaggtatagccataagtccatttggtacctgctgtccactgaacttgacctggttttgccccacctgtgtctccacaagatgtatggttttgggaaatggccctgtcatcttatacttaagacaatgaatagggttttcaaagacagcatgcattctggtatctttca

SEQ ID NO: 32606 - DNA, 1174 bp, Mus musculus
cttcaagcgctgaaggcctacagtggggctgggtggcctgtaaactggcacccaggccatgcagaggatgtttctcacctctggcttcatccagggaggaggagatttgaccccctttggtcctttcccctcccactgttctccccttctgacctacatttccatcccttgatgaagacaggcaaaacagaagtcccactttctttgtctcttagggctaatttgctttttttattttgttgggttggggttttgccaaggatatgaaaaaggaaccactgttgtttggtttgatttggttttcctatcttaggtttcttggtttccttctggttcttagctacgagtaccaccctcaaagtgtcatggagtcctcagagattgagtacccgtgctggactgtttgtaccttgatgttctccttggtgggtcttagggaacagcatcttgtaatctctgtctaagggccgtttccatcctgtctgttactagtgtacgtgcctgatgaatgggaggtagctcgagagaagatcaccatgaaccgggagctcggacaagggtcctttgggatggtctatgaaggagtggccaagggtgtggtcaaggatgaacccgaaaccagagtggccatcaagacggtaaacgaggctgcaagtatgcgtgaaagaatcgagtttctcaacgaggcctcggtgatgaaggagttcaattgtcaccatgtggtaagaagccaagatgagacatggacagaaagtatggacagaaaggaccaccctgtatgtccttggccagctacgaattgttgccttgccctcttcccagtgggtagtttccccgttgcattcttgccacccacagacccttgaggtgggagcctcgccctcgccctcccaccagaactctgctcctggctacaggccccagcaccacccagttccgagaggcgtaggtcatcatgtgggatgcccccctccccctctgagtccttttcttgattcctccaggtccggttgctgggtgtggtatcccaaggccagcccaccctggtcatcatggaactaatgacacgcggtgatctcaaaagttatctccggtctctgaggccagaagtggaggtcagttttgttcctcgctgtgttatcttgcttggtccacttttttcaggagctggctt

SEQ ID NO: 32607 - DNA, 1129 bp, Mus musculus
agatggaactcgccctccttgaagaaggggaaagcagaactggttctccacccctcccccacccacagcaccccaagaattctggaggaagtggccatgggcaagcttgaaggtcaggttgtgggtcaaggtggtcctcacaccagcctcgtccccctccccgacctccctcctgcccctcccctgagggccacacactcgaaagggttccggggactcggcctggctgttggttatggatgttcgaggaagggattcagagccacagcagcctggagccgcccgcccaggcagtggatccaagcagtgtgagctttcacatggtctgttactaggacttcttcatgggtctctcagttctatgttagaccgtgaaacatttgcatacacatcgtctttaatgtcagttttataacttttttacagttcagatattcatctatacatctgtacaggaaaagaaaagctgctattttttttttgttctttatctttgtggatttaatctatgaaactttcaggtctaccccttcttcctttctgctcactccaagaaacttcctctgcttatcactagagtgtggtttttcttcctcttctccggcaactgatgcttctaggacataacttgccgtgaactgtttgatgccttttttataaatacatctcccttcccctgctccctgcagccccattcattaccctctaacccataggctctgtgagcacagtcacaggtgagggagtggggagggtgggagtccagagcccacagactcctgggccctactctctcctttccttgcttccccgcacacagcatctgctccagggcaaggcatgccacaaactcaggtcagaaacaaaaaggttaaaaatcccacacatcctggtttagtgtttctagtccctgttgttgaaagtcacactttgctttctctccttgctttggttcacacacacacacacacacacacacacacacacacacacacaccccaatttgggaatacaatagcagttttaactgcagacaatagtcattggattattatttaaatgaatatttgatctttcacacacacacacacacacacaatagctgctgagtccccaggatgcagcagag

SEQ ID NO: 32608 - DNA, 1108 bp, Mus musculus
acccagcagtcaccatgagcacagcacgccagtggaggggggctccccggcccatcctcagctggctgactttggaacagaactttctctacagattgaatgactgacaaattctatccctaagagagcaggtactcccaggttttgagggcaggaggcacccacacgtaggttgtcttgagagtcccaatgtgtgcacatgtcagggtgccctgtcagccccctcagctgctcctctgagacctgcaccgaggcaggggcatgccaccattgctctcctggcattggttcctcttggaggtacagcggtcagggagctcccccttctgcttctgacagaaggccagtataaaaaagggggcaagacgaagcctgtgccccctgcaggctgctgtccttccctcttcttccctcccttccccccccccccccgcaacccccagggctaaacaaggactgaccaaatcttgaggctggaaggccagtggttggcgcctagccttccccgtgctctgcctctgtccacccatccgtctgctgctcacaggtggacagtgcaatcctcaactccagcagctgctcttacaggccctggggacttcagctggggaccgcggtggctaatcttttcccccagtatggagaaactgcctaacagttcggttaagctcaggagcccttcgcctcctgctggaatgctgcccttctctgggttcctagatgctcacagggtcactgggagatactgtttgatcagggttttcttctacactgtaggtgacactctgggatagtggcctatcctctcgcacatacctgccggttttccacaactggatttctacagttcattcaattgattttaagggtttttttttttccttattattattatttttgaaactgtccgagttgttggtgttttgtttttgcgtgggtgttatttttttttttcctttaagtagagagacggcaccaacagcgtagtggccgtcataaactaatgctccagaaacacttcaataaaaagaaaaggttggcttgtacgagggtgcagtcgttctgctggactgacgcgccccgactattgcaaggcatcatatccaca

SEQ ID NO: 32609 - DNA, 1120 bp, Mus musculus
gcttacccaaggccctctgttgtcatcgttgggtcctctgagagtggccacagagtgctgaaagcatctcctttcctaaacactggcatccaggaggagacaggaccactccatcaaaatgctttggcccattttagcagtaatgaatttacggtttgggattttttttttccctttggtttttgtttttaatgttacttttatgtttgtctgatgtcttttcatttcctgggctaagcagctgcattgggagacctggaccagagagatccaccccttaagaaccagtgatgatggtcaaacttttaacagtccactttgaactaggtggtggtacaaatgagaacttcaagacaggatgtctgtgtaaaattgaacctctcttgccagagatgctgaagatacagaccttggacaggccaggggtctttgctttgggcttccagcttggatgaccagttggcgatttagagaaacgaacattccttgatgggatgacagagtgacggtgcagtaggcacccttggtaaccggcatcgtgacatgacgggaattgctgacagagggttaaagggcctggaagaagcatggaccatatttggacttgatggtgtctgaaggtgtcagagcatgtggaggctggggagtcaactgtgggcatttggtttcagataagacacttggcatcctgctctggaaacttctccttagagctaagtcacgtgcggaaggactcagactccatcacactcatcagatgagttgtcggtctggggcatgacgttagggattgatttgattttggtttctgtgagaacttcataatcactgatttgtgtgtccacatttgtgtctgcatctttccagtaaaccattctttaaattactcattatcctttcaatagggcttctaagtccagtagattacgggtagtcgttgacgaagctctggtttacaagaactaattcaatgtttcattgcatttttgtaagaacatagaataattttataaaatgtttgtagtttataattgccgaaaataatttaaaaacactttttttttctctctgtgtgtgcaaaaatatgtgtttgtggtcttttttccccctctttgtttcc

SEQ ID NO: 32610 - DNA, 1189 bp, Mus musculus
tgaggtggagggtggggtgggcatcccgggtgtctgcccatctctgcagacccgcccttggcactggcactctgtgaactcttctggcttagtaaacttttgtgtaagtcaccccaaggcgtggatttcattttcgcatctctgtaagccttatcctgggttcccaggaagagtttaatgcttttgtttttttccttaatgttgacaattagctgtcaggataaatactattgctgatagctggcacgtgttcaggaagcaccccagatgccaagactttcagacattacctcagaagacaagacagagaattggccacaaacacaaggttaggttagacaacagcaacttccttctagggtccttggcaagccttaggcgttcaagcattgggctgcaggtgtctgtctgtcctttcagatagctgctctctttaatagtcttttaaaaggcaatcaacatctggcctagccagttccagcatcaccgccgctgccttcttataaagttattctttttaaaaattgcttaaaaaattccaagtgtttatttggcaggtgggaggaggattggcagaagtgagagggccagagtataacttgtgccagtctggtctgttctctccttccaccatgtaaattctgtggatcaaactcatgtcatcaggcttgcttggaaacactctgagcaagctcactggcaagaaaagtatcaattttagcaacaattaaacttcccagaaaatccccaaaggatgtgctatttttggaggtaagtgttcttggtggataaagaaggctgatttttgttttgaaccatgttcacattgtgtgtgtgtgtgtgtgtgtgtgtgtgtgtgtgtgtgttcgtgttctacttgtccaggatgggatgaagtccttctcttcttccctttctgtctccgcctctgtcttctataatatgactagagcctcatgctttgttaagtgtctgctgaggtcagttctaggtgctttggcacatagctgtctcagtcgcgtcccttggacggtcactagccctgtgatctcagtgtctttataccttctcaggttgtcattttcctggcttgttagtttcggatagatggatgggcccagagaataattaagatgaaggggaaccacttaaaattcatcttctctaaagcatgtttctgtcctcattt

SEQ ID NO: 32611 - DNA, 2501 bp, Mus musculus
gctcccttgcacgctttaaaagtggatgaaaataggaattggaaaacgggaagtcctggtggtgagagaggaagtgaaagagtgcccagactgttgagcagaggcgtcttaggacctgggatgttactgaatgttactggagtgtgctttgaccagggctcacacacagttgtgaacttatggacttggtaggaagacatgatttggggaacaagacagctttgaaatgagtgagaatgagcgagtggtctactttcaatgcagttgaactccccagaccttggggtcttcatgatttcttatcatgttaccatagcaaggatccaggtccttgctggagtcagtggtcatgtgacatcctgatggaactgacagtggctccaggctttcgtgaggaagctagaagggattccttaacagcttgccatatcaaaaggaaaagaggaactgttcatgaaagtgtgtgttgtgaagggctgtacttacacttttaagaactgcttgcagggtctatgtttgattttcctcgtcccttatttacctagggaatattagaaaaaggaggagtaggcgggacatctttgggatacctgatactgacacagaacagagtgttctcttatcctacctctagtggctttgtcagacctgctctcaaaagtccaggcctggctgacctctggggtttctgctctatgcagttagcagactcctctcaacctgtcacttgacctgaaaactagaccaagggaaatgtccacgagctcagcattaaatagaaataaatataaacacctaagatcttaagaaatcccaaatcaaaagaggacaggagcgtgcctaaacttggttcctgtgaagaggccccagtgggtgggtgacagtttccgtgtagtgcatttgtgttccagtacattagtaattacattgatactgtgattttttttaattgttttggtgcaatattttgttgtctttgagcctcaggatattaagacctaaggactgtgttgttgctggcagagtcagccatgtctctaccagcctcctccctctgttcacagtcacatgctcagcctccagtctgttgctcccatgaactgagaaaattttctgacaccaggtgggagggagcctctcacagttaagagctggacaagccaaattctaagggtttgatttagaaaccctggtgcttcccaggcagagtgttgtgccacacccatcgtggagatggacttacctttcagtcaccatgtttccttagagacattctcctagtgtgaaattttatatcaaaagtcagtggagcattcgttcagggatttttgtaccaatgtccagtaaatgtgtacttctccccgctgagcatacctctcctgtggtcatcctagcgtcagtcacatgtatgtcactgtatgccattttcaaaaatgccaaatggtattgccagtaactgtggtgtgtgagaatcaccacggaaccctatttcttgttttggttttttagagatttctttcttttcttttctgttatgtgtctgtaaacagttaggattgttcacattccatctaaactgcttttatttttgccatggaaaagatggtgagctgtcctttttttagcttccagcctgtagtttacgtgctatgtcaagtcatggtccatccataaaaccaaaatggagggaaagaaagcaacagtacggagtggacagagagaaaatggagcgccgtggctcactgtagataagccctggcagtcgggttggttagagaaatcatgaagtcccccacagaacggaagcacagctaacagtggcattgaagagtgcaaagatataactttatacctgtctgtctggcctgaagcttatacccaggataacaggaatgtagaaaactacatctgaaaccctgtgactgaagatcagacttttagctgctaacacttgcctgtctagtcccctcttgctctcatttagtttgggaaaaacgaaaagtgcccttaggattttcttttggatgcacaaagcttgcgattcaaagtgagcatcttttggtgcacacagacccttcccttcccctggagcacaactttactttctgtgtctctgttttgcacaataagaaactcagtaggcaaaggttgtgtttttttttttggtaagttcacttgctttttaaaatttttattaaaaatgtaataatttaaccaaggggaaaataaagattgtattttgtattcttctttgaaccccatgggttcctttttgttaataaaatggttatactaatgatctgggtggctcatttttttcttcctgagttgacttcaaagactgagttaaatcattctagacttaaggaaaatcagtagccacacagacagcatcctgttattaaggtcatttgtttatgcctgagatcaagcccaatctggagcctactaggtctgtacacagggcagatgtccaaagacatgcaggggctagcaatcca

SEQ ID NO: 32612 - DNA, 1175 bp, Mus musculus
gacagtacatcctcaatattttcttttgcattgcattttcaaccttaatttacatgatgtgtatattacataaatatatatatatgagataatatagcataatagtcacatatataatatcttatataaatatatgtgtatttatatatgaatacaagatattagagcttcattgtgatctcaaagttattttcacatattttatagaaccaatatgtcaactccatgagagactttttctttgacagtgggtaccattttgattggattattttcattttgcatcacttcaggacatctatgtgtctgtcattgtcctgacatttttttagccatttcgctgtcttacacccgattcagctggtggcttcatatatcaggctcctctcccacctcctcagatccacttcctacccaggttccctttcaaaactttccatggactgttgtgtacagttctggccctcagaggaaagtgcacacagttggtgtctgcctccagccagcactctggccagccatgtgaggagtagaggatcccccccactttttttttcaactgagttctggctctgagactttagaaaaacagatctgttgccctggattcagtaaggggatgacagagatgattaatgggctgcggggctgatctgaagaaagattaaaacaaatgaagggaaacaggttgtccggtaaagaggacttctggacaggaagggaaccttgacagggggcctctcctccactgcctctgccttggctgagtcctctctgctgggcaccacctcagaaaagaaccttcaccaaactgttagaaagaaactgtgacaatgtgcctgggtagcaagggctcccagacagacggacaacagtaccatcctctcctaactgatttattgtagcctaatatacaagaatacctgggcttatgagactgtgacaggctctactgtttgcatgaaaggcatatttatgtcaatacatcactgaaaaaagatcaggtttagccacaaatactgtagagtcaacttgtacccttgtactcgaacatcacagattcaaccatgcacaactaaatattcttaaaaattgcatccacatgaaacaaggacaaacatttctctgtctttgcatctcatataaaacagtattgcaactatgtatatttgttt

SEQ ID NO: 32613 - DNA, 1154 bp, Mus musculus
agactgaaagtttcagggatcattgcctgtcactctccaccttaagttttgagaccgagtctctcaatgaatccagagctcgctagttcagctagactacatggccagtgagctcaggggctcatcctgtctccacattcccagtacaggaatgacagacacacaccacctataatacccagctttgtatgtggctactgggatccaaattcaggtcctcacgtctgcatagcatgagctttacccactgagtcatctccccagcatcctgcttgttttctttgttggtctttgttattgtggtagatctgagatttttgctggtagatcattggttaaaacaccaaaaccgaaaccaaaaaactatgtaccatcaatacataagcctgattaatatgaatatactttatgtaattgttactataaacaaattaataaatgtgcccctcactgtgcatagctaccactttacttgtacaatgcaatctgtgtgcttcagatgtgctctttcttagtaagttccacacaaacagcgaggagctatcagacctctagaatagcatagccgtcaactaaaaatctggacccaaaacaccaacccttatactcaccactttggcctctgtctctatgagaacattgaggagtaggggtagagagagggagagagagagagggggggggagagaaagagaaaagagagagagagattgagagagagagagatctagtcacacatgtatagagagacacacgtaaaagagttgtaaaaacagcaagtgtgtctgtttgctcccaagctgtggcactcccaacattagtcataagatacttgggtccatttgctaaaggctaattaacctccttattctctctatggaaagaagaggaaagttacaattgtattggaagcaactaaagaacatgttgtggggaaaaaacaacaggtagataaaagtacatgaatgaacagtaggcaggcagttagtaaacacacgccacgttcctggatttgggggaagtttgaggtatttgtcaagtgatgaaaatatttatcctgctgggatttattttcacattacattttacaaaaatatttattaatattttgaaattaattttgtgtttatgtttgaatttgaggaaatgttcta

SEQ ID NO: 32614 - DNA, 1229 bp, Mus musculus
gtgcagatcccagggagctcgaagtgtagagaaagcagcattccctcagcgtggattggctactgcgaatggaaaaccagaacccacttctatcagttgacattcattctgggaattgtttgcctttggatttgaactttccattcttcagacaagtgtatctctgatcatctctccctgaacagggacaactcagaccacattgcttcctttggggctttagagcgctatagacaaacataatccaagtttgtgtggaatgaatatttagtatataagttttgggattttttttttcaaggaagaatgtgaggtaatccctgcctttgggatacaatgcatattggagactgcctgggagagagacattctgtaatgggactcctaagccacggacagaaccccacatggatgtccaggcgggctgtgctcgagacggtgctcggcaggcgttggcccttagtgtctggctagctgtatctaaaggcctgtatctaagcctttcctctgctctacatagttgggcaatacaaagcccattcgtttccttgtgaactgtaactgagaaaagcagctcacaggtctgggctctccttacttagttattcttgcttttaacttatgtaagttcctgtggtgactccatgtaatatgtagtgaaattactgtatatagtttctattaaatgttaaaatgctatcaaaaaaaaaaaagaaagagagaacgagagaaagagaaagagagagaaagaaagaaagaaagaaagaaaggaggaaagaaagggaaaaagggaaggaaggaaaaaaagcagctgaaaacaaaatgtaaatgcccagaagatgtgtttaaactaaaaaatcagcaataaaaactcagtactgaaaacgttaagctttagttacagtaacaaagaatttacatactccctaccaaccctcaaatgtgagccttaagatatacggaatgcattatgcagacccgctaatgaaaatctatatcccataatttgcaacctgctggctctgttatgccaagtgcatgttaaacaagacatttttcaacctaattgcatggcatttctccgggctctaattgtgttaggaaaatacctctttctatctctcacgcacacccagatcactttgctttctgcctcgagcacatcaggaaaacaaaacaaaatagatgactcctctttttgcaacatgcaggaaatttccaggacaagt

SEQ ID NO: 32615 - DNA, 2222 bp, Mus musculus
ggggtagccaagctgttaaggtggcaggaggctggtcagcgtcgggttgggttgggttgggttgggttgtgggacagatggattttatcattgaatggctcttctcagtgtatggatactgggttgggccttgggttttactcactttcagtatagcttgccagtattgttaaggtatccaaagcctttctagatagagacaggaacattgacttgaacatatgtatgtaagagtccaggctcattctgagttgatgaaaagtcttgtttggacttctgcagggtttgactccctggacactctgagtggggtggtcatccaggcagtactattaatgacctccccagggcaggcatgagttgtgtcctgagtggaacatctggccatgcatggttgtgatgggccattgctttcgctgctttagagcaccacagacctgactgctgccgagtcggtccctgcagctaatgctcgaagaccttctgggctcctcgtggcactaggcccttcaccttgactgtgtgcatgcatgacctgcaatagagcccaccaaccacatagaagtcccctggctagagtctgatgcctggtggcttaccggacttctcagtcaattctgaaaggtatattttgggcacacagtgaaaagtgagccatagatggagcttcttgctgatcacattgacactgtctgtgtttgatttgctgagctcttggatgttgggagtgtagcaggcacaggaggtacctctgcagaaggaaggcggagggtggaggccttgcctttccatattcacctaggtcttgtctttcaacttgttggtagaagttacaaattattctcaaaactgtctgtctcatcatgaggaaaaaggaactttcttttgttcctattcaggacttgaggtatagtgccataaaatgtagcaaaaaccctatcggccagatcagtgttacattgattctaagattacagtatgtcccatcaaacatctgctgtaggtgagggagtggatttgaagaggggttgaaagaaaggaagcattcctcttgctttaaactagtatgtgcatcagatgcttacagcagaagtttgcacaggtaagagaagctgccagtgacgttctgtggggcctggctttgggcagctgctcatcattgaggaagtggcaggacttggaggaagttatgtgtgaatgttgtcaagtcctgaagtcctatgatgcactgtggccctagaaaacgaagatgaagcctccactgaccactgtgtcctctctgacttggccagcctgatggtccttccttctactctgtgtagtcattcctaagccccacagagggagcgccaacatttctcactgtgctgctgaggttctgacctggtgtgtctgacattgcatcaggctttgcagaacaaatgtgattcacttaaacgttcacacacagcaacactgaaatcctacagaccaaacaaacccacttgtcagcaggagccgtggtccagcccagcacctgtgctctcgtagccgaggccagccgtgttgggaagagagccatgccaagggtccaggctgctgtagtccacctgtgccctactcatttggggacaggtggtttttcttgtaaacttgtggacttttgaaacctgttgactaaacagtaattaatttatatttgtgaaaaatgccactgtcctggtgatttctgatgtaaataatgttgtttatatagtatgtattaaattttcctacattgtaaaactgctgtacttttttgattcttgtatattaaaaagtgttactaaggatttttagaattgggctaaccagttacattacattctggtgtgaggcacacgccacagtctccctccctggctggctgcaagctgtgtgtccatgcttgtttacatcttcgacaatggaagctttttaagttgcatttttgttattggttctaaatagttttctgtccctgaacagccacaaaccacagctgcgtacttcagggaatggcatggagccattaaaactgagtcatgagaggttgccctcatctttcacagtggtcatggggagcctgcttcaaacatccacctctgtccagagagaagtaagacatcaggcctacagcctacagctttagtgcagttaatcagttgggttatatactcttctcttcttttctctcccctcccctcccctcccctcccctcccc

SEQ ID NO: 32616 - DNA, 1385 bp, Mus musculus
tttactttgttatatctagaattatgtttttctataattattttgttgtgttggagactaaacccagggtcttgcttatatgaggcaaatactattgagctatgccttccttgtatttattgttcatgtgttgtaaaggttttttgtttgtttgtttaccttctttttacgtttttgatgtagttcaggctagtctggaactatgtcgtcaaggctatcctgaattttactgtgtagcttagatcagcctcaggctgtttctctgacttcatttctgggatcatcatggccaaatacattttatatttataattcatagatgtgactgaaaatcctccactttttgagttcatttaaattaaattcattttcttgttattgcatgattgaaacatttgatcttcaggaatattttctttttgtctgaaataatagcaattttcctttcgttacgaattttcttttttgtcataatttatataataattattcaatactaagtaaagcttatttttgtagtttcctgtatcctgcttatacatatagtgtgagctactcttgagtttatctgtgggcatgcgtcagagcttgaaatggggtacaagtaggccttgagtctactgactcaaatctgtaaataactgttggagtcaatgtgtggttcctatttgagtgctactctgtagagatgcttagctctgaaggtgcagtctcttactcatgcagcgttatttctcacacagttacaaagaagatgatgactttgagactgattcagatgatctcattgagatgactggagaaggaggtgatgaacagcaagataatagtgaaactattgaaaaggtcttagattcaagactgggaaagaaaggaggtttgtgtctttggggagcaaattactcactttggatttttgagacagggtctctggtagccttggctggcctctaacttgatatatagacaaggataaccttgaactcctaatcttcctgtctctacctcccaagttctgggatttcagttgtgcaccaccattttcagtatatgtggtgctgaggagttgaatcaggccttggtgatgcttgccaagcactggaccaactggctgcatctggagcccacaaatttttgtatgcaatttatatatgcatatatgtacatatattcaaaaatccaatgttttacatattctttaatgtgataaatatagtccacactagtattttgaattgtagaaattgtcctgacttatttcagagataaagacaaaataatgttttttttttaaatttaatctagttagatagtacataatgtagtgatgaaatcataggtacttactcattaacacagagcaaatctgtgtttagttagctgtt

SEQ ID NO: 32617 - DNA, 1859 bp, Mus musculus
gtattttgtatttcctagttcatgtaagttgtagtgtgagagagaaagttattttctaatatactcatattctggtctcattaacttgagatggaatacttttttttagtgatggggcagaaccttggttcttgagcatgctcagcaagcaccctatctcttacctccgtccccagtgcccagatttgtgacttttaaagtcagtattgtgtactgggttcttacatctatagagttgcccttgtttcatgctttccagattgtatcactattttgtgaaatctctccatattagatttgtagagtaaattctgaagggctattcttactcctgtcttagtgaaatgtcccctttctgccttaagaggattttgcacttcttagctatgtaacattcttttgatggaagctatgtattgacagccaaatgctggggagttaggtacaggttttattaggtgtcctcagaaagtcagattcacaccaacaccttcatgtttatgcatttgagttgtgagtggcttctgagctggtgagcctgggcttccctttcccgtagtttccagaccactgaaccatgctccttgtatccagttactgtgtgtactcgtcctgtcttatacgtcagtacatccttagcaggacccaggactaacagcagtaggaacagtgccattttggttcatttgggggaagacgctgtcacactgtctgtgactataatccttccttggcctagtgctgttagttcttcattcatgattgctgatgctcattgagtctaaggtgactaaatcagtaggcagtgcctttaaggcgcattcattaaatttggtattttttttctaggttgttagatctacagtggtttgtgcagttactgctagcacatgtggcttttaaaatttatatttagaattatgtaaaatttaaaatttacttctcagccctagagtaggcacatgtcaagtgctgagttctatgtggtggctggctcattgtgttggagggacatgatttaggtagttagttgtatttgtatttgatgttgctgctccacatgattctgaagtgtaaacacgagaaagagacactgtattttcaaagcaaaagaagagtgggctgcacctagcaagtactcaggcttcatttcatctaaagtcttcctgtgagttaaagtctaatcatctttcccctcccacactgaaggcaagtagcgggtctgagagtgggagtccgaaaagaagaggccagaggcagctgaaaaaacagtaagtctttatcatggggaaatgacctaatctgacagttttaaatatgtctgcgtttatgggacaatctttgtgttctgtctgtcccaggtctcaagattctctttaagtttgttagagctccaacttccacttcttaagtgctggtagcctaattagctcagttaatttttttcttgaatgtaaacaaataccaaagtagacattgcattcttgcaatgtaaagaagatttaaattggccaatctcatgttgatatggtaagattcatattgtttgtgcacttattttattatgaaatacataatgttttcatataattctaagattatagtttgtagaccagaagcttttaattcttgagtttagagttaaaaatttttttttccccctttggttttttcaagacagggtttctctgtatagccctggctgtcccggaactcactctgtagaccagactggtcttgaactcagaaatccgcctgcctctgcctcccaagtgctgggattaaaggtgtgcgccaccaccgcccggaagagttaaaatattttacaacaaattatattctgttcattattttttgca

SEQ ID NO: 32618 - DNA, 1123 bp, Mus musculus
ggctaggttggacagaactggactggaaactctccagggcccaccgctgtttatgaggagttcaggtgggcacctaccctgggagctgggtacccaggggagccctgaggaaacaggctctggactaactgctcaggttaatggaggcctcccacttggccttctcccatattgctgtagcaggaatgcttctgtgcaaatctaatagcagtgcctttgggaccctgggagtgcatcacgtctgggaaggtgacccttgttatctcagttccttttcatctttgtcctagggtttgtttgtgtatttgcctgtctaatgccctgctccattgctttggatgaaaactcgtaccttggccagctccaccactgtcaggttctccagttctgactggggttgtggtgatggcggtaggtgggaagatccaccctggctcaggagcctgacttgacactggttctttcagccctaagccagcatctgaggtgtgctgtgctcctgggatccattaatttcaccttttcggctggcttctctcatccttctgccattagccagaggggcgggttgtgaactggagccggtgactgtcctctcaccatggactgaagcacagtggtgactctaggaagctggccacctcgaagctgtacatcctctcagccttggagccgggactcgagggtcccagaactgcagctgaaccatctggaaaagctggattctctattctcctgccttatgtatgaacaccacggatccggctgccagccactcatcactgactggcaggagtggtgggacagtgaccttccaaatccttgatggaacttcaacaccgtaggcacttaaataaagatccttaaagcaaacaaaaaataaccttcagattgagtcacgagtgtgctgggtttggatattttctgatggagcaagtgagctgactcgctggttaagaacatgaacacgtgtttaccttaggaacagcttccggggggtgagcaggggtttctggggagggggttgtctgtgcccttgtgatttagaaagaggcatataaatggaatggggccgggaaaacaggcccagccctgccctccccccccggtccgtccacccccc

SEQ ID NO: 32619 - DNA, 1255 bp, Mus musculus
actgttttgtgagctgtgatacttgtgatcataaacccacaagctcctaagtgatcactgtccagtccatgaaaatgttagtgacaggtcccaggtcagtcctgaactctgtgcattgaaagtggctgaacctcagagcatcaccttgccatttgggataagaatcgtatgggtgttggggggagggaagatctcttgcaccagcacacttaagacaatgtggcctctctcatcaggggatggatcagatgggagcatatatatccatagcaaagggtccagtcagctcacccttcatacctctttattgaccttttttgtagacatacatacggtaccaaagtcgaccacaaaggatgcttggtttcatttttccaccttaaacatccactcacctgaagcaatgaaagaataaggccagaagagtaaagacatggatgttgtgccatattttctttttacagatagtataagtggggaagactaggtaatagcctcaaagtagagaagacatcaagcaaaggcaactgagaaaatgtctgtgtggcattgtggctatggttgaccatctcattcagggtgcttctaaaacagccctcccatctgtctaccaggagttagcctatccttgttgatgaacatagggtgctcatcagtatagtaactaggaatggggaacagttctccaaacagtttgtaaggtgatgttctgtcgctctgaaggctttgatcatgctccaaacaggttttggttcagtcttgttttgaaaatgaatgactaatgggtgaccgccctctctgtcgtgtgtctttgcaaacggaggccctgggatgtactctgtttcatgacatgatttgatttgatttttggaaaaaaaaataatgatttttaagctctttgtatcttggatttttttccccttaaaatgttcttaaagatagcaatggaacccaactccagggcttgctttttatcaacagttatttataaatttaaaatctccctgtggcaaaatgatttccatgagtgttgtgctctctttcaatttttcaatttttctcatgaatgtcaaaaaagaaaatccaatctacttttcactgtgcatccaaggttagatccagccccttggttgtctgcttggttttgagtggtattctagatgaaaactgtcctggtaagatctcccttgaacatacagaaaacaaaccggggatggatggagaagacgtatgaaaggaatgctggagtgctctc

SEQ ID NO: 32620 - DNA, 1202 bp, Mus musculus
gcagttgtgcagaaaccgacctgtaacttggtgcttgttgatgacctgcaggctggtcttgcagggacagatagttatctttcagtttacttgaaagagttctggtttaaattttttagcctaaatttgttttatttattttgtgtttgtgttgtgttttattttattttgaaagtgaccgaggactggccccgcagtgtaaaccctgttttcagtacagagtgaagtgtctgtgcaggtgcatgaggccctgaggaaagcggaggttgacatgggagctcctcttccgtcccatgcccattttgtcatgaggaacctttgctctttttgggaaatttttaaagttgccccattggctacttttgcctctttttgacaagattggtttggatctttaaagtctggggttttgtttcattggttgggttgttggttttttttgttttgttttttcctactaaaactatgatgtacttccctgaagaaccgtaacagcaagaagctagttgctcccttctccaagtccagctttgacttctcctgctgtcacagcagagcctgccatgcctcaaatccaccacagggtttcgctggctgtcctcgcccctgcctctgcctctggccgccccctcagggagactacttccactgcgaagcacttccacttgaggggaggagcctgactcccacctagacctgacagaaaatcagagagccctgccctcttccctgtgcagaggaaggccagtgaccgcctccaggatcactctgacactgcagtgagccactgtccacccggggaagcttcattcctcgccccccactcaccctccccgtaccctctgacccaaccagctgtgttgtgtttggcttgctttggttgtttttaaaaaccaatctcaattctacccacattccccaaaacaagggtcatgacagttaggagaagttagaatctaaagcagcctctgcatgccctaagctgcccagcttctccaggaacgctttgacctgcctgcaccacgccgcccctcctgcctgtcccgcacgcacgcacgcacgcacgcacgcacgcacgcacgcctggggagttgctgcttgcttaggaccctgaagattgctgtggctgagtcagcagccttctgcggattctcttctgtgagaagggtggtttgccagggaccaggcttgtgtcctgtcct

SEQ ID NO: 32621 - DNA, 1311 bp, Mus musculus
gcccattgctagccccgcccactgccacactggttcttcccagcctccctcatagcaacagcaagcacagatgtgatgaaccattcagggtaacatcagtacacacaggcttagtaaaggacacaacctgggcccgtaggccagagcttgcctacagtcctctccatgcaagtttgtaatgtctcctcctatccccgaggctcttgtcacctcacccactgttcttgccaaggctcttaagttgcctttgatacgtacccagaagacagtcacggagtgtgggcgtccttgtctggatacctgtgtatgggtgcctgtaagagaagcagcgacacacacacacacacacacacacacccctgcagagaccagctccttgttttctttcttgtagcataacattcctagttaagtttgctgcctgctggccaggtggagaaatgcaaagtattctaatgctgccataagcggggaggggtggcagaagccttttcctgcactcacaagacttactttgtcaaatgatcaacaggtcctgagttacttctccatctcaactaaggtgtaaagtgggtttgccccactactgcaagtgtgccctgcggagaaaccaggcaggcgctactgcctcagaccccagagggcctctgcagcaagcacagaacctatgccttagaaccctgctagcctcagctgccctgccttggttgacacctgctgggattggcttgtctcaggtttcttcctgaggcctgggctctacagaaggtgggcaggatacacctatctatacctctgttcttgttaagtcgtctccaaatgctgtatgaacatttctgtactaagccctattaaataaaaagtcgggttaaacccaagtgctgtatagtaatttgtaattatgtataaaattaagcagttttgaactgtaaagatttttcagtgtgttttctggaaatttgccacaacatactggctttgtattttatttatcatccattgtagttactggcttcaaactcttgtaaagtccccctcagacctttcaaaaataataaatgtctttgagatcttgacctctgccgtgatgtatttgtggtaagggagtattcacctccctaccctggcaagccatctgtttctgtgctgttgggagtagggtgtaaggaggagtggcctcccacagcaggcaaaaccaggagatccgccccaaacctccagggtcactgacccatccaccctaagtcagagtccaaaccaagcgtccatgaagtcagcacagtcaggttcaagctgctctgctgactacat

SEQ ID NO: 32622 - DNA, 3374 bp, Mus musculus
tgaacaaagcaactcttacaaaggacatttgattggggtggcttgcaggtccataggttcagtcctttattatcaagcggggagcatagcagtatccaggcagggatggtgctggaggagccaagagttctacttcttgatccaaaggctgacagaaggctggctcctacatggctaggaggagggcctcacagtgacacacctactccaacaaggccatacctccccatctgggccattccttggaccaagcactaatgcaattaattacagggaaaaactttctttaccccctcctatatgtgtttttaaggttaagcctaaaacaagtaactaagaaagaagcaaagtttgttcagctcagctatccttaataattacggtcctcaaactcatcagagacctgctcaagtggcattttatgtgcttaatggaaaaaagcctgctgtggcagagactccagctcctagcactcaccctaaggtctctaaagaagattagaaggggcaccaacgactccacctgaattgtggtaatgctaaccactgggcataactgccccaatgcctcatccgctgccaggaccctgcctaaaccgtggacaagcaggacactggagagttgattgccctactttgccgagacaaagcgaggtcaatttctcaaggtcctcctccacaggaagaaggcctctctgatttgccaggcctggcagctgaagatcgacgcagccctgcgacgtgtgcccccaacgaagccacggacaccacaggagcctggtgggttggcagctaggtaatagctaactaagtctctgttttaattgatatacaggccatttggattatattttcttttgtaagtttatccttttatagttcatccttctcagatctctgatgacattgacggctgtcagtttccgcagcagcagcaggcagctcctccacctaaggctttggcatcctcattccttttcctatgtaaaaaaccaagccttgctaactctagagttaccaggtctcttgttaagaagcggcagacaggtttgccttgctaacgggctaaaaattaaaaaagaaacaggtttcagatgtagctttttaccgtccctttatttaaacttgctttgcaatcactgttctcagtagcaactgctcatgtctctgacagatgcttggatggaggaaaaaaaaaggctcaaagtctgtaagttctgcgtgttcagaggtgtagaagcgtctgaggatgtggggcctggagtcattgaaggtgattaacgcgagtcataggaagggttttaaggtagctgaggaagtggggaatctcaggtctccttccccagctgtgttcttgctacgctaagatttcagacgttcagaactttagtatttatcagtggagttgtgacaagctggtgtggcgctggctgctcactattcaatcacaagctgaagattttaaatttcctttagttgtcttttgtgtagaaacttaacggtacttttcatcatgctaaaggcatctgtgtccaatctctacatccatccctctggaccgagacacgaatgttaatgctttttaacccaaagccatagcttttgctaggactcaggcgtgagtccactccaggtgtttaacagacgcctgttagctggcttttctatgatgtggactttttttgtacagattaatgctaatagatctaaaacttgtatctttttgtaaactaagaaaattcatgtaagggactggagagatggctcagaggttaggagcactggctgctcttcccaaggaccagggtttaattcccagcacccacatgacagctcataactgtctgtaactccagtcccaagggaccggatgatgtcttctggtctccttgtgcatatgtgagctgcacagacacacaggcaggggacacctacatatgtaaaaattaaacattgaaaagataaattcacgtgagcttccgagcattgaaggagtcattaagacttggacccacctctcacaggtcacaggggctccagataagtcctgcctaagcctgtctatctgcctgtccttgaggctgggatctcttacctggtcttgggactccgcccctcctctagtttccaggactgtgggcctgaaagtgccaaatgtaagattttcctttaaggtcctaaactttaacttctgtcccgagtctctctctgtctcagcagatgtccacttggctgacagacgccctccaggaatcaactgcggactaccaactgctccaaaaatgactctgcactctggactggaggaaagctgatgtgaaccagcccagccgatgtgcttgctccctgtctcttcagctgggtcatctaactggatgcctctgatgcatgtcccatcgccggaatccctccctgcctttgactaacattccagccttcctaggccctggcaacatccttgtttcagcaggaagtagttacagaagagagttcgtcgccccttttccccagctggctggaatgttagatcagaaggacattcactggcgtgggggacaaaatggctacctagactgcctattggcatcctaggaaaggtacctgttgaactcagagactcagatctatcaacaggtagattcattagctgaaatagttctacagagtgacggggcatgggatctgttttatgcagcagatggaggtgttgtgtgactttaagagaaaactattgtttgtatacaaagcactcagggatcatcagaggtaatctgaggacccgcaatgaagcaaatggctgtttcccagtctcatgctccttctagttagcaactcgctcggccatctcagggtctttgaccctgtatttctgctgattactattggctctggctcatcaattaatgccttaactggataataatttctgcctgggtaccattaagctggtggttattggattctgatgtaaacaggtacccatcacagagtcagggattcgactcaggatacaactcaaggggagaatgtgagagatagttatacttaaaattttaattatggtgccttaagagacccactaaacaaaaatgcctctattgtagaccaccttcctgaaaggccgggggctgccatctatgggagatagcaagccacatgttccacactccctaaacatctttgtttgacacaccacactggatgtgcttgatcacatgtagtggggaggcacgtgggcaggaaatacatcaggacatatgtttggacctgatgggaaatgcggtggctttatgggtttgcctttttaagcctaaatgtgatgacttattgccagtctctggaaacccgggagtggacctggccagagtctatcat

SEQ ID NO: 32623 - DNA, 4446 bp, Mus musculus
aatgcccctatcgaagacaggtctgttcccgctggggccagttttagctttaagagcatgtagtagggccatagctctttaaaattaggcccctaggagcctatggtaaccttttcagttggggccaatctaggggccgtctttacatttggtattttacaaaaacccttggggcccctcaccaatcagacagtggaaatgcaggggcaacaggggaagtcaaaactataaacagactgcagtggactgttaatccagggaagaggacagtgactcgttcttgcattgttctccctgactgtgcctgtttactttgctgggaagagacccaggcaagtcccgggcaacttcttaggagatgagactaaattatagctagggggtgcagccaaaatcctgttggtcacctgtttcttaagcgggaagtgccttctccatcaccagggtccaatcctaaagagaaatgaagagaacacctgccagagatgtttctaagggtttgggttaaggacaatcctcctgggagggtttagcatgtgttgccagttatagttgagctacttctgagcgggacaatactccatcatccgtgatggaggccagacagggaatcaagattcacattagatgtctgcactaggcaaccatactcattccatgcgagtcagcctggaagtcttcaaaacctaggaccaagactgtccaccagtctaggattgaaggggaatgtataggtgggtggaaacttatttgccccggtgtccccaactcctatcctctgcttcctgctgcctggcctttgggtttctactctcctggatctaaaggatgcattttttttcccccatccctttgtcaaagctaaatgcctgtttgcatttgagtgggctgaccttgacttggttacttcaaggtttcaactattcccctattatctttgacgtagtccttgaccaagacttaagtgagatttaagtgcttgacttaaaagtgcttgtcctgcactcctaaatgcagaaaaggctatgttgccccaagggtactgtatgtacatgatatagattttgggaatgtgactttattgaaatcaagcaaaggcctcatggatataataaataactttctggtctttatcaacacccgtcctggacagcccggatagtagctaagaaattaatgatggaagtcatccccaggatttggcgtctccttaactttgagatctgacagtggcctggtcttcatgaccaaactgtctcaaatgacttcagaagccctcagtataaattggaggctacatagcatgtgtcgtcctcaaagtacagggaaggtagaaaaaaatgaattgaaccttaaaagaaactcaactaaatccgttcttgagactgatagtaactgggttgacctcttgccttttgcccccactaagggcctgttgcacttcctactgtgaaaaagtcactccatgtgaatatatggatagccgctcccagtgatcccgcgggtaacatcaagagctaagaacagattccctaatctctgaatccctgaagggattccaattaactctggataagatctttcctcaagtctaggctgcccagttaactgggcactgcttgcctgaccaaccagcctggtgaccctcaactgcatggaatcaagatgatgcccgtctatcaggattctctggatgcccagtgctgttaagttgctgctagtcacatctcaagaaggcaccagaggatccctggaaggagagggccaccaaaaaatggagattaatcagatggcctcccttccacgttaagctctctaaagtttaatgttttcttgctgacctgctttgactccttttcttaggcgatggaagccgtaatgttagttttgatctgttgggttatgtcctggaactccagctgtgtatagtaactcacatggacaacccacttagaagtcggaacttagtctcacaggtgttggatacccttataacttccgatcagcctagcctgaaaactgaatgatgggctggggacatttacaattggagagaaacttatgtggtgtcctggtttacatctgtccagtccaggtaagcaaatcctgccagggtactaactgcctatcattgtgcctcttggggctccagaagtgtcaccccgcctgccctaaggcaaaacatgacattcttactgtaactcccaagccctctaaaaaccaactctttttttttcaagacagggtttctctgtatagccctggctgtcctggaactcactttgtacaccgggctggcttagaaatcagaaatccgcctgcctctgtctcccaagtgctccaccatgcccggcaaattaaaaccaactcttaattgtcagttggggtcatgtaacactattccccagcctaaactctggaacatttttgactcttatgaaaattcccactggaatgtaggaagaacctggggaatttgaccatatgcctggggctggatcccagttcctctattaccatgcagtgataaaggttagggcaagaacttaaaactcttaaaagcctgctgtggccccagtagagacctcccgattccccaggttcctccaccatgcccacgatccaaagatgcccaaccgccgactttcctgtttctttttttttttttggtttttcaagacagggtttctctgtatagccctggctgtcctggaactcactttgtagaccaggctggccttaaactcagaaatctgcctgcctctgcctcccgagtgctgggattaaaggcgtgcgccgccactgcctggctgacttgcctgtttctaacctctcctgagccacctccatccactgctcccatggaagttctactcctggctgtgctaacagcaacctttcctccaccattctactcctaacctgatgcaggactcacggttttgcctcgaccccaaacccacaatctgtcattccctgcattgtcacaagcctctgctgatgcctgcccctggttccagccccttctatccctcggtgaggtgctaggacaaggattgtttcctgtcagaagcttcaggctccctagcttgtccagatttgtttaattgtgccaccattattcagcacctgactggcacaggtggtgagaaccagccactatcccttccttcttgcctgagaccaactatcacaagtgtgcttgctggtcttacgcactgatacaccccaatcatgtcccttcctcaaggtgacatttcggatgggggtgaaggctgcctgaatctagccaagacaccagaccaccctcaaccaaagttgaggttggttctccccttggtcccaagctcagtgaattcagggattgtagggcctgcagcactaggaacatcagttccggtcctgtaagatcagggttcaaaactctgaatgctgaagtaggatttaaggttattataaaagactcagtccctagataggaagattaggtggattctctggcagaaaaaaattttatagaatagaaggcttgacttttcatgacgcaaggagggctgtgaaacctgttgtttttacgctgaccaatcaggcatagagaaacttgagctatggtaagaaacaatctgaaaaccagatatttagacaaacaggaaggacactgttggtgccagttccttgtaactggtcaccccacctaaccacccttgtttcagctgctgcaggtctccctcccgatactcctgtttcttaggactttcaggtgcgttacaagtcttgtcttccgacaaatagagaatgctaaagtgcttgcttctgctggcactagtaaccattagctagaaatggtagcttcctttcaaatatatgacaggagcacctgagacaggggaatcagaaaccagtccaagcccatttcaagaccaagagccattttgaggttctctttactgtaaaacttgagtttcaatttctgtttctcagaatttggctgtaccccatcccataaacaaagaacattttgtactggatgttccaggaagattttcctttttttttccccccactccagacagggtttctctatgtagccctggctgtcctggaactcactctgtaagatgacccgtccagcaggtccagttattcgagggtctcgaggggacctcctcctaagaaccaaatggggggtagagagggaagagggccttgtgcgaaaccgttctggaatgcatcaaagccccaaatgtattagtcaggcccgaggtttaaatgaacaagcaaaaggggaagtacagatacttatcagtgggaggggtagggcaatacaagcaaaaggagaagtacttatgggagggggggcaatagaaattctttcttttggcagctacttggggaagcaggaacttggtggtatcagggtgtggtcaggacatccgcgatgattta

SEQ ID NO: 32624 - DNA, 1189 bp, Mus musculus
cacgtgattgcgtaagtctgcagtttctcaagggcacatgaagcctagctgcatttgctcctgggtctcctgtataaagaggctccttagagtcacagacagagggagcacagtctgctgggtgacaaatgggagctctaggtcctgaactgtggagggctacacgggtagctgtgtcacagcctgagtcccagccctgggggctattgagtctggccaggctgtgaggacagtgtgggctttcatcgtctccctctgctttatcccacagactgcgtggttcctcctgcctgggccagaagctgacagctccagccccaggcggcagcagctcaagctgtccttaactctaggcagagaaatgaagttctccagcgtcacctgtgctctggtgtccaaagctggcagcggctcgtgtggagagaagcgtccagaggcacgggctggcaccagcaaccaacgacatttgtgcagagccttgaggctgattgtcacccaggcctggcaatggctaccagggaagagcaggggtcccttggcccagcagcacagcctttgactgtagggctgcctgtgggaggtgggaatgtttctccatagtctcctggacatcagggagcatagtctaactgaagacatattttataagggacagaacccccagggcaacccggcctcagatggtacccacaaggcttcatcaacagatggtaccagacccctaaggtcaaggggagatggcctgtgtgccctctgtcaagcactagctccccctcctaagaggcgacttctgggaagcttccatggacatagggcagatgcctgtgaccagccagacactgctaagagtcccccagcaggactctaggtcccccagcgctggtaggggtctgatgcttgccctccttagaggcacagaagagcagcatgatatacctgccagtagtactgggcctcttttctggacacccacctgccttagtcctgtgtcctgcctgctccataagagggcagtcatgagtcgaatggcagagggactcccacggtcactgcagtttgcacagaggttgtattgctgtcattgtggatctaggaccaaggctcccatcatgcctgctatcctccttggcaccagctggcagcctgaatcctgtctgattttcttccttgagctcagaaagaaggatcc

SEQ ID NO: 32625 - DNA, 1238 bp, Mus musculus
atcctcttgggtcagggaccctcacttgaaggccacgtgcctaccatactgaccagagttaagatatggaatatttgtacgtggccttgttgaaaggactgtgtcctcttctctccaactaagctgagctccattcagggctgcaggctgtggacgttctctttgtaattgttggttctgacatgttcacagggtgagggactataggaaatggctgctttttatctcttaacacaaatacaaaagtacagagactttttctcaaggggacctgattttagcttctttcagaccttgccggcagggacaggaaagtctatgatcagcagggttagcacaggtcttcttagccagattttctccctttgaggtgtggtttgtggaaatgaggaggttgctgacaacctgtttttaaaagagggggtgctatttggagagtgaacgagcaagctgagagccattgagtcagcatgggtcactgggcctccccctggctaagtggacctttactcacacacatgctggcatcagcaaacacaggactggtctttcctcctatcttactgctacttaccctgtgtcttgattaggggtttactgctgtgaacagacaccgtgaccaaggcaactgttacaaggacaacatttaattggggctggcttacaggttctgaggttcagtccattatcatggtgggagcatggcagcatctaggtaggcatggtgcagaaggagcagagagttctatatcttcatctaaaggcagatagaagactggcttccaggcagctaggatgagagtcttaaagcccacgcccacagtgacactcctctaacaaggctagacctcctaatagcgccactccctgggccaagcatatacaagctttcacacctgtgataatattgctcaggcccctagtctgagctcatcctccgatgagatagctgtgatggcccctgcagtcttccagtgactccatatccttctccattccattccacctgtctccacgccccctgcttcctagctgtttaccagcaccaagctctttgctctgtgcctgtcaggtttctcttctctgaacacttcctaccctgggctgcctggtccatccatccaaaatcctgcagcatctcctctggccgggctctccttaattcagtgtatctttctggtgactgtctcttcctgtcagtcctattgatctgtggttaggaggaccttgagctctgc

SEQ ID NO: 32626 - DNA, 1202 bp, Mus musculus
gcccacgccctctccctgtagggttactgttccccatttactcagaagtgacttttaggagtcatcttggtctgcttttcctccttgggtggctagccggccctcagcacaccatctgctgcgtttctatgtctgtggtcaaactgagcttctcagcccacaatccatcttggtaattgtccagcacctggcacagttgggaccccagagaacctctttgtaagattgggaagatgcaggggttccagaagagcattcagtgatacggagctgggtctgaaggcattggaggggtggggtttgggaacagcagtgtgtccagatgggggcagctctggctcaaggatagctggccgtctgatgtaggaaatcatctttgctggaggaaagaggcagagagctattgaacattgctgtatgaggtggaggctaggaggagacagacagacagacatgggagcacaacagtttataaagatcccggttcctccttctgcagattttggtttggggactcttggtgtggggtgttcagctggactgtgtttctgtagcgtttgctgccttgtgtccatacttctcacaccactgagaggagcttgaggctcagagcatggtctctgtatcagccgtcgtcccaaactactcagcttgtgggcctcatttctgtacagtaagggtgataatcctctggtgttaggagcaggtgtggcggcagtcctaaaggcgccagggactgcagctaagtcatatgacttgcacctgacttcctcatataagacacaaacatcttgagtgctgcgcaggtgtaccaggatacaggtgaatccaatttggtggagatttgcccctgctgccctgattagctgaagcctcgtgactgatgagggggcgtggcctgcggtgcgtggatgagagagagtataaaaggagtgagaggcccagggttcgggggagatatataaacaagggcgatatataaaaacaagggagatataaaaacaagggagatataaaaacaagggagatatataaacaagggagatataaaaacaagggagatatataaacaagaagaaacaggactgaataaatgtgtgcagaaggatcctgtagcagcgtcgttcttcctggcctgttgagtgcgtgcaacaagtggtgccgaaacccgggaaaagaaacatcttcagtcacgagcgaag

SEQ ID NO: 32627 - DNA, 1203 bp, Mus musculus
agagacggtgtcgggagcagcagtcacatctgagcagcattgtcactcctgaggaacaggagttcgtcaacagtgagtgtgggcaggggctgagggacaggacacagcagtgagagaaaagagccttgctggtcagaaatgagcagtcttgagttcagggttgtagctcagtgggcagagtgtgccttgtgtgtacaaggtccagcatggcagaaagggagggagggagacagagacagagaaagagggtacaggttgggtacactgcaggacagggagctagaggaaggtcaaacggtcccacattttcttcagagaagacacaggtcacagcagacccagggcagaccttgccagtcagagccatcccaggttaagcctgtagctgtctcctgcctgtatcagcctgaggaggtgttccagcatataccacaagcatgcatgtcctgagacccttgcaaggtccttagaagccagtggcatccacttgcccccttcctccctctccatgagttccagcccccagacagtgcagggtacccaacataagtgcaagcctatcttcccattccagaaaatgctcaagactaccagtggatcggtctgaatgacaggactatcgaaggggacttccgctggtctgacggacactctctggtgagttcccagagaataaggagtgggagaaaggccccaagaacagcgtgcaacaagtctgatgcaaactctctaagtagatgctactaggcaagggcaagcaggaacgctgtagggaaggggttctgtctctttcctgtgtctctggaggctgacctggggctggatagactttaccagggaagtcacaagatgggaaaaggagccaaaaggaaatgaaggtgtgacagcaaagcatgtgaaaagtgtatgacatttgagtttcctatgtgcaaaggacttgtgtctattcaacacataaaatacagagatcactagacagtgtaagaagtcagtggcaggtcaatgaagagctgaaccctaccagaaaatgaatccttgaggtttatgagcttctgaaaaaggatgaggggcgggctatgtaaccaggtccctaatctaggattcatagcacccggacgtccctcatctgatcagattcccagcatcctttgtgggttcccttacaacccaggtgttggggtaaaagaaaggaaaaacggagat

SEQ ID NO: 32628 - DNA, 1487 bp, Mus musculus
cacatccagtatgtggcgtcctacaaggtagcccacagtgatgatggtgtgcagtggactgtatatgaggagcaaggaagcagcaaggtgggtgtctgtccggctacaattcctgggatactgtgggtttctgatgggtgggggaggtggccgactgtggagcactactcctgacactccagtggtttccaggtcttccagggcaacttggacaacaactcccacaagaagaacatcttcgagaaacccttcatggctcgctacgtgcgtgtccttccagtgtcctggcataaccgcatcaccctgcgcctggagctgctgggctgttaatgctcagtcctgccagcccaaacgatgaggatggccagaggctgaggggcctcctggccctgcctcccaggccctgctgccttctgtggctgacgaccttcttggccttcccttctgattgtactggggctggaggcaggaagggccaggggatttcagagttgcccttcaccctttccctcaccctgcagcccccacaggcctcctgctagcccccttctctcaggcattctgggggagttggacaggtctgagatgaatagagaagaagagtgaagttggggtatgtgggctatctgtaccaaccaccccaagtcctaaacttcctgccagggcttgactcaggactgaagggagcccctgactgcccatccctctctgcacaccacacattcctccatgttccattccgggaaggagaggcccacgtccgcttgctgtcccttgggtcaccaggtcctgcctcttatctcctgagacgcctcttgacccttgcactggagcctcagttgacaaggagactggcgggtctggagaggtcggtggctctgggtggttgacaggttggctgtgggacctctgctggcttgctacccaagttaacaagcagattccaaaatacattcgtgttctccactggaccctctgtgcctcctcattgccctgtcctagccagactgcccggtgctgctccctgcctcgacctctaaccctgtcctcttgagcccaacactctcatgccagactgcaaatagcttaagagcaggagtggggggtggggccgctaggggtggatgcagttaggaggaggtttccctgtcctccgagtctgactcactatgtccctgtcatctccacttctatgctgctctggatctggcctgcagtgccacctggtgaagggccagagagggcctggcagagaggtagttcctgggactgttcccctccctctccctcactaagaaggtggccgaggcttgggtactgggttctcctttggtagtttccattttctttgtaatgggagtgctgggctggagactttttttttttttttttttttttaagaaacccaacaaacctggctttcagagaaagaggtctatggtagactggatatggtgggtgggggaagggtgcagtgtggaaaggaa

SEQ ID NO: 32629 - DNA, 1104 bp, Mus musculus
ttgcttagcccttagaccttcagagcataattacctagaaagctcgaagatgagacactcaagccatcttccttgagactgaatgctgatggtcagccttggttgaggctgcttcttctgaaaattgtgttatcacaaccatactgtcaaggcaaacaaaacaaaatcaacccgggatacagtcctttgttaaaaggtcaatcggatatcctaggttgcccaggttggcgcagacatgggacttttttgagacagggccacactatgtagctttggctggcctagaacttactatgtagaccagccaagtctttttgaacttacagagatctacttgcctctgatctttgattccttaatgctgggattaaaggtgtgcaccagaatacccagtgacatgggactttctatgctaatactgaaggagcctcaggcaagcaggatatgttaaccacaccgttttttacagtcttcgtctgtcatatagtgaggctgtttgttttctgagtgagtgagtgagtgagtgagtgagtgaatgagtatgcatttgaagttaattattaactttgccagtaactagctcagattatactcgggatattcatcccacttctctgtgtgtatcttagtgcagaccctgacaggcaggagagtaccactgtccttgaagcatcttactttgagtcgatcaaggtcactcccaggagcctgctgcagatctctacctgagatccagatcaaagcttcttgtaaagattctattccttctttcagaaattactgaagcccaaaatacctaagaaggttcagaactcagaattttcatgatctctccattttctttaaatagaggccatgtcattcacaccatagcaaccaattccagcttcccaaactcgcccccctcctacttcttcccccctcctgacaccctgttcatcaggcctgactgtgttcgtcaggactccgctgtgcctcatacctggatgtgcacgtgggaggtagaggcaagagaatcaggagctcagggtcagccacagctccatgagaccctggctccgcagggggggaatcaaatgaagcctctgctgcagtggatgccgt

SEQ ID NO: 32630 - DNA, 3898 bp, Mus musculus
ccaccaagaagtcagcatccctcgtgctgaagaaattactcagcttgggagtctgagaacctgggccttcctgggcctgagttttgcctgtgaaacaaaggaaattctctgaatcaaaagccgagttttccttctccttgtctcctcagacacctctgtctctgtcttgctgctgctgagagttgcatggggcacttgtctaaaaattcagcctcccagatccctcccctcggagccgctgacgcagtgggcttgggaagggctctggggattttaatttttgacaagtgccccagggaattctcatcatccagcaaaccgagggaaataccgtactactatgcctttaagttagaaagatcttggtggctcatttaattgacattcctaagccacagtgtccctctgctcccagagacctccaaagcagcaaggcctgttgtatggctgcctttgtgtgatccccctaaaagggagaagacattggagctgaaccctgtctctgcttctccctggctgtatgactctggataagtccctctggacttgactctcttcctctgttaagtagggggttggaccaggtagatggcagagatgcccatcggttcatccttccagggttgcctgggactccgcctcccaggttgagcatgcaagcgccattaattgcatttttccccttccccatttcatagaaagatttgagagtcttactcactctcttgtaattttactttttcaccccagttctacccaatgtctaattgataccaaacaacccaaaagttggatgggagtttgaagaaatgtatttgcagctaagagaagggagtgttcttttgaagttggtttgtacttaaatagcctctgcatgttgtctgttggatagatctttctgaaatgtcttctcaagcggacttctcactctagggtccaagtgctccacttctggaacgttgtggtacttgagtccctaagaacctgcactttgaaaagtatgcagttgctgtccagaattgaatgagacgatgagtgaatcgcctgggttattgtttcctctgcttcatctctgttggcaccaggacagcccaagaggtgtagtcgtgggtctgtgtggatggtaaaggagccacctgaacacctcagggcttcgggtggaatagagcgtgggcactggcccgagagactgacaggaaagcctgtacatgaagcgctgttttctgacaatcactagatcatcccagtcgtcactgagatgtctgcagcctccagtttgctttttgctataatttgtcacactcaccaaatcctgtccctgtgcccctctcatggtggccatttctctgttgcatttcccttagcacagattggcactttatccttcatccctcaatttggaagtgaatccttctctatcgatttttccctccaccctaccgcagccataatctagaagcctcacacacagttcctgtttcctgccttcatccctgaagacttttaatgagagcaataaggtcacagagtcgagtcaccgtccctggaagtgaggggctccctttgcttgcccgaggccatctcttcccaagtcctgacaaagcttgggtgcccccttttgtcatacttaggaggaagtgggaggttgtcctgggagcctggtccaagcaacaggcctggaggcccactggggagaggtggagctgccatacgcctagagatccaggccctccctggggctgggggaggggacgtgtaccagctgaagcctccttagtgtgtcactctgaatggcactggcattccattttgcttcacatgaaatcaactgaggctctttatttaagttttgggctctcagacatggaaatgagaccgtgaccgtggcagtcggacaggaaaattcttgtttggccctgaatgagagtacagaggcatgactgtggaggtgccagctttgcctaatgaatgggaggacagccctctatgtaggtcggctgctttccttcctctgggctgcctcgctctagcgtttagagagtattctgtttttaaatcaaggatataaattacatagatgtagacaattctgtggctggaataacattaagacccaagtgcggagtgcacctatattattccagttgtactccctgcttcccaaataattggaaaccatggacttcagtcaaattaggattacctagcatcaaaatgatgatcaagactgcctagttagcagggaagcttgcagacttgaacgcccgttctttcctgcaccaactttgtgtcttccatgccagagcagagtgaaggtggaaaacgtgtcagtgtatccctctcacgcctgtggtatcctacactcacagggaaccttgggatctactgaaacattcctctaagggtgtcttcctttattcacatggtgttacagaaccagcgtcaggagacctggttgctcacccccactggctctgactcatgccggacacacgggcaagtcacttcacctctcttgaacctgttaccttgttctatagcatctctgaggctgcttcactcacttgtgaatcattctctccatcattgttaagtgtgtctgaagttgcacgtagaagggagtgaaccctgacccctaagctcatcttcatcttaagagagagaaggcgcgtgtgcattcaacttttcctagttaggacacgaggcaacatccaaaaccccgtctctggcctctcttcctagtcttgaccgtcatgaccgtttccttgctattctgagggtagtcttgtgactgtagcgggtgagagccacagtaatgaggagagtgcctcggtcttcagtgtgaccaggctaagggtggatggttgccaagccagaggtccttcctgggcaggctcgctctggctcagctgaaccttctgggtggctgagcttatctggctggcatccggatgagagccctctttgtaagtggctgacttgagatagagtttgccaggtccggagatacagagcacgtgtttatgtttgccccggaagcaggtgttagagatgtgagaggcttttcttttcctgtggccttgatcctgacttgagtgacagttttaaaagaaggaggaagtgggtgtgggggtgtggagacaggacttgtggagttgaaggaacccctgggttttcttcctttaggcacatgagagagttcttaggaagcatgtcacctcagcatcctgtcacagtatcatctggaattgttttctttacccacaaagccttaacttgcctctagaaaatcccctggtatgacaacattgtggcctaagaattcaaactcttctcctatgaaagtctgaagcaaagccacagccaaaccagagaatttcctcaggtggcctggaggctcctatgacatcacccccacctctcaccccaacaacatgagtgatctggatctaagcccctccacccacccgtcgtcttggccttactctctttcaaagccacattagatcactcaaatgcttccaaaaggggcctgcttggcatttagagaccaagccattgagggccaagtttcttccacctgttagctaagcaaaggacagttgtcccctctgcctggggtcaattttcccaaactatgtttatagctaaggacacaggagcaggcccctgctggctaaggaaccccaacagcatccagagcaaaggctgctctgctggccttgctgcctccaggtgctacagcccagcatcctcctgaagtggtccttagcaacaggctacagagtacagcttgccaactatccccagacacccagaacacagacagctgtctcctttggaagagtctgtctgccatgttttccagctgtttttttcctagcgtatacataggtag

SEQ ID NO: 32631 - DNA, 1345 bp, Mus musculus
cacccttagtctcggtgggcattctgccccccagaccacagacacagagcagtcaacatcacctgaaatcattgctgacctcctcggtccccagggccaaccgccactctcccaggctgctctcctgagggaacctggttcctggtgataggagctgggctcgctttggtcttcattctggcctctttagttttcctaaagcacaaatccatgtagtgccctgttacctctccacacccattccaggtgacctggctctctcccgcagcctcaggcagaccttcactatacctgagtttgcaacttttcccccactgccgctgccttattgaccagggctggggtgggggaggggccagctcacctccctccttttcccaggtagactccaaccgaccactgtcttacgttggcagattctgcttccagattgatttttttttttttttttttttttttttttgagaaccatcactttcacattcctgattctgatgagttttgttttgttctctctgggtttcacggaactccagaggctgccctggaaatactgtattttggagtttgtgctctaaaagcccctgtgctgctgggtcttctgactcttccagcagcaggtgtttcggacttgcaatgagcaatgcaattttttctaaatatgaggatatttacctttattaagaaattatactaaacaatggcgtccttgattgttttctgttctcaacgttacttttggaatctgtggtggtaaacaaagatcattacaaacaaaaactgtaattttgttatctttgattcaacggaatttctttacttaaaaaattaaagacaaaaaaatgtaaaatgcttgtatgtgctctgtggagggagagttttctgcatgaaaagggggtgcatctgaggacggggcagggttgaccctgtggatacacaagctcgaggacctcacttcatatccccagcacccaagccggctgtggtagcacatgactgtgaattctatagctatgaggcaaagatggaggatccctggggcctaatgtctggctgttcttcctatcccaatggaactccagactcattgagagaacctgtctcaaaaaccaaggttgagctcaacagagggattcatccaatgttgacctctaacttcatgtgagcctacacgtgcacgcacacacacacacacacacacacacacacacacacacacgggtagatcctgtatctgcatcaaagcatggggcttaggggcaatgtgcagaacactaatttcctctcccagtgatgttgaagccaaccttgcagacaaatacctgagccagatgggaccagttct

SEQ ID NO: 32632 - DNA, 1215 bp, Mus musculus
cagcagtctcagctgtaaaacactgaggaggaagctgcctcggctagttttcccacacactaataaatcattcgtaaacacttgtgcttagaccaggggaaggctctgccttcctgagactaacctgggggaaaggctttctgagcctaacattgaggatgccccttggttctcagcgtggtagtgccatgtcaacaatacacagctacccaggcagtcatctgctcttcacacatccacgcagtctcctggtgggtgtctcgtgctttgtatgtccccaccacccctctcccttcgtaagaagtagtggcactcgttttcttcagcagcttctcagcgtatgaaacccagacttcccgtgggacccttcctaatacggtctttgccagttgctccagccctttccctcctcaccattcaccagatgtgtgtcttctctcaggtgctcaagcataccgaccccttgctcagcagaggcctgaatacagcgatgcctccaatggctctgtctctgtgggcacagccagccttttcttctctagccagtctctgctcacatgtctccgaccttggagaaggtttgccggttctacctgctcttggctcccctttcctccagctactgtctgtctttgtcatctttatgacatcttttctgttggttccccaccccccaccccccataagctctgagtcaaattaccgtgcccattttgttctctgaataagtatgtgcactacaagtattgcagatgggtgggcgggcatctctgaatcacgccacggcacctagtgctaacgaaagagttaataaatatttgtggaatgaaaccccgcccctcctttgggattttgagataaagtcttactttgtaatgtatatagacctcgagccacaccttagcctcccaatactgagctaaagacacgaactgctgttaccaaatcctgctcagccaaggatgaccttggacttctgatacccctgcctacatcttggaagctggggttataggtgtgtggccactgcagccagtttttggagtgcaagagtttgaacccagagtcttgtacataccagacaagcacattaccgactgagctgcatcccagccttagtctattattattattattataatatttatttttgagtagtttcactttgtggctcttgctggacttgtagttgctatgtatcctgggctggcctag

SEQ ID NO: 32633 - DNA, 1146 bp, Mus musculus
ggtagcgtggactgagaactgtgttacctgcttagctgcgggagagccactcgagttggctgtgcagcagccgtctcatggtcgcactcttaagaactgtcctcaacaatcagcgacgagagcatgaagttcttgccctcttttcttcctgggttccaggactgggagtgacgtttttgtcttcaccttgctgtactgttttgtggttcagaacagtgatgcatacccttggtagcaggcggtggaacactgagttacacacctgcctttgctgacttatacaaattgagttaagggcgctgctgagatggctcagcagctgaaaatacttgattccagtccctaggaaccacgaggtggaaggagaaagccaattcccggaaccggtctctgacctcaacacataaccctggcgtgcactccctccaccctccgcacccaaccacacctcctgataaacaaatgttcaaaaacagtttaaagtttgagacaggtctgagttgcctatgttggtcgcaaacttataattctcctgtctcagccttctgagtatctgaagttggaggtgtgtaccaccagactggcagggaagcatttatgttgatgttttctcatgaaggaaggcccgtctttagctcttgtaagttcccactgaagcttgcagcatttgtagcatcttaatctctttaaacagccgccgtagggttgtgtgtgatctcagatcagaaactataatcttggctcattttttttctttttttttttttaatttctgttatggagaaagtgtttattttgaaattattttaattgagaaatagaaaacctcataggaaggaggaaagaaacaatcacagagcatccaggcaatgtttcacttcatgctcttgtcaccccctcactggttcgctcgtcccgggatgagaaaggactcagccacccacagtaatgttattaatggatatatggatctgtttcaccaagaagccagtgaacccatgatagcaaatcctatcgctgtagccatggcgatcttctggaattctttgttgccgggtttggtgcatcttttaaccagccacattgagtcctttacaaactgccgactgggctctacagactgcattacctgatctgtgtttgtgg

SEQ ID NO: 32634 - DNA, 1110 bp, Mus musculus
aaggattcacatttgttacatcattcttctgcagttgggaaaagcgccttaggaaggctaaggtgccatcagcttcagcagttaaaaactcaaggattcatgagtcgcggtttttctgtctatacacagttaaaacagttctatgagccagagcctgatctgctacctcctctgaaactaggagcttgtgttctgacccaaggaagtcagatctttctacaagagccgctggtaagacgtggcgcctgcctgcagccactgtcccctcgtcggtggtaaggttgatctacagctggttccgttctccctgaagctttcccagttctttctaggagtttttacttttccatgtcggttattggtgacccatcatgagattgatttattgtattttatgtgtatgagtatttgcctgcaaggacatatgtgtgttatataggcgcctggtgcctagcggcattagattccttggaactggagttgtgaaccacagcatgattgctgaaactggaacccagatcctctaggagcagcaagtgccactgctgagccgtctctccagcccctacttaggatctcttggtcaagtagtacttcactaatcctgacagccgcctcttcctaagagtcatgcctgtcacttatagacccttggttatacactgttggaagtagagatgcacagtggagcgaacagatctgcttccccagtctgcggggaggaactgggatgaccctctctgtccttgcctacgggatgcaaaatgtgagccacccacaagtgacttagaacacaggtcgagggacagaagagctgagtcttcattatgtagcttcagtgccatgagatgttccaagcgtccttctaagatgctgtgttggtgtcccacaggttccctcagcataaaccccaatccttggagtagctttcagggcttgggaactataggctgtttaacttcattccggggctcagacagtgttgctatcacagcaggaaggcacacttggagtttcattctgaagtgtgagctccttatggggccagtgctcggcaagggggaagggtgcaggaaatgccttagttcactcacgcctctccagctttgt

SEQ ID NO: 32635 - DNA, 1205 bp, Mus musculus
tggctgaccctgaggtcatggctaacactgaggtcatggctaaccctgaggttatggctaacactgaggtcactgctaagttccagcaccaaaaacttcagtttgctcctcttatactgcaggcagtgagataagaaaccaccctagttttcaagagaattctccagctcattgttgaaacagaaaaccgctgttcgatccagggtttcttttttttttttcagattttatcctcttggaataacatctctgaatttgttgtaccccagccattaggctttctggctagatgtctcttccctgatacaaacgtgtctacctatctgtgtacatcccttccttccgcagaggtcgttgttgaatctgctgagcagcgaagaggacgattttaacagtaaagaggccctcctgctcatcgcggtgctgtccaccttgtccaggctgctggagcccacctctcctcaggtacaacagtacctgttcagtcccattccgcatgcctcagaagacaaggactgtctcgtcataaaagcatacacctagggctggggacgtagctagttggtaggaccctggcttaccaagcaccacaccaatctggtgtgttggtgcctgcctgtagtccaaaggagggtccgaagctaaagagccttctgagggagctctgtggtgtgtcttttcctatggtgaccaggttggcctcgaaatcagagatccagctgcctctgcttcctgagtgctgggactcaggcaccactactgcctggcctacatagtgtttctgtcagaaaccataaggtccaccgtaaggccaagagcgtactggttttgttcactctgtcaactgtaaacgcggtttctatcagactggtcttgctttggtgctcttggccttctcagcacggtggccttccaccgcttgtgcttcttgatgttttttgctatttctgaaatggcagctttagtcgtaaaggtagctcaagttcaccaactggatgtcacatggaaagagtgaagtgtgaggagaatttaacaggatgagtcagcgaatatgaacacaatcccaaagtagacatacccacagagatgggttctacatgtgtgtgtgtgtaggcatgtgtatatagtcttaggttactctatgagcgttcaaacaaggagaaccagagaagggccattctggtgggtctgttcacttcaacagt

SEQ ID NO: 32636 - DNA, 1431 bp, Mus musculus
cattttcaaaactacaccagaaatgtttaaagttttattgtataagccaaagtgcattcttatgtggaaaaaatgtatctgtgctgaaaatgccagagttggttagaaagcttgtgttataataagacaagctgccactctcaaagactccctcacacccactgtctttgaccccaacattcagattctcatttctgagttcagtcacaattctggaggcatcctaaccaatttccaccgtcttacaggtgaagcactggatatttaccagataattgaactcaccaaaggctccttggaaaaacgaagccagcctggaccctagctctgtctggaggttctgtatttgctcctgtggagctttattggagcggtgcaggttcctaaactcaggctttcagatgtgcttttttgcaaaaggcagccatttttctgtagcaggacctgcccaggaaagtcctcctaacggaaggcacaattcagtgcgttcagaaccaggacaccaacatcagtgcaggctgtgtgacaaggggtactgttgggcacaaatgaagcagatgccccaaaggtcacattaactcaggcatttcttcctcctcttcttggctggttctctgtcctgctgtgtatgtgctgatgcagtgccctagaaggggagagtagaaattttgacaaccttgttctaaggtgatgggaataaaaacaaacaccaaactcctggaacagttgtgctttcccgtctgctgcccaggttgtgacttagaactccgtcctgagtagatggacgagatgctgggagcccggagcatcacagctacagacggcctggggcacagtgatgtacggaactccgcatcagccggctagccagattattttatataaatgtctaattttgactgggtcttgtctactgatattatttctagcttttacaaacttaaaatggaacccacattgggctcaggtgatgaatgggcctaccttgagggagggtgtaaaagccagccagaatgctgtagaaacaggaccccaggacaggggagtttgtctgctacttttcatagaaatatataccaaaagcatagcagaagtaggcaccaacctcttcgttttcgtcttcctcatcctctcgaagaaccatgtcgaggacactgcctttgatcttgaagtcccgagaagtactcagcttcatgtgctgcatcaggtttacctgggacagcagaaggtcctttcagtgtgtacttggaggaccctttgcttttaccagatgacattcaccttgaccacctctagctgtgctgcctgccacagagcttgctagactccttccagcagtaaatgagagtggaaataaagaacatttttaccttggactttttagacagttggataagaaatttttcatactgttcaatggcaaagacaagg

SEQ ID NO: 32637 - DNA, 1556 bp, Mus musculus
tatgcttttggtatatatttctatgaaaagtagcagacaaactcccctgtcctggggtcctgtttctacagcattctggctggcttttacaccctccctcaaggtaggcccattcatcacctgagcccaatgtgggttccattttaagtttgtaaaagctagaaataatatcagtagacaagacccagtcaaaattagacatttatataaaataatctggctagccggctgatgcggagttccgtacatcactgtgccccaggccgtctgtagctgtgatgctccgggctcccagcatctcgtccatctactcaggacggagttctaagtcacaacctgggcagcagacgggaaagcacaactgttccaggagtttggtgtttgtttttattcccatcaccttagaacaaggttgtcaaaatttctactctccccttctagggcactgcatcagcacatacacagcaggacagagaaccagccaagaagaggaggaagaaatgcctgagttaatgtgacctttggggcatctgcttcatttgtgcccaacagtaccccttgtcacacagcctgcactgatgttggtgtcctggttctgaacgcactgaattgtgccttccgttaggaggactttcctgggcaggtcctgctacagaaaaatggctgccttttgcaaaaaagcacatctgaaagcctgagtttaggaacctgcaccgctccaataaagctccacaggagcaaatacagaacctccagacagagctagggtccaggctggcttcgtttttccaaggagcctttggtgagttcaattatctggtaaatatccagtgcttcacctgtaagacggtggaaattggttaggatgcctccagaattgtgactgaactcagaaatgagaatctgaatgttggggtcaaagacagtgggtgtgagggagtctttgagagtggcagcttgtcttattataacacaagctttctaaccaactctggcattttcagcacagatacattttttccacataagaatgcactttggcttatacaataaaactttaaacatttctggtgtagttttgaaaatgggtcagcgtacatggaacatttgaaattctaacatcttcatttactatgagccaccctctgcaacagttccctttgtgatttgaatatcatattcattttagaatactgcataagttaaatgcatgtttcttgccgagagccccgaggttctaagctacttcccattctacatgtagagggaacaaagagtgcactcaccctgggggatcccatatctcctttccatcccagttgggttagaaggagttttacagtccatggtcacttccttcctgaggcactggtcaatgtctactgcactgaaaaaggcgactgactggggcagatcattcagacccagcttataggcaaacatgcacctgaaagaaaccaagtcttccctcaccgccatgccctgctgtgaagataggctcctcactccatgaggaatgacagagcagcgtttctcctatttcaatcacttgctct

SEQ ID NO: 32638 - DNA, 1159 bp, Mus musculus
tagacaatatatatggaatgtatattttgtatagagaacctagatgagctgggcatggtggcacttgtccttaaccccaatgccagcacgtggaaggcaggtgcagctctgtgcgtccaaggcctgctctacagagagttccagagcaagcacaggtagagaggagagagaaccactctcaaaatagcaaacaaacaagcctagtgttttgttttgttttgtatgaaaatcacactctttgtacttttttgttctttctgtcatgcttagaggtggcaatttatgaaacttgtaaaacaaccaaggtcatgggttgtggtttctattatctttgtgggactgtgtatcagtctcttgtagattgttcagaaacacttcagatgcctcttaaagccactgctgactctggtgtcacagaatggtgcctgcttagatgccgtgggaagatgctaagtctgaaggtcctcccgtttatcagttctgcgtctggttttgcagaaatgactttgagaagaagtcctcgaatcaagcagctgtcatttagcagaacgaactctggctccttctattctgtatctcagccgaaatctcgaagtgtgcaaagaatccactcgtcccagcaggagtcaggtaaggaggcctgggtgtcgagtatggctctgttgacttggaatattttgggaaaaagaagcatacaatttgatatttccccattagcagtcaataatcaaggtgatactaggtaacagtcctcggcctatagccattcctccctggactcttacagctggccgtcctcattgctttctagatagctcattcactcccacacagtgtcccaagtgagtgggtagagcagtttgtatatttactcttcattcttttatttgtgattagattgactaatatgtaagtttttacatttatactaaaaaatacagtatatttatcctaaaatcagttacttcagttgctcccatttcctaaaataagagttaaatccaagaagacagggcctagaaagatggcttagtaattaagaatgctggctgctcttacaaagaactgagattcaatcctcagcacctaacatctgtagaccagagtgaattctaggacagccagggctatataaagagaccctggactggagagatgg

SEQ ID NO: 32639 - DNA, 1527 bp, Mus musculus
ttcgggcagcaagtggataatcagagccaggcacttctcacagcaggcttacatccaccttcatcacaaaggctctgccatcaacctctaggcttccccatcttctggcccttccataaaccacaagatctggctgctcatgacactgggttaggaatatgtaaggtgagggacttgggtggctctcttatcacaaaatcatttcagccacacagagtaacaaaccctgagacccaaaagaaagccttttgtgcggacacacaagcaattttcagttgcttgtcactgccagcgtgtaacccttaagagtggaggtgaccctctgtggccatgctgtctttccttaggcctcactgagtctgctttttcctagatgaggaagtggatgtgttcccctctactgctgaagagtctccgttcagccacaccctctcccggaaacggcctttcagaacctacacgagaaagaagcttattagctagccctgcttgagcattgcgctggaggactcaaaatgaggaacgctgtgagcctggctagaccccttgcactcaggagatgtactctagagcagctttctctgggtacagtaacaatgccagactcatgccagcaatctagcattgtgcccagaacacgagtggccaggacttcatgggactgagaaagttcacaagtaaagatgacagcagcaaagtccctgtggacttaaagaaattgaagattctgcagggtatggtagtaagcctatagtcctagcacttgggagacggagacagaagattctgactacatagcatgtacaagggcagcctgggctacatgagaccctgtctcaaaaacaacaaaagacattaaagaccttaagcctttttcccatggtcatctgaagattaccactggaatgcctcatggtctgaaaattcctctctaggtcttcatatgaggccaggccctgactctttagggggaaggttggaagtctggtgggcagctagtactatatataactcagacagcccaaagatcccattccagatcttggtaattcagaggactactgccacactgtgaaatggaaaaaaaggaggtgtttaccaagccttttctctgggtacagtaacaatgccagagttcttttacacaattggtacttcataaagtaagacccataagtgaaagacgtcagcaagaagcaagctaacaataaagtcatcctggcaacttagcatttggcatttctgcctgggagtaactggctatggtccagagcaatcatactgcagggtctaccctgaaaagcagccaccgcatgacagtcttagccaggtatgtgcttgacacctgtgttgccctataatcaacctaaccaacttgctatggagtgttggcaggagcctcatttgcagtgagggctgatttggaaccttctcagtctccccagaagattcaaccctgttgtggtcccagggctctttctgttgtcagatgccaggtgaaaactcccatgtctcctttcagagaaa

SEQ ID NO: 32640 - DNA, 1201 bp, Mus musculus
cgggatgagcatcagccagggtggctgtctgggaggcaggggccggtgaaggagaagggaaagggcatgtttgacagagctggttaagtaatgtgttcatgtctacccaggacagagagccgagggcggtgctgtgctgtggggaggagggcttagctgtaagtgtccaccatgggacggctcatgtgccaggtaaacctgaatgggaaacactgtcatttacttctgagaggtacgagagagagagagagagagagagagagagagagagagagagggagagagggagagagagagagagaagggttcatttcgccttctttggagagctgaggggaaagaagttggtcaggaggaaaagggggcgaatctgaagactgtcccaaggggcccctggcatctgttgaggaacccagaggtggagctggtatgcttttgatggcctgctgggaactggcttcattctgctctgcctgccttacctctcgagcctggggaatctttccctgagtctaacctctgtcctcatgagtctgttctctccatttctccttgcaggtagattaccgtcactgccttcccccctgcctctaggtgccaagtctgcagcctgcccttcagcccccgctctagctgatttcccacccccactcccccctctccatccaggccacctgcagtcgtaaccacacactgtgttggttacagcaggcatctcccctgcccacccccatcccccatcccttaccccaagccagctctgcacactgtttcatttctgatctctccagagcctgggcagagcgtacccctgtccagcctagtgaccttcgcctgagctctggttaatatttgtccgacccaaaggcagtggggctccaccccctgtgaggatataagctggccccggggctgctgttctttcctcttggcctgagctattccgagctccctgtccaccggcatcatggccaaggggttctacatttccaagaccctgggcatcttgggcatcctgttgggtgtggcagctgtgtgtaccatcatagctctgtcggtggtctacgctcaggagaagaataggaatgcagagaactctgccacagcccccacgctcccgggcagcacctcagccaccaccgcaaccaccacccctgctgtagatgaaagcaagccttggaaccagtatcgcttgcctaag

SEQ ID NO: 32641 - DNA, 1166 bp, Mus musculus
tgcagacaaggcctgcactgaagtagtgacatcccagatcaggcaggacagagtggtagcttctccagcagcagcagcaacagcagcagcagcagtagctatacagggtagtctcgggttaccttgatgagtagttttcaccagtgggatgaggtgagcttaaatcaggggggaaaaaagtaacttaacacaccacatccaggtccttattgctcatcaggctaattaaggtgaatttgttttgagaaaaaatattaagcaaatgatgtcctggacgatgacgaagatgcttctgtgcacagtctcagagcgcagggtggaaggtggagctgtccccaaagcaagggtctgagttcttgggtgccttagctatcatcttgtcacttttgtggtggtgaagcacaggctgtctgctgagagagctgccacagccagggtctttccctaagtgacatatgtgaaagagatgagaactggaggtcacaggagtgtggcattaaggacacggcaaggttgtgatgttttagctggagtttgaagtatgaagaagagcttgactagaaagagaggaagggtatatctggccaaagaaccagaggaacaaaggacagaactaagaggctcaggtgcctgagaaaagctggctctgggtgtgaagagaagcaaccagagggtcaagttcagggatggtgttggcctgaacttgtctcagtctcactctgaaggcagtgacagccgcctcacccacacactcaggaagatctccccgctgagcacgctgacagggcaggataacaggaaccctaaagcctccacagcctgctgggcgtggaagagcctgtgccaaggcaggggctatggagagagactttttttggagtccccccaaaggtgaggaactgtgaagcccacccactcacccctagcctgggttggtgccattccttgagctaagccacatccagacaccagggccctttgcagaggagcccagatttcggccagctggccctcggtccatgtccaaagcaaacaggaagagactggagggccaagctagctctttgtttggagacgggattagccgaatggacttgtgggtctgcctgctgttcaggtagggggacatggctcccagggtgtggacttcaagcttgtaagaataa

SEQ ID NO: 32642 - DNA, 2235 bp, Mus musculus
tgtttcgtcctctgccagatgcagagccagccctctctccctccctccctcaccactgcagagccagtttagcaattctttctgtgacctcagcttcagaaaagaaattaggagcaatgcctctgcctaggtcccagacacgatccctggcctggcctggcctgtaaaggctttcctcagcatggccacatcagccatgggtacctggaaatgaagctccagagcaggtccctgccctccttcacagtgaccaagaggagtactgagccccacctgctctgcacacatcctggatgcccactcttccaagtgtgctgaccacccagagtgagccagctctttgtgggggctgccaggctaggcccaaacctcaaggtcacagtaagccttgaccttttgggaagctgtggggtgttcttcacctgcatgttctggcagatggggctgttgaaatacctcaatgcaagtgattaaccctttccagagctctttcttatttcaactcttcctttccaaataagaacttaatttatgtagttcgggttttgaggggtttgttttgtttagttattctgttttgttttgattttcaagacaagatatctctgtagccctggctgtcctagaacttgctccatagaccaggctggccttgaactcatagatctgcctgcctctgggattaaaggcatgcaacaccaacatctggctataggtcagtatttttacatggaggtggagaagtaccctcagagaccagacgaaggccttggatctcttggagctggagttgaatgggggtactctgaactgctgagccgtctctccagccccatgcactttacatgttaagaaaacaaaaaaccagtttagcagaggatagcctattcccagccactgagcactgccctcctggcagcaagtgtttgcagtttgaagaagaaacaagcgtcctttatcttcactttcaaaactaaggtcatagcttcagttgccctcagctcagtacagtcttactgtcctccagaaatgcagagtccaccctacacatacacctgtgagcactcacaccaagaagtccatccttacagtcccacggtacctctgcgttctaggactgtaggactgtgacatgggagtagggaggcccatgggtgcaggtggaggacagcaaggattgtaccgagaaaaggatgagatgatgggcatgttcgcttgcttggggataaacgcctgctggtgagtgagtggacaggagagcgtgggtccagctctgtcacgtatggagttggagtaagtgacatggccaagggatgagagtaaaggacagcctgggcaagggctgaggagtgtgcacattggagcaacctgacgtccggggagagcagaacaggaaacacactggtcagacaggaagggaccccagagccacagctctaatcctgcctggaagctgtatatgagggtatgagcagagctggagagacactgctcgctcacctcatggacgggtcatctgctcctcctcctgtcccacatccccagcttcaccatgaatcctttaacaagccctgaacttaacctaagccattcacggcgtctcttttctaggacctgttcctgctctacagcttggcctcctaaactatcagaaactataataaaacttctaaaaacccctctgtggccatgcatttcactcttcaaagtggcaagatgagaacttggaagccattggctcaaggtggcttttgtagctgtcaagttttctgggaccctagctttctcgcctgcccacagctaagctcaccaagagccaaggaatgcttttccattatcaaagtcaccccacttctgtgtcaatggggaagtgactaagaaaagtggtcttcctacttggagctgcccagccaagctcccagctgggtcagcaaagccagccctttgatggacagttccagcttggaatgggcaggctcccgactaggttgaggagtacattggtaggaccttccaaagcttggctgtctctgtcagaaggggcctcatcatgacatcccaacagtgtgacccacaaagacttccacaggccatgtctgctgctgttgctgggaaatttgtggcactgggaagaaggctgtcagggtctgattctcatcctgactgcaagaaaagcagcaaccaggggccctctcaggaaggcagacagagaccccaacctatcccctggagagc

SEQ ID NO: 32643 - DNA, 1101 bp, Mus musculus
ttgcatctactttgtctgctattaagaaagccattgtctgagattctcattctctctctctctctctctctctctctctctctcccccctccctccttccttccctcctttccttcctctttccctctcccccctttgtgctttgagacaagatctcactttgtaacctaaattctcaatcctcctgcatcacctccaaaatgctgagattacaagtgccctgtgcactttgctgtgacatagaggaagtccttggtccttctggagaggggtgttccttttgctcttgagacatcagtgacgcaaccagaggccagggttgtgtttgccttggggtcctggacctgggtggttacacaggggcttccctgggtgttctcactgactctagttaacagctggaaccccccactccctgtcttctgtgtaactactcttgggtctaaactaagagagaggctgtctttgctccactgtctttgaccatccctgacagtgctctgtagtgacaattctggaactttgattttttttttttaaaagaaagaaataagaatacatttttggtttactcccaggcgtggggttttgggtctacttcacagcagctgaccatgacttaccttatgctctagcagatggtttctgcgattgtgtgacgtttggaactttttagagggtatatactgctagggcccagataggtgggatcagtggttgttggttgttgggggttgggggggtggttggttatagtttttagtagtttgtgttcaaagaagaaacagaaagaaatttgattctgagatctctatttctctctctcccacctctatcctctctcttctatctaatgatagggggtgaaaatgaggggctaaagggtagggaaaagaaggacccacaaaagtagcaaagaccagctataagcgaaaagaaacaagaaggaattagattcagagatctctatctttctcccctctctctgttctctcctatctagtgatagaggtaaaacttggggggggggggtcgtgtaaagggtgggaaaagaactcacaatatagcaaggcccagctacagtgcttacgtggttggaac

SEQ ID NO: 32644 - DNA, 1870 bp, Mus musculus
aagcagaaccccgttgagcctttagagtcgcaccttggggccctgcacctttcccagagtgggaatggagttgggtgcacacttcctggccatcctgctgctcctgactcacggctgtgatagacatcagggcactaagccactgctccttcgcctcccccacacagctgccctcagggccagggactgtgaacgcgccacctgcttcccagggccccaccactgggactgaacacatctgacttcctctctagcaccaagggcttctgagatcctgtatcacttactgggggaaagaccagggggaaagactagcctttgagctgtcaggcatggtaagtggcaggtgagggcagggtgtacaccacctctgctagggcctctataccctctgaatggtcaagcattgtggtccgcagttgctgcagagcagtttcctagtatatacctagtcttgttgtcagaggcatctgtgcgctggatggtttaagtcacactctgtgtgcgtgccactaccaccccccccccccacacacacacacacagagttggtgcgacccccagaaccctctcgcagaggagaccaatgtctgtagactgtggcgactggatccctcctaggttatgacttttcccaagtttaaaatacactgttctcttggaagcagaaggttcagtgctgtgctgtgaatgaagaagtccccacatacacacacttgctcagaatccactaaccagtctcagattctagagctgggagcctgggctgggtgctatatgggctgagcctgcagcatgctagctgtagtgctgtgtgcttcccagcttgagtcctgcagtgaacacactgggctcccttggttgacattctacagctctggaaccctgcaaagttgcatgtgctggtgtggaggctgatgcaccgccatggggaaccgccccacgcaggcccctctccctccctcccgataggatagtgtatttccatggcttgtgatgctgatgtcctaggagaccgtgtgtcttacccagtgtgtctcagtccccagcagggcttcctgcactctgccggtgctgatgcagcatcctgtcctcacctttcagtcctctgtcagagctgcagtgatggtgggcacttggctagaggacagacctgagatcaatcctactgcattctctggaagcatctcattgctattttatgttattttattgccatttgtgtacattcatctccttttacagtggctggaatcaagcatttgctctagggggacatgaagagtcctttaatagtccttactagagacatttttttaagctttattttatttctggggtgtgtctgtctgtctgtctgtctgatggtatgctctgaggccagaggagagtatacatgccctctgaggctagagaagggtatggaattccttggacctcaaattaacaggaggttgagaagccccctaaaattgtggtgctgggaagcagactcaggtcctctgcaagagcagcagtgctctgaactggagccacctctctggccccacccatggacattttactgcctggttaagcagacttttgtcacccagggctaaggttggaaacgtgcctgcctggctccaaagctctttttttttctccttactattcaagatagtctctcccagttttacaaccctctcttttatagatgacagacagggaaactgagacttcaggggattgagcaatctcacaaactaataaagacaggcttagttctctaaggtaggcagaggagagtggaggatcctgtgtcccttcagttaattgcctgagatggagccgcccagagtgctgtcaggctgagggtcaaaagggccac

SEQ ID NO: 32645 - DNA, 1191 bp, Mus musculus
acacacacacggtgggggggggaggggtaggtcagtctgcagcagagtcttcatgctgaaccagtgaccagtgaggactgaaagggtgtgcttattttccagggactaattattccccagtagctgcaccagaccaggactatctctttgcccttgacaagaatttaaatgcagccgggcgtggcgcacacctttaatcccagcactcgggaggcagaggcaggcggatttctgtcgaggccagcctggtctacaaagtgagctccaggacagccagagctataaaaaaaaaagaatttaaatgcatgtgcacacgtaggaacacaggtgatgctgggaggagtcagagccagggttctgcccatgcgcagtaccactgagctacagtcctaccctattggaatatatttaagctggtgggaattttaaagctaaggaatgtactgttgagggttggggaagtggctcaggtagtaaagtgcttgtgagctaaagatcagcacccacatgaattctatgttgcatatacttgtaactccagaattggggttatggagacaggaggattgctggggctctctggctggtcagcctattaagtccaggagacttaacctcaaaaaaccaaggtagatggtgcctgaaaaatgaccctctgacttccctctgcatgcaattctgtgcacctgcacacacaaatgcacccacatataggaacacacacacacacacacacacacacacacacacacacacacacacacacggccggtcaccatctgctttgaggtccccagcagatgtcccacaggtgtaacgcccagtgtgctagcccagcaaagagcagagcctagcagcagctgtttatgggcatccgtggttctgggcgctacgctatcccgtcctccggagcttgccgtctgtctgggagacagacattaaacgaataattacacaaatactctttaattatagttgttataatgcttcaaaggaaaaagttcagaggcataggagccaataattagggagggaggagccgaggggcagttcctgaaggatatctgaagcagctcggatggagggctttgtgaccagggcgggtatactttgtttttttctttctttggaaatagacagtaaagaagagaaaggccctatgggtaataatgggaggggctagacagcgtg

SEQ ID NO: 32646 - DNA, 1113 bp, Mus musculus
acccacagtgaccctccccgatttgtaataggacatgatagatccccttctgcaaccttagatggaacctgccagctaagatttgggaggaaatggaccaaccacttttaatggtgttggacccaccaaaggtacaagcactaggccacttgggcatcctcggagaagtgttcctgcccacccttagcactgcagggagccatggggcgaagggtgagggtctctgctgtgggtggcttgagacagaatcaatgtgatctcagcacaggcctttgtagtctgagactgttacacatggaaatacaggccgctttcaccccgtgcaggcactgacctaaaagaccatgtagacctgggctcagagggaaggaaaggacccacagacgtgtcacaggactcaggggctggacagataatgcttcctagtcttgcctccttatccgcagcctcccaagccttagttagcttcacaagccagtgacccaggcacaggcagctcttttagtgtctatgctcaatgccgtcattgtttcctgtagatcccagcgctgtgaagtcaggggttcctctgctcttttaaaaattcccccttttcatatcttcatttaatcaccaagtttttaccatgtaactttcattggcccaactctgatacaaaggtgaatatcatggtctctgtccctagtccacaagtgatgttggacttacaaacaggagcttgtgaagttgcctggaatttgttgttttgttttgtgtttttgtttttgttgagacagggtcttgcagtgtagcccgggctgactttgaacttgtgagatctttctgtcatagcctcccaaatgctggaactgccacacctggcttgtttagaactgctagaagtagaacccggggcccagcatcactaggggtgggaggaggtgggatcgttggttgatggggatgctgtctggccggcaaagggagccttgcaaagcaaaacccaggacatgtgagaagaggccattgggagtgggaggcagagtctgggggcaggagatggagatcccggtgaggcaagttgacaatatgtcaagacatcctccaaggcttgccattccctccagtgggttc

SEQ ID NO: 32647 - DNA, 1171 bp, Mus musculus
caaacttctgtcctctgtgggagcctgctgtcagacctcctggcccagagtagccctggtgaagccatgggaccctcacttggactgaattcaagcaagaaggccaagtcatgtttacgtgacagctgtctaggcgggaatcccctaccgcactgtcacactgcagaagcagttgtccccatattggctggacctgggacagggttgagtgctctgctagatggctctccccaaataaagcatcacctgggagctagcatgcattccgtttgggtccttactgggttctctctctgcgggtctgtttccctacgatgaagatgggcccctcctgagagctatgcttggttagcttggtagtgtatcttctgagtactgactccattcttgtgcagtccagataggaccagatgcagggaactatcactgtggcctgagtagccattaccccaggcatgtttagacctgtgtcctgtctttggactataacaaatccaagttccctccttattaagtaaatgttcttgttaagtcacctgctggacttctatacaacttacaaaaccctacttagccacccccaccctctttgatccctcaggtagtgttgaccatatcctaaccagcgagctgtggtagttctacccttctactatggctcctcaaggggcagcggggctgccatctttgtctttctgaatccaaaagagaaaagtgtggagccatccatgtttgcctaaccttagctactcaaaagtggcttaaaaaaaaaaaaagttttgaatctacagagctgaaaatggagcgtggcttcagggatgggcaagttgaagtttaggcagggggtcatcatggttgacagagttcattcctcaagcagtggtgggcctggggtgaggatggaggcttcagagatggcttccctgagggaacccagcaggacagtggcaaggactgacacttggggatgccagaggcgaagggccagcagagtctgcctggcgaggaacagtgaccttccagaggaggacggaggtcacacagcccagtgcaggaggcagtggatggcccctgatcatgtggtggagatggaagttgggcagtgcctgggctgtggtctgctgtggtactagaggtcatctgcacatggggtcagggagggagcaaggct

SEQ ID NO: 32648 - DNA, 1178 bp, Mus musculus
ggtgtcgggcctgggaagggatttgtaaactgtggagcactgtgcccatgtgaatggatatgttcattcctgtctttctgttgtgaggtggttgcgcgagcatgtgtgtgtgtgtgtgtgtgtgtgtgtgtgtgtgtgtgtgtaggccacaggtggtgctgggaatcttcaatcactcttctaccttattttttgagacaaggtctctcattgaacctgcagatcactcatttggctagattagactaggtggccaacgagcctcagggatcttccagactctgcctcccagcactgggttgcaggtgcccacagctgtgcctggctctttatacgaattctggggatccaaactcaggacctcgtgcttgtacaacaagcccttgatagatcgaactatctccttagtaaacccagcccctttctgtgtactggaagctgagctcaggccaggcattcccctgatataaataagatcgtagacagcaaagttatttgtcatttaggctacacccatacctcgcaatatcagattctggacacacacaggaagagtcaccacctgcactctcccctcccccaaataagtgccccatccttcgtgatccagatagaagaggaaatgcccagttcctctctgggcatcccacatacatccatcagcctgccttcctccaggaacctcctccaaggccatctcctgctccttgcctgcttctgacttctgtcttttacacatccctgcttacctttctgcagcctgtggcagccaggctccctcagccccttcctctgttagcatctggtacctggagatccatcagcccgcagtgcacttgtcctaattacaggaccccagccttctccttcactgagccgcctcgtccacacgtgcggtctctccacaggctgtgaggctgagggcagaatgcatgatcttgtgaccttccactccatgctcaggatttcccccatctccctgtatggaagtgcactgggcccactgtgtgtgtgtgtgcctgacttctgcctgtgtgtactccagctgtccctccccctgcagacctaaattactcttctcctggcataaatccagacctgactcgggtgtgtgggtgactgcaaaataaatgttgattccagtgccgccttggcttggagagaggcagtgctgtcag

SEQ ID NO: 32649 - DNA, 1573 bp, Mus musculus
agccagacgccacgggatggagggcttcatggactcagggacacagaccgacgctgtggtggtgctgtccttggctcaggcggctgtgctgggcctggtctcagaaaatgagctcttcggagccaccataagtgctgaggccttctatccagacctagggccagaattgactgggacagccatgggggagccaggaccgccagggccggacatctatcagctggcctgtaatggacgagccctggaagagcccccggaagaggaggtgctggaggtagaggcggcctttgagaagcacacgcggaggaagacacggccccctgtgaggctggtacccaaggtcaagtttgagaaggcagaagaggaagaggaacaggaggtgtatgaggtgtctgtgcctggtgatgacaaagacccgggccctgcagaggccccagccgaggtggccagcagcggctgcgaggccctggtgcagagcagtgccgtcaagatgatcgacctcagcgccttcagccgcaagccccggacactccggcacttgccgagaactccaaggccagagctggacatggccccattcgatcctcctttcccagatccagcccgggatggcttccccgagcccagcatggcactacctggaccagagactttgcccactgaatgtagttttgagccgccccacctggccccattgagcaatcctgagcctcccaacatgacatcgacgacagaactcgtcaaaccagagcagggcttcgtgtggcaggagtccagcgagttcgaggctgacacggcgggttccacagtggagcgccacaagaaggcacagctggaccggctggacatcaatgtgcagatcgatgactcctacctagtggaggcgggtgaccgccagaaacgctggcagtgtcgcatgtgcgagaagtcctacacatctaagtataacctcgtgacgcacatcctgggccacaacggcatcaagccacactcgtgtccccactgcagcaagctcttcaagcagcctagccacctgcagacgcacctgctgacacaccagggcacgaggccccacaagtgccaggtgtgccacaaggccttcactcagaccagccacctcaaacgccacatgctgctgcactcggaggtgaagccctacagctgtcacttctgtggccgcggcttcgcctaccctagcgagctcaaggcccatgaggtgaagcacgagagtggccgctgccatgtctgtgtcgaatgcggcctagacttctccaccctgacccagctcaagcgccacctggcctcccaccagggccccaccctctaccagtgccttgagtgtgacaagtccttccactaccgcagccagctacaaaaccacatgctcaagcatcagaatgtgcggcccttcgtgtgcactgagtgtggcatggagttcagccagatccatcacctcaagcagcactctctcacccacaaggtaaggctgccagcctccgccatggcactttctttccaatgccctccaaagccctgatgggatcctttaggtgtggtacacaggtagtttttg

SEQ ID NO: 32650 - DNA, 2681 bp, Mus musculus
ttgacaaccatcaggagatggaggacttcgaggaaaacgcctacacctacagcagtgtggacagcagcgcggaggccagcaccctcactgagcaggccatgaaagagatggcctactacaatgtgctatagcaggccgctgagtgggcggggagggcgcagggtgagacccacatactgagggctgcccctctgcagcccagaaccaagctactgcccactgcctggccctcctcccccccaaccctcaaatcatttgcaccactagggatctttagaccaaatggagactctactactgtccttgcagggagctggccacaggcctaggcatcccggtgagggaaaggtaaccaggaggtccgcatctggttctccttggcctgctgctgtgcgtgggcagggggaatgccagtgaggcctcttacaggcacagacttagaggtcttccccaagccacctcaggcgcggaggcgctctccaggaagagaatgcttgagccaggccttgtctctcttctgcaccgactctggcctttaaggacatctgaacccctgcactggccgacactgcccacccccaccctggtcagacccaagaacctcttccctccccctatcactcaagagccaggcagggcactctgccttctacctcctgggcctccccttgctccatgcaggcatgcatgcggccctagccctggccctgcctgtcggagagctgaggggagtccagcctccagagcaccctcccagctggcctgcagagctcccctgccccagcctcgtttgaaagaatgtccctaatgtgcatttcaacacagttcatccaggtctgttccaagctaaggtaccaaccacagggtcctcaccaaacaaacccaggacatgccctgcatctggcaagcattaacaaagatagatggcggctccttgagccagcggggagggagggtcggggtgacatctctgggaccaagagtggctgtcctcaggggaagccaaggaagaccacccgtgggaagaggggaactagaatggttttggttttggttttttatgagcaagcaggtgtcgtggggagtgggtgagctgtggctcagccggctccggaggaagagcaacatgtttaactgaagaccagagagagggaggggaaaattctgtttgcagcaagaagggtattgtgaaagaaatttatgttttcctttccaactctcctgtctatcatctttgatggagaggggttttttttggtttctgtttctattggtttgttttgggtttttttttttttttttggtttttggttcgtccaagcctcagctttcttgtgtgctgtgtgtacttcctgcctccctttccgaaagcagccatgcctgaggggccctggcccaggtgtatcactagctgggagcctcagaaggctaaggcaggagggaagtgggggaggcagagaacctacccggccctctccagtcagctggccctcttcacctgtcccctcccctcccccctgtcctccatccataagctcgcaagcacccaaacccctgcccacaaatcccaaggcccccaaggggaggagcaggcgggactaaccccaaaaaggcatagatgaagccaccagctttggctgaaaaaccaagagggggagaccagctgaggcagagggtgttgattcgcagtgtgacagcccccaagccaggcctcagggtgactgttcaggactggggatgagggggacacagtggcccaggtgtggtttcccatggctcccggcctcccaggtgcccatcatgatgaccctcaggtggcagtgattagctatcactgtacaagacatttatttctcctgctgagcagaaggcatcacccctgcaaactacctcttcccacaatgactttctccctggtaccaaaaagcaccctgtacctcctccttcttctcttcctcctcctcctctcctgccaacgcagtggccttggtcttggaacagaagggagaagtctggcctgggtggggtctcccactgtcccccagcctgccattggcacaacccccttggggatgccatactgaaaaagcccctgccctcgccttgtgccgggcaaagcggagaggaaggcacagcacagtacacagttggagctggaggtggtcctggcacagctccagcctcacccctcccaggcttctgaaaagggtgactcagaagccctggccgaattccactctaacttattttgacatgtatacaaaccaactgtttagagattcctcttgtgcagagccctactgtgtttttatgttcctgtttaaaaagagaagtttacttagcaataattataaataaatgaatattctttagcgaggtgactgtacgtgcttcttggtgctcttggaggcccttccccccaaggaggtcccaacaaggctccctagtcacatgccagacagcatccccctctggaactacaagacaatctcagccacctgacctgccagagagttggggggtgggtggaggagaacatgctccgagtcccaagggcaggttttaggtctctgtagcccggatctacctgtgaaggcctgggacaacagatgagttctcccacacacagcttctttttcccggttgttttgagactttttacagcaggctcacactgtcta

SEQ ID NO: 32651 - DNA, 2074 bp, Mus musculus
tctggatttggggacatttgaaataaaggggctaacagtgtcagaaacagggaggcttgcaaaattgctgatggcggcttatttcttcctgaaatggccttccagggggcttcagactgaccgcctcaggctatggggtctggaaagggaacacacagaggtgacagtggcgtggagtctaagctgaagggttctgagctgaagcatggctctgaggagagatctgtccctccccgccaggctttggctccctcggcctgatgacatctgtgctggtctgccctgatgggaagacaattgaggctgaggctgctcatgggacagtcacccgccattaccgagaacaccagaaggtaaatgtgtgcatttcaaggtccatagcccactggccctgatgaccgggaggatgaacccggtctgccggtctggaggtagatagctgtgtctggtgctcagctgatcctgtggcctgtccccagggccggcccaccagtaccaaccctattgccagcatctttgcctggacacggggtctggagcatcgtgggaagctggatgggaaccaggaccttatcaggtgagctcatggggagggcttgagcaggtgcagcccacagttctgcccagcatgccggggcctcactctgccgcatcccccgcaggtttgcacagacgctggagaaggtgtgcgtgcagactgtggagagcggagcgatgaccaaggacctggctggctgtatccatggcctcagcaagtgtgtgctttgggaaacagggcttgagaccccagcaggtgggaggaagccagggggaaccccccccccccaagagtctctctcatgagtgggtagagctgcctggggtctggggcaggacaagtcctgagaaatggctcaggccaagccttccttgaccaggtctgagttggtgccctctggcagttgcttagttcctctgctctcctccttaaacctttccccagcttcttttatgaggcctgtgcccggtagcttgttactttaaactttctgccaaatttattgtgaccctctagcagtgggctactagcaaacttggacctgggcctggtggcctgaggtctaatgagcctgggaatggcttggttgatggcctccaggaggcctgagtctcccctgatgttctctcggcagtgtgaagctgaacgagcacttcctgaacaccacagacttcctggacaccattaagagcaacctggacagagctctgggcaagcagtaggggtggacactactcagctccagtgggtactctgtacatggcagagggtgggcctcacagcccctctctggtggcctttctaggggacatttttttacatatatatatgatggagatgttttttaaagtatatgagcattttccctcacggtggacatgaggcaggaacgtgtgctttacctcagacagtcagtgttctgcatactgtaatttatattgctctggaatcacatggtgccatatttagctactaaaaagctcttcgcaaaactgtcttgatgtgtttgtccccgagtgggagggagcagctggtaggatcccccagggacagggttggggtgcctcaggctgttaataggtcagccagggggttgcttctcatgagagggaacgaggcagcctgtgggcctcctgcattcttcactggctgcctgagttgccagactttgggggtgaggccctggcttcctcacaaagttgcgtgcagtgtctgctgctgagccagtggagctagctggggcctaagggcagagactcacatagaatctcctaaggtgatcccgtttctccatctagggaattgtcattctgtgatgttgtagatacttgttataataacacatgcacctttcacctcttatagtgctgacactccaacctcgagctttgtgtacactaagcaagcattctacctctgcatcccaacttcatcctggtaccaacttagctgagacgaggcctcatcagcacgcagttctagctggtttggaactttatgggtcaggctggtcttctagtcacgaaggtctacctc

SEQ ID NO: 32652 - DNA, 1118 bp, Mus musculus
gaagtaaagttggcagcaggggtctgtgctcccagaagtctggtgggagaagattggccaagcattccgtggtaacaggagtccaggagtcttatggaggtgctgctggccctggccctggccctgggaccatggcagagtggcagttttcagcctgggggccatgctatgcccgctctccccacagtccatttcgggcttcgcgcacagctgcttccagtactctatccagaagaaatggccgctctacttgagcaccaagaacaccattctgaaggcctatgacgggcgtttcaaggacatcttccaggagatctttgacaagtaacaacctctgatgcttcctgggggcaccacagccccccggcttccttgcgccattcctacttcacctggggaggttgctttcctagtgtgcgcttggttcagttgtgagtttcagggaggggtctttaacctgccaaccccctgccctctccctgagacaagcccttttgcccccaggcactataagactgacttcgacaagaataagatctggtatgaacatcggctcatcgacgacatggtggcccaggtgctcaagtcttccggtggctttgtgtgggcttgcaaaaactatgatggagacgtgcagtctgacatcctggctcaaggtaccgctcccggaggggggaaactgttggaattccatgactggaatgactttttttgttgttgttttttcaagacagggtttctctgtgtagccctggctatcctggaactcattctgtagaccaggctggtctcaaactcagagagccgcctgcctctgcctcctgagtgctgggattaaaagcatgcatcactatccagcgatttttttttttaattaaaagattccagtatgattgtgtaagcacaagggttacgtgaaagagaggctctggggaagaaagtaagacacacccaagagcgtgggcatgaactcagagtcttctggaagtgtgtgtgtgagatcccttatggaggccagaagttgatgtcagatgccttctattatgctccattattatattaatgtataataataatctacattattggctttagtatataaggccaagcatggtagc

SEQ ID NO: 32653 - DNA, 1104 bp, Mus musculus
gtggacctggtaaaaacggcagccaggtactattctgggcactttacagataacgtatttattgacaacccagcatggttggcattttattggttatttcaattcacagctctggttaaagcatggtgtaagcctcacagtcagagatgcaaggttccagaggccatgaatttaaactctgcgacaatggctctcagtcttcctactgccgagaccctttaatacagttcctcatgttgcggatccccaaccataaaattattttcgttgctatttcgttattttgctactgttatgatcgtaatgtcagtaactgtgttttctgatgatcttaggagacccctgtgaaaggattgttcaacccccaggttgagaactactgctctagagtctagactcttctccctcctccgggatgacttctggggcccccgtatggtttgagaggtagggctgtggtgggtctattgtacctctgttctcacagagttcaagctgaagaaaatgtggaagagccctaacggaacgatccggaacatccttgggggaaccgtcttcagagagccaatcatctgcaaaaacatcccccgccttgtccctggctggaccaagcccatcaccattggcaggcacgcccatggcgaccaggtaggccaggcttgggagacacggtctgtggactcatgctccccacaggaagccttggcttgaactgcctctcctttctgcagtacaaggccacagattttgtggtagatcgagctggcacgttcaagttggtcttcaccccaaaggatggcagcagtgccaaggagtgggaggtgtataacttccctgccggaggcgttgggatggggatgtacaacaccgacgaggtaaggccctggccatcctcctctccagcccatttctatctctatctctgcctagtttgttatccttgcttctgttggcctcattctcatgccaggaagaggtagaagagaccacgaggtcagaaaagagcgcctccttgcctggaccaggatgggtcatgtgaccgcctttgagccaatcactgatggccagggaggaagggctctgattgcataagttggagacagg

SEQ ID NO: 32654 - DNA, 1149 bp, Mus musculus
catcatcctggctgcttcccaggtcctactaggtctccctgccggggcagggaggggtgcatgcagccaccttgcctagagagcctgactgacttccaatttgctgcccactggtttctttcccttgctgtgcttggtgccccaggtcatcttgtgcacccttcagcgtatgcccgccctgtgttcctaccccatcccctaacatgctctagcagagggtggcattaatgctgttgcggaacacggggcttggagtcagaaatttctgggtttgcattgcattgctctccctggctccaggactattttccacgctacatctcttccctgttcgctggggaatagtgcccactgcacacactccttcgcgtagaccctggggtaaggagacgtactttagaacctgtgcacttccttgttccgtgtcttggtcctgagctacttgtctactcctccacagcacatagcgagctttactttagcccaagatgaggccggcaatgtcattctggaggatggcaagggtcgttgtccctttgaccccaacttcaagtccacggctctggtggttggtaagtggtgtcacaggctgggtgcttttgtgctccgtggaagatacccagggcaggaggaccgaatctggggtgtgtctgggctctgggcagtgtgggtcccagaggtaaggtggtgtccccatgctgtgctggttcccagagggtatcgagtgaccctgggctgccctcttccaagtccctgcttccgtctaggcaggatggatggcgctgcggtcactctgggccctgagcagggcacagggactgggccaaaggagccattcccatgggaacattctcttggcagatggtgagctgtacactggaacagtcagtagcttccagggaaacgacccagccatttcccggagccagagttcccgccccaccaagactgagagctccctcaactggctacaaggtggagttctgccttggcccactgagcagttgcctaacccttgggaggggatgctgtccccgaggttcctggcctgactgtgtctcctcccctggcctctgcagaccctgcctttgtggcctcggcctacgtccccgagagcctgggcagccccataggtgatgatgataagat

SEQ ID NO: 32655 - DNA, 1099 bp, Mus musculus
tccctctctttctctccctccctccctcttccttccttccttccttccttccttccttccttccttccttccttcctttcttcctttctctctctctctctctctctctctctctttctttctttctttctttctttctttctttctttctttctttctttctttctttctttcgacagggtcctgctctgtagctaggactgttgtgcacctcatggccatttcttgggtttttaattgccttcttttgtgggagggtagtatttcagacagggtctcatgtagcctagactgacctccagttcactgtgttgtgaagataactttggatttctgtacctcctgtgactacctcccaagtgctaggcacattctgcttttatagcaaaagggggttgtttgtgactttatttgtggtaatgtgtagacggggtctgaggagacggctcagaccgtggagtacttgcctcaaaagcgtgacaatctgagtttgattctcagaacacacataaaaatgccgagcatgatggtggcaagaagtacccctgtagttccctgcccatctgatctttcctagttgttaaactccaagctaatgagacgctgtgtctcaaaggaggtggatggtgttcataaggatgacaccaaggctgtcttctaaacacacacacctgtaattatgactagaaatacccagtcagccccatggtggtggggactctgctcaggcaagtctcctgcacctgctttgggcctggtgggcttacaccagcagtggagggaaaaaggaacactggccaatgggattctacccaagactcttttatacccaggccatggacccaggacattgagggtgccagtgtcaaggaactctgcaagaattcctcatacaaggcccggtttcttgtgccaggtaagatgccctgggaaaggtgagccatatttgcttggaaaacacctctaggtatttttaggtacaaatttattcctctagccctacaaagaagagtccagatcatgagtcacttagtcccaaccatcgcccaagttaccattggtcctagttagagtttctgtggctgggaagagacaccat

SEQ ID NO: 32656 - DNA, 1196 bp, Mus musculus
taccaggctctgtcggatagctccccagggcccagagtcttcactgaatcagagaagaggccactgagcatccaggacagctttgtagaggtgtctcccgtgtgtccccggccccgagttcgactgggctctgagatccgagactctgtggtatgagagctgactttagatgtggtcaccctgacctcaggggttgtgagtgttcagtggaggtcagctacctctgcttctcacagaacacagccacggtaccctgactggagggcagctggtaccacaggcccaacagcccagccagctgcttccagtgtctggccgagaactgggctgcctccaggggccagagggtccttgtctgggtggcagaactctgctacttaactgagccctttgtttaaaactgcaaatgtgaagccagagaggaaggagaaacagacaaggaagactacaacatagccactccagttcagcctgctgggctcttggggacttctccaaagtggctttgtgagcaagccgaagttgagaatccctccccgactggactattctaccttccgccttactctgctgctgaggctaccctttctcactgcagaatcagggccctgctccagcttcagccaaccgaggacatatctgtgaccgctgacaccctaccacctcagggaccagagggctaggctgattctgcagccctcctcaccagaccctgggctcagtcccagttcccggacttctccagcctgtatcaggctgtggcctcaaaagcaagggagtgacccccaaggggggttgtgacagaagacttgcctactgtccttttcccagtcagagaactatgtccctacccatcgacgtcttttttttttttttttttttttttttttggtttttcgagacaggctttctctgtgtagccctggctgtcctggaactcactttgtagaccaggctggtctcgaacttagaaatccgcctgactgcctcccaagtgctgggattaaaggcgtgtgccaccactgcccggccccacccatcttctaattcctacacagactcctggatcctcgttccttgtcctagctcaccgtgcccgtcactctaagggatgctgacactgcccatcacaaggaccctgaatttacatgggttttatatttttttttaataagatgcactttactttctttttt

SEQ ID NO: 32657 - DNA, 1131 bp, Mus musculus
gtagccctggctgtcctggaaatcactttgtagaccaggctggcctcgaactcagaaatccgcctgcctctgccaccacgcccagctcttgcctccacctcttgtgtgcagggatggcagggtgttaccaccacatctagtttatatagtgctcaggattgaattttgggcttctgtgcacataaacccctaccaactgaacatcttaaaaatcccccctttttgttttttctaaggttgcgtgtttgtttttgctctgcctttttagacagcctttagtaggtcattcaggctggtttgaaacattatcaagacctaacattgctatccagacagcagttggtggctgctggttgacgtgaactgacctgattgactggccaggtattgctgtctgtacacaggtacagaattagttagcacagtctaaggactgcatttgaggtttccaaggttttttcttgtctgtcactactagcattatcaatttagctcttctcataggagacttacttgcaatttgaaaaactgttgttttttttttccctccccctgtaggtatttacataaggaatttgcagagtcctggtcagttccaaggttggcagaaggctttgatgtcagcactgatgttatccgaagggttttaaaaagtaagtttgtacccactttagagcagaaactgaggcaggaccaaaaggtcttgaaaaaagctgggtttacccgagagattggtcagctccccgtttctgaagataccttgaaggcgctcagtgcaggccgctctgtgtctggcctgctgatggcaggggatgaagtctcctctaaaagtcagaatcacagcacagctttgaaagtggcgaagtcgcaccctcacagcacagacgcacagaagaaacgggaagggagggataaaagaatccaagtcttggaagagagcctagtgcctgccaccacagccttgggtcatcagcgagagcttcagaaatccgccaccagtgactccgaggccaccggaagagctggcagtgatacgttaccaagtgctgtgctgctggaagagctgaagcccggggagccgggtgaccagagcttcagcagcaaggtagtgcagagagggcatgacttctt

SEQ ID NO: 32658 - DNA, 1160 bp, Mus musculus
ctctttgtgtggcctttacaactgccaggaccctgtatgatctaaggggattgatacacactctttgtgtggcctttacaactgccaggaccctgtatgatctaaggggattgatgcacactctttgtgtggcctttatagtcctcaacccacatcatgagcacacacaataacaactaaatgctaagaggaaataatagctagtcatttatactaagatatcacagctcttcctgattttatttaaagccctttctgtaaaatttgaaattatgagggtgttgatattaaggctagttagttttgcaggttttttgatatgtttttgtttttgttgttgttttgttttgttttatttccattggctccaaagctttaccaagtgttttctcacttgtaggatcttctggatagaatgattgctgaagaggagagcctgagggaaaggctgctcaaaagcatatccatctgtcagaaggagctgagtaccctgtgcagtgagctacaagtgaagccatttcaggtctggtagaccatgcttgggagattggttttaacttaggactgcgaatccaaagcttccttgtaggagtagggctaggcagactagaggtgttgaagtgaagcagctcacgggttatcaaagactccttcatgtatttctgctttatagagcatgataatgtttttaaattaactttgaggaaaatggaggcacagatgtttgtgagaaagaaagggatgggggaacatggaagaaatggattaatcggtaaagtccttccctcacagccatgagaacctcaatgcaatcctcatatctatgcaaaaaagccaggtatggtagcatatgcttataacctcagtgctggggagtcagaggttgatctctggggcttactggctagccagcctagccaaatgcatgagcttaaaaccaataaaagaccttgtctccaaaaagaaaacaaacaaaaacaaggaagagggctggagaaatggttcagtaggtaggaacacttgctgctcttgcaaagcagctggattcagttcctagcacatgtggtgtcttacagctgccctgaactccagttccaggggatccagcaccctcttctggcctctgtgggtatcaggcgcacgtgtagacttgagcagga

SEQ ID NO: 32659 - DNA, 1197 bp, Mus musculus
aaaatatggaagattgtagtttacacttggttgcggtacaaatcatgcacagaacacatgagcctagagtcggcaccatcatacacaaatcttaccttgtggattgatgcaaaattgttatctacaccactgtgggtttagttcagtggtaggaggtgttaccagcatacgtgatgtcctagatttaatctctggtattggccaaaaagaaaagaaagatcaggtcatcaagatgggtcagtggataattgtcacctcaaagtctgatggcctgagttcagtccccagaaccacataaggatgagaagaatcaactccacaatgctatcctgtcactgtcatatgcatgtcatggcaacctctccactaactcaaacaatagtaataagttgataaaactatttgagtttaaagaaattgtaaagttcttaaaacctgagagctatgagagcgttggtttgttgtttttttttttttgttttgttttgtttttgttttgttttgttttgttttgtttttgattggtttggcttttttgaaacagggtttccttgtatatacagccctggctgaattcactttgtagaccaggctggcctcgaactccgatccacctgcctctgcctctcaagtgctggactataggtgtgcatatgacatcttgcatatgacatatgcatatgacatcttgcaggaattgtttctttccttttaccctgtgggctctggggatgagcctcagattgtcagtcttgacagcaagcttgtaccctccaagccatcctgacggcccgctctcaggtgtgaactgtggagatggcaatgttgtgttatactgtcaacgggtagcatacacatgagttttgcttggtgtgatagtgcaggcctgtaaactcagcctgtggagacttgaggcaggaagataccaagctcaaggtcagtgagattatctcaggaaagaaaaagtatgggatagtttgtgtaatgtaagtactgtactgaaagtgaaaaactggggttgcgttagtacttgaaatatagattgtactgagtgtatattgcctttgtcccactgtaaagatgaaaagtcatggaataaatctattgctaagttgtagaccactgcactgtacacttacaacttgtaaagacggtatgtatatagggtgataattgggtattttaccatagtttaaa

SEQ ID NO: 32660 - DNA, 1468 bp, Mus musculus
ccaacatccagtcctgagagtccttgtccagttaggcagctggggcttcctgtgcctggactggactgacggatacgtagacaaggagtgacatatacatttccatcagtttagatgtttgaaactaccttgggcaggttctattaactgcacctaactcagacgtgagtaggacagaaggaagctgtcccgggcgaactgaggtcacaaagacttgcttttgattcaagagagaccttaaaggctagttatgatagttaagtacaagttttaacatctggtagctaactttttttctctaccccgtaattctactatgactgctcttctagaggtcctgagttcaaatcccagcaaccacatggtggctcacaaccatctataatgggatctgatgccctcttctggtgtgcagaaataattttttttttaattctacttatttcaatactatatattagaaaatgaaaaaacgattgtggcctgctttggcatacaggggtacaagacatgaagtaattctggtaacatctaaaaatatatatatttttgttcgcggacatttgattaatgctgtagctatggaagctttgatgtcacccagaggcgtgtacctggctggcactatcccagtgagggtttcttgagttccagtatgagatggcctgacctgctgccaaaaagagtagcagtcatttctgtagtgcaatttcttgaggtatatgtgtgaacacacatgcttgtctgacctgttgagtttttctccagtctcccaaccctgtgctcattaggcccagtctgttccctgtagatgacaaccacatagagaggctgtctggtgggctgggccattcctgtcatggagtcagcaactttgcacatctacaagttatctgtgtaatcacgtccacaatgaggctctccaaacccatcactactcttccccaaagcactatatttattctgtctgtctgtgccagttctgcccacactgactgatcttgaaaacctgtcagtctgctcttcacacacatatatgttgtttttaaatgtatgaaaataaaatgtgtatagttaccttttaaatactacactgttttgtcttcaatggttgctttgatctatagattaaactcactaaaaggcgaagtgcaaaggatttagaagtttcaagagtctcagaatagtttggatttactctttttcatttggggatattttctcattttgcagctattaaagcctctgggctgggtatagctaagctgttggtgcacgtggaaggcctggcactactccagaaattagatatagatatatatacatatacatgtatatatttacatacaaaaatatttatatatatatataaatataaattgaagatatatatatcttcaatttatatttatattattatttatacatttattatttattattttttatttatttattattatttatt

SEQ ID NO: 32661 - DNA, 2778 bp, Mus musculus
agaggtcagggaggctgggggacaacctcacgctaggagactgcaggtatgagcttgctctgcggggtcatatggaccccacagtgctggtatgagggtacaggagcagggtgattctgggaggagaggggtaggcgcccattattagtggagtaaaggcgtggaaggagtccctggttctcctaagagcctaaaggctttgctgctttctgctctggctctgttctgagtgccactgggcctgctctgagtgccactgggcctgcatgccctggctaggggctgctgggtgcaggaagggcttgcttcagactccaggccagaggccacggaacacttcaggcactagcactagttctcagctgatcatttggtgttgatctgtgacaggggtagggagtgtctccccctgatctgctttcttatctcacacaccaggctccccacgagttcccattgtggggatcctggcaggattcctttctctaaaatggaaacagagtttccaagagggctgtgcttgggtgtcttgggaaggcatcctgtgctggggcccctggtgggctgaggaggttcactcgtatcccacctgcagaagtattacctgcccgctgtgtggacgaggaaggcagagacaaaattaggaggtcatgtgcttggatgaaccttcgtttttgcttcaatcaatagagaatctgtctataaatgataagagttggtaaaagcaaagttccatccttacgaaaacttagtaagccaagactagaaagaagcccgtaatctggataaagatctcgtcaccagtaagcgaaggcgcccaaagcatcggacagagcaggctctgatcccctcagtcagaaactgcccggcggcacagtgtgttggtgtcactaacccacacttcagatggaaacaagaattacaattgccactgttttaaaaccataagctacctaagaaacctgtgtgtcaactagcaaggcattctgtgagttgccctgtaacgactggttctccccaaatcaacccataaacatcagtgtaattcccacgaggttggacactttctggaactcttcaggtcctggcattcatctggaaggtgacaggctgaggatgtgaagtagttctgaatggccgaggtgatgaacggctgctgacactaaggcgggcaacaggcagtagctgtcttaacagagttctcaaacgacttggactcttctgccagcgtgaattcagctgccatgataggtcaggtcagacagacctaggcacgtagaaattcagtatatgatttcaggtgcaggggaggggaggtggatattttcatagtgctttgagacagctacctacctatgagacttctgtttcaaaaacaaaacaaaacaacctagggctagagggaaaaaagcaaaagcaaacaacaaaattgttattattattattattattaattattattttagtctcactatgtacctctggctgtgctggaactcattatgtaaaccaagctggcctggaaatcacagagattccccacctgcctctgcctcctgagttctgggactaaaggcatgcgccatcatcacacctgggaggaaaaaaatttttttgtttttttgagacagggtttctctgtgtagctctggctgtcctggaactcactctgtagaccaggctggccttgaactcagaaatccacctgcctctgccttcctagtgctgggattaaaggcgtgcaccaccactgcccagcagaaaaaaatatttttatacctgatttaggaaacccttttctagacataacatgaaacctaatatataatgggggaacattaaaaaataggttttgacacacacacacacacacacacacacacacacacacacacacacacacacacacacacaaagcttgaaagcatgctataggaaacaggttaaatcaatacagctgtgtgggtggaaacgagtctgcagtgagttctgtcactgctggagaaaagtgtgttttgacttctcagagaacgtcactagggtctgtccagcagcacccaaagactcagtagtgacaaggctgagttcttgcagggtctccatggtttatgttgccaggctcaggccacacggcttcctattcatgtcttggtgacaggaatgagatgaagagtggggagcgcttagcacagagcaggggttgcgcctacagcaagacttatttgctaccatatggtttgtaatcaaatgatagggaactgtgcagaataaagaatattctttggaggtcagagatgtgcagtgaagttacttgtctgacaggacaaattttaatcacaaacacacacttgggagtgtcttgcaatgtatccctgactaacccagacttgccatagagagccaggctggccttaaacttgtaatcttcctgcctctgctgcccacaggctaggctcacaggcatgcacaccatgccctccctgctgctgtttacatacataaatagtacttagagcagtgtcctttcaaaagttcgtcagcagagttgcctctggaaagataggcaggcctgtttcttcagtctgggtgctaaggtgatgtgtggcagagggccacatgtaactggatcaaggaaaaaagccaactcttggtaaagcctctgaactaatccttgggagaataagggccaaagccaaagcatttccttctcccctcccctcccctcccctccctttcccccaggcaggtagcacaagctagcctccaatttttactgca

SEQ ID NO: 32662 - DNA, 1743 bp, Mus musculus
agtctcggcctcagcagcagcctcctgcactgcgccctgaggtggagatggagccccggctgcaggctgggttggcctctcacctgcccgaggtcctggccggcctcagctgccttatcatcgtgctcatctttggcatcgtcttcctgttcctgcatcggtgttcgggcttcagcttccggggagtgaaagtgtacaccatggaccgcggcctcatctcctacaaggggctgccccctgaagcctggcaggaggagtgcccatcggactcagaggaggacgagggccggggcgagaggaccgccttcatcaaagaccagagcgccctttgaaaagcccactgcccaccctatcaaatcgatcccttcctcgggcactttttaattcaccaaagtatttttttatcttgcgactggatttggaccctagctgggaggcgagaggggcagagactgcttcttaccccacccttgggcctacctgtttgcctgaggtgggatcccaggagcctcacccctaccacccctccatgtggaggaaagaggaaatctttagggcagcttccttggcccagctggacttcccgcagagtgaagaggggcggcctctctctgagtccctgaccaggctgcagccctgccccttcccttccctgcccctcagaaagcaataatggttcccatccaggcaacagggaggctggccaggaggtacttgaagaaggcagccacctctccaagggcttttgcatcccctgaccctctctggctcacaggtgagcctccgaagaagctgcagtcttaggaagggaccaaagcaaagcaggcccctcccagtgtgcctgtactttcttgctctcagcctgcctctgcactccaggcctccacctccgtggaagccaggctgagctaggccagcacgggccggccgagctaaagctctgggggccttgctggtgtctgaccatcctttatggcaccctccccccttgccagggccctgttttctgagcccggggctgcctgggctgttggcagttacagtacaggagcccctgggtgggtggtggggaggcacggtggcccagccttctcctcccgcctcccacccgatgctgctttcccctgtggggatctcaggagctgtttgaggatatattttcactttgtgattattcactttagatgctgattcttttttttttttttttttgtatttttaatgggggtagcagctggacccttgaccttctcatgcccacacccaccctgcccttcccatggctgcccagccctggggtatagggaataactaagccccatgtcctgaagaggcaggccagcccggtgggctctaagaaagggggttgtggtgggaggggtaggctgacatcatctgtttcaaatggggttgtgccaagggcttatgggtcgctggctctccaagtgccaggggtgggcaggtggcaccaccaagccctttctaacactgtgccctggtggagaaagcattggcctatgatgccccccaaaccccctcttctgatgtgccttttgcacccttcccattaggacaatcagtcccctcccacttgggctcccccccccccattttcttttccttagcccttctcagtacccagcctacctgtccaggggtgccccttgctctcctgcccacccctcacggccatccaggctggttttgtaagatgctgggttggtgcacagtgatttttttttt

SEQ ID NO: 32663 - DNA, 1151 bp, Mus musculus
cattgaacgaggcattaccaatgttaggcaggtcctctgcctcagaaccacatccccagcctgaggccatggctttgatttcagcactacccaaaataataaagttaagtgatggggtcaaagagacggctgaacaggtaaatagtctgcacccaggcctaatgccggagttcaagccttggtataaacgtggaaggaaaggagcagctctgcgcagccgctctctgggagccacgtgggtaccatggcatgcatggccgtacacataccatacagacagcactcatcaccccatactgacgggatcaccccgtcctctggggatcaccactctaagcatttgggtgtgagcctggtctagtttgattttgtacatacatagtcatctatgagggatctttggtggctcttaagaagtgaacttggaagtccacagagatggaggctcccatctttcttccctcagcatcgtcctgttgtacctcattgccctctaccccccaacacaccatcttgagtaaccttagcccacttcgttcacagggccgaggagggctgggctccatctttgtctgggcctcagggaatgggggccgggaacatgacagctgcaactgtgacggctacaccaacagcatctatacactgtccatcagcagcgccacacagttcggcaatgtgccctggtacagtgaggcctgctcctccacactggccaccacctacagcagcggcaaccagaatgagaagcagatcgtgagtcttgcctggctggggctgggaaggaggcctcctgctctcctcagggccacattaggctctctctgacctcatccctgtgtagttgcgtagagtagcgtggaccttgggtaactgcgctacaagcaggagattccccagacccttgcgggctgcaaaaccatctctgagcccctgagaagtataaactccctgaaaatatcccctgtgctccgacctctacttgatcccctaattccctgagaaacttgaccctagaagaagctatgtgtgttagtaaggtagaagctggggctcgagtgtcctaactggttcactgcaccatctagggtacccaggtctgataggcagcaggacaggcaggtggctcctttactcctgccaacacccat

SEQ ID NO: 32664 - DNA, 1197 bp, Mus musculus
tgtagaacaagctgaccttgaactcacagaggtctgccttcctttgcccctacctcccaagtgttgggactaaaggcgtgtgccaccatgacatgatgagacaggggcttattatttagttcaggatgactgcaaactaatcctcgagcctcaagctgcctgagtgttgggcttagaagcatgagctaagggactttgtaagtcttggtctattttaaattttggtttaatctctgggttttcaacccagagacacatttaagctctttcttgaggtaaaaatatatacggttcagatatatgctataattttaatttcatgcctttctgtaaagctgaatgctagaatgtgaataattgccttctataaagccagatgtcaagtatttgtgcggtctgccttccgtcctgatgctcagctatttccgtgcaagtgctttgcagtgagaagctaaacaggaaaggaactgctttaggcttctttgactctggatctataacactgctgtgtctttagttaagaaatatttgctgatctgagttatttgcatggactgagataacttaacctagaatgtcggtggtaagatctctggaaagtaagttgccataattgcctctgtgtcccctgctgctgctccttcgtgaacccacatagccatctactctccctgcactcccgcccacgcagtcaccttttgttcaggccttgctttccctgcatcatcacggcagtcccggcctgggtttggtttggggttttggttttgttgtatggcactttcgtactaggaatttaaccctggaccgcacctgtgctgagcactgacttagcagggctaagcttcagccccacctaaccattctgttcaatatcagtgccttctccatgacaccagaagatgtcaacagaatactgcacatctcagggacaaaaatggaatactgttttatcgaacctaaacatcttttttaggtcatcaaaatatctgtcacttgcaagaaaactatgaaataggtcatttctcaaagacaatactttattaatgccaaatttattacctactacttggtctcaccacctgtctacttttacatttttgtgttactatgtcttgtgtgtgtttggggagggagtggtgtgtgtgtgtgtgtgtgtgtgtgcgcgtatagaaaccagaagactgagtaatatgt

SEQ ID NO: 32665 - DNA, 2514 bp, Mus musculus
acccctttctgttaaagcctcctaagtggtcattactactttgtagacattggtatttgttttacttagcaataagaatggtgaaattcaaattctcgtttagaagtgaaagctgtcaggttgatagcaagcatgcacatcaaattcaccagaagtacaacccatcggcgcagtcagaggatggagtctgatgtcttccggctgctgcctttgtgggcagagctaatccaagttactgttctctgttcaaatgaagcagcttcaggagaaaaagagcaattacttttgaattctccaataaatctggacaatgccgttagcgaagagcccttcctggtgaaggcaaacccatggtcacagcaggccatttagagactgagtgggcggggcacttaccatcccttccacaaaggatagcttcccccagctcaaaatgtaactgtttctaaactgtattccaagagtgccttaccaaagtataaatttatttcttaaaatgtgagtaataggaattttaaagatttatataatgcttttgaacactctgagaaagggttgttttttttcattgggttaatctgtatatctgaattcttgaagcttttctctagcctacagtagggtcgatctgccgagctgctgaataaccctgcttgattttagcaacaagagacaatccatgccatgcttttatcctgagaaacctggacccttaggctctgactaacaaagacagttcagctccagacactgaacttggaatcctttgtctttggattaaaagtcataaacttaaaaaaaaaaatctctttattcaaaaagatagttaaatcatgctactgagcctatgatgtcgttgatgtttggttcggtattcttgcataaaacttaaaaattaaacgaacgctgcagagtttactgatgtatatcaaaggccaataagctcttttaattggtgacagatcatgcggtatgtccctattacaaatgtaagtcttggagaagggtccttcatggtgtccacatgtgcaggctcaggtagaggtctcagtgagtggacacaggtagctgtgggtgccgagaaaggatctgccaccaccctgacattgtgttttggaacagagttttctgagaaaacattttcaagttaaaggaaaatgctaagtctggcatggtagtcaacacctataatctctgcactcagaggctgaggaagaaagatcactgagtcacggccagcctgggctacatagccccgccctgtctccaaaaaagagagagaaagaaaaaggaaaaaaaaaagaaaaagatcctgttacaaccctcatcacctcaaaaacaaggttaacagaggggtcaagtgagtctttttttttttttttttttaaagacagaggtgatggggtctctgtcgccttggctgtcctagaactctatgtagatcatgctggtctagcgctcacagagatcagaactctgtgtagatcacactggtctagaactcagagtctgcctgcatctgtctcctagtgctgggattaaaggtgtgagccattatacctggctttcaggtatgttttcttaagactgccatcacaaatgtcccggggcctcctgcaagacagtaatgaatccaggttatagtgccttcgacgtctcggttccccggaaggatgctccttccctgaatatgcagtagagctgtgccacatgccctttgaagatcttcatggctgctgtgagaccctgctttggcagcaccgagtcacctggtgagcctcaggctggcacaccgaagttgtgccgtgcttacgttatttattagctgtagccatttctgtcttggctctcacttcctctgcccttccctctgagcagccatagtgacatttactatgaatttacttcctcccaagaatttggactggccgtcagactgttgctacatacaattgcctttgtatcttcgtatgaaataaaaggtcatttgttcctgtttgtgtttatttttcttggttttattgttagttcctgttagacggagttaactagagtaagattaaatcaccgcccactcctttgtagtctttttaaaagaagagcaaaccaagcctgcctttggatcacagactatctcttttaaattttatttattatgtggatatggaggtcagaggacaacttgggagtcagcgctctgctcccaccgtgtaggtccagggatcaaattcaggttgttgggtttaacagctcactggttgtgggccgtttttgttttttaagatttatttattttacatatatgggtgctcatacactgcatgtcagaagagggcatcagatcctattgtacatggccatgagccaccatggggttgctgggaattgaactcaaagcaactagaggagcagtcagtgctctaattgctgagccatctctccagcccccagttatggactagagtcattttaacatggtgtttagccttttaaagtgtattatgcttaatgtag

SEQ ID NO: 32666 - DNA, 1200 bp, Mus musculus
cagcataggccccatctgggaggagctgagtccagtacaaggtatttccaaagacaaagacaaatgttagcatatgtaatttgaaagtatacattttcctaaagaaaagactattttgatagagaattttgatgttacattgttgaatttttttttttttgataagggggtcagagttgggtggaggtgtatgtctcactttatagtcgtatctggcctggaactcgctagaagaccaggctggcttcagactcccagcgatccaccagtctcagcttcccgaggtcagggatgagagttgtgcatcaccgtgtctggcaaaatgatccccacatttatgaagctaccgtataatggcttttccttagccatttggcatattggcttttacttcccagtgaaaactgcctgccacactaagtgtgttggtttatcaagaatcacattgggcctgaaccatatttatttgtattattttccctccaaagtgtttattgcattgattctttctacactcccaaaactgcaggagaaagctgtggcaattcaaacgaccccaacaaggaggctctggctaagacggaagtgtctctcacgttgaccaacaagtttgacgtgcctggtgacgagaacgcagagatggacgctcggaccatcttactgaagtgggtactgaagggagaagggagtgccttgaaactgtatttgctgggcctcacttgcccatcacagtcctcagcaccctgcacggcgtttggacttagtttgctggtattgtacagtcacaatcttgggaattcttccctgcccccgctccactgtgggtccctgctccttgtgcagcacccctgtggaaaagcatctgtggggtaagggtgcttcagctgctgcttagatccggtgacaaggagatagaacataccaccatgttgaaacacattcccatctcgttacagtacaaaacgtttaattgtggatgtcatccggttccagccaggagagaccttgactgaaattctagaaaccccagccaccaatgaacaggtacagatgaaggtttcacactcatcttcttaaacatgataagcttttctgtgacagttgcgttcctgaatggggtcagtgggacagggaagggattagaccctagggtgagcatgggtctaacctcgggacagtaataattagggctcatttgtc

SEQ ID NO: 32667 - DNA, 1082 bp, Mus musculus
aagacccttctcctctgctctcttgtccttggggtcgggcgccttccttcctttctccgggctgagaagaggctctttctctgacctgcagcagttctgatcagctcactgtttataagcattgctaggggttaacctggggtcatgggtatgccaggcaagtgctatatcactgagctaacctctagcccatatagtatgttgatgattacctacctgctcatagcctctgctgctgtgagagactcaggagaaggtatgatggctcccctacattttgttgctaagtgcttatcagggtgtgacacatgatacaagacatccagatcacagcttgtgcagaggagcctaagttagctaagcttcctggatccttctatttataaacaagacaagctcctgcctcgaactattcctgggggtcgatctaacattgctgggggtcatttctgttttctcagcaaactgccctatgatgtgactcctgaacaagccttgtctcatgaagaagtgaagacgaggttagacaactccatcaggaacatgagggccgtgacagacaagttcctctcagccatcgtcagctctgtggacaaaatcccgtgagtgccatcagttgtgactccaaataaagcctggctggtggcatactctgtggcctgacctcactccattttgtccatcccacagttatgggatgcgcttcattgccaaagtcctgaaggattccctgcacgagaagttccctgacgctggtgaggacgagctgctgaaggtaagactctgagagctaccgggtgcctgccctctgctgtcagatgcccagtgaccacagaccagcaggaagtgcctgagtgtcctccactgtgagcctcacgagcagctgtaactagaagacggtgccttctaagcagatagtttctgttcatcttcatctttaaaggcactgtgtacactaagtataggtagtgggaagttttcctgagccctcttttctctggagcattgctccctctgctggtggccaggtgaatagcagcgagcgcagtgctctgctgcggattccctgctaactcttctta

SEQ ID NO: 32668 - DNA, 1197 bp, Mus musculus
aacattcaacagccacctctggttagaaaatcagttatggaagagagtgaagaaacctggcaatgttatggtgggagtagtatttctaccgtcgcctaatgtgatgcctgctggccagtccgcatcagccaagatcctctccctgccccgtgcctcacctgggcagctgggtggtgtctgtgtgctcccggggctcattttccctcaagcaaaagcccaagtggccttgttggattggcctggtcctatttcctcccaatttggaggagccccaaggtctggagtttacatcaacttggaggccaggaataaagatgagagagatccaggggagaaaggctccctcatacttctatttataacacctctgcccctcctgctggaggctctacctttagtacagaggcgctattgtgtatcctgaggctctctttctcctgtacctttcacagagtttgttcttggggaaatgaggagtttagagaacgagactgaatgcatggagactgttgtttgtctgtatgtctgtgtgtagaaagtagaggatgctgcaggtatgggtttgggtttgtagtttcccaaaaggttaagtgaggacattaagtgtgagtttcagaaaactgtatactgggaatggttgagactctaatgcagagatttctgctttattgtttgaaaagtggcttcagtatggaacttaaactgatgctctaataaaatattttaggatgccaagatatagcagagcaaaggctgtcaagggatgctctttagtgcttacacctatttccttacttatttatgtgtgtatttatggctcttccgattgggcttgacgtttattttagctaaggagtagctgtatgagaaagggatgccatttcatctgttgacggaggtgacattgacctgtgaggtatgaaggtactcaggtcttgagacgagaatgtaacagagacgaatcagaaggtggcttagggagaaaaagagaaggaggcaagagagaatgtactgggtaagccagaggagtcggagagcatgaggggcaatgcaggcaaaggaaacgtcagttagggtaacggtcacacagacagttcattctatactcgtcagtcatcgatttagtcgtgtctttcagggcctttctggtggatccctttgagtcttccctgggctaccttcttcctgagcacccac

SEQ ID NO: 32669 - DNA, 1241 bp, Mus musculus
aggctattgaaaggaacaaatataatgtatgcaagtggacattgtgaatcagtactctggaaggcactggtaatgaatagtcagtaaacattagcagctgcttcatctagggtgtttatctctgatgataagttctttgcttacttgtttgttccaggtttgttccttacattggaattgtgacgatcctcatgaatgactatcctaaatttaaggtgagagcacaaccttatgtttgattagaagtgaactgatgagagtgtggcgctcgctcagcagcacacatgcggagcatgtgtgaggccctggattcagccagctcctccagggatcttttgtttacctttggagactgttaaatggattacagcatgaaaacataatgtagtttagtgattgatcctggtcacaattgagtttatgacgatgaagacttcggaggtattggaagcgtccctgacatgtgttcctgtttcactttttagtatgcagtactgtttctgctcggtttatttgtgctggtccatcgtgagtaagaagtcggactccctgttcctaggaagctgctgtgcttgttgttactgaatgttggagtagatcctgatctgtgattgcggattttcggaggacacacacgttggcacttcttggtagccctggtttgcattgctttgtgtttccacacccgaggctgtgtgggcgggtgcatgtgcaccgtggagtgcacacaaggggactgtcaatcacagggtttcatatgttgtcattgtcactctttcacatttttgtacatcagtgaattttttatattaaaaggttgagccaaagcccccagtgtttgtattttgaagccaagcttcactttaaaagtgcctacagagttctgtaaatgaaaacacagctctgcatgagttcaaacctgtcgttcctccttacagtaggaatggcacatattgaggcgatcataagtcttaacttttcaaaattttaaataaaagactttgcacattgaacccctttccctgaattctgtttgttgggaaagctcctgaaatgtgcctttcttggctggttcttagtacccattatggtttagaaaggctttgatgtggctgggcgtggcagcacatgcctgttatcccagctcctggaatatctcagcatcagaagctgaggatcaggagttcaaggccagcctgggctaaaggagaaaaagctgtagtatataaacagtccttcag

SEQ ID NO: 32670 - DNA, 1149 bp, Mus musculus
ttgtttttaatttgaatattttgatgcaaagggaagaaaaaactccatatattcaatgtcaagtcttagctatttagagcttttctttttctttctttctgtttcctctgtatttaaatgtttgttttaacacacacacacacacacacacacacacacacacgtatatatggctttttgtgtgtgtgtattcaggtacatgctaggtatgtcctcttctgttcaggtacttagccctgtgtatgttttacctctataataacttgaatgtattttctgactattgagtcatctcatagttgtctacattttttttaaaagcaaaatactgctcttttctgttatttggatgaacaagcttccacttttgttatagacccttctttccccccaaatctttatttctctaaaattccatggttataatctctgccttccattctccagtctgttttgtgtgtgcacatgtgcatgtttggctgcaagcacctttacccattgaatcattttggtggcccttccctcgtatgtgttttgtaatttcactctgatttctcaggaccgtttcctgcactggtataccttttcttcttttctccctttcccttccatgtctgttgtagtactggagattgaattagggctttgcacatgctaggcaaatgttttaccactgaataccaccctaagcccgttttctgctttttattttgagataaagccttactaagttgcctgggcaagccttgaatgtgcaatgaaaaagcgatgctgtgttttaaggggctattctaaactgatatctagttgtcttaactagggtttctttttttgtatgtttgttttttgttttttgagacagggtttcttgtatagccctggctgtcctagaactcactttgtagaccaggctggcctcaaactcagaaatcctcctgcctctgcctcccgagtgctgggattaaaggcgtgcgccaccacgccctttctttttctgtgataaataccatgaccaaaagcaacgtgaggaagaaagggtttatttcatcttctagcttatgagtctatcatagaaggaaggcagggcaagaaccgatacagaggccatggaagagcgctgctggctgccttgcttcttatggcttgctc

SEQ ID NO: 32671 - DNA, 1144 bp, Mus musculus
actctccacatgcctgggctcctgcattcctagacaccaccgacagatgcagaagtcttacctgattcaaaacacttcctgagatgcaaactttctcaagtacaggataatgtttacaggaaagatgcattgagcacggtgccttctctctgcaaagtctgtagggtcacacactgtctgtctgtgtcccctcacctctcactctgtacccagtggagagttgtgggcaagtatatctggctgtaggggtccaccccttcctctgcagcccagagaaaggcagcttggagtgatttatctttctccacggttccttctgcttctgttgatgtttcccctcaccgtcccagctgctgctcacggagtgtgtgcctgggaaggggaggagggctgggcacagcttgtgcaccacacagcctggctatgtggttgagcttcacgcctgggaatgcattgtctttgctggcccacggaagggtttggtgccgaggtctgtttcctgtgctcagaaaggagtggactgtaagccctgaggattattggtgagtctggggtagacataataagcccacagattcagctgagttctgcaggaaggacttgaccacagggaaccctgagttctggcttgttcaggagtcagtctgtggctctgcagtcctgcaattgccaggcttgtgttcagttcagtacgtggtgtccatagacggagcagaggacccacactggcttgctagtaccagcccatagctctatgtggcatcaaaattcatttgatagtccataaagtagagtctccttcagggcaaaggccctggcctgtgctcataagtggcggcacttttcttctgagcctgagccctaggatagtgttccatgccttcgggacctctgcctccttgagggttagctgccttttccccgttggtgtggctgagctatgctacggatccatctccgaggcttgacatgtctacacgtatgtatgtctctcctatacactgggttccctggaggtgaaaatggattatgaagccagctccccaccatcacgcagtaagggtttgataggcatgtataggatcgtactccagtgtgctcaggagcttggcctgctgtcagctacctattgtaatagccctgg

SEQ ID NO: 32672 - DNA, 1158 bp, Mus musculus
cctgagtcctctgcatgagttctgcactctgaccccttgccccaatcaccacacaagtaagtgttgcactctggggccagcaggccagcatttacctttttgcccctgcttatcctggctctctccctgtcctcagggcactagacttcttgtgtggggtctagccttgtgcctctcagggtttcatctcctttcagcttctttgcctcattcatcacagtttatcctgccactaacctgtcctgagtccccccctgggccccagagccctctggagcctatcacttctttgtgcagtgttttttgtttttttttttttttgttttttttttgatgaaccatgttcttgtcactctgcacttacttgtttcccatgctgccttgcacacacgcccgtcccccatcccaggctttgaacccaattcagtctgctgcctgcccttccctggcttttgcttatccctttgtctaagggctccttctatcctgaccctgcatcctacccaccagcgtatgggcaaggaacagcctgtctgacttcactctaccctagtgccctctcccctggctctcccaggttctctgctcaggaggagggaggtggcacgggaacctgtgaacagctactggggccagggattaactctaagtgccttatactctgttctgaaaggagtgaggttgcagtaaatgtcacatctctatcctcaaggactagagactaggactcacttgggggaagaggaggcacagggtgttcctggagggtttcgatccattcacacgcttgtgtagagaaggatatctttctgcctacctccaaccatttgctcttgatcctgctcaggtgtgggtccccagggaatttctgtgcaggggtccagcaccctgggccctttctagatacccctcctgagacctggaatggagtagggtctggagctagcctgctccccttgctatgcaataaaggcagtgactgtgtgtcctgtttgttgctctcatgtcacggtgtgatgattattgattaagaaaggccaggcaggctctctggagtccctcgggccaggccaacatggatctgatttttggctcatggcctgaggtacagtctcagctgtctatggtcgcagctggccagtcagtgctgaggcccaa

SEQ ID NO: 32673 - DNA, 1194 bp, Mus musculus
ctccttctgcgtctgccttccaagtgctgggattacaggagtgagccttcatggccagctgtttgttctaagacagaatttacacagttgcttatctatgttacattgtagccagctttccccatcctcattagggtgtatctattgagctttttattttcaatgcttaagattgtactaggccctcatgcacaccaaacactgagctatacaccattagaaatttacttatctttttgtttggttatttattttgattttggtttttgtttaaagagacagggtttttctggcctggaactccctctgtagactaggccagcctttacctcctgaatgctgggcttaaacgcatttgccaccatgcctggctccaaaattcatgttatctttaaaatatataatagttatttcagtgtgtgggtgtgtgtgtgtgagagagaaagagagtatttgtgtgtatatgcctgtgtttctctgtgtgtatgtatgccccctcttctccccactcttccctcccctctctcccctcctccctcttctctctctctctctctctctctctctctctctctctctctctctctctcttctctctctcccatatcacacgtatggaagccagaaggtgatttgtaggaattgactgaccttagaatgtcatgcataatgacagcatttcacctgctgagctatctcacaggcccaaactagagtgtctaccatattttccagcattgtgctcttggatcatcagctgaactccttgtctggctatgtgtatgacgatgttgaagtgaatatctcagtgtagaactttccctgcttcctgggtcatttcttcaggagcttcctgaggtgtggttaagcacaactccatgccaagccctcctggagcaactttcctaactgctatagtagaggctaagtgccgcctcagtgtgcctcactacagttacccccagaaataaagctgcactggaagtctgtatttgaaggcatgttgagggctgaagatgaagcccatttggcagaatgtttgaatggcatgcacagagctctgggtttgatccccagcactgcacaaattgttaagcccaatcctcagttagcagaggcaggaggatcacaaattcaggaccatacttggctacttagagagtaccaagagggttggaaagatggctcagcagt

SEQ ID NO: 32674 - DNA, 1311 bp, Mus musculus
actgcacaactgctgtcgattttacaatcacacagtctgcacgtagctgggaccaaatatcttcctaacctcaaggctcatccatcctggataaggccatgggactcaccacgacttccatcccacagctgggaaaaggcgctgcagtgaatgacagacgcctcacaccctggtcccgttgctgctccccatgtcctacctctccaagtgtgggttcccagtgtctagtcggccccctcgccctctgagagcagacattctggtcctctctattcctctttctttgggaccctcatgtgcacctgcccaaagcctcctccctgctcccttccaagcaccggacttgctgggtgcccccagaagctgtctctagagaccttcttccgcccagtctccaagagtgctttccaccccagtgtcctgtggggcaccatctcattaggtgtgatgtcagagtggcccaggctccactctgactcggtaaagtttgatgcgagcttggtgggtttgttgatgttctagatgggtctcatgtagctccttctagcattgaccttactctgtagctgaggtcaccctattcctctgtcctcccgccgtcacccctgagtgtcaggagtacaggtgcgcactatcacactgcggccataaggacttcttgtttgggctgttgagagatctcagtgggtaaaggcatctgctgctaacttgatgaactgactctgatgcctggacccccaaggtgaaagagggaagccatctctgcatgctgtcctctgacctctacatatgtgcgtggcacatgctctgcccctcccaactaaaaataaagtataacttaaaacctttactatttgtgtgtacagtgtgtatgtgagtgccatcagggaggtgtggagaccagagaacaactttcgagagttggtccccttctactttatgtgggttctggggaagctctttacccgctgagccaactgcctgcccaggagctttctttgttggtttttgctggttggtttgtgacaaggtcttactatgtagccctggctggaactatgtagaccagactgatctggacctcacaaagttcctcctgtctgtttcctgagtgcaccatggtagtttttttaaaaaaatgttgctttttgtttgtaattctttgtctctatagtcttatatctactttgtttgtgggtccttcctgggttgttcttttatgtctcctaacaatatcttctctggctcagctcagcctctcctggctcaactgtcaccagctgtcttttcttcatagtcggctttcatgtg

SEQ ID NO: 32675 - DNA, 1112 bp, Mus musculus
tccaccctcagggccgcgttcgcaccaagaccgtgaagaaggctgcccgggtcatcatcgagaagtactacacgcgtctgggtaatgacttccacaccaacaagcgcgtgtgcgaggagatcgccattatccccagcaagaagcttcggaacaagatagccgggtgagtgggggccgcggccgccggagagcctgcccgggccggtgcctccgctccccccagacggcccgccgaagggctggaggtgtgccttggccacagtggggttttgccgacgtggtcttagttcgggctccttacggtagctgaaggcagagctccggcctcaaaaccttactgctgtggtctctgcttcccgcattttaccactatggccgtgttgtgcaaaaaaatagcagtgttgtgtccgtacgacggataagaccagtcggggtacatgacattcggaggagggctggtgacggcgagtgaggatgtaaggagtggacatctgaacagtgctgtgtgtgtgtctgtgtgtctttccgatggtgagaccgaccttgatgtagagacaaagtcggttctggtgggaggtggtcactgtttcgcattgcttgtagctatgtcacgcatctgatgaagcggattcagagagggcctgtgagaggcatctctatcaagttgcaggaagaagagagagagaggagagataactacgttcctgaggtaagatttgtgggtcttcctctgcacctcttcctgggggctcacctgaggtgggaacgcagctggatgtcagtgaagtcttaatctatttcctcaaaatgatgagagatccacccacctcggccttctgagtgctgggattaaaggcgtgggccaacacacccagccgagggtgcctgtaatcagccgaccttgagcttctctgcgaggtctaaattcattttcacatgggagcccagtgagagtgcctcccgacgtggttagcttgacatccaagtgtgaaccctgctttctgaatgcacactagatggttctgacacaagaataaagtgggctgtggtggtgcacagctttagtttcagcatttgggaggcagatgtctgagctcgaagccagcctggtc

SEQ ID NO: 32676 - DNA, 1211 bp, Mus musculus
ccttaaaacagtttttaagtcgtttggaacaatatatttttttttctttcttggcagcttttaacattatagcaaatttgtgtctgggggactgctggtcacagttgcaaatcaaagcatttgtaaccaagagaaaaattattttatttaaaactggaccggaggaaaagtctgagcagctgctgtatatagttttaaatggtttgtggcaccttatgttgcacttatgttgggggagggttgatagaagtttttaatcacagtcacaggactttttcttttgtaactgagcttaaaaattaaaaaaaaaaaaaaaagggctgctttttggtgggggcaggtgaaggctcacaggagccctttctcttagaggggcaaatacccttccttacaacttttatttgacgaatgtatgaatcaacagttacagttgacaaagacgctactggaattgaaaacttgacttttctttttaatttaacgattacttgcctctcttagggaagctgtgtgccaaagagccagtgtcataacccctccctcctgctgagctgatgttgcattgttgcatatcccagctactctgtgggttttgtgaagctgtgtgtgaagtctctacctcattgttgtatatgcaggcaagactgcactctcctacagatgtgtggagtaagctgtggtgtaatttttttggcacataataaacacgttgcagcagagttgtagttttgtctctgtatctgggtgtgtgtgtggtggggtgtggtagcaagcagggaagattccagagaccagtcctcttttcatggattttcactaatgggataccagcccagagggatgggaggtacatgcggagacctgctcctatatgggacttgttacatcctggtcagccactctggagtgtctagtacctgggtgattacaatcagaataggaggcctgcctgtacattttacttcttggcccctcaaggcctcctccacatggagccctaggaatgctagaggcacaactcccaagatgtcaggagccatttgctggctgctttcctgtgagccctgacgtgttcctccttcctcttggacacacttgtgctgatgtaattcctttctgagtggttactattttgcttttttgattcagggtctttctttgtggccttgtcctggaactccttatgtaagccagcctggcctcaagctcag

SEQ ID NO: 32677 - DNA, 1099 bp, Mus musculus
ttctttttaagaacagtcatggcccaggaatggcctggaaggtcaacagtaggctagccctgtctgtagcctctggcactgtaaaaggcagactctgtacggcgcaaacgacccactaaaattgttccgtatccactcacactagtgggacatacctccattttttctgatgtccagcccagtcttaggactgttgtcgtggcctcaaatcccatacagatggtgtgagctgttttcccccagcaattacggccacagagtgctgcctgcagagcctggagtcagatgagctctggccttggcatctctgagactagcagtctgcaccttgcttagcttgcattctgcagccatccacatggaacctaaaagaggccaagaaaacctcagagccctttagccgtgatccgcatgcatttctgacatgagctggggtagggtggtgcctaggaatgagagaccgctggaaggaaggattgggagagaagaaacagcccgtgcttgacctctgatcatctccttccattgcttctccccaagagctgtcactttagaccttaattgggtgagagaacttggcagagattatcaacaggaagtggaggcagagtagcccagagtaacccagctgtggccagcagcgtgggctcttgggtctcctggaccttgatccgctgctctcctatgagccatattgtcactctccctttggtgtcccttaggtgccaagaagaaataaatactcctctgccctactaaaagcatgttgcaactatattaattggagtgtgtgtccacagcaaggaatagccgacagggacacggcagaactgtccaccatacacagtaaagtctgtttcctttgaatgattctgctctgtagggatctcttcaatgatctctgtgcttggtgaggccagtttggtggaacactgtctggctttgaattctttgctgatgactttaatgaaggtccactcacgtttttaaagaggggaggaggcctttgatggcagagacataaacaggaacagaacagacgagccacagttggggaggtgcagactcatccagtgcctagagcagtttgcatgcatgc

SEQ ID NO: 32678 - DNA, 1349 bp, Mus musculus
taatattcttgtcttcttttggtaggctgcaagacaacagacaatttagaggtagggataacagacgaggatggccaagtgacaatcggtcaaatcagtggcatggacggtcatggggtaacaacaactacccacagcagagaccagagccctactatcaacaacagtacacacagtatggccacaaccagcggcctccatatggttactattgacagaaatgtcggcagcttttaacaaagaccttttattttgacaacgtgctaaatgcttgtgtgtcttctgttggtcatagtttttcattctattttaaagaatgggttattaattgattagaacttgagacttggaaaaaagtaatcttattagaaacctgatgattgatgggaataaatttattaagtgaggattatttgacttcttttacatactgttttgttctatgatttggtagtgttttgagttttccttatttggactctagggattctgtattacagaaataaaaatttttaattaaaatgctggcttttgctgtatgaaagaatagcatgctcacacgtgctcacctctgaagtgtttcagaggctaggactgtcagtctgtgaaaacacacccacaattacttaaagtaattgaaccacagttcagttgaaaggtaaaacaggtatgtcgcttctgtgtttgtatgtgatcatggtgtcttgtggtttataagtgagtcagctccagaactgctttggtcctatatggaagggctcattttctgtgcagcctcctgaggcggtggagggtgggatggtagcactcaacattttgtatatcccaagatttttgtaaacttacaacaaggaagacatggatgtgcgctgtaacacaatactcatgtaaatattgttgcattttgattgttttggtattatgtattgatttttatgagattattttcattttcaaatgcttaccttcgatgcttcctcatacagttatagtaaggctgtcacttgcttcagaacaatcattcttgaaatattttcatgataacagatttattcaaataaaaaaatttaaagtccttagtatattatgtgtgtaccaagttgtgaaagaatgaataaataaattgcattaaaatgtaggcaactttaccttttagttttgacagcccatttatttatgtggtaatgacttaattggtttttcattatgctgtcctttatacagtgaataagagttaacttcccaagtttgccttttctcttagctccttgagatggactctcccaggttctctgtaatcagaatgtatcaagtccctctttttagccatccactcaggtagccatctc

SEQ ID NO: 32679 - DNA, 1345 bp, Mus musculus
gggtgctgcagtgatccagatgactgagatgtgacagatgccaacagatggccactgcagcactgcaatgcccttcacagcaagaagggggtagaataccaagatccctaacagctgcgctgaaccataaagctgtccatgtccagccagtcactcctgctgaagaggaagaaggctttgtgtcatctacatagttccacccaagaagtaaaaatgctacagtaagagtggatcaaagggatatttggcagtgtgacatttctacatttttatataaagcagatttttaaaatacaagtaagataatattttcccttgaaaatgattatcttacaaaaaaacccttgtataattaagcttaaggtctatcagtctatcagatagttgtgggaaattattaaaaataagaattcttttaagtatcaacttaagaatttttctaaataggatataaaagttttcatcaaaagtaatattttgtattttcaagatggcagggaggtgatgtgttggtggccaggatctcttgaagttgttgaagaaagggaactgttttcagtctgctctggtactatgatcttatgggtctaagcctcagttagcgggaatgcccatggaatgtgtgattctgcttaactgaagagaagtaaagactgtgtagtaaccattccttaaccagtgttgcatgccagaggtaagttagtgctttctgaccattggggcattcgcatgccttgtgctttactgaacaactgtaactgaatgtagtcatggaaggaacaagatacggaaccactcactgacattgggacatcacctggaatttttaaaataaatttatcctttttgtttacctatttgtcacctctctttttctctaaaacttgagatactactttagaacaaaagttccagctaattaaagtttagcttttatgcacttctaattttaactaatatttagagagttgggcaggggataactcagcggtatagcagttgcccagtgtagtggtgtgaatgaaaatgcccctgtaggctcatgggagggtagcactattagaagttgtggcctttgcacatcatcatgcttcccaccatgataatggattgaacccctgaacagtaagcaaaccccaattaaatgtttcttttataagagttgccttggtcatggtgtctcttcacagcaatagaccactgactaagacacctagctggaatttcattcctagtttcaaaatgccagtcattgcagcctgagtagttactgtgcactgactggcctttgctctaagtcttttgcaaaaattcttgcttgccactgcatcattgtgcattggta

SEQ ID NO: 32680 - DNA, 2051 bp, Mus musculus
cagccgcctctgtgcacttaacacacacacagatcacttctgcagtcacaacccttttttgagctgcaggtagaaagtgaggctgtaatgagcgtgcctgctagctgcagtgagctcttcaggcttctctgtgatttttaatttatctgtttccctccatcatcctgcttattagttgaaaggatgccctgagcacacacagacatctgtgcaaggatgccatgcccaaggggcagatgtgtccctcctgagtgtaaggctgaatcttacctaagacaaattgtaagtgtcaggcaggagaagctgctaagactcttgtgatgtcttagagattgctaccagacagtaaagattccaagcatggttcatctcctggggtataaaatacctgttctcaacactacttaaatactgtcagtttaggaaaaataggagcaaatgctaacataggtatgggttttgattggtataaaaatgccattcatagggacagagcctctctctgtctctctgtctctgtgtctaagtctctctccctgtccctctgtctgactctaagtctctctcctcctcctcctcctcctcctcctcccttccacccggggctgcctggcgtcggcgtccgccatcgagggacccatcccggcttccacgagtcccgcagcccccggttctcccttctccttccttctcctcccttctcctgcttccttcttccatcccggcctgcctggcctctgccgtggcccgcgcagctcgggtctctgtgtctgtctgtccccctgtcccggttctcccttcttccctcttccttcttccatcccggcctgcctggcctctgccgtggcccgtgcagctcgggtctctgtgtctgtctgtccccccctgcctccctcccttctccttccttcttccactttcttccacccagggaccaagcccgagtccaagtcccgcgcagtctgggtctctctgtcccactgtccccctgtcccggttctcccttcttcttccatcccggcctgcctggtctctgccgtggcctgtgcagctcgggtctctgtgtctgtctgtccccctgtcccggttctcccttctcctgccttcttccactttctcccacccggggaccaagcccgagtccgtgtcccgcgcagtctgggtctctctgtcccactgtccccctgtcccggttctcccttcttccatcccggcctgcctggcctctgccgtggcccgcgcagctcgggtctctgcgtctgtctgtccccctgtcctggttctccctgctcctgcctccttcttccatcccggcctgcctggcctctgccgtggcctgcgcagctcgggtctctctgtccccctgtccccctgtccccctgtcccggttctccctgctccctgcttcctgcttccttcttctccccggggaccaagcccgagtctgcatccgaccgagacgcaccatcccggcttccgtgcgtctcgctgtccccgggtctgtgtctgtcaacctcccaaataaaaaaaaaataaaaaataaaaaaaatgccattcattgtcaattgcttggtttctgagctcaaatggtctcttaacaccattttggtcatcgtattaaaaatagtgactgaagcatttaaatagttataggaatccagtcacacttttctcattggatttcatgcccagagataattctgcttgtaattccagaggccatacctctcacactgcatggtgggggttgtcactggggggcacattttggactcttgttatcttttatatgcatttttttctaattttgtccttttaattagcagttaaatattcatggtatcattactaagcatgcaaattgttgtggctttgggtcaagttgtgatcggtgggtgaacttaaggagttttggttttgtaggccgagtctatgccgtgctgtcaaagcgagaaggtcgagtgcttcaggaagagatgaaggaagggacggacatgttcatcatcaaggctgtgctgcctgtagcggaaagctttggctttgcggatgag

SEQ ID NO: 32681 - DNA, 1161 bp, Mus musculus
aacgtggatcgcgctagagaggagatcgaagctcacatcgcgctgcgcaccggtggcatcatcgagctgacagacgagaacgacttccatgccaatggcacagacgtgggctttgatctgcatcacgggtccggcgggtccgggccgggcagcctctggagcaagcccaccccaagcatcactcctacacctggccgcaagcccttctccagctatcgcaacgacagctccagctcgcttggcagcgcatccacagactcttacttcggtggtgggaccagcggcagcgcagctgctacttcacgcctggcggactatagccctcccagccctgcactcagctttgctcacaatgggaacaacaacaataacggcaatggttacacctacacagcgggggaagcctcagtaccttccccagatgggggtcctgagctgcagcctactttcgacccagctcccgccccaccacctgggacaccccttctctgggcccagttcgagcgctctccaggaggtggatctgcagcaccagtatcctcttcctgctcttcttcggcatcctcatctgcctcgtcgtcctctgtggtctttcccgggggtggcgccagcagcacaccctccaatgccaatctggggctgctggtgcaccgtcgactgcacccgggcaccagctgcccgcgcctgtctccgcccttgcacatggccacgggggcgggagagcaccaccttgctcgccgcgtgcgcagcgacccgggcggtggaggcctggcctacgctgcctatgctaatgggctagggacgcagctccctggcctgccctcgtcggacacttcgggctcctcctcgtcctctagctcctcctccagctcttcctcctcttcctctgggctgaggcgcaaaggcagccgcgactgctctgtgtgcttcgagagtgaagtgatcgccgcgctggtgccctgtggccacaacctcttctgcatggagtgtgccaaccgcatttgtgagaagagcgagcccgagtgtcccgtctgccacacggcggtcactcaggccatccgcattttttcctgaaggcagtgcgcgcgcgcgcactgcagggaaggagggtcctctctcgaccctcattccctagggtctacctgcccagacgcctctggt

SEQ ID NO: 32682 - DNA, 1140 bp, Mus musculus
gacttcacctactcatcactgtgctgacgttctggcagaagaaactggtactcgaaactatctgaaggatcagatcagccttggcctgagagtttgagctggtacagggatggcagtagcttcgtggttgaaggtaagtggaaggcgggggacagcagtatagtggtggacagaaagcaagtgatctaggccagcagcctccctgaagggacgtcggcccaaaaagctgaacttgtgactttgatataagctctataaatggcaaaagaaaagtctacactgatagcagatatgcttttgccactgtacggagaaatatacagacaaagagggctgttgacatctgcagagaaggacctaagatgctgtggctaaaggaaatcagatggcagatctaactgccaaacaggcggcccaaggaacaatgatcctggcagtcgaggacctaaagattattatgatgtcagagagaccagctttagacacacccctgagcactatcaagttatggacattacttgacccacctgggggccaagaaattaaaaggtgtggctaggtcctttgacttctatgttacaggactctctgacttggcagaagaaatagtcaaagctgcaaggcctgtgctataactaatacaggacacttcgtgtatactcctgagaagaggctcaggggcaactggttggaggtctactgggaggtagaatttacagaaattaagccagctagatatggcaacaagtacttagggttagaaatagacaccttttcaggctgggtagaagcttttccaaccaggactgagacagccaatgtgatggccaagaagatactagaagaaatcttccccaggtttgggatacccagacaagtcagggactggccaagatattagagattggttagaagttacattgtgcatacaggctccaaagctcaggacaggtagaaaagatgaacagaattctaaaagagaccttgacaaaattaaccatagagactggcacagacttggtgctccttccctttgccctatttagaactagaaatactcccacctgattcagccttacttttttaaagatcctttatggggctcccatgtctatcactgtcttaaatgatgtgtttaaa

SEQ ID NO: 32683 - DNA, 1669 bp, Mus musculus
gcccatccccccacaccaccctccgtcctcttgggcttggtgtggaaggagctaaccactagcttgccgtggtgcacacataggcctggcaggccagggcaagtccctctatggccacctgagagatggctcacgtactctttgattccttgtggtccagagccctgtgtgctggttgctgtaagacaccttgtccctgtgtgggtcttaaagaatcatcatccattgtggtcgctaagtcctgcttcctctggcatctggagttcccagactcctgtgttccctttctggatatgcttttgtatacaaatttttagcacaagactttcactctttacaaaagtgtcaacttggaaaatgatgttttaaaccacaggataagccttaaggaaaaatactttcaatctaccgtttgtgatctcttccatcagaatcatctctttctatctgtttctccctttgtgggttaaggttcacatccccatgaaaccggcttgtaactgcctcaggccagtttgtatctttgggaaggagtgtgaattcttgtggcccctatgagtgactctaggcagggccagcagttcctgtgtgcatgctagactctggggaggtgagccccatggcatgtacctcactgtgccctcagtcatcatggtgaggcaagaatgctggggactcctggcccctcaggctttgctgccattaggaaggagggaagaatgtctgctatgctgtgcaagtatgcacgcctattgtatctgacactgaccacaaggtctgccattcctttagggacaaagggtttctctttagctttccaaataaatttagatccttgctttccatcagatggagaaaggaaagatctctgctgactgacactgtcttcagagacacagtaccctcacagtccagctgctcccctctagtagcttttaataattttaataattcccctactctctctacctttgttcttctcactgttgttggagcagcttggatttagtcaaagggctcattaggacacagcttcattttgacggggcttgttcagaatttcccgcaatctctatagatctgtcaggttttcttgctgctgccctgttgcctggggtttggatgctgatctctttctgtggttctctctctctctctctctctctctctctctctctctctctggttttgtctccatattaagcttactcacttgctataccattatttaggatgtgatccaccttgggatttttgagaccagctttctcattggcctttgactcaccaaataggctagattggatgaccaacaattccagggaccagtatctttctgcttccccaggtctggaattacactttgaatgccaccgcatctggttcttttctttttttcctccttttcttttctcttcttttcttttcttttctttttggttggttggttgcttggttggttttatttatgttttcttcttgtctctggagatgaagttcaggtgaccatgcttgcatggcaagcattttacttactgacagctgttccccccggccccataccttctcctgttagatcaaatgtaccttctattaaacctgatagattgatataaatggtatcttgagttcctcatttacttgtctgctataggacagaactcagagt

SEQ ID NO: 32684 - DNA, 1405 bp, Mus musculus
ccccaatggaggagctagagaaagtaaccaaggaggtaaagggatctgcaaccctttaggtggaacaacaatatgaactaaccagtaccccacggagctcgtgtctctaactgcatatatatcagaagatggcctagttggccatcagtgaaaagagaagcccattggtcgtgcaaactttataagcctcagtacaggggaatgccagggccaagaagtgggagtgggagggtgggggagtgggtgagggagcctgtggggaacttttgggatagcattggaaatgtaactgaaataaatacctaattaaaaaagaaaagaaaagaaaagaaaaagataaagaaaacacaaatggaaatcatgaagaaaatgtagaatatagaagttggattcagcagtgaccgaccgtcggaggcggcgcggccgggaggcaacggcggactcgcgcgattggtggatccatttaattcaagaaaatggagaccgaacagccagaagaaaccttccccaacaccgaaaccaatggtgaatttggtaaacgccctgcagaagatatggaagaggagcaagcctttaaaagatctagaaatactgatgagatggttgaattgcgcattttgcttcagagcaagaatgctggagcagtgattggaaaaggaggcaagaatattaaggctctccgtacagactacaatgccagtgtttcagtcccagacagcagtggccccgagcgcatactgagtatcagtgctgatattgagacgattggagaaattctgaagaaaatcatccctaccttggaagagggcctgcagttgccatcacccactgcaaccagccagctcccgctcgaatctgatgctgtggaatgcttaaattaccaacattataaaggaagtgactttgattgcgagttgagactgttgattcatcagagtctggcaggaggaataattggtgttaaaggtgctaaaatcaaagaacttcgagaaaacactcagacaacaatcaagcttttccaggagtgctgccctcactctactgtcagagttgttcttattggaggaaaacctaatagggttgtagaatgcatcaagatcatccttgaccttatatctgagtctcccatcaaaggacgtgcacaaccttacgatcccaacttttatgatgagacctatgattatggtggttttaagaatgatgtttgatgaccgccgaggacgacctgtgggattccccatgaggggaagaggtggttttgacagaatgcctcctggtcggggtgggcgtctcatgcctccttctagaagagattatgataatatgagccctcgtcgaggacctccaccaccacctcctggtcgaggtggccggggtggcagcagagcccggaatctgcctcttc

SEQ ID NO: 32685 - DNA, 1182 bp, Mus musculus
cgccaagatgtcggaccacagggagaggctgaggaactcggcctgcgccgtgtctgaaggctgcaccctgctatctcaggctttaagggaaaggtcttcacccaggactttaccgccagtgaattccaattctgtgaattagcactccccacgctccacccccaccccagcccctatacctgttttccaccccaggctaaaggaagacacttaacccctcccctctccatttataccaaagaatccataggtgatcccctccctcatgttaaatgctcaagaggaattttccagaaggcagggccatgcaatcatcaagtactcagagggcctgggtgtccaccagcccactatagggactcagacacagagaagatgggtagtctgctggctgcagggttaaccctacacactcgagcccctcaactcagttatcaattgggcaggaaagaggtcatgggctcatttcttccttctttttaattaatgaaaggttacctcagttttccctcctttagacatggatgtagctacctttttgtatgtcgttatttttgttgaattagagtatacatggtgtgaaaaagagtatgactttgccatatgatttgcaagtgggggggaaagctactgtgagcgtgtgttttattttttaaattacactatagagtgatttccccccccccccaatgtcaagtttttaccctgcatgtactggagtatttatttcatctattaaattgttatgtttctcagatggcttttcgcagttactgtcttttcactaactgtgcatgccgcctgccatctgtgggaaggagctgtggggggaaaaaggtttacatccattggcaagtgaatccccagtgcctaaccatttccactctaaaattccattttccctctggtattattcctctgagcatccttgcaccctagaaagacaaatgtatgtgatctatttttaaaggcaatcgaatgtgattggactatgcagtgcgtgggggaggactgttagtggggaggactgttagtggggaggactgttagtggggaggactgttagtggggattttgtcttcttccctctagtttttctggaaagtaacctagctctctttgtcctccactcatttctctattataatgagccataggttcaggcttactgaaatctgattt

SEQ ID NO: 32686 - DNA, 2003 bp, Mus musculus
aaggcagaacagttcagcatttgggtggaattgaaatgtaggcctcccagccttctctgaccccaggcacctcacttacattgctaactgctggcttctctggctaggttcatcgtgggatccgaccgcgccatcttcatgctccgggatgggagctatgcctgggagatcaaggactttttggtcagtcaagaccggtgtgctgaagtcactctagagggacagatgtatcctggcaaaggaggaggaagcaaggagaaaaataaaacaaagccagagaaggctaaaaagaaggagggagatcccaaaccacgtgcttccaaggaagacaatcgagctgggagcagaagagaagacctttagcaggtggcaagcttcccgccaggtaggcaggaccagatagcccctcgcagactggtggggcaggtggtgcaggaaactgcatagcagatgacattctcatgtcctctagaaatggtctgtgtatgaccatctggtcaatatcacagttaccgtataaaaggcttcccatgtgaaggcaggatttgtgattggtagtggactggcaagtcatgtctactgtggcttcacctgactttggaaacttgatgttttgtaccttttatttctcttgagtccatgacacccccagagtaccactccctcctcagtgcacctgctgtggtcccatggcctgttgtatctgtgtattacaagctcaagtcagacaagccttgagaagcttcaacttgactgaagcgcgggtattgattgttcagtgagtgaagataactgtgccgtatgggcagtgctgtgttcagtgagtgaagataactgtgccgtatgagcagtgctgtgttcagtgagtgaagataactgtgtcgtatgagcagtgctgtgttcagtgagtgaagataactgtgccgtatgagcagtgctgtgcgcccaggatctggacagcaaactcgttatgcagagtgggcagattcacgacagtgccgtccagaacttctcatcggttctggggaatctttgtctccccgtctcctggagttgaagagggaatgcgcttgttcatcgtgtgaggaaagaaggatgcttccactgagggcccacgttctgcatagcccaacaactataaagttggcgaggagggaccagcagagtcttgcataggagtggacctcatctacagtatttctaagcggtttcctttgatgaagtgcctaaacttgtgcttttgtatggtactctcatgatgtgctgctgttcacatctgtttctgctgttcataggttgaagcttcgctaaaagaacatttctatgaggatgccatttttaagaactcacattcttttaaaacctcagttgtggtttgaaattcgaaatagtacatgtacacgtacccggctagaaattgtcactgttaagagtgtcacagtgtgaagaattgccctaccctgctgccagtactttgtcccagtgaagctactgttggtcattggtttttcaaaaataaagtacaattaccagcttccagtgataggtatattctgtcctccagtgatgggtatattctgtcctccagttggtttccgttcatgtttctcttaccaagccacacctccctccccagctcagggcgtcctggacacaacctgctgagcctcttcaaaaagaagctttttttggtcctcgcaccttgtgacttgtgatgatctgctgctgtcctgtttgagggtgctgccaatctaggagaagctgggacagggcactcatccttttggtatctgtgggcccagcaaatctgaaacaagccccgttcctggggtttttctgttttcacatggggcagttgattggctactgtcatgtctagccatgatgctcttttctcagggctgccgtttccttctggaagccttcatgatgctgacacgggactgtcatggctttgagtgtggtgtgcagcctcttcaccaggttcatgcatcacctgtgat

SEQ ID NO: 32687 - DNA, 2412 bp, Mus musculus
ggaaagagacaattgtggaaaaacaagtgaaacccaattagaggcaggaggttttacttaataggaaatactaaagttggtttcttggtattgacaaatgtatttggtaatggctgctgttagcccgataggaaatgagttaggagttatggtaatatctttctttgccagagatcctaaataattccaaattaaaaaaaatatgtgaaaggaaaaaaatattagacaaacaatgggaacggcaggtgagccattatagtatgtcagtgtgagttttaacacctgtacctggacatcatttctagtgatgagggcggggcacagctctgtgatgtccagctgtgatgctgacgctcttgtctggacagcacgtctcctgtgaatgtgactaaaggagtccttctctcccctccccttctgttttgcagcattgacaagatatctaaagtcacctctcctgtgttggtcattcacggtaccgaggatgaggtcatcgatttctcccatggcttggcgatgtatgagcgctgtccccgtgctgtggagcccctgtgggttgagggggctgggcacaatgatatagagctctatgcacagtacctagaacgactaaaacagttcatatctcacgagcttcccaactcctgaagacagcggccaaccttacctcattactgtgaagcgaggatccttgtttgcacacgctttgactggatttaacagtgatacccaataaccacagagaagggcccagcctttgtgtgttcttcttaaagagctaacacagtctgtcttttgtacgtaatctccaccttccattaggctgagcagctggattctcagctgcaagaccttgcaggagtgggaacgagagctgaccatgaggactggttcccagggctgtagactaaagtgtgatcaagtccgtctcccttgctgtctgtcacctctgattcccctaccggtgcaggatcacctctcatccatgtgccggtgtttgacctgcggcgctttcagccctggtgccatgggtgagattcatatgtgaagctatggtagtgtaactggaaactgtcgtgagaaatcctccattaacttgtattaacacgccagcctttcccacacacatgcattgaagaatgatttactggaactataacagcttcatcaactgttaccatttaaatacaactggaatattcttaaacaacaggaaactggggtttttttaagtgtaaatttattactagccaagagttttaatattttgattgtctggtctaatagagcctggccgactttccttctgtaaagtcctccttgtcggctttcttaaaagtcctgtacatatttgcaattacattgtgcacagattcttaatggatagatttcttttgtcaggctacaacaacagactgcagattccttgtttgtattgtaaatgattgaatacattttgttaatatgtttttattcctatgttttgctattaaaatttttataacatttccaagacaaaaattccaagtttctgctttgaagaatttaggtaattaaattaccctaagctgatctcttagtttaggagttatttgggttttgacactggagttgtgccaggtgaacatcagaaacaagatgcttaaatcattacactaacttgtattggttgcgggattgggtttggggtcgtttggtcttattttagggttttttttttttttgttttttttcttcttcaaatttaaaagccttaaatgtactgtaagcctcagatcgttgtacaactggattgcgttggttgccagtttgtgtgctgttgcctggatgcggcacggtggttggtaatggaataaaggacgcatggatcagaacgcgtgggcttatgtgctccttccttcatctcgccatcaaaagaaatagtaaggcgcacctttcatctcgacttaagaacatccgtggggcatcactgtggtaaaagggctgagacacagcagcagtaaacatagatggcacattcctaagtgggacatgcagtaggcctgctgcagagacaagagccgagaggactctcgtggctactcagctgggagaagacagagaacctgttctctgggaaggatgagtcatgggaatgccataggtctttttggccttttgatcacctttccagagaaaggatactagctttcacctcgaagtatttcctgatcgtactttaagaggctatagtggttacccagcgtggcacatgctttagttccagcacttggggacagtcaaggatgtgcacatccagtagcaggcgaagtaacaaagctgctgagaagtccagagcactagatggagaaaacaccccagaggcctcttttagagaagctaaccaacctaggggttctaagcacctgactt

SEQ ID NO: 32688 - DNA, 1513 bp, Mus musculus
gcaggggactggcaactataacatcgaggactttgctgacctgggcatgttccctccattttctgagtagcttcaggcaaagccaggcttctactgcccagacgctattatcatgccatagatgcccatgttcaaagagggtccccctcacccagcttgccctgctgtagaacccccagaaatctcccttattccccatcctccctggacatggcatcacctggctctaacccacagccctggcttcttgggtttgggatctttgtatttattgtactttatctgtgtgctcggaagggggccgccagggtcttaaatcccattgtgaataatctattaatggacaatttgcacccatcaagtgtttgcttgatccacaatggctggcagtaccagcaggtctgcctggtgcagaagctgggtttctttctgctttttcacggctgctgcctcggaggcttggtgtcagagtgaaaggcagtgacctctgcattctgtgctggagccaggagcacaggatgggagtctcccacactagctgtccttgacggcctggggccaggtgtgctttaaacctgagaatcaacgttgtggcttggtagatgtactgtggcgtgttggtgtgtgtggccagtgagagtgagaagccgtccccattcagctgcatttcaaaggaaagcgtgactggggcctgggagctgggctgactccctggaagccagggctggggagctgcccactctgtagtcagttctttggtcccctgcccttttacagacatactttacttcttaaagtctctagtccttctgtcctatgcgagcactcacgcttctcttactaagcctgagggacagtgtcctgattccataaaggtcactgcatcctccctgctctgcatctgagcagagctgttttctgcccagcgccttcagaaagtcagacccagtcctcctctgtacagggttaggatacctcgactctaagtgtccctgacaccttctgctcagtaacttggaaagaagatggggccacactctgggtggaaaagggtgccttgggccacctgaacctctgtcctcatcaggcaggagaggcaagggtacctcagggcagacacagccaggcgcctgtgaggccagagactctgttctgcccaagcttctacaaagacctgaattcctcagtggtcttaaggtagaactatgaactaacttctagaacaatggttctcagcctgtgggctgtgttggggatgccagacaaccatttcacaggggccgcatatcagataccctgcatattaggtagttacaaacgatacatacataacagtagaaaatcacacttataaaatagcaatgaaaatgatcttacggttagggtcaccactacatgaagaactatattaaagggtcacagagttaggaaggttgagaaccactgttctagaagtgtcttgctggcttatctctgacatcagagtccctgtgtcagtcagatttaaagagct

SEQ ID NO: 32689 - DNA, 1128 bp, Mus musculus
gctaaggaaaactcagagccaggcttcaaggccagtctctccatccaaggcacttgtacccacactgtactcagagccatcactactgaaactagaagctggatagaggtttatggacacaccacctacttttccacagggccattgctgccttctggattagtagagacagcacttcaacacagcactggcctgtctcattactgctccaggttttagtccctctccctctaccatttcaagatgactcttcagaggaaggagggatgccaggcagcagtgtataaggtggtcctgatggggagaaggtgtggtcgagacagaaaagcaccttgtagttaagagggctgcagaaataaccattttagatctctgagtgatatgaacagtcaccctcagtgaggaagggctggggagggtggagaaaggcccagggctttccaggtggcaacaggtcctctagttgtaaccagatatacccaagcaccaggttcagaaagcaagcagggggcagcaaagacaccacccaggagacaaggagggagcctatcctctcagtgttgtctggtggttgaactctggaaaaccttggtcctggtgagcttaaactgaaggccctttgccaatgaccccagcacctccctgggaggaatggcttctgttctccaacccgaaagaggatgtgggaaaggttagtctgtgggcatttccagaggaagttcatttggtccatgtcccctgcattgccttctgtggttagggatctgcagggttctcctgaattcaggtaattgggtcagcattttgggtcggaatagggaataactttgaaatagactgcctgatggtagaagtgggtgcaagcaaagagtaaactaactaactaacttacttacttaccttccttcattcatcccttccttcctcattcccttcttccctccctccttcccttccttccttccttccttcctccctccctccctccctccctccctccctccctcccttccttccttccttcctccctcccttccttccttcctttttcaatgaccacttattcgctaattcatgaatacctgttttagatgtctgtagacaggtcacatgggatgcagctcaccc

SEQ ID NO: 32690 - DNA, 1114 bp, Mus musculus
aagattttgcactgtttaaaccctatctcaaggacaaataaaacagtgaccctagccatgaacgtagatgattctgtactgctcaaggaattccttctcccccgcacttagtttcccttagacatgattgctagatgttctcttggtccatggctattggacagatgccattccttttgggataggtagggctgtgaagtcaacttgtcaatcctcctggaatgagcacccctgatgttttcattctttacaagtgtcatatactgtcagatgtgagggtatggagcctggaatacagaggaagaatcagaaaggcctggggtgccctggggctaggggggaaagggctcatgtgagtagacttcccaccttagagacccagggaagtaatgccaggtcctcaggcagccctagtccctggttgaactttgaaaatattttccctttgctctgtaagccacagtgacccagagcatcgggtcatctagattcttaccaactttctccatggcaggctttcttcgtaggccctgggaacagattcggagagccaatccccatttccaaagcccatgaacacattttcgggatggtcctcatgaacgactggagcggtaatgcctggtggcccagcttcctctgatgttctgttcttaggggcacacacaggagttgggtatgggacaggaggcctaagtactacaggggtgataccatgcagacttctgactctgtgggtgtggggcagtcacagcttccctgagtagctttctcataagtggaaggatggagctgacagaacctaaagctttatcaagccctacacactccactcactgttgccagcaccatcagctgctgatgaagagctgtacatggagggattttagtcagtggctgaattgagccttactattcatcagcccagcatctgagtcccagctctacaccctgataccatgtgtaagaggaagtgggtccagaaatctcaggagagggccttcccccattcaggcccttggtagggactgtcctgtcatccttcattgttccctagcacagcacctccaaggacctctgtcttcatactgaatacctttctgtttgttccctg

SEQ ID NO: 32691 - DNA, 1238 bp, Mus musculus
ctcctcttgggcaagggaggaaggaaggaaggaaggaaggaaggaaggaaggaaatgctttttttccattttattatgttataaactaggctattacgtttttacactgtttcctttttaaaaattcatcatagatgctcatttacaactttgttttcatttctgaagcaaggctgcatcatgctagttttcatttagagcattcatgtaatatttgggatgtgttaaaacgcacgcacgcacgctgttgctttggtttcctaagcatagacttctggccgtacttagcctgtggtttcccagccctatgatcatggtaggttacaagtgtctctgttttctataggaagtggtatactatgtccttttagtttgtttggatatttagaaggtgaacttttcaaactgaaataatattgagtccagcagcacttacctgaaggaattaagagattctcttgagcccaggtgtttaacaccattctgggcatcagaacaagcccctatctctaaaattagaaaagtaattttaaaaaactttatgttaaaaaaataaaaatatcttttgcttttctagccctgtgtcaaatcagtcacttttatcagaatctgtagcaccttcccaagtggacagtacatctgtggacaaagcagtatctgagacagaagacctgcaaggtttgcaaatgatagcatgtgtttgtttaacacttgagttttgtaggccgggcactagcatagatgtgggtatttagaacagtacctgcttattgtatatgctttgttagttttgttatgagaagagtattttaaattctcaaatatttaaattcttaaatatttaatagttgggatctactttccacttgtatataattagatcagagtaaacagaagattcaaatctgatgtaattagagtgagcaatagaagtattatactatatgttctgttgtgttaggcagttaaatcccaaaactctcctctccgagcactgggactactggcttgctgattttggttttgactgattatccgggaggcttttcttcctgcttcccaggcactcctctccccgtgtgaactacagagtagtggtcacatccagctccttgcattcataagtgcggcaccccatgttctcaccctggttccatggattcaaatgatccaagaactctgagaaacttatctgaaggcacttgcaatggggaggcatttaggaggtttcataatct

SEQ ID NO: 32692 - DNA, 1169 bp, Mus musculus
atccccttgatctccttttgttgtctaattgctctggctaggacttcgagtacaatgttgaataggtaggccaagagtggacagccttatctagtccctgattttagtgggattgcttccagcttctcaccatttactttgatgttggctactggttttctgtagattgcttttatcatgtataggttgggccttgaattcctgatctttccaagacttttatcatgaatgggtgttggattttgtcacatgctttctcggcatctaatgagatgatgatgtggtttttgtctttgagtttgtttgtataatggattacgttgatggatttccgtatattgaaccatccctgcatccctgggatgaaacctacttggtcaggatggatgattgttttgatgtgttcttggatttggttaccaagaactttattgaggattttttcatcgatattcataagggaagttggtctgaagttctctgtctttgttgggtctttttgtggtttaggttttagagtaattgtggcttcatagaatgagttgggtagaataccttctgcttcaattttgtggaatagtttttgaagaactggaattagatcttctttgagggtctgatagacctctgcactaaacccatcttgtcctggttttttttttttttggttgggagactattaatgactgcttccatttctttagaggatataggactgtttagattattaacctgatcttcatttaactttggcacctggtatctgtctagaaacttgtccatttcatccaggctttccagttttgttgagtatagccttttgtagaaggatctgatggtgttatggatttcttcaggatctgttgttatgtttccttttcatttctgattttgttaattagtatgctttccctgtgccctctagtgagtctggctaaggttttatctatcttgttgattttctcaaagaaccagctcctcgattggttgattcttttaatagttcttcttgtttccacttggttgatttcatccctgagtttgattatttcctgccttctactactcttgggtgaatttacttccttttgttctagagcttttaggtgtgttgttaggcggctaatgtgtgctctctctagtttctttttggaggcactaagagctat

SEQ ID NO: 32693 - DNA, 1149 bp, Mus musculus
acacactgcataatttctagcagccaatttatgcccatagttacattttttcctgaatccaactatgaatatcataattggaaaatggttttaagatgaaaaggaacaagaaattaactttgcaaatactttaaacccgtgctcatacagtaggcttcttgtcctgttctgccaaattttgtacctgatttcctacttctcttctctttccaggaaaacagttggagttttctgctgtggacccagttctatttccaagactcttcatagtttgagtaaccggaacaactcatatgggacaaaatttgaatacaataaagaatccttcagctgaaaccttaggagactactggggactttaaagaggaacaagtgcaatttctaagacttagaaactcagctgaatcaaacagctgtgctatgccaaagaataccaagggtttgctatttatgattatttaaaatgagaattcagaaaatgtggcaaaatggcatggttaatctgcgagccaaaggggccctgaagaatatctgatgtggtgattcacattttgatgagcaaattaaaagaatgccgttagacgcacgctgttgatttttatgggaaattcaagaagtctcttacaaggagctgaactcacttacactgaagctgatagctgcagccctctttaaattgttttcggttgaacacattcaagattgaacaaaattaaaaattcattgaaactcagactccattttctaggttgtgcataagtggagtagctttcatttggataggctccaggcaaacactgggaggttgaaactgtagcacaaaactttgtatcgatacgggtacttcatatctgctgcttcactactgactctcctgcctcgctgcagtgttcctaatctatatgctcacaaagcttatacccatgtggatgtagtatctacttatgtttgcatcttatcctccgtctaggaaaatctgctcccccttagccaatcttggacacaattatttaatagaactgtttgatcaccgatttgttcaatttagtcccatggcttagtaatgaaaatgtgctttaagcttatccttaaaaaccaaagagctttgtatcttgcaccaaacacagaagcacaagacctctctccttt

SEQ ID NO: 32694 - DNA, 1151 bp, Mus musculus
agattcatcacctgccaattgcttgctgtgcaagcaagaggacctgaggccagacttcaggatctgtgtcagaaaaacaagacagatatgctgacacacttgtaattctagtgctagagagacagagacaggtggaaccctagagcctactggttaaccaacatagttcagtgaacaagtatctgtcaatgagtgagctgtgtcaaaatcaagttatatgttcctaagaagcgatagccatggttgacctctgatccctgacttctgtatatgcttgggcttccatacacacatgagcgcacacctaaataactaaataaaacaagaacatttaaccttgtcaaagaggatcttctgacaatacctagtgaaccctaaaattcagacaggaaataaagaggagtttttacaatgtcagtgtgttgaaactatttcttgttgtgtgtctttggcatgtggaaatgtgaataatagttgcataatgagtgaaatattaactgtggagatttgagtagctctttgggacttcagtggatatttcacaatgacatgaaatggttcttctgagtagacagctgatatctatctattaaaattaatgtgacaggcaaattaggcaataacattggagctacacaacaatgtgacaaaccagaagtattctgaggctcaagaaaacctgagcatcatatcacctaagctccttacacaggtaaaaacatgaatttatacaaaaggcgaaggactgtatcctaagtctcatagatgagaattgatatagtcatgtctgagacccagctatgttaactcctttttttcccagagtaccttagagcactgagaatgttagctaatcaccagagatgttagctgtgtgctcaatgtatcttggcattctgagtcttaagagttggtatgtcaaacctatataattgtatttgttttgatatggggtctctgtttgtagacctggctgccatggaacttgctatgtagaccaggttactctcaagctcataatgatctacctgtctctgcctcctaactatattgttttaaaaaattgtagttgactaaaataccattttctctgctgtgaaggaaagtaacactctagaaatgtgcactgtggcttcatcttttatttttgt

SEQ ID NO: 32695 - DNA, 1164 bp, Mus musculus
tgggtttcataccatttgagccagtgtcatggtggtacccatactcttttgttcagctctcagtcctgtctctcttcgagaccagatgggctggttggcagcctagtgaccttatatgataatagcaggttaggaacaaatggaaaccgacaggtgctgctgtaaaaaatgtctcagtgttcacaggagtgttacacttgaatattgtcaagcagacaacctaaaagccaatcttcacacctcctataggcagattgtgtttattttcaccacagtggctgtgctctttatagctcagtttcaatgtcattggtgttttagaaagggttaagatcctatggaacaaaagagctttgggccagtttgacagttggtaccccctctaatgcctcacctaaatggggcgttttatgacgaaaaatgtgaaaatgcagtgattgttgggagttcctctctcactaattggcttcctgttcattaaccagttctggctggagttaagggacaccagatggttggtgctgattatagaagcagtcctggacagctgactgagatatgatcacttggcttttctggggaaagttgtacttttctaagttaatatagaagtctaaagtggctgtgatgtctacagttaatgtaatatataggaattatctttaaatatataattttgttgctaaaaatgtttcaggccattgtaagttatgcagtagaacttgtgttatgacaggaattgtaactcaagacattaaaaatacttaacctcccttattcagttgcatcagcacttgtatttctgtgtaaccctacccttggttgttatagaaaattgagtccctacaaagagacagactctagtgccatcatgtaacagaaccacttgagtttgctcagaattttgcgttacgattagcgttctagagtggacttacctgcttggtaacacattgaagggtcattttgggtttggacttccacactgattaattaattaatgcagttttaggtttttattcactggaatcggactgatgattagtactgtgtttccctttgaaaatgaagtattaaagcactgagaacgcctggctacctggacctcattttctcctctcaggttttatgtctgttgtgtttttcttgtcaggttaaaaaatc

SEQ ID NO: 32696 - DNA, 1191 bp, Mus musculus
atgagataggaattaaaaagtgtatgggttgtgtgtggaataatgggatagtccgtaagaggtccaaaaccttacagaaagtcataaaacctaattaaccagtaaataaagaagcaaaataattaagaaaatttttgcaagagtgtattttttttatttaaaagacagtaaaatgtaaaatagatttttttctttttagaaattacagcatcagtcagcatcctctcacagtgattcatttagcaaactgaactggtgggggaggggagagcagttgtggctccagttcaaacctgttaaaccagatttgctggcatacattatcctggtgtttgaaccagttaccttgtggattgagtttctactcagctgtcagcgggtctcagcttttccttgggttttcccagccttcagcatagattgatgctttgaggaaatgcccagccattattctgtatgtagtggatggccagccttccaccagttggctttcagtgtctgaggttcttatgtggtcatgtctgtgctattgtgtaccaaccatttcagctggaagtgttcattttaccagggttctggccctctctctgtccactttagtattgtctgtgtagttgcaaatcagacgcattctcacttgtcgtgagttcagcagctgtttcttagtcactaccctacctcccacccccattttcttgcccagatagttgcaaggcacttctttcttagattaaagcgtttcttccaaggtacccacagaaaatcttagtttcttgtttgtggatcacagttcagtctccctcctcacaccccttgttattccttgtctttgtgcccaattcagcctttggctgcatttccccagccttcctttctttgacactggtgttggggtaggaggacgtatctgtcttcttggtagtccctgcttcctcagcagctttgtgtcagagtcagtgggggaatctcctgagtgcttctttgggcagttctttggttttagctgtcatcgcttatgattatggcttcttgagctgacctctcatttatttcttggaccaagggagcttctattttccattttacccacagtcctttcatctgattttgttcaaagatctttttgtaattcttgataacacttgacttcaggagtactgtactttctgctgcttttgtttgtttgttata

SEQ ID NO: 32697 - DNA, 1125 bp, Mus musculus
atatctcactggtctccagacctggcattttggtcataacccactttggaccaaagaaatgttttgacctcttaaagaattcaggaggaagagatgctgagctcctgccaataaagcttatgagatagtacacttagctgaaggaattaaagagataataatttgggtgctaaatgagatcctggagcttttagaccatttactgtcaaccctaccctcagatcatttggcacacagctagcaccaagtgggtgcaactaaggaagtcacaacttttcatgtggaatctgagtgagagagagagagagagagagagagagagagagagagagaattcccaatgtgaagcagtcccctagggccactccagcagggcttgggaccccgagaaggcaccttagccacagtacctttctgagttcctttcagctcaggtctgaacaagggctggacctggaagcctgcaacacttcgcctgctgctccttctgtaaggacaaggcagctaagactgggttttctttgatgttcttttttttttccctacgtatgtgctcagctcatggtgatcactgaccagataactgattgagcacaaacgtctcacattcaaagaaatggagtcattcactctcattgctcgcaaatacaatatcaggacagcaatgcaaggaaaatgatctcttggttgcttttcctgagcctacatttaaggtaggcaatatgatgtttgataacaatgattcatttcagtgaacattttcaagtaaagctgtctggttcaaagcctctggcttgtgctacactctgaatactggacctcaccgggactcctttctgatatcttgttaagctgtgtcatgtagctcctgcagctttagttctgtaagacatgttccagcagttaatagatgaagcagatgttgcagtgagcccactcaaagccctggatctgggtagtagctgagttgtttaacccctgtcagctctcttggcacaccaccagggatagccctcccacactacacaggtgaagggcaggtacagttcacctactgctcatgccctcagggcagtctctcccatgcccacagcaccagctcagctctactgagctgcccagaaa

SEQ ID NO: 32698 - DNA, 1188 bp, Mus musculus
cctttcaccgtgcagcctgtgcaacaatggcacacagtaccaagaggaagtatatcatttgccaccccaccctgatatgtttcttctcctaaaaaaaaaaaatcacacttgctctcgtcatcctcacttgtgtttgcttttcatttgccttatttcccttctatgcagcgctcagctcagttccttgtagtcccccaagcagttggtaaagagtttgtttagaatcctgaatgaacaacaccctcactgcacttgtgcctgccggatctcccagggtgttcagctaatgatcagtgtcatcccaaaaagctgaaacagggtgacagcagctctgcccaacaaagggagttgaacaggctgaggccttgacttgactgtggctgtggggagaggtaagttggtttctagagcttccatagtgggacacccagacacttctgagtttcttctacctcacagagatggtgtgaggctatagaaggcctcaggatgcggccccttggttcttcatgagaaagatgaactaaaataatattcccagcctgcaagaagataaaatacaggtagagctgttttgtgcagcagttaacctacttgctctctgcctttttcttggatcctcatgcctctcactagttccagaaaccagaaggcaacctggggatattgagatgacaatgtagaggtaccaggcaaacccctgctatacattctctgaacaaatcactgaatttccaaggaaatagatccccctttaaaggatgtacaaaagtgtgtctgcattgatgtctgtactgtaaatttctaatttatcactgtattaaaaaaaacttgctatttaatttttgtattaaaggaaaataaagttttgtttattaactggtgtgtgcattggtgtgtttttgaaggtatatgggaagcatacatgcccagcactgagaaagagaggggtcagttggtttggcaaattgagaaaagctccttggctcatgctgattttctccttgtgggatttctcctgggtcatcaaacccccacaatctaaggtcaataaaagcaaggagatcacttgttgctctggacatagctatagttctcaagttgttaccccaatgataccttctctcccttggtatttccaagagtgctcatctttccttttgaagtttaaaaacagatttcttactg

SEQ ID NO: 32699 - DNA, 1240 bp, Mus musculus
attaacagtgcctttaaaatacatggactggtgcagagtcatttgttagagcagtttgtggtctttagttcaaacaaggatctagtttaattgcacacccaaactgcctttggaaatttcttgcatgtcagcgtttggttgactttacatgcaatgtgacttttcccccaaattattctcagttatctctctccttcagctggaatcctaggttactgggttatgaatgtgtatagtgattatgctcaatccatcttgttaataaataatgattgatgttcagttatgtaccttgacagtggctatacaacagcttttgctatccaagacaaaaagcactaatcaacttcaaaataattgacagaaccagaatgatttttctaccagcatatgtgtaactaggactctagattatcaaacccaaactataaaagtgacacacaggtcaactgagtattctagtcgtgtagctacttgtttttacctagtcacaatctgttctggggccggagagattctggtccagtggttaaagagcacctgctgttctttccaaggacccgagtttggttcccagcacacacagagtggcccacaatcatctgtaactccagcgacagagcctgacactttctgttccccaaggataccagacaggcatgttgtgcacagacatgtgtgcaggcaaaacacccacaaatattaaacagaaatgaataatcttaaaaataaatgtgttctgcctattcaatgatttggtagatagaggtccaagttatttaacaaactgtttcctcggtttggtaaccgacataagaccgtgtaattgcctacgacagttctgggtcagtacgtgtaaactagtttgcctggcttcctgagcagctggtgagagttaagttttggatgaccttttctagttgagttattcttgctcttgcaatagcatttggcatagcatgaacaagtgagttttcatttccaagaactctcaaatatgacatatactcctggcatgttggacatgcatacttatccccagggaaaaaagaaagaacaaagttaagtatctgaatcattaaaaaaattattctatatctacaagatggatttttgcataggatgcatgtataagcctggttttgagataagtaatttcttatttatttatttatttatttatattctttaatccttttttacagtccagaccttatccccttcctggtttgctctctaa

SEQ ID NO: 32700 - DNA, 1196 bp, Mus musculus
tcctcaccctcacaccttggttgtcccaatgctgtgacttgctttggcgacctgcaagcattatctgcagaaggggcagctaggtgtcagcactgtcactttcctaatcctgttcctaagatacaatgctttaatgtgtttatcatacacagctttttttttttttttaaagaaaaacttagaggaaaatcagcatggaaggtaaaataactatacctaaagtgttaaaggaatctgccgctgcagttttgtcagattgactgagcatttctctaacagctttggaagagtatctcactctttctgtaactctgtgaagtagaggaaaagtacaacactcgtagtaaaactaatgccacccatgaaatgtcttacttagagccttatttttttcaagattccagggaaatattaattcttactttttcttataaatcagtagcatagatgcaaaacttagtcagctgggcatcaaggctggagcttgggcttctaagcaaggaagcgccctgggtttcctggaataccttagagcctggtgctctgttaattttatgtttccaattctatttacacagatgcttgcattgggcaatcaggttggcaaactgtatgtttgggatttagaagtagaagatcctcataaagccaagtaagtatagacatttctaaaatggtctaaattgtagctttcttatgccatccttaaatcattaatttttgtggtgctgagggtcaaactcagggccttccttatacctgccaggcaagtgcactaccactgagctgcgtcatagcctaatttcaattaacttatttatactgtggtgacagaaacatataccaaacgtgatgaaatttgagaatgaatccttgggggagggtgggtgttcgagacagggtttctctgtgtagccctggctgtcctggaactcagaaatccgcctgcctctgcctctgcctcccaagcactgggattaaaggtgtgcgccaccactgcccggctgggaatggattcttaatgaagataggctggttttatactacactttttcttcttcgttctttaaggtaaatgctgttctgtttgctgtttaactcttatcatgtttcccctagatgcacaacactgacccatcataaatgtggcgcggctattcgacaaaccagtttcagtagggatagcagcatcctca

SEQ ID NO: 32701 - DNA, 1108 bp, Mus musculus
agtgccttgtcgttttgtcacgtcacatgaattttgttattttgagaatgctgcatacagttgggggcccttaagattatttattttcctcaataggattcgctggagagccatattttgtatagtctagtgaagccccccaaccctggggattaaaggtgtatgccgccattctcaagcttcatcaaggatacttaataccatatcattggctgtgtttgtttttccagtttgaaactacagcacactctcagataaaccgtttgtgtgtgtgtagacacacatatatatacatacacatacacatatatgtatatgtatatatatatatatatatatatatcttatgtaggcttgactttttgtatctctgggataaatgtttagagtagttgttgaataatggttgactttttaagaatttgtcgaactgtcttccagagtgccattttacactctcatcagcaatatatacacagtccagtgtctctgtatcattgatattatttaatactaccattatttttagttgttccaatagatgtgtagtgaaactttatcctggtcttgatttacactcactgctagtaatgctgctgaacatgtgcttatttaccatctgtattagggttctcgagaggaacagaacttacagaatgagtgtatatatatgatttattagaattgttaacccaacactggctgcctatgaatgaaaggtccaagaatccagtagttgtttagtacacaagactagatacctccactgatcttaagtacacaacacaatttcaaagaatgccagtgaaggaatgaacttgccatcaagagcaagcaggcaaagagtgcatcctcctttgtcctttctgtgggctgctagcagagggtatcatccagactaaagatggatcttcccacctcaaagattctaattagaagtggctcttcttcaaatgatttgagagagagaaaaaaatccctcacaggtgtgcccagccatttgggatttagttaattctagatagtccagttgtatactagacagtcaagtatagccatcacaccatccatatccttttggggaatatttcttggaatctttagctgg

SEQ ID NO: 32702 - DNA, 1153 bp, Mus musculus
ggctcttgacaggtctaccacacgaacacaccaaaacttgagcaccagcaatgagtcatcctcttctaggcttgcttgtgtggtagacctgtcaagagctgactctgagaaactaaatcagttttgttgttgtttttgtattaggactcttctaggaatgtgaagtctctttcctgttgcttctttgtcttgggagaagctgtgtgttcagtgctgtacacttttactagagtctgatatttaactccgaaagccacacatttgcattttagttcacattgttaaaattgttgacttttctaggtcattgagtagaagggtctatctgaagtactaattttaagtccatatacttgttttagtttgtcaaaagtagggtcacttcattttatgttctagatatgaagtgcttagcatgaagccaaattacttttatccccttatcctagggctacaacactttccaatgcagtctcttctttggcaagcactggcctatctctgaccaaagtggatgaaagggaaaaacaggcagcattagaggaagaacaggctcgtttaaaagcattaaaggtaagtaagtatgggcattttgtttggaagaacaagtaggggatcattatataaatgaacctcttaggttttaaatgtgttagtagtcctacaggctgaaactcagtttatttttcatacttacatgggatgcttggtgaaaagtcagggagtacccttcagcttttaaagcagacttagaagatgtccattttcagagtctgaaccaaaacagatctggttttcgattccttatgcttagttcctttttcaacaggaacagcgtctaaaagaacttgcaaagaaaccgcatacctctctaacaactgcagcctctccggtgtccacctcagcagggggaataatgactgcaccagccattgacatattttctacccctagttcttctaacaggtacaacaggcaataaggatgtctgagtatttagtgtaagatagtcttcaaattatatgtttataggttctgtgagtttgctttgatttatgattttgtattcacaaattaatactaaaggtgtaaaataacacaattggtatactatctaaatataaatgaataaggttagggttatattttgtat

SEQ ID NO: 32703 - DNA, 1148 bp, Mus musculus
gtccacgccatgtcggctgctcctcagggagcgagtacatggggaggtgagtgtcactgtcttctgggtactgtgtgggcagcttcccttgcagtaagcagctttctttctggtagaggttttgcttatacttgatgcatgggaatttgagaaataataaaatgacagtaaactgatttttatctcctgatgaaaatttatgataagtgaaatactaaattcatagttaattatggaataaggtttaatgaagatgaaattaaatataagagtaagagccactttcttacggatgaggtcacgcctgtaatgcggatgttaagtgtacagtagttactgtgtttgcggtaggaaacatttcatagtgggcaatatgataaggctctagtaaaacgcacattgttatcaaccggtgaagcatagtgtggccagagatcacatggtaattcttgtatttttttaaattgtattttacttttatttatttatataattaacttattttatgttaaatgttggttagacttgtaacaggaatgtccttcagtaggtttttagttctaagatgatcatggtttaacacctttaaagcagattggtaatgtatgtctattatacagctttagttgatttaacatcatcacctttgcatggttttgttgtgtgtgtatttatatacacatatatatgtatgtatatatgtatatgtgtattatgtgtattatatagtcaccaaaaattgctggaaagagattatcagaaaaatgatactaagaagaaaactataaaatatgttgaaatttgtatttgctttcatataacatttgaattattaaatttttacagcacatgaaatagattttcatctttaatcatttgaattaacaatatagtttggatgcttctttcctttctccctctcccttaccatcctctccaaggctcctttgtgtttttctttttttggtgtggtatttttgtgagtattgaatccagggcattgcacacactaggcaaatgctctgccattgagcttcatcaccagcccaaagacgctgttttgtatacaagaatctaagctcggtgaaggcaagggttatctatcatagagaacattttgtgatggttgttgtgggggcttgcttgtg

SEQ ID NO: 32704 - DNA, 1160 bp, Mus musculus
actttttttttaatgtgtgacagttggggtgaagtagggaaagggaaagtaggtaggagaaattcagagtacagaaggtcgtaggtagagagacagcgtggggttttagatgacttcaagttttaagaaattatcagatgcaaaattaagataaaatataagaataggtttcatttatgtaatgaagtaaagtcaggaataaatgtatgttgtttattctgagtttttttagtgggtgattttaatggaaatgtagctggtgttgatggttcatacctttaatcttcacacttgggctgaggatcacttggacaacaatgtgatagtatatcttaaaaaacaggaatgtgatataatgaagagaacttttgctttagaactaggtttcttgttaagcaatgtattactttcccattctattcccattcttaaagataacttacagttactctgtaactgatgagacagtgagtggagaactgaacatgtgtgtgttgtgtttgcttcctcttaggattcagtccttctccagttgcacagccacattcttcagctggccttaatgttgactttgaatctgtgtttggaaataaatctacgaatgttgctgtagattctggtggtaagaggagagtttttgttgtttttatttaaaatatgataggtgacatgttaatgtcgatcctctataggaaacatgctgcttttaacatttataaattagagaaattgatcttcttcccccaaatcacttgatgagaacttaaaagagtattaattttacctttttcttggtagcattttagagtttaggggaacttttgtttgttccactatataataagaaaacaatttcttggtaaagtgctaaattgttagtgactatttggaaagtactatagcttttggtcatgacagtttttcttctactgaaatgaacagtgaccagttggtcttacagtgtgtgagattatttttaaactgaagacatagtgcgtggtacctggtttatttagatagtttctatataacttaagtagagtatgttaaagggtttatggctacaggctttaaaaagtcattttagtactgattattattaaggtgcacctactaatttatattttgaaaactataaaactctagaatgaggattgtac

SEQ ID NO: 32705 - DNA, 1226 bp, Mus musculus
gtgtgtattcccatctagtaagtagatttggatgtgccactagtgatctggctgtgctctaaacaccctgagacaacttacggtttctgaggctgattctctgggatcttggaatagtactgtctgttatcgctaaatatttcttgatgacatcagctttaagaggatgtgttttattagtgttactatataaaacacacaagctgagtaatgtgcagtgaattgaaattcgtttcaatgggaaatccagtgtcaggctgccagcatgtagctaaagctttcttggtgcagtagaagggcagtgatcatgaacacacagcctgagggaagttcctataataatgaatgaacacactggtgtgtgtgtgtgtgtgtgtgtgtgtgtgtgttcacgtagaaaatggttggttgatttaggtgctgagaatacagtccagtggtccagcacttgcctagcactcttaattgtgaaaggaaggaaagaagagagggttagacagaaggaatgggtagaactattagtatcagaatgtagaactcttaaattccaactacatgaactagacaaaagggcaatgggttcattattatagaactggatttgttctgtgtgttcatggtttctcccccccccccccccaaacccaacaacagttaattactttctgttccagaggggtaaggggtgtgtgtatgtgagagagacagacagacagacaggcaggtgtcatgcactgaaacagcagcaaagcatataacctttcatatttctataggttggattagtatgtttctacactaataaacattaggtgtaaaagtaaatttaagatgttaaattttaaaattagagacgttctaattttctcttatctgaatttggaggcaagtctgtacaaaggattttatcaacaaacacattttaatacattttggaatgatcataatatgtaagtccctggtgataactgaataagtggtaaaataatgttgccttcacctgaggaaccttaaggtgagtgccatttggaagcacaaatgaatgagtggtaaagtgagcttctctaagagggatcatggtacagatacagcagacaaccaagagctacacagatgcaggggcttctgacgagagcctccgtatgcataggggaatgtgtgatggtcagtgctaagtagtgaatgagctcatttgaattcctgatttctgccaggcaggatgcaga

SEQ ID NO: 32706 - DNA, 2017 bp, Mus musculus
gccatgatttaagactaagatctgtctttttggtgactaacacttcagttctttcaactcctattaatacccataatcagtaacctaccaagaaaagcccgtatttggaaagtgtggagtttgtgttggaaaagctgcctggagagaagagttgtgtcctttaccatagcaacaggattcattgggggatcaaaatcataattttaaattatgcattatatttcttttctccactcctcacatatacagaaaccataattgaagttaacttttctttttaaaaaaaatttatattcagtttgcagtagacattccttaagtatttgtatttatttatgattatcaattttacataacattaatattatatcagacctccttaagaaaatgagtatggatgttcacagtatgtttgatttttatccacaagaatgaatctgattcagaatgcttttcagctgacatacagagcactaaatactttacggcaaatccataggtctgaatctcttaagaattctcagtctctctgggatgtagggcgcattataaatgcattaatccttatagtcaatcctgtgcctaggattttgcaagggaacagttcactgactaggaaaagcactacatttaaaactcagcattagtgcattgggaaggatctttactgctttgtgcttggcatgtcgttattttccatttgacattagggcctttccaaatgaatgtgaggagttgctttcacttcaagactgtccttcttttcagtaaaactttaggagatgttatggggaaagggagggaacagaaatccttgaactttttatttggcgtgtgccatgttatgatcatgtaccttttcaataaggggagatagtatctttaaagtcaatgtctagccaagagtttagttaatgaagaattaaactgcactgttgatcggtgctttctgtaaatacatcttatcgcttgggttgagaggggccttaagaaggacagttcattgtaggaaagcaattctgtacatgagttaagcatacttgttgcattgtctctgcagattctatttttgtttacaatattaaaatgtatgttagcaaatgggtggattttcaaataaaatgcagcttccacaaaacatgttacggtgttctggtttgaggtgtgttctcctttttccttccttttttttttttttttttttttttattattattattatcagtctcatcagttttttgctaataaaattatgcccaggaggttattatatcgactggtcaaataaaatgtaaaatttgtttaactatacaaaaagaataatgtctgaattcttgttaccgtctggactcgcttagacacattacttgcacttgttcactttccttcctgaggggacgccgtcagtcaggtaagttaagggagaaagtacttgctcgtcagtgcgtaagactgtgtttgctaaagaatgtctgtatcatatagtgtagtggataataaacgagcatcagagtgcatcaaagagagatcaaaagctgtatactgctaagtgtttgttctggtatggaaaaaaatcacagtttttagccattgtgtttttgttaatgactgattttcaaatttcgctattattaaaatgtttccatatgaactgagaaattgtgttttaaattaagaatccttaaattagtaaatattgatttattttggttttttgaatgggtattttaaggtatgtggcttaaattctttcatgaccttttttgatagtgtgtgcatatgaagtgctttataaccatctccattttattgcttaaatacttctggggtctgttgggtaagaattgctcacatccggtgttggtccagggagttaaattagcaggtagaataggtggctagacagtggcatggttccttggcttgctgtctgtcattcattcacaactgaatgggcatcatacccctgcagtctagactgttggccacttttgactccctgaggatcttctgtgaa

SEQ ID NO: 32707 - DNA, 1198 bp, Mus musculus
ttattttgttttcccttctaactgagattgaggcgtgctcacttgggccttccttttgtatgacttcttaggatctgtggggtgtatcatgaatattctgtactttttttttttaacatctttagccatcagggaagtacaaatcaaaacaaccccgagattccaccttacaccaatcagaatggctaagatcaaaacctcaagcaagagcacctgctggcgaggatgtggagaaaggggaacatagctggtgggattgcaaactggtacagccactctggaaatcaatctggtggtccatcagaaaatcagaaatagttctgtttctatctaaagacccagctatagccccctgggcatatacccaaaagatgttccacaatatcacaaggacacacgctccactatatttatagcagccttatttataatagctagaaactagaagcaacccagatatccctcaaccaaagaatgcatacaggaaatgtggtacatttatacaatagaatactagtcagctgtctacagccataccatcctaaacgcaccaccctatctcctctgacctgggaagctaagcagggtcgggcctggttagtacttagacgggagaatactattcagctattaaaaacaaggacatcatgaaatttgcaggcaaatgaatggaactggaaaatatcatcctgggtgagataacccagactcaaaaggactgataagtggaaaagagacactaaatcaggactaaatctctggatgttaaatccctagttcaaggatttttcagtatttatgttacttataatcattagtatagaaaacaaggaaacaaacaaatgtgtctttgaaagattatcaatagcagataccaattttgtttgtacttgaagtcttcataacgataaaacatatacataaggtcactcagtcagccaatgtttataatatgaaatggatacatgagaacagacaagtaactgaataaactagggatgagatggaatcgtgatccattctggaagtttatggtcactcaagattgctttgtactggggggaggggttgcaaagtgcaaagcacatctgggtaagaaggcatgctggaaactatccgggtgacctggtgaagaagagtcagggtaagaaaatggagacctctctaaagacagcaagaaagagtcagggtaggaaaa

SEQ ID NO: 32708 - DNA, 2888 bp, Mus musculus
tgctctttatccgcgtttacccctttctcctcccttacaccatgtcaaacaccttagtgggacatcgtcaccggacgcatttcagaggcggaaaaaaaagtaatattaaatcttttaagtgtttagctaaaagcatgaatgtgacactgtaaccaactcctaatgataacctgtgactattaaatctctctgacagtttcttttttaggtgatttccttcctgccaggctccgttgtaggggttacagagcagtcgttcccgcctcacaacctggtaaggatccatctcttcccgtaacgctcatgctcggctgcttaggctactttaatgggcagacatctcaatgtgtgtgtgtgtgtgatatctttttctgtttgtttttctttttgaaaggtggtgggaggggaatcttaatttgggccttgtccaccctggaaacagacttgtgctggtcattaatgtacttaagttgcttctggttgaaatagctgttaaatgtgtccccttgttcagagttgcgtgtacctagctcttctgtccccagtgtggacatggccttggatgacatcggttccaactgtacacagaaacctgctaatagagatacagtttggagacagtcaaacaggtgaagttgaatggaagttccgagttgtacaaggtgcaaattggaattccaattgtagagcaacttttcagaggttgacaataagtattgaggcatgcgcaaatgtggtatttttctggagatgacaagtctcctaaaatacttaatgaatgccttatagttttcagtagaaaatgcagaaatacagtctatttaaagaccctaatagttcaccacttgagaagttggaaattaacatacccatcagatttctgtgttttaattagaagacgataaatgaaatgtttctttgaggaccagcacagtaattactaatcaatgagtatgaagaaattgttgaaagtatttatttttgttgtattaaaatttaggctaaatttctgtatgattagatattgaaggttgtgaaatgtgaatgaaaacatgtaaagtgaggcttcacaaagaatcttttctccatatttctaaaacttttgtcctatttaaaaatacttgtttaaattaatgaaatgatcgatactgtttttccaaagacggaaaagtctttccttaaaatactgtttttttgtccacttgtcttaagtgtgtgttctgatgctctgaaatgcaagagacattaaattctttgtgaaacatcactgtttgataaaggatatacgtatttagcatccttgtttttctttgtgctaaagtggatacagctgttggggcagaagagacgggaccagctgctggccacatttcctgctttattttaaaaggtagtataagaaataaggaaacagaggtaatatcagggcttctgctgtcttttatttttaaaatgttcataattaagtattttccagcagtccaaagatgtaagttatcctacacgtaagatgttttattttgttacttggttatggaaatggaatcttgttcttgcacaactgtaaatgttttgttgctagataatatgattttgagacctaaattagtctctggtttttcagtctatcacattttgtaaaaatctctactgcacttgagcatgaatgggtagtagccaaactcacaacttggagtgacggacctgcttctacaagggtaggatacaagccccacaatgcagctgcatggatttcagtgcctatgaattatatatatatatatatacatagatatagaaaccaaaagtagttggaaatttatttgaaatgactaatttgtgctctttctgaagtatgttaaatgtagcttttgaaacagaagccttgaattgaaatttaatacttgaacatttttgtatatatttctttgtatataattttgtgcagaaccaatgacaaacatatggtgtcataataaaatcaggtttgttgatctttcagttatgggctcaaagaatttattcatctctaacatgatattggaaagtaatggatgaaaataggaaaaatggttgttaatatagacttaatcgaaaggttctggaagtagtaagtttgttttcctaaaaactataccatttctgtggaatattttcttaacctcagtgcttttcctgcatttgaagtgtgggcttggggaaaattagtttctgaattgggatgttttgaaattccaagtacagagtcttaggctgtcatttcataaatggcagtttggagaattaggaattctcaacagtggaagatcagagtgtcctgtttttaaagctgctttcttaggttccttatgtcttattaactgtgtttttgtttccatttcattgtttttttctagttttggtgacagtgatttttgtcattttttttgcatcaactcatggtcttgtttttacatggtaactgcatgtatgtaggatctatcaggggctttaaataaattttgctcatatttatgtgtaagcacattttactgtaaatgtttgggtttaatttacagcagttgtttatttcagtgtgtagtaaacagtatctagagtgttctgttcactacttgttaattaaaaaagttatgattaatataaaactgttgtcttactatttttagaaaacttttgtgaataattagtattttgatagagagttctgaaatacaaaatagattgctttgaaaatttcaggtttgggtgtatttactgtgatgttgagaacaatttagtatttggggaactgtttcaggttttattcttgatttgtacctgtgtaaaaatgatagaaaaccttaaaatgtagcttttaaatacctgtcttcctatggtagttaatattc

SEQ ID NO: 32709 - DNA, 1206 bp, Mus musculus
tattgtctcttcacagcagtaaaacactaatttaggtggccactaaatttgggtgctcgggtcctaacttgaattctctggaagagtagcaagtgctcctaacagccgagaggatgtattaattatgtttctgttgctaaataccataaccaagcatcttagagaaggaatgatttatttaggtttatagttccacaaaggtgtcaatcctggcagggagctataattatagtagcaatctgctagcttgctgtagctagctgtagtaggcatggcagcaggagcagaaagcagagagctttgaaggagagagaacaaaactcaaagtgatggggggctttttagctcttagagcctagtctcattgacttcttcctgcaagactgcactgcttacatttctcaatcaactagggaccgtgtgttcaaataccggagcctttgtcattcaaacagtaacagccatgttaattggtttatgttttaaagactatcagtctgacgattgaggatataatagactggagggtgagaaagaatataacatttatagtctctcgattattttcttgattgtagtgagttttgcttcactgatttggctcccgccggattgtatactctcctccctctccccccaaccccatccccactccaaggatctttggatccttgaatgaaagacacacacacacacacacacacacacacacacacacacacactagcttatttttaaaatgccttggctacctcaaaggctgggcactcctaagccttctcctgctaccccaggcccaactggggaagtggccagtggccacttacccgaaatctcacatggttggttggctttatcttctgccactccttcatcccatccttctacccagagtcattgagatctcctccattcttctctgcatcctacctgcacaactgtaagtatcctagcccatgcccagccattagccattggcatctttactgatcaatcaaaactcaattgggcacaaggaccttcagtgtctggacatgcagattccggattgaatcaaagccttagaatcaatcttcaacatatggttaccacttgggggataatctgtttccatttaatggtgtcttagtatgatcaggctgttgtaaattagagactgggaaagttaaacaacagaaatttatttcttgcatttaggggctggaa

SEQ ID NO: 32710 - DNA, 1183 bp, Mus musculus
aagaaagtgtagcaacacccactgaaattaaaacagaaagtgatacagttgagtcagtttaaataaaatgagaaaagtatgcttttctttttaaacaaaagctgctgttggatctaggtgaagaatttttttatgtatatatagaaatatctatattaattgtctagctgtggcagggccttcagctatcatttggttaataaatacattttagtatttgcatttcctactgcctgcacagtttcaggtgcttgttgtgtgaaagttctgtagatgagtgcaaatgtaacaaaatgaaattgtatgtgtacaaatgtacaattttcacttgtgaactgtaaattataaataaaaaatatttttgctatccatggagtgtaatatttatgcacaccatcaaataaagacagtgtttctatacttttattgggcaagaatggaactgaacagcaatcttaacatgatggttttttttctagtagcttcctgggacttaatgcagcaaagtttcaaacttagtttttctcaaatagaaaagcaagattaaaaaaacaaaaaggacatatgtgcttacatatagatatgtatctccagctagagtcatccacaatgtccacttttggaaagtatgtaatgaaacagtaatgcttatttaaacttggacactgatgccatcaagcaactaacaaatatatttaagtactaaaagtgattttactttttagaaaatatttttaaaattgtcaatttaatgcagatgaacacatttctattttaagttacagggattctgtataagaatgttcatatgaaaaacatggttaactttttttctttgttggttttgattgaattagatgggtaacatgagatgttaatattcatacatgtaataaactgaatgatgaacaatcttggtttgtatttcttgagtgaccttagaatgtgacccttatgtttaatgtgtgttttaaaacatgagtgcagtgccagttatgagccatactcccagatatgatattattccatttatagaagatacatatacagtattaaaacttgtgattttttttccgtgggagatggaaggcttttttcatgtgatttctttgattatagcactaaagggtactctggtttgtgaataaaattgagcaactccaaaagtacagtgtgaaacctg

SEQ ID NO: 32711 - DNA, 1257 bp, Mus musculus
ggacaaatggggggaggaggccctatgagatttgaaggaccacaaggtcagttaggaggtgggtgtcctttgagatttgaaggtcctccaggaccagtaggaacacctctgcggtttgaagggccaattggtcaaggaggaggaggtggttttcgatttgaaggttcacctagtttgaggtttgagggatctacaggtggtttacgatttgaaggaccagggggtcagcccgtgggtggtctcaggtttgaaggacatcgtggtcaacctgtgggtggtctcaggtttgaaggacctcatggacagcctgtgggcagtcttagatttgataatcctcgaggtcagcctgtaggaggacttagatttgaagggggtcatggtccatcaggggctgcaattaggtttgatgggcctcatggtcagccaggtggtggtggtggtatcagatttgagggccctttgctacagcaaggagttggaatgaggtttgagggtccccatggtcagtctgtagctggtctgagatttgaaggacataatcaactaggtgggaaccttaggtttgagggaccacatggtcaaccaggggttgggatcaggtttgaaggacctatagttcaacaaggaggtggaatgaggtttgaaggtcctgtaccaggaggtggcctgagaattgaagggcctctgggtcaaggtggtcctagatttgaaggttgtcactctttaaggtttgatggacagccaggtcaaccatcacttttgccaagatttgatggattacatggccagccaggtcctagatttgaaagaactggtcagccaggtccacagaggtttgatggaccacctggacagcaggttcaaccaagatttgatggtgtacctcaaagatttgatgggccacaacaccagcaagcatcaagatttgatattcctcttggtctacaaggaactcgatttgacaatcatccttcacaaaggattgaatctttcaatcattctggcccatataatgatccacctggcaatacttttaatgttccatctcaaggattacagttccaaagacacgaacaaatatttgatacacctcaaggaccaaattttaatggaccacatggccctggaaatcagaatttcccaaatcccattaacagagcttctggacactattttgatgaaaagaatcttcagagttctcagtttggaaactttggcaatttgcctacaccaatatcagtaggaaatattcaggca

SEQ ID NO: 32712 - DNA, 1126 bp, Mus musculus
ggtaattctcttcccttagtcttactataattaacaagccaccatggtttaattctttgaaactaaaaacaaatggaggggtaactagtgggggtaaatgaatttaacacacgatatttgaagattatttggaggatttttgtaggacatggcatagagaggaatataaaagatacttcacagttgaaagaaatagaatgaagactatcacacccaagccatagaaacacagattaggctgtgttgggaagaatatcgtgaaaaaaattggaaccctctgtagtagccgccttcctgtcaaacaaatgatagatacaaactgagcaaagaaaatgtgcacaggacctatagagttgagaggattggcccagatgctctataaactcagaatcctaaatagcagtaccttttcttatgctcaattaaatatatgttgaccaacagttgatgatatttttttttaaaggcattatattctgtcacagccttttagggaaaaggttgggtcacatgtccttagaccaagacactgatctgccattaagtcctaagctaaaaactcttgttcgtccctgttgaaatcaaactggcttacgggttaaaaatggaagaaatatcatttaggcagaggttatatgaaatcatagaaattattcatctcatttggcctaataaacagtgtgttctcttcaggatgttagaagtaatttagcataggagaaccttccattagagaatccccaacagttcagtgttcatgagaggacaggaggatcacagggaggacggcatccttaagatctgcttttggaagtctcaaatgacatttggagattttgctgattgtggagaaagagaatttaaaagagtgaaggccaatttgcttcatatataaagtaaatgcatgcacaaagtacaaaacaggtctttaacgtgaaaataaaataactaaaaacaatgtttgctaattaaaatgtgtgagccaaatgatcacattgtaaagctccttgccccctttccagtctgatagacttacttggtttttagaaaaggaaaacattgctcttgaatcagtatggaatgaaacacacttgaatatggtgagactttctctgactaggtaaga

SEQ ID NO: 32713 - DNA, 1114 bp, Mus musculus
ccttgaaaatgatgtggatgaatgggtcccccctaccaccaagaaagtatttatttcagatattcttggattcagagtcatgggtttaagaaaatgccttgatctccattattcccctgacccaaaagagttaccaaggaagaaactgataaaagtcacacataaaaccaacatttaattaagaagttaaagactatacctatagttgcaaaaccaaaagtgctcaaagcatgactataaatgatgaggctgaaaataggaaaagcccagttggggatggcttttcagaataatacttttagtgtctgatacaaaaagcacttagtaactgaaggtattttcatataaagtcacatgaacccagttcccagaaattttaagtgatggcagatctgtttggaaatgtttgctttcactgatacagagagcagtctttatgttttgaagacttacaggaagtcgttaataggagtggactgtactgaatgctgttggatctttcaaggtttccaccatggctttctttttttctccagaatactgtgattaagataactgagcacttctctttacattgactgtataaatatgttgattttgtatttaaaagtatttgttaaaatatagacatccagaagtaaagtctttataatccaaaatatcttttttgttataattttttactatttgaaaatttcacaccttatacccagatcacactcactttccagtcctttcaggtctgcctgctacctttgtgacctaacaccttcccccccagcccccggcctttccccccaaaaaaagaaggaaaaaaaagatacaagtccagtttgtgttgcctatatagtcactgaagcatggtctacactcccagtcatcttccacttaaggcaaacgtggtctttccccgctcacacccctgtcagaagccctcagttgcggagagctcctcttcagcgtctttatcacagtttttaagagaactcttccatggtttcctgtctaagctgctactgttttttgggtaggtggatggggtggtttttcacccaagcctccttatgttcctcctcctcaactgagtctgcagtcattgctgccactacagaag

SEQ ID NO: 32714 - DNA, 1175 bp, Mus musculus
atacgtctgaaaccctttacgtgtgtaaatagtagtgttggtcttttgtattttgagaaaagggacagctgcattttttttctttcctttttattttttttatacagtggattaaagtacctttcattggcaacacatatcagacccctttaaccaatattaaagactatcagaccaaatgtttatgttttccaaatatgtcttatcactggttgcagttttcaatagaagctgattgccctgtcatagccataaatcggaattatgaactttgtttcagattgggtgtactaaaacgctcctttgactatttccttaaggatatattgaaatgcccacagagtttgaattatgttctgtaggaaagtgtagacagttgttttaggatgtgtacagttgtagaaggtgccaactttaaaagctcatgtttggttcttaaggttttctttttaaaaaaaaatgcattaaagtaatttcgttacatggcctgctgtactaacatctgttattactgtcgtgagaaaatttttatttttaaaaccggtgtccatgttgtgccagagattgtaggatggaggggaggctacctttaaatttttttctttatttatcgttaaaatgtttcagcttaaattaatctttcctgagtgtttttttttctgttttgaaggcaatcccatcagttcgtctgtgcagttagtaggaggggccggactggtgatcctaggctgtgttaaccaaagcaaatgtgaaatcagctggcatcctgttgataactacttcaacaaaccatattttgggcctttgtttttgtatataaagataatgatacactcaaaaaaaaaaaaaagaaagaaaattggtttagtaacaaagaggaaaggttatcttgattcttatcataaaatgctgataaacactgtaatgcatttaaaaagttctatttctgaagaataatttcctcgctcaaatgaaaaacctttaactttttctggagggtagggaaataagtcagtcttttgcatggtatgtaaagcgctctctactgataccatttcctttttccctgccttagctccagtggcctggtaaatcactccttaccacgccacactcattccctctttcctcaatgccttttcccactcattcaatccacaaatggctcatcaatt

SEQ ID NO: 32715 - DNA, 1179 bp, Mus musculus
cccgtggtcaggaggtggagtaaccagagacatcacagacaccctggtggctatcaacatccatgacggggcccatcatttagatctccgagcccacaacgccttcgatccttcctctgtgctgttatctcgattattggaagttaaacacatgaagaaatggattttagatttctatagcaatatccaatgaacaattttttaaaattaatttttttttgttttcttttatgttccctccacccacatacccattcacttttatgtaattcacttatatgtaattactttctctcatttgtcattatatttgttgagccaaggccaagacacaagagagtgacaggggtgggcacagacatcccacccaggtgactgctccggcctcactgtctttgtgtcatcatggcagctcacaggccatcagaactggcatggctcctcactgcctttcaccagagggagagcccctctcccagcagcagggaggtctccttggttctgaggctgaagtctctctggcccattgtaagtccccactcctgccacaaaagggaaagcagaagccgggttcaaaacgctgcagctgcagctgatagaatgtggaatgccagtccaggaaaccgggctgcttcctgtgagctcactcagtgagtgattctgaactgggctgccataaagaagaaggcagagacctacctgcctgttgcttctgtctccttccagctgttgggaggtcagtgtgcctgggctggctgcttttggaaagtcctttctttatctctttcccacttggcagctctccttacttctgggacatttgccactgtggtactgccaggaaggaatctggccttgtcctgctctctttgtttccaaggccaattttatggtggtctggctacattctgccaatttaggaaaagtgctatttttgttttttggtttttttttttgttttgttttgtttttttactttaaaactgaacaaattctgttaataaaaattctttaaaaattgcaaaccatttattgaaaaagtagaatgtacttctgttcatttggtaaagaaattttatgttctagtcattgttaccagtatcattatagccttaggtgtctggattcctagcatcaggtgtgtggggactttcctgtgtggcttctagaagacaagca

SEQ ID NO: 32716 - DNA, 1099 bp, Mus musculus
caggttcttctcaacagcagccccccagtttctttatttcttagtcatgttcttaccatggcttggaaacatttctcgcttttcagaaactatccctagagccctgataagattttattttattattgctttcttggtttcgagattataatataattacaattacatttctgtttttctctttcctccctttaaattgtcccatataccccaccttgctctctttaaatacatggcctttttaaaaaattaatgcatttatattaatttatataaaattattgcatacatatatgtatacacatatatttttctaaatgcaacctgcacaatctatataacgttactttggtgaatgttcacagggttggcccttcagtattgaataaggacttgatgtgcgcatccttggggaggactgtctcttcagctctcagctctccgtagttgcctctagttctttgtgtagggtggagctttggcggactctctcaaccacttcggtgttgttcttgttcagctcatgtttaggctaaggaaagatttggtggaggacatttttacctttattttaggattttaggcttttttccacaacatctttttttatttttctaatttactttacatcccaatcgctgctccacccagtcacccccccccccacacacacacagtccctttctttacgtccctttctttactccctcttctctgagaaggtggaggactcctgcccccccccccccccgcaaacccccagtcccctgcatatcaagtctctctcttcaggactaggcatcctctcccactgagaccagaccagggagcctagttggtgtaatgtattccatagacaagcaacagctttagagacagccctgctccagttgttgtgggatttacatgaagaccaagctgcacatctagggaactaagtctagctcgtgtgtatgctctttggttggtggttccatttctgagagcctccaagggtccaggctagttgactcgttggtcttcttgtggagttcctatcccttttggggccctcattcattcccccaacttttccataagagtccctgagctccatcca

SEQ ID NO: 32717 - DNA, 1205 bp, Mus musculus
ggaagtatccatccatctcaatttcatttttattagccaactgttctgtatgcctcctctgcctcaagggaaaggagaccatagacctcctggaaaaagttgaaggtatgggcatctaaagagcccaaacatggtcttcctttctgtgtatacaagcacagtatataataacatttggaccctcataagtacagcctttactctcaagtttctgttagcatttcaggttttaaagatctcaccagagttcaccattaagttatgccatagcattctaggttttcctgggcctttccaaattctttccatgagataatttcaaatatctctaaatccattatttaggtgtacttgaaagtataacaaagtaaaaacagaattctaggcctttaggcccaggcttgggaatgtggcctttgtaaaggtatgctaatcataaaacagatagcgacattcctccacccacccgcttcctgggttcaaagagtgctcattcaaagaaagtcaccctggccattaccagaacctgcaatgcaaatgtgctattgttaggggctcttagaagctgtcttgagagttaacaattaccaggtattccttgtgactcttgtaactttacgcttccttgtgactcttaactggtatctttggtatcttccaacaacgccctccccacttccttgagttgtggtttcttcctttaaatacccccttacccagctactcggggcgccacggccctctacccctgcgtggtgtatgaccgtgggcccgagagcactcttgaataaaaatcctcttgcagtttgcagcaagaccgtttcttgtgggtgattttggggtgtcgcctctcctgagtcagaacgtgggggagtcctcacgttgtgggtcttttatactcacagaaatgacctacttctcagcaccaatttttctgttagctttccgtgttgtaacaaaatactctggacaagcaacttataaggagaaatatgtatttttgtctcacaatttcagtattgttgcacacaatactctgtaagacacaatatatcattgtacagaatatgcagcaaaaaaaaaatgcttagctcattatggcaagaaacaaaggaggcaaaggaagagccaaagccccaacacccttcaaggtaatgtcctcggtaatttgattttcttccactaaatcacaatttccaatattt

SEQ ID NO: 32718 - DNA, 1300 bp, Mus musculus
tgtggaagcttgcaggatgggtctaaccagaggaggggttttgtagatatagtcaacatttagaacagattgatggtcagccaaggccactagccttgatcatgtgagcgggctcactcaaccaactgaagcctcaagaatagaagcacatatctcggggaaaggcaattctgcttacgtctgtaacatgaaacactgcatagggtgtaccctctagcacacccctctaatgtcctacctagcagtgctaccatcatgaaaacacagagagggcgttcagaggtcgcgcagccgcgggcttggtgccccggacggcgtcccgggccctctgcctgggtcgggaacccgtgctggagtgaactgattttaacctgcggccgccgaggcctacatgtcacagccaacgccggcgccacccgccatgcccgtttgaacctccactacctccagattctgaacatcaaaaagcagagcatctgcgtggtgcatttgaggaacttggggacattggacaacccaagctctctagatgagacagcatatgaaagactggcggaagagaccctggactccctggcagagttctttgaagaccttgcagataagccctataccctggaggactacgatgtctcttttggggatggcgtgctcaccattaagctgggtgggatctagggacctacgtgatcaacaagcagaccgcaaacaagcaaatctggttgtcttctccttccagaggccccaagcgctatgactggaccgggaagaactgggtgtactctcatgacggcgtgtctctgcatgagctgctggccagggagctgactaaagctttaaacaccaaactggacttgtcttcattggcctattctggaaaaggcacttgactgccagccagattccaagacattccaacatgagacttctggtctcttagaaagtcttatatgccgggccgtggtagcgcacgcctttaatcccagcacttgggaggcagaggcaggcggatttctgagttcgaggccagcctggtctacagagtgagttccaggacagccaggatggcacagagaaaccctgtctcaagaaagaaaaaaaacaaaaaacaaaaaacaaaaaacaaaaaaaaaaacaaagtcttacaccacaagtgcgcccatgacataacagcttcaaaatttcttacagtgtgtgtgctaataacctcctgaaaaggaaaaaggctcagagggagacatgagtcgttcccactcttccattgtctctgaaaagatactctaagaagtaacttctaaat

SEQ ID NO: 32719 - DNA, 1195 bp, Mus musculus
gtcaaggctggtgacctaagtttaatgcctggaccacatgtggcagacagaaagaaccaacttccacaagttgtcttctgacttccacacatgtgctatgtcaagcgcacgcgtgcacgtgcactgtaatgattaaaacaaatctctcaaagcatggaactgtttccctgtagtgctcagcaaggctatgctgtgttccctacatagaaatgtgcaaaagaccctcccacacaggggtcactctgtcagttgctacctatagcctatgacctaaaaatatgaaatacttactctctggcatctttattttgctttggccacttgatcaactcttctagaattcaccattctggaagcaagttcaactcaagctgactttcaggcaagtgaagcagatgatgtctgtgatctcagcagctatgtgcaggtatgtatctatggccgagtctctgatgtatctatggccaagtctctgatgtatctatggccgagcctctgccatggctctctgtgcttaagtttctcacttgagttctcaaggaccatactcaggtcttaaggctcatatggaaagcaatttattgattgaactgtcttcccagtccccatttattttatttttaatatatctgaaggaaagatatattatgttcaagaggcttctacactcctatgtttatgcacaaggagactgcagccatcttttgtatgggctgtgtgccctccgcattggcctagtcctcctgggtccacattaggtgttttgttttgttttcccacttaagtcctgcaaggatttgtgtttctgatctctggctctcagtcacagggaggagctgcatgagtatcaggtaagtacttagcctttctaagacccagtgtccaaattattcagtgaggatagtaaatgctcacgttattgtgcaggctgcattaatgtgctagagtagcatccagcagccctcttgcaaaccacgcataatttcttccttttcttcctctttctcctcgacttctgagatagggtttcgtgtattctaggtaggccttgtgctccctaagtagacaaggatagccctgaactcctgatcctcctccctctacctttctagggatccatctcagggcttcaggcatgctgggtaatcattctaccagctaaagtacctcccatagttacaaattattcttacat

SEQ ID NO: 32720 - DNA, 1577 bp, Mus musculus
ggtggtgtcgcggagtgtgtgtgtgtgtccacacctaacccaggaatatcccaataactattgggggaggggggtaaagggtgttatgaatggtcaatgcctcttggcgggtccgtaggtgggtttctctggccactgccctcttcttctatgccctacccgccccctccccatcccccgcctaaaccaggttggaaagtactggaaattcaattgcgtggtctctaactttggaatttggtatccctttcagcaggagacgttaagacgatttctgcacttgggtctgtgtggacgagagttttgctcaggttagatgtagaatccgcctcagacctgcaccagtcccctacccagtcgccacctctcctccaccccccacgcacatacaacacaaccctggagagaaggtttgtacacatgcagttaaccgtaagccaccaacgcagctataaggacgcagagtcagcccgggttttgcgggcatctgagcgcactattggcgtttgattagccctggagatcaccctgctgctttgtagaggcgctggtggggcatgctcgtgatccccagcgccggggctagagggtgtccctgtgctgagctgtacggccgtgctcggaggatgttcgctgaacagtatcatgggcaattatataagctgcctcagtgatctcccagatctgtattgcaagcacccggctcttgaaagacaaccctgaaagttttactgcttggggactgtaagtacctgggagacccacttggggaatggggagctgggtaccttgtgccgaggtgcccacttctgagatgtgggctttgggtgctaaagctctgtccccaaggaaccggttaccgaagcagggactgagtgggtggagatccaagattaacctgtgaagaagaacgggtcaggactcagatttctttgagtccgtggagccctgagattcaggtgttggaggtgttgtgtgggggggtgttggatggccttccagggaacgtagttttcggaaaatcggtgttctaggcagccccaagactcttttcttggcccctccctggctttaaatccagcgtccttcacctgtttagaaacctgcctccagtcccttttagaaatgcccagagacgccaggcatccaggcccaggtttggggtgtttgtggtgggttaggaagtagagtactggcctctatggggtgcgggggtggacagaaaaaattattatacctaatgcggatgctatgggaatgggtgcctgatatggcttctgttccctcgcctccctccaggactgaaaacagtttggtttcaactgcgctcctttccacccccctccctcctatctcgctgcctcccttcgctgccgcagcctgtcgcacgttgatgggctttgatagagaaccacagtagtggagtgtttttaaatcttgtttttcgcctgtagagggaaaagctatcccagccctagcagaaagaaccctgaggaacgctgaagtctggggcttggtggccctgaactccctcccccaagtcagatgatagcgtgcatgggtggggagggttttgt

SEQ ID NO: 32721 - DNA, 1229 bp, Mus musculus
aaaaaaaaaaaacaaagaagaaaggacaggagtttattgaggtatagctaagttctggcttccctttcctttcattgatgatggttcccctctgtgctgtggttttgtgaagtggcttggagggcctggcaagactcgggaattgccaacacacgtcacttggtagctctatgcattcaaacacagtccttagaaatctgtattcaccctcttttcagtaataaaatggaaaatcgaagtctctgtctccaaaaggtttgtgtggcacttgtatagtatcttttggtcagtatcctttgtgacaatggtggcttttggcactggcatatttcttcttattccccatctgctcaacttcaggttttgtgacctgcttctgaagcccattagagcacatcagtagtgggaacatgtggggctggggaggctctgagacttaagagggtttgaagatgctcattttgcaaggttatacaagcatagctccaggaggaccttggataatgatggtacctgtagaaggtgaaagccagggatatgtggagaaaggtgagcagttcaccctggttcagtatcaattgttcttttactccttacactcacaaaatcctaaagactttctctctgcctctctgagtacctactcagtgctagctttagtttctagtatcactataggtctcaacaggcattgctaatgccatccctgcagtagactcacctgaaatgttcttaccaaagaccagtttcttctttccccataaatgttctctgtctctctgtctgtccctgtctctatctatctatctatctatctatctatctatctatctatctgtctgtctgtctgtctgtctgtctgtctgtctgtctctctgtctgtctctctgtctgtctctgtgtgtgtgtgtgtgtgtaagagagagagatgggagccagtgtgtgtgtgtgtgtgtgtgtgtgtgtgtgtgtgtgtgtatgtgtatgtgtgtgtgtgtgtgtgtgtgtgtgtaagagagagagatgggagccagcaaagctatacagctaagggtgagcaatgacacacaagagtagagcttcattaaatgttcattccatcccctttccaaagaagcagaaaggatcccatattgggtaatttatgtatgaggtgagtgacctaattcactaaatccatgggactagaatatgataatcaaggctttttgctccaccctccgccctgc

SEQ ID NO: 32722 - DNA, 1657 bp, Mus musculus
atctcatggtagtaaccttccaaagttgtgctgaagacttgtcattgtggaagagtctgaaggctctcaagtttgaagggtttgggattttcttgttgacagtacaatttgttaagaagtccttggcaggcaagatgacttgcctcagtaaaagtgcttgctacaaaagcctgataacctgattatgagttttggagtatatgtagaaggaggtaacatgttctacaagttgtcccctgacctccacacatgtgccatggcatatatgtctctatccagtcatgtgcacacagacaagtaaatgctaatactgttactactaatgataaaagtgaagacattattcactcctttggattaatttttctggagatcatctcaaatctacgtcaaactgggaaactgaattgtactacagagaggcccttgactgtcagatgcaagagtgcttttctgtaatctcagcaacttggtgttctgaggcaggaagatcacacatttaaggtcagcctggacaacataggaaggtctgtcccaaagaacagacaagacaaaataacaaacaacacttgtttgttacttcttgagacttgttaagttacaggtcctcgggatggtagagatgactcagtgtacaaagtgcatgtcacacaagcaggacaatcagagtgtggatccctagcacttatatgaaagctggccacattgttttgcttctataacacgagaactggaagaggcagagataggagaatcccagaggctccctaaccagccttaaccaaaatggtgagtctcagtgtcaatgctagactgtctcaaaaataagatgtcaggagatagataaagacatccattgtcaatcaacttctgggctttaaatatatatgtagagacacatgtcctcatatgtctgtgcacactagcatacactacgcacaacccccttgccataaacacaaacacagattcttgtccagtgcattggagagttgacctgagagtgtgtttctgacaagttccccagacatacaaatcctgatgatggaatccccttccttgccgagcagggatctcaaacttgatctttctcttcctcatctccccatgtctgtaagtaccagatgtgtatgcatctggacaccaggattgctgtggtgtctgtcgtgacagctgccgtgtgccaggcaacataataaacagtggccatcatcagcataccagggacaaactgcacttacagccggaacagtgtgctcttcaggctcccttaacatccttaaatgcattcaactttgtgacatattgtggaggagggagcaattttattattaaggtattactttaaagattttacatatttttttcatgtttgggagcaggaaatatagttgaatgatagagtgtttgcctagcatgcatgagaccatgggtttgatgttctgcactaccgaaattttaagaaatcatattcttattcatgtgtttctccttgtgacagcagtaaccagaacattaaggaggcctaaggtaatcgctaagggaatgtaaacaacacacgaccctgtagctaagcaaacacacttggtcttttctgatattgttcttctttacaactgcttggaaaatgtttttagatttatttatttttacttta

SEQ ID NO: 32723 - DNA, 1119 bp, Mus musculus
ctgttgtaataaaaacacgaagagtatggtgttttgtaactatttttataccgacatcagacttgatgttagtgcttctgaattatttagcatttttctttctcagctggcctctgcagcgaatttctcttccagggcggagggagttgttttataggaaaccaaggaagcagacagacattgactgcaggccctctgctttcccattgggagaaagacaggatcaggtatcctgttatggaccagtggcctcctattaaagggaggtggctgctacttgtctccattttccagagaggttgtgtagcttgtgtgagcgagcccagcaagaagggttgggggttgaggtcttgcagattcctgggtgtttctgactgcagagcctgtgttgtttttgttggaagagcctgcgtacaccctgctttacgctatcataagtacatggaggctcacatcacctggtggcttacagggtgccaggtcaaatcaccccctgagagtgtggaggtgaacagaggtgagatcagcctcagaaggctgacaaggaggaagaggagtggcctcgtggttcctgtgtattgttgtcaccgtctccgggagattgctggtggctgtagtgggaggctggttaggtacattctgcagttctctagggcattttaacttgagtctgtctgctctgtgggcgtgtacagagcaggtagagcccctccctcaccgtctgcatcttgggcctctttgaagagggtggtgattggcagcttcaaaccacccctaacaacgagaagcgaggaggagctgggctcttatctgctgcttctcataattgaagttcatcacagacttttagtggccatttgaaatagacatctggactgaaaagagtcctgctgcagattgggatggtctcactgctgctgctgccccagcgttatctatttctttatttcagagtcagagattagacatttttcttattctgtattgctccagctcctatttaattatcagtgacccagagatgactctatttaaagcatgttaaagtcctcattctaccatgtgtgaaacctcagctagaattgtgatatgaagtctctgggggagaggggcctctgg

SEQ ID NO: 32724 - DNA, 1156 bp, Mus musculus
gcaggaacagttgtaatcctgagtccctgcctctctctaatgccttctactggccaagaccaactaagtgttgccagctaggggaccagagtggtgtatctatctactaggtcgaccagtctctgtgataggagccaaaacatgaaggtagagtatggcagggtcatggtggccactgtaatagcaatacatgcatgaagtgtctgcagtgacagagggaaagttaagagacccagtggctgcatgtcctcactccccaaccctgaatattacaagctgcatggaagtaattaataccacatccaggaattgaatccctggacccataattacatgtacaagaatttttaaagatgtgatggcagtggttttaatgtctcataaatattcctccaaggatccttggcacagagaggagtggttttgcttctcaggcagggagccagaacagcctgtcctggagaaagagcgggagttcctccttccctcttactttggccagagctttaagcttcactgagaacttagcctgtgggttcttctctacagagcctctgtaccttggagtcccttgtaacctgtctctccagactgctgccacaacaggcacaggggctcccagtcagttgtggagagttatgctggggagagtttcccaggaaactcaatttgtgtgcctacattctggtctgagcatagcatgcgcacaaggtagaggtttttattccctcatctgcagagggcagaggaaggaactagaaggtagaaggtatgcagtagtaggcctgtggagatgatttggtggttaaagtccttgctatacaaataggcagacccggttcagctctccagaaaccacacggaagccaggcatggcagtgtgctgaaacagtgagcttcaggttctatgacatatcctgtctcaagagggaaggaaggaaggaaggaaggaagagaaggagggaggaaggcagggagggaggcagggagggagggagggagggagggagggagggagggagggagggagggaaggagggagggagggagggaggtgaacagagaaagatacctgatgtcaacctctgacttccacatgcatgggcaaacacttgtatgcacacacatgtatgcacacagaaaccccacaacatag

SEQ ID NO: 32725 - DNA, 1099 bp, Mus musculus
ccttcatgctcttcagttttctctgataaaaagtacgtgacattaataacttaaaaaaatttaaactattactggggatacttcaagccatctggtgtcttggtcctttctcaaactcagccttaatcttctccatacacatcacaggcacgcccggatgaattggcagcccctactagaatgatttaaccaattaacttactcattaactgccatggtatcttataaatgctggacaaaagatctagaataatccttattaagggatagacaaaggggatatttgaaatccccctccatcattccttttctgcttttctcatggaattcccacagggactaatacccgtgaggataaaggataaaatggcattagagtctttgaaaggaaaatgagttcaagacgtgcccattgttgatgccagagcagaattcccatgaagtgtgtgtgtgtgtgtgtgtgtgtgtgtgtgtgtattactaattattctaggctttcggctgcacttacctttctcgtggtgaattcttgagctctgttaaaacattactgtagtacatatgacaccattctctaatgtagagcagttttagataaccaggcatcatgcttcccattctatgaccaagaggaaaaaataaatagtgagtctgtggcaaaattagcatcatatctatcatttactggcaaagctgtgatccagtgatgtcatttttgaaaactccccttaaggatacgatattcaagagaaaaaaacaaaggaagttttatctctaaaggtagttcttctgctgtcgtccatagcagaaagaacttgaaagcaaggtagaaataaatttcagcctgtcagggagtgggctttccaataactcagtagcctggaagaggccctttgaaagaacagccttatacaagagggggcactgtgtataatgttgatagttttaggttcggtttctaactttggtgtaccaggaggtgcaaattcatggagaaagacttatgtgcaatggctttgccacactgagatacaaatgtcatctcccaggtccacctgaatcccggcaaacatcgctgggctcctagttacttacctgt

SEQ ID NO: 32726 - DNA, 1267 bp, Mus musculus
tgtctgttgttcactgggttgcagattcctatcactcttgacttttgaactccacatatctccacaagacaggtgttgttactcctattttttaggttggaaattaaggttaatcagcttgcccaacacaatgacaacatggtggtgtggatgctgacagtgacggtaaagctgacatttctgtggcaatcaatctctgctctcagttctttgtagggactgtgctcactgactgcctcctcaccgtacaggggcggttagcctaagtgtttttcctaagaaagcctgtgttgctagagaacggaaggattgacgaaagacgtccagtctgagcaaggcttgcactctgactcctaggatgaaagtgggaaagaagatccgaagggctgcaaatacacatgatcgccacactgcgccctgcgcctgcttctgggaggggacagtgctaggtacagtggtcttggggtcacccgagtgctggctgcctgtacttgttgcttcagcttttcctgtattgactgctcactgtctcccgtccaggcatgtggaaactgacgctcaggaggtcaagtgatttacccaaaatcataccactaattggggctctgggctacttttaagctagatgatttcctttgctggctcatctcattaaatttaaagaactattcctgcaggcctgatccgttgaacaaacagtggctcaacaaaagctgcacagctgcccttagcagctcttgctgggggcctgaggtgaggctggctaggcctgcctcagaggactcttgagttttggggttcactgtgaacttgttccttcttgctccctccctaaggagccacagagagccagaaatggcaggacttggcttctaccccttaagtaaaaccacagcagcctccacttgccttagtcagatctagttacagccagatagacatcaatttttattgctgttaattccacacaatgagggtttagactcttgatcctgagaaacaaaatatggcccccaaagggaagatcaagacctatccaaattgtcttttttttttttttttttttttgctgctttaagaaagaagcacctgccgcccccccccccaataccaggacattggaatttcacatttgtttcctttctctcattattccacatatttgaatcaaaatgatgataaattgctccattgtagatggtttcagccggacattgatatattggattaattggattaagaccaatgaggttttccaaatccccaa

SEQ ID NO: 32727 - DNA, 1132 bp, Mus musculus
tgtcttcagcttaggcctgttgctgttcaggcccagaccagacatccctctctggcttcctttattcatccccccactccagtgaaaagatgtctcctcctcccccagcttctagtgtcttggcctcatgccctgagcaatcccctgttaccaccatgtggataatgactgaaacttaagagtgtggaaattgaaagacttagcaagagtataaacacacacacacagacacacacccatccaacaatagttattaagtggaagctctgggccagacatgatcctcagcctggttgaagacccgtttaattcctcgtgggagctgagatgtcccacaacagaaaagtaaaaacactaaaaacagcatgtctgtgagcatagctgagagctatgtgagatgctcaaggtgtcacctggtgatttgtgccactgagtgacccaaccctatagacccggccatggcaccaaagggtaccagccttggggagctgccttgctttacttttcaccttcaccaaatggccccagttgactggccttcagcatctttttcttgcctgggtaccaggacaaaagttcattagtgatggtaataatactagcagtttttcagatagtgtgggaactaatcaaagcagacatgggacatatgacgttctgtttgtttttttgttttgttttgttttgttttgttttttcctgtcagagtaactatgcaacctcttcaagccaaatgcattttagtatgcacccgttttgttttgttttgttttgttttgttttgttttgttttgttttgttttgagacagggtttctttgtgtaaccctggctgtcctggaactcactttgtagaccaggctggcctcaaactcagaaatcccctgcctctgcctcccaagtgctgggattaaaggtgtgcaccaccaccgcccggcttatgcatcctttccaaaagagaaatcaagggcctttgaatcaagtgcttacatctaagtacccagctacctacttcacatcgataggtaaacatggtgtgttttggtgtttctaaggaactatctgattaaaaaaaaccaatatcctcattttacaggtgagaaacttagactctgactgcatgtcaaagctca

SEQ ID NO: 32728 - DNA, 1724 bp, Mus musculus
agggcactgaggtatctgtgggtctttctctttgtgtggctactctgttctaccctctgctcacctacctccaaaaagctcacaggcccacagagctttaaattgtattctctgatcttctcaataccctaccaacccttggtacccctctgttacaaaccattgcctctagcccccaaattaaggtcccacgcatcagaggaggagcctaatcaagacaaaccaaggctcctgaacagttaaggcgtcgccccccctccaagcacaagtaccaaatctgttttaatcagccctgattacagtgggatatgatcacatgatacaaatatccctgggctctacatgccatagtctccagtaggatgtgatattgacatatccaccatagacttgctcctcctggactgccttgaccagttcaatgagttttttatttgctttgttttggttctcttttctcttatttctaagaaccaagcaggctgatttcccgtgcacagcaagattaactaaatgactactgtttccaggatgctgtgaactggaaggtactctgtagatgtgaggtatgtgagaatgtcaggcaagtactgatgaacgtaaacattgcaagggctggctgggctggctttaagccagtggctttaatcaggaatgatttagcttggtaacttacctcgttccctcagctgttgcctttcccaggggccgaggagactgtgccttgaatgtgaatccttcaaagtagctccttgctgtgtccctgagtggggccaggtctcagccttagaaagtatagtttgtttcaatcttctgggcaacatggactcggtgcacactggtctatctcaatacctaggagagagcaggcagccagcagcaggagtgacagccagggagctgtgtctttggagatcacaaacagggtgcagccctactgggtctgaattttcacatatattacatcattgtgtcttcatagcaatgtcataataaatgggatattttaatccgtatcttacaggtgggagtaataaggctcagaatgattaagtaattgatccaaagcaataaacaataaatgggaagtctcttggctcccactgcattgtagtaagaacttataaacatacaattagcaattctttctgactacttagagctctctcctttggtgtgcaaatgagacttttgccagctaagtctccacctgactctacttacacagacacacagactgaagggagctggcgtcataaatgaaatctgccctcctctgactttggtgctcatagaggcccattagaaatgctttacagaggatctacagtcttcaatcctgatttcaagctttgcctttccactggggctggatgggaggtagcctgccaattcttggcttgaacagggtgaaaagatggcttggacagggtgaaaagatggagttgtttcttggtttctatcttccttgcaacactaatcaacctgccttgtagcaaaccagcggtttcctagcaacatccaatgatgtagcagagtggcatctattttgaatcttcccaaagtgacctgttgactctctttgagcatgagtgctattgccttagacaagtggccttgctggcagggttctgctgcagggctaccctgaatagtacctccattctgaaaatggactccttccttttcccattcctgcccttcacatattctccagacactat

SEQ ID NO: 32729 - DNA, 1132 bp, Mus musculus
aatgtatttttataagttggcctttgatcatttaattatttaaaatataaagtgaaactgtctaagtggactttgtaagaacttatttttggaggagatgctggtctgattttgtaagacagacccaagaccagctacaagaagttgtgttgaaatatgagctaaccagtacccctagagctcgtgtctctagctgcatatgtagcagaggatggcctagtcagccatcattgggaagagaggccccttggtcttgcaaactttatatcccccagtacaggggaacaccagggccaagaagtagaagtgggtgggtaggggagcagggcagggagagggtataggggactttcgagatagcatttgaaatgtaaatgaagaaaatatctaattaaaaaattgaaaaaaaaaaagaagttgtgttgagccagacatggtgtcctacacctttaatcccagcacttagaacacagaggcagacagattgtttcaagttcaaggctagcatattctacccagtgagtttcaggactgctggggccatgtggaaagatcctgtctcaaatctctctccctctccacaagaaaagaattaatgtattcattgattctgactctctccctcccccaccaatctcaatctctctctctctctctctctctctctctctctctctctctctctgtgtgtgtgtgtgtgtgtgtgtgtgtgtgtgtgcatgcgcatgtgtccgcgtgtgttctgtcccactccttccatgcagaatttaccaaagtgcggatagtaagctcagtgttttacaaactctgctagtctgcaagaaaattattttgagtcatttttgtcatctcccattagacatcaatttcctaggcaaaatggaatgtaggacactgttgtgtgagtgaaaaagcagacatgtggccagaggttaataactcccattgcccagtcatgaaagaaagaaaaatcacagtgtcacttctactcttgacatttggttctgtcatccttcgaagtcgaacaaagcatctttgtgcattataaagaggcctccatttatgtctttccaaagttctttggagatgtgcctctccattttgcatggaaaggtagatagtaagtggagag

SEQ ID NO: 32730 - DNA, 1210 bp, Mus musculus
actctttgactgtgaggacactgctccccttcccctacggtgtgactaaggacaatggctgtcatttgggaccaaggaacagtttatcgttttggtctgtggtcctttaggggagagactaacaggagccaagtgttctctgtcaggatggcccttgaggtgaaggagccacaaacatcctggggcatgcagaattggacacatgaacagaagctggggtgttaagtggacacattgtgtacagagtcagaacatgcttcccagcacacttgcaaaagaacaaacagggttgggagcatgtcgccacggctagctagctgaggatttgggggaaagcaacctagagcccccacagcctccctccttcaccagcaagtcagagaggataatgcttgcttcctgcagctacttagaagactcacagagatccaaatgcctaacagtcagccaaatgcctagcagatagccaggagcttcctctcctaactgcctcctcttcagactcttcacctgtctgtagcatatctccaataaaatcacatctcttctcaaaagccctcctggcctcctattgctaagcagtgcttgcacatatgacttagtcctcgggatcctgcctgttgaagctctcatatcctgtgttatgtctgccacccggtatatagccacactgagggatgagtgtatgtgtttgccctttcctctcttcccgtacttttactcccttgcttggagaaccctgttctctctctatgctgtagcctaccccgggtaagactgaattcaagtactctattaaattccacctaccccatcccaccccccagtttgtcagccaaggagatcctctgattcctgtcttcacttacggtttttctgtatctcttatgaaacttctgggaaatcaatttttttgtggtcaaaccttgtttttattgcctatgaagtttctagagtcaggattttgtcctcagataatccacccagcatcaggctcatcaaatgaatgaatgaatgaatgaatgatgaatgagtggcatccattcctaactagaccttccttcaatggaaggctatcactttttcagccatttatacatgctggttgttttctgtcagcttgccacaaacgtagacatatttaggaagagagactcttcattgagacaaggcctccataagattggcccataggcaattttgtggggtg

SEQ ID NO: 32731 - DNA, 1177 bp, Mus musculus
ctctatttggtcctctaaccacacacctactgtgggacagttgctggattccttagccgctgtcccattccgtgctccctctctcttctttgatcctgaaccatcatcccgagcctggctctccatcctgctgctgatcctcttgctttctgatcctgctgctttcctcccacccctggccttgcattctcttccccaggaggcatgtggtacacgcttattttgctaaaactcctcctttagctacaattccaacccgtcctctgtctgctcagcggcctcagactgctgtagcagcacatggcaagggacttctcctctacagcactccgccgtgatctggaagctgtggtttaaaggccacgagcaatttcttgggagttccttgttagaggactttacaaagtcctgatccagagcaggtgctccccacctccctcccacttgtaagcttggttagagctaatcaggctgtgccctgtttctgaactgggaaaggagaaggagatggggcgagtcagaccttgctaaatgaaaatggattgctttcttaaaacttggttcagacccactgagcgtggagagaggtgcagcaaacaagaattttgcctttaatttgcgccaacatgactttcaattccagtggaagcaacacagtaaccgaattccttcccaagatagttgggaggcattttcctccttgtgtaataagctctgctttgtccagggcaagttggttccttagcctgtttgaacatcatctcactcaagatgaaagaatagccagtagtgggaagagagccttctgctcaggagagcatagttgcagcctcagcatccagagacaatctggtttcagaactaggctgtcactagcccttgtgcgatgccagaccagttacttctcttctctgagcaccagctagtcaaatggggactcgggtctcagtcagtggcgtggcatggaaggaggatctcagccacatagcaactggggagttttatgcaaattactgaagttcagtgaggctcggtttccccgcctgcagctttgggatgagctcctatttcctaaggatataatgagagcagaaaagagctctccatggagaatatatggcactgttctccaggcagggcacgataaccaactgtgaaataaactctacgacttagg

SEQ ID NO: 32732 - DNA, 1114 bp, Mus musculus
tctgctgggagttccatggaacctgtggcagccataggacttgggtctgcctgcttgacacgttcccggagcgaaaggctgctggggtgtgtaaagttctctgccaaccttgtcctcagcttctctcaacccttcttgcatcaaaggacacttgttggtaaacccgttcttgtgacacaagctgcatggggaaatcagtatgagctcccttttccctgctaggaagacacaccgattccttcctttcttcattcatcccccgaagacatgttacgtggtggtgggtgcttttcagaaagatgaaggtgaagagtgttataagcagaaagctcttattgagtaaatgggcccttgggaaccacatgcctggcagactcctttcttctcagacctcagagtaaatggagtatcctgtgtgtgtacttgtcctaaaactcctcctgtcaccaagtacatcagcatctcttcagaaaagcatacaaatactttatactagtgggaagaaaggaagacagacggacagactccaggtcttgtatcatttcaagacacatttttgcaaccaaacaagatggattgtttggttggtgggttggttggttggctggctgactggtttggtttcatttgctttggtttgctttggtttagtttttttgttttgttttgttttgtttaagacatggccttgatgtgtaggttgtacaggttggctttgaacccgtgatcctcctaagccaacctcccaagtcctaggattacaaatatggctacccacacccatatccatgcccagcttcaaagttgttattgttgcttaatgtctattggcatgtgtgtgtatgtgcacatatagatcaaagacagcctgaggtgtcatctttagcaatgttgctgtcttcctatggcctagaactgtccacttctgtgtgtctcgctagtcagcgagcaccaggggtcttctgtctctacctccctggcactgtgattttaagtgttcaccacagcactcggctttttatctagtgccagaaatcaaactcaagtcctcacacctgttagacaagcactttactggctgagctatctctctgccaacaatgtatggatgtct

SEQ ID NO: 32733 - DNA, 1169 bp, Mus musculus
attaagggcctttggtatttcctattctgtaacctgtctgttcatatcctaggcccatttttctaccgcactgttagactttactcatttgtaggtattattcttacattaaggaaataatcctttgtgtcatacaaattatagttctccttcctagattgttatttgtcttttaaacaaaaaaggtcaagacctcctgaaactgtgatttttcctgatcatccctaacatcaccagactgtgaacccctcgaggcaaggtccaaaaccttgattatcactgtgtctcgagccctctggcagggcctggtactctaagagatctctgtggttgaactgaactgagggtctgtgttccccaccccagaccccctctccttgtggcttgggagttccatttccacctccagcagaaacagatgactttttccattgctcactacagccatgcacctgtttggcctaaactggcacctgcagccgatggaggggcagatgcagatgtatgagatcacggaggacacagccagcagctggcctgtgccaacggacgtctccctgtatccctcagggggcactggcttagagacccctgacaggaaaggcaaaggagccgcagaaggtagggttgctgcgttgtccgtgttgtgagtcctctgtgtctgcctttgaacggaggaggcctccaccatgcacgcatctgtgcctgactcacagctcatgcttcttccatcctccacaccccatgccggctgcagtccacctgtgtcttcatcccagatccgggtcagcgggacccatggtgctctgccgcatctcatttcatgccttcgaggatgctttcagggcattcacatggccagccagccatctttgtatggggtcagggggagcacttctgggaaaccctgtgggatcaagaggcacgcgtgggagtgggacatggtaggggatggtgtgtcccaggtgaaagactcttagactgcatgtttcgatggaaacatttcagatgattgccgacccagtgaccaagtcactagtatctctgacccagcttcctcatctgcagtagtaacaacaattactgtgtactcacagtgtttgcatcagaacttactaccatcatttcaccacacactttaccctcacaaccctgtgaaatgggtataa

SEQ ID NO: 32734 - DNA, 1199 bp, Mus musculus
acgttagcttcccagtaaccagggcagctcatccatataactccagctcctggggacccatagacacctataagcatgcgcgcgcgcgcgcgcgtgcacgcgcgcacacacacacacacacacacacacacacaccaaaatcttataaaggaaaaaacaacaaacaaaaacaaaaatgacacaaactgctaacttctctgcctggtctccagaagaatttgaactttccaccttgaatatagactttagttctttatgccaaaaatattccagagaaacaaaagaaagaaatgcttcacagttaaacctaaagggagaaaaacaaacacccacccatctctgcctcagagaagggctttaagctttaacatttattgagaagctgggagtggtggcatatgcatgtctttgatcccagcactggagggtgggtcagaggtaggtggatctctgaaagttcaaggccagcttggtctacagagtgaattatagggcagccagggggctggtgagatggcacagtggttaagagtcctaactgctcttccgaaggtcccaagttcaaatcccagccaccacatggtggctcacacaaccatccataacggaatcttctggagtgtctgaaaacccccacagtgtatttacatataataagtaaatctttaaacaacaacaacaaaaaaattgtagggcagtcagggctacacggagaaaccctgtcttgaaaaaccacaaatacatttgcgtatacatatattatagctcatatactaggaaatggacattttattttaagaaaatggctacagtgtatgtatagaagaattaatgatttgagagaaagatatatcaagtatgtttccccttaatagtaattaagtacaaacttaaataatggagtatcaacctcttttaaccttgtgagctagagtcactccaaaaaaataccactccaccaaggctgtggtataactccgcctgcattgttactcattacattgtaaatcactacagccctttgggaaaacaagttggctgtttgtatcaaaccataaaagttgtgaatgtcagaggctcatgaaggaataaacccataatcagaaaagttgcatgcttaccacagccttgtttacaaatgtgaaattttggtaacattccaaaggcccagtaacagaaagcattgaggtagatcatgc

SEQ ID NO: 32735 - DNA, 1200 bp, Mus musculus
gtatatacatacaacacacacagagagagatgtgctcactcacacacatgtgcacaattgggtgcatacacacatacgcattagaggaaaatcctttctgatcgattttatctgtgtgtccttctgaaccctagttcccccatctgagactcctcctccctcgttgcagtttttgcaaacatggtaggctctgggtgccatgctgatgcttgttggacattaatactcagtttacctcacaagccaaagggcagggacttgtagccacatttttcaggtgacgaaacagtcttggagaactgggaactcaggtccaccattcactgaaatcctactctttactgaacctgttacctcccctagtggacagattaacagtgttgtccttcccaagagtctcacactgctgtcccaatactcactgtaccatcttccttccctgtcacagtggactgcatggaccccacatgttccagcaggggtgtctgtgtcagaggcgagtgccactgctctgtgggatggggaggcaccaactgcgagacacccagggccacatgcttggaccagtgctcaggccacggaaccttcctcccagacacaggactttgcaactgtgacccaagctggactggacacgactgttccattggtaaataccggggaaagggttggcgagggtggagggtgggttcgactgttacaatttaacctttcagcactggtgggggtgtggccctaactgcaaactcctcctgctgtggactcatttcctcttccttgcccttacattctaatctttgatgcctttcctcttggtgagcagataatttaaaaacttacaccctccccttgttcagccttgggattctaaactgtgttgtactgggcatttctgcatagctctaaccagaatgatgagagaatgaattcaaggaggaaagattcgtgtcggatcacagtttttcagaaagttctttccaggattgcttagggcatgccatcttttgtagagcaagagccaggagggaggaggcggggatactcacagggtgtgtccacagtggcagtgttgattacttgcctggttgttgtgacaaaatacatagtcagggagcctgaagaagaagtgaggacaggctataaacccccaggcccacccacaatgacacactacttccattaaggctctacctcttagag

SEQ ID NO: 32736 - DNA, 1122 bp, Mus musculus
gacctcctgaatatttttaagatgggctctccccgtatttcattttttcatttgggtggtccccatgtttgccattccatggcttgtgtattcactcctgcttagaagccattctccccagtaccctcttatatcctgctgatgaacagaccctacagcacctctcagaataaagggaagtataccggcccggttaagtcccctgttcccaactttccacttggctaagcagcttcctggtgcatatttcatcataacagctactgcaatgatacatgaactaagaacagggtctctcatctaccagtatttttggagtaaatcgatagatgattgatacataaatcagtagacagacagacagacagacagcaatagtacctatcatttttctgaagtgaggaaaagaatgtccttacagtttatacaatcatggcttctagataaagcttctccattatagttcactcctatctagagacttttgattctcatgtgggcattggttgctttagaagacttcccgctctgtctggcctgtatgagaacacgggaaaaagaggcatagtgcgactggagatgggagcctcttccatagcccagatgaggagactgagcatgctgctggcacaggctgggactaaagagaccagtcctgagcgttcagacacagctcttatgtatgcactgagtttgtatatcagagcaatgcttgacacagatcttcacacgtagacaagaccttaaattgtcaagtaattcaaatggcctctccactggaaaaccaagcatgtgccattctgtcttttgagttaagaagtggccaggtttccttttcctgttcccacttttcacagttacatccattggcctcacattcctcataagatgcaggaagtaggggtacatcttattcagcgcacccaacattctgcatttgagtctgtgtagacatgtctgttcccatataatttgagacaagctagcaatgtctcaacctaggattctagtatgtatcagaagtgatgcagaatctgtatgcctctaacctctaatttctcaggatcctgtctgcccagataatttgtcactcttaattccccttgagggaggttggccatt

SEQ ID NO: 32737 - DNA, 1134 bp, Mus musculus
atctgtgtagtgggatcatttaggacttgaagccagtccctatcctaaaagagttcaagatgttcattgtaatggtagtggtggtggtagtttatttatacgggtgttttgcctgtatgtatctgtgtaccacatgcatacaatacatttggaggccagagagaatatagcatcccctagggctggagttacagttggttatgagctaccatgtgggtgctgagaattgaatcaggccctctgggaggtcagccagtgtccttagctgccgaaccatttctccagttccaagttcaaggctgtattgaggaaacagacaactcaacagagaagaacccgtgaaagtgccacagaagagagatctgccacagctctagtgggaacatgaggatagagtgtactataacagaaaagcggggtggggtggggtggggcaggaatggtagctcaggtgagggagtacttagccgaagctcccgggacaggcaagtcaaaggggccctggagctctcttccatccatgctttcaaggattgcatggctcccagcagatcatcgggccttcaggatgcagcgctgaggtgttcagggaaccgaggcagctgtgtggggaaatagaatagaccatcgagcgcgaagcacgtggagagtgaaatccactctgcagcttgggagcctgctcaggcactatctctgtccatctcggttttctcaaatggaagaagacagtccctacttaatgtgttagttacggggggaatgaggccatgtgtgtcaagtgcagacacagactaggacagaacccacatctttcagtgtcaggtacatcccaatccatggcattagctctgtcccatgggctgctggggctgcagcccaggaggtgggggttgggggagcagaggaaaccacagatacagtgcagctgccagtgctggctggcacgaggaagaactgtgcagctagggatgtagttcagttggtagaatgcttaacacaaagccctaggtttgatctccagcacaaataaagccagatttactgatgcacatctgcagtcccagcacttgggaggcagaaggaggacaattaagaattcagggctatcctcagctacatggtgagttgagcccc

SEQ ID NO: 32738 - DNA, 1167 bp, Mus musculus
tttgattacaactatgacaacagtttccgtgtgactagcatgcaggctgtgatcaatgagaccccactgcccattgacctctaccgctatgatgatgtgtcagggaagacagagcagtttgggaagtttggtgtcatctactacgacatcaaccagatcattaccacagccgtcatgacccacaccaagcactttgatgcttatggcaggatgaaggaagtacagtatgagattttccggtcactcatgtactggatgactgttcagtatgataacatgggacgggtagtgaagaaggagctgaaggtgggaccctatgccaacactacccgctactcctatgagtatgatgctgatggccagctgcagacagtctccatcaatgacaagccactctggcgctacagctatgacctcaatgggaacctacacttgctgagccctgggaacagcgcacggctcacaccactacggtatgacctccgtgaccgcatcactaggctgggtgatgtacagtacaagatggatgaggatggcttcctgaggcagcggggtggggatgtcttcgagtacaattcagccgggctgctcatcaaagcctacaaccgggctagtgggtggagtgtcaggtaccgatacgatgggctgggacgccgagtatccagcaagagcagccacagccaccacctgcagttcttctacgcagacctgaccaaccccaccaaggtcacccacctctacaaccactccagctctgagattacatccctctactatgatctgcaaggacacctctttgccatggagctgagcagtggcgatgagttttacatagcttgtgacaacatcgggaccccgcttgctgtcttcagtggaactggcttgatgattaagcagatcctatacacggcctatggggagatctacatggacacaaaccccaacttccagatcatcatcggctaccacggcggcctctatgatccactcaccaagcttgtccacatgggccgacgggattatgatgtgctggctggacgctggacaagcccagaccatgaactctggaaacgcctgagtagcaacagcatcgtgccttttcatctctacatgtttaagaacaacaaccccatcagcaactctcaggacatcaagtgcttcatgaca

SEQ ID NO: 32739 - DNA, 1115 bp, Mus musculus
cccctcaaaatgtacgtttgctgtaagggtcctgtgggcagagttgtcctgtgagttggcctagttgatctgtcccatactggctgcctgacattggctgagatccgccggggtcatttacttataagacagagagacagcatgtgacccaagggaccatctccttgtagctgtccagcctgtgacttcctcctctgttgtctccctccctcaaagactatatttttaggcatcagtgaataccatgagatatggggtattcttctttaaaaggaatgatcccatattcttcctggactgccaccccagagaggaaacaggcaagcatccctgagctgtataggacctcagctgtaggccagacagtgccatgtgcctcccttgacactgatgctgtcctccctgaactatgaccttggctcctttcagttggattccacctcccaggtgtgtttaaaggcacaggccacagttcctttcgcccatttaggagactttaaatataaaatgccatcctggacagctcccgctctttcgacactcattacatctatccacttgagagagtgaccgggtcttcctcactggtggaagtttgtgattctgatgggagttagcttctgaacctctaaggattgcttttgcatagttcccaccttctccaccctccacaactgccaattagtcccccagcctcagcccctcctccaagaccttaaacaagactttattagtttctgacctcgtcttttataccctgagaccccctttatggtcatctcccaggcaggcatcactagatggtattgtggtgatattgactccatagtaaaccacactttagcctttaacacttggctcagagccactggtggaaaactagcccaaggtccacaccagtgcctgactctactgaaggatgctgggcttgaaagaaaccctaggaagctaaagggagactgctgaggctggacaagtgcctgaaaataagagggattgcatggggaggggggcagatgatgaagaagagccgagtaagctgagtaaactggctttataggcttgaggcaagggaagaagaagaaagggccttacaactgtgacttaagtgactg

SEQ ID NO: 32740 - DNA, 1216 bp, Mus musculus
tgcttagcccaggttatgccgattctggggtaggaggattcacctcccatggggtcccagtctctcctctctcccgggatcttcatcaggactaaaagccctccacgagaggcacaccgtccccagctaggtcaaaaccattgtctatattttgtgagaggggacggaagtaaaaaatgaactctgtggttcaagacctttttatttagccttcccaaaacagcaaactcattttaaagactcattgctcaggtgactgaaactttatcctctccaacccatcattctcaaaaaccagccttgtgtacttgactgcccggaacagtggcgggctatgcggtttcacggtgttgtggaagatcaaaggtggggaagcatggggtgggaaccctgtgttgtgtttcagaggcctcggtggggccctgtgttgtacttcttaccctctggggaatgccaaaggcgtgagactgggctacttcctagtccctaagaaaaatgtgattgattctaagggctgatggttcagggctgactgcccgtgggcaggctcggctgtccccgcagaagctgacccacagatgtctggtggttcccagcagctctaatccactcatcaccagaaccccactgttctaaatgtgcccgtcattctgaggacttctgaacccgcagctctggcaaaggacgataatgagctgcctctggatgaccaacactggagactctggccttaccatgtggaaatagttttcctgaagtctggaactaattttgagaagtttttttctcaacacttttgtgtttctaacactgtattcttgactgtgtaaataccaacaaggctgtaaataaatgcagatgtagataccttctagaaaaaaggggggaaagcataaaaacaaaaccagaagtgatcccgtgtagccttcgttgacaaataaaagactattttgtgtttaaaggtgtgcagtggcctttgttgggagacagtggcagttaccaggagggctggaggaagacccccatcttagtcccagagtcccttgcaggtcctacctgtcatgaacagcggtgtctggaggatcacagaagaccagaggcctcacttactaaaagatgaggtacacacagaggcagctctcaccttagctagtgccaaactgccttaagctgtgtcctagcctggttcttatgctcactggcttcaaagacagat

SEQ ID NO: 32741 - DNA, 1199 bp, Mus musculus
gggcttgtgtgttgagacatagcagacatcttttaaaaaggatttacttttaaatttgtgtgtgtgtgtgtgtgtctgtctgtctttctgtttgtctgtctgcatacatatatgaagaggctggaagagggcatcagatcatctggagctggggttacagtggttgtgagctacctgcttggcattgcaggaactgaactcacccttgagctagttaagggctagggctcttaactggtgagtcatctctccagcaccatagcaggcatcgtttaaagtatagagctgattttgcaagagagtgatgagggacctccagggatccccaaaggaagaaagacacaagttcccaaatagggaggggcaggtaggttagggggggtcaggaacatggccaagctcaaatacagataggcttgaactggtgttggcaagccatgattaatcgtcactatggagtggtactatgaagccccgggaaagccaacaaaaaggcttctctgttaataaaaagtatggtctagaaaaagtatacatgggggccaaagtagaaactgggaagttttctctagcttgatgtagactttagaaacttgtaaccaccagctggtttagaggttgaaaattagaccacttggtaatgggacattgctctccagtgtaggcgtgcttataaactttaatatcctagggttgtctggtagacacaaaacaagccataaagataagcttgtattgcagatgagtaatctagaaatttctcttgtacaaattccttcccaggagagataaaagctgtacctgctccttctccaaaggtcccagtgacaaactcagataccagagttcactctgggaaccatcgtgtttttaggcttctttatagagcataggagatcagctacttacaggatgtgggtatgcctcccccagtaagccgcacctggaaagccttgaccaagtagggatgagggcttccctgtggccacataggtagagctcctccctaatgtatatactgtagccccttctcaaagccatatgcaattaaggtagaggtttgtatagcaggtggtaagaactttagagtggtaaggaactttctggaaagcctgatagagaacaggagtttgaccttgtctggcaggaggagaatacgtcacatgatgcaagggattagtggtaatatctctggggtg

SEQ ID NO: 32742 - DNA, 1145 bp, Mus musculus
ccactaaagggaagttaaagtttattctgatttcaggagaacatttttccgggctgagggtatgattcggttgataaagtgtttgttacatagtcctgagaacctgagtttaggtggtcagcacccacttaagataggctaggtgtagtgctgagggtctgtagttccacttctgggaaggcagagatgggcaaatctaaagttctcgggctagccagtctaaccaaattggtgcgctccaggtttagtgagggatcctgtctcaaaactagggtggagagaggctaaggaagacacaaaacgtcaacgtctggtctccacatgcatagcatagataggcatacctgcaaggacacagctaaaacagggtggtagtctgcgtgttgtgggctgcttttaagattttcattttcagtcatgcatgtgagcaagcacctacagagaccagaagacggcctcggatctgcaggagctgaagctatgctcaggtgtgaactgttccactgagtggtaggaactgaactcagactgtctaaggaacagcgtgtgctcctaaccactgagctcgctccggcctcttctttttgttttttaagatggtttcatgtagcccaggctggccttgaatccattgtgtagctgagcatctggggatcccaggactttcggcgtgctcgataagcactcttaactgagctgcgtcttctcaagtcagtgaagtgaaaaacctaaaaacagttgtcctaaggggctgaatttaattttacataatagtactgtaaatacttcatagacatgccagggaactttaaatggttgtttgagcttgaggtatcactctgtgtctctgtggataccaactaggaaaagtgtaggctggtatccagagcatgggctgtggtttcaggatgtccaggcttaacagctcctacttagtgcccgtgctgagtgatgggtgcaaggttaatgctaagtgagatgaaggagcggggagcactggtgcggtgctgaacactcactgtgtgctacctattagcactgtctgtatgagaagcagtcctctgctttgtgttccctccttttccctggctggtccttcttggtctcccttgctcattttatttccaagccccttaaagagctgg

SEQ ID NO: 32743 - DNA, 1193 bp, Mus musculus
tataaaattggactttatgagaaaataaaagtcatttcactctattaaaaaaaaaaaagaaaccacaattctcaccacacctgtacatgatatttcacggagaacgttagggtgagggataaagggtgagcagaaagccggatcagagcaggtggctctggcctggaaggggtacactcgctgtaggggggaaagagtctgggactcggggtctgagtgtgggaaaggctgtaaaatgaaagcgtgctcaactcagtggtgaacagcactgctcttctgagatggagaaaggtgcagagaggcaagacctgaagtgcaagtcccagcctaggctctgtggaccctggggggggggggaggagggggaggggaggggttcttttttgtttgttttgtaaagaacattagcaagaataccataagaagctgggatgtaacataaacgtaattctctgtgcactctgactgatggtttgctttgggttttgtaattccaggtttgcaccgccagcttctgttcgttacgtcctttgtctttgctggatacttttatttaaaacgtcaaaactatttgtatgctgtgaaggaccatgacatgtttggttatataaaattacacccagaagattttcctgaaaaaggtatctcgtgttaattgaaaatgaaaaaccgcttgtttactttgtctcattctccctggttaagggctcaggtactggctgcttgcgtggcctcaaacatgttcttctggagccttttataagaacacatccattcagaggccccgcctcggcctaccgtagcgctggggcctgagccagcatggattaggggagacacggcattcggcaggtctccatcagtaagatgagtcccgatggcctttctctttcagtatagccctatttatttacttaagccatcaccatggttattactttatgtgtttggatgcgtgcctgcatgtgcgtctgtatacagtgtatatacttgaggaggccagaagagaatgtcgtatcccttggaagtggagtcacagacagttgtggcagccacagacactctgggagtggaactggaagagtgcaccctgaccctagcctttatttgtttatgttttgaatgctgaagcctaagcccagggcctcagacactcagcacatgttctgcccctcagccacatccctagccca

SEQ ID NO: 32744 - DNA, 1099 bp, Mus musculus
cttcaaaatttaccattttttagttgttaaaaggtgttagttgccgggcgtggtggcacacgcctttaattccagcattcaggaggcagaggcaggtggatttctgagttcaaggccagcctggtctacagagtgagttccagggcagccagggctatacagagaaaccctgtctcaaaaaaccaaaaaaaaaaaaaaaaaaaaaaaccttagaagttgtcaatgactgtgtctttaaaccaagaacagataagaaaggcaagtaagggggctggagagatggctcagcaggtaagagcaccgactgctcttccgaaggccctgagttcaaattccagcaaccacatggtggttcacaaccatccgtaatgagatctgactccctcttctggtgcatctgaagacagctacagtgagtgtacttagacataataataaataaatcaaaataaaaagaaaggcaaataaggggcattcatgttacttatttttataatggtcattaccaaggcttttagaatgcagtctctcatttgctgtggacatgaccataaagaaaaattcccatgaggtttttcatatgctactacctgttgggaacatttgttaaaagtaaataaataaataatgtaaaaaataagtaataaaataataaaaataaataaataaaattaaaaagaatgcgggtttgactaagtggtactcaacctgtgggtcatgaccccttcacaagggttacctaagactgttggaaaacacagagatttacattgtgattcacaacagtagcaaaattacagttacgaagtagcaatagcaatgaaaataattttatggttggggaccaccacaactgtattgaagggccgaagctttaggagggctgagaaccactgctctaagtggtgaaggaagaatgagaagttcgccaagtgaaggaggggaagagctcatcacagactagggatagcagagaaggactaaggcttagtccctccagcctcctgtcaaagcataaggagatgcgaaggccgaaggagtggctcagattccagagaacactgtctgactttgatgtttagagcatagaagaggttgg

SEQ ID NO: 32745 - DNA, 1133 bp, Mus musculus
gaaggaggtactttgagaactttgaggaggtaggaatgaggaaaggattgtgagtgctggcaggacaagtaatcagatgtgagatgacgcctgcagcaggcccagcaggcttccgggaggagagggtaagagcaagttattcatcagatgtcattgtcctggaagcttctagcctccctgcaatctcggctagacctagagtgttttcaccctctgagacttagtgctgaataaactcacctttccttgttctttctgaactctggctggctagttcagctcagctgtaatggctcaaaactctccacactaactgactcatttctctcttggcctctgactgaactgctctgcttggcctcagactctagcagtctgttgtaatcttctggctcctcctctttctctggcttgtctgtcttcccctgtgtctagcttgttctctctctgcagctgtctctgtaaaggtctcctggtaagtctgcctctttgctctccctctgcactgctcgctcctgtgttgcctgttttctctctgttctcctgagagttgggcacatcctattctgtcacaccattctctgatttgtcactttgtctgcctctcaatcagacatcacttcaaacgcggtgcttcctctacaaactaacttgaccttcatttcttgggattcagtgtgtgtactaagggcacgtctgtattccagccagagggcttaaaggtgtgtgctaagactgagccacaccacaattagaaataagtaatttcagtaaataacacaatctcaggttcacagtgtgatcaaatatcctgcaatgggtgtgggtacgtcacagatcatacccacagaacttctgagcgagtagaaagctgtaactgcagtgcttctttgtgttttaaggttagccaccctagctgtacttgtagttgcttagaaactgatgaccagtcctcatccggcctataccagttaagtcagaatcctgagactgagctcagaggtcttagtctgatggacacttgttttgttgtgtaaacaatcgcaggtggatttacaggtcatctgctaaactatcccgaaaagaatttactctaaaacatctctactgccttccaggcaaacacttgcctg

SEQ ID NO: 32746 - DNA, 1133 bp, Mus musculus
tttgcatgattgactgattgattattatgttgggggttttttgtttgttttttgagacagggtttctctttgtagtcctggctgtcctgaaactcactctgtagtttcactctgagttgtttcaaactcagagatcccctgactctgcttcctaaatgctgagattaaaggtgtgcaccaccactgcgcagctagataatttttttaaagaaaaagaatgtaattgttgatttttaagacatatttgatttcaagaagtgttatgccacaattgtgcttcttagacaatgagcaaataaataataagtaaattattttacttacagacttttatacacgaaagatcatgaagtagaaaataactcaatttgggccagtaaggtgctttggtggataaatgcacttgacagcaagcatggcgatcctgactgtgccccctaggactcacatagtgggaagggaaaatcaactcccatgaattatcctctgacctctgtctgtgttctggggcatgcctatagaccagtaacaacggaataaagaataacccactcctcaacaagatgtaacctcattgcttatctccccagataaaggagaagctacaaatcatggtgtgtggttatattcctagcagtggggatgctgaggcaggaggattatgagttctaggccagcctgggctatttaatgagactttgtctcaaaaaacaacaacaacaacaaaaagagaaaggaaagacaaaaggcaatttttggtactcagagaaatcctttgaaagtaaataaatttggtagcacactaatttcagaacgtgccattgctccattaccttcctccttccccgacacttactgctcccaccctaccggtctcccgtgctggggaccagcaaggtttgtccactactcaggtgcacaaccactgagttacacttgtagccctggcttgtgtattcactggaagctgccatcaattatgaattcacaagggacattttttatcatttgataatttgatcatatttgataagaattggatgtttacagacatatttctctaagtgaaataagacttattttttgagctcttctcactttggagggaataatgttgctatgaacatttgtac

SEQ ID NO: 32747 - DNA, 1170 bp, Mus musculus
ttcccatgtaaacagtcataagcgaaaatgaggtagcgttggtggcgggccacgttagactgtacactcagcccttgttgctcatacagaccctctcagaagctgattaattagaacagaggtctaattccccactcctggtcatgcacacagctccctgccctatctcacatttataccactttgctctaggagaccgttctggcacactcaccataggggtttcagttcgtggaggtgttctgatcttaataatgttttagatacatctatcccatacacaagctatgtgatagaatgtaacaaattaccagtgagaagggatttattaagctctagatattttgaatgagagaaaaactaaggaactatatttgggggagggttgttttgtttttttgttttttgccaaactggcacaagctagaacatgtgcaaaaggctgaataagctccctgttctttttgccactggatgatggaagaatgagcttgtctaggtatatattttcttgactttcaccagtttcagaaggagtctaatttaaacatttggggtttgtttgatctgtatttattgcatcctggccataggccgggggcctgcatgttatgtttatgaacagctagaacacagccatgtggaacttaatggctcaagatcttctaaataatttaacttattttgtatgttgcaaaaaagaaaaaaaaagtttattttgcttgagagtcacatttttttataactgtacagcttttaagggatgggaggtggggaaataccctaaaataggatgtagatttttacagttgtgtttatgctagaacatctatgggagcattatgtaattaaacctcaaaattgtttaaaaccttgtgccatggtctttttcattatacttccctttagcaagagttggtgcatgtcaatcgtgcactgctgtgtggacagaccctgagattagattaatacctatttccaaagctttcatccattgcatgaattacctccctacacacacgcacacatgcacacacagaggtacagttcctagtcgtgtaaatgcatcttcaggatcagtataactgaacacgcagaccctggcaaccagcagcattactcttcccgtgcatgactttgtggtgttgtctaggctgttactgatgttgc

SEQ ID NO: 32748 - DNA, 1111 bp, Mus musculus
catgctatagccacacctttttaaatgtcagtactccccccaacccccactccgctatccggtaatttcaccattctggtttactacctggatagcacaactgtattcttataagtaattaggtttatctaaatgtgacaatttctaagtaaccttcatctgctggctactaatttggaacataattttctttgctatttctatccatttagaagcttaggggccgtgagtttcaatgtgaagagtataaattccagctaagagtttgtaaattgtcttatcttagaatctcacttcaattttaaagtagtaactaagttccaggaagcacctaatcagaacatgtcttggattttaagatgtgtttatttgggatactttattttccctatgcataaaagaaaaatattgctggaatagttctccaactactgtttttagatgagagctgaagcagaagctccaagactagcaatcaaagtaactcttgaggtaattaggatcatgctgttagtcaaagagaactgggagtgcgctgtcacataataatgtactgcacatgccaatgaggtgcacaaagatctgcaatggtgacgctgagaacacaagtgaagtgaagtttgtgtatggagagtatggcaggtcctgagagcttcaagcttcaggagtgttagaactatagttcatagttgtttaaatataatatttcttgtgacaaccaaaatatgttgtggctggtgccaatattttcgttaatgaaatgttgaatgtcgcattacagtctgatcagaattctcagtgtaataagccaggcctaagccattttatagctattggcctaactgtgtaactttttttttcaaaatgttttattataatacttgtcatttctttcacttaatatatgttaattgtcataataaaaagtttaaataagttgatgtacttagcattgtgtttgaaaacatagtttctgttacattttgtggcattatagaaagctcggaattttcaataactggtttgtaagaggtgaagatgttctgtgtcacccaggaatagactgttacttcatgatctagaaagcaaatttgtaagtagatcgactccc

SEQ ID NO: 32749 - DNA, 1099 bp, Mus musculus
caaatatgttctcatttctagagattttaaaagtggttttatgttttatcctttatgtattttttttagattttctgatttttttaaaaaggagcatatgttaattcaaaattcttttagtatcaaattttgtgtttacttgtaaaattcctaccttggaataataaaggatccactaatttaagaaacaccctcttccttctgactcctagaaagtctgttctctgggaactactgttttctagtttattatctttttaaatgttttctcaatctcttttgtcttgtctttttagacaatgaccctatcaataaacactggaagtttttggaagcctatacatctccagcaaatacattatttatcatccattttctttttttttccaattgttgaataaaataatttaaaagtgttctgtttgtttagaacaaggacaaggggacatccctacattttatacctatgaagaaggactatcccatttaacagcggaagggcaagccacgttggagagattagaagggatgctttctcagtctgtgagcagccaatataatatggcaggcgtccgaacagaagactcagtaagaaattatgaaggtgagtgttttttctcttcagactgggaaatcgtagccaagttttctcttagaagccagaagactgcagagtcattgctccagactctcatacagttttggctctgaaggagtgacatgtggcagtcctgtgctttctaaccccaagccgattgtgtgccacacctggatttaaagcacatctctcaatatttactcttttggggtaggggcgcgggtgttttcttaaaggcagggttactctgtgtagcttcaggctggccttgaactcagaaatctacctgcctctgccttcctactactgcggttaaaggcgtacacacacacacacacacacacacacacacacacacacacacacacaccacccctaatatgtgctcatgtcattctttttagaactctgttgagttggtttatgatcgaattttacacattagacagctaaagcaagaagaattaaattgcttgaggtcaaagagctgataagtggcaa

SEQ ID NO: 32750 - DNA, 1600 bp, Mus musculus
tttttgatcattgtatgtgattgtatgtgctgccgggcgtggtggcgcacacctttaatcctagcacttgggaggcagaggcaggtggatttcggagttctaggccagtgtggtctacagagtaagttccaggacagccagggctacacagagaaaccatgtctcggaaaaaaaaaaagattgtatgtgcttttaaagcctgaagaagggctagagtgttcatgttcaaacctgggtgcatgaggtaggtacagaagagtacacgtgggtcatagggtcacggctcaccatgcatgtgcacacgtgctgccagtttctcagtttcctcgtctgtaagatggaaacatagttgcttgtcagggatattacaaggcctgaggtacaagtctggagccctccaaggctttactaaatagtggcaattactaataataactgtgagccctttgtcttccagattctgctcataactgtaggcaagaacgtggtgcctcttcactccagaatggggctggtgaaaggcatttttcttctccaaaactcatttctcaagtcaaactataatgagacagcaagctgtcaccagcagaagagactatgtatgacctctattaacaaaggtgaattaactgaacgggtatttgtagtttctcatttcccccaagcttcctgtgtatgttctgagaaggcctctgagtcctgcctttgctgtgtgcgtctgtcagctgcaagattcgcctatgtggtgaaatgcacagagctcacactgggcggaagggacgtgcggaagcttagatgtctctgggattcaggagaactcttatccctgagattaaaaagcagaggcctcagagggagcagccgctagcattttccacagaggcatgggtcctctacttggggctcagccacatctcgcaatacttgtgtgctagcttctgttattcttcatgtaccatcagctctgttatgttctcctaggttaggtccttgactgtccaccctcttaacgttcgctttctgtcacagaataaataatctgaaatgaagtctgcaaagtactctcaatgatattttgtctttgtaatagttaacaaataaatctgggtttttttctatatcgctgtgattttgctcttgagtaaaaccattaatgagaaaagactaagatatttaaattgtacatgtatgtgtgttttgcctgcgtacatcatgtgcgtgcctggtgcccatggaggtctgaagaaggtgttggaaccacaggaactggagttccagttgtttatgaacggccgtgaggatgctggaaactgacgctaggtcctctgcaagagcagcaagtattcttaactgctgagccctctctccagcccagcacttgctgctcttttagaggagctggattcagttcctctgcttctgtgttgggcagctcacagctgctatatgctgctggcttccagggatctcaatagcctcttctggtttcctcagctacacatgcaaatgcagacagacgcccatacacataacaatagtaacgttttaaagtcctgcgggggcgaggggtgtgaattagttggtggagctggtctagctg

SEQ ID NO: 32751 - DNA, 1165 bp, Mus musculus
gaatctcagccatcccattccttacccctcacaatcagttcttaactatataaacttttggtttgatagcattatcgatttgagatcagttgaaattgctttacttttttatttctgtgactaaattgcctgaacacctcattgtatttgaaaaccataacagctttgaaatgccacggggcctgataatctgccagggacaggaagaggctctgtttcccgaaccatgcccttggtgcagctgatcctgacatgggagaacgaccatgtttttctttgtgtgtgcttctagcagctgttttggagaaccatgacccagtagtgttccctgtgctatttctagtgaaatggtcttagctatgtagcagcttttgattccctgcatcccctaggctgctgcttgcattctgtccttatttatagcattgagagatttcctagagcacatgctgagtaagagaagtgtgagaagtcagagggaaagtgcagctacttttagcacatggctggcttcagcacctgtccggctatacttgtgtgatatttcaagatctcagcctctgtttctacctgggactcagatcttctggtagcttaactatttcagtcgaaagagaaggtctctaaatccgagatgatgtgctactagtaataaggggaccctgtttttaagtgcatgaccaagctctctgcaagtggacatgcttactctctgcaaatggacgcgtattgcgggtgtttgctacctcctgccctcctcatggttttggttctcctgctgtggtaggatgcttggccagcattgtggcttgtcatgccagccccattgcctaccttgtcatgctcagaggtcctactgcctcagcagcacaagtttctatttccttcaataaaaggagatgaaaatattctacaggaagtgtgtcttttttccccctctcttttttgtttttccctttctcatgaagtactactcatgattcttcataaactgtttgaaagtaagttgcagttggatgccccttaccattatagatgtccgtctgtagtcttttgtttttgtcttaattagagatttattgatgtgaagagacaccatgaccatggcacatcttacaatggaaagcatttaattgaggttggcttacatttcagaggtttagtc

SEQ ID NO: 32752 - DNA, 1218 bp, Mus musculus
gtactcctcctgctccagcttgaacacgtgccgcacgaagaattgctgcaggtgctcattggcaaagttaatgcagagctgctcgaagctgcagagggaagaggaccttggacatgtggcgcccaacttctgccctgtcacccagacccggctctacctagatcacagcttgacacaagactcccatcacgtgggctagggtacaactatcaagtccaactcctacgctgaagacgactctggggaccggcaagggcaaaggacatgcccaaggtcactaagggccagagaggcaggctagaagccaggctcaggactctttccttggtgaccagacccataggggggatgtcagaacactaggaaggtgggtcatagagaaataacagattgtcactgagaggccgaggctgacactatccaagcaatcagagagatccctgatgccagcccagctaagcaacatccttgactctccttttcagtatggtgtcttggggactcggtgacattctacattacaagaattgaagtgacttcgactaggaggcctctgtgccttccaaggggctcccctctctgctctgcaccagcccgccctgggacctccacctgaatgaacctctcaagccactaggcagctttgtaaccgccctggagcctctgtcaagtcttggaccaagtaaaaataaagctttttgagacagaaaaaaaaaaaaagaattgaagtgacttgaagtgtctctagtcataagctcagagaccttccaagtacccagaacactgtaaaccttccccagtatccaattgggctggcttcagctgacctaggactggacatgaaaaggctctccagggtgactgaagtcaagtttcccaagcctgaagctgttcttggaggcaggccagtgtagcttaaaggaagaggcatggggccccccacattacctgttcacagtgaagttctcaaatccaaagatgtccaggagaccgatggaccggcgagagttcttcacttccagggggggtggcttgtagattgctgcgttgatcttctccacaatccacacaaagagccgcccatagatgccctgaaaggcacccatcagccacagggcaaggcagaccctccctgagtggcagtcaccattcctagacacactgggtctgggccccagccttacaggtgacattaatgcccccaagtcttcctgaggc

SEQ ID NO: 32753 - DNA, 1231 bp, Mus musculus
tgcattcctgaggaactcttgtttactggtgctgtggctcacaggtccccctctgtgccctccttcagcttccaggccagacttagtagataaatagtaataataataataatacaattgagttatcagccacaattccttttggaactgttacactctgcctctggtccctccaacgtggtcctcttcctggctggaggtgctggattctgactgccatcttgctccatggtggctcttctggcctgggacccggtccacaggaagggctaggagctgaattaaagatgagagcatccctcctgcacactggggcttcccttcaccaggagcaaatcacttcaacctcccgtgcctcgtttcctccctctgtagcatggggctcgagactcctgtttgtgagggactcttacaaggataagagcaaggccacaccacttccgctgtgtatcagtctatcatacactccgcacggtcacatgatcacttcacttctcgatggctattgcagaccaagactgcagtcaagaagggagggtgagcctcacgatcttgggtctcagggcctgacataggggtcttagctcagccatatccctctgaggcacagggcgagcagggaccaagtagcagacgagtcgatgcttcacctggcatctagccactgcctcccacttctagcagaactgggtcagcagccctgttcttgcttcctctctcttaagctaggccaggctggctcctggctgtgaaggaacttccggtccccaagaagccttgaagactggacaagggaggacagggtggagcagggatagccgtggcttcatttatcgtttgcacccaggaggccttgtagtcttccaattgcaggagatcagccctacagtgtattctacgtgaaccaacagggcctggccttcactcctccaggccacaatgccctggggtcaagggaaaggaactctgttatcttctcagaataaatattactgccgctctagagggatctgtctgtttcatttttcccgtaccccgcacccccccacacacaagggtaaagacagagggcacaatgggtagctgacctctggtcagaaggatgagcaaggaaggccttgggaatcacagataaaagctggccttgctggttacctagtgagtcagagcccagctctgtggaatccttcaggttccctgcttccagtcagtgtggggctggctttgctga

SEQ ID NO: 32754 - DNA, 1133 bp, Mus musculus
ttgatagatatttggacaactggtgtgaagatggggctcttaaagcctagagaatttgagtcctaccgtggtggtgctcagtctgggaggtgttggtttgcttttttgttttgtttttgttcagttgttgttttggtttggtttggtttggttttgactccatgtaacctgtcctggaacttgttctgtagaccaggctggcttcaaactcagagatccaccttcctgtgcctcttgagtgctgggattaaaagtacgcgccaccagcagctggctgagagcctgggagttaagacctgagctagaattgccttgctatgagactgtagcagcctgcagcttcagacagctcctgtgtgagtgaaaagattcagacctgcctggagacctgagctgggaattcccttcctgttgtccccaggctggccggctgttaccaggccctggacggaggcaacacggccgatgcattggtggatttcacaggtggtgtttctgaacccattgacctgaccgagggggacttggccactgacgaggctaagaggaatcagctctttgagcgagtgctgaaggtgcacagcagaggcgggctcatcagtgcctccatcaaggtaggggggctgcagggaagaccccaagccctggatgggagggagtgggactgagcttgggccccagtcagctcatcataatgacccttggctttctgggagatggagtaggtggggagcatagctccccttccccagagctgaacagcaacgcaaatccaaccccgccactatgcaatacccactacaccgttcacaccccattcagactcccttaggctcttgtgtcccagcctttgagatactttgtcaaggtataaagtgtcagaagttaaggggaagctggaagaggacagggagtctctcgtccctttaagtgatcaagagctggtcttcaggagggtcctctgctcagtcactgctgggagaaaggtgggttcattgaacccagcataagctagctttctgcggagcttggtcagctggctctctagagacatggagccctgatttgtgccttctgctgagttccgtggtataaaccctcccgtcgagctcattttcctcttatgtattcac

SEQ ID NO: 32755 - DNA, 1158 bp, Mus musculus
atagactgtagaggccttttgggtccacgtgggaagatggatgggccccctgtggtgaagagcgggactgagagataaagagactgaccaagagatgcaaacggccagcactgattcctcccttcagggatgggagactgagactggacaggaacaccttccggggaacctggcaagaaggcgtttgccctgctggccaaagctggagccaggaggcgaatgcccagcctctggcagcaggaaggttctcctcccagtgtcggcagcagcccgctgtgaccttagggccttcaagacactgggcaggatgacagcggggcttgatctgactgcttttccaggtctgggcctggtttttatggagaagtgagagagcgtgtagaaactgaaacaactctagccacccacgctcatatgggtattgagagatggcataactatttgtatggatgtgggcctgagggctagtcctggtgaggagtaaggctaactttagtttaattattgagctggtactggcttgtggacttggtggaggtgatcctgactgaggcgtccttggtgcagtgctttttgaactgggagactgagactcgaatggtgtagcagagttagaggggtccagggctctgagctagcaacagtgatgtccctgttaggaaggctggcatttgctgctcgctggtgttgtgccctgctgtcacccccctgggcatatcctggctgttctcctggagtgcagacccctaagtaaggcttgggtgggggcagttaggatgcctgacgtctgaagtgggctggagctatctgactgtgatgcctaaactgacaggaaaacggtggcacagttagcaggttcagctctaccccaagtctcattgtccctcgccttgcacatcctgaaagccttccattgcctgttacctagcatcagccagaggtacctcagcagtgtcccctgactgtctcaaggctgcctccctcgggcatactgaaggtaggatctgtcccagctggtgagctgccaggactgcaaaccccagctcaggtgcaggattctggaggcaggagataggctgtggtaccggtgtctcttgagccggtgcctctgctccataacatgcttgccgaagcactggccggtgcttctggactctg

SEQ ID NO: 32756 - DNA, 1238 bp, Mus musculus
caagaaaataaaaaacacctactgtatgtagttctgccaagatggtcaagaaccccccaaagacttgtacatttgaagacaccatgcccatcacaagagatgaatgactcagcctgaatgacccagccatagagaatgggcaattggcctgttgggtatttagctcctggctttatctcgtttgccctggacctaagatgcttagagaaaaacagaaagtgtatatttatattctagaatggtggagaatttgggcttttcttaacaggttaacagtttgtgctggtcattcatggaaaattaatatttttttctttttttacaagagttgcatgttaattgtatctttattaatttttaattaaatattgaacaaagtcattaagtactggcaaaataccatatccagatggttgactgtgagccagcacttagccgtgtcatctttgatttacattcttatattaatttcacagatggctttccagtaataaaaaagaaaaggtgtgggattctaggcagctccttgctatctgccttggtgctagctggagtcttagaagtaaactctgacctgccagtgagtgggctctgttctcatcacattcaagattttgtcttggactctgtggcccacagccaatcaaaggggtgggccatccaacaccccttcagaagcttttccagaacacccgtggaatgtagtcctctcaccagttagaggctgttgttttgctttctttgatcttcaaattattattactattgtgtctagcaaatttaactggtaatctgtaagacaacacagtttaattgactttatcagggaaagttgtcagttttttaatttttccattatgcagtatgcatagtgaagcaaatagttctaattcggatttgaatgtatacgaaattgaattaataatcacaaacagtaaatgaaagatcatatgttatatctaagctatggccccaaaagaaaagtggggtttttttccccatgtgaaattggtttttaaaaaattctcatattttcaatattcattaacaagctttagcctggcagggtgatgcatgtctttaatcacagcacttgaaaggcagagataggcagatctctgtgattttaaggccagcctggcctatatagttccaggatagtcaggaatacatagtgaaactctgtctcaaaaaagaaaaacagtgttggttcattagttagccttggaatatttata

SEQ ID NO: 32757 - DNA, 1380 bp, Mus musculus
aagctcaagtgggcaggagctgaggtgttttcaggcctgggtttgctgcaggaactagacctgtcaggctccagcttggtgcccctgcctgagatgctgctgcatcacctccctgctttacaaagtgtcagcgtaggccaggatgtgcagtgccggcgcctggtgcgggagggcgcctaccaccggcagcctggctccagccctaaggtagtcctacactgtggagacacccaggaatctgctgccaggggcccagacattttgtgacgaatggtgtggcctgaggccacttgacagactgctgcctgggcttgctcaggtccccactaatattttaatgtgccaatgcctgtggagagtctacaggcctaagtggcggccatctcagtaaagatatgggccaaggatagtttttgtacctggggcctatacccaataacaaaatctgccggtttgtcacagtggctcacctcccagaactctgagcaaagggactgtgatgccaaaccagactttggtcccttcctgagccctgctccagttgtccctaagtgccttcccttttgtctggactgacctgacccatgatgtttggactacatgtaggtgagcgcccgcattgcaaagctgactcaggtccactgggctgaaggtcccttggagcccagtgtctagtcacacctttttgctctgggcccatgaggcctacttcttccttttctcatggaatcctgggtagaatcttaataatagaaggacttagagagaaaatcaaatccaccctccttgtggggaagatggtaatatgggaccaagagcagcaaacgtgctcacctggtgtcttggagcccagcctcctgctgaggttgggggctctgccatccctcccctgctgggtaccctgttaccattcattgtctgtgctgtttcccattgtgcccagcagtagcaacaacaagatcacatgggtggggaccctaggtccggtggccagcttatggcaggagcaaagtcagtccccctttcagagcctcaggaagcttggaacacctcagtcacaagcctgtcagtttcttcctctgggatgggagtcccgcagcatcgagactggaaacgtacacatttcccccagggaccctgtcttacgatgcttttctacgtcaatgcaattgtggccatctggccacaagctccaagggacttacaagctcaagggccagagcccagagacccattttcccctccaaggagtggggcaggaagggtctcccaggcacgctgtgctcacccccagggccacatctcagctctccagccctggattctttcctgtcttcattttatgagttgttgccctttttttttttttttttttttttt

SEQ ID NO: 32758 - DNA, 1179 bp, Mus musculus
gttctggaaacagcacacgggtacttctcttcctgtcagggttcagggtgttggggaataggagttacccaaaggctgggagggaaggcagaggccagtcgctgagcatcagtctgatctcccatttgagcctgagtgcagagagctgctggagaaaacagaaccatggggctggggtggggggtgtttgatcattttttcctctggcctttggacggtgatggagtctgggaggcctgtctgaaggcagggtgctgcatgtcttccagtcaggaagtctgggagttgtgctctccttccatagcctctatcacctggcatgtgtcctgtcacctgtctgattctcaggctcctttgaagggaaattttgatccctgttcactgatggtgttgtgactggtaaatagcataacaaatgactacatgtgctaataaacggagattggtttttgggtgtctggttacatacattgtgtgaatacaagaggaggcagaaataacatgaaccctcaactttaaacctggtttaaccacttagccaaacccttagttccaggaagcacccaagcagaaggaagcctttctgtccctgtcattttcctcctctggtttctgcccccaccatgctagtatccacgctagagaggagctcggcacattcttagacagccatagcccagtggcccttcaggggatgaaagccaggttaggctgggaaggcctcacgaaaaggtagcttttgaatcaaacaagtgggaatttgtggaagacaaagcgggagggctttgccatctttgtcaaaagaagtagcctgtgcaaagaaagaagtccctggggagtgacggatattcagcctgagaggctgtctttgtggaattgggtttagatgaggcactgtggtgggggcttggtcttcagttggaggctgtactctggtgcccagccactgggcacttgtgtagagctttggcagtgtttagaagtggaggccagaggccagagggctacagagttctcccgagtatgacctctgcagggtgaggaagaggacagacagtgacctacctgcccaggagtgactgctgatttggtgccagcttctcatttgaccataggtggcaccccctacttcagcttgctctggcttctgtcagtcaccttcccagatcccagggaaac

SEQ ID NO: 32759 - DNA, 1183 bp, Mus musculus
gtatacatgtgcaggctggaggacaacttacaggagttggctctcttgccacctgggtcatgggaatttgactcaggtgtcaggcctggcagcaggaggctttacccactgaggcatcttgcaggtccccaccttgttttttgcaacagggatctggagcttgctgactagtatagacctgctgcctgcatagatttgctgcctagcaggtccacttccccagtgctggggttataggcacaagtcatggcctggcttttcatgtgagagctggtttctgtttgtgtggcaagcactgtactgacctatctccccagggccagcactgagtttcttagacattctccaggttccccccaacccttattttacatgtgtgagtgtttggcctatacatttctggtgcaccatatacattcagtgcctacccatggattccctgggactgaagttacagacaatgtgagataccatgtgagtgctgggaattgaaaccaggccctgttagatcagctaccatggctctagatgactcttaactactgagccatctctccaggccctttcttaagtggattgacaatgacagaacatgtctggatccatccttagacatgcttttgctgaagttgatagcactatttctttgttttatgtttaagtccataaattaaaagtaattgcaagctatctctgaagaatatttagagataatgatgtacttcggcaaagccattagaattcttttcatgccgggcgtggtggtgcacgtctttaatcccagcacttgggaggcagaggcaggtggatttctgagtttgaggccagcctggtctacagagtgagttccaggacagccagggctacacagagaaaccctgtctcagaaaggaaaaaaaaaaaaaaaaaaaaaaaaaaaaccaacaaaaagaattctgttgatcattgaagatttggttttgagttggagatgcagctcagttagtaggatgcttgcctggaatgctcagctctgagtttgattcttagcaccacagaaaaactaggcagggtggtggatgcttataattccagttcttgggggttggaagcaggagaatgggaagccacagtcattccctaccacataatacatttgaccccaaatgtattatctcaaaagagatttggtttaaagtaaact

SEQ ID NO: 32760 - DNA, 1149 bp, Mus musculus
gttctaaatgtaatgtttttaagtttttaattttttagggtgcagtttgtttacgtgcaggtgtggtcttgtgattgctgtctatcacaagtagagtgaagggtaagggatgggagggtaagaattttgacaagctgtggcaaaggaaactatacctttcatttttaaaaagtgtaaatagaaaagtttttaacggttttatatgaatttcactataaataagcattttaagactgacaaatgttgaactgtatatacatttatcaacttaactgcccagtttttggtgctgaagtactgtaagtagaatttatcagtagcgtcctaatttctgtgtctacacctggggagaagctgtgatgctgtagttaatcaacttacacaagtgcttacacttgtgtaacttacactgataatctcggcaggagcatccctgagacacctaccttgtggtggtgattgtccccatttctactaggtgaaagttactcacccatagatggagctcttggatagcattttattgtacaaatgtgtttcaacaaccactttgtgactgttcctagctaaggggaaatttaacttctcttgggtcatagacatctttaagaagctgattattctatgaactctctcaccaaaaaaatacacatgccaggacacgtgttaagattttgcatacaattttagggacttaagaactcccaagaccatccatgtattccaggttaagccttctgttatggtcagctcattacttacaggtgtaagtttttatcaaataaaatatcttttggatacacatggatcaggaaataagaacaaacttgaataagttatgttccatctctactatcagcataccatgtccgtgttttgagaatatagcctctctgtgctccagcaggttaaatgacaaatgagtctactttagtctgcttttaaagaatcacttgtgcatatatatttgcacacatacatgaatatcaagtaagatttattttttttcctttgaatggttctaatgccaaatagagcatgattttatgaacaaataatattcactcctattttatgtgccaggtaaggctctagccaccaaggctattacagtgaggacatgggaaatcctacccagatggagcttac

SEQ ID NO: 32761 - DNA, 1465 bp, Mus musculus
aatggaaaaaagcctgtcttctgagtttggccttctttgttagaagaggcctcctaagggaatagaaagccacagttagagttgtgtgggatttgaggtgggatctagcattaaccctgacagctgtgaccttgaggacatctcttacctcctgtttcctcacgtgttacatggaagctacagtttccacccaacattgttacagatgcagtaggataacgtgtgagatctagcccagtgcttgtcatggaggtggtccaggacatgccagctttctatgcttgggggggggggggggggggaaggacacagtctcctcttggcttttccactataaacattctcttgtgaatcttctcttccaggccattccccagtatgctattccttgtcactccagctccaatgtggtggtggagcccagtgggcttctagagttgaacaacttcaccagtcagcagctagatgacgacgagacagccatggagcaggacatagacagcagcacggaggacgggactgagcccagcccctctcagagcgctgtagaacggtcctagtgtgcagacgccggagtgcactttagagcctgcgtggttaccaaatgtccagggaaacttaaaatttgttatagtaaaaaagaaaaaaaaaaaaaagaaagaaagaaaaaagcactttgctcatatttaggctggggacctagaagcattttaacaaaattaaactcacagaggaatgtactttaaaaaaaaaaaatagaaaaagaaaaaaaaaaaagcagaggaaacgatgcaccccatggagcccggcaccttgttggtgctaagcagcgagaagagactttcctgtgagtggtcctcgactgctttccactgagcaaataccaccagagagtatgaaaaggaaaagaaaggagaatatgaagagtttgtatttttgaaatgatgtatctgaacagtttttcaaaaattgtgtttgtttttgcaaatccctggagatgttgatttggctagcattttacatttgctcagttcatgattagtttatgaatacctagggaagtcctggcattggagtccttgctggacggtagacatcagtcaggttgctgcctgggcagtttggggtggcttgtacatgtgctccttggttgtatactaatttattgtggagttccacacttgcctatttatttaatgtaaatgttttgaagcaggccgaatcccttttcctacatgtcctgggaagctggatccctggccttcccaccttcccaccccctcacccccctttaagaagacggattagagaagatttggtccggaagcagaggaaaagacatttctagcccaaaggaaatgctcagtggtgttcctgaaaatgagctctgctcattggatgctttctcgacaccgacgttgcacacccgtgttggactgagactttgaaaacaactttgacttac

SEQ ID NO: 32762 - DNA, 1177 bp, Mus musculus
gaaaaggttctatgaatttccctccttattctggggctcaaactcaagaccatgcgtatgctggacaagcacccagtgtctggataacattcccagacccttggatttttagtaagtcaaatgaactaaccaatgggaagtgctactctgggatatgctctagagcaggtcaagctgatgtgaactgagtgtgccagggattactttgaatacaaaggaaataacatcctaggaggagtgaaagaaaaaaaaagagagaaacagctggctggcctggagtaatggggggacttgaatgtgattgcatatgaattattgtaggctgctgttacataggctgtagtctatacaaccatacagagcagtctgcagtttccaattcattgttttcttagccactaatggtaggacaccccagaggtctggttcattattcccatagacagctctggttttagtacttgtttataataaaagtaacttttccccgacttttttatgcagtaaaggaaaaattggaatctaaaccaagacaacccactattgacttgagtcaaatggcagtacctattcagatgacccaggaaaagagacattctcctgagagtccatccattgctgtggtagagtcagaactagttgctgaatacatcaccacgggtaggtgtcctcttaaaacatagtaataaggtagtgctacctttgcggacttcatggggtgctcatttggggaagacatatctatatatttctagctcttttcctgttttactcagagcagattgaattatcttcggagtttccctaactttaatacccccccccccctatttccctgactttaatcaatcaatctctctctctctctctctctctcccttatttctctgactttaatcaatcaatctttctctctctctctctctctctctctctctttctctctttctcactcacacacacacacacacacacacacacacacacagacacataccaaaaaaaaaaaaaaaagcagattagatacttaagtgtggtccagcaacaaaatactaatgagatttggggactggtacctatggagaagtgaaactctttctcttacattcgtgtgtagcctgctttctgtttggatgcgttattattttgagatcctaaggagttcaggggtagtgat

SEQ ID NO: 32763 - DNA, 1186 bp, Mus musculus
taaaaagtcattttagatatgacattatcactgtcgatccagttgtcagttattaagttatcaggtctttggaaaatgaattttgtgagagaaatacattttataatgtgtcatgatgaaaaacaccattgactttgacttggagtttcaggtgtttccgagctgtggtagcagcacttgggaggcagaggcatgaggatgacaggctttaggcctggaccacatagtgagcctgcttcaaagaacgagtgagggctgactggggtggagcctagtgtggagctcttgcctcagtactcaaaagcaaaaagaacagcaaaagtcacaggaagtaacgagcagccttctgtgtagatcctgtcagggcagaagaacctcaaaggaacaagttacagtagcagagccagccctgctgctcctcacttgattgctgctgtttgcatttctttgctgagcccacattttcataggcttgtttgctattcacttgtgcttcatggagaagaaagacccagaggccatccctataggcagctgacttgtctgttgtctccttacatgactgtgtctgctgccttggctcggttataagcaaaacctacagaaataaatgttttgtggtttatctaaaaataatacagaaaatattgctgttatttttggtgaataaaatcaattttgtatagtttatttcaacctaaataaaatgtgaattttgtttaaatttcaggtgaggtgtttttggtgggtcagaatacatccttgtatattttcttaaaatggttatttcataatcagcctcatgccttttacgattcaagatgaagtattttctagcttttctcttttcttttttattttttgtttgtgttttaaagtgtagaaaaataattaaaatcaagaagttattaaatgaggactggggtggatctcttgctaacatgtgcaaggcctaaaagcaagctttaagtttgctcttttaactggtttgctgtgtatacattatagccctgctatagattgttggggctcgtgtttactgtttgttgctggttagaatattgctgggtgaatcgcataattgccatagggctattttgtgttgaagtgagttaatgttatttgacctgcaaacagcagaattggatgcatgcattgcagcactgggtcaagcctgctgtttgta

SEQ ID NO: 32764 - DNA, 1191 bp, Mus musculus
agttctcgtggaacccaagaccctcctgcttcatcttccaagtacaaggcttagagacaccttcactcctggctctgtggctggtgctttatgtgtgtatgaacttatgcaggagcaaagggctctccatgagaccaaatactcagatttcttttcaggtaccctgcatggcagcactcaataggtctacattccagccctagccagtgcctatccagataccccttaagcactgtagttttgaaatgctttccggttttccaaaggaaaatgaaaccattgtgcattcaggtgcacacatgctgttcacaggacctcagctcagggtgggggttgggaagaatgttgtagctcatacagctggtgggaagccagggtttcctcccgtggtggtttctagggtttttgtcaattaccacaaacttgatggcttaaaacaactctcatggacaactgaagtccaaaatcaaggtgacagtagggccacacacttttctttcccgttgctaagctcctagacatttcctggctgtagctgggtaaggtcacatgacctctcctctgccttccccttataagcacacctgctggatttaagacccacctggataatcaaagatgatctcatccctagatcttttaatattttgtgaccccttttccaagtaaggtcacattcacaggttctgggaattaggatttggacctactttttggcaggccaccattccaccctctgtcctttacatggtccccacctctgactggccacctgtacccaagatttttaggattgtgagtagctgtagtgagaccaagcatgcatacctgtcactccctgcttccagaagccatgcagaacagatccagtgctgtgtgtgtaaaagtgctgacctccctccaagatgaacacccctgtttcctccatccttgccctcagttggctgatgttctcctgagcagtcatcctgggtgtgcctccctgaaggacacagagcaagggagaatactgcatttatccatgaagaccgagaaatgaggtcatgtctctcccactaactaaacggtgacccaggcatcagtgtctttgaaataatagtgacactgttgcacagtctagtcatccccaggtttagcctctctgctaatcccaccaggatcacattagcactgggagccctgtcacaaatc

SEQ ID NO: 32765 - DNA, 1182 bp, Mus musculus
aggaaatgccttaacaccagagctgctgggagggagagcttccctgcaagggtggacatcagtgcactccctgggcatgtcattgttcattcataaaaacagaattggctgagtgtctgtccttgtgccagggacagttctgagagatgaggacacggtagttatagggtttgggcccacagtaacaaatggagtgtctaggcacacattgcaatcatggcctttgtccatgtatcgtgcctcagttcatctcaagtaccagtagtgtgtggatcacatgtgagaaacactgtcctgtagcaacaggggactccaggagtccctagggtctgcattgacagtggcatggagataatctgggtgggtggctgcagagcactggagggttgtcgggaatgtctatcaggacctatagcatagttttattttattttatttattttttggttttgtaacatttgatgctatatatgaaggtttatggaatcatgaacattttaaaaatatttatttatttatttaatgtatatgagtgctctgtctttacacacaccagaagagggaatcagatggttgtgagccaccgtgtgggtgctgggaattgaactcagggcctctggaagagcagtcagtgctcttagtcatctctccagccctggaatcatgaaattttaatgcttgcagaagaacttcagctatccaaattttccaagttgagaaagggcctgacaaagttgaagaggtagaatgttagcacaagcacaaataaagcttgggtcacatggtttctaaattggtattcattctacactcctatgagggaatgttctagaggtgcctgaagaacagagagaatcagtcatagatactggaaatgggggatttgggagtcagaggttaaagtacttgctggacagatgaaaactggagtttaaattcccaggacccacctggatgcagggggactgtggcagcccacctgtaatctagccccagaaggcagagatggatccccagagccagctggctggccacacgagctgtgtagaggaggttttggcttgattgagatatcctgccttaaagagaatagggaaagaatcctgacctcatctcagccccctgaaggacccccccgcccccccctcattgtgttcacatgaaaagaaaggagtgagtaga

SEQ ID NO: 32766 - DNA, 1152 bp, Mus musculus
gctgtgggctgggctgtgggctgggctgtgggctgggctgggctgggctgggctgggctgggctgggctgggctgtgggctggggtgggctggactgtgggctgggctgggctgggctgggcttgaacatgttgcaggatgaggcaaagaaggaaagctctgtgagacagatgttgggtggcagatggggaaactgaggctctgagaggtggcggggtttgtcctgagtgaagccaaagctaagcttgtggtccacaccttactcgggaactcatggcagagtgtggagctaggcttcacccgggctcagaggccacactctcgggtggggtctttcccatgctgcccgtagcacagggtcacctcccactgggcacccaggaatgggccactcggtgacgctgactgacagatcctctgtccctcttctgcagtgggggagcccatcactgtccccaagctggagcacccgacccagaaagacatcgacctgtaccatgccatgtacatggaggccctggtgaagctctttgacaatcacaagaccaaatttggccttccagagactgaggtgctggaggtgaactgacccagccctcgcgtgccagctcctgggagggacgactgcagatccttttctaccgagttcttgagtgcattttgttctgtaaatttggaagcgtcatgggtgtctgtgggttatttaaaagaaattataatttgttaaaccattgcaatgttagatgttttttaagaagggaagagtcagtattttaagctcacttctagtgtgtcctgctcaaggtggaggctgatatttatgggccttggtggtttcttacccaccccttctagcgttccccagacgacagacacttggccctggctagctgggcaagggcagtccttagtgactccagggattcttgagaggcagaggccatgtcccacccgtggctgcaggtcgggttcctcgtaccaaggggaggctgagggcacagctggccccacttggggagggtagataacatctggactgcccggcttgggtctctgctcctcaccctagccctcttctccaatctgagcctaccctggcctcctgtctcctggctagggacacggctgtcccacaggtgccgtcttgggtta

SEQ ID NO: 32767 - DNA, 1162 bp, Mus musculus
gccagttggattcagagagccaaggctcccacaccgccttgggtgatcctgctcagtttatgtttctgagctggctggagttgttctatttgtggaagctgggtcagacagctcgagaatgagcccgcccctcagatgcgacgactcacttcaaatgttggtctgtgcctttgttccaaatagcactctaccctgcaacaaagccttacctgtggtaggcatgcatgcccttgtccactttccaattacacaaatactggctgcttagactcgtgtaggggacacgagtctcttgaagatcgcttttatctgctgtcagaattctatcaacttattatgaacaatctttgaacacctcgattctttttaaatcacattttctgtaaagtacatatatttgactttgtgaccatccatgcccttttgttgtattttgaaatattaagaacatgtgtctttctaaaaaacagacatttctttaatgaacaatttgaatttatgacaaatttgttgcaaaacttactttgttgctgttgttccataagaaacactaatcaattccagggaaatggactttgggtggaagtatctgtaaagaagtaatatgttctataaattaacataacatagtatagataaaaaaatgtctgggatgtatagacctatttggaacattgtttttttcccctcccctattgtctgactttcttttccttgctatgattctggagagctctttagtttaaatataccccatgtccattgtaaaggggcctggtgtcaccatagaagccaaattaggctccacatcaatggcaatttgatttatacgaccttctcttctcgccatggcggctgttccctctcctgggccttacaagtgacatccatcacatggcagcagtgtgagagaaaaggacatgtcctccatcatcgccatgcactggtctgtgatttaatgcacattctattctgtatgcagaatcgtatatgtgcaaatgcgcagtcagtgaataacatcagctaccctgggctgctctggctttgaaaaattgttcttatcagcaggtataaatggtatctgggggtatctttgccattatccataatcatgaggttgataaaattttaatgtattcttttgacatagataatactataa

SEQ ID NO: 32768 - DNA, 2476 bp, Mus musculus
tggaagtgtctgctgcagggcatcctccccttgaacagccccacagtttgcatcacgccattttggacttaggcaaatgttctttcccaagttcactggatgcttgcatgctgcccaagttcagcttgggcttcagcttttagaacttgtgaaaacgttaaaaacaaaagaacaagaaaccaaccttggccttactgtcagtgaaacggaattgtgtctgttaactagaagaaaccctctcctggaacctctgttaggagtgtgtgcctgtgttctgtgcctattggtgggctttgaatagtgtgtcaagtaataggccactggctgagaagtgacagagagtgagtatttgggatgctgtagatggtgtaggaggagctctgagcaatgggagcccgcttttctctgcccttagcatactgctgatgtgcccaacacctagttaagagagagtggtcaggtgtgagaaggcacatcgcacgcttattgtgactttttgttccttcggtgtgcaggtggagtgtgtaggcatgacggcgagggtggtgatgcaccctccagccccgaccgagctcttgctctgctccacagaaaggtcaatgtgctgagcatgtggccagtgtgtgtagcgagtcctgccaagcgcttagccagcatctttgactttcgaagcttagaaacagctcttgacgtactccgtgttgcagtgtcgcgtgtgtggggctgaagccccctagagttgtgttgtaggaattagggaatggttatgaaaggaacctgccctcctgacttatgaggaaacacaaactatccaccagaaatgtcctggtgcgatagagattgcttctgtcccggaagttctcggtgttctgggtagttggaatgatccgccccagcttgctttctcctgtggtgaatggttcagagggcagatctgatggctccttggtctcttcaggtccctgcagtttgggaaggtggagctccaaagagccaacaaagtctctccgtgcagacagggaaggcttcgtgtgcaccttgtgagcctgcttgagacatgtttgaaaatgaatgcatcagcactgggcaagcctttgtttttagcagagcagactagaaatgaagtctacagcatagcccgatgcctgcctgagtcttttctgactcagggcctggactgtgaaggagacaggctagagaagggaggagacatgatgagtctcattaccacaactcacaggtttcacaggcctgttcagaaatgcctagagctcagcactgttcctggctacctgttagccagccttactgtttaccagagactctatcaagtgctccaactgtagcggccggtgcgtgttcctctcaatccccggcgtcagtcagatctgctgttagccacactttgatttccctgtagaataaacatatgtttcatagatcaagtaagtcagagtttacagtgcacagggatccttcattcggtgttcgtgttctgcacaccttgtgccaggcttggtgagcagacaggtctctatatcagcacatccagacagagctgcatgacgaccccacatgtgccgtgactcagtggaattggtgttgtgtgcactgtagtttgccatagcttaccacaagggcccccagagccttaggggctgaattccttaccctgtcctgcctgaggctttaggtgacctggataatgttcttctcaggctgtcagggttccccccccccttttcacacacccacctaacgaacaccgtttgctcttgaatgtttcactccactcacaagaaatgccctttaatttctactgtttacaaacaaagctctccaggtcttattctgtctctcaagtgtactggacaaaactgaccgtggttcctcaagcaatgtttggtgtcacctctctgcaggtgaccaagcccgttcctcacttcgtacatttccctctgttctctgttcaccctggagcgagagagctggaacggggactttttctttaatttgtcctgcctgcaaaactcctggaagctatgcccggcttcccgttctctgccccagctcccagacagcagaagaagctttgtcacacccaggcagagaggaagtgtctacttaggattttgtggcccgggtgttgttgcataccacagattgtctatggatcatgtagtgctcccctctcttggtgctatttcattcctgatgttagtaaaagaatgacaaaaacaaaaaaaaaaattcatgtatagccaattgattgtgacgtcacgtggtctgtgcctgctcagaaagcaaatcaatgggttcccccccccaccaccactcccagttataaataaatgctaaagacaaacaccactttcttgatcgtatttccttggtgaggcccagcctgagtagtataaagacaacagcttttggcatctgagcctctctggacaagatgaactgtgccctgcagctt

SEQ ID NO: 32769 - DNA, 1099 bp, Mus musculus
gtactcgccatgtcaaccacacagcagagtcagctgcctctatgaccgccagcctcggtttggtctgcatccctttgtacttgatgtagctactacctcttctaagcagtcttcaattcagaaaatcacaagctctcagatacaaagtaatcttttgtttggtttgggtttttttgttttattttgttttgctttttgagacaaggtttctctgtgtagccctgaaactaactctgtagactaggttggcctcgaactctgagatccacctgcctttgcctctgctggaattaaaggtgtgctccaccaccgcccagctcagagtaatcccgtccccttccctgctcagagcagagacctctcatccctggcatagcaaagaggcatctccttccaccacccactctgaatttgagctggcagcagccctgttctctaatccaaactctgctgttccagctgtgtgaccttggctgagtcttagaatgtctaaaagcctcaaagttgttgctgtaatactagactgtctcaccctctaaactgatgtggtatccaaattcaggaaatgcagattggggcagccaggaatctgtttggtgctggagcttgcaggtggcagctggaaagagtgctgatagcaagggctcctgtcacaggtccctgctctcttgtgagagctggatgcaggtggaccacctctggcaatagttgaattcccagtgctttgctagagaccacttctctcccatctcctccctctcacctccttggttcacagtatcctagctgcagccactagcagccactggaggagacgccattctctctacagcaggactgagatccaggctggctaacatggctctcactgcccccgaccccctgccgccgctctcactgccctgcccctgctccagcccttcatgggctccctcctctctgagcgcctctataaatcacctgtgcagatcccagccttgcaattacgcgtccttttacacggaatctctctggtcacagagacacagaacagaccttgatgaattgctgaagattgctatcttttgctttacgggggtcgggggtggggggtggggaa

SEQ ID NO: 32770 - DNA, 2236 bp, Mus musculus
ctgagccacctgtccattcttgagcttgtgaagaaggcttcagggtggcctttgctgactcctgcccaaggtacagacctcagttatccaacggggaagaaagcctgtcccggacaccacccacgcaggaggacaggagcttcttgcagttgggagtgagagaggccaacgtcctcagacagtgaacacatactcggtgcaccaagggtggcatctagggcacgcagtgggatggctgtgggctggtcatatctgtggggacagagctcattgacacatggttttatttttccaccacagcacactgggatgagaagtttcaccacaagatggtggacaaccgtggcttcatggtgacccgctcctatactgtgggtgttacgatgatgcaccggacaggtagacgtcttgctagacggtcaaggtggggggggtctggggtgcccagatctggcttgccccttacccctcagtgtgttcagcatcctcttctcttcatccacacaggcctgtacaactactatgacgacgagaaggagaagctgcagatggtggagatgcccctggctcacaagctctccagcctcatcatcctcatgccccaccacgtggagccgctcgagcgcttggagaagctgctgaccaaggagcagctgaaggcctggatgggaaagatgcagaagaaggctgtcgccatctccctgcccaagggcgtggtggaggtgacccatgacctgcaggtgagggccggagggtagtgtctggggcaggtttcacccagtggctcagcaggtccatcctttatccatagggcatccagacagtactgggctctgctgatgctggggagaagtgggctctgcccttgggagggaggatggactgaacatagttgaacagcgactggctgttgtctctagccaggtcctagagtgggctgagccctctcaagaaaatccctcagggacatgcgtacaggccagtatggtctcaggtagttactgacgatggctttcctctcagctaactctagactgtgtcaagttggtagttaaagctaacagggataggagggctcaggtcctggtggtatacagaggaacaaaaggaacagtggtttgcagcacttccgcaccgtgcctggagcaaggtgtccagagggtgactccagggtggtgtggatggaggttgggggtaagagcccggcacgtgtgtggcctcaccaaccacctgctcccacagaaacatctggcaggactgggcctgaccgaggccatcgacaagaacaaggcagacctatcgcgcatgtctggcaagaaggacctgtacctagccagtgtgttccatgccactgccttcgagtgggacaccgagggcaacccctttgaccaagacatctacgggcgcgaggagctgcgcagccccaagctgttctatgccgaccaccccttcatcttcctggtgcgagataatcagagcggctccttgctcttcattggccgcctggtccggcccaagggagacaagatgcgagatgagttgtagagtccaagagtgggcgtggcacggcaggaagtagccaaaggttcctgagacacatgggtgctattgtggggggagggggaggcaccaaccctggatattccacgggtggggggggttggcagtgcagatcggaattcccatatgtctgagtgggtatttttagacagaatccactcctaagttaggacatggagcccagatactatgataccaaattcaggggtgtcacagccattttgttctgccctgcaagttttagatccaatctgcctcaacagtcaatcagtgttcatatttatggccaggcattctatctgttagacaatcgagttgggggtagggcagcctagctctttttgtcaccttgccccgagccctcttcagtcttcctgttcacccctcctccactccctttaaccgcaaaactaggtgctgtggccccagactacccatccttaaaatgatccttgcccagcggtgggagctgggagacagtgcatgggaggggctccctggcatgcctgccctagaattgttatgttgggcatcacagtcatgaacttttgtttttctcccttttttagttttttcaaagatggggggaagggaaatatgagcctttgttgctttcaaaacgagaacagtttgtacaagtttttttttttgaataaaacttttccaatgaaatgtt

SEQ ID NO: 32771 - DNA, 1876 bp, Mus musculus
ggtttcctggtggggtggattctggaggtggaggggcctcccatggcctgcacttacgagagttttgtgtacttctcaaaaaatgcatattcctgccaggtgtggcttgtggtattgcacacctttaatccatagctctcaagacagtgtggtggatcttctgcaaccttgtcctgacagcaaaggtccttggccaccagacaaagttgagcctgacagcctgggtttggtgtctaaaggaaggaaactgactctagttgtctcctggcctccatgcagtcacgtcatgtgcatgctgcatggtaatagtttaactagtaagagatgtaaaaacatgcctctctttgagtttggccagcccagataactggcttagagaaggacctgggcatgggggtataaaattttctagaggtgattctagtatgcaggccaaggctggaaagcatttggtcagtgaatggctgttctggtataactggttgtttcttctgtctaccattggagagttgttaatgtgaaaaccaaataggcaggttgtgtctttggtaataccagatgaatcttgtcttccaaagggcctgctatggtgtgcttcggttcattatggagagtggggccaagggctgcgaggttgtggtgtctgggaagctccgaggacagagggccaagtccatgaagtttgtggatggtctgatgattcacagtggagaccctgttaactactatgtcgacacagctgtgcgccatgtgctcctcagacagggtaagtagctgagtccctttaagaactgggtagctaggaatgcctagggcagagagtggcatttctatagacttatgttcaggaggagttgtggattcacttcaggggctgggaaaagtagcattgttgaaatggtcatatcagttgttagacatagccttctgtgcccttcagtgatgacacgatgacgagtcagaatggccacgtcttgctcttggtccctgtcagtgccatgttctgtggtgctgtacatggttcccttggcaaaagtgtcctgcgcactgattgatttagaggcatttgtctgagaagggaacagcgctcagtgcttttggatagatgctttccccgacatcctctgtggtggagaaatgccagctcactcctaaccctggcgtcttctaggtgtgctgggcatcaaagtgaagatcatgctgccctgggacccaagtggtaagattggtcccaagaagcctctgcctgatcatgtgagcatcgtggaacctaaagatgaaatcctgcccacgacccccatctccgaacagaagggtgggaagccagagccaccagccatgccccagccagtgcctacagcataacaggtatgtctgcagtgaccttcccaggtcaaactgcttttactggtctttcctctgatgtttcagtttgtgaatagggttattttagcttaatgtgggagaatacaagttgggatgtggtgtccgattgacaagtcggtcagtgggtgaatacccacttagttcgatgtctttgctcaagagtttccagctcctcttgtgggcattggtgaaggtagtatcaagcctttgtactgggttgtattaaggcaggctgagtgggagtggagtaaatgaaggcacgcaggtgcatttctcttaccattgttattttatttggtttcagggtcttggcagctgcatctggaggcatttaataaaataaagacatttaataaaatcttgaacaaagacaaggcctgactggattgtgtccagtattcaactgagttatgttgtctatggagccatgcttattctgttggtttaagctggagggcatgagcagagctgaccagagaagtcatgaagt

SEQ ID NO: 32772 - DNA, 1876 bp, Mus musculus; identical to SEQ ID NO: 32771

SEQ ID NO: 32773 - DNA, 2234 bp, Mus musculus
agttctggaccgactcgaacaccgggcgcctccagttccggactagacacctttgagcgtttcttggtctccataatagtaatcctgtggcacagttagagggcgtgtgccatcagatctagtccagtttctttagtaagtgaagtttagcagtcccttctcttagtcgcgtgatcctgcaagtggccatagttgaaagcctacttactgactgctgccgtgttcactcgggacccggagctgcagcgtccctgtggttatcatttcatgggggaaaagtgtgcaggttgccaggtttagaaatagatggtctgtcgtttgtgcttatgcacacagatgataaacctgttttgagtcaggattcctctcctatccgaggtacaacttacagtcccagctgtacatgtgctacttggagacagatttttctttgtctcttgggtgtagattatgccgtagagcccttcgatgaagaggtgatgacgagtctgagtaggaagtgttgtctttgtccaagatgcctcactatgctgcgttctgtggcacagctgaaagcactgtggtcaaaagaaacttcctaaagatgaccaagaggcatttgtctgagaagggttgctgcttttctgtagggccattgggcttgctctgactaaccctgtcttcacctcagaggtaacttgtttcctttggttcagtttgtagctgatggcatcttcaaagctgagctgaatgaatttctcactcgggagctggctgaagatggctactctggagttgaagtccgagttacaccaaccaggacagaaatcattattttagccaccaggtagaaataccattgattgtcacctgtaaatactgtgtgtactgagatgctgtgtaaacttgggccaaccaagcagtaaatctggcctcagtgggtgtaactgctttgttagaactgcatttgggaagaacttaccttccatttaacgtgtgtgctggcgttgtggtgggcggcaggtgggatcttgagtaaatggttgcgcttcccctctacaggacacagaatgttcttggggagaagggtcgtcggatcagagagttgaccgcagttgtccagaagcgctttggcttccctgaaggcagcgtagaggtgagttcctctgctttatctcccgggggttttagactgagttgggatgtggcttctgctatagaattgtacttctgaaaacctgacatggccagtgacagtcacaggtacttgatgctctgccaaaatttccttaaaagcagagcgattgccatgcatggcgggggcccatattcttgtcctggcacgcagaaggcaggatgacggcggggcagagctagtcagggctgctgtagtgagaccctgtcttaaaccacaaacagtatgatattctggtggtcgaatgtagaaataatgcatgggtgactggctatccttagtgtggttgtgaggaaccagagtagaagggcgattcagccttcatcgctgccttgtgtgggtagtcgtggtacttgagtatctaagggatattacaatggcttaattgaagatgggtgagtgacaggaatgtactttgctttctttaaagctttatgcagagaaagtggccacaagaggtctgtgtgccattgcccaggcagagtctctacgctacaaactccttggagggcttgcggttcgaaggtgagtgtcctgagacttgatggtcatgccctcctgtggattagtgtgtgctagcatttttgttagcaaataacttgattgacagaatcatctagtctctggtggtgtagcccatccccccactgaacctagttaggctaactaggctagtagtaggctggtggatgaaggacctattgttggtgacacatgcctgtatgccagcactgggaggaccagcctgggctgtgggatgagccccgaaaaaatggtcagtgctctgacgagggaatgctgtgggtatgttgagaatgaaacgagtagatagaatcataacagggaggggcatccgctttgtgaggtttagcaaggacccttgataggtgagcaggaaagcatcctgcctgttactgtacctgggaggagtatctggttgggagttgtagctttggcagtgcaggtttcaaaacaagctagaagtcatgcagctctactaactaatgcattcactgtgtggatatagagatagcagttctaaagggaaagacatttacac

SEQ ID NO: 32774 - DNA, 2234 bp, Mus musculus; identical to SEQ ID NO: 32773

SEQ ID NO: 32775 - DNA, 1110 bp, Mus musculus
caacagcaggcttttatgcctaaagagagactgatcccccttctgcagtccacacagcttctctctgctggcctgcactgccatgggcattcacttgcaggacaactcattggtgagatttgggctagcctttggcaaaaagtcctgcctgggctcacctcctagggcattctaggtgaggagctgaagctcagggcattgtcaatcatggcacaggggaaaagaatgccaactagtgttttattcagtccaagtgtggcctgggagaccccactggcctcaggttccccatgtgtgaagggctagtaccaggctctgccccaatcacagggactactgaaagggatatgagggtgaagagaggccggatgaggcagcagcctgtgtgaggggatagggtcttagcctgagttgctgacccacatagcccacaacaaatgacagtgcaggatatcctgtcttacgtgggtatctctgcgcagtgttaggtccagtcataggtgctgcggggctgcctcttccgaccggtgggagttgatgtgtgtcctgggtgtggtgtcgaggggtggctggggcgccctcaggcctgtgaccctctgtgaagtgatgatttgtgtggcacattcattcctggaccacgtccaggtcaacctgtcgtacctgtggctgcccttgtcccgtgaagtcattatagtttattcagctgcaacaggacaaatgagcaaaagaaccttgaacgagaggtcattaaaggccttttgtgatggaggacactggctgtgttttcatttcttgtctaacatgcccaccccgacaggaagagagagctgaagcgccctcctgccctgcccagctatgggttttgtgcctccgctgtgccctccctccagaagatcccctgaggatttctctgttctgtctttcaactgtctagccttgtggccttcaggggaagctgccaagcctttcatctctcaaaaactgtctggattccatgagccctgctttgcagctgagttggagcccctgccagtcactgtcccctcagcttagcctggccctgattttggctctgtccaaattccatagcctgctctgccaggtcttact

SEQ ID NO: 32776 - DNA, 1129 bp, Mus musculus
ttctgagatagaaagcaggcatttacaacttagaacacatttcttagagctgtaaaacaattaactagaggtcataaaagggaatgaaagatttattgtaggtgctaggacagaacataaaatattgactgggcttatctatatgaaacttcattgttaacttttacacaagaattatggtttttaactttcagtgaacctgcggagctagtgacagaagagaaatgtctagttagataactactcttaatggaaattcacataaacatctgttgccatcttctttttgaatttatgtttaaacttgtgaatgtttgaattagacactacgcgagcacatagaaaataaagaactaagcgtgaacagcttggagtgagttagatagtttcaatagttttccctccatttttcttttctcttggaaataaggattagaacccctttttaaagtgtctcctttctttttcttccaaaaagtgactttccctagctgacaaggagttaaaccctcagctttaggtgctcagcctgtggagaaaagaacaaggacctcttttaagtgacaggtgtcaacttgccaagagacctgcaacttttagcctcaagagtaacttaaagtcaaaattggtaaatgttattatagaaagcacacaatctctcacaagaccaattcttgtcccccaccccgacaccccacccttccatccccaaccccaccccatcacaccaccacaccccatcaccacaccgatgctctttgctctctatcctcagctacctcccaaagagaaccagagctcagagctgatctccatccacctaggttgggcctggtcttacagtgtaagatgtcccaagcctaaagccaagctgtgacatgtggggttctcattttaccagtatttcccttttgtccctggttggattctccatgactgctactcctccatgactccaagggagatgctgagctcataatgttctgagtgtgtcttacctgactctgtgatgccagacacatcactgtattcataaacactgccatcacttagagcaatagttctcaacgtgtgggttatgactgctttcacagaggtcacctaagaccatcagaaaataaaattcata

SEQ ID NO: 32777 - DNA, 1203 bp, Mus musculus
tcaattggcaaaggtgctcccgctactcagaagtgccctctgctggacagtcctctggaggtggagaaaggagctgaaacaccatcagcaacatggctcttgtactcacatccaactagcaagaggaagaggattaacctaggcatctactacaaccggaaccccttggaggtgaactgctggtcccgcccgtggatcttgaaccgtgggcccagtggctactctgatctggctgttgtggaagaacaggacttggtggcgtgtttgtttgagtgtggggagaagaatgagtatgagcggattgacttctgtctgttttcagaccatgaggtcctgagctgtgaagactgtaccagccctagtagcgactaaagccaaatcaagacggatgagtgaggcccagcttcccacagaaaggaatggcagctacagccagggtaacagaggtctctgatgtctagagaaaactctaaaaactaataatctgctccttgaattttttcacttttcccttcaatgagcatggtgaaaattgtgccatatcttacataacgaggctcttgaactgggagtttgaatctcttctcttcccattaaaaggagaggccatgtgctcgcttcgcgttcgacaaagcctggattctgatcttgagtggaagccacaggcttgtcttttccaatggttcactgctcacctgagtattaggtgatgtgtaggtgccttggccagaagaaagatctgtgttgttgtatttttttaaatttatttatttactatatgtaagtacactgcagctgtcttcagacacaccagaagagggcgtcagatctcattagagatggttgtgagccaccatgtggttgctgggatttgaactcaggaccttcagaagagcagtcagtgctcttaactactgagccatctctcaagccccgcattgctgtatttttaataagaaaaatgcccttatccttccaataatgcctggagctgtacaaattctctgtcttagaagacttgagaaagcagaactgtaaggtcagatgctttctccagccttgatgctgtgttccaccttcccttcctcatccagaaaacagttactagggagaaaatgagaaacccatgccagctgcccttgatgatggttgataacggtgcttattgcttttgatgtcattacctctgttagagatgaatca

SEQ ID NO: 32778 - DNA, 1705 bp, Mus musculus
tactgcttgagtccgtttgttaaagttagtactcaaaatggtgcatgtattgggcatttcatatgtgtgctctcattggcccttcaccctcagctccctgcgtccctgctgctgcttccctccctctcctcagtacccctgtcctactatcatgtgttccattattgtctccaaccctaagagcgcctcagtttcccagtcggtttggtttttgatttgttctctttgtcctgatgcttaggtttgatgacaaatacaccctgaagttgaccttcatcagtgggaggacaaagcagcagcgggaagccgagttcaccaagtccattgctaagttctttgaccacagcgggacattggtcatggatgcatatgaacctgaaatatccaggctccatgacagtctcgccacagaaagaaaaataaaatagccacttgtaaaagctctccttctgctggatcatacgactcactggtgggtaggggaggagacagaaagcttaagcttggtcaagtaagaaatgttaaagatgcccctgtctaatccaccctggatgaatagagttttctagttcagatatgcagttgtccctttgatggctgtagcctccctggtctgctgagtggttttctgttgctttccttaagcgtttttgtaagagctaagcatatttttcctttgtgcttaatagtactttatgcagtctagctttgtgccatgcagcgtttgaatgctcagttcttaagaactactaaccttgctggggcacagtagtgttcacccagaatcccagcacttcccaggctgaggaagggggaatgatgtgaggccatcctgggctgtagagccaggccctggcttggggagtgggcattgttaacttgttgctgactttgtgttgacccctgcatcagcaactatttccttaaatccaggatacaacttgttaagtgtgacagctttcctttacacaccatttttgtgggtgtatatatatatttgacttggggagaattattttttacaaaaatacaaaatagctttttaatttgtttaaaatagacctgcctgttactttttgtgctcttaaccaattaaagaagccggtggcattttttagttttatattctctgttttccactcgtatgttcctgttgatttgtgccctttattaactgccattttctaaaatttttttcaataaatgaaagaagatgtgaaaatgtggagtcttgaaagaaggaacagcacacacagcacgtgctctacttgggtggagtcccctctaggctggctcactgtttgtgggcccttgagaattcggagccaggggcttagttctagtgatagcagtgacactgggcacatcacatgcattggctcgctgaagctcacccacaacagtcctaaggcaggcactgttgtcctcacacaggaggaagcttaggcatgaaagttgacaggccaccagatgttatgttccttcagagacaaatttctcaacttggtcagagaactgggcagtttgaggagtctaattctaagtctagtaccccaaattatattccctatatgaaagcatccagagagcatccagaatgttgtcctgtctagcactacacagtgagaccacactgccagatgttgaaggcttggattctgtaagcctataagcctgcctataatccttcgctaagtcagttcct

SEQ ID NO: 32779 - DNA, 1133 bp, Mus musculus
ctctccatggaaaatgtcttttatggacactcatgtgaataggagatagtggcttcttttactttgcataatgtttttctgtttctacttttaaatcctttaaccgtttatctggggtttgagactctcatgtaagtgtatataatatttgttgctgctctccacccctgctccttccccagcatctcccagacacctctgcatagtcccctctcaacttcatattctctgcatagcccactgagtccagccagtgctgcctgctgcctgggctacccactagagcttgggcagccaaggaggccacagccctgaacacagcaaactctgcaccagcagccatcactctcagctagcagtgggcttcatgagtgctccatgtgctgccatattgactggcttgatcatgcacgggctgtgtagaggcagctgcagatgctgtaagtccgtgagtccagaagatactatttcccaacaaagtctataaggttttcagcgttcactctgttgtagcatatgtcagtactttgatgcttactgtgactgagagatatagtccattgcacagatctactgtattctcttaacctcttttcagttggcggacctttggattatttctactttttggattttatgaataatagggcctacatattcatatggatctgttttcatttctcttggtaaggtacctagaagacgaattcctgggtcctgtggttactttaattggttgaattgacagtctgttttccattccactggaagtgtgtgaaagtctgcttttccacactccttgccagtgtttaccagctgccatactgttggtggagaggcatgagttgcttgctctctcccctctccgtggtgtcccacagttgccaggccatgtgctgtgaagtggcagtggacatttccgactgtcggctgccacgctcagactgtgcccaggctctcactcaggcgaggagcctgagttgctcttctgcagtctaaacctgcccagctgagtgtgtcagaaagcttttgtattggagctgaagaggtggctcatggttaagagaactggctcttcttccagaggacctacctgtgtttggttctcagcattcacacggcggctcacagtc

SEQ ID NO: 32780 - DNA, 2320 bp, Mus musculus
atgttcctgttcaggagatctggctcagcagatcactcacattttctataccttatcagtatttctgagtttgattaactctgctttttcctaagtaattttcccaaggaagaatggattttccctgcagtgattatagactagtctcccctgttcaaaggctgcatttagctcaaatcccaagaaaggagtcaagtctggatcgccctgacaaagcctgtccttcacttgagtgacctcctagtgcatcccaagctgacagtggcagtgactgggctttctttctagcttgtcattgaagcagagagccagtagggatagctagctagcccatcattgggttaaatttggaccagcatcaacccctacctttaaatgaagacccacagctctggttcccactgtagtgctccagggcccaaataattgtgaaagttatgtggtttgtgaaggggacatccaaatgacaggttttatgatgtttgtttcttctgttttcttcagttaagaaatacctgtatctcctgaatacacccacactatataaagtacttagtagggggtaccccgtagtgtgatttaagtcattggtgagattttggttggagtagctgtggttttaattaacagccttggcggtttctttcactcaaactccatagggtcctaacccttccttagccagccctttcctcaccagccgtacagtcctctttagactgagcccttaggatggatggagctggagttcttagaacgcagcaggatttgaggatgaggctgctgcacagaattttttttttttttggtggggggtgggcaggggcagagatgacagagatgcacatttcccagattgttatccatggtagcattctgaggattgttctgtggaagagacttggaggtacacagaggttaccaatttttagtcatacaggatggaggaaaaagtgccatgtccccatgagtagacagctttgtgtattggcaggattttttctgagggggaaaatgcactcttgtgtttcctaagtttgttgccaggagtgtgggaacttacaccacacgagagctgaccctagactctgaggtccctcactccctcactcttcggagtcttgggtctaggaggagttagacaaggccatgctaaggccagacttgctcatgcccttcccagtgctgcgtttgaggcacagacagttcagccttcggatgtcaagctgggccgggagcagcttcaacgtggttccagatacctgcagctgcagccagggtctctctagctgctacctgccctccaaaccgagcctcagtggagcccagcagatcccagtttgctcaggcataaccaccagcaaagcaagcagacagactatgcaagacgggaaataactagctgaaatgccaactatgtttgtttttttttctacctgataacactgtttacttataactgtataaatatagttgtcctaagagccaggagggaaacctttccacctagaaatagaatggttgtctgttggctttaggccacctgttacagctccttgtggtctgatgattgtggtttattcaacctgtttacattagaattggagaaggggccctggatcttggtgggctgccactgctgtctgtatccccttgactcctaaagagccttttgatagagggacttgggacaaggtatgccctgtcagggatgcttttaccacaaaggaatggtatggaatcaagtgggatgattgatggatgattaacacagtaccaaagtgcattcttcaatgtgtatgtgcctgttccaggcaaggcccaagttgaaaatgcagtaaagcagactcatgaaagcaaacagactatttctgatcagtctggagagctgcgtctcagtgtggcctaagctgaaggcagcaggtgtttgggtgcgctcggggctggggggtgcctgggttagtgctctcggggctgggttagaatgcctcactttggcattcgccatgagcaggaagcactggagtggggtcttcacagggaacaatgtgccttttgacgtgttctaatggacattacttactgtctcctgatctcctgtgaccactcctgttcctctgaaggtaccaagagtaaagaatgacttggggacgccattatccttgcaccttatggccactcttagcaatctggttttttaaaaatatccttctttggaaccattgctagaaagtcataaaaaaaacacctttgacatagtttcacattaaaagagaacaaatgtttacctgttccttttaaactcagaaaatgaacctgg

SEQ ID NO: 32781 - DNA, 1417 bp, Mus musculus
gtctaaactatgacatttgattgaagcagtgtggctgacgctggtcttcctgcgacctgattgctaagtgctgtcagctggatgtccaggttctcttagctgccaggtggcctagcccagactgaccactggctctcaggccacaagtcccatggattctctacaatcacagggtgtccaaaggaagtacagcctagggcacgccagggccatgactgaacatgacagtgcaaagcccacctagaagcacttcaccttgccgggatggaaagcaggactggagtgacttccctgcctgcttactgctcctcttctcccgggagccctcgcctggggccgaactgggaggtttccttactacttcccacatggcaatggcaaaacttccctaaagtcaggcaaaggacaaagctgaaactccatactgtggaaacaaggtatctagctggatgcagctggtcaattcagtcccatggacctttggggtttatttttcttagcagcttgacaccgtgtgtcttttgcatccctggtggtgcttggtgcttctgcccttctgggcttattgagaataggattatgatacggttttagggactctcaggtgggctggcctttcctgtgtgtgtgagctgttacatagtcatgtgactgtcattttcacaaaccttccagagcttttacacttttgttccctttaaaaggtcccagcaagatactccatagtcatctgatcagaatgcttctgaaacgttcgaagctagaagtagctggagcttagactcacttttctgtgccaagggagatgtcagtctctgggaattctagaagagagaacttcagatttggagttagacagaaactggttgaagcttctgaaggtgggaagaaggatgtggactcccaagcactatgtcccttgaagcagacagaacttaatttctctgcagctcatagttgactgttcgcaggaatgtttgatgtgtaaggtggccattagcaaggtggcttcagaggctgctctggcaggaactgtgtgagtctggagtgtgtgtgtgtttttaaaacatgaaatagtctcattactttatactcacacggctttactccccatcctaggcaacttagggcttttcagggctgcgggaaggcaggccagcaccccagggaggagagctggccccggctgcggacaccggaaaatcccattagagaaaacttagaaatgtctaccaagtcatgtatttcctttatgagcttagtaattattattggaaggctaggcttactgggtagctttaaagacacttatttttccacttgccacccttttatatgtcactagtgcttagaaaaacactttcagttggaattaatttttggttttggtaagaagataaaatattttaatagatga

SEQ ID NO: 32782 - DNA, 1103 bp, Mus musculus
aaaaaggataaggaaggacacttcatactagtgaaaggaaaaatctacgaagatgaactctcaatcagtttggtggttcctcagaaaattggacatagtactacctgaggactcagctataccactcttgggcatatacccagaagatgctccaacatgtagtaaggatacatgctccactatgttcataatagccttatttataatagccaggagctggaaagaacccatatgtcctttaacagaggaatggatacagaaaatgtggtacatttacacaatggagtactactcagctatcaaaaatgatgaatttatgaaattcacaggcaaatggatagaactagaaaatatcatcctgaatgaggtacctcaattgcaaaaaaacacatatggcatgcactcactgataagtggatattagcacaaaagctccaaataaccaagatatgattcacagaccacatgaagttcaagaaggaagaccaaagtgtgggtgctttggtccttcttagaaggagaacaaaatattcacaggagcaaaaatggagataaagtgtagagcagagaataaaggaaaggccacccagagactgccctacctggggattcatcccatatacagttaccaaacccagacactattgtggatgccaagaagtacatgctgaaaggagcctgatatggctgtctcttgagaggccctgccagagccttacaaatacagagatgcatgctctcagccaaccattggactgtgctttgggtcccccatagaggagttagagaaaagactgaaggagttgaagggggttacaaccccataggaagaacaacaatatcaaccaaccagaccctcccccaccccaccccccagagctcccagggactaagccatcaacaaaggagtacacatagctccagctgcatatgtagcagaggatggccttgtcatgcatcaatgggaggagaggtccttggtagattcccagtgtagaggaattgaggacagagaggtgggagtggttgggtgggtgaggaataccctcatagaagcaggaggagggagaatgggataggggttttccgggatggggggaaaa

SEQ ID NO: 32783 - DNA, 1208 bp, Mus musculus
ccagctctacatgctttgcggctgcttctgcccctggccccatacagttatatgtaacttcagcggtaagaacttttaggtttaagttttatttttcctatgtgagtaaatctagctatatagctagctcttatggttttatgttgcttaagaagacaccacagtttgatcctgtgctgggaagtaaatgtttccctcgagcagtggttttcaacctgtggttcccatcacagtttggggcttgaatgactcttctacaggggtcacatagcagatagcctgcatatcagatttacattaccattcataagaatagcaaatttacagttacgaagtagcaatgaaataatgttatgactgggggtcaccacaacatgaggaactgcactaaagggtcgcaacagtaggaaagctgagcaccactgagctagggccaagtaaaagcagattgacttagcaatcagggtggctgcgccgaataagagagtcaccctggagactgccgcttgatctggtctgtaaagatgtttttaagtctaggattgcctaaaactctacagtctctgtgtggtttgtatttttcagctgagaggggagaagttacaggaagaaaaagattgtgatgatcagatacacaagctactgcaggaggattccgaaatggggaagaggaaagctgatgagcagaaaaaaagggatgaagcagtggtgctgaaaacaagtctggagcaggtcagtgggtcacgcatgtctggtggacattgtctggagcaggtcagtgggtcacgcatgtctggtggacattgtctggagcaggtcagtgggtcacgcatgtctggtggacattgtctggagcaggtcagtgggtcacgcatgtctggtggacattgtctggagcaggtcagtgggtcacacatgtctggtggacattgtctggagcaggtcagtgggtcacgcatgtctggtggacattgtctggagcaggtcagtgggtcacgcatgtctggtggacatggtctggagcaggtcagtgggtcatgcatgtctggtggacattgtctggagcaggtcagtgggtcacgcatgtctggtgggcattgtctggagcaggtcagtgggtcacgtctggtggacatctgcctcagagagccctgccttgcagaccatggcaccaggaatactcattgattgtgcagcctaagagcagt

SEQ ID NO: 32784 - DNA, 1198 bp, Mus musculus
agcaatgttaaattaaaccacagttaaacttttgctaaaagtttggtagaaaggatatagtaaattcaaagatgtgtccaaagaagttattagagttgcatattgttgttttgcttttgaaatacaagtcttcagcctcccaagaaggtgaaattatagatatgtggcactgtgcccaactagttgtggctttgggtcataaatctaggtttattttaaaagagcagtaaaaaaaatactgagctgtcagttttggtgtcaagaaaggattgcagaagttaaggttactagcgctggggtaaagctgaagagctagggcgtggtggtctaaatagggagaggcaggcttagagggaaagtgattccagaaccctttctctcctctcccctcctctcctactctctcctccctcctcttctttctccctccccttccttctgcgcccttcccttcccttactccctctcctcccctgtgtatgtgtgttatataaaaagctatgtatttgtgcctgtgtgtgggtgcgtgcgtgtgaatgtgggtgcttcagagaccagacttgagaggcatcctagctcctgggacggtgttaccagcagctgtgagcccttggcatgcatgggttctgggagctgaactgggtcttcttcaagaacaagtgctcttaactgttgagctaactccagtctctgaagctatattttaaaatcctctcattattgttctgctttgaactataaaatagaacctattttactgaaacttgaacatttcacttaatctacttggctatatacacattttaccttgatttgaactagcctttctcttatgtattttgtttacttatgttatagaacacgtgtagcaacctagagagtgtaaaacatgttccgtcacctcacagaggaagcaggttgttggcctatttttaaatgattttcctatagcatttataagtataggtgctcaccaaatgtttattctgttgttggttatataatcctaaagcattttctttatgaacaatgatttatataacagtgcccttggttcatggtaaggctggatgcatgtttagattcctgatgctcttatgtctatttatctgctgtttcttctgacatgtgctcctgctctctctagagacagaaataggtgcagggccttatgtgtttaagagcaggcaaatgcatg

SEQ ID NO: 32785 - DNA, 1205 bp, Mus musculus
cttaaatgcaattttctttgtgtttttttggcatgttcatcaatgaaccctgtcctgaccactctgaataaaacagacttttctttccaccctacattaatttccttctgatagcatttactaccactgctcagaatatattctcacttgtttccttcttttctgctcttcctcacgattgtaattccatggcacaaggattgtatttgtttatattctagagcttaatacagtcctgatttataacctttagtaagtattgattaaatgagtattcaaattaaggtaaccataagcaggcatgaaagcacatgcctttaattctagctcttgggaggcagaggcaggtagatctctgtgtgtttaaagtcaccctggtctacaatagtgaattccagtatatccagggctacatgatgaaacactgtttaaaaaaaaaaaaaaagataaccataattttttatgcaggttgtaacatggctgtcagcggttggatactgtgaagatcccttcctacaaaactgaattaaaaagtattttccctttcttccagagtttatattcagaacgccaatcaagttaagcaagccgggagaactcagtgaggagtatggatgcctgagaaaggtacctacatgttagcatggcgcttagtttcttacagttaattgaaatattggcattcaagaatgcttatctttaattctttgggtctttaaaaatgtatgactcatagcctgtctttcttcatactattttataacagtctagatagatttaaagctacactagaagtaaatgtagctaagaacctttgagctgccttgtcgcaggtgaagtgtggcttttaggggctatcacacagtcaagaaagctgtgttccatactcagacagcccttgctaataattgcttgtgtaactttccctcccagacattccagttactgtagctgctgttatttgtatgctttttactttagtaagtactccaggagcattgtatggaggacataggatattttgaataatctcttaattataaaatatttactactgaaaaaccttttaagtatgttatcataatcttttttgtttgtttgttttattcaattattggagattgaacctcgggcatggtggctatactctgccaatgaggtccagctccagcctataactgttactttttttttctctaatttca

SEQ ID NO: 32786 - DNA, 1099 bp, Mus musculus
ttccccacaggcttgctttctagctggcagggaaatgatccaggtgagagaagactgaaactcagttcagcctgatttgtactgggccaaacttggagagtctgacaccacttggttgattttagccatatttaattaagcacagcatgattttggaaacagttttctgataacaactcagtcccatgagtttaatagagcttaagacatgtttacattgatattctttataaagtacgtctggcttctctcacatagatgagtactgttgacttagatagtgcccgagatttagggtaaagagtgacagaggtaaacataatgaacgcctgtgggcatcaggattgcctggccctaagataacttagaagtcacttaggccactgtaaggcacaagtgacatcactcaaataaggacagagtgtgtctcagcaagggatgtggacagagtgtgtctcagcagaggagggatgtggacagagtgtgtctcagcagaggagggatgtggacagagtgtgtctcagcagaggagggatgtggacagagtgtgtctcagcacaggagggatgtggacagagtgtgtctcagcacaggagggatgtggacagagtgtgtctcagcacaggagggatgtggacagagtgtgtctcagcacaggagggatgtggacagagtgtgtctcagcacaggagggatgtggacagagtgtgtctcagcagagggatgtggacagagtgtgtctcagcagagggatgtggacagagtagagtgtgtctcagcagaggagggatgtggacagtgtgtctcagcagagggatgtggatcacagatgcactggctagttttctgtcagctttacacagctggagttatcacagagaaaggagcttcaggtgaggaaatgcctccatgagatccaactgtaaggcattttctcagtgatcaagtggggaggtctccttgtgggtggtgccatccctgggctggtagtcttgggttctataagaaagcaagctgagcaagccaggggaagcaaaccagtaaggaacattcctccatggcctctgcatcagctcctgcttcctgacctgcttgagtt

SEQ ID NO: 32787 - DNA, 2457 bp, Mus musculus
gagtttagaggtaggtgttttcgatacagttcatatgcagggctctggaagttagctgatatagactaggacccaagaaacagatgtgggcaattagatgataaaggcccatctaatgacatgggacactggaggagtgggggtttccagccccacctagaggccatgtgactgtatgatattttctggctgagtctagatgtgcttttccagtaagaaagacgcagcacaacttaccgtttggtagatgactcaagccacccgtgttctccttttttcctattccagtgactgagaaagtctatgagagtgagtcctgcacagacagtgaggaggagcttaagatgaagccggcctcagcacacaaaccccctgctgccgctgtgaaaagggagcccagagaagaacggaagggccccaagaaaggggctgctgctctgggcaaagccaacagacaagtgtccattactggcttcttccagaaaaagtaaatgctacctctgaaaggactcgggctggtcaagggagaagaccaagaagtatagactgtcacttactgtgtaagtttgcctcgctccttgcctcgcctggatcagatgctgctctgccatcacgggacacgtgtaccacttctgttttcttcacccaaaaggaagtcacctggaaacggggcaaaagaacattttaaaagctgttacattgtaataagtttataaatataaagcacaatctttgccctgcctaggagaattcattcaagaatgacctgctgggccacacttgccctgcgcatgtgcctctcctggtctctgtgttctgtgagcgggaggcagtgtttttatttgatgagttctactggatgtgttcaccgcgtctccactttcctctccacactaccatacttctgtcccccgaccccacaatctgttttctgtaaatcttttaagtcttagtcagatgagaagctaaaactaaaatcttctgtaattcccgatctccgttgatgtagtgagtgactcagctccaggctaggccagtgtgcatcgtccagtcctttcatctcatccgctccctctcacttccctcagactgagatgtgctgatgaatccagcctcaccagaaatgacttaaagtcacatggtggccaatgacagagctggcatgttgctagcacagggtatgcatatactcatgtgtggtttctttcttccagatttcctatacttattacccagagagtggaacctgtacagcgagatgaaagattaaaataagaatgctttctatgcaccagataacttacctcaaggaaatacagagtccagaaatgtcagtttcctgtcctgggaaggaagggagaacttagcacacatttctacacagatgttgctcctctgttttgtcaagttcttcatttgtccagcagcacaggctccccaggaggggacagggggctgacttttataactttcagtcaccttccattctggctgggcaggaggtgagccctgtccgtgttgtgtggcagtggctttgcacactgagctgtagtgagggaacccagactccactgctggtgtgaacccaggggagatgagggatgtctgctccaaccctccgctgagggctggcttgtgtcatgtaatcagttgcctactgttggaggttggggttggggctgacttgggatttacacatctgctttagcaaccaagcctgggctacctggagaccagcagcttgggagatgagtcctggtctcctgtcgagaactggagggcagatgcttgtccatcaagctgagtaaaggttggtgtactccaaaactgttttttctaacgtggaaaagagtggaatgcctggacttaagcttacaggaaagctctggagaattccctattttcagtggttatttttgtcattgcctctagtgatttttgtaaatgggaatggaaaagtacaaggcaaccatccagtctttaaaaaatttgattatggtgggatttctaataaaaccaaatttgaattggagctctggtgcgagttggagttgtatctttcaagggagaatgcaaacctgatttctgtgtgcaacgtgtatgccacctggattctgggctgcctgcaaagctaagcagacgttgagtggtggcctttctctccaatctatgcagtgctcagccaggttaccgatgagttaaattcaagaagctgttttgaagcagagctttaaactgaatgtctgatgggtctgtcacttgacagcccggcggcaggagtacagttatccaaatgctgaccaggaacaggctggttttcagttatgttgttaaaagcacatacccacgatctgaaatgtttgctatcttcatcttttcagtcctgtgggaaatcttagctttagccaaccttacttttcagttcattaggaggaaaatctagccctgatcttgcat

SEQ ID NO: 32788 - DNA, 1148 bp, Mus musculus
taggtcctcattactgtttattgacatcatggttatttaaagattttttagcaacaaaatacaactttaattccgttatctgaaaaatagaagctatgtatagctacatagctttttaagtctttttccaagtttataacaccatgtaatttaattaataaattagtttaattatctagctaataggtaactaaataatctataactaaatatagtagataagtagtagagacgtgaattaaaaatagaccttaaatgtctgtcgccataatcatttaacttttttccatacaggtttattgtgtttaatgtatcatgattcttcagttttatttttctcaaacttaatagctttttaagaaatagacttaagttagtattgtagctgagatttgtgagtttaggtactactctcatttctgtgcagtttaacattaggaagtatattcagtcagctcatagttactggtggatcatttgtatatttatgttagctcataaatggaaaaggatgctgtttcactttatacctggagttgaattgtttttacacattattaaccttctcggtgcagttgttttatacttagaaccagaccaaatgttcaaccatttaaatcctgcctaactagctcagtgctcttgggtccttctgtgaatctttttcttcatctgtgtgatagttataataatgctatcagcattattaataacaatgaatgcagcagtgaacattctggtgttattaattgtgtaaagtgaaagtattgcttcagcacaaaaacccatgggtcagaagcatacgttgtataaactttgatgttttgctacagttactctgaaaagaccatcccaatttacagtctcactaacttgaagtgagtacttatcctctgtgcatagagagaggccattcggcttttggtctaatctcctgatgttaacagtttccaagtcattttgcttctttcaaatctgattatatctttaactttgggatagttcattggtggcttagatattcttttatttagatttttctcctaatagctattcatatttttattcagagtgtatagatgttagtgtatgccatttacaaaacagaaaatgcttgaatctaggtcttacacatacaaacccttcag

SEQ ID NO: 32789 - DNA, 1096 bp, Mus musculus
tttaataacagctcaagataggcatgccagcctgtgggtctcgaccttggaatgataactgcattgtttatctcatccctcttttcagcaatagcatgggaatatattctctttgagcaaataaatcaaaataagtaatttctggagttctgaggaaaagaattaggctggaacatagctcagtggtaaagcacgtacctagcatgcagatgaagcaaagcttacatttgatccctggcaatacaaaaagagagaaagttattattgatgaagcgaagtcaaatcataaagtggtaataaccaacaaacaatatataaaggccagtaatgatggtataaaaatgctggagacgtgcaaacatgcaccgtaatggtgggtaaactgtatgcaaggctgtttacttgtgtttgttaggatgctcagacagcaagcctgtattgttttcctttagtggtggtcactgaaaagaagcccacttctaggaggtgaggttcaattgaactgtgggctcaattcctagtggggtgttgtttcagaatcacgtgagaatgagagaagataaagaacaaaattaaaagaaacaaaaccaagattggaaagtataacctctaagaaaaagttcaaggaattaggattgttggactctgaaacaaaaagctattgagttcatttactaaaccataaattactcattgggatttttgctaaaggtatcaaagtaagaagcagtagtggcaccctgattatctctagtgaagacaccacagggaataaggttgcaaaaaaaaaaaaaaaaaaaaaaactaaaaatggccgattctaaaaacacaaaaagaagacctagaagggaactagttgaaaagtgagacaaatgggtaggagagggctaagagaaggatgatggggttactgtgatcataatacattctatacacatgtgtaatggtcagaaatgaatgaatggacaacatgaaatgtttaagaggttagaatttcctgggtggaagtgatcatgaaacctatttaaaaccttatttttgatggaatgatatttgaaatattaagggatataccaaatggcagtttaaagattcc

SEQ ID NO: 32790 - DNA, 1176 bp, Mus musculus
gaacacactggcgttcatctgggagaatgggcgggcagctttataagatagttaagatttattgcaaatataaagtatcagcatttggatatagtaacttaagagagtccaagagattggatactttgtgatgtctgcatgtagtaaatagaccccaccccccattgcttttggaattgatgcaacagagacgcaagtgggagtctcctgcggcttctgctgctgttctcagacttcccactgatatttgtaaacttgaaaaatacaaattccacttggatacatttaatttcccacctttcctgctctacctccctcctccctgtgcatcctctaccttctgtactgtgaaatgctactaccctgttacctcactgatacgagtcttaactgttcattcagatggctttaaacttagtagtgaattgtttgtttatagactgtcattttcattgttgtgagaatatttgagatgcactatatgaagtaacttcagtgtctttcaaagcccatttctggttgctggacaccactagatggcgacactgtgggcttttacaatgatttttttttttttttcctgaatttgttctagaaactgatgaggaaacagatataccaaccaaagtaatgagctgaccaaggattttgttgggggttctctgtgctctgggaaataagagtacaaaaatttgaggaaatttttttttcacactgtccctcaaagaattttaccataagctgaaaggagttgaagagagctggttgtgataactcatatgtataatctcagccctggagaggcaggagaattggctgtgagttaaaggtcagtttaggctacatggagagatctagaccaataagatagatagatagatagatagatagatagatagagcaagcaagcttaaaatagaagagaatggcacattgtctgcctctcacaaagcatttgtttagtaccaggtagaaacaaaatcagtattatttttaactattcaaaaaatgagaacctgtacattaattaagaggccaagacaaggacaaagtgaccagagtttgctttctaaattttctatcaacagaaccctaaagtagaagaatgtgaacaggatgaggaacgggccttgagagcaaaacccaaagaagccgcacagggacatgagagcccat

SEQ ID NO: 32791 - DNA, 1449 bp, Mus musculus
gcccttgtccaacagtggcccgtgcagtctggggtccacagctcttcctctccttcctgtgctccctgccttgcctaggatgaagcctccagcgctgctccctggccctgttcctggcatatggcaatgtaccccaggctcagggatctcccttccttgaggatgttcttggcatggtcctgccctacctcatgggatgggcaatgcacacactggcccttatttttccctttcaaataaaacaccagtcaggtacctttatcccagtcttaactgtcccaaatctggaaggtccagagtaagcaggattcagggagagggagtggatagcaagtatcccaagaaaccaacctgtaagtcaggtccagccagtccaagcacatggcttcccatctgggtgagcccactgtcccactcccacatgtctgggcacctgccctgggctgaggccaggctgctccaagggccgcatgagccctaatctgccacagagcaacccaggttaaacacagcccatgcacaaagccacaggctaaatcctgtggaattgtttttaatgactgaatttaaccattttcatagttggttcctggaggtgtgccaagtgcccgcttgcctcttctagacccacagcttcttgatccacttgtggtttccatgtcactaatgtagaaacatcatggactagcatccccagtctttgccctcatccagctgtcgcagcgcagcactggggcctccccctgctgcccaggggggggggggtgggcagcctcctgaaacccatctttctgtgactgtcttaggtgacgtgtagccctcttccgttttttcacccaacaacttcctctgtcctgctgcacggtccagagtctgggaccgactttgtttctttgttatttatgatcttgtttaaagaaaataaatatctcccaacctttatttgtctgaggagctgtccttactttgctgatctggctaggaacagtttattcgatttagttgctgcaagaccccagaagcccctttctccatagtctgtcagtgtctgtagccactggctagtaccccatactcctgtaagtacatcatcacctgtgttcctataaacatccctagtgaagccctgggagagatggatagacatagtgctgtgttacgaagaggattatcagggaggggagagaaagaagtctttctccacagcctatcagtatcttcctcagatctgatcctgagaagggcagatgtctttactacagccgggaaacttgagtcctgtcccatttcttcagctggccaaggggacagtctgcccctgtgttttcctttgctgatggcttctctgccaacactcaactaacaactcaagtcatcctctgagctcgagttgtatgtgcccatctgtcccacagctctctcctagggagccagagccactttattttt

SEQ ID NO: 32792 - DNA, 1193 bp, Mus musculus
agatatttcattttggatgttttagattatgtctatctctctctttgtcagacatactaccttgcacatgattatgtttcagaaatattcagaagatatttctatttttggatagttttattatttggcaatttcaaacatgaatacaatgctggattcctttcaactatgtatatattttgggaagcttatacagtagtaggtttgcatatggtttttcaaatggcctttagtgttagttgtcacattctctcctttacccttctttcccatccccccctccctattttatcttccagcttttttctttgtctctctccttccttgggtgttcctctgctccccccccccccccagtccatgagtattacttaacctctgcagttatgtggattgtagcacatatattggaaattcatatccacacataaaagaaaatatacaatatttgtcttttgggctatggtaaccttacagtgaccccccccccagttctatccatttacctgtgaatttcttttacttactcattcatttgttcattaattcattgattttgttgaggtagggtttctctgtgtagcactgactatcctggaaaagatctgctggcctcggccgcccaaatgctagaattaaaagtgtatgctaccactgcctagctacctgtgaattttataatttaatttttcttaatagctgaataatattccattgtgcatatataccccaatgtcatccattcatctgttgatggatatctaaggtgcctccaagttttgactattatgaatgaatatagcagcaatgaacatggttgagcaagtgtctctgcagtagagtgtagagtcctttagacatatgctcaagagtgctatagctgaatcttgaggtaggttgatttttagcttcttgaaaaactgccacactggctactacaggggctctaccagtttgcactctcagcatcaatgagtgagtgtccccttctcctcatcctcatcaatatgtgctgtcatttactttattattgttttgtttgttttttcgagacagggtttctcgaaacccttttatagctggctgtcctggagcttgttctgtagatcaggctgtcatttattttattgatcttgatcagtctgactggtataaggtaaaatctcaaagtagttttaatttatacttcctaa

SEQ ID NO: 32793 - DNA, 1123 bp, Mus musculus
ggtccgtcccacgatacgtgcagtacaaccggtcacagctctctcctctaacgacgcccagtcgcctttggacagcaaccagccaccggcagcgccgcctaccgcccactggctcagtaagccccgccccctcgccgcagcgcttccaccggaagtgcgcaacagccttcgcacaaaggaaactgggtaacggagtctgcggatctctcagactcctatcagagaactcgacaaccctagcaggaagagacctcttgaaggcaatgcatgctggacaatgaagtcctcaaatagtgtatcaatttgcgcttgcgcagatgcaggtgccctggtccaacttggccaaggtagggaagcaaagcatcatgggtgttgtagtccatttgcaggggctctaattggcgccttcttttggcaccgctttccgggaactgttggtgaaagagtgtttcttcctgcgtcccaggcttcccagcggcgcccgttgccggggaacgcaggcgccgtgggaagggatggcgggagcgtacagcttaggagctggcacctgcgttgaatttgtgacgaagggcccaggctcgggatgaaacaacggaaaggccaagggcctgggggcggccgtgggcgcaaaaagagaggtaactttatttctttaaggttgagaaaagcataaaagggctaaagaattctaaggagacttccacccgctccggttaaacaaaacaaaacaaaacaaaagaggacggaagagagactaactagggaaccagaaagttaagagaattttttttttttttaaagaatggaaaggaagtagcgcctgagggtcgataaatgaggcaagtgaggattaatagatacggataggagaacaacaaaattaaacgtgctctttttacgacagggatacacgtatgtgtgttagaggtattcggagtagggggaagggacataactctgtccggaaaaaccttagatggtgaaagggtgtgtgatagaggacatcgtgaaacctgtaacccaagcttactcaaaaagcaaataaaaccacttatatatatatatacccttctacttctctgattttttccttgggaagcgattgcgcttcataagaatatac

SEQ ID NO: 32794 - DNA, 1203 bp, Mus musculus
aattaaacagacaccatctttaaactgtctttcctgccaagaacatacagtcaaggacagagactaacatcttttgattttcccaccactttttagagctgggttcataataactttgaatctcaccagatttcagaaggatggtaaatcaaaaggtaaatggtatttatttgtaaaacttgaaccctcaaaggaggaggattagcaagtcagtaagaaaaaaaaatgtctcttttaatacaggaatcaacactcatgcatttgtcagtacatcctgtgagataactatacatcatatgaacattcaagttggcatgagaactgtaggatttagggaaagtaactttacatttctgacctatctcctcacctgtaaaatgagatcagatgcctgctctttgacctttgggtgtttcctgaagaagcagcatgcttgagttgaaagaaacacagctgaagtctagacagttacgtttgaactctaacttcagacctggattgttgtgtgatggatgctaggaggtggtgtttgttgttgttgtttcgagacagggtttctctatataactctggctatactggaactcactctgtagaccatgctggtctagaactcagagatccccctgcctctgcctctgtctctgcctttcagttgttggaattaagataagcaccaccaccatcagactagtttcttaaggtcacagcgtctcagtttcctgttatgaggagtatgcccttactaggagttaccatggaacttgattggaaaaaagtaaagtaataggttcactaccagctacattgtaggtgtaaggtctacacagataattatttaaggcacgaagtaataaagggtttttttgtttgtttttttctctttttggtttttctagacagggtttctctgtatatccctggctgtcctggaactcactctgtagaccaatctggcctcgaactcagaaatctgcctgcttttgcctcccaagtgctgggattaaaagcgtgtgccaccactgcctggcagtaataaagttttaagttattatccctaccaagaagtcatgtaaagattagttgaaaaaagaagaactgacacaacacattaatgaatgatggcagacagggtgtgagtgaatatataattaccccatacatagagaattttgactattttaggttgtcagtaagggggga

SEQ ID NO: 32795 - DNA, 1116 bp, Mus musculus
gagttcctctgtctcgtcttgccgattgaaggtccccgtttctccaatttctctccatcttctgggaggtagcaggaaatcagaatcatggttggtttcaaggccacagatgtgcccccaacagccactgtgaagttcctgggggctgggacagctgcctgcattgcagatctcatcactttccctctggataccgccaaggtccggctgcaggtgaggatggagtgagggtcctgatgctgtctaatctgctccctccctgggtcagactccttggcagggatgaggagcctggagctggcgggagatcagcagagccatctccctgtgctcacaaccaccccatcttggtctttcagatccaaggggagagtcaagggctagtgcgcaccgcagccagcgcccagtaccgtggcgttctgggtaccatcctaaccatggtgcgcactgagggtccacgcagcctctacaatgggctggtcgccggcctgcagcgccagatgagctttgcctccgtccgcattggcctctacgactctgtcaaacagttctacaccaagggctcagagcgtgagtatgcggcaaggacagactgactgaccttagtctgtctgtgcagctcagtggctcctttagactttccaagaaccccgggaagatcagaggtggaccctgatttctgttatctgagcaccagggctgtctccaagcaggatgtgagcccatgatggtctttaaaaccatcacggtggtagctggcctcctgggtgacacttggatggaggcttgaaataggggagggactgggccagaagcacaatggagaggcagccaccacaccctctagcccccacaaccacattctttcttcttactatgccctcctaggaggggaggggagggggtcgagacaggagtgtcaccttgcagctctggctggcctggtgttcgaacagctctccctgcctcagccttccaaatgcaggcattaagtgtgtgtcacaatgccctccccaggatcgctctccagggagaagtagagctggggctaagaatctgcctctggactcagctctgctaggaaaagcctctctgcttggtcttgggtttcacatt

SEQ ID NO: 32796 - DNA, 1161 bp, Mus musculus
ggaagggatccggggcctctggaaaggtgtgtgctgggtgttggcttttctcccctcctctcctccatgccctgggctcacacaggttctcttttctacagggacttctcccaatgttgcccgtaatgccattgtcaactgtgctgagctggtgacctatgacctcatcaaagatactctcctgaaagccaacctcatgacaggtgtgttagcgccacttcaagctggtagggggcgtctagttgtctaaagactgcatcttgttatcctgcttgcctcgtgggttttagagtttatatttcttaccattcaaatccaacagggtaaaaaccccactttgcacataaacaggcgagatcaacaaaaagactctgaagtccccctaagagagtctagctgtagtctgtctttaaaacaatgagacccctctgcggcaatggtgggatgcggctgggagagctgacagcctctccccctgcttcatggcagatgacctcccttgccacttcacttctgccttcggggccggcttctgcaccaccgtcatcgcctcccctgttgatgtggtcaagacgagatacatgaactctgccttgggccagtaccacagcgcaggtcactgtgcccttaccatgctccggaaggagggaccccgcgccttctacaaggggtgagcctcagatcccctcacagaactccagagaagtgagatgcagccaaatgtcagacagcccatagttgctgtcacctctgttttttagaagttaaaatgagcattcagactgggggttggggatgggtgggtcagtggtggagggcttgcttagcatgcttggagaccctgggttctgctccccagcacagcaggagtagggagctgggtactcgggattcttgggcatgtggccatgggttgggtggatggatgagcccagtggttagaagcaggtggtggagggacctccatgacttgtgtttgctctctctaggttcatgccttcctttctccgcttgggatcctggaacgtagtgatgtttgtcacctatgagcagctcaaaagagccctaatggctgcctaccaatctcgggaggcacctttctgagcctctccatgctgacctggaccctgcttcccagccctgccctgtctttttcttcat

SEQ ID NO: 32797 - DNA, 1195 bp, Mus musculus
agcacacttggtcttctggtaattaggctagccttatctatttgccatggtaatccttccattgatgagtcccattggccacctgatttctcttgtggtaacttttcaaacccactagccagtgagagccctgagcagaggatgacgtcatacactgcactgaattgttctcaactgttgaaagagtttttctgatttctccctccccactggacacccacatccctccccttcagtccacacaagacctggcccagggaggaaggggcagtctctgatttctgattccatttgtcacatacaagcccctgggatgacagtggcttttcctctcagggtcactgtgaggattaaataaagcagtgatgggaagctctcagagcagcacctatatgttcaatacaagcatctagtgtaccccaaacctccaggggccccagatgcttccctctttctttatacctttggggacacaactgatttccaaattcagtgtctcccctccagcccactgtggagtcttagtcctcctggaagccttgtcctttggcttaattatcaggacagtctccttagaagccctcgcctctcaacacaagcttctgtggcctgggtacggcctgggtacatctccttttataacaatacacattccacaacaaatggcctgcactggacccagccctaaagattagtgctccataaatatttgcccaaaactttctttcaaagaaaaactttaaaagatcaaatatttcagaaacaaagccttatccctgtcctagatgttcccctaaacacatacacacacacacacacacacacacacacacacacacacacacctttccttttacgaacagggccttgctatgtagctcaagctaaccacagactcgctatttggggattacagacatgtaccatctcatccatatctaaactgtcacaaagtccctgagatgtgacagaggtgttcagagatggagatcagtcagtgacaaaaacccatatgatggccaaaatgaaaactgtaacatccattagtccaggtcatttctggttcacacacctgtggttcttcatgagactcaagataaggtccaaattgtcctttgtcttcatttcatagctagaaattcagacatgacccaagaagagctaagaggcaggagcattggacgtgggaagccca

SEQ ID NO: 32798 - DNA, 1113 bp, Mus musculus
cctgtttctaccttctagcaacaagctttcaggcacacctcactgtcattcatgctcagctttttacatgattcccgggatcatgattcccaggatctaaactctgtacctcatgtttgtggagcaagcactttacccactgaaccacctctccccaccccccaccctttctctgtgtgtgcatgcgtgtgtaaacacgcagagactggttctcttgaatgtcacctgagctctaaggaccaacccttatcatcaagcttggcagcaagttcccttgctcactgagacgtcttgatgaaacgactccccacctttttatggattcactggaacttgctatgagataagaccaggttgtttaccccctgcctctgtgctccaacagctgcgataagaggtgcacaccagggctggagagatggctcagtggttaagagcaccgactgctcttctgaaggccctgagttcaaatcccagcaaccacgtggtggctcacaaccatctgtaatgataactgaatctgttctggggtgtctgaagacagctacagtgtacttacatataataaataaataaaccttaaaaaaggaggttcacaccacattttgtatgattcttgtaaattttacacatgattgaaataatttaaaatagaatacaaaatgtatatacacaaagaagcctttatccatggtgaggactttggcgggcagtgagagatccaggcacttctcactggacgtcacaagggggcgctggagaaccggggaaggcgtctttgccgaaaactgagctgctttgctttacagcagacaagatggacaacagagaatcagagcggtcacaaccaggacatcagctctagaaaactctagaaaacatagtggtgtgggtacggagagcagacccagtgatgaagagcatttgctgttcttgcagaggacctgagtttgattcccatcacccacaattagccagctcactcttgcctgtaacatagctccaggggaatctatgccacacacatatcacgtgacacacacatattttaaagatacataattttaaaatttttattagatattttctttatttacatttcaaatactatcc

SEQ ID NO: 32799 - DNA, 1110 bp, Mus musculus
ttcgggaatccgctgaggaaattcaagctggtgttcctgggagagcagagcggtgagtgcgcgactcccccgctcctggcagccggccgcggcttccccgcaccgcccccagtgcagcccttctggccgctgaggctccccgccggcctcgctcttcctaaaacccccaccccagccttttccccgggtcccccgactcctcttgtccctgtccctggctcctcctcgctaggatctatcaggcttgtagcttagatctctgatcctcgcccggactccgccgcctgcagccgggccctctcgggccgctctgtcctcctcagtcctcaccccgcccagcctcctgtccatccctttcttcctttgctctgcgtggtctccaccacccgggccggctttatggggccccacccttattccttgctctttttccggttcccattggaagtgaggtcccactccgagaagcccccaactctggagaatgggccccctcttcaaccttggatgaaggagggtgggatctgggcgttgttttcccctgaggcttggctcggagttgtactagtctctcggaaggtgagagaagaggtggtcatggagaaaaacaattcttgctcagtttacacctaaatgaagaattagttagggttagtgagctaatatattttaactgaaggagacttgaaaagaggtggcgttgccagtgatgattttggtcccttgggttgggactggttggaaatccttatttttctattaattttcgtcattgacaattcttttggctatattgatgccttttcagtctctgccagatgctatgtcatgatcagtttactttgaatttttctcatctcacttccctcttttctcgtttcaatatgaaatatttaagtatcttcatgatgatacaagcaaggattaacgggtgaaatgttaattattaatttcttcttgagaattttccagttacatatttaagatgtatgtgagaggcttagaataatgcatctttgttttgtaggattgcctttgggtaatagggtaatagatccaccatctagctctctaaattagattagaatactatttgagttaactgatttt

SEQ ID NO: 32800 - DNA, 1099 bp, Mus musculus
aaactggtatcttcttaagacagctacagaatactcatatatacataaaataaaaataaatcttttttttttttaaagaaattgttatagctcttctaggagtggcgcctgtggtgtcaactcttgttgaagttgtcaggccttgtttgggcagccttgttgggaaacttttcattactgcttcaatttcacttgatatggatctatttaaattgtttatctcattttggtaaattggtagatcatatgcctctagaaatttattcatttcttttagatttcctattgtagtggaatgcatggtttttttagcctaataactttcgtttcgttggctcaagtcccagcaaccacatggtggctcacaaccatctttaatgagatctgatgccctcttctgggtgtctgaagacagctactgtgtacttacatatagtaataaatctttaaaaaaacaaacaaacaaacgagctctgtagaaagtctcagtaacagaatagatcaaagatgggatagaatatttgagcttgaaggaaacagcaatagaaacaataacagcacacaaactcacagaaattaaacaatgaatgggtccttgaagaaatcaagcaataaataaattttaaaaatccctggaatcaaaacacaacatatctctaagtgcctacataccagagagacttcaagtaagaaatttaatgatgtgccttgagaacaagaaaccaaattctacatcagtagaggggaaaaaaagaaaacactaagatggggcagaaattagtgaaaggggaccagcaacaaacaatacacagaaatacacagaatcatcagaacaaagagtggacttttgttgtttgtttgtttgtttgtttgttttgaaaagataagacaaacctttaaccaaaatgactcacaggaaaatccacattaataaaagtagggaagaaaagggagtcattattctgtgggtcttagaagaaaagggagtccttattttgtgggtcttagatgtgctggaattagtatcgtccatgaggtcagggtgcctggtgtaagctctgttattccctgagtaggatattgacttaaagagcaacta

SEQ ID NO: 32801 - DNA, 1521 bp, Mus musculus
tctttcaaccctcctgcagaagctcactgctttggccccatactctttcattgactgcagtgtgaatattggcttgaaccttttcccttcagtaataacgtattgcaattcatcattgctgcctgtttcgtggaggtgatctattagcttcacaagcacaaaaaagtcagtgtctttattatttatattttttaaaagccaaacaattccagcatactcgtgataactttgaggattagatacattttcttaacatttttttccctttttaatgttatgataatgtacttaaaatgatgaaaatctcagcagtatgtgtgtggcttgttaaagagcagcgtgttcatagcagcgttgcctgccttcttgctgtctatcagcctttcttgcctcttccttttcgccttccctgttcttccctttctcaaacaaacaagacatggcaaaccgcagtctaacccagccctttgaaattatccatagttttacagacagctccaggctatgagccacaatgtccaaaattattcttgagcactgatataaattacttagaccttctttgagggcagaactcagctgttgctctcatgatgggcagtgctggaaagggttctggtatgtcttcaaaatgagtccacgagtttactgagtgcttacaggtaaaggaatgaatataagatgtctttctgatcagaacaggtgtcccttcacatgagctttactagactctgggagggaaaagtagccaagtacttctgaaccattttttaatacttgtttcgtcatggtgaaattatagcagttatcccaaaatgttttaattatcaaaatactgtcttttaaaaaaaaaaaaaaaaaagtaacaccttttaaagcattagatttcacttgggtttcttttccaaaaaatgctaggtagacaaggcattgtaaacatgagtttcctttaagaaccatcagaatataaatttaacatgaagaaaactgctatatctagtagaaataatatctaaagtttaacaactaaagtaccctcacagaatagcaaatacccttctgctctggacatgggttcaaatttgaatatggaaataatatccttggaagtccctagaggcaggtcagaggaagtatgcattaagagggaaaggagagaatggaaataaaagtcactataatgcagatttatgccttattttttagcattttttaaatgttgggtctttcaaggtgttttttgctttttattagatctatataaataagttaactagcaatttagttttgtatttaagctacacttaatctttttctttggtgatatttatttctttgcctttttttttttaaaaaaaacttagaatttttaggtgttttgttgaacatttagagcttcatcaccatggcaatatgtatttcccttgaaacattgcaaacaaatatactaggagtgcacccttttaatctttactagttattgtgagattgctgtgtaagttaataaacacatttgtaaat

SEQ ID NO: 32802 - DNA, 1261 bp, Mus musculus
tttatcctcttttccgtctcaaaggaagctaacatctcaggcacagacatagccaaaagtccatacacccattgccaggcactcccataagtcacatgtgaattttctctacacatagcaaacataacttcatttggctctaagtgtctgaggaatggagctcacaagagagcaaacaacaaagctacagttatctgtctggtaaggataagtcggggcaaggagcgaggtctgggtgcccaaagaatcaaataacagttggcttggtgttgtggcaggggttggttgtagtggttctagctctatgtgaaggagcttgctggataaaggcacgatggggctttttatggagtaaagtttcttgatttcaactataatgaatactttgcctgtctagttagtactggcaggacatacccttaaccaaaacatggaatttggcaccttttcctcacttgtagcttccctatgatagctgagctaaccctaaggtttcctagctgtgggaagaggtgagttctttgagacctccggccttaggaagttgcttccattaggaaatgcctttctgatcccaggagctcagctcgactgttaacatctgaagcttattctcttccttcccgctggggggagacggcattatcttgttctggggcctgacccaccttggcaccagcctggggaacccctcatgtgcctgtctataggtagcaagcaatctctccatttgatcctgttccaaactattccatcatcctgtcccaattgccaatagaaaagctaaaatccctggctcagttgctagagtgcctagtaaaattcctagcatatgtgagcgctccattggctcagcacagacactaataaagacatgattggccccagaactggctttgcttgttttgttcctccaggatgtttccttgagacaactctgtgacacagcatcttctgtagagtgcattatgagtttatgtggaattggtgacagctatgtgaatgaacaatttgggacaattcattatctatcttgctttccctggactatcaccttagctcatagaacagagatgaagttggttatctctgaagagtcaaaaagaggatctcatattctaagagtcaaaaagaggatctctgttctatgagctaaggtgatagataatccagagctggcactgcctgccaagagacttctgatgttagaatatttgtatgtgtgcatgaatgtagaaggccagagctcaacagccttaat

SEQ ID NO: 32803 - DNA, 1209 bp, Mus musculus
tccttcactcaacatctataggtgtctatgagctatgcctatccagcagtatagtgtatacttatattcctggtttatttctcatcacacatggtactggttaccaccaagtgccttgtagttgctaagctacattgatgtttcatgactttgctcatctttttgcattaaatgatattccttaagaaatttttgaggagctggagagatggctcagcagtgaagagagcactgactgctcttccagaggacctgagcaaccacatagtggctcacagccatctgtaattggatccagtgccttcttctggtgtgtctgaagacagcgacagtgtactcataaagaaataaaataaatctttgtgaagagttaaggttgtcataaaaaccaagcactctattctgtttccagagaacatctagtgtatgtcactgttattatggttgcctggctttagggaaatttaattatttaatatttatttacttatttgctggtttatttttgagatagagttctctctgtcttgctgtcctagaactcactatgagaacaacctgacctataactcacagagatccacttgcctctctctctcaagtgttgggattagagacacacctcaccgtgtttggcttatttattgattgatttattttggtttttcgagacagggtttctctgtgtagctctgactgtcctggaattcactctgtagaccatgctggtttgtttatttatttatttttaattaaaaatattttatacataatgagtgtttgcctgtatgtgcctacagaggtcagaagaaagtgttggatcccctgggactgtattatagatggttgtaagccaccattggctgcttagaactgagccaaagtcttctgcaagagcgcccagtttagttcttcttgtttttaccttcacttagttgtaactttcctgagggtgataacctcttgaccttggaatatagtttacatttgcaaataaaaaacatgtaaatgtgctatttatacttctgcaaacattaaatcattcctcagtttgtagtacatacattgcttctgtggcattattttcactttaagataagtaggagctaaaggtagacaaaacaatttgatagttggatatcagttgagggaatatattggatgttttttttgtcttccatatagagcttaatcttcacattactactg

SEQ ID NO: 32804 - DNA, 1180 bp, Mus musculus
ccctcaccataggatgaggggtgtgcacatgaccatgagctgccacactggcatcaccatacacagacaccttgtccacaccttttcccctccccagtgcagtgctgaaggagaggtgcctgaaggagaggtgcctctgttcaccagcctcccttatcaccatttgttcacctttatccaccctgggccaggaagtctggaaactggactactcacagttagtgaaagcctgagagtctcttgtcatgcttaaaacaaaacaaaacaaaaaacaaacaaaagccctatttttcttcctataagataaaccacgttttccttctcgttatcccaggaatgccctaaagtgcacccccttccctgaatattcatcagggacacacatctatctgtccagacctctttttgtaaagtactttgactttgattgccaaaacctctaaagataggaggcagggtatgcatcgtgatgctatgaaggggtcacaggcttgccaaaggacacatagctcatgagtgaaagagccaagatttagactcttctgatcctctattcttgttgctgcctcctactggatctcgagtgtaagcttgcttgaagaaagaaggggttacttgctaccccacacagaagcgtttatgaagacttggggagctccggtccatcagctgagcagatttttaagaatttctgctttgggccaagacctataatgggccctggagacccagagatagatagatccagctggtagtacagataggaatttgccacaaaagacctaactcaggacactgaaggtgacaactgcctagtactgaagataattgaggacagtatcgtccatctttcaacaaagagtcttgcttctggaaagcctgcacaatctgtccatctggctcctgtccagatccaacaaagtacgttaacggggcatggtataagcctgaactactgaaagcatgtctggactggagtacaaggtttatttgagaaccagaaactaacttgtgtcccatgtatcccagtgctttctggccatcagggcagttctacgtttgagacctagcagtgtttctttggaaggcttgatgctctgttctaaatagctttcagaaatgagtcatggagagcatacaagtagcacaaatcccttggtcaccaagttctggcatctgt

SEQ ID NO: 32805 - DNA, 1288 bp, Mus musculus
gggaaaaaaagaaaaaaaaaaattgtgaaatttggcattatgtggttccagggctcagctttcaaaattcccagtaggccagcttcaacattccatggccaaactcgcctgacctagacttgggtcccactctcagtttctcctgtgggtatttcctaatttataaactgttaatgccagccagaaggccagctaagaatataggagttgaaactagtggccacagagtcaaagagggacacagaagacaagcagcacttgctttccttaccgtggctgctgctttcggtagcccttaggtagccctgcggtggcagtgtgtccctttatcctttccagcctgagggacaattttctttcccaagagaacagatttaaaacagctttacagatagcagcagcccacaggaatctgctttgggtttgaccctagcatcctctgtcctagaccccagctcagccatcctcctcatgcatgaaagtcagactaaatgaagaataggactggcccagagacctcaggtcagccagatcaactggatctgtcttgtgaaccaagctccttacaaggtgatgcaaggctaggcctcctgcaccttggagttgtcttttatctttgaaggcccagggcctgtccccttcctgtcttcaaggcatctgcacccctctttcatagcacatgacagagaagcttgttctcatggcatggaccatccctgtgaagagagcgttgtgtatgatttttgtattttttaattcattttaacctacaggttggaatctaatttttaaattttattggaactcacattttaaaacaaataaaaaacatttaaaaataataataattataataataaacctttgaccagtgtcttccaagtagtttgatcaaataatttatagatgttttcaaaatacagcctggagtgtaaagattggaaagccctgtggccacgcttgtgtgtatgaagtgtaaatctggctttgttgttttggattcctttgggttttgctttgttttgaagatcagatagtgatcactctgaatggttgaagccaagagtttgtaactatgatatttactgtaagctgtagaacattcaacaactattaaaagaaagtttccaaaaaaaaaaaaaaaaaaccaacaaaaaccaaaacgtgtgtcttgggtgagggaggcacagacctcctccagccagtgagtccctgcgctgctcctcccccagggcattctaagctgctttttaacctgttgtgagtacacacctggagccccagtacg

SEQ ID NO: 32806 - DNA, 1214 bp, Mus musculus
ccacccttctgcctactgcatccagggctcccaaggctagtgccaagccaggacgtcagggcgagattaccatcttgtctgtgggcaggtaaggtgggcagacatagagttgtggaataacttgaaggcctggatgaaagcaagtctgtgggttagcttagtgctgactagcctttcctgggcatctctgggtagtgtaggtggccaaaagggtcatcatttcccagctgtgctatgtcacatggagctcttgggtccctgaggcacacacagtcttggtgttatcatacccgggacttcttagaccaagggtctgtctgtacccctctaactagatgtggggttgctgggagctggatacaaatagctggggggctgagaaggactcctgagtagtctaacaggctcaacctgtgtgatcttggaaattgcagggtgacctagtaggagctgccttctttggcctgggtttcccctctgatgaggggtgttggtaccacctctccctataggttccgtgtggctcgtattcctgagcagcggaccagttcattgttatctgaggtgaagaccatcacggaggctgggccttcagagggtgatctccctgactccccacagcctggtcttccccccgagcagcgggcactgctgggaagtggtgggagccatactaagtggttgaagcccccagcagagaacaaagctgaggtgagtgcttggagttgtgggggggggtagcacctgggtcaaccctgacagaagagaggcccatgaaggcagtggcggcctcttgactcagctctgaccctttaatcctgacccccaggagaaccgctatgtggtccggctaagtgaaagcaacctggtcatctgatgggctgtctagaattagacactctgccctgtcctgggaggttctgaaggcttcctgcaggagggagagctgcagctgggactgaggaccaagatgcaaaggccaagtcctggaggtgggaccgtccgccccactgaggaggcagcctgcggcacagcacgtgagcaggagatcaagagcccaccctatccctgcagtcccggttacttccatgcagggtgctgtaaccctgtgcctgccctgaacacatcataggagccctctgtcccttagaggtctggtttggtggaggagtggtatctgtacctggccccaagcttgtgccttgggaactagc

SEQ ID NO: 32807 - DNA, 1111 bp, Mus musculus
gtcttcctccaaacatgttcgccacgccagtgtgcctgccacctttacacctattgtggtacccgagcctgcgatgtctgtgggaccccccgtggctgcgccagagcctgtgggctttcctgttagaggccatcccgccttgcaggcaccatcacttgaggatgtgactaaacggtacatgctgacccttcactctggtgacgttcctgccccaggtcctgtggacctaccctgcttgcctccttctgcaccgccctccactgagaccaagccctctggggctgccagggcaactccagatgagccagccccagcgagcaagtgctgtagcaagccacaagtggtaagtcctttggaaggagactgagggagggtgcatgagagccatgggcaccaacctgacaggaactgagtactcattaggcaggcttccagaatctgtcctggaatagagttaatggcacctggctcctgttacctcaggacctgaagaggcttccggatgctgccagtgtggaagggtctgtctgtctgccccaaggtgttctggtggtggttgcaaaggcccttggaatgtttctcagagtcctgtttcttagattcccatggttctttgctagaaatgcactagaagtgtggatgcaggtgataacactgagtcaaggctctggcctcaatgcccgactcttggctggtctcatttcaggccagttcacacgctcttgccttgaaatctgttccaaaacctgggagacttagggaccagcctcactttagggatcagcagagggcttcaggggtccgactccaagcttgttctagtttctgaccttggcctttcttgtggcttaacctcctcatttataaaactgggtctgagggatgtggatgttgcagatccacccaggtggaatcctgcagaactgggagagtccgtgttttgagtttggctagtccccaggaccagtgccaacacactagtcttcagctggaggagcttcgaggtaaagtcgctagggaagtgtggtgacagaccggcttctgctgagccttggtggcaaaggcccctcagagggattgaaaacagttctgatccctgtagatagggctg

SEQ ID NO: 32808 - DNA, 1195 bp, Mus musculus
tgtgggaagatgaagttttatctctacggagtttggagaaagcggagaatcttgcccgcagagggcgcaagagcaacgtaccccgaccgcagaaagacgtggggagcggagtcttagagattagaggacgccaggccttagagggcagggggcgtggcaactggaaaaatggcgggggaagttgtgtgtaatagtcctgagtggtgggactgctaaagcagcattgggtgggttaagggacagtcagcgagggacaaaccagagggaggtgggagataggtggagcgtttgggagagtgaggggcgggacatgggcgtggtgcggcgggattcgccactgaaggatgagtacggggcgtggtctgagcaaggtggggaaccacaagcgctccggtgggcctgccccacctacgtctccctgggccccacctcttttccggccaggagagtttctgcgtgtacctgagtttcggtgtgtacctgagtttttgggtcttgggttgccatgttggagcccctgcggcagaggttcccgcgtgaaagcggggactactttatgcagagctgtccactctcagctcctgtgggtatctgaaggagtccccagggaggatcagcccgcggctttcgcagccgactcccctagagggtcgttttggtctacaaaagtcctagcatcctgtttctccttcggctcctccccgattccctccccccacagtgttcccagcctcgcgcgctcccggagcccaccccctcttttgggcgccaggccccgccccccgccccctttcctctgcctcaaagtttatttgcaacaaaagggagcagagagctagctgcttagagggagggaaagggagctggagcgggagctcgaggggaggcaggcgggccgccgggcttggcaggcggactttgagtgcaggaaccgagccttaggcccctcaccggcaggaccgcgatgtccctggcctctcccgcagaggctaaggctgggcctggggtcgccgcaggggcgagaggggccgcccaggatggaactcctgccttttgtagccgcggaaacttgatcttcgactgataaacctctgctcacgtctccgcaccctcctccacagccgccgcacgctgcgggtgcaggacccaggctctcggaccgtggccactgcgcgccctcggagtgggagtgcag

SEQ ID NO: 32809 - DNA, 2230 bp, Mus musculus
caggtgtcagcgaacatccagaggagcattggagcgttccacgtgctagcctctgagtcaagaggccgataaccctgtaattgtctcttgctcaggttcgggcggcgccgccaccacccacacagaaccaccggcggacaactgagaagatggaggacgtggagatcacactggtgtgacagtggatttaccttccgttactgctacaatcaaggccaggcttggagtttggccagtctcattttttaggcacctttgcatgatgatgactcttgaaaggagcaaaaccaaggaggattcgatgggactggttggcctgattgtgccttttttgttgtcgttttttatgtcatctctcctaccatagcacaaatcatagcgggtcctagaagcagaggggagcagctctcatgccttatagtggcccatttttatatgagactcaaggccaggcctagatccagggcacagacccagaattaccaattgtgtgaactcgtacagtatattactgtggccatgcacagggctgtggcaaagatctcatctttcctcaagtggattttgctcttctgattgttattcaaatcaagttgactgtgtaaggaaatccaggagaggctggctcctccccaggttcattcccatactgaaaatgcaaccttattgagaagaaagtggactgcctgagcttagcgccaattgcataatgcacatctcttcctcaactaacagatttaaaataacagtgtcctttgtattaatatttatgccattcatttagtattagtgggctaacctggaggggctgaggccacatctttcccatcacatagactagaagggaggctaaggaagaagcagaaatggagcttccacatctgaaatgagccactttaatgttccttttgtctttgggtatgtttcctcttggtttttacagtgtataccctctgaccagtatcctttgaatccaagtgtctggctgcattgaggacaaaggcctacattgctcagcttctctactggagaggcccttatattattttattcccaagccagagtattggcctagacatctgggttgtgattggtgcagaccagctgtcgccttctgaaagtacagcttcaggtcccactgccctgacatttgtccagagtgaagaatctatgggccctggaggaagcctgctttctgtggaaaggatacaggactgtacacctgcccaggtgagaccaaggaggctagcaccttctgcaggtcagggaagagcctcatggcgccctggcctcagcctagaaggtcaagcactctgtggacggtagatcttgacctagggaacaaagcaatgcttgccaatcctcttttaccttggctgggaaaagaaatttacagatttaaaggttgtatgatgctttgaaatttccatcccttctgagaatctctaaaaacttgaaatggtcacatgtccccgtgggatttttgactgatatcggagctgaagggattttcagtcatttgatcactttagcaatgatactctgatgaatcttctccatgaatttggatttttggtttttacatttatctgttgatctatttgaggtctttttatgtttatcaaacttattcttaagtttaaaaaattaaaagggtattttaagattttcaaatttgctgatcttcaaagtgcttataatagagcagttcctgctaccagtcctgtattctgtttagctaaccaaattgtccttggatttgagtttcccacaacctcagagttatttgaactcttttgttatattttaaaatattttttggaagagctgctaattttattttaagaaacaaagttgtaaaaatatgcctcctttttaaaaataaataaataaataacccttctctccaggccgaataacccggcgtcaccatgcacaggtcagggctcaaagggagcctccgtgcaggtgcgctttctttacagtggctgtaaaaagtttgtatttattatgtataaaatgttgaataataaaaaatgaaattaagttttgcaagtgtcctgataaagagttgattaggcaggctttgagagagaggatgcttcttgtgggccatccttaaaccacgtatcatgtgcccagagcaggaagtgagtccacccagacatcacagaccctgatgctattcttgtccagcaagagggaagaaaagacaggtcatgtatttgag

SEQ ID NO: 32810 - DNA, 1197 bp, Mus musculus
cgctccacctatcccaccccgcaggagctgcctcccacctgcctgcttcactccgacatccacagccgccccagatcctgtgctgcccccactgcctgccaagagacacttggtagaacccagcgttcctcctgtccctcctcgaaccggacccccctacccacaggccaggtgagtgacatcacggctggtgggtggaaagacctagaatgcagaggaaccagggttggaggaatgaccctgactgctggtggggacacaggtttagagagaagagagcagggccaggccagggcagagttgggtaaggggcagacgggaggatagccaggacttaaggatacctagatatgtgtagaaagagcaggggagccaccagggtcgcgagtgtctatcccagcaataggggggacccaaatcccaggacctgtctgagcggcagcctgcttaacctgcttactgtcggtcctcttcagaattccttctcctctctccagctagtctcctccttgcttccccgaacttttcccactttctatggacactccactactcattcctcccagctctcggctgtttgctctggtgccagccagagaagcgtctaaagtcaggctcctttggagttttgaagggatgtgctgtcagaggtctcttgtccttgtcactgctggacggtgttggtgaatttcattgatgtctgcagcaagccttctgtggaaggtgggaattgtgttctgatttctagctgggaacctgaggcttgggaaggactagctggatccatgcaggcgtgtgggagtgatgggaggtgggggcagggtgcacttttgtggagaaaacctgtgaggttttgtccatctagagagtagcattgagtcagaggatcttctagcccaagccaggtctgaaattatgagatgtaattgatggaagaaatcacaagatgttttttgtttcctggatccttgggaccctgtttccacagtatagattcatggttcttagtgctattgtaccctctagtggccattctcctgagtgcagaagagagagagagagagagagagagagagagagagagagagagagagaagactcagagttgctggaattcaagataccctggatttaccatgccacatcccttttctcctgccttctcctaacccagggtgtagattttgattttttttt

SEQ ID NO: 32811 - DNA, 1163 bp, Mus musculus
ccccgggaaccacttctgggctgctaatgtgcctcctagtgaggccctggagcccagcagcagccctggtgcccggcggtatcacctggaggccaagtacagagagggcaagtaccgccgctaccatccgctctttggcaaccaagaggaactggacaaggtcagcacacagagcctctgggattcttgagccttcttgtccctgcattatcccttgaacccatctctttcttcctgtggccccattcctccctctcaacccatgtcttccatccgcttagagggctgtgcatgtgtggggagattgaggcccacagggcagtagggcctgcctaaggaaagctggaacaatgtagggaggagtcaggcttggttcttggtccagtgccatgtcttcagcatctggctgcctcctcctgattcctctgtctcccgcaccctgtcctgttctttcagaatcctgccaaaggagtgaacttggtggggatgctatttcctgtcaggctcatgaaaaacagctggaccactctgacccaccccatccacgccccattctagatgaggccccatatgggccccaggccccagaagattgggagccaagtcttagaccctgatctggctcagaccgcttgcttagaggcagcagggtaacatttgtaacctgtgggcggcagtcctcagctcttcctccaagctgtcctatccaggcaggctgagtctagccccagagttgtctagaaaccaggcctccacctccccaggacccaggcgtccagcccccagttcagcccagcccagtctggcctaaaagccagaagggtggtggctcccattggtcgggagggctgggccggcagtgaggaattcaaatgtgggaggaattagctacaacccctcagctcctccctctgcccctgctacaaggcagagggagcctgagatcctccaggggctccttgtgccctgaccagcagctgtgcctcaggacccacagggtgagggcctgtggctaggaccccagcctcagctgggtagcctctgcccagcctccctggcttgccctcccctcttctttttctgactctcatgcctttcttttcttctcttctggcttctttaagccctgctctctttcagtctgaggatggtccatgcaggtt

SEQ ID NO: 32812 - DNA, 1103 bp, Mus musculus
gacccctttttagtaagctgtgaccactgtgtaatgtctaccaactgtctatttttgccatctaaccattttctaacatcagcctgtgaagtttgttctgttcggcagcctttgccttccaattatcttccagcatatgtgctgtcctcgggctggggacacttcccaggaacccagtcttgttacctcctgtcagccataggcacacgggtttcataactggaccctgtggcatggtgactttacctgagtggctggtacttttagagtaaggactcagagctcccagaagcagagacttcaaaaacaccctcaagcggactgcttccaattctgtcctttggaaagctctctggcaagacttagacctaagcatcagagcatgcgtctctctgccatgccttaaaatcaatatgcctagtcatttccttctggttccatatccctgcttcctccagccaccaaacagaaagagtgcatctacaagaagcccccacgcttctcttccagatcgaacacctttacaatgaggacgccggggcctttatgagattccctccacgccaggcccccaggccaaggctagccctttgagctgtttcagggacatgctttcctgtccggtgacttggaaccgatgccctaagcccccacctttgcgtttctccccacctgcctttttagtagtcatccatttataccgtgccctggtttcccagcctcgagggccaaaactatcagcccacttgtttctcccttctagacctgaacaagttgctgtcactcagggcctgcaggcctgccaacttctgacccctctccccttcttgacctcccttagtctactagtgtatgtgaccagccaaccgagaggcagagcccgctctcttgtcctaggggctgttgtcggtaacatttccaaagtctttgacctctgctgaccttttccaaagggtctgccttcctgcccatcagctttatcagagtgttctggccaccagctttgccgtagcaacacccaaggcaagaggtttaggcccctgggtctatgggtgaggggtagagggagcagccgctcatgctctccctttgagttgtaaaga

SEQ ID NO: 32813 - DNA, 1190 bp, Mus musculus
ttagcagtagcctgtgagcttgtagctgtttagcccagtttgcaagtaagaactaagactccgagatgctggctcgcccaaacacatgacagaggccagctccagctcctggctccagccacaggtcaggtacaggccaaggcataatggccatgtcatcttctaccacctgcaggtagagcggcgtgtggtaaaccaactggcggcagcctatgagcaggacctgctaccagggggttgcaccctgcgtatcactgtggaggattcggacaagcacctcctcaagagccctgagctgccctcaccccaggctgagaagcgtccacctacattgcgactggagatcattgataaggacagcaagacccgcaaactggacatccaggcaccactccaccctgagaaggtgtgctacaccatctagcatccacctgtctgtgccctgaacatctaataaaggccccttgctgtggcatggcaaccaatccaccttgccctcatgcctttccaaggcctagcaccctctcctgcctttcttggttgtgaggttcatagtctgttatgatctccaaggcaaggaacaggaagcctggtctgcacttcagtgtgcactccactccatgtcctcactagagcattgacgtgtggccagaagctcagaaacatgcagcggagaacaagtctggctgaagaagataggactcaggcagtggtgcaccacctctgcttgtgctgatgcggctcatcctcaggatggccccgtggcagtggggggaagccaggagccccaagcacaggtagctctgtagtttattctacagctacctctttcccatgccctacaactgtcagagtcaaggcttgtgactgagccagtgtagagcacccataggtctgactggtccctcttcctgccttcctctggggtgggaccatggtcccaggtgaacacctcagctctgagatggggctcattcagcaggctggcagtctagataacagaaggtgctgtgggagcaaggctggagtcaggctccacacaggtgggcacgggtctgccttagccctgtctcttaactgccgtcccagccaggtagcaattccatgggcctagcatacccataaaggacagcaggacacagcagggcctggcaagtcactctgcatcatctgcagaagccatcaccact

SEQ ID NO: 32814 - DNA, 1877 bp, Mus musculus
ggtctcagtgtctgcagctgcctctgatctcatctgaatctcataggtgtgaggctctgggcttctgccaaccagatgtctttttttgttgttttaatttatttatgttatgcttaaaagtgttttgtctgtatgtatgtatatcacatgtgtgcctgtgctatgtgagtgctgggaattgaacccaggtcctttaggtagggagcgtctggcagtgctcttaactgttgaattatctctccagccccttcagccagctgtctcagtgttaagagtaaactgaatctcagaggagggaaagattcacttggagggagcaatcaataactaaattgacagctcaagcctcttgcttccagttcctgattttctatgaggggaccttgtaggaccaaaaaggctaatagaatttgacacttcagattaatatggaggttggagggggacaaagttgaaaagaatgcctccccagcctgaccatagcatgtgttggatacaagacagagagggaaacgagatattctgaggtctgcttgaatggggttggaattgtattagtaaatatctcaggtcctggacctcagccgggtccagtataggtgagttgggctatgccatctttaatggcagggaagtctgggaggctggtgtggtgaaggcggcagcgatagcgaccacagctcttggtgtactgtaggaagcggggtgcaccaggaaaaagcacatggtcagccaatacagtggcgccatgtgggagcagagcatgggcctccagtagctgcagatcccttaagtaataccgaggtcggtgtgccaggagcaccagatctgcacgattcagctggtgctgagctcttaggcgtgggatcacttcctctgagctgcctgcaatgagctccacctgtggggaaagccatagctggaggtgaggagaactgcttttccacgctagaccccaccgggatctggctgatttatgccaggtattaatctaggccttcacaagtgtctcaaacgtttcctctgacctcagaaatccagtagtcagtttcagtattgtaattctattgtgtgcccatgaagaagctgagaatcagaggctatgtgtttcccctggggtcacatgactaaccaaagactaagatttggactcagacttgctgagctatggagagtttccttttagctgctgcttttgtaaccccgcaggaagtaagtgcaaaagactcgggattgtgggtaggagcagcatgccctccaggatgccagctgcctgagtggagctgcttccttgaatgggagtccctcatgaaagaggcctggtctgagcaattcctgggatagctgaagagatcagcgttggggcgataggggctgaccatttgctcatcgaagcctgccagccggatgactttttcagccactgctgctgtacgtgagtcccgctccacagtgagaaggcgacttccagggggcaaggctcgcgcaataagcagtgtagagtatccacagtatgtgcccagctccagcacacaagcaggggccttctcttccaccagccgcatcagaatctgacctatgggtcaagatggctattttagaagacattgaaaacaggtgtgcccagaatcaaacctgctgtgcttttctgaatgtggtgtttatgtgtgaggctgacaggctgctttcccctttcccacacctgtctccatccacctggccaacttgaagagaagccttccagtctcagtttagatgtttcttcctccaggaggacccaggcgaaatatccaccctaccttccaggttcccgagacattttcagtttcatgctcaaatgcacttccccattgctgattgtctttgattttggaatt

SEQ ID NO: 32815 - DNA, 1150 bp, Mus musculus
ccagctggaagatcaagcaactcggctgcaggagagcccagccccggagaagggtgaggtgctaggagacgccttgcaggtaggaaaatacagacagacagacagtaaggccatctgatagggttgattcttggtgttctctgatagggttgatccccattttgtctctttatcccaacagctggacactctaaagcaagaggcagccaaacttgccacagacaacacccagctccaaacccgcgtagagacactggagtgtgaacgtggcaagcaggaagcccagctgcttgctgaacggagccgctttgaagacgaaaagcagcagctggccagcttgattgctgaccttcagagctccgtctctaacctcagccaggccaaagaggagttagagcaagcctcccaggcccaaggggctcagctcactgcccagttgacctctatgacagggctcaatgccaccctgcagcagcgagatcaagagctggccagtctgaaagaacaggccaaaaaggaacaggctcagatgctacagaccatgcaagagcaagaacaggctgcccagggcctccgccagcaggtggagcagctgagcagcagcctgaagctgaaggagcagcaattagaagaggcagccaaggagcaggaggcaaccagacaggatcacgcccagcaactggccatcgttgctgaggctcgagaggcctctctaagggaacgggatactgctcgccagcagctagaaacagtggagaaggagaaggatgccaagctagagagtctgcagcagcaacttcaggctgccaatgatgctagggacaatgcgcagacctcggtcacacaggctcagcaggaaaaggcagagctgagccaaaagataggagagcttcatgcctgcattgaagcttcccaccaggaacagcgtcaggttcaagctcgtgtgacagagctagaagcccagctgaaagctgagcagcaaaaaacaactgagcgagaaaaggtggttcaggagaaggcccagctccaggagcagctccgggcccttgaggagtctttgaagattaccaaaggcagccttgaagaagagaaacgcagggctgcagatgccctgaaggagcagcagtgccgtgccactgagatggaggca

SEQ ID NO: 32816 - DNA, 1189 bp, Mus musculus
ggagttagagcaagagaaggctgggcgaaaggggctggaggcccggatacagcagcttgaagaggctcatcaggctgagactgaagccttgcggcatgagctggcagaggccacagcttcccagcacagagctgagagtgagtgtgagcggctcatcagagaggttgagagccggcagaagcggtttgaagctagacagcaagaggaggcaaggtacggtgccatgttccaggaacagctgatggctttgaaaggggagaagactggccaagaggtccaggaggaggcagtagagatccacagtgaaggccagccaggccagcagcagagtcagctagcccagcttcatgccagtctggccaaagccatccagcaggtccaggagaaggaagtgagagcacagaagctggtagatgatctctcagctctgcaggagaagatggctgccactaacaaggaggtggcctgtctgaagaccttggtgctcaaggcaggtgagcagcaggaaacagcctcacttgagctgctcaaagagcccccgagagctgcaaacagagcgtctgaccagctaggagaacagcagggacggccattctctagtacacacgcagcagtaaaagctatggagcgtgaagctgagcagatgggcggtgaactggagaggctgcgggcagcactgatcaagagccagggccagcagcaagaggagcgtgggcaacaggagagggaggtagcacggctgacccaggagcggggccaggcccaggctgacctggctcaggagaaggcagccaaggcagagctggagatgcgactgcagaacaccctcaatgagcagcgtgtggagtttgctgccctacaggaagcactggcccatgccctgacagaaaaggaagggacagaccaagagcttgccaaacttcgagggcaggaggcagctcaaagaacagagctgaaggagcttcaacagactttggaacagctgaaaatacagttagtgaagaaagaaaaagagcaccctgcagggggtgccagtggagaagatgcttctggcccaggaacccagtcggagacagctggaaagacagatgcaccaggccctgagttgcaggcacttcgggcagagatcagtaagctagagcagcagtgtcagcagcagcagcaacaggtggaaggcctgacacacagc

SEQ ID NO: 32817 - DNA, 1431 bp, Mus musculus
cactggaggagggtgggatgcaagaggtatctctgtcttggctagccactcataattgaggaccccacatttcttaggtgtggctggcaactcataacttaatgtaggtgtttatgagaccccaaaaaggaagaggtccagccaggggttttgtgaactagtcaatagaggttggcaacacaggacttaatctggccaagtgactgtcttttccttttcaggtgaagcattaaagagtcagcaccagtgcttacgtggccccactgcattgtcagcactgaccttgcttggtcctttccctcctgctgtccctcagtgccttctctcagctcccaggccaatggcggccagccttccccaagacaatgaggtttgcctgcaccctggcctgctacctggactttgcctggtgccttctaggcgtctttcagagatggcccaggaggcttggagcttggacagtgtgtggtcttctccctatcttgcctcctgattttttttttctccctccgttgttgttttggaaaaaagtctacttttccatctaactagattgagactggattctttagcccagtcttccttagtctctggacctagaagggaccattggagaagcaggctctgcttctctgttgttcctggtggctgggccttagcaggggtctttgctcttgaagcccaggattgggcatgacctggtaggagcctctgttcttacctatttccatatacagctgcctggaggatgctttttttccaggacagataggttctggatctcaggggtgagatagggggcagccttcaatggcagctcatacttcaccttccccagacttgcactggggtaggatatggaacgatggggaggtttttaagggccggggatggatcttttctaaatgttattacttgtaaataaagtctatttttctcccttgagtgctaagctctttgggtcagtatgaggaaaaaggggaaattgcagctctttggagcctgtgtttggtctttctggcccctgttcctaactagtattatggactgttgcaggggttcatgttattctgaatttttatttggcaagaggcagtgtctcatgctgcctgagtcaggcagagttcctgaggacagtaccagggtctaaataaaaatgagaccttgagctgctgcagctttatgagtactcagtgtgggccctgcagagacacagactgacatatacagttgtgacctgacgcagccactgttccgtccttgccttggggacagtacattaggggcaaactaggaaaacaaaatcacatgtaaagattgaagtcagtgcagatagtggtcagagctgagtggatgttgccaaagttatatctcaactaggcttcgggttaacctttttgattggtacaggatgtagaaatctgccagata

SEQ ID NO: 32818 - DNA, 1846 bp, Mus musculus
aaatcttaaaacaaaactctgggcagacccaaggtaggccttcttaccatgctggttagagtaacagctactgtatattgcgtgtgatccttaacatgctaacagctgggaaaggcctcatgtcatgtatggacagctgctagactggcttcgatacttggtagcctggcagcctgtcatcattggcctggtacaaggcatcagctacatcctgggcctcgagtaatcagaaatcacatccctggagaacccaccacccactatggacctcagggcactctccgtgctgcccacaaagacttgggtggaaaagactcaaaggcacttgggccattcaggaccaccccagctgtgtctgggttggtggggaaatgatggagaaccagccagtggggctgtcagcagtgggggctttttaaaagaaaattattttgatgaatatatttaaatttttttattgtggagcataggaattgtcccccattcctaggcctaaccttgcttgaacagggttgggcaaagctgcggtattattggttgagaggcgtcttctcacctctggctgagagcactggtgggtttgcaggaggctgggtgcttcagcctacccttccccttcccctcccttccctctgcaaggctcaagcctggtttgcactcagtgtagaagagctcagacgggtgccagattagcactgagcggtaaagggtctcttcatctctggacatgatgggtgttgtgtatgactctgttgcctttttgtctggaaactaaaggctgggggtggcaaaatcaatgacttttctaactagggaagccctgtggcctccaaattcactgacatgttttggaacagctagaaatatgagcagcatggataacctgcccctgagcagggccattgccaggcagagtataaaagcaatctatatatcattaagctgtggaagctacattggcagcagcgaatgttgcagcttcttgtgcaagtacacccttcatggaagtgttgacatgtgccaaagggtactctgcacatcacttccttcctgaaagcctaagagtgtgtatgtttgtgtatgcacagagcagacagactaatggatctctgttttctgccagtcatcagtgtgcccttgaagctaagaggggattccagcccaggaaacgtccctaggtaggcttggtcatttgtgggtttttcccaggcctgacgttaagaatggtgagtgcataggcagaatgaggcctgaataaagatgggctctgaaaggggacttctgagcaggcctaactgtagtcctggaagtctgaagaaagggggagggcatcatgggtcagcagcactgggtgtctagagaaatttggcctggcccatttgaaggcaacaagaaccaaacaggatcttgtcatcacatctgaataaagctccatgagctggctgcaaagctggacacgcatttgcctttttttttttgccacctctttcccgggccccctggggtatcttggcttcttgcatcccacctgagagccggaacctggagccattggtcctgccttctcacccatcctccctctgtgagagtgtgtgtgtgtgtgtgtgtgtctcctgtcctacggcatcaggggccctgaggccttcacccccagtctgagactagtaccctgatacccccacaactcagcctgttctcttactcagctgtggcttcctttttccctccatcctcagaggaatgagagctgagcagaaggccaagagacaggctactcttcctttggtatttgtcctcccctctccctaaggtgaaggctacgtctatgttttacctttagtcttgt

SEQ ID NO: 32819 - DNA, 1118 bp, Mus musculus
cccaggatttgggaggcagaggcaggttgatctctgagtttgagccaggttggtccccagagtgagttagccttaactatacaaagaaaccctgtctggaaaaggcaaaaaaagtgggggaggggcaggtaactataacctattcccagccttttctgccatgggtttgtagagtgtcatgtctgtcagactcaggctaggctgtttgtcatttctgagaaggtggtgtatctattttacccctccacttctcatttctgtctccagtcccctctgctctccttcttttgattttctgggttcagcttttcattccaacctagagagctgaagagaatctgggtagcttgatttttactaggctatggaacagcttaaaagtcttggcaggggctggagagatggctcagtggttaagagcactgactgctctgccagatggtcctgagttcaattcccagcaacctcatggtggctcacaaccatctgtaatgggatcagatgtactcttcttttttttttttcttcagagtatcttttcccagcccttggaatacagtgactctcttgctgggctgcatgcagccatgcattaatgtaattgttgtaagaaactgcacacacctcaggaggtccgttctagtacccatcagtcacagagttttactgctgtgcacagacaccatgaccaaggcaactttttttttttttttttactttattggatattttctttatttacatttcaaatgttatcccctttcctggtttccgctccaaagaacccctccccttgccccctcctccctccccctgctccccagccatccatgggactgtgcacagggtccccagtgaaggagctagagaaaggacccaaggagttgaaggggtttgcagccccataggaggaacaacaatatgaactcccagggactgaactaccaaccaaagaaacacatggagggactcatggctccagctgcatatgtagcataggatggcctagtcggacatcagtgagagaagtttcccttggtcctgtgaaggctctatgccccagtgtaggggaatgccgatgcactcttctagtgtgtgtctgaagacagctgcggtgt

SEQ ID NO: 32820 - DNA, 1197 bp, Mus musculus
ctagaaggcagaaagggaggcaggaaggttattgtaacccaaagcatagggaatggtccagttggtgctactgtaagtgtcttcttctggttttcctcataagtgcagggaaagctgtgtaagagatagcaagaactcaatgaaaaggaaagactatatctaggatacagtttaacgaaggataaagtgggaaagtcaggcatagtgccagctttgcaattttgatcacactagttgagttatatttacacaaaattgaaatgtgactgggtgtggtggcacatgtctttaatctcagcacttggaaggcataggcagacaaatccatgtgtgttccaagccaggtaggcctacatagttgagacctatttcacaacaaccaaaacattgggaacgtgagagaagatcaggctaaacgtgcagcattctggacaggagctgccaagggagcggctagagctgaagtgcttgtgtttgtgtttcagatggtgaccctctttcagatgtgggttgttcccctctatttcacagtgaagctgcattggtggaggttcttggtgatctggatcttcttctctgctgtcacagcctttgtcaccttccgagccacaaggaagcctctagtacagacaaccccaaggtgagaatgcaggagaggagaagaacctggctttctttcttcttcttcttcttcttcttttttttttaaagatttaatttaaaatttttgatgtattttgagtgttttgtctgtaagtgttttaagtgtaccgcttgcatgtttgtactgaccacagaggacagaagggggcactagatcccctggaactagactcctgtgaactgtgatgtaggaaccaaatttgggtctcctataagagcagcagatgctcttagtctccaagccttctctccagcccccaagctgggtttcttgaagcaaatgtgctggaacacatgggagaaagatgagtttagaatgaaaacaaaaagcctgttgttttttttgtttgtttgtttgtttgtttttgtcccagaatgagttggtgcagggcctctctaaaacaagctgatttggagacccactcccctatatccacaggttcagaataccagattttccctatccttcacttgatagtctacatcaagatctgttggtgtttaaaacacacacacacacacacagaacaaata

SEQ ID NO: 32821 - DNA, 1687 bp, Mus musculus
tctaaagttcatctataagtactttgaaggaaaagaccatagaatatcaagatttcagtcagaaaatccagggaaagaccttacaggaaaaagtatttccttattgaatgagcaaaaaaaaaaaaaaaaaaaaaaattgagcagacagagaagatagaatatcttgaaagaaaagttaaagtgtggaggccttcaggaaatagctagactgtttgattttgtctttcaaaagaatgtcttaacactcatcccagttgaccttaaacctgctcccagtgctgggcttacaggcacgagccatcatgtctgggggacaagaaattattaacgagcatttctaacgcagagcccagagcagaagaaccaaacaggaagacggctgtgggcagaaggaagaggaggaaagtgcaggagccaaggaggtaggcagccgtcctccccagcccgctgctctcctaagcccttccccggtcatagtgagccagaatcagaagatcaggtcacacgcacactgcatgtgatcacaatgtacatcttacagcttagacctgtaatcctagcactcaggaagcttatacatttgacaactaggactgctggactagtgggatacacagcaagtttcaggccagcctgaaatcagtgtttgctggtgtctatggggacagacagacgaatgtggagtgactgacatgcatttggagtttcctgggggttgatagaaaacgtcctagaaatacttagttactcagctttaatccatgtttccaaaggctaatttttttttctttttcttgagacagggtttctctgtgtagccctggttgtcctggaactcactctgtagaccaggctggcctcaaactcagaaatccacctgcctctgcctcccgagtgctaggaccgaaggctaatttatggtatgtgtataatctcagttttaaaattgaaaaactgctaggcatgatggcatacgcctttaatcccagaagctgaaaggcaaagacagtccgaacttgagttctaggaaagcctggtctacctctaagttctaggatatacagggctacatagtgagaccctatttcaaaattaattaatttttagaaactgaggccaatggtagaagctctgttgtcaaatgctcgaaggttaactgctttcctccaagtctgtcatatcgagtgggaaaatcagttactctttccactttcttcttcatgcttctgatccagattctataccttcagcctttgtagtctctcccagatagctgcccttaaactgttctttcccacagatcgttgtccaactcgagttctcagccaaataggaggacaggaaggacaagacaaagacagcaccgacctcagaccaaaagtgatgacggtggtgtgcaggctgctggacagtgtcctatttgtgcaggtgaactgcatcaatcaccatgggggtgggtgtcgttctagacaattagtgggctccaagtacaatagaagaccctgtctcaaatagttggagaagcaatacgatacgaagtatcagcctctggcctccataagtgcatgcatatggtacacacataccaatcagttttgttacacacacagttttgatttgtccaagcctggcagcaatgttctttatgctcatagctgatctttcccagtagactcaatgttctgta

SEQ ID NO: 32822 - DNA, 1328 bp, Mus musculus
agcatgctcctgatgccacctccaactcaacgccagaccctcagcgagtccctttgcgtcttttggctccccacattggcaggctccccatgcctgaggactacgccttggaggaactgcgaggccttacccagtcctaccttcgagaactgactgttgggagccagtgagcttggctcttgccaccacactcatgcccactcacactcgccacaccacagtccccagcactgttttagttgacactttgccaatctctgggaatcctccattcctttctgctgcatcttctagttattcaggggttttcctaatactgagcatagcctacaatagctcataagggcttctggaacaacaacaaagaagacaggtctccatttatcaacctcaagacctttttttttctttttcttttttttttttttttttttcttttgaaaaatggtcaataaaacctctttggcagaacctcccaaaacctagggaattcttttccacacccagcgttctggctctcaccccatgccagcatctaacctccaccactgcgatccttttgtaccgtgactgtttgacagacatctggcatatgactgactgaccttccttacagatttgtccctcaagtagatttctcagtaacggtggattttggagtcaaaagagagttggaccttgttctttggtaaatttaagatagaagggctgtctgccatagaggtagagatcttcaaggcctttactcatgccctgtgtatcctttggacaccatactatcatgcgcagtggccccaagccaccgagaaccagtctgagaagctccagattcgctcaggcccttgatcatcagtcgtcgtcgtcttcgatttgccagaggagtttagatgaagaatgtcaaggatgttcctccctgccctcccatctagccaagaacatttccaagaagataaaactgtcactgagacaggtctggatgcgccctaggggcaaatagagaaggcctttaccacattgctgctggctataggaagtcccaggtactagcctgaaacagctgatatttggggctgtcacagacaatatggccaccccttggtctttatgcatgaagattatgtaaaggtttttattaaaaaatatatatatatatataaatgatctagattattttcctctttctgaagtactttcttaaaaaaataaaattaaatgtttatagtattcctggtggtattgactttctctttgtgtttttggagactctgagaagaaaccgatcctaagttaaagagcgagcgaggggctgaggagtgagttcagagggt

SEQ ID NO: 32823 - DNA, 1186 bp, Mus musculus
aaactagtcattcgtcacctagcttctggtgagtgcaaaccaccaggtaatgctgctatgcggccgagttacacctgtgaacctgtgaaccttcgtggtagttcaagcagagatagcattcagttcaggacacagcaggcttagtctgattttctatgaagagatgaagactgcgaagagacttgttctaagcaagggtctgtgaggtggggaaagatagcactgttgtagttaacacaaatgttcttattgttcactaagctctgctcacttgtagaaatgttaaccaagaacaccagaaatagttgctcagcagccagaagccaggagttcctcacctgtgccttttcgactttgacaacatctgccttgaaattttgagaaacaacattctttgtccttcctgcccgccttagatttttgtctgttcttctacactgttgtgaatcacacctttgtacactgaagtcaatgttttatttcttcagatgccattattaatgagaactatgactacctgaaaggattcttagaagatctggcacctccagagcgcagcagcctcatccaggactgggaaacatctgggctcgtttacctggattatattcgagtgattgaaatgctccaccgtattcagcaggtacctacaactccctaagccactgtctagcttttcttttcattggcacttagagcagcgacttcaaaggaccatactttaaccgcagtgcttgagaggcagaggcaagcatatatatctgtgagttccaggacagcctgactatgttcaaaactaaagaaagaaatcatggtggcacacatataatcctagcactggggaaacgaggcagaaggatcaggaatttgaggccagcttgagctgtgttaaatgcattgagcatggaactttggagttttttatttgtgccttaccctataacctaagccagccagaactcactgtatatagcccaggttggccctttttagtatgcttattgggagtggcggggttatacatacacaacacagatgtgcaggttcctagacaagttgtggaagtgggttttcttctggagtcagactggagtcatcaggcagcaagcaccattacctgctgctgaaccatctcaatggctggctctgctgctttgtccccttgaaagtgtgagttacacgctca

SEQ ID NO: 32824 - DNA, 1183 bp, Mus musculus
tcctcttcagaatttggtatatgtagaggtactctctgtatgttgtatatattatatatttttctttactttggtggtttgagattttgtgtctaaatagaccggcctagaattcactctcccatgagttaggattataatattgtccatgaaataagctcttactaagaaagagaatgggctgcttagtagctctttttatttttttgttttttcgagacagggtttctctgtgtagccctggctgtcctggaactcactttgtagaccaggctggcctcgaactcagaaatttgcctgtctctgcctcccaagtgctgggattaaaggcgtgcgcctccaccgcccgtcttgtagctcatatttttaatcccagccttcaggaggcaggtggaagtggatctgtgagtttacggccactctcgtctatagatcaaattccaggatagccagggctttgttattacagagaaaccctgtctcaaataacctgttcagtacaggtgacctgcctgccgagtatcctgactgagtactttgttctcctcagacattatgagctcaatcagctattagaacctcgaagcataactgcagatcctttggactaccgcctgagctggcacctttgggaagtgctacgtgctcttaactatacccatctctcagaacagtgtgaaggtgtgctacaggccagttatgctggccaactggaaagtgaaggactctgggagtgggccatctttgtcttcctacacattgacaactcggggtgagtgaaagtcattgaacccgctgggaatatccagcacctcagggcagtacctaaggattgctgttcaggtccagttcagtaagtgattgcttacagtgcttctcaatttgtggatcttaatccctttgggagtcaaaggaccctttcacagggtcacctaagactatctgaaaacacagagacttacattatggttcataacagtagaaaaattatgaagcagcaacaaaaataattttatgcttagggggtcataacaacatgtgttgcagcgttaggagggttgagaaccactggcttagaacatctgttagatacagccatgtgataaatctcaaagggcctggagagatggctcatcagttaagagcacttggcttcttttccatgggatctgagttcagttct

SEQ ID NO: 32825 - DNA, 1072 bp, Mus musculus
tccagcacctacatggagagtcatggccatctttaactccaactagtgccctcttcaggcctcagtggacatattgcacatacatgctgtatagacagacagacagacagactatttatacacataaaataacttttaaatgcattttgtagcaaagtttggtcaaattagaagatctcctcttgatcatcacacttaatagccataattaggctaaggaaatttgtttaaaggaacgtcaggttgttacctaagtatcacaggtgtcacaggcacgtggagtgagcagatataccttatagttgtgcagcttatacattgagatgaacaaattgggagaaatgagctggcaaacttaaatgaatggtttttgtgctgatatattttgcaccaccgttaatgatggcctctcaagaggtactgccaaaccttaaatcattggtttttgtactttcttagttgtgaagcactggagcctgacatggacattatgtgaagccctatggggccacctgaaggagcttgacggccagctggatgagcccagcgaatacattcagactctggagcgtagaagagctttttcccgctggctgtcacataccgctgcacctcagattgaagaggaagtctccttaacccgcagagacagtcccgtagaggctgtcttcagctacctcacgggcagtaggattagtgaggcctgttgtctggcacagcagtcaggtaggaatgagattctctctaccactacctacttctccacactacccctgcctctcaattgtaatttgccttctaaatatatctaagtaagattattggttcctctagagaccatgtcttgttttcctaaacaattctctggaaccttaaatattatttatttaattaaaattttgttgatcttcttatgtgcatttgtaataaaaatcaaaaaatgcagataagtagaaagcaataggacaaaaatcacccaaattctaagacttagtcactataaacatttaaatgtgtgatctgtacttaggtggttatccttataataatgcatagagtatgcacagatata

SEQ ID NO: 32826 - DNA, 1178 bp, Mus musculus
ttgaaggagatgtgaatttgacaaatctaaatttggatgatattgtgcatatccgaaggaaagaagttattgtctatgtagatgataaccaaaagccacctgtgggtgaagggctaaataggtatgaatttatttatatacagaaattggagttttttcctgaaaacacagtctttctataaacttttattgtttgtctactcttatttgaaagtataaatggtaatgatgctctgtgactttaggactcatacctttccctaatggtaatgtgttcacatgctattttcaggaactttcaacaatggaagtttgcctttgcttaattttgcttttcagaggtagagattaaactagggcctcatacatgttgaaaatcactctgccagtgagcaccaactccagaaagttttcttgttttgttgtatttcttcttgttctgccactggtacactcaactatttaaatgtgagactaacgtttattttgttttgtaggcattctgttgccatatattgcttggatatggtgggaggttagatagctcgcactgtaaccggtgtggtgttgaaccctaacttagctttgattcacggcattcctgcttcacctcccctgtgctgtagtaacactcctgtactgctacatccatcttcctctggataagatgtgtgattggtaaaagtcacatttgcagaactccagtaaacagcttgtttgagggctgggaataggggtgaaggctggagagctggctcagaacacttgctgctcttggcagaggcctgtgtttgggttcccagcaactcacaactgtttgtagcgctggttctagggaattctattctgtcttgtggctttcataaacatgagcacacacatagagtacatacatatatgcatatatgcaaaatacccgacactaaaacaatctctaaaaatgacatttttacatctttggtcatggttgcatttaattctttttttttctttttttttttttcttttttttttttttatgtataagtacactgttttcagacacatcagaagaggacaattggatcctggtacagatggttgtgagccaccatgtggttgctgggaattgaactcaggacctctagaagatcagacagtgctcgtaatcattgaactatctctccagacctacattt

SEQ ID NO: 32827 - DNA, 1212 bp, Mus musculus
tgcatgtatatttgtatacacttgtgtgcctggtgtcttaggggaccgggagatggtatcagaccctctagaactaggttgcaaattgttgggagccaccatgtctgtgctgggaattgatccaggattctctatacaaagcagcacatcctcttaaccactgagccatctttctagccctagatttttctattttaaaacttcaattctagatagtactcacaactttgtgatattacacaaaatttttttttttgatctggttttcctgttacaggttaagaggtagtaattacatcctatctcacacagctgctataaggatttattaaatcatctggtgtaatgtcagatccttaataaaaattaactgctgtcatcaccttttctattgccaaagactaaggtatttttttctccgttatcagatttagcttcctgagcaaacctgttgatgagaacaatcagcaggatggagaagatgactctcttgtatcacgattttacactaatcctattgccaaacccattccacaaactccagagagtgttggaaacaaaaataacagtagcagcaatgtggaagataccattgttgccttgaacatgcgtgctgctttgcgcaatggattggaaggaagcagtgaagagacgtcattccatgatgagtcattgcaagatgaccgagaagagatagaaaataatgcttaccacatacacccagcaggtcagattcacatacttttttatatctttgaaacagtttttaattacagcaatgtggtcaaaagagtccacttcttatagcctaagagactgtcctatcttcctaactttgtaaattcaagtggattgtttattagtaagaccttaccatagtgtattctatggagacttaccatgttatgggtattccttttaagaagaggactctatggtaaataaaatctacaaatcttaggttaagcaaagtttagtagactatattacatttaaaatgtttttgtttttctgtttgtgggaatagagtctgggtcttgctcatgctttcttcaaacttgcagtgacccttctgcctctgcaccccaagttctgcgttgagtatgtggaggcaagttgctcagaagctcagggtcttggctttgttttaactacaacgccatactgacacataagaccctgtctcatattgttatatgaaaataaaattaa

SEQ ID NO: 32828 - DNA, 1201 bp, Mus musculus
ctatgtagctcaagctggcctttgacttctagtccccctatcttagtttctctagtgctggaattacaggcatgagtcactgccatggttaattttaactgttaacttgacataattgagaattggatctaagaatatctgtgaatgatcattgtgactatcctgattgatggggcaggatctacccactgtggacagcaccattccctgggcttgggttccttctactctcctttttctggacctagagataaacccagggtctgtgctaagtaatactcttaccactgggctgcaccctctggtagtgcaaagtcacaccttttgattaaaagtttacattcctgagggtgagtaaaatgccttggcttgatttctattccgtaagaatttccatggaaattggagaaaggtttcaaattgcattagtggttctgcttattgcaggatgttatggaaaacaaaacaaaaaaacaaaacaaaaaaaaaaacattgcagttattattgaccctgaattttgctatttcagatactggctttggtacgactagtggaggagcatttggaacatctgcatttggttctagcaacaatactggaggcttatttggaaattcacagaccaaaccaggtaagggattttgtttggaatatatctggtttatatgtagctagcatagaactttactgagtgactacagtttatctacataacttgttttcttcccctccatctcttcaggaggattatttggtaccagttcatttagccagccagcaacctccacaagcactgggtttgggtttggcacatcaacaggaacatcaaatagcttatttggaactgcaagtaccgggaccagtcttttctcatcccagaacaatgcatttgcacaaaataaaccaactggctttgggagtaagtaggacactattctttgggcttgtacttctactagtttaatatttgatttgtttgctgaatgtgttctctttgctctatgtttacttatctcctttcccaccaagtggtcaaaaccaagaaatagaagaacctgaaagtgtattgagtttagtagactagaaaagagggcagtaaatatagcagttcctagacatctagggctaaacagagaaacactgtttaaaaaaaatacacacacacaataaaacagacagagagatgtgtctgacctagaa

SEQ ID NO: 32829 - DNA, 1197 bp, Mus musculus
tggtcccgagcagtttcagtccgaccggagccctcagtcccatcccaggatcctgcagcacccagtgtaagtgtttcttgaccaccctcccatcccaccccgttcctgacgagaagctagtctggtggctgggttctgcttcctccttcacgggaggaagtatggagtccaagagaagatttggtcctagaccttttactccaaagccagatctctgcctctgcttgccccaaagggagccctggagtagccatggtgatcagggccatagggactgtggggggtgagggtggggttgcttttctgccaggagggaaggagtgggaaagaccaacttcctggggtgttgaacctggatggaggcttcctgggctggactcagtatactgagctgaagctgaagctgaagggagaaggttctcaagaccctcatattcttccaagttttgaactggatcagatagttctctcagaggggacaggaatggccatttaggctccacagaatcacagtgcttgctgacctgtggcttggctcacttagagcctgggggtggaatggctggtagcttgtagttcttctgaaatgggtcttaggaccttctcattgttcccagttgaacatgggtgagaaggaggaatgtgatcagacagggtcagtgggaggtctgagctagtctgagctagaggtccttaatttagagccttaagctgctggataacaagagactttagtccaggcatttggttctggtgtagttctgagcctttgtctcttcttgtgaatgatgggacgaataacttttccactcctgaaccttctcttcagtttccatgaggatggtgattgtgaagtaaagtcctcacagttccagtgttcaggcccctggggccctctattgtctaggttctttaaaatgtggaactagagtgtcagtgtgccatggttcctgagagctgcccctgcctgtctctgccacttctgtcccatctctcttcatcttcttcctttctgaccttctttccatttatgttctggcttttccttgtgccagctctggaaaaggctctacttccccaggctcaggtatcctaccaggcctcaagttgtgccctttgccttgcttggaccactccttacaggatgttctctgcggccttggaccctgatgggaccgtgttccggctccgcttcac

SEQ ID NO: 32830 - DNA, 1222 bp, Mus musculus
acttcgggaacaaagagctgctaataacctctcagcctgaggaaaagagattctaaccccgtctgtgatgctggaaaacaagaaaccactctggccttccctatctccacgttctctctgggccctgggagagaagagcgggaagggtatgacagggctgaccccagcactgctgacctctccccaccactcatggggatcttcaagaagcatcaccattcactgaaaggtcctaaaaaactgagctggcaggaaagctccaccacttggtgctaaaaaaaaaaaaaaggtcctgaggttcactaaggttagggttcagagcagtggctgctacctgaagaccgcagccatttctctctggtcattcatctgagtgatgtgtctagtgatctaccgtgcacacccagagtgtgtgcacccaggtggtaggtccataaatttgcccaggtgttcaagatgtaccctcttccccatcagtttcattgtgttcctgtgtgtgtgactggggaaagtacgctctatgatttctaagggctttgtttcttgaggttatccagtggaagtagtattgtgctttgtcttgacagaaaatttgtcccagaagaagcatcaagtataggatatatttttcttccccatctaaaacttctagctttttggaattatgtctgtaatcccagcatgttggagggtccatgccaacctgggcttcataatgagaccttgtctcaaaaatgaagtaagatgccaggtatggtggcacatgcctttaatcccaacacagcagagacagtcaaatatctgttgagttcaagccagcctggtctacagttagtttcaggtgagccagggctatatagtaagacactgttttagaaaaaaaaataataataataattaaaggaccctaaaatcacaggcttataagacctttccctcctttgatcagggggaaggggtcagaggtagatttccctactccagaatgggttacttggttttcctttatcttctctactgtcccaggtccccagcttttatttgtatattttatttcaaaggacaataaatgtttttcttttgccaacagtctgaggtaggtatgttgctcctggggctcagctctgcgtgggacctgaggtgaagaatgggctccagaacggaggggttaagtctccagcagctctgctatctcccttacccttgctgcctagggtttcct

SEQ ID NO: 32831 - DNA, 1157 bp, Mus musculus
tgccctcctttggaaattaatactgccatagggaagatctcaatgggagaaactgaggagaaggggaaggagagttaaagaaataagagataatgggaagaaaagagaacctccatgagctgttactctgctgagtgtttttttttttttttttttttaaagatttatttatttattatatgtaagtacattgtagctgtcttcagacactcagaagagggggtcagatcttgttacggatggttgtgagccaccatgtggttgctgggatttgaactctggaccttcggaagagcagtcgggtgctctaacccactgagccatctcaccagccctgctgagtgttttattacaccatttttcctttaattttaatgacagcctagatgaggtagctatcagcaatcttgttttaaaggtgttgaacagagagctgaacaactttcccgaggtcacaaaggtagtaaatgataacagtgataacagaggtgcttggaaggcacacattactctgtgggtgatgagaactgaacctaggtcctctgcaagagccgtaagtgctctgaaccacggggctattgccatcatgcccacatttctgttttaatcatagtaaggattaatattaatttagcactagagtaagagctttggcttcttgtggaaggtcactcgtcatatagtggtggttagggatttaaaatcccatctgtctgttacagagcttgttctcttaaagtctgtattagttactcttctcattgctgtgaccgagaaacagtttaaaggagggaagatttattttggttcatagtttgaggagataaatagtccattatgtcatggaagacatggtagtgggaagctgtaatggctggcacccaacttgatggacgaggaggcagagagattggtacagagtggaattgtgccatatgaggcctgccctttgattatgtacttcctttagctaagctttcctctagcttctgaaggttccagggtctcctgaaacagtaccatcagccagctgaggaccaagtcttcaaacctctgagcttatgctgccattttatggtcagtgtccatgttcaagaagaagagccaagccaggtgcagtggcacatgcctttaaccccagcacttgggaggcagag

SEQ ID NO: 32832 - DNA, 1198 bp, Mus musculus
aaagccaggctaaccttgaacttgtgacaattctcctacttcccaccctaccaagtagtagaattatagacatgcaggacaacgtacattttttcagtagtactttgcccctggctgagcctctttgtcttgatctgatatcttttttgttttgtttttgtttttttgagacaggatttcactgttactggctggcctaactctctctttagccctggctggccagaactctatgtaaaccatgctggcctcaaactcatagagatctacctgcccctgcctcccaaatgctgaaattaaaggtgtgtgccaccatgccttgcttgatctgatagcttgctaggtctttagtcaaaggcctaccaaggtttggatcactagtaggcaaatccgggccctaacttcttgatccaatgctcccatgctctccgggttagggaaaagcttctttagccccgagctactcatcccctgaccctcaaccttgctgtagcccattgaggacaggccaaaacccttcataaatcagattctcttctccttttggcctggctggtgaccctagatgctgcctggctgatggggcgtaggttcagtgaccgctctctctgctctgcatccgccggctcggatgatcagtccctctggaaatacccgggtttgaggaccccctttggggcttttgtttttccgacttttggaactaaaccaacactcctatccaatgggccccttctgttgcctgcctcacaccccctcctgctccctttgtcccctcagcactgtccttactaactgaagggaggggttcgggggtgagaagaatcagcctgttcactgagagctggagagaagacatccgtggtgatgggtggcttaggcccgtcccttcagccgagccacatgagtgtcctggtggtagcggaccttcttccttcttccttctgggctgggagggaaagcaaggaaaagagcattcctctttttttctttttcatgtttcttcccttttctccccatttcttctttcttgttctccccttcccttcccattatgggcttctttgtcttcaagcatttcatgctttgaaagctaccagctgtataagccctgctgcctaactccatcactatgggattgtgttctctccatggcttggccttataaagctctgccaccctagtaacctctgacttt

SEQ ID NO: 32833 - DNA, 1851 bp, Mus musculus
tcttctgccttcacctcccttcctttctttgcaatatctggctcctagagtggggcacagaggggctggcccaagggcctgggcactgtacatatctgccctgctcatccttggtccttcatcattatttattaactgaccaccatggcctgcctgtcgggaaacccttccacccatgggctgctgctgtcacatcttctccacttcagtgcatgtcttagttgctcttccctcagttcccactccacttttggggtccagcttctgtctctgctgtcccagttttgaggtttggtttttgtttctgtctcctgctttcaggctcctctctcccattactccccaacgatcctagcagttgtggggaagataggaggagtaacttctgacacctgtacctcagatctgttcatcctactcacagccattctgcctaccccagactgggccacggtcctgatctctggggtttgttctatggaagtgtggtagactggagggaacctcatcctggagctcctttggatctccagggctccattcagggagtggaaccaactcccagggaacaagtcaccagagttttaaagagagaccaggcttgtgattgatgggagagacttctcccagttggaggatgagtagatgccaaagctgtgggctgtaaggcagttgccatttctctcttgccctgcccacacctgccttcctcttacctctgctcccctatattgcaggagtgtatctcttaagaggtgctgccctgaagctccccatcagcatcagcactactggggctcagggcaactggctcccctggctatgggagccacagtcatgacacagggctcttgtggagccctgggcaaggatgttatatttgaaccaaaagacaaacagttttaaaataaaaaaataaaaaataaaataaataaatctcctgaatttcccaagtgcctgcacagcatcctccctttgtcagattccatttttgtgttactgcatagcctgggccacaggcttaaaacagacacaattggtttggggcaggggtggagaaggaagatggtatatgtatgtgaaggctgctgtgtgaccacttctccccccacacctcccatcttccagacaactctctcctttacctgtttttgctatggctgtaaaggtatttttccctctgccccattctgtcatgcctgtaccctgagttcctaatttgggcctgggttgggtgcagctggggctggtcttaggcgggtgctaggctgtagactgccttgatgccccctggacaccctcacatgggtttttctgtgttattttcataagattctttgaagtccaataaagcatgtaggagattttaacctctgctggctgtgactcttattgtgtccctgtggcttaacaaatggaattaagaggttggtgaaccagtgggttagggcacttgacttcaaaccttacagacttgagtttcattcctgagacccacatggtagaaggagagaaccaactctgaaagttgtcctctaatttaatttctatacatgtgctgtgctgcgcatgcataaggaggggtacagaaaatacattttctccccctgcctccccccagacaagttttttctgtgtagtcttgcctgtcctagaacttgctctgtacactgggctgttgtggtaaatagaattgggggtttctaccccgcctgagatcatttagttcccagataaaagacacaaaacctatagatttataatagccttaaaagcactggagctgggcagatatcaagcctctaagctattttgtctacttccctatcgataacccctagttataacttg

SEQ ID NO: 32834 - DNA, 1473 bp, Mus musculus
tctgtgtagctctggctgtcctggaactcactctgtagaccaggctggcctcaaactcggaaattcacctgcctctgcctcccaagtgctgggattaaaggcgtgcaccaccacacctggcccaatgccctcttcttgtgtctgtgggcatcagacatgcatatctaagcaaaacaccatacacattatagaacgttattacatttatttatttgtgtgcatgggtatgaggagggagggagggagggagggagtgtgccataatgtacatgtggaagttggaaaccagggattgagctcaggttgctagccttagcaacaagtgcttgtgcccactgagccattttgcaatcatccaaataaccttttgttatttggttataaacaaacatggtaagaagagtgcaaatatctctaaattacaattgaaataactgttatgcttgtttgtaaagtttttacaagtttctcttgctgttaattctttggttcagatgtgtttcagactaattattctgatgtgtcctattatctggaaattccttctttgttttcagtggctgaaagaccacagcatatgttgatgagggtttctgtggggattcacaaagaagatattgatgctgcaattgaaacctacaacctactttctgagaagtggttcactcatgcctctcctactctcttcaatgctgggaccaaccgcccacagctgtctaggcacgtatcagttatagctgctttttgttgctgttgctttcttttttattatttatttgtttgtttgtttgtttatttatttatttttggtttttcaagacagggtttctctgtgtagccctggctgtcctggaactcactttgtagaccaggctggccttgaactcagaaatccgcctgcctctgcctgcctcctgagtgctgggatcaaaggcgtgcgtcaccatgcccggctgctttcttttttaaaaaattatttatgtatattagtgttttgtctgcatgtatatatgtgcatgcctattgcccatggtcagaaaagggcattggatccctggaactggagttagatagttctgacctaactatgtgggtgctaggaattgaacccatgtcttctgaaagactagctagtgcttttaaccaccgagtcaactctacagcccctaaagctgcttttataaaaggtttgactagggaaataagaaaaagccaggtggttcatcacattaaaaacaaacaaaaacttcaattattgcctgctctgattaaataatttgtattttgggacaatctctgacttatgggaaataagttggaagtaaatgcagttaaatgagaacgttatacagttggtcgtggtatttgtacagctgactgctttagatgctgctgaacagaatgtttttgatagggaattgcatattggttatattccaagaagattgtttaaaaaaaaaaagaaggctatag

SEQ ID NO: 32835 - DNA, 1303 bp, Mus musculus
tacattcttatgtcctgacgagtgtgaggccttctgtggaattacagagtgactttcttacttgcatgcttttgtctgtctgtcctgggaatcgtggccaagaagattaccctcgtgaaggatttagtgcgctgcagaagcagcctcatcccctaaatggttacaggctaaggcaggcgtgtgctctgtacagacctgcaagcagtacacgtaaaagtaaatacaaagaaacaaaaagatttgctattccaaagaggcaacattcctatttcagggatgaaaaactcaagcatttttcagggtgctttgtagaggagataaaattacaagtttttttaaaaagattggttcataggaatacatttaaagattttaataactagttttgtaactgatcacttgggaattttaaacaaagactgtctagtgttctggagttcttcctaatagctacgttttcttcccttgcagggtttaaagactggaatgtattacttaaggacgaggcctgccgctaatccaatccagttcactctgaacaaggaaaaactgaaagataaggaaaaggcactgaaggaggaggaggagaaggagaggaacacagcagccatggtgtgctctttggagaacagagaggagtgcctgatgtgtggatcctgagaaaatcagggcctgggagacgcagcgggctctcctgcccgccgaggcagacgatttgagcatagataggatagtgggtttgcttggttatcagcagctctgcttggacgtgcctgccaggacagggagccacgacttacagtactgtttctacacagtgtaaatatcatttttaacaaacagaaaaccaaagccagctttgatattaggaatcaaagtagaggctttgggaatactaaagagccttcctgcaaattagtgaggagacttaggaagtctcgtctctccagctttccctgcctggccattctcagtttgggcaaagagatttagtttgatttgactgattgcctagaagtaaaatcaagcaattactcatcagctaaagacctttgtctagacaaacttctataggtcattttgaaataaacatttctaagtgattgtgtggtactaaacttgtcatctattatcatacaagacagtttaggggaaaaaacccaaaaacccaacattttctgttgagttcagagagacaaactttaaagacatttagattgtatagatatctagtgttaacatatgccctttcctgccccaggatgaaatcttgttaacataaaattgacagtttctttcattt

SEQ ID NO: 32836 - DNA, 1157 bp, Mus musculus
atacatcacagtgtgatacgctgtccctccatatgtgcacaccatcttgtatccatcctgtcatctgttcatgaaacttggttgtttcctccctttagatagggagaataatggctgccatgaacattggtctacaaatatctattggattcctgcttttaggtttggtggttctatacagcaaagaattgctggactatataattctgtttgactttgaggagctatatttgcagcaccattatatttctataaaagtactaaaaggccttattctgtcttcataccttataacactcgattttcatatttttgataaagcccttctatgagtggggaatttcctggtcttgtagattgacttgtttcgttaaacccgagttttggggcattttctccctttagtcatcacatcctttttttcccttatgaaactcataataaatctgctttacgtaatggtggctatgaacggccttttggcttgtccccttccatcttctgctccctagactcggtaattgatttttcaacccttgagtttgttgattcttgcacaggcctgctgtttagtacctctagtgaatatttcagttcagtttttagctcctaaatttgatgttttaaaaaatcatttttatctatgttggtagtatgatgtttgtaattgatttcatttacttaattcgcccatattttgtattagcttttagtttaagacagctggcttgttttgctctgtgactgtagtctcatgaaactttgctggcctcaaacttcctaagtagctgagggtaaccttgagcctctgaccttcctgccaatggctcctgaggattcctgcactctacctactgagctatttctctagcctgaggcagtgttaatgtgttgggccagtagggctgagacttggttgtttgaggaagtttctgcttgttttctgtcactggcatgccctgtgggtttggtactgagaattgagactgatttgtaaagagtccgttctgcagatgagattctcaggccttaactgtgtggtcctgaagcctcagtttcctcagcacatatttggattatgcatgggtaaatgtttccttgaagttctagagctgtcccagtcaccccccccccaccccacccccacccccaccccc

SEQ ID NO: 32837 - DNA, 1099 bp, Mus musculus
cctggtaaacggttactggtgtgaagacaaaagtctctcctccttagtcttagtaaaggccaccagaagcatgtttgcttacagtgacaagagcagcaacacattctcactcttttagaatattttactggttattatatattattttagccagggtctctatgttgtcctggctgtcccagaacttgctatgatcaggctggcttaaacttcagagaacctcctgcttttgcctctcaccatgcccagccttaagatttaagaaaaatgatgtgtaggcatgtgtgttggtgtcagagtgtgtgcgcattgttcggcttcccacagaggccagatgaagccatcaggtctcaagctgatctcgagctgggataatggttgttagccacctgatgagtgctgagaagtaaacttgggtcttctacaagggttcttaaccactgagccatctctccagcctgtagtaataaatattttaaaaattcccacacagggtttcttcccgccttttaccatttatgttcccggatgaaagacacacacacacacacacacacacacacacacagccttataattttaatatgccttaagcagtataatacctgggcagatgcctaccctccatgttgttagaatctacctcctttcaagttattactatgtttcatctgggctgctcttagctccaattaggcaaccctctgggccacgttctctgagcccctagcccatggtggctctcctccctcctgcatgttcttactctcccatggcagcttcttctctctcctgccttgtggtctcttcccttaggtcagggaaacctaaaccgcacctatgtttgtgcttcgcagctattgactcctggcatctttacttgccaaccagaattaactaggggcagggttcctcaggctatgtgcagattccaaatcttggaggccagcacttagcgttacaataaacagtaaaagaaaacctcaacactagcccttcatcttattcatcagctctgtgtcataatttagttcccacaagacttcagtcagcttttccttctatagacagagctgatacattgatgatattgcagatc

SEQ ID NO: 32838 - DNA, 1231 bp, Mus musculus
aaagataaaaatggccaggcagggtagccatggtagtccaggatgactggtgactagagaccctcttgcttcagcctcctgtgtgtaagggcacaggtatgtgttgccatgcctgcaattccctattttcaaaaacagttggatggtgccaacgtttttatgctctaccctctcccttttatcctccagttcttcaagtaatgtgcatttattattgctgtcacttttcacatgtgattctttaatgttacattcaggtcacttactaggatttccatcttggaattaagaaaaagtaacaaagactagagacatcaactcctgagggtgaagtgttatttgacttaaagataccttttggaaagggctggcaaaatggctcagtaggtaaaggcacttcctgccaaacctgagagtcagagtttgatccctgtgaccacattcgtgaaggagaactaactcccacaagtgcaagcataatgtgtactccctcctcacacacacacataagcacaatacagcttatattgtaattgtttataagcatcatctgttgcacatcaacattgtcataatcatggtgccatgatttcttccctctttttgagacaggttctcatatgtatgcctggctggtctggaactcagtgtgtaaagcagactggcctggaacttcaagtgatctccctgcttctacctcctcgccctgggacttagatgtgggcactggcttctaaagttttcctagtgaattatccgtaactgctttgatattgctactgttttctcctcaggacaaggttactatatataacactggggagggacagggcttccgggcagcccttgcattccctggattaacttaggtgttgtgtcagacccaggaactgtggttgataaggccagtgctggaccacatccttgctttccctactgacttcaaagtcgctcttcatggctgctaacaagtgacagacttttgcaacctctctgcctccagtctgggtgaatgatacaatatatgaaataagttgtattaagaagtgatcatcagcccataaaatacagtacagttctgattattggtaactactgccctgtcagtcaatctaggttaacttagggcaatatgaaagtcatgagtaagtttagaaacctactgggggctgaagcaatggctcaacacctaagagtactggctgctcttccagagaacccgggttcaatt

SEQ ID NO: 32839 - DNA, 1110 bp, Mus musculus
ggtttctggtggtgaaacttaagcccacacccttgaagcaagcccttctataggtattttagtgtgacagcagggttcctgatcagtgtgggcatctccagcgcctcctggtggacattttgatgcagcactgacatttttaaacatttttgtttcttttccacactgcagcaaagcaatctacagccacctgttcttagaacacagatagaaaaggaaaagccactatatattgtaaaagttacaatagaaaagaaactaaacaaagctgtaaaaagttagcatttactgaaatgtatggagatagtgagcagctagtttctaatccaggtcttctggtccaaggcagggctctttgcagatgctgcctttcctcaagaaagaatgttaaagttcatccatgggtctgagtttgggggagacagagtagttagtcagcaccctgagttctcataaggtctgtcctcactaggagtgagttctggaccctgaggaagccccaagctctccccaccaagctgaaaagtttgtttcgagcaccggatctgaggaagatgctaaaagtctttagaggtaagtttggggtgaagtggatgtgggatcgctataagggtgtagtaatgtagagaacagtgctgatgaggtgaagtggatgtgggatcgctgtaaaggatgtagtaatgtagagaacagtgctgatgaacgaacacagagggaccagtgcgctgcgctgagaatgatatgtagtccctgtatcagggatggtgttcttctacatgttttccttttcttacagagctgacagatgtccaaagctattggggtgagtagaatctatgccctctgtgaagtgataaccgtgagcccctttcacatgcttctgctcagcagtcatgcatgttcgctcaggtcttaggtgtccacatctctcctttccttgctacctaatgcttttggtccccctacagccatttcctttgtgccctcctcgcagaatcatgggacccacgtgcccattcttatcggttactgttgtaccttctcctacagtggacgtgacactgaatccacagacggctaatttaaatcttgtcctgtcgaaaaatcgga

SEQ ID NO: 32840 - DNA, 2369 bp, Mus musculus
ggaaaagcatttagtgttttggggtttttgtatttttgcttttgggttgtttatttttgttttttgttttttatttttagagatagggtttctggaactctgtaggtcaaactggccttaaacttggagagatccgcttgcctctcctgagtgctgggacaccagtctagttgtgttttggttttgggttttttgtttgtttgtttgttttttgtttgtttgtatttttgaaacaggctggccttgaactctgtgattgagaaactaactgagaactgatccagagtcccgattacaagtggacatcaccatacctggctgtgaatttgttttagtgttgtttgagatagggtctccataaatagcccaaactggccacagactcagtccatttgcctcactcccaaatactgattatagatctacctcacagtgcctgactgagctcccaaatactgattatagctctacctcacagcacctgactgagctcccaaatactgattatagatctacctcacagtgcctgactgagctcccaaatactgattatagatctacctcacagcgcctgactgagctctcaaatactgattatagctctacctcacagcgcctgactgagcacatttgacgacttttttctttactaatgtctgtggtcaaatgtaaagaacctctgaattagataggaattttttaataaatattgaattcagtaattttttttctctagttactgagatacttgtgtatcctttctattctgctcctgggtcagcctcactgagttgtctcagttgttacgtttaccactgattcctgaagcaaaactgtcatgtgttacattcagcactttatgtttgctgactctaggtttggtttttgtctctttataaacaaactacctctaagtttgcattctttgttatctgtcaaggcatatcagaaagaaattatggggaagggcttatgtatgtgtatttaggatcacaataaatcctaagtatgtatatttaggattacagtaaaaataataaaatctttggatggtttcaagaagagattgtagctttggttttaacaataaatgctaccacaaccttcagccttcagcataaaattttaagagtggtaataaaaactagaaaatgctcttgaaagggagataaagtaagataaggagaagacttcaatcaaccagtatcagttattatttaggaggaggaagaaattcagttacccattctcacagtgagttattctggtccccccagcccctcttatttcttctgtagagctaggtactgaactcggctttttacttcaagcagagacattttagcaccaagcttaaccccatttttgtgttttgtattgttattattggggtttgtttgtttgtttgttttgttttgctgacacagggttttaacacatttcccaggctggccttgagcttgctatcaagtgcaggctgactttaagctttgcctcagcatcctgagtaactaggtgtttagggtaatactgacttttcatcttagcctggaccttctctttgtgctcatattcaaattgcaaatgagtgaaccgctttggctttgctggaaaggtgcaacaaactttcatattcaactgtgaaaaaagttatagctgtgaagatggaaatgagtgtcgggggaggtgcagctggacttctgacactgcagacaagggctactcgtggcttttggtactctccaatgtactgtaacagtgaaatactgaatttccataaaagcaatgtaaaataatctattatcttacaatgatggtattttggatatattttaaataaaatgttttatttcaggatggagtcttcttactctgtagcccaggctcgccatcaaattgtagtggtagcttcctgccttagcctttcaactgctggggttaaggcataagccaccacaggcagttttccctgtatgttttaaatgtgggtactaggaaattttcagttatacattaactggcttctgttacacttctactgtcaagatgaactttctattcttgggggaaccctagaataataaagacttggccagagaaccaagggagacttgaaggtgcatctgtttataaaaggacctatctgcacactcacccccaagccctgaggttttttgttgttgttgttgttgggggagggggcgcagattgctttaaacttttattttcaatcgagtacatatgtgtttgtataagtgaggaggccagaggcctcaggtcctctgaaactggacatgggttctgggaatgaaactcgggtcctctggaaaataaagcatacccataactcctgagccatctctccagac

SEQ ID NO: 32841 - DNA, 1186 bp, Mus musculus
acctaggagcagattgtagcctcattaggtattaaaggttctctcactgtatcatcagagctgctagtcattactggcaatcagtttaaattaccagaaagctgctggaaacactcgctattcacgttgttcgtaagtgctgcttgctggcattttggtgtgtttggagccatagagagagagtgtcctgtgctgaccacttctgttgcgtccacactgcgttcatttcctgttcactactaatggtgcttctcatcctctgatcacttctctctcatgtgttaaacaagtgtattaaagatgcttcataatgccaacaacatagcaggtcagtaaacatgatcccatagtaaaatacaaggggtccccaaaattagtgattgcttcacacttactgtcctgtgggctctctggggacactgcaacagaagccacaaacttgcacaaaacatcatttgaaagttttaattttaccaatttgaagctaatttaattttattgtttctcagttataaccgtaaaccaaaaatattccaaatgtgggaaattaagttgaagggaaaggtgacttaaaactttcaaataatgtttcattagttttgtagcgtttgtgattgtaaggcatcagagctgacaactatgtggagctgtgggagctgcggtgcctttccatggaagcactctgttctcaagtgttctttgccaggctgggctctagccgctttgatcacctaagtgtctttacgctcagtcaagggaggctattaaagtggtggtaactcacatggaacaaatcaaaagaaatcagatcctcaaacagcaggtgaaatgagcaattaaaaccctgcgcgctctcctgggtgcaggtctctcttaagctgcatccttgcaggcctatgcacggctttcaacagcagggagcgaagactgggaaaggaatggcagtagcagctaaagctgaaataataaaagatttgcatcctacaactatgtgcattctatttataagactcccaaggttagatgtgagaagaaaaaagccttttgtgggccacgaatactttctcttgaggctgcaatgcttcccatgctcatcagtgctgccaggctcatcacttttaaaggacagacataagtgttacagaagaatgtatgaaatattacaatctaccacctcaaaaaacat

SEQ ID NO: 32842 - DNA, 1882 bp, Mus musculus
tagtcacaggctatacaactcatgtttttacgcatgaaactctgtttttctccacaggatggagctgtaacgtagataggatgggttgttagtagaagctctacactgagagcagtatttgatgtggcttaagaatttacatcacatggcaattataaatggcatatacctcaaaattatgcccccttgaggtcacatctaatgtcttgagcagttaggactggttgagatgtcacataagaaaaagcaggacttacgtatgtaatggctaggaatgtcactttacactgctgtgtattttctctgtccctaagacttggtctagtgccaggcatacagttggtgtctaatatttgttgatggaaagtatatgtatttagtatacgttaagtgatggtgatgtagcttgtttagtaatgtatcctatttccccctccctctcactttttcttttggatctcataataaaagacatcaacccactaattaggtcagttttcttggggacttaaaagaactaaatgatcaccacacacaagccagcccttttgaaaccctcactgctttcacgtgcttttcccacttgattggctatgtcctctgtccctccaagtgaagtctaatacctacttctaagtttatagttaacaagcagtttaatttttaagaaatcttaacttttcttgtacatgacacaattgacaatccctattcctttgtgtccttgtgtttggattactcctgggtatctttcttctggtctcttcatttaacctaagtatcattcctcagactttttgctcttaagtcactggaccgtacttttgagtaatttcaatgcagtaatctcattttagcttctcagtctgtctctctgctgtgctcacttggctgcctgttgtcgcttctgcatcttcaaggactcagtcaccacaaacctactctatgtttgtgttccttacttggttaatttcagagccgttgcaccgttcaaggctttacagttcattcctgtatcgtccacctgactattggtgtcttaagctctgccgattttctctcaacatttctatcagtgtttttcagtttttattacgatcaccaaaggattacctgtcttttcccatctctctgttggctcctatcaccagattgggctttctagaagccttcagcctaattcctgctggcaagtttcatgagctttttggtgagagtctctgcttgatatccaagaccctcctcttgtgtttgccactgttctgataagagtgttaaaacgttttccaaaagtccagagttgttggccttccaaacctttgcaaacacagtatttgcattgagagccctaggcttctttctcatctgggaaattccatgcatttttgaaatctgtgaaattacccctgtccccttcctatggtcaccactgtaactgcaacctacctctactgaatcacttattgtactgtatattttattttatgaagtgtcctttattagaatgtgagctccttaggggcaggaaaagaaactattcattttggcacctctatagcataatgtttggcacatgagcatttaataaatgtttgttgaataaaaaaaacaaaacaaaacaaaaaaaatgttctgtagatatctgttagatccatttgtttcataacttctgttagtttcactatttccctgtttagtttctttttccatgatctttgcattggtgaaaagggtgtgttgaagtctcccactattattgtgtgaggtgcaatgtgtgctttgagcttaactaaagtttctttgatgaatgttgctgccattttatttggagcatagatactcagaattgagagtttctcttggaagattttacctttgatga

SEQ ID NO: 32843 - DNA, 1213 bp, Mus musculus
actcttgatgctttagtttaaactttttgggataaatatgtaagaaagctgagaatttttaagtttacagaaagaaaggaaatgatacttcatatgtttaggaacatcaccattgaaattcagggcagtgccccctagtcaaacttgttaacgttcattttagttagatatgtgaacatttacactaagtgaattaaaggctataaataggatcatattggttggggccaaagttatggaaaagatgtttctacagagattatttattttgaaagtataggtgatgggcagtgggcatatagttaattctcaggttattatgaagaacgagaatgagagtgtgctggcaaagctttctgaacatatcacatggtaggtatgtatggaagatcatcaaaacacaaatgtgttagagttttggcttgaagaaaacattctcagcacatggctttggaacaagaaaactgggagaactgtgcacagctaagagttgaaggtgccttatcttcccgcggcggatggtaacagactcattgctcatgaacattgattgcacatgatttctctttccatgtatcagagaagaaaatggtgtgtgtgtatgtatgtgtgacatgggacgatcatacacgaattcctttatatttctttataataatgtaataaatatcctactgccatacatggttgttcacatctcagttattttctcaaactagatcaaagggaaatcttgtaagagaagtgtgtggatatcatagcttgtggtccatcaggttcagtatgtctgtgtgtgcacacacatgcacagaggagccagagctgaaggtgggtcttcctctgtcatcctactccttatgttttgaaacagtttctcactgaacccaagctcaatgattggctagggagctccaggggtctgtctcctcttggccctccccctcccctccccctccccagtactggacttatagattaacacctggcttttatgtgggtgctgggaatctgaatggaggtcactatgcttgcaggcaaggagtgtttcccagagccatctcttccagctccaggactagtattttgttagctttttacaaaatcattttgtggaggacttttaaacttacaactgcatgaaaaaggttagttttgagaatgactgaactcatacaccattgactagaccagtggttttcagcctgtgggtttc

SEQ ID NO: 32844 - DNA, 1120 bp, Mus musculus
ttgagtcagggcctgactgtgtaatccagaatggctttgaactcattatgtagctgcaagctgcccgaatttcacagcagtcctcctgcctcagccttctgaatgctgggattacagcagtcaccactgccagcttctttctggaatatgtattattgtttcattttataatgaagaaaaggttcagaaaaattaattagccaacaacacacagcatgtaattaacaacagatctatggatccagctcttaatattgatccttttggtggtgttgcactgttcacttcagtgtatgatgagagaaatacatgtggcatagtgagaaggaagtggacaggatgcaagagaagccacaacagtccaagtgagaaacctcaggtttcttaagacaactgaaaccaagttccttcttttttgtgcctatttggcaaggccctcacacaataccatcttttgtattagggctgtaatttttaatgtttatgggtgttttgccttcatgtctggctgtgcatcgtgtgtgtgcttggtggaagtggaggacagaagagaccattagattccttggactggaattagagacagttctgagccgccatgtgggtattgggaactgaaccctcatcctctggaagagctgtccatgcttttaatcgctgaagcattttctctattcctgatccagcatggcactgtgttactgaagctggtctcccacttgtttacttctgacttaattgctacattcgaatttatataccacccttacattttggttggcaaggaaaagaaatacagtgtagtgtatgtagttggcaactctgttccccccagaaagcaattttgatgaggaacactgatgtggaataagaggcagatagagacaagtagaaaggacagaatcatgtccctctgtacctctgcagtatagaagaagttctgactgagaagcaaatgcagatgacaaggggagtccagaatgagaagacatgtatgaggtcagtgcagtgatggcttattggttaaataggaagcagaagctcttagaatttttgctcatggacatggttcagaggttagatggggttctaataaactactgctggaaatcctcatctg

SEQ ID NO: 32845 - DNA, 1561 bp, Mus musculus
tggtcttttcatggatgtgaaaaaaaaaaaaaggaatcttcaaagatcatgcctaggtgatgggttatatgggtaatattagggaaaaatggatacacagatgcaggcttataatgtccattcttttttgcaggggcagttatctcttacgttctttctactgtagctacaagggataattctttctatgtgcgtgtgatgtctcttttttgtattgttccaatatctgtttagggtttccagttccttaggtttgccctttacttattattattttgtttgccgtatttgtgcttggtgacctgttcatgagagtacctgggaacctggtaagatcctttttagtagtcagtgacttagctgttatagttttgacccattatagatttcattggttgagccttctggctctcagttatgctagattgcaaagccatacagaagttccaagttatctaccttttatctcccagattccacatatctgtgttcttacactgaatttacccaatgacccctgaagctgctctgctcttattttgtaacctaaagcagtgttgaagtgccggcctgttgtattgaaagaaagaaatcagggcactcagaggtgccctgttctgcttgaagttggcacatttatcctgtgtatctttgccctgagttattcgctgagataatataaggagagttttcttttttcttttctgtagtgaaatacctcatttatgataatgtaattattagcaggtctagtctaggtacagacttcactgttgaaaccaactagtcttaatcttgggaggaccctttctttccttttctgcctcccttgcctttgtggttagcatattcacaagcaatgggagttaatgccatcaattctgctggatgctgctctaagatggtggtttaatatggaaaatacacattttttttctcctttttcctctcatggattttggttttcatttaaatttgctgctgttcattcacccattactcattcatttgggtgtattttgtgacttttataagttgattgctactgctactcttgtcttagatttcctacctcttcctacacagaaaccacccaagacccagcctggtcatactttgccacttttcccttagccctctcactttacctaccttatccttgatgagggcccaagtggcatctgcttcatccagtgttagcaggtgggggctactgaccaacatggtggggagtgggaggggttgggcaaggtagtggctgctgcaggaacccccaagctgcccagagagattaggcccgcctactttgggctgtgacctactccagcatgaggtcatagaggccctaataggtgatagagccttggatacagagagcactgtaactctactagcctcattgcagtctgtgggtcataatatttacaaatttttacttcttttttcccaattctattactgtttgtcattttatttttcctttatgttcttgccctgccctgccctgtctttaaacagcacaaagacgctctcttctttcgtctctcctcttctcttttca

SEQ ID NO: 32846 - DNA, 1502 bp, Mus musculus
ctttggggaaaatggagacttcatctttctggaccctagaagaagaagcacacaggcctagggtggtttggggctgcagcagttgatgtttattggggaccagtatccctatgccagatcttaagggccttggcccctgcatctcttgcctcagcttcattcgtcgctgtcgaactccgaagacaaaccctgaagcaggggcagggacatggagtgccggtcggggtccccggggcccccaccctgggctcctggtggagggttgcgggggctgaagagccagttctctgctagggttggggatagtcacagcttgactcatgccctggtcttcctccctagtccctccctctgattctttgtgctacaacacccccatcccgccaccttaccacaaccatgcttccacctcaccctccccttggctccttcatgaaggtcctgtacaaactctgggctgctgagcctattccttggttatgtgccctgtgccctctccctccaatggcctttccccttcctcatcttcatttcccctagcagtacctgaaagcatataggggcccctccggaaggggtttcgacccttatgggagaatctggtgggtctgccttctggcccttcttggggaggtggtgtaggtggggctgggacaggtggaggtacatcagcaacttcatgggtatcagcagatactgatgtgggggccagagttgatatgatgctaaggctaggtctaacccagttggctccttggggcaatgggtctttggtcagagacttctgtggtcccagcacacccttgggctgcagtgaaaacttgaggcaggagaaagcaataggtagtgaccgctgtaaccggatcagctggggttcacgggctgtaggcaaaagccctagctgcagccaggtgcaggagaagacctggtagatgacgtagatgctgtgggtgcttcggagccagggaagattctgttgtaggctcacctgccctggtggtagcagcaggaaagcaactttcttgcgcagacctcccatatgtaggcgaatcctgcagggctgcccatccatcattcgcatttcttcataggctgtctcggctcggccatttggtgagtattcccgtgtgcagtgggcaaagataccctcagaccctgcctgttctagaagatttggtagcagccctactgatttcagtgcccttctgccctgccgacctggcaaagccaggcgggtgtgggctggacgggactgtttcactagcacgcccagtagatcatagtaggctgcatccgacaggaaaggtactgccactacattggacccaaaacgctcctcgatgacctgcaggtggccagtttataagtcaggggctgagttaaggtcagaggttaacttgtgttgtctaaattgacctacccactattgttcactgtttaagtacattgctacagtatactaacagatctgtttcttatttcccagttccctgtagaagaat

SEQ ID NO: 32847 - DNA, 1240 bp, Mus musculus
tttcttttttctcgaaaggccctggaagcccaagtgttgattcttcgtcagtggtaacagtgccccgcccctccacaccatctcgtctggctctgtttcttcggcaacagagcctaggtggctctgagtccccaggtccagttcctcgatcaccagggcttactgcatctccaacttccagccctagtcgaaggcccagccctgcagaggagcctggtgagctagaagacaattacctggagtatctgcgtgaggcacgccgtggtgtagaccgctgtgtccgagcctgccgaacctggtctgccccttatgatggcgagcgcccccctcctgagcctaaccctcttggctcccggactaagaaacgcagtctactaccagaggaagacagggacaatgtaagggaaggagaggaggaaaacctagggagtcgagggttagctgtgggtgtaggggatacccctggctacctactcccaccccagctcaatggggtaccagggccatggccagaaggagccaagaaggttcgtctggtgccacgattggtaccacaggaaggagttagggaattgttagagggtacctctgaggacatggcaggactagagagctttgggcaagagctccaggagctggaggtggcattgagcaatggtggagctggctcagagcctcccttagagcctccactacctcctgaggaggaggaggcctacgagagcttcacctgccctcctgagccccccggccccttcctcagcagccctttgcggactctccaccagctgccgagccagcccttcactggtaagctatttgacctaagcctttgctctgtgtactcttgcatgttctcaacatgtttgtgctgatttctaagacccttttggctatgccattttcatgtatttgcctagccgtcatccattttgcttgagtcccttctatatacatatcatatcatactatgccctcatgtttgttgatatgtctttccatgcttgtgctgtttggatattgacttatgtctgtgccttgtatgtccttaaatgcatgttcttccttttcctttagtctggccattttctggggtttgtaaataggatgctctgtacttggtgaaaaatacatctgagccacatggacgatgtttgtactgtcctgtgtgaaagacacaggtgcacctctgttttgtgccattctcaccagtctgtgtatttttcaatcttctgctagg

SEQ ID NO: 32848 - DNA, 1147 bp, Mus musculus
ggtcatggtgtacaggcagataagaacctcaaagtgtaagttctacatctggattggcagacagcaggaagagagatagacactgggtctggcttgaacattggaaagctcaaagctcaatcccagtaacaatgaggcagcatctactccaacaaggccaaaccttcttaatagtgtcatttcctatgagcctgtggaggccattttcattcagataccacactctgctttcctaaatcctgtttttattaaatttatttttattttttaaaaaagattttgcgtttagcttcattcgcagcttcattgaccacttatgaactggcagctcctgaattttatagctctagtttaatttcactctgaactgaagtatgctctttttctttttcttcttttttctttttttatatttatgttttttgctagtcttataacccaggctggcttttaagttcactttgtagttgaagattatctaggacttctgtcctgcctttcttcacctcccaagcgctaggattgtaggtgtgcaccatcatccctggtttatgtgctgctggggattgaacccagggctttgtgcatggtggacaaagcactctaccaatgaggctgcattcctagcccattgtctggatatctgaagtattctttaagtgtctcaaaatttaacatgcttaaaactgttgtctgttccccttttcattgtcttcccctttcttccatcttgtttttttccctcggacttaaacagatgcttttttcgtttgagctagttggggacctgctatatagcttaggctggccttgaattggtagtcttcctgctttagtctgagtgctggcatttcaggtgtgtgttatacttgatcttatcaccttttgtgaagcataatttccctatgtattacaagacaatcagtggtgttcccaagtctccagtgttaagattcattaatcacctcttttgttcacctctggatgtgccatgccttactgttttcacttttggtttaaatccagaggcagattatcttcagttatattctagaccagctgtttgacacctgcctaatttgatcttcctccctgccctcccaagtgctgggattttaaggtgggagccattttgcctgactttatt

SEQ ID NO: 32849 - DNA, 1198 bp, Mus musculus
actcatttttttttaacctcttctgtttatttggagattggaatggagaaaggtatattggagaaaattaaacttacccaattaatgcatcattgataggtccgaccaaggcaagcatttgaatgttggctcttgtggttttcggtgaggtcctggagcttcctgtggcgacatgtgcattggctgattttggttgattcctatgacatataagccaactgctcctcaagttcattgctctttttttttattttatttttttaattagatattgtcttcatttacatttcaaatgctatcccgaaagtcccctattccctccccctgccctgctccccaacccatccactcccgcttcctggccctggcattccccttaaccctgatggtatatgctagttagtttttgtcaaatagacagactaaagtcacctgggaggagaacatctcagctgggaatatgcctccatcacatgggcctgtaggcctgtctgtggggcattgccactcaggcaggtgggcctgggctgtgtaaaaaagaaaattgaataaaccatggaaagcaaactggataagccgcagtacagcctttacctcagttcctgcctcatgctcctgccctggctttccttgattctggactctaacttgtaagatgtaatgaaaatgaaccctttcctcctctagctggctttgtcagtattttaccagagcaagaggcagcaaactagagcacagtgtatctactgccacctagtgccaaagagccttacctagcaaaaagccttccctgagaaggtcccaacatatcctcagggctggttatctttcaaggagcccatgggaaaaccatgcacatttatcctgtcaaacagggggtgcaggccaggcagcagtaacaattcttttcttgtgctattgagaagtcccagtccaactggttctgaaccagttccctgtatttatgtgtgtccctagcctcatgtctttggcatgctatgtggtggtttgggtatgtgttacagtgttcttcacactcattttctttctgggaaatcaactgcactatatttcctatatccccatagagttgtgtgtcaacggataatatagacaattggttgataatgaaactgctgcttccagacttggatctaacgaacacttcccttgtgttatttccacattgcccaacttg

SEQ ID NO: 32850 - DNA, 1200 bp, Mus musculus
tcaagacaaagctctgggaggggctgtgagatgctctctgagcaggggaaacactgagatgtgtggttggagtgaaaatttgtagctcattggtattctctgcttctaggacctgaccaacagccacttcttcttgtttgactttgaaaagaccggacctcctcgagtaggacccaaagcccaactctcaggccttaaacttcagccctgtctctacaagcgcaggtgaccgatggacacccattggaaggggagagctcagactccagtctcagaactctgaagactgtatctacccaggctatgagccaggatctggtaccaccctccttctgtaccaagaacactgtggtaaagcctccagctcagctctactctaatggagccttcttggatacagaaagcataaaattacttgggcaggctcaagaatgaggtgtttattgtgagggcatggatgtgtctaataattgtgggtcacttcagtattgtggaaactagtcggctgagaactgatggatctctgggtttgctttctcttcatctctcagaaggcacgtgggctctccgctgtgttgtcttctgaccaatattgtccacctctgctcatccatagtttctgctccttcagcttcaagactacagacaggcagtttttgccttatggcaggtcccaatgctagtttgccacttggggctgggagttatttaatttctttgtttcttggagctgggaatcatctaatttttttctgtgttgctattgttgttgttgttgttgttgttttgagacagtatctcacactagtccaagctgacctcaaacaaaacaaatggcaatcctcctgcctcagcctcctgattattgggaacacaggcatgggccaccatatttagctgaagaaatcatttactttctgaatattctatttctcatttgaaaaatgtaaccttcttgtcttacagtatgttaaatgggttcactgaggaaagctacagctagagctgggactagtaagaggtgctgaataaaccagctatggctatgtgtgtcgttgatctcactgtgtctgatcacccctactgccttaacggttgagcaataagtaatgtagatgtgaccgagaaagactgggggagtttgatataggcatgtaaacgggcttatttgctctttagagacttaacgtgtttgaagct

SEQ ID NO: 32851 - DNA, 1675 bp, Mus musculus
gcaaatggaaggctggttggggctccgaaggaaggagcgcccagaattagcttagctggtgggatggttggatgaaggtaagacagaagagtaaggtgggcgcctcggttcttgactcgtcttgcatccatgtgttttgtcctcacagctcatcgattatggaaagctgggcgacaccaacgaacgagccatgcgtatggctgacttctggctcacagtgagtgctccctacctgctagtgaggaaggaatccttagagaaccgggtacctggcagattgaaggcagggcattcttttatgtaccagacttgcgaactaccttagacacgtatttctcttatttgacttgggtaaaatgagcatccgcataacttcctgtaagtgtttctgtgtaacttggtacctgaatgggtggtgggaaagcctgtgaagatggttttgaaccctacctctgggaataatctatagttaaatgcctctacagttgtgactattttttctgattaactctccccatctaggagaaggacttgatcccaaagctgtttaaagtgctagcgcctcggttccaaggtcagaatgggaactacacaagaatgctacagatcccgaatcggaaggagcaagatcgggccaagatggcggtgatagaatataaagggaactacctccctcccctgcctctgcctcacagagacagcaaccttactctcctaaaccagctgctcctgggactgcagcaggacctgcaccataaccaggacgcaagcctccacagctcctgtacagttcaaacaccaaagacttaactggagctggagagtggtgcataggtgtggtgcccgtgttcgtgggtcttggagctcgtgtagtgtgtgaggcctggaagtagcattgtaaagccccctcataatgagacccagacctccctgctgactcacacgatcctctttgcacagaagataaaagtcttaatatgaatataagatattgactttcttgtccttccctaggatttatggaaagtaagaggcatccagatgctcagcctcctaagacagtaaattcacaacttaggttctaaattctaggtctagttttgcttgtttgttggaggggaggggatcttgctgtgtaatccagactatatccaccatgcagcagtcctcctgtccctgtgttcccaagtgttcaccaccacacagtgccagtttgctttggttttgttttttctgagacagtttctttgactgtcttagaactctgtttgtagaccaggttggccttgaactaagcgatccacctgcctctgcctcctcagtactaggattaaaggtatggggcactacctcctggctcagtttgcttatctcaacactaatttagatgggccctgtacctcttgattccaaaccatcttcctatggtgactggctgacgtccagcatagagacccaccgttggaattccttttttgcttttataagttatacatgagaatctttatgaatcctatgagactaggtttcaccttggcatcttcatacatatctaccaatgtcttttgaccatgcttaccaccacatgcatgcaccctattgtcctgcctatttcaactagtcccccttccacttgatgtctttttatgtgtgtgattatgtcctggcgagtttc

SEQ ID NO: 32852 - DNA, 1244 bp, Mus musculus
gatagaggggtgctttttggaggaaaaaccaggaaagaggataacatttgaaatgtaaataaagaaaatattcaataaaaaaggaaaaaatagaaaagaggaaaatcctttacctaattggacatgtatcagatattaatgattttacaacgtagagataacttgagattgttaacttaactgaaatatgtttatataaaaactctgttaaaactatgtgttcattttagtattttagcagattgtttttatattgttttgtgattaaaaaaataaaagaaaaattgtactgggtcaacagagttaaggaaaggtatatctatgtactttacacataacagctatatagagttagaaatagtcttattaaagaggaacagaaatagaggaagcaactctattttagttgggatactcattctcttctttgggtcagaatctggccacactagagaaatctctgcaggtctctttagttagatatttttttttaagtgggttgctaaataacagaagtatatttctcctaggaccaatggcgaggttattttcacaccgtgcttattcataaccctgtcctttggtgctgtgctgggaatggtctctagcaacgggttgtgatgacaggcaaagagggtggttgggggagacaactgcagacctgctgcccacacctcactcccagccctttctgggccaatgggattttaatttatttgctcccttaggtaactgcaccttgggtcccactttctccaggatgccaactgcactatctacgtgcgaatgacgtatcttgtgcgttttttttttaatttttaaaattttttttcttcttcttaatataaataatgggtttgtatttttgtatattttaatcttaaggccctcattcctgcactgtgttctcaggtacatgagcaatctcagggataataagtccgtagcagctccaggtctgctcagcaggaatactttgttttgttttgttttgatcaccatggagaccaaccatttggagtgcacagcctgttgaactacctcatttttgccgattacagctggcttttctgccatagcgtccttgaaaatctagtctaagtctctgggacactttacagtgtcaggtaacaataccatctcatagaatggaccttaaattcaagttttaaaaaaggtacttggttactcccataatgtgtgtgctactgtgtcaccagctacgtatgtctcagattttatga

SEQ ID NO: 32853 - DNA, 1909 bp, Mus musculus
acagatcatatttgaattcaagctcctggaaactggctcactcaactgtgatttcttataacatggtatgaggtatttatatatagctatataaataaatatataaacaaatatacatttatataaatattttttatttatatgcagagggactaagtcagacctttgcaggctccctggttggcagtttagtctctgtgagcccttgagtgcagtttagttgattctgtgggttttcttgtagtgtctctggcccctctggctcctgtaattcttcttctccctcttcttcatgattccctgagctctgtctaatgttattctcttcaagaaaaacagcttaggaaagtcataattaaacaaatatattcagtaacattaaacacattaaaggtgtatcatgtgtcaagagccccgcttgctattgagaattttatgatggaaaaggattaaagccattgtctaggttttgtaattaagaaacttgaaactgtacctacctcccaaccctgtgaaaggtggaagagagggttaatgcccattatgtagtctactgtttgtgacctagacctacctgttgagcctgtttctggttcaagcctatgaataaataaaaatgaattgtagagcgccaggccaaatttatctccacggcctcccctagcatgttacattgtctggggaccataagacagtgttagactgaagtgaaaatatgtaagtggacgatggtcctgtggtttggaacagaaggtctccccaagtccccatgtgtctagatgcttaagtccttgccaaatcattttggtcagtataggaaggctggatatactttttaatattagcaacctaaaagggaagtattacacagatgtgtctctgcatttgtgatggtttgtatatccttggaccagggagtggcaccatctgaaggtgtggccttgttggaataggtgtgacctggttggaatgggtgtgtcactatgggtgtgggtataagatcttcaccctagttgcctggaagtcagccttccactagcagcccttggatgaagacatagaactctcagctcctcctgcgccatgcctgcctggatactgccatgctctcaccttgatgataatggactgaacctctgaacctgtaagccagccccaattaaatgttgttttttataagacttgccttggtcatggtgtctgttcacagcggtaaaaccctaactaagacagcattggtttctactttggtcaaggaagaaagtgagcgtacctggtgaagacagtgacagccactgtcctttagtgtgtaccatttatgtgtgtctgaatgaacacttgaaccttttctaggaaaaagtaactttaaagtagatttaaattttttttacatctttttgtagtgttgggaactgaacccagggcctttagtacactttgagctatatcctttggctcaaataaactttgtcttatttaaaatttaaattcatggaaaagttataaaaatcgtacataaatcttcctgtgtcccttacagtttcccttgaggttaatatccaatattattgtgtagcatttgtcacaactaatgagctaatgttgatgagatataaactctctttcctcaatgctaaacttcggaatcatgatttgggtaccgtactagttggttctgtttgatttggtgttgtctctatctaaatccatcagtgtttcatctgcttcctaacctttatagtctaggatagtttaaaggagattaaacttctatacctgctagctagagagaactgccctgctctcagtactagtaggaggaaagttttatgtgctgaggcaatgaccagcagaagatcattgatgtccttcccaaggcctcaaattccagtgctatctccagatggaa

SEQ ID NO: 32854 - DNA, 1120 bp, Mus musculus
gtgtgtgtgtacacgtaccccaaagccaaaggaggctttagaagttcagagtcttattggagtacagtcagtttgagtccaatctgggatatatgagactgtgtctcaaacaagtaccagaagtaaaaggaaagtatatgttccgtttatataagttaactttaatctgaattttagtaatgtacttgtttcatcggtcaagaaacagtagcaaaggtgatgagtgtaccatgtagctctcatgtcagtgagcactgtcctcctctctcaccctgtgtgacctgtagtactatgggtggcaggaccttcctttcccagcactgcttatctgtgagggcacaggctgctggagtgtcacagtcactactataatcacttttgatttttggctcaaacctttaaaaagaaaatgtctcctccagagccctgctgtgggactaggcagcaaggcttccactaaccactcagccagactcacgcagagcttggtatgagataatgaatggaagagaggagtcatctaaggacaggaacgtggtccggcagggacagcgtcagagcatgcagttaacacctgaaaaactgttctatcctctctagagatgatgctcccataaggcatatcttctgatgcctcctgctaccccctctccctctcctcctgttagctttctcctttccccctgtagttctctcaggtcatccattactctccctctgcccttcactcagtaaggtaccttactccttccaaataagaggctcatcccatcagctccagaagcctcatacccccaccccagtgtgtttattgccacttccctggcctgagcccaatgcatggtcaggaaaaagaggagcagagcttaatttagtctctcctaaagagaaaatgggaaagaacacttaaaaatgattgacaaaaaaaaaaaaaaaaaaaaaaaaaaacttaacctaagatgcaaacgtggcacacaaggacattttcttttagataatacagtgtggcaggagagaaatgatttgtgccagcttgactctggaccttgtccactattgagcagtaaagctcaccattattgtgttaagaagcatttatttggctctctgtgcctggcct

SEQ ID NO: 32855 - DNA, 1928 bp, Mus musculus
ctccctttcttacatgatgttgctaactttgcaaaattttttaagtatcattccaaattcaccttagcattatctcttcctcagagctttctcttgcacaagatgttggtttaaatgctccactccctttacacccaaggggatcctgactgcacatcagttatagcatttataatgtgctgctattcctagtttgcaggcttgctgtctccagggtcatacactacaagtgaaataggattgttatagtcaccaccattctcagatcctccctccaacctggcatctagtaggtgttcagtatatgtcacatgttgattgaactatggattaatgaatgaaagccagggcttccaagcaagcttatttgcataacatttggcagccagtacagacaactgctaaatcacaaatctctattctctgcaggcaacaaggaagagacacctgcaattgttattcttgggcagcactgggaagcatcctttcataaacaaagcacacactgcctaccataattccagtggatttctgaaaggtgtttttatgactgaagcaaattctttcaagctgtttctgtggaaggtaaagttctcatcattcagaattgatttttagctcatcaggcacctgaatcattctatagcaggggatgcaaagtaaaataacacccagaactcaagtgagcctcttcatggagaccagaaagatttcctgaataaagtgcccataattacagttcctttgtcttcactcagtagcccaggcagctgactaacaagataatatttgccattcctacttgaggtctgaggcagagccaggggaatgagaaatgagaacattttttgacaaatagtgaatgtcaaagggggtgcaggaggatgacagaatcagtgcaatatatataaggggaaaaatcacatacagtattatatatgtacagacatatattaacatttattccagagaaagtagataagcatcttagaaaacaactctttcatttgtatgtgttggggaatggcaataaaaaggaaaaaaaattaaggctgtaatatattttctaaaaatgtaggtagatggaatagtatacataaagagacagttctatattttaaggtagattgtgaagtaaatgtaaaatagacacagtcaagaagtgaataacattacagatagttgtgctgaaaggacaaaagcttgagaaaagggcatcaggattaaatgcttgtaagcgtctctttactgtcattttaggagaatcataagaaggagagatgggaaatgcttgctgaacaccctgttaacaaagaggtccctttgctgttgagaaagaaaatggtactgttggagcacaaaatgggacctgagcatggtgagtgctcgtgagctccctacccacccccaacactgttcattattgaacatgagtattttaagtcttgaatactgatagggaacttttggctagagacgtccccaaaaatcttacctttaaattttactttgttgaatctttgcacatgccatctgcagctcgagtgatggtgcagctctggttgatggtttatatggatctctccttgctttgagaaggtgatggtatgctgtctctgttttcagtatactgtcatttgctaatgattttccttaatttgaaactggtttcctttactgtactgtgcatttagtgggtcattgtgtactccatgaaggattatttttgaactaattccttgaaggcttattttttcacatttttttctttcatggacttacattaatcatattttccaaaacatttttctctctaaaagagagcatatggatattgatacttctagtcctaaaatgaaatagatttgcatttgtggtggtttgaataagaatgaccacatagattaatatatttgagtacttactca

SEQ ID NO: 32856 - DNA, 1104 bp, Mus musculus
gtcccactgtaggtatctggcctctatcaatatattctgaactgatccctgtaattatggcacgggggcctatttacaccgaacttgacttgctgaatgagtgtaaacacaaaattgcttcaagttgctaattgttctttcctgctgtggacattggctatgacccagcaatttggctctagttcaaccatataagctctcctgttgcaggcccttgaatattacctcaagtaaaaattgctctgaggtccactgggtcttagttgcagtaaagaagattgtcttttaatattttaataaacatttgcactataaagtgggaaaagcaacttttttaatatcactgaaaacaaacaaaaaaggtgaggaagccatttgtgagcatttctgatgccattttttctgcctttgtctccaagccacactggcagcaagtgggagatgtgtgcttgatggagagctgattccttagaccacagccaagggttttcactggacgttctgtgggtagaaaagaagtgggcatccacaggagcacccaggtagacaggtggcaagctgtgtaccatgggcatcatggtgctccttggcatatggtgcttagccacagttcctcagtggagcctgtccctgccccagatgtgtgcaccctcatggactcgggaatccttcccagatgctccagcctgtgtcagccagtgatggggctgggcagaattgtccatgagtagattctttgcaggtactttttctgtcctttttttgaactttctggctgcagtttcccactctgggcactctgtgatcctcatttgtcagaatttgtaatggtttagcttcctgttttaaagcatgttgcctgtatattaatttaacctctgtgtgtttatttacaaatttaatgataataatccaactagtatatatgtacagtattttttaaataatggagagaagcaccgggaagtggtggcgcacgcctttaatcccagcacttgggaggcagaggcaggcggatttctgagtttgaggccagcctggtctacagagtgagttgcaggacagccagggctatacagagaagccctgtctcgaaacaaaaca

SEQ ID NO: 32857 - DNA, 1145 bp, Mus musculus
gtttccaatagaggagttagagaaaggactgtggagttgaaggggtttgcaaccccataggaagaacaatatcaaccaaccagacccccacccccaagctcacagggactaagccatcaaccaaggagtacccatggctccagctgcatatgtagcagaggttggccttgtcaggcatcaatgggaggagaggtcattggttctacgaaggcttgataggtgcccctgtgtaggggaacccagggcggggaggtgggagtggatgggtgggtggaggaacaccctcatagaagcagggggagggaggatgggatggggtttctgggagggggcaaaactggggaaggagataacattggaaatatgaataaaggaaatattaaaaaagaaatagaacagcgcactgacattgcagacacaaggttctgaaagacgggcagctcatgaggttttaactctgctgtgtcttgctcttcgtttaaggcataactcaatccgaagacagctcaacctgtcgaacccggactttaatatccagcagcttcagaggcaggagcagctgactgggattggtagaattaaaccagagttatacaaacagaggtcactggacaacgacgatgggcggaggagtaacagcaaagcctgcgggaaactgaacttcattttaaaatatgactgcgacttggaacagctcattgtgaagatccacaaagccgtcaatctgcctgccaaggacttctctgggacttcagatccttatgtcaagatctacttgcttcctgaccggaaaacaaaacaccagactaaagttcacaggaagaccctgaaccctgtgtttgatgaggtgtttttatttcctgttcactacaatgaccttgaagctcggaagcttcacttctctgtgtatgactttgacaggttctctcgccatgacctgattggtcaggtggtggtggaccacttcttcgacttggccgacttccccagggagtgcatcctttggaaggatatcgagtatgtcaccaacgtgagtctagccttcttccattgggctgggggagttgcttcttcttttccacagaaacagactgcttacacgtgttatttgggaacaaacgctaaaattcacattgatatcctat

SEQ ID NO: 32858 - DNA, 1154 bp, Mus musculus
ttctaacatttttttttttttagaagtagctcaagtctgtttgactgacattgaagaaagaaggagagtggggtgatctctatcaatctatcatcaaccaaagaaactccagggccacagctaagcagcagtactgttgggctctcaggcagaatggccacacagttgtggctctaactgcctacaccttttagggagtggcttccagggttgtcagaaactcacagctgggtttagaacaggaaatttcaagttcagaacctcttctgggttgccaggcgtggggggacagggagattgtttaatggctccagagtgtctgtttggaatgacgaggttaatggaggggagagtgctggtggccacaaattctcaagtgctaatagcagccgagcagcacacttacagatggttaaagtggtgaatggtgtgtcatgtctgctctaccacaatgagaagcacaaaacaaaactccctccacttcccagaacccagccccattattctatcatcatctgacttcccagagtccacctgcttcactctctcccccaattccctgatctcaccacccatatgcaaacgtacttcctgaatatacttgctagaaaaaaaaaaataaagagaaatcaggactaaaagtttctgcaggctgagagactccattgtttctgatggagcttctgcctagagagagttctcaagcccacggcgggaaagaggagcagaaggcgtccacacttccgctgtgccagaccccagcatcacagttaactcacacacgtgtgaaatggctattatattctttttatagtaaaggaaactgaggagaacaggaaggaaccatgacttcagcaagtattagtattagtgagcccaaatctgaaaacaggtctattttccaaaatccaagcttctcattttctgttatagtactctccatactttgtgtctccatatgatagttgacatctggttactgttgtgagatggggtttctatagctcaggctggcctaaaactcactctgtagtgggggatgacctcaagctgcctgtctccctgcctccacctccaaggttctgggcgtgagctaccgtgccttgcctgtcacaatcccttcgccaactctggactaaagattgtgattggat

SEQ ID NO: 32859 - DNA, 3098 bp, Mus musculus
ccagcaggtacaggacctggctctgtccccaggaaaacacacacacacatgcacacatatcaatcctttcacagctgggaaacaaggattgagtattacaaggtttcaccactcaaacctcctctctccagcctggtcttcttgcttcctccatacccctcagtccctgcagctcagacctgacagtccttcctttgcaccaattccttttcctgcctctgcatgggctttctcctccgccccaatggcccgaactcaccttcagcccaagtggcacttggacttcaaaatccctttagtgccctcaaaggctctgccagaaggttgcgtgcacctctatagttcatttatccccttatgagtcctttgaaatctgggtgaatatctcacacatggtttgtgtgtttccagcatccatctcagtgcctggtgtttgtttggtacacattaaaaaatacaagtgaaaaccagctcactctctgtttcttctccctacagaaacgatgactatggagaagaagactgcttgtgccaaggacacagtcggacaaccatgtaacaaagatctgcagtaacttttcccacctagcaacacccagatgactccagtgaagaaatactcagctgtaaccacagcaataactggccctctttccaaattggatgtggtgaatctgaagggttcatctattttcttcaggtggcccaaggtgatatgctctagagaagctcctccctcactgtcaaaagccaagttggactgtggaagagagcaagtggcatagtaagtggcttgagtgccaagatggcctttggttggatgggcatgacactggtcctgacagtggtcagtctaacatgcagtcatttgatttggatgccctggaaggacagaatatttaaatatatatccaggtgctaaataggcagcagatttcaaatcaaactttactacctgtgagctaatgactgtcttcagagaataattccaccccagaaagtgttccagttttccaagtaatggcccaagaaaatactaggctaagccagcctggaaaaagtctcatgcaaggcaggtcagttcatagcaaactcactgtcccttcccatgcacatggcagagtcccacttagccatggtcattcttcacagaacccaggttctgggattctaaaacattatttccaagtagcctcttcctttccagcagtgatattactagagtgaaacgtgccatctttgttagggacacttgcctcccagtggaatatgcatccaggaataatctttcctggacacagaagtgtgtgttatgagataagatcactgagagatgacactggaaaaaggcacagcttttgggctttcttgacacagctgccttctggctgtttccatatgcaacagcccagggtatagacttgggcagccacagaaagaggctcttttccacctcagacacataccacttttgcagcacttggggaatggaaatacctacaagaatgaaggccaagggctctccccagggtagctcatccattacccagcatcctcctggaccagtctactgccagttgtgcacctcatccttcctgtgtctgcctccaggaaatgaaaccaaaggccccagtaccccctgaatggactgggggctattacctaaaggtcctctctcatcctgggtctagaagaccctccccctgcatcactgttccacaattccattcccctccagtctctgtaacagaacccagagttgggttgcagttaaccatcctggagagcagcctctcttcatttcactttgtttttcagtgtaggttgcacccgagggatgcagcattacagcagatgttggaaagttctggcttccatatacacctagtacaagaaatcctactgccaacgccagatcttgtcgtgtcttaaaagggtggagacctttggttgtataaggcaatgttaattcattcaagcttagtgcattccctggcctcccagatccactcccatctccttccaacttcatttgaaggggttcaaagggaacctatgttcaaagttcagcctatgtctaataaaatgagaaaaacacaccttccttgcccatcccttccattcagacatccgccaccatatcagtatttagaaccaaagtatgaaggccaagtgccaacaggacagggagcagaaatattgtcactagatccaggcagatgtgcctagaagaatggtcccaaagaaactagaatggctccagcaaaagattatcaggcagccatcttattaagctttgacatgtccttggcaatgggagctcaggttggagatcctggggtagcctgttgttcccacctcaggatctcctcaccttgagctagcagccctggggtactatggaataagctactgactcaaagatagctttgtgggggcattcaggcgaagaagactacccacgtggtaaacagatggctttgtgtgtggagagctttacctagccagtacagctgtggccagaagctggctatcaatctgaattccctcagctcatttgcaactctgcctctgttctcttgtgttctgtttggtctccctttagtttcctagtaaatattccttttgaaaaatacagtcgttgtctcattaaatggggggtggaggggggtgattttctggctttttttttctaggataaaaggatactatgacatcttgaaagaaaaaaaatcctggtggaaagagaagaaacctcatcaccctggggagacctggtgctaagtgagagaaagatgctggctatcctcagtaaccaataaccagctctcctcccgggctcacttcagggatctctgccctgagtgtgtattgccactcaagtgtctcctgggatactgaacagtgtgcattcagcagaggctgcaatgtccagtatggtgtagcattggcaagtcagggaggtagagtaaacgggtgttggtaaaactctctagggatgctaactcctcatgaccgtcagtatccagttcttcacatgagaagaagaacatcattcacacataaagacaaacagagaatggcttcctgttgtggtc

SEQ ID NO: 32860 - DNA, 1146 bp, Mus musculus
ttcaaatcccatcattcaaaccagacgatacagggaccactattgccacctgcaggtcaaagtaagaataacatactggtgctctgctactgcaggggttaaagctcaccccaactccattccttataatcttcctaatgggccagaggttctgcggagcttttgttctctaagtcacacaggaggaaacagacagcgttagtcatgcatttccccagccattcagacagtgggtggcagagttgtctttaaacctggatctgtttaattttatgtcctttcggaagaactggcaaagtagctgcagtgttagcacttgctgcaggatttgctactcaatgtgcgtgtgtgtgtgtgtgtgtgtgcatacgggagggtggggggtacaagaaaaaaaaaaagagaggaatggggttccctggagctctgctatatccttgaatctcacccacaggggaccaaactccgtctcaaacaggccagggagggacactcccacgttcattcacccaattgtactcagtgtattctttcataatgacctcctcggggaaagacacaacggctcactctctgctacattgccccgcttagccttgaactcactctgtagctcaagtcatctgtgaaccccacaacccttctatctcagctttccaactaataataactaggattacaagcatgtgccaccagggtcagctgcaaagcctttcaccactggactcattccacatcattggatctttcattccgtagaccttctggtgatttcactcgtcactggacaaagcctggagatgcttttggctttcctagctagaggaggtgccaatgacatctgcacggaagaccaaggatagtggtgactggcaacttgattaaaagcagtacacttggaactcacttaggccacacagactacagcagctcagctggtttgtgtatcgggtacacatgtgcatataaccttaaagtgaactgtgaacatctcagaggcatacaatgctgaagggcaaagtggatttggaaccaaaagaaagaataaaggaagtgaagcaaacacaaatcggtggactcacaaaggttggcatgatggtggaaaggtggcattcaaaggaattcaaagcagaaatgtgactaggt

SEQ ID NO: 32861 - DNA, 1212 bp, Mus musculus
gtcttgatcttggacaacggcagttcagttatgaatgtgcagacccatgggttcaatctagggaggcatattggctgtttctagagggccctttataatgttccttcttttctagacagaagaggatatcttgctgagaaaggagctagaagaagtcgccacgactcatcacaaacagttcaacctgtggtataccctggacaggcctcccagtggtatgacccatgttactctcctttattctgggccagctccacccttggacacacctatagactagtctctagcttttgtctgttttgtctttaaggtttactccataggagattatgcctgggggctcttggtctatatagggcgtacaagaatctgagtgggaggatattgggagcagcagtttttaatgggagtcaagggcaggtgttaaatacctcttccacacgccacacactgcactgagtatagactctgagccaccaggctaattgagcacgtactctgcagtcagcacattgcacctaatatgacccctggccccttaacctcgtgtacctgctcatggctacttcttacctccaacctcttctggacagcagacttcaaatgctgagcttcagtcagctcctgcagcctcacctagcatcccaggaacttccgtgcaccttgcatcatgcattacacatctcctgcttccctgatctatactgcctatacctataagctgtccaccagtgtgacctcctcacctccccctaacagccccactttctactcaatgcttagagcagagagacagcatcccgagtctccgagagcctagaatttggcaaaaatgctatggacggcagggaagccacatgtctgcttcttgagtcaactatgacaatcagcagtgcagacttccaagcgtttatagggtagcctggtctccagcatcaggggcaaatgcagaaccatgcttcttcccctttctgcttcatttcagactggaagtacagctcaggctttgttagcgctgacatgatcaaggagcacctccctcctcctggggaggacacgctcatcctggtgtgtggcccaccacctctgatccaggcggcagctcaccccagcctggagcagctcagctataccaaggacatgatttttatctactaacacctcccacactacttagcgggtccctctctctgctttagagtgagtttggct

SEQ ID NO: 32862 - DNA, 1154 bp, Mus musculus
cccctgtaagactgatatttaatatccatttaagtcttaaacaattgcgacctttacactactctgtgccgccacctggtggcaactgtgtagattgctagttgcttcctccccattcccaccccaggaagtcctaaagttactaggaactactctggactcctacacactgagtgcgcatcggacagaaattaaagcgcacaccgcgcactaaaacttacaactagccggaaatttcatgtccaatagtcatcaagatatgattcacgtggtataaatttagccaatcaaatttctaattcctccaactcacgctcttctgttctaggctctctctctttctcggcaagatggcttctccggccgtaccggctaatgtccctcctgccactgcagccgcagccccggcgccggtcgtcaccgcagccccggcttcagccccgaccccatccacgccagctccgacaccggctgcgactcccgctgcgtccccggcgcccgtctcgtctgatcctgctgtagctgcgcctgcagccccgggccagaccccagcctccgcgccagccccagcgcagacgccggcgccttcgcagcccgggcccgccctcccggggcctttcccgggcggccgcgtggtcaggctacaccccgtcattttggcctcgatcgtggacagctacgaacgccgcaacgagggagctgcccgagttattggaaccctgttgggtgagttctggggaaattaatgttttcttcctgtgcatcttactattcctctcgttccatcgcccctgaactcttagcctgtttctctttttgcaccttcctactgtggcttgccttcccgagtgatctgaattcagccgaattgccgttaagccacagaaatgtgcaaggagtaggtataagctattgcgtagtttgtgatacttgatctacatgttattttatactcccaacaacgtggtactgagagggcatgctgccaaaaatgaaagctcaaatgacagcaagttcaaagcccttgacccgttaaacagagtacccacatgccctctcttatgcagtgacctaccaccaccccagcacaaacagaaagtgcccaccacccatgttagggaagaggatgtgtcagaagcttcctccaactcaaa

SEQ ID NO: 32863 - DNA, 1326 bp, Mus musculus
ttgtggggaagggctggtagggggaaatagcaggcaaaggagaccttgcaaaggaaggcttaatcgtgtctggtgatggaaagggggggggggtctctgagtttgagttctggaaaatactagttctgttgatgctggacttggggctaatgtgttggcttcgtgtttgctgactttgaggccatctccaaaagcaggacctggagaaacagcttagttatagaccacttgcctatcgtgcataaagccctgaattcactctccagcaccacaggagccaggtgtggtgatgcgtacctgtgatcctagcatggggctgttggagacaggaggctcaggagttcttgttcctctttagttagaaagggccctgaccctgggggattgggtagtcaggggccatgggctttgagttctcaggattatgtaacgcctggctcttctctctttaccaggaactgttgacaagcactcggtagaagtcaccaactgcttttcggtgccacacaatgagtcagaagatgaagtgagttgagaggatttaagcagcccctgtatagttcacagccattcaacccctaacttccccgaaggccccactgtgctgtgtctgtagccagagctgcagctgaagctctgctttccctgtccacattgggcctcctcaggtggtgggggttggtaatttttcctattcagcatatacttgtagcttcttaacctcctctcctgccttcccccttaggtggctgttgacatggaatttgctaagaatatgtatgaattacataaaaaagtctccccaaatgagctcatcctaggctggtaagatggcgcgggtgggagtggatagagggtctcattgtcatcagactagatctcgtctcccctttcagacatagaacatataaagcatgtgacctcgagagcctatgagattttgatgataacttgatcctagaaagtcaagaatatttattttcaattacaactttgttatgcagtttttcatattgttaattactgctaaaatgggtgtgagaaccccggcaacacccgctgcgctgttgcatttggtattggtgtcagctgccctgcgtctatgattgctgttgcaggtatgccacaggccatgacatcacagaacactcagtgctgatccatgagtactacagcagggaggccccgaaccccattcacctcacggtggacacaggtctccagcatgggcgcatgagcatcaaggcctatgtcaggtgagccctgggcacgctcaggtctaatcctgccgcttagtttctcttcaggaactttattcctctttta

SEQ ID NO: 32864 - DNA, 2140 bp, Mus musculus
aagataactctgggacagtcccggccttctcaagaggaagacactaactttgactgctttcccagcctagtctacacaaggaaactgctcccaggggcgatggtcgattaattttctccttcttccccagcactttaatgggtgtccctgggaggaccatgggagtgatgttcacacctctcacagtgaagtacgcgtattatgacactgaacgcattggaggtgagtttccttccctgctgtacacacttggagaccctaggattattcaagagaggagctgtttctgacaaagatggaagccctgggtagcttaaagaacacactcaaggttcatgctgactgaaagttgaaggtttgttcagggtggggaattgtcagtgtcccgggccatatagtcatccatatgaggccagaaccaatagttagcaagcaggtagtcagtcagggagagcagggattttggggaactgactgcttccagaaggcatggagggagttagtaggtggctagagacctctttcctcttgtcatgactaagctttctgtgttgtctcttactgcctgtcccacactcccacagttgacctcatcatgaagacgtgttttagccccaaccgggtgattggactctcaagtgacttacaacaagtgggaggggcctcagctcgcatccaggatgctctaagcactgtattacagtatgctgaggatgtgctggtgagaattggggagggaaaagcaagggagggtgggcatccctgctccgtctgctggtgacatgacagtacctgacaggacagtgcctcattgagtctttgttctgtgctcagtctgggaaagtgtctgctgacaacacggtgggccgcttcttgatgagccttgtcaaccaagtacccaagatagttcctgatgactttgagaccatgctcaacagcaacatcaatgtgagttccgtggctgcaccctgagagctgggtggagggacttctgctatgtcgtccaagttggaggcagtatagtatgttcagggcgactccacttcctaatggcttgactgaagtactactggtattgccatgacttgttaactagactcagttagaagacttgataaaatcagtttaacaaagtcagttcctacttttccccatctgtgttccccagggcacataccctatactgcacagggctatactgcagtcccccatctatgagaatcagagaggatagcagtcatgcacattcccttcctggcttctacctccaacccttgttcagtctgcctcaccagcatttatccaggactcttcgcagccaatgtccatggtggagctggctagccagcctttctgtcactgttgcactcagcctctcactgcttatcctttgacttccaggacctgctgatggtgacctacctggccaatctcacccagtcacagattgccctcaacgagaaacttgtaaacctgtgaatgagccccaagaggcacttgtgctggtcgaggttttcaccacagggctgagaccgaagtggaggcaaagggtttctttgtggtcttgagtcacggtgactcagtcagctgcttgtgactccaaataaacatagcttaccttttgtaaatgaactttatctgatgcgagtttattgtcggccaggagaaagaagcatgttcctgaactcgcacggaagccagggagtgggcactgtggggagaagctggttatgttggcatgactcacccacagtggctgctcccacagcctaggctgcggtagtgtcacccagccccacaccaagcagctttttcttggcacagtggtttacagtgatacttttttcttcttctaacttaggataatagcaaatggaatctccaagattgtttcagtttttggtttggtttggttttttctttctttttctccctttttcttccataacatcttacctggaatggcagtcaagagatttgccttgtgcagtgtggaaggacctagagatgtgctagtgagctgcaacaggatagaggatgggcacacacctcagtcctgggacccatggatccacaggagcagaaaaccttcatggtgaggaatagctgcttcaccagactgttcagtctggaaagctat

SEQ ID NO: 32865 - DNA, 1148 bp, Mus musculus
ctagtgccctgcatgtctggggcttgggaataccctttaaatggatgtcttttctctcctgggccctgctgtctgtgtgcatctccccccttcaccctcttgcttcataatgtttctcttgaacctttgttttgttcatcctttcgatctctttggcatttctgctttctccttccctcttgtggcccatgtcttacctggtctccctgtctccaccattcttgcttgtgcatgccacagcggactacatcgtcatgcagtttggccgggtagcagaagatgtgttcaccatggattacaactacccactgtgtgcactgcaggcctttgccattgctctgtccagctttgacagcaagctggcctgcgagtagaggccccccactgcctttaggtggcccagtccggagtggagcttgcctgcctgccaagacagccctgcctaccctctgttcataggccctctatgggctttctggccttaccaaccagagactggctgctctgcctctgctgctgaagcaggggggacagcaaatgggtatgacaggagaagaatatttctgtgccccaaggtcaacacacatgcccagtcctgggtcagtcccctgctgcagtggtgttatcacaccggaaagcctcttcacctggaggtacagagggagaggaagcacaagcctggctgctgtggctcagccatccactcagcctacgagtcagagacagtgggtgtcccgggaagcaggggtacagtgagtgtgtgtgtatgtacagggcactcaagctgtatgtagaaaaagctctggtggtcagcagaaagcactcccacttcaaaagggcccattaggcccaaagggggttaggagtggtagggataggtgcgtggcaggtccctgctaggattgcaggggcctggccatgtgtattagctggaggcttagaatgctagctcatttgttgctacagatttgcccagtgcttgcacacgtaagaacccagctctcaaggccaaatatctgagtggatggggatgataggagtcatccagtagactccctacatcagggctctcagcagccccagcacaacacctatgacacacacacaggatctaggtcaccattcaagtaatggtatgcttcaggaag

SEQ ID NO: 32866 - DNA, 2905 bp, Mus musculus
acctcactggttaatggcagagttgagaacctcaaattcttttgttcctactgttgcccagaaactagactctctgacctgctagggtctattctgcatgtcctttctcttcccagttccagagatgaaacccctccgagttaatgtataaggttggaaacctttcagtagggaatcaggcagttccctgttgaaagttgtctgagtttttgcacaccattctgatctgatgtggcctgtgcctggctcctctatgaggacttcgagctgtgcacagaccttagcaggaccactgcacactttgtgtctgtgtgacaggcagcccaagggttctggggctgggcttggacacgccctccattgggatggcaccactcatctggtgggcttgggaactccaagctcttgcctgtgtgccatctgtgagaagcttcttggagctgagacaccagagggaagcaaagagcatttagacattgctttttgctttgaaatagatatgtttggaaacgctaagtagaagtttaaaaagtagagtcatgtagagtcatgctttgaatatgtgggtcatgctttagatatgaagaggctatgcaggtaaggaggctggattgatgtaaatggaagtagtactttaagaaagctctagatttcccaggttggacactcgacgaaaggcacacctgctgcagcaggttctgacacacctgagccatacattgccatcagagaaccctcagcgaggtagcctttgtttacagtctagtttctagagggcagtaggacttccatgctggggctggcctatctcctgatgaaagattacagtgccatctccttcccatagttctgtgtctgccctccctccctgactttatagggagaaatctcctgacattagaggtgatagaaaccagagctttagtctagtcaggctgtttctctgggttgacaagtttaaggttgaacaggctgatttctggaatctcatgagtggaggggaccctggtggttaagagcggaactggaagcacaatggaaaactcttggactctgctctctgctttaccacacacaaaaaagagggttcttggctatttgaatataaagttggtagcaccaggaaataggctgaactttgtagcccactgtggaaaggagcagcctcagcacaaacccctctgtcgggccctgagtgacaagaccagcctcacaaggtcagattttaagactcagctcctggtgataatgccttttcttgaccactggcgctgtgaacacaggctaatggacttcagataccagggccccgggatcacctgggttagcctctcccacaggaagatcccttacccctcatcccctcttctttttggtccttggctgggtagcaaattggtgagaagagcagcctagtctgtaagagtgcagggcagctggaaccttaggcagctcctctgtatgctaccggctccacaccctaacactctccaccctctgctccaaaccagttcttctgcagagtggtgatgttagcttccccagctcctctccaagtctagctttttctgtccttctggctccaaggtgctctgtgtctgtgtgtgtgtgtctgtctgtgtgtgtgtgtgtcgaggaaagggcaatctgcaaacaatgaacagaagtttaagatcacatcagagtagggaaagacaacggaggcagtggtgaccactgtggactgtggatggtgccccttcattccatgctctttctcccatggttctgagcaggcgactgtcaaggaagtgtgttgtcagttcactggaggaggagctgagatgtgcacccttttaaatgaacatggggtggtgatggtgccttaacaatcttgacactaaggtgaagcaagcaagtaaggtgtgtgcctctgggaagacaggagtcggaagccaaggtgtgtggcaacagtctggaagagagcttttggtaatcataccgtcttcagtgacaaggcaacaatgctgtaaagtgggtttgtttggttttgttttttctttctcttttatggaaatggcaggtctatttgcctcaaacgttatgtagaagtagttctaagtttaacaagcaatagagatgactgcttagctaggatctgcagggagctctgctctgcaagcacaacacctgtctcatagatggacagcctggtttcccttctcagcagtcctggcctccccttctctgtattccttgccccagctacgatatcctcatgggatttcaggatgccaggtgccatcaaagcatgcttttttgtggtgcctagcactgtgactggggcccaactgccctgcagagttgggaccttgcactgccctagaccctggctttagatctgcttcagtctccagaacaggctatgggatagatttttctttcagtttatggccacctgcccaaattgacttccagcttacaatcttctgtcatttcaagatcgtaagaagtactgggatgggtttgagttttcagcacagaggcgagttgatctaggagcatacaactgtactgagcagctagagcatttgagcaacccatgtaatctttgtgtttccctccctgtaagaaggcctgtcagagcttgctgtaggagttagggtaaatgaaagttagtcctggctctcatcaccacctttcctagctcatcactgtgccttctttcttccctaagaaagacaatgcacccctctcttctgttctcctgccccttcgcccccactgaggtccaggtagagcagatgaggctgaaatgtagagtgttctatagagcatctcagtagcatagaaggagaagcccagctccaacctcctggaccccatactggtgaccagcttggtgaggacaggcaaaatttctcta

SEQ ID NO: 32867 - DNA, 1205 bp, Mus musculus
gagtcaggtggggagctgtgctgaatagtgggactgagtataataaatgtaagaggggagaaaggtactaagtaattacggtcaagcatggtatcagagtcacgtagagtactaccaacccagaggaacagagaaactgattcgtgtatgaggccggagaaataagggagctgggaattgactattaagatgcaggtggaatttaatatttaattaataatttggtgcttgtcagactgtatgaattttgggcattgatttttcattgcagtgtggtacaacttgtagccatttgggagtttgcaatatcattttttatctttaaaggatctcttcagataagttttgtatgtttgcctccagaggcttggatggagatgccattgctcacagtctctcctctcttagtaacagaagcttctctatctttctacctgcttgcccgtttctgagggaagctgacttggctgctagacagttgtcatgattagattctgtgcctctttgattgtttttctaaagtttttgatgtttatgttgattataatgctatttactttccattttgaaaatccttacacctggtctgatgatggcttagtgggtgaaggcacttgctgccaagccccggtagtctgagttggattccagggacccgcatggtagaagaagaggaacagtgctccatctttgccaaatgcccatctccttctctataaatttgcttattctcgacagtttatatcattgaaaccttacagcatctattcttctgtacctagactattttatgtactgtgattttggtcttacacaaatgcccatcagccagaggctcatgtggaccttatttgtgtagatcttagtttctgtgctctcttccctcaaataggctagacttctggggggaaggatccaagacttacaggaaactgcttcttggtgttaattaagctagtatgataggattctgcatattctttgccctttctccctcttgcctgccatgtaatgcttggaaccattgtatttatctatccaggttttatttatctattttattttattttggtactggtgttgcacctgagtgctgggtaagcattctgtcagtgatctgagtccctagccttttcttttttcttttgacagagggtcttgctaaatggcttgggatgatgccttagacttgcagtcctcttgct

SEQ ID NO: 32868 - DNA, 1165 bp, Mus musculus
cctgaatcttggggtgttatgtgtctgatgtatgttgtgaatctttctattatagggctactacaaagttctgggcaagggaaagctccctaagcaacctgtcatcgtgaaggccaaattcttcagcagaagagctgaggagaagattaagggtgttggaggtgcctgtgttctggtggcttaaaagccacaccggaggttaattaaatgctaacattttccatgtggtctttgcatccttccttgtctgcatgttggaaatctgcctaacattctaggaagaggtgaggtgtgggcccttgagagtcagtctgtgggaataagtgtagcccaactatgcacagttgtaaattcctacatccccgtgtgtattggtcttgatattcaaagaattgatgaatgccattactttcagtccaaagtgaagaaacctggtctcaaaaaatcccgaggaccagaaatgagatgggttttcctgaaaatctaaagttcttgaaaaaccttgccatccagattgctagcaactgcctagctttgtaagcttactgtgatggacaggtagctcaggacgactggtcacttaatactggacagattagcatggaaaacttaaggggaggaggaggtagtaggttccatccagcttcgctttgttggtggcatctaggtgttgttccaagggagcatgcctacctgcaacaggacatcactggttgggaatactgtagaaccagagctgtgacctttgaactactagaaagatgaaattttatgtaaagagtaccttggagtaaataaataaagcccaagatcctgattgtctacatctttaaatctggaagtttttagggagtaggttgtgtatgcttagtactgacgctgctttagtagacaagtgcgtagtaagaggcagtataagttgggtcactaaatacggaaaaattcattttaagatgtgttgggggacaaaagacttctggctctagagataatactgtgtgctgcccctagtccagatgatgtatctgtttatgggtggaggatgattgacatgcatgtggcagtcgggacaattatagggtccgtaacatgacaattgtgtatgtaaccacagtaattctatgtaaaggtttaggcatgtggctgcattgttatttcctaaagc

SEQ ID NO: 32869 - DNA, 1103 bp, Mus musculus
cttcagggacctcagctagtgtaattgcacaatcatagcagaggttttttgttgttttttaaaggcaacaagccacagatgcagggtgttgcccaaagtcacacagtggctgatctctgtgtcctaagttatgttttccctaccttatcagagccgtcattcctgtctgtcaaaactgatcctttttgcaaggaaaagaagagaggctaggagagaacatgggtgttgaaaggggatcatgaaacagcctcacctttgccctctccatcccacaggcaacaagatgaagttcctccacaagaagaattaaatgcctttcctggtagcagagtttagtgctttgcagagcccagggagagggcccagcctgggaccctgtgggctgctgtggctactttgcttctacaggccccactccaagccagcccacttctgccttcaccatattccaggatactgtttgtaaataatctgctgtaagctttcctgtttttgtaacaagcaaagaaaatctggtaaatatttgtatattcccaaagggccaggtgctttcttgccttgtctgagcttggatggagtcttgctgggtgctggtgactggccaattatgtgcagctgactgtctcagccaaaccactcatgtttcctcaagacttctggcctgtctgcctgaggccctgctgccagtcttgggccctggagagcaggtgctgtcttaattatgtataagaggactggttttttttttgtttttgtttttttggttgtttttaaatctagagtttctaattttttcttcttagtagttcccctatctgccaagcctcttgtttctgaaaggcaaggatcacttcgcccttttttgcaatgtagagccaggcacttgggcctggtccttgttccttccatcctctgacatggtcagtgagtcatgggaagcggagctcccgtcagtcagtggtggccatgatgcggtacagggcatttctccttccaccatccacagatgttctcaataaactgtacattcattttggctgaagagtcttattgtgttcctttcactttctacagttctctccaacccaggcgaatctagatgc

SEQ ID NO: 32870 - DNA, 1308 bp, Mus musculus
tgtccgtgcgttttaatgccatgtttgtttttacaaatccttgctggatggaggaagactccaaactggaagcaaaccccatgcttggtattttcctgttaatatattaatagagacatttttacagcacacagttccaagtcaaccagtaagtcttttcctacttgtgacttttactaataaaattaagctgcctgtgagttatcttgaagccccgtgcctggaacaagctctctctttcttgccacacagttctaacttggtgttcaagataacttccaggtgtgtttttgcttctctttcttgtggtgggagagagaaggaaggatgccttgggagtgcttgagtagcttctcaagtgtcttttccagacagacttatgaatacttcagaccctctacttcacacttgttaatgtcccagtgtagctggcttgtcagcgtgctggcctccccacttgacttttgcactgactacattacctaagattctggttagcctgtggctgcatttcatgaccagttggatctgaaatgcctgggggctcctcacaaaatgaagatttgtttcatgcactgtgatgtctgacgcaacatgttctagaacagactggccatctgctagtttacactgatacctaaacacagtctcagtgtgtgtggtcttcctcatcttcttctagtagctctaaggacttgaacatttagaataaagacattttctcttaagcccaagcctccctggatgattgacgtacaaatactgatcagccttttctgtcttgctgagaggcagttctttgaactgatgtgggcagctttgaacaaggactagagttcagattgcctctctctgagaagtctaacagttattggataactggcttttttcttcctacatcctctttggaatgtaacaataaaataatttacaaaacccaatcaatgtttctgttctccagcctttctcctttctcttgtgctgtgtgacaagcatgtgacacaaagacattggtatattgtagtttgaaaacatgttatgcaaccaaatcgtaagacactgactgtgttaagggtatgtaggtgcagagagaaagacaatgtattcctaggtacacaagtagtcagacaatctgaggacctctaatgtcacaaaccaagcatggtagtacatgcccttaagcctagcactcagagggctgagacaagagagttgcttgggattcagagtcattctgggctgtgtaatgagacccatacatatacatatacatatacatatacatatacatatacatatacatataca

SEQ ID NO: 32871 - DNA, 1909 bp, Mus musculus
aagtgtcacatgttttagtacttctggtgatgttagtgtgtgatgttagctgtggagaaaagaaatgttttggacctctgtttgatggcgggaggagtgctcacgtctgcctagtaactggtgtgtgctaggttgtctagggagatgaaggaggtggagaaagagaggcaggtgacagggataattgtgttgggttattcccagggctgagtggtggaaagcaagctcctttagagggaattggggctatgggggaggggtacagcttcttcatcctctcactaagttcaaggatccccccacccccaacttggccttggcctgtgtctttcttttcccttgctttgacctacctggatcactcccaccctaccagagatcacctcctgcaccactggatagccttgctggccgactgccccatcactgcgcacatgtatgaggacgtggcgctgatcaaggaccacacactcgtcaattccttgatccgagtgctgcagaccctgcaagaattcaacatcacactggacacttccctcgttaagggcattgacatctgacctctgagcaccagccagcagcaggacccagaaagactccctgcagctctgcctcttcatcccaaagggacctaagcaagttgtgggggacagagaggatatgtatacttactgtaaaaagaaaactagaggatttttggaaaaaaaataatctattttagagtttatttgctgacctgctttttacacactttcatgtgaaagagacagagaggggcaaggttggcgctgcttgttttgaagctggtgcctcccttgcatggccgcacgctgggagcctgtggcctcccagactgagcctgcaacaagtgtggggctgttccacatgccgccccgtcacggcggtgaggccattccacatcgtttttaaactaatgttttctatattaacattattctggctatctggctttcacgggccacgcacaggtgtgcgagtgggacatcccatgctccaatcaaagggatttttagcagtgcctctgatcaagcactgccaagtcagctccacatccgtttccccccttccccttttttgtcagtattatttgggaaggagacatgccaggacaatgtcattgtgctacatgcagaaaatcatgtttcctgttggcacaaagttgcacaggagtaaacatgagcatgtttaacaggtttgtcttttcttcacctatcttatttatttaacctgccattgtgtgttttaagtatttgtttttcttttctttttttctttaagagaaggaaagcttgtcagtctaactggctatgttattactgttcaatttatgttgttttgcaacttagaaaccagctacagtatggcccacttaataaaacacctgaaacaaatctcactggtcactggctttcatgggtgtgtgggttgtggaggtgtagtgtggccttcctgaggaccaaactgtgcatctctccccagccggctggggtctggactgtctaggacgcccctgaggacttaagtccgtgcaccttccctatctggtgcccaagactttcaaagctaattcagtcagccagtgaggaggaatgtgcaaaggttgttctcccaccgcagagggaggaaagctggccaagcttacaaagattgtcacttaatcgatgatactgggccatttcttgagaacggtaggagactgggtgggaacatagaacacaggtggccctgtctgccctctgttaacacatgcaggtgtgtgtgtgtgtgtgtgtgtgtgtgtgtgtgtgtgtgtggtgtagaagccctttctctagtgaagggtttgctctgtcaggtataacagtggaaaagccttgaccctagtaaccagctaaatttttcttttctt

SEQ ID NO: 32872 - DNA, 1168 bp, Mus musculus
ctcctatagcgttacctttcctgctattaaaaccactattgatacatttcttgaaagttttcatgttcctcagtcatcttggcattgatgttgttacatatttgtaataagcatttgtagatttttacctgaaattattctcaataagttctttcctctttgagagttattttagatttatttctaggttacatgtgcttgaaggtctgtccagtgcatttatttaagccatgagaatgggggaatagccaaggtgggcatgagcaaaggcttttattcaactcttttcacctcataaaggcaaagatttggatccagagtaatgaaatctcttgctaggatcacttgctgatagctgtgttttcgcctccttaactgagctttgaaagcttgcgttccctatcacctggcccacatgactatacactgtccctgggcttcttcatctcatccttcttagcccagcacatgtgccatgcagactgccacagctctctgcagcagtgtggttctactcactgtggtgatctgtcctacttatccatttctagaccaagaggatgctggtagagaagatgggtcgagaggccgtggagctggggcatggggaggtgaacatcaccggtgtggaagagaacactttgattgccagcctctgtgaccttctggagaggatctggagccatgggctacaagtgaagcaggtaatgggtctagcctttggtttcacttctagtctgggatgccagtggttctcaacctccccaatgctgtgactctttacacagttcctcatgtggtggtgaccctcaactataaattttttcattactacctcataactataattttgctactgttatgaattatgatgtaaatatctgatatatggggtagggtatcaacagctaagcgaatgtgagttcagctttttttttcttataaataaagtttatacatctatgttttttaaacctttgaaagtggcacctttttctaggaggcggtgcctcacacctttagtcccagcactgaggcaagaacaggtgggtctgtgagttcaaggacaccctagtctacagagatagttctaggacagttagggctaaacagagaacccctgtcttgaaaaacaagatcaaacaaacaaaatggcatctttcttggg

SEQ ID NO: 32873 - DNA, 1175 bp, Mus musculus
ttcatgtattgaatctgcagcatgattgagttactcttgcctgttatcagaagatgtagtgtcataggtctactggaatatagggtttaagctatggaatgaagagctaaccagccccctctttaaaggctttttcagaagaagaggtgtcatggtgtcaactgtgcactttgttccccaagcaccagagctctcactgcagatacactagagcaggcttcttgtcactgatcttgaatccccagcctttggaactgctctagacccagtctaggcttcttctgtatgtgccccagggcagttagctgagacatttgtaagaattacttcatctatttctaattcttagggactcctgtccttcactgcccaatggacaggatgttttcctgttagtgtatatttcagacaagagggtaaaaaaaaaaaatcagtctttttactctatcttggttagaagtgaaagaggagttatttcttaaaaaaaaaaaaaggttgacttgaattttttattttgaatctcagaaaaagcaattgaactacgtctggcaaaaattgaccatactgcagttcacccacatcttcttgacatgaaaattggacaaggaaaatatgaacctggctttttccctaagctgcagtctgatgtgctttgcaccgggccagccagcaacaagtaagtgaaccgtagagattccccaatgatcatcaggcactgttgtcactgacagccagagtctaagctagcgttggtgtacacggaagacctcgggggttttcttagtgttttattattttgtgtgcacgagtattttgtctgcatccatgcctgtgtaccacttgtatggctggaggccagaagaggacaaagatcttgagctggaatggcagatggttgtgagccgccatgtgagtacctagaattgaacttaggtcctctggatgaaaggctggtgctcttaaccactgaagccatctcagtatttaaagaatttaagaaacaagtatggataagacctaaactatgtaggtgtcagggtgtcttgtcagcttttgtctacactgtacacattgggtaactcttacaaattggatattcccgggacttgcaagcagccaggcagccgatgggttaaaatgacctatgtgaaccccatctaacagacagctatcta

SEQ ID NO: 32874 - DNA, 1200 bp, Mus musculus
atggagaatggatggacccagagaagctagcatttctggttggctatcatcacggccttttagttttggagggaatatcccttctgattgacactagtggcctccggcagtgatgacccatcagttctgttctgtattctgtctcttctttggcttgacagtaaaatcaaggataatccttttatactgagaagatgaattgttgcttctttctgttataaatgagagtagaatgtgaatagcaggtttagaaagaatactaaggtaggtgagaaaaaacagttgcttactctgcgagtcagaccagtatcatagaattcagtatagtttagtgcacaatgtgccaggcattgtttcaagggtggcagatagaagggatggacaaagtaaaaaaataatctttatgagtggagcttttattttaatgagaaaaaaggagttagtaaataagtaaaatatgtagatggaagatagttaaagatgttggggaaagaagatagaaggatgatatttggggaagaaaagttctggttgttttaaaagaaaagatttattttattattttaagtttgttaggtttgtgtgtatgtttgcgtgtgggtatgtgcacacaagtgtaggtgcctgcagagtctagaggcatcagattcccctggagctgggattatagacagttgtgaaccatctgatgtggtgggtgctgggaactgaagttggagcctctggaagagcagccaagtgcttttaaccactgagctaccatgccaccccaaattccagtttccagtagaatggtttactttattttatttatgaatttgtttatttatttatttgttttgtttttcgagagaaggtgtagccttggccattctggaactccctctatagaccaagatggccttgaatttacaaaggtctgcccgcctctgcttcctgagtgctgagtttcaaggcatatgctaccaccacccagaagtagagtaatttttaaaacgatttttcattttggataacaaatagggtctttttccctacaaagatttattttgtttttaaatatgtgtatgtttgtgtgagtgtgtatacatgtgcacaagtgccaatgaaagccagaggcttcagggtttttggagctggtgtgtagcgcttgtaagcatctgacatatatggtggaagtgaacacaggtcctgtggaag

SEQ ID NO: 32875 - DNA, 1227 bp, Mus musculus
ctgctttaagggaatactataaagtgcacacatgcatttctcacagccatgtagcttgggaaacccagctcaaagtggtttgtgcatagttttcttgtatctgcttgtagcagaaggacaaatgagctaactaatttaagcctcgtttattttggcattgatcctattaaagagagcagccctcctggcccagttacctctttttttttttttaagtttaaaaagggggggggggcggctgttaagggcactgactgcgtttctgaaggtcctgagttcaaatcccagcaaccacatggtggctcacaaccatccataatgagatctgatccctcttctggtgtgtgtgtctgaagacagctacagtgtacttatgatataataaataaataaatcttaaaaaaaaagatttatttattattatatgtaactacactgtagctgtcttcagacactccagaagaaggagtcagatctcattagagatggttgtgagctaccatgtggttgttgggatttgaactcgggaccttcggaagagcagtcaggtgctcttacccactgagccatcttaccagccctaaataaatcttaaaaagaaaaaaaaggtaatttcatgtagctgaccttttgctatggtgaccttgaacttctgatcctcctgcctatttcttccaagaactaggactcctaatcatctgttaatggtcccagttcttaatactgtcacattaacaacatcttattttggaggggatacagtgagactgtaacagaaatacaacatatgtagagataatcatctgctgaactgacaataatttgctaagccctatatgtctatatagtgttcaatgcctagtttggcgttgtccactttcccccatttctcatgttcgtgtgaagactgtttttttttcccttgcatttctgtcttttgaaaagtgctacacttgtgactctgtgtagaagaatgtgttttatgttggttgactgatctagcttggttggctttgctgcttggttatgagtgtgtggtgcacttagtcaagggcatcaactcagttactttccataaggacaatttttgtactggactcagctgaccatcctgctcacaagtacactgtagtcccagggaagtgagaaagtggggttaccagccttgttatcatagaaaatgaacagtgattcttaattgacatcatcagatgccatccatcctca

SEQ ID NO: 32876 - DNA, 1204 bp, Mus musculus
ttatgccggtgacacggccagcacgagccaccatggcccactctttccgcacaccgcatccgatttctctaaagggtgtcgcagtcgcgtggaggtggctgcagtcgcgggatcccagcagctgaccgctggccactctgtggtggctgctctggaagcccaggcccccggggcccaaagagcatcacgtcatcctttgcgcccgacgaccgcccctccccgaccgcgcgtgcgcacgcggtggcggcgggtggggggccgcggtggggcgggcggccgctctccgcccttcctcaggcttgctcaggccgcggtgcagaggacagcgtccaggatgcggcgcggggtggcccggcgcccccctgccccggcacggcagcggcggccgctaggacccggcgaggcccgggggcggcggccggagcctcggtagcggcggcggagggagcggcggctgagggcgggcgggcggccgggggcgggggctcggctccgcgcggcttgccccgctcggcccggagccatgagcggcggcggcggcggagggggctcggcgcccagtcgcttcgccgactattttgtcatctgcgggctggacaccgagaccgggctggagccggacgagctgtcgggtgagtgcgcgcgagcccgggctagggcccgcggggcccgctttgtcccgggagcccagtgagggtcgggcgagcagacgggacgcgggtcccgcgggcctgctgccccccgcgcggtggtcgccgcgtcggcaacctggggagacgcggacgctgggtgcgctcagaggtcgaggggcttagtccacaatgaagggaagcttgccttctagcacccttttgggaggaaagaagttagcccacttcctagtgagagttagtcccacccagacttttcaaaagagcaaaacaaaaacttgatgagtttatttggcctcttcccaagaagccggcgagaccagttcctcaaaaccgttataactcactcctgagcaggccaggcccgggcttttccttcacagttctgcccctcttgatcggacgtgaagtgacaaattgaaccgggttacaccaagaacgggttctctcttggcgctagaaaagaacttgtacccagggccatgcttttgttgttgttgttgttgttgtttgttttttaagttaatgtcctttaccaggcgagggtcatttgt

SEQ ID NO: 32877 - DNA, 1191 bp, Mus musculus
ggttttttggtagtatgtatgtctgtgccacatgtgtgtacctgatatccttcaagaccagaaaaacagcattacattccatagaactggaattacaaattggtgttagctacagtgttgtgagttgaatcccagggtcctctggaagaatagccagcattcttaacatctgagccatttagaacactttgagacagggtttctccgtgttgccctggctgtcctggaactcactctgtagaccaggctggcctcaaactcagaaatccacctgtctctgccacccgagtgctgggattaaaggcgtgcaccaccatgctcggctagaacacttacttttttaatcattaaagtaaatttttacacagggtgtggtggtgcacgcccttaatcccagccagggctgcacggagaaatcccgtcttgaaaaaccaaaataaataaataaataaataaataaacaaacaaacttttgctagcctttgtgttgcccattcacttttggtcactagtgaatgtggtgtcaaaaaaggcataaataaatgctttgcggcctttcctgtccctggagtttggtatcttgggtgtacgagctgcataagtaacagtaaaaataaataaataaaatagatttttgcttaggcatggcagttgaacaactgggctgctgaaaaaagagggttgtaagttgaagagtttctggtcatcctggattaaaaagtaaaattttgtctcagaaaaaaaaaatctgttagctatggcttcatttgattgtcattttggagattaagtgatgcctttttagattaggataaaactttattttgtgtgttatatatctctgcagtgcatgcatacatatgttccacagcacctgtgtggagttagaagtacacaattgagtgcctgtaatgtgggattgcaagggaagattttattttagtctgtaggttcatgctgttttatctgagaaataagtcagtttggtattggtgaatatctatgagtccttgaatgattgcacaatcagttactttcattactatgaagtttatttatactttttcgtttttttgggaaacagggtttcatgtagttcaggctgtcctcaaacttgattgatactagttaaggacagccttgtgctgatcttttataagactaatgtttttttggttttttggttttttt

SEQ ID NO: 32878 - DNA, 1101 bp, Mus musculus
cccccctggattgtaggaaaaaggtgattatgagcctccatgtaggtgctaataattgaacacaggttctctggaagaacagccagtgatactaacctgatccatctctatattttaaaattgtttttattgtacatgtatgaatgcaccacatgtgtgcagtattcttggaggccagaagaggtttgtgatcctctgaaactgcagctaacggatggttgtggagctgaaactcctcgtttccctgccttaacttgagtgcagagactgcatgcaccaccacacttggtttttgagatggtagggatcaaacttagagctggaagtaaagatgttagctactggacccagcataatacaatcaatcattcaaaggattcaggttttatgaacaatataccccagtaatcccagaaggctaaggaaggaggatgatgcgtctaaataaatacaagtctgttcgtctgcagaaatttaaagtctttgtttatttgttttaggcacacaagtctctgaatttcgtttcaacactgctccagattactatgtcagaacaactggatttacctgtgagacaggcaggcaagtttcttgaattatttccttgagtgtccaaacaaaatactgattaaaaggtttgttatggtccttgagtaatctccagtaagaatccacttacttttggtgtttatagcaacagcaggtaccttgatatttggtagtagggcttacatgaaaacaatttgagatttatttactttaattttacaagtgtgggtgttaaatatccgtgcattgtgtgttccattgcggtcaggataacagggtatgggatctggaactggactcacagttgaggtgctgttgtgggtcctgataactgaacccagatcctctgaagcagcacttgggggtcttagctgctgagccatctttctagctataaagtgaaaattggatactttttttttttcaaaaagctttatgtgtatggatgtttttacctgggtatgtatctgctgaggccagtaaagggcaccacatcctcttgaacagcagttaagatggttccgagctatcatgtggatgctgggaattgaa

SEQ ID NO: 32879 - DNA, 1121 bp, Mus musculus
ctttttggttttttgaaaagggtcttgttggtagatctggtaacctggtagtccaggctagccttaaaccctaaacttcccgagaagtatgagttacagtctttgactatacaggtgtttgtgtagttggtattttctatagtgaaagctaaaaagtgttttaaaactagggtcttgtatacctcagacaggcatcaaatacaaggtctctaacaccagcttgctgagattacatgtctgtgcagtcaggcttggaagactattgggtttcttttaaattggtctgaagaggtagtttgttgcggagtgaattgtattgaattatctgtattttatgtgtatccagtttcctgaaggattatttgaaattagattttgtggaaacaacccattttcctttgtttgacttagatgagagttgtctaggttaagattccttttccttactgtggggctttgactttcagggtacagcttactacgtgcatccatcatatcatcaaacatgactatccaagccgctggactgccattgtggacaagattggcttttatcttcagtctgataacagtgcttgttggctgggaatccttctttgcctttatcagcttgtgaaaaattatgagtaagtgtccttcctaattccagttaaatttttgagttgtgggaatataaattgcttttggtataactaaatgacgtcagtttaatattgaagtaggtttttttttgttttgttttgttttgttttttttccttttctttttgagatagggtttctctgtgtagccctggctgtcctggaactcactctgtagaccaggctggcctcaaactcagatatctgcctgtctctgcctcccaagtgctgggtttaaaggtgtgcaccaccactgcctggtggagtaggatttttattctgaatatttcttactaatcacactaattttgtgtgtgcatatatgtgttcaagtggtccattgtacatacagaggctagaagacaagctaggaacatctccctatacctgtaccatgcaggtgtctaaagttcagacttctggcaaggacatccacctgttgagccctcacacaggctcagcatacttattctaatcctg

SEQ ID NO: 32880 - DNA, 1135 bp, Mus musculus
taatttttctactttgtagaatactagcttagtataatatattttttgtttgtttgtttttgagacagggttttctctgtatagccctggctgtcctggaatatattattattttaagatatattggcttcagtatttatctatctatttatttgtttattattttaagatttatttattataagtacactgtaacttgcttcagacacaccagaagagggcatcagatttcattacagatggttgtaagtcaccatgtggttgatgggatttgaactcatgacctcttgaagagcagtcagtgctcttagcctctgagccatctccagctcaaggcttaagttctatattttttgttaattcaaaatgtcattcttttaatgattttgttcttatttatactttatttaaatgcttaggttctttgcttttatgatagcttatccttacctggtgcaattcttcctacagtgtagtttctcaatattattaaataaatgtctctttaaaggaaacacttcaagttgaagaagatgatagacctgagttaccctggtggaaatgtaagaagtgggccttacatattttagcaagactttttgaaaggtatgctcctgttcatgcatagtaacttaaatttatttttgctgcttttgctattatgaatataaatataaagcattataaggaaataatggccacattcttgttcatatagatatggaagccctgggaatgtttctaaggagtataatgagtttgctgaagtctttctgaaggcctttgctgttggtgtccagcaagtgagtctaacattgtttaagtatagacctgacactttgaagtttttgatttaaaagttttatgttcataggtgttatgcatgtatgtacgtacaccacttgagcacgtcaggcacctttggtttataagagcaaaattacaatcatgaaatagcaataataattttgtggctgggggtcataacaacatgagtaactgatttagagggtcactcaaatacgaagatttgagaaccactgccttacagactagaagaaaatgttacaaattgtgtgccaacacgtgagtactgggaatcaaaccaggcctaagggaagtagcattgccctta

SEQ ID NO: 32881 - DNA, 1099 bp, Mus musculus
tgaaatatttttatgtcttgtaagaaatgactgaaagttaaaacttggcttaaacatattaagacttttttctgtaagtctttgtctggctgctatactgagtcctgtgtgcatagttttcatctatgtctggtagcagtatctgtctgcgttttgcattcagatcttgctatccacacaaacgaatgcagccaaagaataagttgggatcatagtactggcctagtgttgtgtttttttaacacatctcccactggccagcctccaaattcccagacacaaaaattttgaaagagcttagttggggaagtctattgtaatgtcttcagatacacacacacacacacacacacacacacacacacacgcgcgcacacatgcacacatccttacttccgtcctcttttttaaggcttgctgggttcttcactatttttgtgaagtgaagttcaaaagtgatcaaaatctccaaacagctttagagctgacaagaagatgtctgattgatgatcgagaaatgcctgtgaaagtggaagctgccattgcactacaggtgttgatcagcaatcaagaaaaaggtatgtcacagacacctttacacacaactgttaaatggaattgtagaaactagcttaatagactctgtgaaaacaccttggtttttgttgtttctatacccaacgtaatagctgtttgataatgctccccctttgtattacagctaaagagtacatcactccatttatcagacctgtcatgcaggctcttcttcatattataagagaaacagaaaatgatgatcttacaaatgtaattcagaaaatgatctgtgaatatagtgaagaagttactcctattgctgtagaaatgacacaacatctggtatgttgtttgaacctgttattattggctagatgttgacttagttttctgtttgatccctatagtatgtcacaagtgacttgccttccctcaaagcaaatattccttgcaacttactgtgtaccatgtagtataaaccacttgactaatatttaactagtttatttctcacatggttctatattttatcgagagacattgtgaagtagaaaaggtg

SEQ ID NO: 32882 - DNA, 1099 bp, Mus musculus; identical to SEQ ID NO: 32881

SEQ ID NO: 32883 - DNA, 1486 bp, Mus musculus
tgtgatagaacttaatatttgttagcatgctagagtcctgaataagaattcctaatatgcatatattacaaactaaattgatagaaaaaaaatattgtagcacaaatgacatctaacctcattacaatcatattttacataatcatttaaatttgaaatataattgcatagttacacgtaagagtggggataatttttctgatttaaactctttcacaatttatattctgtgtccgccaggttcttactggagtcgcaggagaagatgcggaatgccatgcggcaaaattgttagaggtcattattctgcagtgcaaaggccggggcattgatcaggtcagtgggcctctttctgttccagcatttttgtctttttttttgttgtatttttaaatttttgatagtaagatagtagattaagctaattagaatgtaattgcaatcttgttagattttgtaatctctctttacagtgtataccattattcgtggaagcagctttagaaagactgaccagagaggttaaaacaagtgaactcagaacaatgtgcctgcaggttgcaattgcagcattgtattataatccacacctactgcttaatactttagaaaatcttcgcttcccaaataatgttgaacctgttacaaatcattttatcacacaatggcttaatgacgttgactgttttctggggtaagtaacgttaaattgtaacttcatgaggtgctgtaagtaaacacaatagataaaagtaaattaccatttttatttattgttttaggcttcatgacaggaagatgtgtgttcttggcctatgcgcccttattgatatggaacaaataccacaggttttaaatcaggtttcaggacagattttgccagcttttatccttttatttaatggattgaaaagagcatatgcctgccatgcagaacacgagaatgacagtgacgatgatgaggatgcggaagatgatgatgaaactggtaggtgaattatgttatacggaaacatcctaggaccctcatagccaaaggctccctgattcattcataggaaaccagggatagtagcccagtgactgataaacacttcttgttttctcccatttaaggtcagcgtacccataatggtggttgtggttgctaaacttgaaaattttatgtccttctcatgggagatattatttagcaatattgaagtaaattgattggaagcgctgagtttatttaggtgaaagagtctcagaaagctgggcagtggtgctgctcacctttaatcccagaacttgggagtcagaggcagacggatttatgaattccaggccagcctggtctacagaatgagttctgggaccacctaggctacataaaaaggagtttcagaaaaagccaatgtagtggcacacacatttattacaggagtatgggcttcaaatggaaaacagaaaattagaaagacaattgggttatatctcaggttgc

SEQ ID NO: 32884 - DNA, 1045 bp, Mus musculus
tgttctcttttctctctgggtttttggtttttcgagacagggtttctctgtatagccctggctgtcctggaactcactctgtagaccaggctggcctcgaactcagaaatccgcctgcctctgcctcccaagtgctgggattaaaggtgtgcgccaccaccacccggcctctctgggtttttaaaggtgggttttctataaagctctgtcttgaaatgaactatgtagaccaacaacattctactattttattgcccgttgaattttagttagggttcatggacacctgtgagtggtattttattcctggaactgttctttctttttcccaatatttataatttactaagagttttgagttaattgtcactttgctgagtagcagaacatttcattgtcatgaacaacttaattggcagaagaactggggagtgatgaagatgatattgatgaagatggacaagaatatttggagatcctggctaaacaagctggtgaggatggagatgatgaagattgggaagaagatgatgctgaggagactgctctggaaggctattccacaatcatcgatgatgaagacaaccctgttgatgagtatcaaatctttaaagctatatttcaaagtaagtcactttcatatagatagagccatttaactgaataaatttattcttgtgtctgtcccttagacaagaagtgaagcaaagtatttgttcgctttgaggtataggaattctttccacctattttggagaacgcagcttcctatgtcttttctttgtagccctggctatccttgaattcactctgtagaccaggctggtctttaacgcagataccagtaattttttaaccccctccccagtgttgtgatgaaatgcatgtgtcaacatttccctggcagtttagattattttaattgaaaaaataattaaaaacaaaatcctgttaaccatgccattgtgtgcacacaggggtcagaggactcagtccttccctaccgcctaggttctgggaatgaggaacccagggccctgcagga

SEQ ID NO: 32885 - DNA, 2059 bp, Mus musculus
accaaacaaacaaacaaaaaaaagtaaagtcttttttgcctttaaacattaaatcaaaattggctaagaactctgtatatacatcttagggagtgtatgtgtcagttaaactctccttgtaaatgtattgtcagttttttccacagaagttgatgatcagttgaccattaatgtttcaccccccccccctttttttttctagagtccaaaatgattgaaaagcatggaggatacaaattcagtgcaccagttgtgccaagttctttcaattttggaggcccagcaccggggatgaattgagtttccactttctttcctgctgtgtgagtgtagtgaagagcttgtgttcctcctagtagtggttccagatccggttcatgttaactactaactgatcaatagaaggacagaaaccccaggaggtgggagctgatcatgtaacctggcactggacgagaaactagagggatttggggaggggttaacttggggggctattttctttattttttgaagaaagtaagatcctgactctgaagcttcaagagacactgtggaaatctgaaatgaggggatgtcatgaaggcagcttttctttttctgaggaaaaaaataggcatgggctacaggactatttaaaatgtctcatttacagtataaagttcaaaggtagatgtaatttttacacctctaagtatttgtcctatttctgtctgttccttaccattgggtatcctttatatgtaaatatgataaggtaatcgatagccttattcggtctttatcattttcattcaccagattgttcctatgtagattggacatttattgtagcactacataactgattttaaaatctgtaaatgaattagcactttcatattgaaacaagcctgctagcctatgtataaaagcaaaactgtttgctgtttataaaaagggatgtaatggggtggggggcaggggtaatttcaggtttaattattaatttaaaaatgaactagcaattttgtatctggtgactttgtggtgcactcacctctggtagtgacttgaattcggtatgtaaaaaggggttagtgatgtttcattgctgctaaaaatggcaactctctctgtgtccttttttgttcctaaagctctcagtgtacaagtggacatttggatacaagaccttatgtaacaaacagaggtgatatctgaagcatgtaaattggatataaaattctactcttaaagagttgatctagagtatggctaaacatctatatatgcaatctattaaaagaacttaattcggcaattatgtcttgatctgattgcaatttattcctaattaatccttacccccattaacctgtttttatcttgtaccagatagagtgcaaaatgtatttataagattaatacctgcccattcccctctcctcatttctcctcccctgtcttgattatggtatcttatcctaactctgaagactgaaggcacatggttccctctaaaaaccactattgataccactgcagaaataagccagcaacaacagggcagcggggtgggcttctcccctctcttcctaaatgcatgttcaaagatgagaccttattgatcttaaacatctgtcagatgagtcatacattggattattttttatatacatgtatacacaatatttcaaattgaaagcaacatctcagtggattcaaaactactacatactgttgtctaaaacaaaatttataattgtacaaatgaaatgcacatattgatatttaaaatgcataattaagaaaaccctttgtgttgtgtttttcttgtgtactaagccctgatgctggcactgtttagctttccattttgcctctggaggaatcaaagtatttctcaatactaaaatgtttgcaaaaggaaagcaatctctaattgtgtgggtgcaaattgttaaccaagtgtgcttctactcctgtctcatagttacgacaccaagtgtataccctaggttgcttaagggaatgtcactattctataaaatcagtacaataaaaatggagttaggaa

SEQ ID NO: 32886 - DNA, 1314 bp, Mus musculus
ataatcggtactcaaatgtcatttgaaggatctcaggacttagaatatacatccttttatggtttttgagagtgtggctgtctggccttgtatttgctatgtagagggcaattgatgacatgatcttgacctaatccacccacaactcctatcaaaccctggcaagaaaggtacatgacaccactactttgttttggtactcttggacctttctacctccacatggccagtaatgggattatagataggcatgtgccaccatctctggttctgaacagtattattattttttgcttttttttccagatggggtttctctgtagccctggctgtcctggaactcactctgtagaccaggctggccttgaactcagaaatccgcctacctctgcctcctgagtgctgggattaaaggcgtgcgcaagcactgcccggccagtatgaatattgttatgaacaatggttaaacattcctagtgcaaatgccaccaccatcttgttcatgggtttaatcctcaaggacacaaaacacttggacccttaaaaattagaatatgggtctccaaggtgaacagcctctggcatgttggaacaatgtagcaggagatgtcagaaaagttaccacagggataactggcttgtggcggctttttgatccttcgatgtcggctcttcctatcgttaagcagaattcaccaagcgttggattgttcacccactaataaggaacgtgagctgggtgagctgagtttagaccgtcgtgagacagataaggaggtcggccagttcctcctgccttctgcaagagggttcccagactgccctttgagaataaaatgggaggccacaaccaaagtcttttggataaagcaccaccatggactatgcactagcactaacccgtttgcctgccttccttcccaaggcatagatcttacccagcatgggaaagatcctccctccctccccccttccaccatgcactcaataaaataaaatgaatgaacgaaaaaaaaattagggcatgacactggaattttaaaaaagattttatttaatgcttcagtgctctaactgtatatactgtatatatacagcatgccagaagagggcatcagatcctattaccaccatgtggttgctggttattgaattcaggatctctgtaaccactgttatttctccaaccacagatggcattttatgatcaaaacattaaatcatttttaagtttagtaaatcctatacctcagggtactcaagctgttaggtgttgtgattttatatattctatatatagtaaccgttttaaca

SEQ ID NO: 32887 - DNA, 1122 bp, Mus musculus
tcaaatcccagcaaccacatggtggctcacaaccatctgtgatgagatctggcgccctcttctggtgtgtctgaagacagctgcagtttactcacatataataaataaataaataaatcttaaaaaaacatgatgaagatcttgagctttactctcttccctagcccagtgtcaagctcttgccagtattcttgaaatggcattgagagctctccacagtgcagggaaaaggatagaactagaaaatagcatcctaagcagacctaagaggacattataagtctatattcaacccctcctactatatattatttgtagtttcatcatcttcctagatttagcagcatattttctgaatagatgcttaaatgtggcattcaaaagtgtattacagaaaccatcatggtgtgcaatcttattttagctcatatcttaatttttttctcttttaaattttacagaactatagccatctaccgaaagcagatatttttgctcttgctctcacagtcgtatgtgctgctggtgctgaaccccttcccagaaatggagagcagtggcacgagatccggcagggtcggttacctcggatcccacaagtgctttcccaggaggtgacagagttgctgagagtgagtattgtacatgggaagtgctttattaactaaacctcagtattatactaaggaggttttttgtttctttgttttagtttttttccttttcttagacaggttctctatgtagctctggctgttctgcgagcttgctctatagaccaggctgggctctgcctccagagtgctgggattagaggagtatgtcatcatatgttgctctagtttgtaagcattactttgcttttgttttttaggtcatgattcatcctgacccagagagaaggccttcagcaatggagctggtgaagcattcagtgttgttgtctgcatctagaaagagcgcagagcagttacgaatagaattgaatgctgaaaaattcaaaaattctcttttgcagaagtaaggaggattttattattgttgttgattttactctacctttctcactgattctcagattttcatttagggttttgtcagactttgtaattttgtgtgaga

SEQ ID NO: 32888 - DNA, 1154 bp, Mus musculus
ttatgttcagttcctttttaaaaaattttaatcgtgttgctgtagaaatagttcaggaagagcacttggtgctcttgttctggtctcccctcccatcccctaactcccgaaccccaaagggtctcactgtgtggctctggttatcctgggactcactgtgtagaccacaccgtcctcagactcaaagagatccgcctgcctttgcctctcaagagctgggttaaaggttgcatcactgcacccaactacacttgttcttgcacaggaccagaggtggatcccagcacctgcagggtggctcacagacatttttaactctagtttcaggggttttgatgtcctctttagtaccagacaggcacgtgctgcatatacatacatcaggcaaaacgttcacatacataaaattaaaaaccttaaaactgtaataatttaaagaagatttttaggtctgtggtgtatgtgtgtctgagagtaggtatgtgcacgggagtttaggtacccatagagacaagagacatcagatcccacagtgctggagttacacatggttccaagccgcataatgtgactgctgggaactgaacgtgggtcctctgcaagagcagtttcaatcctaaccacagagacatctctctagcccacttctcacctccattttatttatttattttttgataaggactcttgtagccaaggttacccttgacctgatcctgctgcctcttcatcccaaatgctgggattacaggcaagcatcaccactcctggctaccaagttcagccttttctaattgggtagagatgtgttcatcagcgggagtagataccattagactaacaggaaagaagctttcaaacttgttttcaagaatattccttagaacaaatcgattacatcattcatcttggatgcaattctcttgtgttttctgatagttattaaaagattgtcaaccacgaagagacccttttatatatatatatataaagtaatgttttcccctggtttggcttggttttgaatttttgttcttatttgtgtgtgtgccccacagagacagaggacaacctctggagtcagtcttagccttccaccttgttggaaatagtctttgctcattgtggcatacaccaaactagttgacctgtac

SEQ ID NO: 32889 - DNA, 2166 bp, Mus musculus
agccccgccttggatgggaggtcagctgtctcctcccctccggcagcgcattcccttggccgattgcctggtctgttggcctctttgagtcaggtgtcatggcaagcctccgctgttggtgctctgatggacaagtcactagtcactgcccttgtggatggaatctggttggtgactcttcccagcttcagctaagatacttccctccctgaccaccacacacatggcatgcttcgtttgcattttctttctcctcacctcaaagcaagacttatcctggcccagcggctcaacttagttctttgggtgttctgtccccagctgctagtctgttgaaatcaatggtgattggatagtttggggggttacatgggcacagtggaagctgacagaatgtggactggtaagatgtaaagtgtcacaggatgatggccagccttgtggctttcactagaactatgtctctctgcttttccctccgaggatgacacagattgtggtttgtatgcttcttgtttgaggaatgatttcagccctaatctggtctgagacggagatgagtggttggaaagtaagccttaccacactagttggaatctgtaaccagcagtaactccatgcacagccaagaagctttacattataaacaggaaggtgacccatgtggcacagaagaggtgggactcagtagagagcagggacccccacgggcctggtccagccttgcctcagagcaggaaggaggccattccagacatgtgcaagtctacagatagatcccagcagtcctggcatctacataaggactggatagagttccattaatctctgccttttatgactggaaaacatttgccaatggaagtcttaccaatttttcttaagattttgggctgcttaataaaagtaattttatttaatgtttatagttgccttcatacagtttagatttgtgtgcaaagtatcactgtgtcacgaaccttcttagtggataacttgggtgtaggtttggacctggccattcactcaccatgtttccttgtcagtgcagccgggaatcagaccaaggggaccagggtctcccctgtgtcttgatgatgtctcctagagacctcagtgtccttggagagaaaagaaaaagaaactccaagaaggtactggccggtgtgaaatgtctggacggaagcaagggcctgggggtccaggggagactggggtaaagggatcgcccgggccgggctgacagaacctccctccttaaacctggactgtcttacagcacagccagaggcatggcccgcagctgccacggccctccttgtctggtctcaagcctgaatactgcatgctccctttgtatgggctgtgcagaaggcgtctgcagtctgtagtgtttgtttctgcttgcctcaccggcttcagtagcactgtggctgggaagtgaaagtcctttgtagacagtggatgagaagaccgcacagatgtgaactgtgtgactcccctttaggccaatgcgctgatacttgtgggtctctcctgatactcaaggtggtttcagctaagtgtctatagaccgtgcctcatctctgtaataactacaggaaacgttgggagtgtctgtctgtgtgttcactgtaatcagccctttcctccaacgagagatgagattatttgcaggaattatgaatgaaaagcatttgaaaatgttttgggatctactatattgagaatgaacaaaatatttataattttaaaacatttttatctacacatacaatgtaatatgctctacttcttgttttttttttgttttgtttttttgctaatttttctaaggtattaaaatgttttctatgggatttttggtttctatttttttagtaaagtggactcaataacaaaattaaacataccagaatttcatacattttaaactggttacattaataaaatggagtaaagtgtgtgtgtgtatgtgtgtgtgcacttgtgtgtgcgtgcctgcctgcatgtgtgcttttgctaatcttcattttcatacagtcatgtggatgtggtttagggatactcctgaaaacactgggtttgggagttaagacctcaagaagttagctgtgacctcatgtttggtgtgagtcacagctgtgggaagccttggtcagctca

SEQ ID NO: 32890 - DNA, 1199 bp, Mus musculus
tgaactaaccagggagccattggacaaactgagacacatgggacaggccagcacacaggggacaggccagctaaccagacagcactgcttgtgagaagaactgctcctaaggtctcccagttaccataaccttgtttgctccagcctcaaactcaaggatgcttctcatctgtggtgggcctgagcggccaccgctgccaccgggccctagcaacttggtcagtgtgtgtgttttgaaatgttaatatgttaaataccaaactaatatttcaaaatatgtatatatgatttctatatcctgatttttcagatagcctgcttataatttaaaataaaaataactaaactgattcataagattttagtaataaaaggttgtttcctttttaaataataaaaactactttgtagattaaaaataaatcaaattttcaaattaaaaattatcaacacactagaaaatagaactgtattaatatataagaaattgggaaataaaaatgaaggagttttttatcatattcattttataaatttgccacctgtgaaatggtttttgcacattacttgtattttctttgtatatgaaataatttttgtactttgtagactctggagcccactgtcctctcggctctttgaagctgtgcccactactgcttttgtaactggagtcttttaacttccatgacggcaccgcctgccgtatgttcactaaccacccagaattaaatttatttcttaagaaaaagaacctctgagtgctgtgatgtcaggttggctctgcactgtgcagtactcaggagcggcatggggccaaggctccatctaaactgtgaccatttgggcctcggaagcacagagatgctggggtgtggccgtgagcttctgggttctgatccagccctgcggcatctggggaaagtctcaggcgtcctctctgcacccctagtaagctgttccaggtgccaagctcctgcctctcctgggccaccgtttcccctggcgagtggcagattatattgatttcaggcagaagacactgaagtcttcctgggtcatagacttttttgggttgaggagttggtttctgcaggggatattgtccatcatctttggagtttacctcacacagctttaaggaatgctggtccttatgtcaggcaggagcttcagctgggggctcacaggcctcctca

SEQ ID NO: 32891 - DNA, 1228 bp, Mus musculus
tctctgatataacataaacttagttaatctttaatccaaacctttgggtctctgggagttcaaagacaggttgatctccatcaaattccaggctagtatttaataagcccatgactgtaaataaacaaacattactatatggtgttaatgaaatggttaaacttggtttgacatttgcacatcttgttgtcataccaaaccatttggttttgattttcaatccttttacttctctagcaatcccagtagcggcaggtgggtctctgtgagttcaaggccttcttcctgtgtatggcaagctccaggccaaacagagctacatgataagaccctagcacaaaaaaaaaaaaaaaaaaaaaaaagaatttaaatgaacttccaaattttatgatacatcttagccaatatgtttctgcatgtttaaattcagtgatattatgctatttacacttttacattatctcccccccccaccttgtttcttacccttcttctccccaaacactcttattccctctgccattcctaaagctatcctggccttttagtcatacctcaagctgtacaagacagtagtttaccaagagtagcccgctgctatcgacacaatcgcctgcccgtcgtatgttggaagaactcgagaagtggtactctgctcctccgatctggaggattccatgggaagggagttgttggtctattcaagtcacagaactcccctcaagccggtaagaatttctgtacagcacaactctcactggagtattcctaaaactcagccaggcaacaacagtccaaggcctgtggtctcaatcccttgggagactgaggcaggaccacttgatcccaggagtttagatgccattgtgagaccagagagacagtcttcccagaattaaagggactaaaacctgggctccagctgccactcccgacacttttgtcactgtccacatgcagagtgcacaaggctgggcttaagtgaagacagcagcaggcctgtgggacgtcacattgcactgccatcttactaccatagctcatcttctctggattttgatcaataacagttttggttctaggctgctttcattctggcaatcagaatatctgtccattgttggaattagattgtaccagtctttggtattttttctgaaaagtaatctagataatgtaacagctgtagagataaaaaaggggttttgtcttgtgtggcatgggcata

SEQ ID NO: 32892 - DNA, 1374 bp, Mus musculus
cgaggagatcacagccctgaccaaataggcccagcggtccacacacacttcactatttggtttaatgtcaggtctgctgggggtaatggtggccaagatctcaaactagggcttccgtctgtgatgaggacgcctctgaagaaatctcaagctcccaattttggttgcactttacgaacatgctcacttcgttagcatttctgagccagaggctggctccctcccgtggggatctgggagctggcactgtgtacacctgtccctgactgtccacgtctcccgtgattgccagtgctaatatggctggggctgagactttgcaaggcctaatgccaaaggacacaaggcctgtgtggtgtctgccacactcagcaggccctgtagtggttctcattttggcatctggctggctgcctgccttaaacccccaccaaagctccttttcataaaggggctaccttgagagaaaatacaaacgctctcctgttgatgatttgtgcattttaaaaaatgagtttctttccctcttagcacccctccttcctgtctggttaggaagcccaatgcaccctctgaggtcatcacttctgttctatgttattatctaggactcaacgagtcatctcaaaccatattctgtgaatccatctcatggtccactcctgggctgcggaaggtacaaggcgaggttatggggctgctcttcactttttgtttttaaatgaagacctctgaaaagcacagggcctctgctccttctggctctgatgtcctgtgactgtagtgtcaccacctcccctgggagtcagaccagggactcctcagggagtgaaatgtgcttcaggacacacaggactcgagccaagctcctgatccagtcacaccccacccccgactcccctgcctcctcctactgttttaggcttcacatattttaaatgtttgaaaaagagtcactaacaaagtggattttattttaaagcagatttcttcagaagctatcatggtcccagggactaggtagaatttttaagtctaacgtgaactttagctttatcagacatttttgttactagtgcctagaacatagtaggtgctcaataaatacacatggagtaattgaatgactttctcttttggcatctgtatgtgcagaatactcaacaatgttcaaagaccttcttaactattcagaaggcaggaagtcctacaccatagttagatgaacctaactgtacctggaagttgcccatttaactaattattctgtcctgtgactgtcatccttccagttgttgtgtagcgtatggaaccatgtcatccttttactaggcaaatacacatactatctcacatagatgattatgaaactga

SEQ ID NO: 32893 - DNA, 1522 bp, Mus musculus
aaaaaggaaaaacttgttttgcttggacttccctgacaggagtgatcgacacaggaactgccccatttgtcgcctacagatgactggagcaaatgaatcatgggtggtgtcagatgcacccactgaagatgacatggctaactatattcttaacatggctgatgaggcaggccagccccacaggccatgacttggggaagactttctgttgttattctgaactacaaatacactgttgtcgtagaggagaagggggggatattgtggcacacacagaaatatcagttttcccaccctcttatttttgctattctggtatgtcccgttcttaaataaactcccatgtcttccatgtatggtgggctacagtttgctactgtttagccatatttcccacagtccacctattctatgttgctcttgagccctttgctacagatagcagcaatacttgacactactgcttttcagggagggagggactgttctggcatctttttagtaggtttaagttttagagtgttgacagttgtagccatctgagataaatgactgaaactaatgtctcagttggaacctgaggtgtgtgtgctctgcccccttgtggttcattatggatccttcagtactgtggcccaattgcttcctgatgttatgtcacttttggccttgggttctggaactacttattctttatgttgccatgatgcagcacacggattaggactgtctggttggaactttgtctcgaaaatggactgtaccggagggatcttcatggctgctttagaaaggcatccccggacctggataggtgcccgttggattttttcataatgcccatgaagcttgagttttcagaaggatttttttcttttatagaaacacacattttatatttccagattccacagaggcatccagtcctgagccagacagcgtttattttaggtaaagacgcctttctgaggcttcggtttcctcaaatttctcagattaaaagaagaggacgatcaggtaaacctcctcaccaagcagttgtaaaaccctaaactccagaccttgattggctttcttcccatttctctgcactattcaggcatctagagagagaaccgtgacaggagtgcggcctcagtgacagccacagtggcttatggaggaagaacgttaatgctaacagtgcagcctataaaagtgctagtgcatgaaataagtcccctgtaagaaatgttagcgttccatagaagtcttctcacagatttttggcaagtttcaactgtccctgttttcctaagtatagatgtacacaattgaagttactgcttattgatttttgattcagattttaatgaatatttaaataaaatccctttcaaagaaaaagatctgacttgattcagattttaatgaatattcaaataaaatccctctcgggggaaaaaaaggtctgacttgattctgcccccaaatactgaagacatcaatagtccattcactgtaaggacagggcagtgacacc

SEQ ID NO: 32894 - DNA, 2657 bp, Mus musculus
ccctttcgggctgccgtggggccctgcacacacatggtacacaggcgcaaaacagcttgtacagtcgttttagaaggctgtgggaaagactcagataaataagttctgattctatttagatatatcctgaaccaaaacttaatttttactaaattataaatttaatttacaggtgaatcagtggctaacctggctagaaactgctgaagaagaagaatcagaggaagaagctgactaaagaaccagccaaagccttaaattgtgcaaaacatactgttgctatgatgtaactgcatttgacctaaccactgcgaaaattcattccgctgtaacgttttttcacaatatttaaagcagaagcacgtcagtaaggtttccttctgcataaggtttttgtagtgtgatgtcttaatcatagtctaccatcaaatactttaggagtatccttaatgtttagatagaatattagcagcatgcaataattacatcctaagttctcaagcagaggcagtctattgcaaggaccttctttgctgccagttaccataggctgttttaagttagaaaactgaatagcaacactgaatactgtagagatgcactttgctcagtaatacttgagttgttgcaatatttgattatccatttggttgttacagaaaaattcttaactgtaattgatggttgttgccgtaatagtatattgcctgtatttctacctctagtaatgggctttatgtgctagattttaaaatccttgagcctgggcaagtgcacaagtctttttaaaagaaacatggtttacttgcacaaaactgatcagtttgagagatcattaatgcccttgaagtggtttttgtgggtgtgaaacaaatggtgagaatttgaattggtccctcttattatagtattgaaattaagtctacttaatttatcaagtcatgttcatgccctgattttatatacttgtatctatcaataaacattgtgatacttgatgtagttgtacatgacttcaaatagtatctgcaaagtaatgaagaattcatttggttttgaggtatggatttatctccgtttaagaacttgggaaatttttaatttcatagtcttaattagtagtgattgagcctataacaccccttaattcaagcattaattttttttcacctcagaactattccctatcaatctaatgcaaactgtcaacttaatctgacctttactattacagaccttgtgtcaactctttggctctgctttctaagcacctaaggaataagcttgtctcatccaccaacctctgctgagatacctgtttagcccttgatctccatttgttctttgcagcgaaacaaccagaacaagaaactgaaaaacaaaactgctgcatggtttagaacccagcagacttttaagtcatcctaaaattggctccctcttgctgcttttcatttttcttgcccttgcgtattcagttactttacctggaataatcagtggtcccctcaccctttaaccttcaggtgtgatataaatgtcaaagaactggcctttctctgctgggacagtgagaatgtttgtgtcaaagtctgctgcaaaagaaaaaattgtattttggcatggaatccagagaacagtagaccacagaaatagactgggtggtcaagtcctgtgtccctgtcaaatatctgttctcagatgtccccagctccactggtgaccagagtaggaacagataaactcttgctgcctcccagcagaaccgtagtctgctttggcggctcttgttttgaagatttgcagtagagtagaagaaactgggaagagttgaagtggatagctgaggaggcccatcccacatctcagcctagttttagtccactatccatttaccccaccccttggtgaaagcagatctccaaggagaataatgtagatgtgtcttcagccactgctgagtaggatgataaatttcagttttgtgagcttcaatcttaagagaattgcagtaatagaaattaagagcaattcaaaattaggtttaggatctaaaatgttctggataaaagattgtctttgaatctgaagcttgattgactgcatgataactgagttagggctaacagaactaactgaaatgatctgtgtataccccactcactagaaaaactagtaatgaataaatgcttggatagtgacctgggttttttcttcatttgttacaccacgtgatcctagcattgcattgcacaatgcctccaacccattatttggccttcacagtgtggtggttgtaatgttttgtatgtaatatatatgatatactatcttctatattaaataattactatataactttacgcacattgaaaactgagtaccttgaaagcagtctctaagactgactgactgctcatggcatgggtaaactccaaatccttgaggtgggtgttgtggatcagctgtagctctcaatgttaaggtaaaccaggatattacaaagctcttaccccaccttgtcttagagacagcctgacaagagtcctggtcaagaaatagcataatagcactgaagtcatatgtatggacttcacttttcacccctacattacttggaactgggtcagaaaaacaggacaaaaagccatccgccc

SEQ ID NO: 32895 - DNA, 1171 bp, Mus musculus
gaaaagccaggtaagatattgatagtgttagggccagccttaggtataataccttttgccctttattgtttttaaatgaagctgagttcttatgcttttttttccttagcatatttccatttgacagttgtttgaaattgagtaagatgcttatccttaagattagtaaaatcacatcactttattcaacagatatgttagatattcttccctgttccaccttttctgggcaaagcaatggcttggctcatccctttggtacttgattaccataatttttatctagactttctttctccctttctgaaataggggctaagccagctctaccataaccagagtcagggactcttatcccagctacaaggacagtcgaaggatatgccacctcggttttctaagaaaggacagcttaatgcagatgaggtacatttgcctacattacttctatgcagtagtttgtcagtgcagaagtctcttgcccgatgattataaaaagacgccaaagaggacttaaagctggaattctttttccttttattctctcctctactcttatgtcttcaacttcttttctacttttctctgctttttctctctggatgtccagcgtcctatgagcgaagattatgagatatgagggcaagtttctaagttatttatatagttatcatgagaaaatggtaaagatattgagtagaataaagggtttatctgcattgctgatattgggagacttgaacggtacaaacataaggtttgtgaagtgttttgtttttttttttttaatttcagtatctactctttaaagcaggtatttttcccataagttaaaattcattatgtgacatgaaataacttttagtttttggagaattatatcactgccataatagatttgtatagaattagttgtgggttattgaaagtgtttatagttgtgttcattagttctgttaacttggttgtatgttgatttgttttcaattttagattagtttgaggcctgctcagtcgtttctaatgaataaaaatcaggtgccaaagcttcagccccagataactatgattcctcccagtgcacagccaccacgcactcaaacaccgcctctgggacaggtatgggcccccaaagtgtagtacgcttctcagtgtccctgaaggtgggtga

SEQ ID NO: 32896 - DNA, 1099 bp, Mus musculus
ggtctgtgtggaatttgcttgttaagcattttagtattaagtctcaaggtttggtgcctgggccagcagttttggcattgcctgggaatatatatattcagaagtggaaatttttgggtactaccccaaacctactagaacagaaattgggaatgggccttcgagtctgttttaagataccatctggacaattctgatgctgtttgaaaaaatttttaggattgttttgttgtggggggggaagtaaagcctttggtttggtggctccttttcccctctgtttagcggttttagggttttatggtatttgttgtgagtggatgctgtgttcaagttttttcataattgtaagccacttcatcaatgttttattaaactagcgagttcctggggaaaaccccagggcaaaacgctcagaaatggattcctgcacgaagcactagacgagatgacaactccgcagcaaacaactccgcaaatgaaaaagaacgacatgatgcaatcttcaggaaagtaagagggtaagtgccaaagtctgttctgagggaagtggtggtgaactatattctagtatgtgaattgaaaaattcaggcatgattttggcaagattcactaggcatccattacattgtagtggattcaaatatcaacaatattttaaagaatcttaaacagaagtatagcctactggtatttgacagcaaggtttatttgtttacaacctacaagttggaagtgatggcatttccattgttggtttagtgtgtaactcagtgacatgggtaatataaccatcttaactcatggtcacttccatataatgaaaacctactgctcttgagtatttagagaagtttcttgtgaaacagcgggaaagcccaaatacaattcagatgttgtaactgagaagtgattccagcatctctggatgaaaactgaacacttctataataccatgcacaagatttgcataagctcaagccagacaaaagccctactcctagccaagaagctactagcaaatacatgctgctgggagagggatccccccccccccccaccggagagtatcagttgatatgtcagccacactccaag

SEQ ID NO: 32897 - DNA, 1187 bp, Mus musculus
taggactctgtcttacttctacctcccaagtactaagagtgcaggtaaacaccattcctgtccttttttttttttttggattttggtttttggtttttggtttttagtttttggtttttggtttttggtttttggtttttggagacagggtttctctgtgtagccctggctgtcctggaactcactctgtagaccaggctggcctcaaactcagaaatctgcctgcctctgcctcccaagtgctgggattaaaggcatgcgccaccactgcccagccactgttcctgtcttaagactccattttttcaaagagtagggactatactttgggcttttcatactatatagcaccttttataccaggctctttgtgtaacttgaacaattacctgttttatcttagagaaatagagtatactagccaggcctttaatctataaaaatccccaaatttgctgtcttagttgggatttctattgctgtgatgaaaccgcatgaccaaaaggcactgttcatcattaaaggaagtcaggtcagaaattcaaaacagggcaggaacctggaggcagggactgatgcagaggccatggaggaatactgcttactggcttgctcagcctgcttttttatagaacccagaggtggcaccacccacaatgaactgggctctcctgctgatccctatttaagaaaatgccatacagccagccattttctcaactgagactgtctccttgcagatgactctagctgtgtcaagttaacataaaactcaccagtacatttgcttttgtttttatcaagtgaaagggatgattatcacatgaaggtccttagctaggacccttcaactgcacagctgctgggtcttcgctgctatgcctctcccctactgttcctctcatccaggaaatcctgttggggagatgtcattgttggaatttttaagcttagtttttaaattctattctccttgaatcatgatttttaagacttatataaagaaatatcctttcctccctgcccaaagtatgtaaaggagaatagtgatctgaataaaaaaaaaatagaataaaaataaacttgaacaataggactttagcccaaggcttttctttgctacctgaaacagtgtttaaaatttagtccattcttacccagagcacttcatatgtgttaggttattc

SEQ ID NO: 32898 - DNA, 1339 bp, Mus musculus
tctatcaattattgttttgctttgtttgtttgttggatacagtgtcttgtatttgcccttagctggccttgaactcatctcataatccaggctagcctgtgacaattgtcctgcctctattctccaactactgagatcagatgcctggtcaaatttattcataatgtcacagatattataatatgctgtatactgtcttttattggtaagatgtgcttatgaagaataagaatgctactaacatagtgcggagtgtaactctgtcatttactgtttaggtgtttgttgaaagctctgagacagtggatcaccaggcagcctttacagactcccacttgtggaaactcctggatcgacatgcaaatacaatccggttatttgttttgctgcctgaacaatctccaggatcatattcgaaaaggacagcataccagaaagctggaggtgattctggtaatgtggacgatgattgtgaaagagtcaaaggacctgcagggaatttaaagtctgtggatgctattctagaagagagcactgaaaaactgaaaagcttgtcactgcagcagcagcagcaagatggggacaacggagacagcagcaaaagcactgagacaagtgactttgaaaatattgaatcccctctcaatgagaggggctcttccacctctgtggataatcgagaacttgaacagcacattcagacttctgacccagaaaactttcagtctgaggaacgctcggactcagatgtgaataatgaccggagtacaagttcggtagacagtgatattcttagctccagtcacagcagtgacactttgtgcaatgcagacagcgctcagattcctctggccaatggacttgactctcacagtatcacaagtagtagaagaactaaagcaaacgaggggaaaaaggagacctgggacacagctgaagaagactctgggactgacagtgaatatgacgagagtggcaagagcaggggggacatgcagtacatgtacttcaaagctgacccctacactgcggatgaaggctctggggaaggacacaaatgtatgtacttgagaggaaggctctttgaaacagtgtcagtgtgtttctcacttcagcgttgattagcaatccagtgcttagctctaagaccaccttacatggactgtaagataattaaggtttctttcatttgcagtgcagtgctctaggcagtaattgcatcaagttaagtagaagagtatccaatattagggaagtctatggtaagaatgctaaggaatacttttaacatagcatacactctcactacttaagccaaacacttttagaagttttattt

SEQ ID NO: 32899 - DNA, 1299 bp, Mus musculus
gggccactgtcttgacttggaatcatgttgtgcactatggtcagatgtactgtaaagccaaggatgtgcaaagagaaacaagcaaagcctgctactatgaagggagggggacaagtagattcattgattgcggacaaatgtgcacatagccgctagtaaaactagcctcaaacaggatgctcatagcttaataataaaagctgtgcaaaggccatgaatgaatgaatcttctgtttatttcattgatacacacattacctcattgacagttctgaagcaaatgcaactgtgttgacttttgaaaagcagcaaagaggagctgaaggagttcttagagccagtgtagccctcagaggaattaggaaggtgtgttattttatttgacttttttgcaaagtattaagaaccttagggagacagcccaacatctgtttcctcgggccacgcccagtaggtgtgctcagctgctacaggtttgtgattagagccaactgtctgtaagctatggatgtagagaatgtctccctccttcactcgggccggccggcatgtaaatacagcggtcctgttgagttctcccagctgcagcttcgatgtctgccaaggttctttgcctctcattgtcatgtacatttgtgtacactaaagcttagcggtcggtctgtctgtgtactcctcggtaagactccataggatgtatttgctcgttaatgagggttctctgttcagtagcttcaagatcttttctctgtacatttattttccaaaaattgcttcaagtttgagtcttctagaatgcttgtaaagtcccgttttaattttaagagtcgatttgtagttctgtagtgtaactttgggaaccatctgcccatctatggaataaagtttctcgggggccttggcgtagactcggtgccacatgattcattgcagagcgtgctagcgtcagcaggcctcttctgctctgctaagtacagtttcaaagaatacgattctacataaactttgaaatactatctaatttataaaagtcaataaaaggttttggtaaaactttttcatgcaagatgctgtttacaacaatgaacatgccaataaaacatttgttcatgttgctgtgttatcttagtcattaacctcggggcacaataatggatctgggtacagaatggatttgtcgtctttaaatacagtgctgtgtaataagtactaagttactctgtgacgaagtatatttatagtgaagttctcagatcaaaagatgtatttaatctcctgactatctcagattcttaccct

SEQ ID NO: 32900 - DNA, 1193 bp, Mus musculus
ccgactgcttcaatacctctgaaagccagtgctcggagtgcagttcgtgtaaattaatttgcaggaagtatacttggctaattgtagggctaggattgtgaatgaaatttgcaaagtcgcttagcaacaatggaaagcctttctcagtcacaccgagaagtcacaaccaagccaggttgtgtagagtacagctgtgacatacagacagaagaaggctgggctggatgtcaggcctcagatgacggtttcaggtgccaggaactattaccattctgtatctatccagagttattaaaattgaaagttgcacacatttgtataagcatgcctttctcctgagttttaaattatatgtatacacaaacatgtggccctcaaagatcatgcacaaaccactactctttgctaattcttggacttttctctttgattttcaataaatacaaatccccttcatgcaaaaaaattaaaacaatctgtagtataaagagacaaaaaaattccatagaagcagattttccaggcatctgcagtttccctcttttagaatcggaattcgttggaactctcatccttgtctggatgggaattagctttaacagagaaactacttcaccctctcctgaaagaacaaatggaatatatgagtcttctcttggaggctctttccactcaaatgcagttctggggctgtgctagcattgatactgtaacaaaacggctgaagcaatgaacttatatatttaaaaagttaggttaattgggttcaccatttcaggtttcagtcctgatcccatggggttgaaactaaggagaggcagcacagcgtggcaagggaatgtggtagagtcaagctgctccctttctggctaacaggagagtgggcaatgtgcagtcttgtgagaatgcccaggtcctggggggaagggagtgccctggacatcaccttaaaggtggagacttctgcagctttggttttagttactcttctgggtgctacaatcaaacgcccaacaagaagccacctgagggatgagggtttattttggctcctggttcaagcagggagtccttcgtggcaggagtgcaaggttgcttcctgcagtgtggaggatcaggaagcaaagaaagagcaatgcaagactcagctttctctctttccctgattatttattctggaaccccaacccttg

SEQ ID NO: 32901 - DNA, 1109 bp, Mus musculus
aggctccctttctttaggatgcctggctctagggtgttccatagtgtcatctctcaggagatgtctagctagaactggcatttgtgaaggaaatgtctgggctttcctgataggcgccatagattcccaacattgcattcacccaagccttacactgggcctttctgtgtttccgcagacataatagtgagtaggggtccattgctcagcctgctgggtgagagcactggggaagtttttcttagatgtgaataacagcagaggcaactcgctttcctgggctctacagttttgaattccttgtcagtggatgttatgtgctcacaacccctggagtactggatctaggggagtctgtatctcaggagaagaagcaaagatctcatgttctgaaaggtttgaatgccagggtaagtctccccaactgctctgcctaaattcccaatttctacaggtgtttgattgtttgtttgtcttaaagtaatcattaaatttattcaacaaggacaataattccttggatgatggtcaggtggatgattaacggctggatagatggatgggcagatggatgtaaggatggacaaatagatgggtggtcagatgggtcgttggctaggtagatatgtgggaaaggatggatgagaaaataggtagatagatggatggatgggtgaatggcagatagactcctggaaaatggatggatggagactgcactgtcacagatgctagcaataagcagtcactgtctaaataaagcctattccaatcgtttaatactagagggaacaatcaagaaatgtcctccctgttggctgatctggagtagtctttctccatgattgttcatcttggtttgtatccttcctggtctaagctgttctggatgttgtctgatgttctggttgggactgaacagggagctcccagcatcccgtcatgtgttatgcaagcatttcataggtggaaaggctgtggcctcagtgcctcaagtggagggagcactctagcttgcactcttacctgggtatttggttctagctcatggggtctctggcctgtgcccacccacaagaaacatggccctctcttgcttgagcaaaaga

SEQ ID NO: 32902 - DNA, 1202 bp, Mus musculus
ctgttttcaaaaaccacaaagcaaggctagcaagaaggctcagcgggtgatggcatttgctgactggaacctacacagcagaaggagggagctgacgcatgaaagttgacctctgacctctacatgtctgccacagtcactcctgaaccgcagtcaataaacataaaaaagcaaatactaaagcagccagaaccaaaccactacaatgctgaactacagttctcacaagcatgccttatttaacaatgcaagatggaagtgcggggactgggggtgggataggaggaaagtgttcatgtctacaaatgttctgtgactctaaaactatgccaaaagaatattttaaaaagctaatatgaatgtactagttgtgctggctagttttatgtcaacttgacagaagcaaagtcatccgaaaggaaggaatctcaaatgagaaaatgtctccataagatcccgctgtacggtgttttcttagtgatatgggaagacccagccaattacgggtggtgctatccctgggctggtggtcttgggttctataagaaagcaggctgagcaagccatgatgagcaagctagtaagcagcaggcctctgtggcctctgcatcagctcctgtctctgggttcctcgctgtctgagttcctgtcctaacttccttccatgatgaacaatgtgtgaaccaaataaaccctttcctttccaagttgctttgggcatggtgtttcatcaaagcaatagaaaccctaagacactactgttgtagaaaaatataccctgcccatgggctaaagatagaaaggaagaaatccataattatatgggacacataggtttcctcccttatccgggaagatcatggtgacttgttttctagaggcatctgaacagaagacaatacaccaagatcatcacaaaaatcccacaacaagggcaatactcattatgatcccaagaagctaggcagaaagcccacagtccagggctgtgatgtcatggcccaacctcactgtcaacttgactggatttaaaatcaccatggagacacagttcctgggtgtttccagacaggtttaactgtgaaaggaagatccaccctaatgttgacagcaccaacctgtgctgcagggcccagactgaataaaaaggagaagggaaaatgggaagctgagctccagccttcacctctgctccctgcatc

SEQ ID NO: 32903 - DNA, 1171 bp, Mus musculus
cagaaatgtgatacggccagtcacactgtgcccagtgatgcttagctcgctgtcatttctctctcctttttattcataccagtaccctagcctatgggatgctactacccatattcagaagagtcttatcccttcttgggttaaatctcttgggaaacatcctcccagaaacattcagaaatgtgtctacagatgactctacatcccatcaagttaaggataaggatcagccatccctggggtcttaaaggagccctcactggcttggaactctctaagatcagcagggcctccaatcttccactcctcctctgctgcccaagtgctaggagtttaggtgtccatcaccataccctgtctacctgattaacagctatttccccctttaatagagaaccacagaggtaggagtggatataagagagagtgcaagctgttcattcttttgttaggcatagtagttcacatcctagcaccctgaaggcaaaggcattaagatcaagagttcaaggccagcctgggctacataaaaagttctagatctgtccgagctacttaatgaaaccttttgtagaaaagctggaatgaaagaagaaaaagaaaaagaggaagaagagaaagagctaggcgtggtggtctacttggcgaaggaggtacaaggccagcctgagctgtataagactcttgtttcaaaaacaatgaacaaatagaaaaccaaaaccaaaccaaacatacaaaactcccagagattcccatgtgtggttagatgtcacagttgggattgtcgctaccatattgtccctgtgtgtgagggtgtgaaggcactgcttaagagccactgtcttgggagagtggaaccctagtttagagtgcaggaaccaactggcagaggtattggtcttcctaataatagcacaggatccaggggaggactctgctccatagttccaagtgagaaaggcaagcaggctatctgtcacatgctgcaagcagggccagcaaggggaggactggtaggagcctgtgacagtatccagggtagggctgggaaggaatgctagataagaaggctagagaccggatgcccaggagggaaggctgctggaaggggggtgggggggtgggggggggtggagctgtgcttgaatcccagcaatgatggctagttggg

SEQ ID NO: 32904 - DNA, 1099 bp, Mus musculus
tttgctgtctgactttcctgtttctattctgttttagattttttcagtcatgagaaagtgcagctagcagaggtcagggaaagccccctcccttctacccccttgagccatttctgttcaaggtgccacagccctcttctggcacctctcctccatctctatcttgaagcatttctggatgccatgtgggttcatctatggagtttcagtatgtgttcttacagtgggtgtgggtgggtggagctggagagatggctgtgaagttaagagcgcttgctgctctcccaggagaggactggggttcttttcctactacccctgtctggcttgtaattccagttctaggggtttgatgccctcttctggtccctgcaagcacctgtgctcagctacatatacattaccatatgaacactcgtgtgcgctctcgagtgtgtgcacacatacccctgcatgtatacaagtacacacaatcacacatgcatatgtgcacacacacgtacatgaacacacacacacacacacacacacacacacacacacacaaacattaaaaaaaggaaaccccaccaagcccattatcacagtcacactagcaccttaataactgcttagcatcgctactcagagctccttgattgcctcataaaatgtttcctcttagttaaattgttcagatcagggttcaagcaagaccaacaggtcaggcctggtggctgtttcttcaaactctgtggggttgtggagatgcctgggtgggtaaagtgcttgccacacaatttccaggacctgagttctgatctttagaggccacataaagctggagaaagaggcagccccagtgcctggaaacccagcattcccacagcgatgtgagagcgggaggcaggagaacctgtaggtcacaggtcagccagcctggagcgtgcgtacaccagtgagcaagggagaaggtaaggatcttccgacccttgaactccctctgtgacgtgtgtgtgtgtgtgtgtgtgtgtgtgtgtgtgtgtgtgtgtgtgagagagagagagagagagagagagagagagagagagagagatcgcgccagagcgagctccagcgc

SEQ ID NO: 32905 - DNA, 1171 bp, Mus musculus
cccctgcctttgcttctctagtgctgggattacatgactggatatgcccagtgtccagtgctggagttgaacctagaccttgtgcatgctgtatgagtactctgcagaactacaccccaactccaatgttgcctccccctcccccccattttagaaacagaggaataggtccatggttcctctacctgatttgaggagctgagcggggaaggggagggatggggcaagagcttaaagagtctctgtccttgctctgagcacttgggtgtgttgcgtggtcattgaggtttgagaaccgtagggctggatagcattttagttttgcaagaggaggggctggtgagatggctcagcaggtaagagcacctgactgctcttcagaaggtcctgagttcaaatcccagcaaccacatggtggctcacaaccatccgtaacaagatctgattccctcttctggtgcatctgaagacagctacagtgtacttacatataataaataaataaatcttaaaaaaaaaaaaagatccagaggaacacagtggctcctgacctcatgtttctaacagagttgatttcgccattcagtctctctttacccgccagacacttgatcatggctcaggctttgaaatgcagtgaggaacataggtggaaagagataagataccttgggtggctgtcaagttaagagaagacttaactttgagggcagggacaggtttggccacatggtgagctggacgagaggtttgtaaattaatggcatttttgatggaacgatggccagaagagactttagagggtagagttgcttctgtttccaggcgcaacgcaggagagggcttgagggatgacagtgattaggccacatggctaagctggcccataagctctggagaagtggagcgggcctattacaactctgggagaatggggcctggacaggcagagcagaattgctggccaaaccatgaagggcccaagggaagttggaggctagtactttctctattgaaaattttattgagataattatagattcatgcaattgtaagaaatagtgcacaacgggttcctttgtgtgcactttgcccatttcccccagtggttagattttgtacagttgtgataacacagccaggatgttacatcagtgtagcccattcagct

SEQ ID NO: 32906 - DNA, 1201 bp, Mus musculus
tgtctcaagatctagatcaaaagcctcaagatcttgatcacaggtgtgcccgtcatctctggattgtagttcattccagatgtagtcaagttgactactgggaattgtatgctactcaaccgttactccagtctgagtgttcagtagcaaatgtgtagctaccatctggtcgtttgagttcgctgtttctggacccacaaacatgtgctatataatccctacaacatgaaattgcatgtagaaattgcaggatgcaccaagcaatcaagtgaattagtcagctggctcgcacaggcaaaatcctgaagctgcttttggtgtgtgggagattgacaaactcttaaaccatgtgggttacagtaagaaccaaatgaaacactctctgtgcagaagcaaatcacattgcaggttttaaaaaaaaaagatgtgaaaaacgtagcaaaaccgcacagtcaaaagatgttatgctaattttcacgataaaacctccaagtaggaaatctctctcttcttggaaaaggtactggaagtggtaatgtttgtgtgcatattgacttgagatgttgtagaggctctcctctgagtttaacagctacaacagccgtgatgactttcaggggacctcttagagtggacctgttgactgttggccttcccctacagaagaaggattggggtggtcattgtcccctcacctgagaccccagccttttgtgtgtgattttgggggtggtcagtgtccccttacctaagaccctagctgtttgtatgtgattctgctctgattgcatctagccccttggtcaggtgcctgcggatgtagtgtagaagatgaactggtgggcttggtctgtgtagctatgaggacgtcattatccccgctggagagggacttcatagtgcagtctctattcctccctgcatctcctgggtgtttttgttgacctggggttcctttttaaagctgtttcttagctttctgcaggggctggatggggcaaggctcactgtctggatccactatgtggatctgtgtgtgctccttacctcacttctctggagtggtgctggagggtgcaccgtgagctcagagttcacacttttgaattctccagattctattcagactaagctggcctgggttttgagtcattttaagggtggaaggacagaagccactgtctatatcacaagtctggct

SEQ ID NO: 32907 - DNA, 1200 bp, Mus musculus
ggagtttcttaaggggagtgacagtgtctctcccttactattactggaggtaaaaggacccagtgagccagttggtgggagctcagccccgtgtagtcagagaagggggtgaattggctgaggggtcatggtgacagctcatgaagggtgctgcctgccaccccatataaaatccttcatcagtgcagagccttgggacaaaggtctgaagaggaaaagtatgatggtggatgtgtcgtggtccagtttgaatgcggtatgctcaaggctttcgccttacaataatttccttcagtccttcagaccccgctgctgttagggaagaagagcaggctgttcacggcacccttatggttggttctatgtcacccccactctgttcacccacgggccatctagagctctggtctattagcactttgtcttgtgagaagaaaggcacagttgtatggccttccctcttatcccactcccaaagcgtcctccgtctcacccaaaccatgatctcagaggtttacaagtcagacgtgtcacggagctgtttggaagcagttgtctccattagtgatgagatcgaaacaccccaaaagagggctttggagtcggaacttggagggctattagacatgcttggcttgaggggggaagtgcaattacaggaagaatcagaacacaaagtagtgactgttcacagtcatagctgctcttcttccaaggggctgggggcagacgggcgaagccccttggtttgtttcggctatgggaatgtgagtgctgtcttcccagattaactctcttccttatcatcatggttcattgtgctgtggatgtccacgcatgaactgaaaccagtacaggcagtttcaaggtgacaggaatcgtattgcaagtcaggtgggaacagaaagtatagtgtctagtgtgtacagttttagctgcttctctttcagatattggctattggcggaggaaggactgaaggagagggagcatgtacagccctggttggtgagccctgttccttcctacctggcttgttttgctcctaccttggcgttgaggaaacggtggtacaactggtcatctgtgtactggactcatcaaacaccgacagagttactcaggaaaaagaacttacaacaagttatcttgtatttacactatactaggcattctagtgaactaggggtcatttaaagt

SEQ ID NO: 32908 - DNA, 1182 bp, Mus musculus
cctccctaacatttaccagagttgcagaaggctgcaggtgcgctcaccctggcaagccaagagattcggaggttctgtgcattttaatatcctgcaacgattatataattgtcgcgctttcaatgaagtcacgccagtggcctttaacaatggcctaaaagtgacactgagcaaggaatacacttccagggcactgtggcttctttagcaatggctttttgtcagcctctgctgtgactataaagcaggtacacgttttatatgctgcggaacaggaatgggaattcttttctgactctggccagggttctgccttccctgggtcttctggacacagagcagcccagatctctgatgtgaccaagttcccaaatgaaatgggtggaaaatcagtctctaagaacagaaaaggaaatgaaaataaactacccatgtgatgggtaggtctgtgacaggaaaacagttatttcttgatgttaacctgtgtggaaccacagtgtagctgactagatgtggtggagtgtacctctagtcccagctacttgggagtctgaggcctcaggatcttttgagccctggtgttcaagaccactggggtaatatagagacctcatggcagaataattaaagggagtaaggggctataactgaatcctgagtgtagccaatccacccgtgtctcttcaaggttcactgctattagggtgccctggtgggggtcgggaggaagcttcctttctggagtgtggagcagtagactgggctgtccctcagaaatgctgcccatgctggccccttgctaagtcagcagaaaggggtggcctcctgccagcacagaggcaggcaggcactgtctgctggggatgcacccagccatggccctcatcaaggcagagaatcagaagcgactctgggtgcaaatgagtaacagcgggagccagatgaaggagcgaagaggatgggggagccctgcttccctggaaacgggaagaaagggaattatcgaaactcaaaagacatttgactaccaaaagatctttaataatctggagtcactggagagttagaaatgaggtgactgccacaaagcccaagtcactgaacttgtaatgggaaggttcagagtctcccaatgcagacaccgcgctctccttccatctcaagtgctgaactggcctgttg

SEQ ID NO: 32909 - DNA, 1092 bp, Mus musculus
tctctcttgcctgggaaagctggggaccgctggccagcagcctccctgtagccatctgactcctctttaaagagcatttctgatttgacttacagcctactctttcccagggtttaaaaagatagtcccctcccccacctggttctttctcacaagcccccccctcccccccgcctcctcctcatccttttccagatagggtctgtctcctcgacactgtttctgctgtccgcctcatgctccatgctgtctgtcctatctcttccatctttagggacgaagcagatctggatctgttccagaaggtgcctcatactcaaacgaaaagagagcacagtctatcccgcttcatcttgaagggatgagaggtgtctggtccaggctcccagctatttagtcacaggacaagggtgagggcttctcttccatctttggcctcgcctgggtcgaagccatctttccttggtgctctgtgcttaagtgacccctgagaatgcatggacagagtcagttcggatcccctagagctgtctggggaaccacaagtagatgatggcgaggctgaagcaagcgccttttgtttcctcagaggacagttctccagccgcaggctctgagtcaaatttctatttaccatacatcccagcagcaatgtcctgtccacacaccagccaaaagaaaacccttggtgttaaaattcttcagaggacttttagatccaggtcttctttcggcttcgataccacagtggcgttagccatcatttttatacaaccacatgttattgaagtcacctgatggtcagttttacaaaccaggtacctgtaatttgtataattttgtatatgctctggcgtcccatggaagggtagaatacctgtgtgttggtgtcctcacctgtgacattaggatgcttgagttcctggcctcttctatgttgatgtttctgtggctaagccctgcacgtgtcatttctgaaaagccttaaatcttagagaagtcacatcgcagggtgtcagtgtgacaggctgcctgggaaccgtgagcccttttgtaagctggaagcatttctcttactactgttacttttca

SEQ ID NO: 32910 - DNA, 1153 bp, Mus musculus
ccttagtactaccttgtagccgccagccttttctcagcctgttctgggtgcccacttgctaattggccccgtatcagaagcaggacaagccaaaatccttctcatttgtgtttcaaaagcccgtttttaaatccagctctataggaagctgatgacttggtttcaaacaacctgaatcagaacccaagtcgattctttgaccatgctctcacgaacgtatccataccaaaactaaaggctgcacctccgcagcttgctatgaagagcgaattgtacttttcattgatgcctttttcaatccatgaccaaatacttagctatttgtgaatcttctgcactccagcttgaaagtgcctttggctcgagattccagcttagaaagtgccaccataataacgacaatttgtagagagaccaaaaatatttcgagatcaccataatgcctttggttaaccgggatgaataaccaaccgcaggcttgtattcatgagagcaccgagcaacgtgtggtccctgcctgctgtgagtctgcctgccaatggggaaccccaccaccactgtcctgtacagcagtgtggcagcggggagccctgcgaactcttgtgtctgtgtatgccgcctctcccggcatgtccaccaactcatcacccggctctgcatccctgggaaggaacttatgcgcaagcaccgaatcccggccagtgggcagacaccatggctctgccttcccccactgtgtccatgtccagactgtggagactcatccactggaacgacagtgtgcacttgcctgcctacacgtttggttgttggaagcctcgcattgagatgacagtgcagaacaaaaattaaaaatgggttcattagggtcattgcagttgaagtgtctctgggctgttttgctggctctggatgtccgaatgtgctgtgagggacttgcgaagagcacaccatttgcaactcggcattttcaaggacattctagccctcagccaactctttaaagtgtgtgtcagcttagagtaaaacctttttttttttaatctggaaaccccatactgtaaggagaaagaacaaaggaggcaaaaagaagccaagaaaaaaaaataggtgttttgttttgttttgtttttcttcctttgctgatgtaagt

SEQ ID NO: 32911 - DNA, 1636 bp, Mus musculus
ctacggacattttgtctcttctctctctgaaagaggtgggcagaatccacacatccatcatgttagaaaacctgtctatgagttttgtgtttttatttttcaaattaattgttttctgtgattagtttcaatgtgtaaaatagattattaactgcacttctttaaaaaaaagaacaaaaggatgtacatctcctgttacctccttgaaagaccaacttctctaggcctttttcagtgggcttatgacttcagacaagggaaaaaaaacagtaaaaacaaaaatagtacgtgcctgaaaaatgacaaaaaaaaatctttttgtaacatttaaaaaacctgaaaagcctttacttctttgatatgctcaaattttatgtaaattggtttttgccacgtgtgttccttcggattctaagcgacttcatggcttctctgttgtctcgtgtaaagtgtataggatgggcttgtggcgtaagcatttcatctggtcagtggctcttttgatactgtactgctgctgggactgggctggaacctgagcctctagagggtgactgggttcctcttgggggagattgtggagaagagggtgaggtggctcatgttttcttaaactgtttgcagaaactttcaaaaggcatttggctaaacctcccggcagtacagtattctcgtactcattaacgtttgtgtctaggtactggtacctttctgtttaaaaaaatgttctaagtgttggctttaaagtgaatttatctttagtatgatagttatatgaaaattatagggtttgtgtgcagagaatttttttataaagtgctttgtaaaaaaaaaaacaaaaaaacaaatgtattctagctttcgcggtacatatgtgtgataactttaatacccatgacagttaagtgcaattatttcatcactctaaaaatgctatttttgtgtcagttcctgcaggtgttttcatgtctttgcaaagtgacacattttgatgccttcttgataaagtggtagacattttgtagctttctagaaactttgtatccatacggtatcaatgaaaaataaagaaaatgaaagtgtgggtcagctttcttatctgcaacagtctgtgttgttgagaatgaaacctgcctttttttcccttaagttccttttctgttgttggggtggtaagtccacaccagccaattgcttgctcagtccctccttccattacgtgagtgttgggaattgagcttgggtcatcaggcttggcagccagtgcctccacccactgagtgcataatcagatgtgccctgtgtgtggcgggcaggggttagtatgtggtcagaagggggttggagctgtggctgtgtcctccgtgcctcatcactatagctttaggtatgccctgcggggtttcttaaacagccacaagtcagctgccgtgtctgtcttctgggctctgttaaaattgacaaaaatgggctcaccatgaatctcattggtagaatgcttgcctagcatacacacaggccttggggttctgactccagcccagaatacatgtggtgaagtgctccatgcccttgatcccagcatacaggaggtagagatgggaggatcaagaattcaaagccaacctcggccaca

SEQ ID NO: 32912 - DNA, 1181 bp, Mus musculus
gactttcagctagagatcattcccgcagggttgggctggaagtctcagctactgattttcttggtgaagaagggagtttgttgccattcctatttggccatccctaccttctggtaaaaggacatctgtactcatcgtgtacatagaaaagaggcccacagaagacctcggggaaggaacaatccatcaacaaatggactttttctcctcaaatgttcactaggccagatgtgttaggttttgtgtcagattttctttcatagatcctttcggttctcaggatgattttggggctcaacttgcagacttgtcaaggaagccttttgcttcctgctgccttctgcctggggccctggggcccatttttgtcattgtgagaatgttgcctggtttgggggacataggtgttgcttagcttctgggtatccttgctcccatttggaagggtccagtcacatcctttatagcccaggcacacctccagacctccctctatggggtcaacatgtgacaaaatgcatccagtttgctctaagataagcctgagctctgtctctgtctctgtacgtgtgtctcagtatgtgtgtgtatgtgtgtgtggtttggtccctgtgaaggctagaagtggggttcaggtctcctggacctgaagttatagggagttgtgagctgccctgtatggatgctgggaactgaacttgggtcctctggaagagcagtaaccagtcttccccctgggagcaggcccagggcaggcactgtggcctagagagtaatgccactgaacccaggaagacagtgaagctcggaaacagtttagcttcttgcccaaatcctctgagcagggactgggaagcacatagaagagcattctaagaggatgagaagcactgtctgtggatcaggagctcggcagcgaaggctgtctgagtctctcccactgccacaccagtacccaccagactgccgttgcctctcacgccgcatgtgccgagatttcctcccaactctcatttttcttgagttttgtaggaactgtcctgtctcctgcactctcaacatcgtatcttcagttccccccatgcttgttaaagatggctgcatactattctgtccatcgagaggatgtcttcagtgagctgggagcgtgtaatggagcaggttttagattgctttctcct

SEQ ID NO: 32913 - DNA, 1113 bp, Mus musculus
gctgctgtcctctctcttaaccccccagccaccctcttacctcctgtctgccttgcctccccaggctgtcttgcccttctccctatgcccgcccccacccgcagcacatttactgcagcagcccaacatccaatataatttaattgcttgcttcctttgcatgccgccctggcctgcctgtgtaccaaatgaagataaggggtggtgtccctgctccacaccagcacctctgtgaaggttcctggcacttagatgctttcagcaaatatttgttgagagttgaatgactgaacctggtccagcctgctaacagtgtcttcactgttacatacagggtcaccccaaagtgaggtttggtggccacatgcagtctgtatggggaagcttgtttcctctaacttgtcaccacagaagtcacctggttcatgcaggtgctcagcagtgtatagggtggggtgctggaaggttttgggggtgcttggataggatatgaggtaccttgctccttgagcatggggttgctgcattgcccagagccctctgtagcggtaattttaaaaaatgtaacccacccacactattgctggtaatgtacctgcgggccttgttctcatctcctgaagactgactcagagctccgaaatctctccacccaactcactaagttcccactggcaggtcactaccatgctagcccctcgcttccaaattcccactgcctttttggatgcacttcttgcaaacccacgctttaccactgtacctttctctctggaacccagttgagctgccgtgtgaaggaaaacaccacagaaacatagtggtaacagggcgtatcaactagcatcctaatttataagccattctaagttaaattctcgagtatcggatcctggcagattcaccatctaaaccaggggccacgtgtagctacatcatgtcctcctactgtccctgtccaaaagcgcatctctcctgcctcttctcttcctccctccaacctactcacctgcctactcacccagagattcctttctttattccttagaagtcctgagtacaggattcactcctcattcccggcagctcctctgaggaagctgaattagcatc

SEQ ID NO: 32914 - DNA, 1145 bp, Mus musculus
gatagaacaaataaatagatattgctaaggcccaggtaactgttacctgtgtagcctgccattttatgctgttacctatgttttaagaaaactttctcgtaagttattactgctgatactaagaaactttctcgtgcccaaggtgattgcatattgtgttatgctctgtgcccttggaaaccaatcactacagaagtcagttagagctgctttgtatagttagccacaataaacttggacccaaatcaagcacccagaagcacttcctgcacctgtgtgtgagcttttgtggtatttggctttataagctgctcctgggatggaacccaatgggtatgtaaggaaatggaccagaaattccttacagaacatttaaaatcatataagtagagcttacatttttttctcctctgagcttaggctggcctagcgacttgctttaaagaacagaatatggggaggaaaaaatgatgtcacagtggaaaagccaggcaagcaccaccataaccaggaggtaaggtcagcaccatcgtggccaagccatatggacaatgtatgtgctctaacggcagctacagacaaaactgcactcagccttggtgactgtcctcaaagctcatattgattgtaaaactatgagcaaaataacagaaagaaacaaactgaagagtagtctacccattaccaaccaatactccccagactaccaaaatcatgaaagcaagacttagaaactgtcaaagacgggagaagattatgaaaacacagtgacttaaacacacatgggatcatagagtggcttctagatcagaaaaagactgttagtgggaaaacggactaaatctagatcataccctcaattagttgcattaaactatgttattttcttatgatttgtgtgtgcacagtgagtgtataggccagagaatggcctcagatgtcatccctcaagtgtcatctgcctgttttttttaagacagtgtattgcagtgacctgacctggagcttgctaagtaggctaggctggctaggttgtgaccccagagataagctgtttccaccccaccagccctgggattacaaacatgtgacatctggcactttttatgtgggttcctgggatcaaatctaagtcctcagctgag

SEQ ID NO: 32915 - DNA, 1211 bp, Mus musculus
atacgtgtctttacactctgaagaagtttttctcatttgttttgtttatttgtttttgtctttctgtctgaaaggtaccacaatgtagtcttaaagaatcttatatctctatcttttatctctaccctgaatttgatttatgctcagaaactatcttttccccttttgtttttatttattaaataattgatgtgatacaacctaaaatttctgaattccagatataaaaattacactttttgaacatttgatgttacttacaattcacagacttgttaatagcctgacagtagattagcatctgtcttctcctgtcttgtcaagtctcttgctactttttactttcctaagggattacctcctgtcttcttttaaataaattcttagcaaactggttaactgttacttgcaagggtgccatcactggagtggtccagtcagctttcagtgtaaaaatctagggaatttctagctttcctatacgtatgtttctcccagcttactgtgtgcagcagttcctttgcggtgaaatatgctgcatgcttttcagctcccaaggcaatacagctgtgttccctctgcctagcactgttctgctattataagcctacagtgtggtacttgcatattagcatactagcttatgtacgtgagtgagagagatacactacagttagaaattactttttaaataaatcctgagtagccttctacattttttccaaatttcattcagatagttcactttctaagatcagctttgtcttcattcaagaaatcttgactagattaaattttaggaaaataggtctagtttttatcttccatgttgtataaattcaagttccgtaaagcttcctgtgactttcttttcatggccctttcagatttcagtaaatgaactcaaaggccacaatagagtcttctacttaattctaaaatgccacaaactttagattttttttattattgccagttcttcccagtactaagatatattactctgttgcacgacaagtcatcacatccataattccttaaagaaagttgtttttttaaatgtgtcacagtgcctgtaagtaaagaattctagaaagattggtgtgaatgactttggctaaaggtctttaagtcaaatggacctgaacactagagagagttgttaagggagagtaaggttgcgtagtagctaggcagctttctctcttcat

SEQ ID NO: 32916 - DNA, 2002 bp, Mus musculus
aaactgttgaatgagtttcaagtcatcatttctttgcatgttgttttagctttagaaagacatgcgttatagaaacaagtaatagcaaaaaattgatgtatatttattgattcaattccctttaaatcttactagtttgttactattttatccatatttttaatggcttgttcagcataacacagttataattaagctgatcaagttgtactacatttaaatcatcagcagtgtatcttgaaagtgcttaaagggttagttcatagtacaagaaattaaatgcaactttacattttaattttttgtcaattaaaatacaatgtagaagtttattttactattgtggacacaaaatgtaaaggaaaccaactttttccatactgatgtataatcttgaaaaggaaaaaaaaaaaaagcttctctgttgaagccagactttgtgtagtaaaacttttaaacattattttaaaagaaatatgtatataagtatctgtgtattctttggaatgattctgaagtctctggtctaggaccatgcctgtataaggtgtgagagaccatgatggtgtgtgagaatggaataaatgatgcctttgatttaaggtggcccatataatatacattgagtactccatgtctccaaatggatttccatgatgtaatgaaaacacactaacctttttatgatttttatacatctgccaaaatatactgagaatctgataaattgtctttgggtctctgaaaagaatcaggtgcaatgtgggcaggcctgtaaactgaaccagatatgtgtcttctattttattgctcttgtaatctaatgtaaagaattgctaactaaggctgtgctgaggaggtcaaattaatttttatttgtttagaattctgttgtcaaaagaaaggtaatgaataaatgatgctcatcctagaatgtataattttgaaattagtatggagtaaaatgtgagagcgttgagctttatcagctacacttgcattcaagtcatattgtaagagtttggagatgtatgctctttgtaatttgctacagtgtttttagttctgattatatttttcatatagattattcaataggacaactctgttaaataaattaatttcattcacctcatttggcaaaactgtattctgaaccatttagggtttttcccttatctttccttctctgaactctggcatacatatttgtacactgtaatgtcattgtaactgtttaattgccttggcaatgctaatgtatcgtaacacttagttgagaaaagcatgaccgggtcatatgttgtttgacttaagggtaacatagaataagtgtttctccagtctgccagacaaagcttggtagtgggaggggactctgacctctcccttttgtgtttgtctataggaattgattgggaaacttttgttttgtgttttttgtttgtttgtttgaagtgtaaactgatactcttttataagaagtaaatacaaacattattgggtgcctttgtttgtaaaccaaaaagtaataaatgaatccctatatttctattatagcatctattgtatttttacattgtggaaaccatccatgagttaaaatggctacgatggcaaaagtagtccttggatcttttttctttcttaggtgtcctcatctattctcatcatctttttatttatgtcttgagttgttcacacagcactttaggggaagcatataggcagaatgaacatttatttaaaagtatttttatatagtgattaataatgagacagatttttttttaatgtaaataaaaccgggagaccaccagcgtgttccaaggatgaatgacattatgttagtttataggttcttcaccagtagtagatctgacttcatttaaaggattattcattttcatagagattgagtgaagtacttggcgggggtgctgagagtgtgtcaggatggggttagagtgtaaatggctttgtaagcattcctttctaggct

SEQ ID NO: 32917 - DNA, 1930 bp, Mus musculus
acactgagaagtgagtgcatttcagtgcagcctgtccagaagggacctgcatgtgttgggagattactagtggtgatgctattcggatttctctgtcttacaggaaatttcaagagcaagaatgccctccttcaccagaaccaacccggaaagaaaaagacaagaaaggctgccattgtgtcattttctaagagtcccttgaggtttagctaacaactgccagggaagccctcatctctgctaccgtttacatcatccggtacctttgtagccttagaccgatgatcaccgtgttagccttacaccaagaagctggcaaatcctttatgtgaagctaatgtaacggtcttacccagacttgtgtaaaggaaacactaaggctgcttcagacgttatctgattcctttaaaacacatgtctacacacacagatgcagtcttcaagggcttttaatagaggtaaaccaagtttggagcctgagctgtttgctaagctgaagtcataggttggaaagtaatttttaacttctggaatcatgttgcctactgttactctaaatagaaatatagggaaggttttttttttgttgttgttgtttttttaaatgtgaatttttgcctatctttaaaactttggttgtcaactttcattaaccttaaatacactgaatggaatcaacacaagtgagacatctcagacctttcctgatgctacggcttttgtttttccagtggccaaaataccaaaatgcctgttgtatttatggattaaaaactgctgattaagcctttgttatcatgcttccttcaagatgacaatattctctgtggccaaatgtttggactggttctgcacttgggtgttttggtgaactcgctatcttttcacagccgtggtaagggtaagagtggatggttcctgtcttgtcttccttctcaagtattcctggttaagggattaaaaaagaaaacccacacaagctaaagctgtttttgtttgatgtaatataaaatatggaattgatctttccaaagtcagagatgattaatgtttttgctatatacttttatacgttattttcttatcaaactagttaacaagtatttttatatgtttgtaagcggatatgcttccaccttgtgtatatgtaaagatgagtatttaagtctcactgttcactgttaactgacaaagagaccatggcttttgcttgctggcttggtcctttttacatccactggtggccaataatcagaaaaccttcccaacagaacgcaacaggacgagagtgcgaagtcacgttcagtgtccccgctagatattgactgttatatcaagtattacgtgtaaaacctctacttgacaattagtgtaactgtggatggcttctgactttgtttttaactctgtggattgtgtttaagcaattcgaagtgcgctcctgattttgagactcagtggtattgcacagtggtcactttattgaatgtgtacaacagccccatgaagtttataaagtggacccttgtatagcttcaggtgctagaattaaagttgatctgttgtcaccagacgacgcttgacggctccttttttgtgccagggctttggtgagggaaatagacctggctggagtagcctgtgcctttcctgcaccgtgtctcagggagttctgcaggggatcttactgttccattgctttcttgaggtcagtgggttttaactttttttcctcaagtgttcttaacagagaagccccaggtgtagaggagagagggaggtgaatatattcacatagacccccagaggatgaatcctaaaatgtctttggcaaagagggccatgtatttatttaaatacaaacaaaatcacttaattttattgtgtttcaaaaatgtttacattattgtttttaagtttctggtaaaat

SEQ ID NO: 32918 - DNA, 1211 bp, Mus musculus
tatgccaaggaaaccatgagggtttcagatcccccagaactggagtaataagcagttaagacctatgtaggtgttgggaacagaacctgggtccctggaagagcagccagtgcccttgatcactgagccatctctccagccccagccccagtttcttgattgagcttacagacatcttttctgagatctgtacatggagaagataaataaccaagtgactttagagttgatttggttccatctgcttggatgtgtttgatatttttaaccttgtaattggtatgctaatatattctagctacaaaatcaatctgtgcgatgaagataaactctgaaactgtctgccattagaagattatgtctgcctctggtgctaggaatgaaatattaagacaggaatgcattgcctctcacatcaaataggaggctctgttgaggacctggtgggggctgcccttgtgagagatgatttataatgcgcaactacaccgtttgctttgttgtttttctttagttttggatacagccggacaagaggagtttggagccatgagagagcaatacatgaggacaggcgagggcttcctgttggtcttctcagtcacggatagaggcaggtcggtgcagttaatgtgtcggggacaatatgatcaaaaaaaaaaatcatcgtatgcacgtgtgaaagtgtcatatagaaaccaactattatatggaatcaatataatattgctaataaaaacctcaagttagcagtgctaggttctgtccagattgctattttatggaattaaaattttcattttttttacagtagaaaaatggcaatacagtaataaacaatataaaactcactacctttagtttcttagcataatgtatttattttgttttttagttttgaagaaatctataagtttcaaagacagattctcagagtaaaggaccgtgatgagtttcccatgattttaattggcaataaagctgacctggaccatcagagacaggtgaggaggaggcagttctgagctcgggaagctgtgtaaagaagcacttgatgaaagagtggaggacccgcgtccaagaaactcttgtgtggcgcgcgcgcgcgtgcgcgcacacacacacacacacacacacacacacacacacgtgcggtgcagcacagcaccagctcgctgctgagtctggcacactaggtcgcacagaatggc

SEQ ID NO: 32919 - DNA, 1138 bp, Mus musculus
ggagctgggccgcggtcccctgggcggtgggacaggggtctgcgccgcctgaggcctgaccctgcatagacagaggccggtgaggggcggccgggattcccacgggggacccgccacagccgaggagtcccaaggttctgcagcgtcttcgctcgcgggccgccctcctggagcagatccgactgtgttaggttggcaatcacggccccgtgacgtggtgctccgggttgtcactgtggtgtggacctcgactccacagctttgcacaccctgggtcggggagtggacgggtacggggactgagtgattgtcactagagttcacggaaggagaaggtggggagagctctacaggtcgtccgaagtcacacgcgaagaacttcaggcagtttagaagatcacgactgatttgcggaatttgtctcccttttttttttttttttctaatgatgtttgtattcatttttgtagattttcctggcacctttcgtccttttcatcttgtattgggttgattataaacagaaaccatgacggcagccgagaacgtgtgctatacgttaattaacgtgccaatggattcagaacccccttcggaaatcagcttaaaaaatgacctgggtaaatagtttcttaactcaaataggaattattttaattgatagattaaaaacgtaaaagatggacaaattaatatggtgttttttaatacatatctatatggtctgatatttaaatcctgtcaaatataattatctcaaacattcatcttttcttcatagtgaaaacatttcacattctttcatagagatttttttatttttttgagattttaaaaatatatatacagtatatagttattaattgtagtatacagtgtcatacctgaacttttttatcttgtactcagcagccattgaccaatccgcctctcccagccttccttccttcttactctcctaggctctgtgagccacggtcctttttttttctttttgttttcctttttccttcttaaataaagccttactctttccctaggtcagcctggaactcactaataggccagggcagcctccaacttatgtcaggtcttagttcagcctccaagggttacaggtgcaggccactattcacct

SEQ ID NO: 32920 - DNA, 1162 bp, Mus musculus
agagatattaataatgtttgaaagagacttcagttaatttgtattcttaccaaataagcaggctgtagactatggagcatttaatttttttttttttgtaaagttagtaactcctaagatggataatactgaaatttatatgggactcagaattaaatttagattggccaattatgaaatatagtactttctttagtctctgtaactatttaagtactgtgaaacagcaagtaagtcaaagatcataatttgataagaattgaccaataatattatttctgttttctagttaaaactttcctctagcattataaatgtgtatgtactaattacacatgcataatctgatattacagctacattaaacatctgattaatactttcgtcagatgttcccctccttggttgtggctgtgactcagtagtagagtgcttgcccagcatgcatgtggtatgggttctacctagcactataaaaaatgatttgctcttttagctgcctttctgtttctactctggttacttctagcatcaagtacaaataatgccacggaacctgccatgtaaaatgtctgataactggatccatttcactcgtgcctctatgtcataaatttattaagcttgttctctaataactatctctatttctttgtctctctaatctctttttagccaaagcagaataagtatgtttaacgtatgcataaaatataaagactaaagacaagtatcattgatctactatcatcttttattttttaaaaaagtttattatatatatatatatgtatatatacatatatatatatatatatatatatatatatatacacacacacacacacacatacatacatacatacacacacacactgtagttgtgagccttcatgtgcttgttgggaattggatctaggacctctgctcactgcagtcggcctggctccctcaggcccaaagacttattattataaataagcacactgtagctgtcttcagacgcactagagagggtggcgtcatacgggtggttgtgagccactatgtggttgctgggatttgaactcaggaccttcggaagagcagtcagtgctcttaccagctaagccatctcaccagccccaccttcttttattgtgaaggcatggtttgggtatgt

SEQ ID NO: 32921 - DNA, 1196 bp, Mus musculus
atttgttagttcacgcagcaaacagattttcaacatatatgtactatatactttgatattagcatttagataaaacataaaaaaatattttactgacttgaaataggtacagatccagaacaagagaaatttttttaggaaagtgtactgattttgtaaaatgataattgtggtaaaatatttagtatgagggtagaaaattcccagcctgtaacctgacagttacaggcagtctctggatgcccttaccttcagactctgcttcactctttgtccctgcatttccttttgacaggagcaattctggattattatttttgaggtggtgggtggccctcaaacaggggccatgcctatccactggatatggtctctatgggttctatctcgcccttgttgggtattttggctaatgtcctctctgttgggtcctgggaacctcttgggtccctggcatctggactttctagtggctatccctaggtccccctctcccactgctatatgcctcctttcaaattcctgaccctgatacttctcctttctctctcttatctgaacttgctccctttttccctcctcctcctgtctccctcccaggtccctctctccctctactttcaaagattattttcttcccccttctgagtaggactgtagcatcttcttgggtttcatatggtctgtgagttgtatcatgggtatttcaagctttgcttttttttttttttttttggctaatatccactaaccagtgagtacataccatgtgtgttcttttttgacttgggttatctcactcaggatagtttcaagatcccaaccatttgcctgcaaatttcataaagtcattatttttaatagctgagtagtactccattgtgtaaatgtaccacattttctatatccattcctctgttgagggacatttgggttctttccagcttctggctattataaataaggctgctatgaacatagtgaaattcaacacatttttagcataaagtagtctctaagtgtttgttgaatgaggtggaagctcgtggatgtttcttttaaaaggacccatccctgtgctagtagaaatttgtcagtttgcttaatgttgttacgaactttagtttttcaatattgaatattatgaattaagaaaaaatttcagtacattttgtcatgtggattgtcaagctttt

SEQ ID NO: 32922 - DNA, 1184 bp, Mus musculus
acaaggattttttttcttatgctttggtacataaaatgtctaaaatgaaaataatggattttagatttatagtcatttgaaaataagcttaattatataatatattaacaatgataatgaatatatcatcagcctcctgatgctaagatgtgtttgaagtcttgatatggcatttaacaatgagaagaaatagaagtcaagatgaaagaatatttgagaaaaccactacagaaatgatagctaactgttgttaatgtccattcttaagcattctcatttagatatggatttaaaaatatgtatgctcacacacataacatataatactaaatcaaaaaaatacttttactctgactatatgttaaaatgataacattttagatatattggtttgaagaaaatatatggcttaagttcaatgaaaaacaaatatctgtaaaaggtaaagttgtttttttttctcctttgtttagatcgatcaggaagtgtcactggatccaatgttagtagaagattatgattcattaatagaaaagatgaacaactggaattttcagatttttgagcttgtagaaaagatgggagaaaaatcaggaaggattctcagtcaggtttgttttcatatctctactttattactatattgttttcagaattgataaaagcaaaatctaaattttactggtttaagtacaagttcagaaatggcattgtcaataaatttatctttcaagtagccttcaaaacatacagttaaatgtacatgatacacatgtgttatatatcctatgctattattgacatttgtcatatataaatatatgtgaaaatcattaatttttgtataccaatgagatttaagctcagctaacatagtaataaaaatttactttttcttgactttggagatttgaaaggacttgaaagataatttagttctaactaataaaatgtgaatattattttttacctttcctacctagagcttgggtgaatatttcataaatgaactaagagttacagttctacttaataattctctataataattgaccttcctatataaagcaattttaattctgcaacatagctgctctgatcacatccaaagaccttctaggtctgtgtgatttggctgaaatgcagacatgtctttagacatctttaatctcaaacagtgatat

SEQ ID NO: 32923 - DNA, 1123 bp, Mus musculus
gaatgagaagagaactcatgctgaaggagcctggggtgctgttcccagggtcattacctaatgctcactgtactgattctcaactgaccattcccatgtgggcacgccttaatactgtgagaggatcctggctaccctggcagttctcactcctaagcactttcattacaaacaagaaactgattcttagagcttgctgcagttgactcatgctgcaaagccttcctcaaagccttcactggtgtgtaaatagtgtgtcataatgctgctttgctgggtagtgagctcttatttctcatgatgagggagggaaggctaaaactgaaaagtcaagtgacttcggtttttgaagtaaccatatttcttttatgaaaacaggattcatcttgtatttccaaatatatcttttatgtctttgtttgggggtggggtggtgcaagaaacagacctctatgcttaatacaaaaatgaattcatggtggcctttctgagtgatttctgctcgtggcagcacactgttcagtgtggttctcctggcttcatcgaggaaggactgaggacctttgttatacttagcaaaacccagatgcatcaatttctgatgctttttattgttgtgtataatctatttacttgttttatttctgcctaaagtattcaggtttgctgtggacatcagaggtctgaattctgttcttactgattttgttccatggttgaatttaaaagtatataataatgaaggagctttattctttattcaaatctgttcttattcttattctttctcaggataagtaattttaaacaattattataaatattgcatagatttgccagagaaaaaaacattgtcctgatattgatgttatcttttatgaaatgagcaccattttattttaattagagtcaagaaaaaggagctggccatcttttgccttaatggaaaatcaatgaaaccaatcccatcgaagatattgcctaaatatttagttatctttagatatatgtcttaggtgtctagtaaaattgacattttttattgttaatatctttctgcttcaagagtacatggcagagatgacacatcactatttagtaatattacagccccacagacaga

SEQ ID NO: 32924 - DNA, 2289 bp, Mus musculus
acatctcagacttcatggagttcaggacctgtggttagaagtagtttttagccctaaggttaatcagtcgtagtttggtgagcgatggccatgactcagctcaagcagtaagaagagcggcgacaaggaacaggtaaacactgctgggactggatgctccaaactctgtcttccttcaggtaagactggggtgctttcactttactaagaagggccacttgtgtctgactgggacaagagtccttgtgaatgggctcggaggtggcatcaaagtttactctagacttataaagccttgcttatttgtatttatatgggcatggttggcagttacagccctgtgttccgtggccagtaaacccaaacccatttgggtttttgaataccgctgggaatgtctaaggaaagtgatcacagcatttcccctaatggccttgtgattgtctgttctgataaccatgtttgggagaaacacttaaagctaattggtgcttctgagagcagcaatattcccatcatagtcccatgaggcagacacctccccagcctcaatgacagcctctctctctctctctctctctctctctctctctctctctctctctctctctctctctctctctcccccatccccctcccactgccccatcctgaatatcagtgtcactgctcagaagagatcctgcaacactgccacctgtgtgacccatcggctggcaggtctgctgagcagatcaggaggtgtggtgaaggacaactttgttcccaccaatgtgggctctgaagccttcggccgccgccgcagggaccttcaggcctgaacagataacagccccagaatgaaggtgacttccttgtacaactggtaggaaaatgaatgtccacatatctcagggatagaagacatactctgaaggtcacttggcctatgaatcagatcccatcttacagtttttttttaaaccttcccctagcctttccttctccctgcctgcctaccctgcctttctgctctcttctgtgatgctgtgctctagggccaagagatacagaacccatatattcatcactctaattgtgaccattctaccatatgggtttgaaagccaatgacattatcctagtagtatacactacaatgtaagagaagccataagtttaaggactgaattggttcactactggatatataaccattggatggtcatttaactctcactgagtctcaatttttccactttataaactagggacatcaacagaacctatctcttaatattaacagaaaactaaatggaataatgtcaagagcttgacaattaatacctaaactttgttctttttttttctcctaggttacacaataaagataaactctaattctattcatgtataattaaagttatgtataagaaaggctgatgaaagacacatatatttgcatccttcttagtattgaaaaacccttctccctttgacaggagctaaagctaagtgcagaataagttgcctattgtgcatcgtgttgtatgtgactctgtatccaataaacatgacagcatggttctggcttatctggtagcaaatatggtccccataaaccatcctgttgatgttgatgactctgctaaacctcaaggggatatgaaacactgcctcttgctcttctggggacacatggtaatgttgtgactcaatggaaccatatgcttaaagaactcttaatattgtcacttgtgaatgtaatcaaaattaaaaacaaatgtattttcaatatcctcaagtggagtctttgctgttacttatactgtgtttcacaagagagcttttgggggtctgtgagcactttgctgaagcaaaggcattgctgtcttagaagctgagtctctggttaacctcgtccatttattaaaatgctgtgtgtgtcaaagaagacaatgcacatttatttccagagagtgacccggttgccaaccatagagggtacctatgattcttcatttctcaggtttgcctttactcacccttgccttttctccccataaaagtccttttttttttttgtacctcttggcctacaacgacctttataagtgataacttgtttaaatggaaatcaaaggctaaccaatctagaatggtcatcagtgtcatccagactcatttttttttatgcgagacacctaaaagagtcttactcaaggtcctgagagagacatttgcacatttaacaagcatttgcttactgactgctatatatgtggccactattctagacactgggaattt

SEQ ID NO: 32925 - DNA, 1178 bp, Mus musculus
ctactgttccaccgagacagtttctatatctcaaatagaagtggtttccaggctctggaaaggaaagccctaggagagatttccataaagctgtttctctttggtgaacattttgagggaaaatggtgtggttgggaaaggctgtgttttgtgtattcctgagagattcttccccttatttccagagaggtcttctcttagatgctgtcagttgagcagattggcagccaagcagaggtgttcagagaggtttccaactaatgtagtcagaggagagttgccagagaagcagggctccttagataagtaaattgaaggatattttggggataaaaataaatcctttttgaaaatgaaagttggagagttgctgtatatacaaattgccctgttctgaacagttggccagggccaactctgcagaccaatgacataagcaagaagttctcgctttttttttttcccccttagcgcggccgactctgcaggtctgcgtggagccgcggttgcgggtctctattccgcaggatggggtttgtgaaagttgtcaagaataaggcctactttaaaagataccaagtgagatttcgaaggcggcgagagggtaaaactgactactatgctcgaaaacgattggtgatccaggacaagaataagtacaacacacccaaatataggatgatagttcgtgtaactaacagagatatcatctgccagattgcatatgcccgtatagaaggggatatgatcgtctgtgcagcatatgcacatgaacttccaaaatatggtgtgaaagttggcctgacaaattatgctgcagcctattgcactggcctgctgctggcccgcaggcttctgaataggtttggcatggacaagatctatgaaggccaagtggaggtgaatggaggtgaatacaatgtggaaagcattgacggtcagcctggtgccttcacttgctatctggatgcaggtcttgcccgaactacaactggcaataaagtttttggggccctgaagggagctgtggatggaggcttgtctatccctcatagtaccaaacgattccctggttatgactctgaaagcaaggagttcaatgcagaggtacatcggaagcacatcatgggtcagaatgtggcagactacatgcgctacctaatggaggaagatgaaga

SEQ ID NO: 32926 - DNA, 1195 bp, Mus musculus
tcaagtccaaggaaaaagtctctgaggtgtgggtggacgtgggaagggaaactgcggcttacatcacacgccagctcacctttcacgctctggggtgcatggaaaatagagacagggaggtctaggcaaagaccctgggcaggaggaagtgggctcggtggtggtagcggtggggagggctccattgcctgcttactagaagtctctccccactgtgctctgctcggtggtcatgagtcagaaatagtacatttaaaagaaattaagcagtttctcccatcctgttgcccttttgaatctcacagttgttattcaagtgaggcagggagtggtggctacctccattccgatttacaaaagttcaagtaagactgacaaaggtagacaacaggaagcacagggccaaagtgggagccccgtgcttgtcctctctgtcctctctcgtccacttagatcccttctcccctccacgattcaaaagcagcagtagtggccacagtgtgcggccctagcacaaggcagccagcacaaggcagccagcgacttactttgctagatccagtcctgatagttacgtgaggctgtgtggggagaggggcctctggatgatttgacccacagacccttcttttctcaggagaagctcttgattaagagacgggctactctgaaaacagaccccccagatcctgccctctcctctctgggactcaagtcttgcttccaccctgtaactgacaatgaattcagctgccctgggaacaggctgggactgaacccagcgtctcagagccacagtcagctctgactggagcatggcagagaaggggaaaaccttgacccagtcttctctgaagagtgtgactcattcctttcccttacagtctaacttcagtctgtctcctgggtaggagcagagaggattaaggcttgaaagggtggaatcaaacccccaccccacccccattcccatcccgtgtactttccctctgcttttactaggatatcactgacatggtgggccagtactgaccagagtgccagctgggagctgcagctttcctgccaatcggttccaacctgaatttgaagctttggagctgcaaggcagtctggatacctaagtgattcacactggggctctgtgggacaccatgtgctgtgcaacagcggcccctggtggacaagagctcta

SEQ ID NO: 32927 - DNA, 1192 bp, Mus musculus
ctatttcctctgttatgcaaatggcatgtttcaaccatgggatgtataaccctcaaccctaattccagaaggagaagacaacagaatagacctgaacttgacttacaacctggaacacaggaatagaagatgacctgttctcactgatatgtaacacaagctgggaaatgaatacttgttgctgtaagtcacagagtctttgaggttgttatgcaacacaataccaccttgtttaccagttctgaatgtgtcagctttgctgcagtcacaaagcaccccaagctagcttacaagcacaaacatttatttctcagtcctggatctacaggctagctgtggctctgtttgctttgcttggccaaatgtcttcttagtctgtgacctgagttgaaggaacagcttctgttggggctatggtgttcccatagaagacccaggagtaaaagaggcttcatcacacccacacaggtgcacttaaatcttccaaaggtagggctatgccacgtagttttatattctatcgcctggtgatgggtcagggacatctactttgtctactgagaggccatgggagtcctaggcagaggtgggaacagacagttggaagcagtgcaatgtagccacaggagacttttacttgtagaattcttctacctgtagcatttctctttccattccaggatgactgagtaggtatacagtacttaaaaagcttgggagttgtaggtcaaattagattaatttcactcactatagactttttgttttgctttttgtttttttgagacagggtttctctgtatagccctgtctgtcctggaattcactttgtagaccaggctggcttcgaactcagaaatctgcctgcctctgccacccgagtgctgtaattaaaggcgtgcgccaccacgcccagccattatagacttttaaactgtttctttcagtgcaggttccagccaaggcttcaatggcaacaagaaagagtgtacagaaaagttaactattagaagggggctggttccaggaagatgcattctagagagagtcaaaaacttctcaccttggaaacacgttcataatgttgtcacttttccaggactctaaaaggaaatggctagggcagatgcccttttttcatttttctttttcctcctcttccttctcttcttcttcctcttcctcctcctcc

SEQ ID NO: 32928 - DNA, 1165 bp, Mus musculus
tgaagcgctgtaagcaaggcagactgtatgatgcggtggtctctgcttacatttctccaccacagacagtgtctaaagatattagatcacagacaagatggtatgcttgtgtttctctcatcgagctctgctttacctggaatttccttggtacacaaccaggatatttcttcatggactcttcctgactagttctgttgctttgcatacccctactgcattccaccttcctcaaaggatcattgggtctatcttcttattttgagacaactgtattcttagtttgagtgtacagttagtgtcagatcactcaattctccatttttctagtttgaatgcatttggaaaataatctttagtgcattgatcttgtagttttttttaaaaatcattttgttaagtcatttgccattttcattatgttgattgcttttaaggggagtgaatagagaaaaaatgcttttattccatgtgtgctggtcagctttctgttactggagtaaacttataaagactagaggctggctttggtttaggttcttgtccctgatctggactcagtgggatgtggtgctaactcacatggcaggattgtgtggtagagcacactgcttgcttcatcaagtcagagaatgaaggtggaaagggaaaatggctggggtcccacatacctctcagagctgcccccgtgactctaggatctcccacaggcatctccttctaaagatccataaccacttcccagctgcaccaccctggagacccagcttggaacaggtaagcttagtaagcttgactcaagtgccatctttagctagtgtaatggctcctactgtaaaaagatttgtaggctgtgcatagtaggacacattcttaattccagcatttgatagcaagtggcaggcaaatctttgtggtttgaggatagcctggtctacagagttagtttcaaggccctgccttaaaagcaagcaagcaagcaagcaagcaagcaagcaagcaagcaagcaagcaagcaagcaaacaaacaaataaaaatctgacaaaaccaaaacaactgcaaaggatttatgaatgtgtttgctacactttccaggtcaaacatttcctagactttattgcctatcatgtattaagccttgctcagtgaactataagtaactat

SEQ ID NO: 32929 - DNA, 2206 bp, Mus musculus
gctgcctggtgcagagtaaatgcgaacatacaaaggttgcatggtaaatacttgggattttagtttgtgtctattaactgagaagcaaagacaggcaccaagaagcattaccaggccacccttagatgaccttgcatgctctgagcagaattgctcatttttgttctctctgttcagaaacaaatactcttgtttatcggaggtttttaggtcacttggagaaaaccttcagagtgatcattagccgtttaatttagaagcttggctcctaagttatcattaatgtgtgtgttggctactgtgttgtttagtaggtgacaactgtgctacagaaactgtccacacaatgcaatatgaagtcagtcagttagagacctcagccctgaatagaagagcctctgttttgtgggtctttttgtgtaatcaaatgtttttgttgatttgactgaatcataaccaaagtacaatggacacgcaggggaagaagacaagaaaattaatgaagagctggagtctcagtaccagcagagcatggacagcaaactgtcaggacggtaccggcggcactgcggcctcggcttcagtgaggtgagactgctcacgactggggcatgagcgctttccatttggtatttgggttgccagagcatccgagaaccctgagagagagagttagttttctttctttctttttttttttttcttcaagacagggtttcactgtgtatccctggctgtcctagaactcactctgtagaccaggctagcctcaaactcagaaatccgcctgcctctgcctcctaagtgctgggactaaaggcatgcgccaccactgcctggcgagagagtgctttcttgtcagctacttaaaatactcttacagcacatctctgtcactacagaatcaggaaatgttcttaagaagttaaaatgagttttctaatgttggcttagggtaaattttacttaaccttggcagacctttaacagatacgaataaatgctcataagataaaagtctttcatgtaagtttaaaactggtctctaataagtaccaatgtgtaataatgactggtgtagtgtgaatgactgacagatgctgttccaggaagagaaaagcaggaaatgtcgtcagtcgagaggagggagacagcgaagtgctcctgggaggctttccttaaagcctggagtggctgtcctcagtctttccctcagcagccaggaatcttaatttgcctatgaaatactaatactacctaatactatgaagtggacggtttggggtgtttaagataggatctcactatgtaaaccctgctggaacttgaactcctagagatccacctgcctctgcctcctgagttaagtgggctgtttttaagatagacaaaaattaggaccaatcccagttcccagtttctgtactggccagtggtgcttctctctcttccctcataggcctttggttgatgttttaggtagaagatcatgatggagaaggtgatgtggctggagatgacgatgaggacgactcccctgatgctgagagtccagatgactcggacagtgactctgagtctgagaaggaggagtctgcagaagagcttcatgctgctgagcatcctgacgacacagaagacccgaagagcaaaaaagatgcgaagagcaattataagatgatgtttgtcaagtccagtggctcctaactaccaaacacttagtctttgtattaaaagtaagccttattgttataatgcacagtggaggactgcttatagagcacagacctttgtattataatttttaaaaaggcccttttaaataactacaaagagtgtttgctttcaaatgccatgggttacatttctccaggcatgactataaccatttttgtaaagagtccgagttgtataaaatgagaaataaatgctgtactcagcttcccttcatgttagcatcatctgccctctcccccgtttgcctctgcaggtgcattatgggggatacttgccttgtttgtggcagctccttcatcttcatcttttggtttgttcctattttgctcttacataattcatctgatactgtgacgtgttcccttggttatactttgttaaagtagacctgtccgtcatggagttggctgccaccagccctgctgcagaccatcactgacagtccatgcttgtttagtctttgctcgtg

SEQ ID NO: 32930 - DNA, 1174 bp, Mus musculus
cacagctgatgaccccagccctgacctcttgttccacacctttctttgctcttgctctcttccctgaatcagaaactacaggcaagctaggcctcatggatctgcccccaggaccaggctattagttgtggggcagtcggaccaggccacacagtcttgccaggcagggcaaatggtggtgtgggtgggcagatcactctaacacactgcttgattcctgtgtgctctgtctagtgcagcagctggccctcctcccgcctaaagcccccctgtcctccaggacggtgccaccttacccccccttaagcaacggactgcactacacctttgtctaacaccttccaagtaagagcccccgcctagctggcctgctgctgtgcgccctgtagtctcagcatgcccctcctgccttcccactgccactgagttgactgcaatgccgcctgctgttgcttccttccattggcactgcggccgctggagggtggggtggagaacctgccagagatggtagacagaagttcacctttaaggaactcaggtctcagggctcaaaagaggtcgacatcaaaggtgctactgtgctgaaataccttgggggagtttccagccctttatctctattagatgatgtcggcttttggagggttcatgctgcagaactgtacagttgaggtacaagaaaagaactgaagaaaaaaaaaaacccacaacttctcatattttaagcccatttaggattttgtgctgggctgccctcacagctagctgccctgggccgtgggcatatcttctagggtactagctgcacttaccgaaggcagcttgatgccccccaaaacagcacaggccacgttgtcagtgtccagggaaagaagagttagatctcattctttcagggttttatcatagagaccggcttacagcccagagttacagagacaggcagaccctgagggactgggctcagccctccacacagcaaggctgccttagggaagagacagaggcaggtccaggagcacaacccatcaggatgcttggtacgaccccatgaagtgaatggctgacaaggacaggcaagtatggcggatttctgagtttgagaccagcctggtctacagagtgagttccaagacagccagggctatatagagaaaccctgtcttgaaaa

SEQ ID NO: 32931 - DNA, 2106 bp, Mus musculus
gttatccttggctaagtagtgaacttaaggccagcctaggctgcgaccctgcactagaagcaggaagaagcagggcctctcgctccatctcctctgtgtctcgcctcctcctcagagacccaagagtgccttggagcgtctgtactcgggggaccaccagcggggcaagatgagtgcggaggaacagctggagcggatgaagcggcaccagaaggctctggtccgagagcgcaagaggaccctgagccaaggagaaaagacgggtctgctctcagcccgatacctcagccagccactgccaggagatctcggctcagtatgttaggcggggctgggacagaggccagaacttccccgagtcccccaagcagacgcaagtcccctgccagggtgacttacttggttgaccgtcccaaggggctgcttgtccacaactccagccgcacgtgtgagctggccagaggatgaccgggaaacaaagcagtagggaggtctagcagcagaggcctcatcctttctccacgctgagtgggaggaggctctgggctcaacgaaggacttgagaatgtaggattccagtagagcagatgggaaggaacggtatgatatgcaactcaaccacacagcctcccaagcagatcccgcagccaggggaggcaactcaataaggtgctggtggtctcccacagcccgcggggctgaggcctcaggtactcaggagggctggggaaattggtgctgcccctggtggctggcgctgcacctgcccacggttgccttaggctcattgtggggacattgcatttggctttggggtttggagcccccagttccccagccctctagcctgactgctccctccctaattcattgcacaagctcctacgcttctagtgtctgcgctcattgcctctaatcctgcctgattgtctctacagacgctctgaattggtactggcccctctctaaccagccagtgctgtctctgaccaggcttgtactagcagctcttggctccctagactagcaggcatccctaggtgttgcttaccttcccactgccctgctttgtgtaggccagctgactgataattcacccatccaaaaagctgctctgtgaggaccacggtcattagcagtggtctgggcattggggatttaccgattccatccatgccttaccctggacagtaaatatcagctttagagagtgcgtagtctgaagccatttggtggtaactcctcctatcccatcatgcaattccttattgcttttgtaattcttatctagtaacttgaatagatagcaaaataaactgtattcagagggcctctctgcagctgttagtcaccaaatgactagaatagtgtctttaaaagctataaacccattaacttttaagtattataagtaaacatcagaaccctgactttctacaacctgctgtctgggatacagagagtatttccgatccacaactccaatcctttgtgctttttctttgggggaaaaaaaggcttgtgtaagtctcgtcagcgccaataaacatattgcttcccattacggattggcgtggttcttccgcagggtagtttgcagagtgcggtgaacttttgctgtttgtggaagcaatcaggctgggtttaaatgaggacttgtctctttttgagcacttgtgagcgtgtaaggaattgtgtgttttctttgtgaaccattaaatttatccctggacttcagttgcctaagtcatccaaactgtaattggaaaaccatcagcacacacaattctgttggtttgctacggaggacccgagcttgtgcatgaatgtgtggagcgtgctgacatggcgacaggatcgggtcggggtggttgtgaggtatctttggctgctggggtactgtgagatgaatggagtgagagagaggaggtgacctgaggcattaagtatcgtctcatcctcacaagagagtcctttgttcttttaaggtcagaggtctgaagtgaacaggaagccatcttggaactgcgcacacgtgcctgggtagatttttccctcctgggaagagacattgatacaaagttgccactgtgaaacagccttgga

SEQ ID NO: 32932 - DNA, 1191 bp, Mus musculus
agccaaagagacatctatactgtgcagtggagttggagggttgtgggaagctcagccccttggccactctcagccttccccaggagcctctaagggaaggtctcctccttcccaacatgagacatgtctaaacaagctctggttgtttactcctcctgactcgttctttaatacattatcagtcacttgatgcttatgtgccctgtgcactatacagctatcctgatacccagtgactaacacccaactccagttcacagtagagtaacaggtttaacacaaatgactctaaaacaatttgtattacatttatttattacacatgggggttgctgcacagcatgtatgtggaggtcagtggtgcttgcagaagtcacttctcttattgtgtgggctctagggattgagctcagatcatcatgtttggtggcaagtgtccttacccagtgagccatcttgccagccacttaggctattctaagcagaatttagagcttaagtcagtgagtgcttgagtggcagaggagcaagttcaaaactgcctttggctttgatagctaaaagaagactgaaaacagtctcttctaactacagacttattcctctgctcgtccccctacctctcagctccctctgccctgtgctctcaacctctcttctgccagtcttagcatcttcctgagtgttgaactctttcaaattgatagattagaaagtgttaccataaggttagatgttagtaacttttgttagctgtgtgttaagcacactgtatcctagtcccctactctctgggagttagattactatatacatgtaaatcagaaatgtcaaactcatcaaaggtgacttcctaggacaattcaactataagggacatttgaatccagatattggccctgttcagaggacttgcaataaattaaaaaagaaaaaaaagatttatttatttttgttttatgtttgggtagcacgtgtgtgccattaatgcccttagaggcctgaaggggatgttggtccccctgggattagagttaatttacagctggttgtgagccaccatgcagttgcaaggaagccatgtcctctggaagagcagccagtgctcttaactgctgtgcaatctctccagcccttaggactcgctttttttcttttttcttttttaagcttagttgagctaaataagat

SEQ ID NO: 32933 - DNA, 1216 bp, Mus musculus
cttcagcgacctgacttggagagtgcctttatgttgaggaacagatgtaagtggcgggaagcacacagaaagtactccctgggacttgggtgctgtggacgcagttctccatggttctcggggtgctgtggcatagtactccctggaaagactgatgcataccatgctgcagctgtgagggccaggggccctgtggccctagcagagctgagtcattccttctcttcccacctggccaaggttcaggataaccagctcctgccagatcttggacaccccgcttaggatcctggaatcacccgggttgttgttgtttgttgtctttgctggaggaaaaacagaagtgtgcttgggaaaacctgatggtagcttggctggactgtggggctggctgaggcttgccccagtagactgctgttcagaggctcactggagaaattaggctttaatgagaatgctctttcctaaactttaactggccaagccactggagcctgtgcagttaataatgtactcagagtgttgctgagctgaaatttaacagccggtttaaaaacacaaggtaggggatttaacaaatagggcatagagaacacgtgtgtcctggagtgatttccacccctgtgactttgtgctgactgggagtattggtgcctcctctctggaaggtcgttatcctgtctccttgtctctgaggagtaacagcgtacagcccatgtgcagataagccggggggctgtgtcacaactcagtgaagccgagattgaggcagctcctcccagagtgagacagtccagggaaggaggctttggtggagaagggagtgagcattcaccatgtccctgctgcggcagacacaggcagcagtacagtcttgggaccagagcggaggatgccccgagcagggtgtggctggccgcgtgagtaagcagggagagaagttactgctcagatatctgagatgacaaagtccttctgaggagtttgctttagaaaacagaaaagatttttaaaaaactgagtggaaaatttaggggacctgaaacaaaggctccctgcgttctgagctatgtgtgttggtgcaggaggtgcgccagtgggaaagcctggagttcagtcaggtcggcttcagcttagtccctaggtctcacttcatacatggtcactgactccagatgtctttacgccttgctcaaacttcctggaaccctgattg

SEQ ID NO: 32934 - DNA, 1195 bp, Mus musculus
gaaaagagacacacataagatgactgcctaactctagacgcagacaaggtgacagggttagtctccggctctgttagaggaaacccacatggctgggagtcacgtggaatgtgaatcttgacctcatattcagactcatttgtctttgtttattaagaagtaacagttctgagggcagtgggtagagagcttgtcttggatgcagcaagccctgagttctagcccctgcattgctggcctgatatagttctcagctgcatagtgaggctgactggggtctgtgtttgaatcggaaaggctgtgtgacagggaggccacttgaccccatgccgctgtgtttgcactccgctctacaattggcaaagagtaaattcttaaataattaacagaaagaaacgccctgggggaacacctatttctaattctgcaggagtgatcaccgacgtatccttcctgtctttttctcagggagaaatgtgactttcataaacttggacagtgtcacacataggctttacttatttacctgcttatctttttccttttgagtgactatctcactttgtaacccaggttggggctgaccttgaactcaaggcaggactgcctcagcctctccggtgctggggttgtagcatgtcaagttgtacgtgtagttttgttttgtgttttctctctgtgtgttaatgcactgtgtgcaatgcctggtacccatagaggccagatcccctggaactcacggttgtgagctgtcacgtgggtgctgggaactgaacctgggtcctcgaaagagcagtgagtgctcctaatcaattgtattttctccgtatgtcctgaatctctcatatgcaacctgacttcctgggctatggagtggggcatttttctaaataatcttcagtccttgaacatgcaaatatgtttgtagtttcatgggtgccggtgttgctgacatgcttgtctttgtgagtatctttgaattgcttagacgttgctttctctggaccgggatatcagcattcgataaaacgttctctattgagtttttcatccttaatgtgatggaattgggaggcggaggttattatcctcatggcaaggcttggaagctgaagtgtataggaatggcatttgtgtaagacagggtagaattgctttaatcccaaggaggaggagcagcagggcatttagattc

SEQ ID NO: 32935 - DNA, 1101 bp, Mus musculus
ttaaaaaggttcctcctgcttccacagcggagcaagggctgtctgggattgagtcacatctaactgaattgattctaagctgctctgactttgtacaaatgggaaataactcgtttctggtagcttggcttctgagtctgggaataactgctcatcggaggaaaatatcctctttaggatataaaaagttcgctagaaatatgcagaaaaaatcatgtgaaatgggctcagctgatctgaagtaatttgaggtttaaaagcaataacatgcagttttaaagataggtacaaataaatgttgggctgcttttaagttaatactaaatataaaggtagaagtcacattgtttcctctggtcagatgtattctggcaagctcacagtgatgatggtgttccaacattcgcagtttccaccagaaggactttccatgttgggttgaccttccttggatgtctgagtgagctggaaatttggagtttggctgttagggttttatcgcatgtgtgtgtgcttgagtgtgtttctcttttcaggtgtaatcctgagggactcacacggggtggcccaggtccgttttgtgactggaaataaaatcttgagaatcctcaagtccaaaggccttgcccctgacctccccgaggatctctaccatttgattaagaaagctgttgctgtccgaaagcaccttgagaggaacagaaaggtaaggcggacaacaaaccaggtgttgtgtcgagacacttgcgctgcggatcttcagaggggagaacgcacttgagtcctctcaggtggttctgggtgctggctaatagtcaacatgatagtttcctagaaataggtggtttgatttttagctcccctaaactattacatccagttggtcccaggtgctggggcttttgtgtaggtttgtggctatgggccttattctaggagtttaaattgcctctgtggatttggtgatgcatgcccttaattgttggagtttgagaccagcctggtctaacacattgtaagacaaccaacttattctgtataataataagataccctgcctccttaaaaaaattgccctaagaacttaacctaaccatagaa

SEQ ID NO: 32936 - DNA, 1856 bp, Mus musculus
taaacaaatggaaattgttcagccttattccctattttgtttggtaacgtgctcaggcaggataaggagtttaatttagacatttatggaaggtgttgtgtaaactgtcctgtatttggaaacattgtacattcacatgaaagaattattttctgtaatatactgaaatgaaaattgcaagagagaagtgtgaagttactgtggagtagccattaagaataagattcatttttaaagccaggcatggtagcacacgcctttaatcccggcacttgggaggcagaggcaggcggatttctgagttcgaggccagcctggtctacagagtgagttccaggacagccaaggctacacagagaaaccctgtctcaaaaaataaaaaaagattcatttttattccccatttcagacataattttgtttagttttgataaacatgtatatataataaatttcttggttagaagttcaaatatttttagaaaggtaatagagatgtagcaaatttggtagttaagagaaaactgacaaactacttaatgaagggtaccaagaaaggacaatcggattcagttcgctagaataaaatttttatgaactgtacaaagtgattgacagaaatgatgatgcttacagagttaaattaagagttaagagtgttatcattggaatacattttttaaaaaaaatcaaaacttgaaatatttggtgcctaacactatggtccatttgtagggaaacctgtatgagtatgtgaattttttatattaaactgtgttgtctacttgataattgaaatgaagatctaagcaccgttgtttgctttttccacaattaacatttccttaaatagttttgcagatgtaagtagcactagaatattttttttcttttgagagaaacctaattccattccatgggtcacccagacttaaaaaaatgctgtttgtaaaaggtcgtcattgactggactcgtggacctttttgtgatctgttaccgtgtatcttagcagaaacagaattaaaaatgtaatgtcacttcagtgacaagaaatctgattaatatctaaaagtatatattataagtaatactgtatagttaacaagaattcaaaaggtgatactgtctcttaattttactcaatttgtgccttctttggtcattagaatacatatattttaatgtaagttatttctttgtaaaatgctaatcttcagcccataccaaaaaaacagtgatagggaggaagaacgtagcctctgtgcactgcggctgcagtcaccatagtcagctggcttctagagcttcttaacagtcaccttaaaatacatcggaaaacgagaacgctagacaggccaagacactaatgtttatgtatatcatatttataactaccttcaagtaaaaataagtctgctacatacaagtcctgtgccagaattctttgttcttgccagtgctctaggatctgaagatgatcgctcatcccaagaacctgttttctctgaggaatccaatgagactggcaccaatgctttatattactgtgtttatgggaatgagttgttaaagcatgtgtatcttttttaagtacttttttttcaaattaaagttgtatataaagttcaaaatcttgccttaaattgtttaattctttctaagactcatgaattgtaacatttaaaaaaattcacttttgataactcagatttaaacaaacactgaagacctgctattatgatacacatttacttacacgctgttcaccagcaatgcaaacatacatgtgattactagtgtcgcctgtaagaagaaaatgctttaattatatcagcatagtgagttaagatgtata

SEQ ID NO: 32937 - DNA, 1200 bp, Mus musculus
atttgctatgtagccttgaactctgtagctgaaagtggtgttgttaagtcatgaaaaataagtgtttactgagccccatctacaagtagagttttcagtactggaaatccagtaacaaatgagaacaatgcctttctagagcgtttgtttaaatggctattcctgcctgtttctttttgtctgtctcgctatactgctcaggctgctctcatcttcagagactgagtgatcctttcactgcagccttttaagtagtagggttacaggtgcgttccaaaatgcccagctgaaaacatggcaaacaaattgtgttgctttttttaaacttgtattttcctttgttcattggagttccatataggaggacccacatagtaggagagaaccaactcccacaggttgtctgtcctttatcctccatacacaccctttcatggacttagatacactctaaataaatgaaatgaaaaaaaaatgtttttttcatttgacacagggtagccccagctgtccaaaaactctctctatagaccaggctggcctcaaactcagagatccacatgcctctgcctcccaaggtctgggattaaaggcgggggcaaccactgccctgtataactttaagttatagatataggtgggcatggcatgcagccctttggtcctagtacttggaaggtggagacagaggaatgcaaagtctccaagaccaaccaccaccctacctattcacacccagaaaaagctgtggataggagtagaatgattagcatgtaaacctagaagtaagttagagtagaagaatgccgttttattgagtccaaggttcttagaagattgtcttattgtgtcagtatgaacagcagtttggaactaagttattggtgtttagtgaaaagaatgcagcaatacctgtgaagattggctgaattcctgggtctgtatattgttaaataaagcttagctgaatattactgtggtgtagcaaaggaaagtagcatcagcatctccactactgctaaggaagagaccaaagaaactgagcaaacctcaacaaaagacagggatgtgatagaagtgacaccaagggaagagaatgttggtacttcgtgagttttaactagaaatggataagcacatagtctgttatcatttgcctgccctcttagcacaatacctgaaacagcttatattctatgg

SEQ ID NO: 32938 - DNA, 1704 bp, Mus musculus
gaagtacgccagaggcggcagctcaggtggtgcagtgggtcagctttgctgacagtgacatcgttcctccagctagtacctgggtgttccccaccttgggcattatgcaccacaacaaacaggccactgaaaatgcgaaagaggaggtgaagcgaatcctggggctgctggacactcacttgaagactcgaacttttctagtgggcgagcgagtgacactggctgatattacagttgtctgtaccctgttgtggctctataaacaggtcttagagccttcttttcgccaggccttccccaataccaaccggtggttccttacctgcattaaccagccccagttcagggctatcttgggggaggtgaagctgtgtgagaagatggctcagtttgatgctaagaagtttgcagagagccagtctaaaaaagataccccaaggaaagaaaagggttcatgagaggagaaacagaaaccccaggctgagcggaaggaggaaaaaaatgcagctgccccagctcctgaggaagagatggatgagtgtgagcaggcattggctgctgagcccaaggccaaggaccctttcgctcacctgcccaagagtacctttgtgttggatgagtttaagcgtaagtactccaatgaggacaccctctctgtggcactgccatatttttgggagcactttgataaagatggctggtccctgtggtatgccgagtaccgcttccctgaagagctgacccagaccttcatgagttgcaacctcatcactgggatgtttcagcgattggacaaactgaggaagaatgcctttgctagtgttatcctctttggaaccaacaacagcagctccatttctggtgtttgggtcttccgaggccaagagcttgcctttccgctgagtccagattggcaggtggactatgagtcgtatacatggcggaaactggatcctgggagcgaagaaacccagaccctggttcgagagtacttttcctgggaggggaccttccagcatgtgggcaaagccgtcaatcaaggcaagatcttcaagtgaacaagtcttgccagtcgcctagctgcctgcacctacccttcaagggagatgggggtcattaaaggaaactgaacattgaaaaaaaaaaaaaaaaaaaaaaagaatggtgaacttgaagtatggaacacagggtgttccagtcttcaatttataaaattcaacactctggaaaggcttcctaggagtatctttcagatatgcattgtggacaaatcaatctacattctcaaagtagccatgaggatgaggttaagagagggtgtgcgaaccaacagttttcaaatacagggaacaattattatcatcaatagatcacaactctaagctcagacttattctctagtccttgcttttccccttctagggagcatgataatatctatgacaaagagtactctggaaattatgtccctccattaattattcttacaggatgaattccatagcactaactctgttacagcactttaggcagcctgccagctcaacactatgttaatcgctatttcatttctaggcattcggcttaggcggaatcagcttaggcccagagatttcctgatacttcctgataaggtaggtttcaggtagcacagtccttccaggctgctgttaaacaaaaatgtggggagaggaggttgaacag

SEQ ID NO: 32939 - DNA, 1358 bp, Mus musculus
aatcctaatctattctggagtgcctgctactgctggactctggcctttgtttctggaaaggtgacagtttgcaggaggaaggtgtgactttcctttctgctgggacttccagcttgccctggggccaccctgcttatctgtgtcacttcaaaccacagttggagtttgtgtgagtcaacttccctttactgtggtgaaatgccccacggtaggcagggagattgactgaggctcaacgtttggaacggtttctatacctggttttccgccactgagcctgtaatgaggcaggagagtgtggtaaagggagccacccacctcatgacagcctgaaagcagaaagagggttggctgctggtcacctagctcattcctgtgaggtcccaccttctacagactccatccccttcagctgagccgtttgggaccacatcttcaagggatcatcagcttttgtgggctatctgacaagattggagttaactctcacaataacatgctaacaattgcggttccctgtgagaagtcagtgtgtgccaggctaagcagaatatcagggattagcacgttcagtcatttacagcagccttatcaagtggctgcggtgccacctcctacctaccttattccctgatctttatttctctgaagagactgaggcctggggagaataaggaattccgccaggcagtggtggcacacgcctttaatcccagcacttggaaggcagaggcagggggatttctgagttcaaggccagcctggtctaaagagagagttccaggacagccaggggtacacagagaaaccctgtctcgggggggggggggggaagaaaagaaaagaaaaaaaaagaaaaaatctagaattcccctgagctatacaacaagcaacaatggaacatgactcaggcaacatgacctgggagcctgtatgtcaaaattctgggctccatagaaaggggtatatgtgtgtatggaggtgcacatgtgtttgtgctgggatgtaggtggaggccaatgttgggtatattccactctcattgaatctagagttctctgattcaggactctggctggccagtaagaccttgggctctacctctaaccctctcccaggcactgggattatatatgtaccctgacacgctcagattttgtgtgccagggtcctctttaccaacatctctggtagatgattttagcagagcaatttctctaagccattatgcaaaatccctctactagcctggccccatctgcccattgtgttgatggaactactgagacccagcaacaagcaggatcaagctggggtgtcaatcagagcatgacttactgttgctaaaagcaaaatgt

SEQ ID NO: 32940 - DNA, 1202 bp, Mus musculus
aatgtatgcacgtgtaagcttttgccttgattgaggtcaagctgtcgagaaatggttctctttacagtggatccagtcaggattggcagcaagcacctttgcctgctgagcctacatgttgtatagaatggcaacgttgtgtagaatggcagtacattaaatgggtttttcatttacgaagtgtgctggctggttttgtgtcaacttgacacaagctggagttcagttgaggaaatgcctccatgagattcagcagttttctcagtgatggggggatgggggctagccccttgtgggtggtgccatctctgggctggtaattctgggttctgtaagcaagctgaacaagccaggggaagcaagccagtaacattcctccatggcctctgcatcagctcctgcttcctgacctgcttgagttccagccctgacttccttggggatgaacagcagtgtggaagtgttaactgaataaaccctttcctccccaacttgcttcgtggtcatgttttgtgtaggaatagaaactctgacttaagacataatggttttgagattatggttttatttatgactatggtgagccctactgaagaagcctcagcattcagatctatcgtatcctgccagttgcttgaagcatgaatttgagtgtcccttctaaataggttttcatttctgtgaaatgggtacaaagaggctatgttctagtactgtggtcaggcttgggataaactgtaaaatgaaagtggtgcttggcataacactattttacttgtttttaatcctgagagggagtctgaatgcttctgggaagaagatgtggagtccggactgacctgtcctgactatagtatgtctgcagtcctaataacagcccctggggggttcttcactcttctcagcttttgtactcagagtgatgggggctagtgaggctgccatgtgggaaatctaataaccaggggtattgggaaaattgagatccttttctgtagatgatgaatgagggcaaagagaagcagtaagtatttggggcctgaagcagagagatgaggggaagggaagttataatggaagtcttgagtcagctgacaggaatcatgagtcagcagaaacctgagtgaccaggagttgtgagtcagcagaaagtatagatagcaaagatgatgagtcaccatcattcttggtgaatcagggct

SEQ ID NO: 32941 - DNA, 1160 bp, Mus musculus
tttggccacatggctttggctttagactccaggatagaagggactactgggacaattgatgctgattagctggagctaggaaattagcagtgattaggaagagaccagtataacggaggtgaaatattaattaaaaatggaagtgttttcagagagcacaatgaagctgtgttccagagatagctaaggttgataggtcctgcagttgtacttggtaatgtgtaagagtcacccaggtggtacaggttttgaaggcataaaggggtcatggagagcagctgaggtctggcacagtgagaggccatagaaggccattggtgaaggtgcagcctcagttgtagttgacagcccaagactgaaggggtcatgcaaacgatttgaggcttggccctatgaagagaaggcactgtgaggctattgattcagcctactttcagtgggaagaccccagtgtattggagatgatcgtactatgggatgattaccaagaagcagtagcagtggagttgatcaacctgagcttagagtgctacagagggcagagctggagaagtgatgccaaccctttggagtcaagaagatcatgtgtggatctcagacattgaaacattgaagctgccttggagaccccaagattttcgagattcgagagccataggatatctcctgaggaataccataacggagtggaaccagctcaggaaaagaagtttgttgcagtcaacaaagatgaaaagagaagttggagattgcaggtcggtggtggcgcacgcctttaatcccagcacttgggagacagaggcaggcagatttctgagtttgaggccagcctggtctacagagtgagttctagttccaggactgccagggctacacagagaaaacaaacaaaaaaagttggagatctgaaagctgctttgacatcagacatggagatgcagagtttggagtttgcctggctggtttcctgttttgatttggggattacagttaagtgattggatggatctcagaagagactttgaacttgtgtttttaacattgttgagactgctatagactatggggacttcagaagttggactaaatgtactcttcattatgctatggctagataatagcccacttagacaagcctatgggggccagggagtggaatg

SEQ ID NO: 32942 - DNA, 1165 bp, Mus musculus
gagggctagactctgaagaacagtgctgaacagtcgggaaattgtagtgaatttttcctggttcttgggaatgttgcttagacctaggaaaagctaatgggggtaggacagcatgattgggtgttgatgcaaaccccggcttttctttccacagccaccatggtgcgaatgaatgttctggcggatgctctcaagagcatcaacaacgctgagaagagaggcaaacgccaggtcctcatcaggccatgttctaaagtcatcgttcggttcttaaccgtgatgatgaagcacggtgagtattggtgtcttgggtttttgacagtgctggatctgggagggaaagacagtaaccgttcaagaaaagaatgggtgtgttgatgctaactcccaaaaatttttatgtgatacggagctttcagaattctgatgcagagactcagatgagagaaaaatctaataggcaaaaagttagtgttggcgtaaaggtttaggtctcaaattgatgtctggtttgacgctggtcacttgttttataggatacattggtgaatttgagatcattgatgatcacagagctgggaagattgttgtgaacctcacaggaaggttgaacaaggtaagacatcttgcttctcaaattgcagctgtctgccacttcacagtgttgtcattcttgctctacttccctgatttaaggaattggctaaggctatgcttctgttttagtacccacatttcacttggtgtctttggttacttgttcaaattattggttagttttgtgtgggatagagctaaactctggtaacgctggagtgggaaactgctgatttcagtagcttaaactatggctcagtgtatgaataactcagtcttgtactggtggtgtgtgtggcctgtttattttcaagatggaagtctcaacacatagagaggttgatctatactctgtcaaactgctgtattaaagttacacgatgcacttgtccagtggtgtgctggcttttaataaaattgttaatcttgagtaagtggctaagagttcatggtctgttggtgtaggttgtagctgtctgagttctaggctgctcgtcagttttaattgtcatcagcatagccaaatagactttctgactccatggtttaatagcagtttggggcattg

SEQ ID NO: 32943 - DNA, 2063 bp, Mus musculus
aaaaagactggtctctgttttcctggagttcattaaagccaggtaggtcgtgagcaaagaggagtgagatagaaggcactgtagtgtgagcgtgagtgcaccttcaggaggcaccttggctgcagttttgggctgaatcctgttggatggcttttgtgtcacttctccacagtccacccacattcaactgtagtcatcttcagagagttaaatattgtctcctcaacttcatttttttttttttcatttctagtgacatttgtgctgttgcttcctggactaaaccaacatgggatcattctgaagtacattggaatggccaaaagggagataaacaaacttctcaagcaaaaagaaaagaaaaatgagtagtgtggctgccgcggagtgtgccctggccctgggcactgaagtgttacagtggctcgttgcttccctcactctgcccttgttaatagaaattctcacaggccaggctctgtgcgggctctagtgccaggtgtagctgggtacattccccgtcagtgtgacttcctttcattttgacaacttccttcctttaagatgctaagtggtgaactttactgttttgtacagtgaactgtgactttgttgatgtttgctttagctatattcaaggcagtggtctgtggctacaggaagctggttctactgtctgcttaacaaactgtctttgtgagtacagagattgggtttaccacttctgctgaggagaccacttaaaattcattcctgagtttccactgtgggagaatacccatggaataagataaaaaattaattccacaccctagtgtgtgtaagttcctcgctcataggaaatgcaacagtttgagggagcattgcccctttgttcctgtgaggactggcaggctttgactgacctctcattccctttgcactgcttcaggttagttctagtccataatggcctttgagcagcaagctttcagaagattatatttgaggattgtagcagtttctttgtttcagattgtcagctgacttaaaatgtttgtgactttcctgtaagggcagccagggataaaagtatcctttgttcaatgagtagaaaactagattatctattaatatttaagaccaggaaaaaaaaaaaagaggcttaagagtaagcctggaaaatctcacttgttttcgtagtattggctgtatttcagtgcctccagctttgcacttgagagacaagtgtttactgctgtttgactttccccttgacatttctcagaaaaatgcagggctgcagctgagagcagactgctgattggtgactctggtctgcctagcttttgcaactctttaagcttactgtgatcacgtgccctctcagtagggggcttttagagcagttgaaatctgcagaactgaacctctgagggccaaaataggacatttgggaacaactccttaacccatgaactagctgtaacatagtttgtggatccatgcactgatgctgtgaagcctgcccctgtgtgtatctgttctctcacctccctagcactgtaagcagcggtgcctcttgtagcatgtgtgtttgttttttaatgtttcatgactcccactttgattttacatgttttcttgtaaataagcctgccttcctacctggaatttgtgtgtgtgtgactaatacatgttctacgagttaactactttggcagttttaatcatttcttctttgttttgtggtaaaggggaaaaattaaaaaccagttggaacccttttgtctcactttctttgttaactctgagtttatgaatctaactagtgaccacctgttgtcattggagctcttctctaaggtacccatgtcagatggaaagggagaacactgaagaggaggagacagtggagactcaaaagatcgtgtacttaagctcccaaagcaggtggttgataatcatcagtagttgataatcatttgtctgccttttaaaatttgggtgtcataacttgcggtctcattgggaacaggctccatccacccttaagcatacttccctttctgcaagttcaagta

SEQ ID NO: 32944 - DNA, 2895 bp, Mus musculus
gctgtagtttctttcatagaaagtagctgatctgatgtaatcttttaccttttaaacaaccaggatagagaacctattggagtttgcattgttgatgacaggttcacaataaagtgacgttctggtggaggtagagtgaaatgttttttaattcagttttctcatttgatacttttaatttacaaagtaattttgttttatgttttaaagtgtaaattaaaaatgctttagtttacctggcatttgggtatgctcagtaatgcctgccagcagcacctttaatttcagctggtggcctgtgatgggttctgtttaccttttgcaacattttatagcttgtttagtgactagtgtgtagtgagtcacgatcaaggcatccttcagcttagcattttcagtactcactgctgatccttggtagaagtgcagactagaatagagctaaaaatcacgtatcaacacagaatagcacatggtattttgagtctttttatccccccccccccccctgcattttagcaactagtgtggcggccacttaatttgccagcctctccaagcctgaaaaggtccaggtgtctaagctcttctctgactgcaacgagttgaattctaatcctcacaggatggatgccagtgtcggcactttcttaattatgagtattgaaaggtgctgttttcagtctccacatgtctgctgacaagttaaagaatctagcatatcgcatttggttttacttgttgattttgagccttattgtcacaaaacagcctagctggaatattgatgccatactatattttgcatgctattttcttccctagaggcattgagggcaattgcactttggctctctcaagatgtgtcattttcagacattcttcatgtcagaagagcttttgttgtaaggagaaaaccagctcagacttttgtccctgtaggtgatggtagtggtcagaaatggcttttgctttggtaataagtgaattttattccccaagagtctcaggcatcagaagtacttggcatcttaatccaagcaaaaataagacagcttaaaaaacaaccaaaaaaaatgtgcctctggtgaattatccatcctttttttaaaatgttaaactggtctttgagaaaagaatagtgcagataagagcagccaaggacttcaaagcttgttgatcactgcactctggataaaacccttggcttcctgttcaaatagcctttccaggtttaacttctttaaggagcctcaagtgaaaaaaacaaaaacaaaacaaaaaacccagggccactgggggaatgttttatgaaatcatgtagagtgctgtagttttgaagtcatccgttttttgatgacaaagtacctgtggaaaaccagggatatttttttttcctcaacttcttctctttactccctacccctctcctccctaattctgtcttccttctctccactcttttaagattcagagggtacagaacaacctctattatttcagagtacccttgagaattgaaatgtatttcgattagttgtctttaattagctagctagagtcagttgatatctctaccaagctgaagcctagtacctacgaagctatttctttaccaaagtctcttgcttctgcttatggtcgtgagctgatcacgcagtttgctagatgatttgacactggtggtgagttcttttgaggcgtgagatttctatgtgaaactgataggtcttgatctgctttcttagatcactgattcagagctcaaagcccaggttcagggtaagaatttgtaatacagaagaagaaagactcccttcactttgcccttaacacttgcctctgttatctaagcttcgttaatagatttcttaatatcatccaatgtttggtgttatctgcattgtttttttttttaaattgtggttgttctgatgtgtgaaatttaaggaaagagccatttaataaatgccaagcagggcaatgcagccaaatattagagttgatgtgcagtcttaggtcctttttaatctggggtattacaggcagtactttaaatcagagtcttcctggcctttttccctccacctttttgtagttactcgggggcttacttgtgcagtactaaaatcaaaggagctggttcttcttttctcccaatcttttcttagtaatgaacacacctacaactagcctgccactcccaatcacacacagcagatgtcagtgctgtgctaatattagctgcatttcctgcagggcagggatgcgaccttgcacatgctaggcaagctctctaccctgagctacgtacatcctagcccttagaactaccaccctgaagcatctttgtttcctgtgttcagacgcagacgaagaccaacattgttttatatgttgaatttataaaatgctagtaatttagaaccctccccccaaatcaaggaggcaaaaaataacgcactagtcactgaagttcatcctcagttacctcgatagggtaggtagattcctaatagtgctggtgagcatcacaatgctgtgcaaagattcaagaggaggcagtcactgtactttgcctgcttttgggcctagataacgtcactgtctacaaaaagctaactgcttaggtttgaaaaggcaaccatgtagagaaaacttgacaattggggctcattgggaagttctagtgctaatgttaaaaactcaaatcagctggctatttgaagatggcaaagaatatagttctgaaattttatttttccacaacagggtgattggcagtggttgttctccctttttctgacagtgtggttcagctcctgtttcagattctgtgtcatttttcaatttacaagtcacttaagtttctacctggaatgtcaggtggcaatg

SEQ ID NO: 32945 - DNA, 1263 bp, Mus musculus
tttaccagtgattgaaagccaccatgtggatattgataattgaaccagaacccctcttagaacaggaagtactcttaaactgctaagctgtgtctcccaatttttaaggaatatgtttttgtagtgggttgggcggctgggggagataatatgagggttggggtttgtgtgttccagaggtaaccttggatgccattcacctttggtgggtgtgggtgtgagtgtgagctcattctgtagaggttggcctcaaactcaagatccttctgcctcctgagttcttggattaaaggcatgaaccaccactgtggaatacggacttttaacataaaatcaagttcattttcaaagttgagtaatgtgcaataagtcctatcagccattccttgtatgtgtgctgccccccccccccacgtgcccccagtctacccccagcttctgtttgtatgcaaattgagccaccaatcttttactttagcggttaggagtaacactggccagaagactcagcctgatgtcatgtctcagaatgctaaaaagctgattcagaaaaatctggctacatcagcagatactccaccaagcaccatcccaggaactggcaagagcatcgcctgtagtcctaaaaaggctgtcagagaccctaagactgggaaaggtaatcagccagaatgtggatgccttgtaattctataatacacacaagttggtttgacttacatgtgccattgcttcatagctgtgcaagagagaaactcctatgcagtgagtgtgtggaagagagtgaaagccaagctagagggccgagatgttgatccaaacaggaggatgtcagttgctgagcaggtgactattttttaagcttaagctatgcattaatgctgctggtaggctcaaggatctcatttacccatttccttattttatcaagaaataatagctcttggcctagcagaatggttcagtggacaagggcgtatgcatatgcttcagagcctgacagcctaagttcagtctctggtttcacatggtagaatagaggttgccaactcattcacgttgtcctctcacttcatatgtgtgcctgtgcacactcacacactaagtttaatgataaaaagaaatcagcccctgaaacctacatccaggactcggaaggctattggcaacactgctctaaagttgtcagatgctcactacttgactcgtcactacttagtctttcctcttaggcaatctcctgcatagtcgtttaagctatat

SEQ ID NO: 32946 - DNA, 1139 bp, Mus musculus
attttctcattttgcagtgtgaatgttatttgtatacaggggtgtattaatataagcaagcacctgctttatttttataggtatgaaatgcagtatgctcctcagccacctccaacagtgtgtcagttcattactgctactgaaatgacccttcagcggtatgcagcagacataaacagcagacttattagacaagtggaacgtttgaaacaagaagctgtcactgtgccagtttgtgaagatcagttgaaagaaattgagcgttgcattaaagtttttcttcatgagaatggagaagaaggctctctgagtctagcaagtgtcattatttctgccctttgtactcttacaaggtgagctagtgcttcatactagatcatcttactgtcttcatatgttttattttaatcccagatttaaaacactattatacttggccagtgtttgtcactttgagatttgaagtcttctctagtctatatgcactcaatcaaatttgttttcattgtctacgtaggcgtaaccttatgatggaaggtgcagcttcaagtgctggagagcagctggttgatctgacatccagagatggagcctggtttctagaggagctgtgtagtatgagtggaaatgtcacctgcttggtgcagttactgaagcagtgccacctggtaccacaggacttggatattcccaacccagtggaagcatctgaggctgttcatttagccaatggagtatatacatctctgcaggtgaacacttttaagtttggttgggaatatagttcagttggtaaagtgcttggctagcatgcataaagccctaactaagtttgatcctgagagacgcaaagtcaagagtagtgtcacaagcctgtaatactggtatttgggcagtagagccaggaagatcagaattcaaggtcagcctcagctgtgagactcagtcttaaaacaacaaacagcccagcggcaaaacagattatcaggcaatgggggttcccactttttggccccaaattttttataggtcaaggttagatattaaacagtcttgcttaggttcttaattcaaagagcagtttgactgttgaatgttacttaagcaattatttaaaatgttgctatggctacatgtgt

SEQ ID NO: 32947 - DNA, 1145 bp, Mus musculus
aaaataaagcaggtgcttgcttatattaatacacccctgtatacaaataacattcacactgcaaaatgagaaaattgcattctactctcaaaaaagtctcaagaaagtcaaaaagtctcaagaacacaagctatttcataagatagcttattgagtgatacaatgacttaataacttcctggaacaatcctaccatgtgaacattttcatctactaattaggagaaacgatttatcttgcaagagaaaccctgaatgagctcacattaatatcctctttctccctctgcagtactgcaggaatggagtccataacgttgcaaacgtagatattccacatatctagcactggatcaaacgcaagccctgaggagtttgagtcaggaagaggctggcttcaaacttgcaataagcaccctcttatgcaccaagatatctggtgttgatagcacaattctgtaatctcagctacttggaaaggtaacataggacggactttcccaaaagcattaaaaaacaaatgaccccctgtatttgaaagtgattgtgggctgcaggtgccctggtcattgatactgcaaggagaggatttgaaaaacttttcccgtgtttggaggatccacactcatccttgccaaaccctggtgctttcccacattgtattaaaaaaaaaaaaaatgacaaaaaaaataaaaaaaaataaaaacccacccaaaaggtacttcactgaaatttcatctgttaaccatttttttcagaaaaataaaatacaaatgcaactgtgctggttcgttttgtctacttgacacaaacctcaacatatttgggaagaattttaactgagaaaatgcccccaccagattgcctgcctgtaaagatgtctggagagtattttcttgataaatgattaatgtgggaaagcacaggtggatgagttgtatgaaaaagcaggctgagaagcaagggaggaagactacttactacatagtttctgcatcaggttctgcctctaggcttcctgccttgagttcctcccctgtttccttcatgctggactatacatggtaagatataaaaaactacttcctccccaagttgctttggttatggtctttatcacagcaacagaaagaagctctaactagt

SEQ ID NO: 32948 - DNA, 1147 bp, Mus musculus
atccggtgccttttggaggaagattggcccataatgtttacctgcttccttctctttagtcctatgcgagatccaccgctgtcatgtccatggttggctacataattggtcttggagacagacatctggataatgtcctcatagatatgacaactggagaagtagttcacatagattacaatgtttgctttgaaaaaggtaagatgaaatgggcttcttcatttatttgaaggtcaggttatttggtgttaagggcaaaagtaaaatgatttgtctttttaaggtaaaagccttagagttcccgagaaagtgccttttcgaatgacacaaaacattgaaacagcactgggtgtaactggagtagaaggtgtttttaggctttcctgtgagcaggtatgcctttcctcttttgtcctgtagtgtaactgtataatgagcaaaatccatgggaggaagtcataaaacattttcatatggaaacttgtgttgagtttactgaaaacacttctaaaaataggttctccacatcatgcggcgaggccgagagactctgctgacactcttggaggcttttgtgtatgaccccctggtggactggacagctggtggtgaggctgggtttgcaggtgctgtctatggtggaggtggccagcaggctgagagcaagcagagtaagcgagagatggaacgtgagattacccgcagcctcttttcttccagagttgctgagattaaggtgaagcccaaagatgttatgtcactcactgtccgctttttaacatagcagatgtacctaagggttgatttatgttagggttttctgggtgtgaggactccttgtcatctctattagactgtcctcccacacagacacattcacattccttagagctattccaatgaacatatcaagtgtctaatgcaataattgaataaccttttcccctgttcagtagtcagagatctcaggcttattttctgtggcccgtgaatctgttcacttaatggcggtgtaaatgtgaatgtattgattatcaaaggtagagcaagaaaccactatcttagttgggattttagttaaagcagcacacccagatgttcctgtactcactgttcctgatcacaacctcccccaggtgaactggtt

SEQ ID NO: 32949 - DNA, 1152 bp, Mus musculus
cttagtgtgactaaggcatcttatttcggcattggagcaccagggccataggaaatggctgcagataagaaaacagaaaattggaatctcataataaaacaggatctcagtgaaggagtcagggctaaggtacaaaacttagatgataggagacttaataggaaaagagtgtaggctctcaatggggagagaggccagctggctggatgcagtggcttggagagagcaaggattgaagacatattgtagagtctattgccagtatattaacaggcacccgggtcactcactacagaaagaaggaggagacaaagggcaagcaagctcaactaactggttgtcatagctaggaccatgttttcctgtttgcctgtcattgcagctgtagtgttactgaggtcttgggaaccacatcaagataaaacggtgctttgcttgtaaatgccatttctctagatggctgcttcctccagtgcttgttctccctgtagtccccagtggttatacaagctggtaaggcctaacccagactgatggacattttaattacaggtcactaagcagcttcgagtctggagagtttgttgaatgcactgagcagttggaattattaccaggagaaaatattaatctacttgctggagggtcaaaagaaaaaataggtatttgggaatggttttaatttttttttcattacaagattattcattatcttttcctaggaaatgcgtaagtttctgtctgtttatttagagtcctagactatttgtaagtttctgtttatttatttggagacctagattatgcaaagaaatagaattagggttgtgctagtaatagtttataaagcaaatgaaaaatggctcagttagaactaaactagaaagatgtgatattgatactttgagatgaatgtagacatttagcttgacaaagtaccaagcagtgttttggctgcagttttcttcttgatgagcacactgcacactgctttgtgacgttgagacgtctgctgtgttttgagagtagctgcattgtgtaaggctctcaagtacttctggagagctacacaaatgcaccagggacattcttgatgtgtataactgaaaaggcagtttccctcttgacttaatgtgtcagttttgtttccac

SEQ ID NO: 32950 - DNA, 1193 bp, Mus musculus
agctgccagaggctggataagcgtgaccaatccacaattccccgcaatcttctaaagacagatgctgtcctttggcagtgggctatttgggaagctgcgcagtttactgttctttcaaagttgcgaaccccattgggcagagctcaggacacgttccagacaattgaaggtaaccaacaatttagcattcttcaaaatttgtgatgcaggtgactttctaggtttttaactttagaaaccttggctttcttatactgaaacagatttcagagttgggttttttttttaattgaataatttctagatctttttagataagctttgttagttgaattatttgcacatctgcttttattcaaaagcttaggggattatatggacaaacggtttcctcagaaagtgagagatttttaatttttgttttaaattgatgaatatataaataggatatctggtaaattgatttattaagagttgtctctgattcagaatgttgctgtttttgttttcaggcatcattagaagtcttgcagcccacacactaaaccctgaccaggatgttagtcagtggaccactgcagataatgatgaaggccatggaagcaatcagcttagacttgttcttctgcttcagtatctggagaacctggagaaattaatgtataatgcctatgagggatgtgccaatgcattaacatcacctcccaaggttggtgttgtgaaatagtggtgctttgtaatagattgtgaaacctggtggggttgtatatggctgagatcacagtccatctggattctgtttatgtatatatgtatatatgtatatatttatgtatttaaggcatcttcatcatgattggaactagtcctgaatccttttcttttttttttttcaaaggtcattaggacttttttctataccaatcgacagacttgccaagactggctcactcggatccgcctctccatcatgagggttggattgttggcaggtcagcctgcagtgacagtgaggcacggctttgacttacttactgaaatgaaaacaaatagtctaactcaggtaatgtggtgtatttgggatgcattttaactgattgtaggaatttgagtttggtctctaatggagttatatatagctctctctccctctccctctccctcccccctcttcctccctccttccctccctc

SEQ ID NO: 32951 - DNA, 1178 bp, Mus musculus
cccctttctcctcttttatctagtgttaggatatagttagtgaagacgagtggaagaaagaacccacagagttgctaaatccagcaacagatgaagagtcagatatatttctaagttcagaagtatcgcatatattaaaaataaaattactagttactaataagctggcacgccaaattgactatagatctcaatagatgggggagcttaagctgttgtttgtatatgtgttggcattgactttaaatcaagataagattcgtcaatgctccttgaaaatctcacattagcagcgtttgagagcattcattatttataataaattcatagagctttgttaaaaaaaaaaagtaacctacatacaggttccttaaaattggtcttctgaagtgaaccttttgggtgttacgtgtctaaatcttgaagggtcatctccccagcgtgctgcatgcatatagtgatttttaaccagttccctgaatttttcttttgtaggttgttgctgtagctcatgctgtttatcaagcagtgctcagcttgaagaatattcctgttctggagactgcctataaattaattttgggagaaatgacttgtgcactaaacaatctgctacacagtctccagcttcctgatgcctgttctgagattaaacatgaggcttttcagaatcatgtgttcaacattgacaatgccaactttgtagttatatttgatctcagtgcactgactacaattggaaatgccaaaaactcattaattggggtaagtcattaattttatagactttgttattatgttattatttatttatgtatttgttatttatgtattttgtattatttctggttttgagacagagttctgctctatggcccagatgggccttgagcttcctgtgttcttggctttagcattctgagtcctgggattactgacagataccaccattcctggccataaatctatccatgcatgcttaacctctctctacccttccatacctcatttacttctttttcctcttctttgtaatagagttctttgtagactactaggcttaccctaggtgctgagattataggtacgcatcaccatgttcatttataacttcatatattttgtttgttggtggtagggtgggacagggacagagttcaacattcaataccttcttt

SEQ ID NO: 32952 - DNA, 1313 bp, Mus musculus
gaacacttggctatcatgatcactgatacacaaactttaatattagcttaaaagcaattttagtatttactttgaaaagattattaaaaatacaagatctgtgtttaagcaagtgtgagtaggacattcctaagtatgctacattgtgatgtatatcacagcgataaagatactgagctttttatccagccttggaataattacatgagtagaggaagtgtgtaattgaactcaagggcgacaaacttcatttcttgtcatgataggaacttggaatacattttagccaagttttttcttttcttttcctttaaattgtattaaagatgcctatatcagctaccaagaattagggactcagctgtgaactgtggtggtgcacatctgtaaagacagcctggattatggattattctttttgcctcatctcagtccaaaaaacaaaaaaaaacaaaaaaaccccaagcccacaaaacctcaaacaagactgttagttaacaagatatttttgagttgaaactgcattaggtagaaaatagtggtgtagagaagcctgtgagtgtttaaaaaggtgcttgttttccccatttgcaggttctatacagagtaatgagatgcgtgacggctgcaaaccaagtgtttttttctgaggctgtgttgacagctgctaatgagtgtgttggtgttttgctcggcagcttggatcctagcatgactatacattgtgacatggtcattacatatggattagaccaactggagaattgccagacttgtggtaccgattatatcatctcagtcttgaatttgctcacattggtatgtgaattactgtttttgttgtttttaaattgtttatgtctttaagttgatgtgagagaaagaaagagctttgcttcttgtgttttaagtaagggattgcattttaaagaatcctttgataattctcatttttctagtccagtatggtttttttcctagtatcaatttgcatttagtgtctggtagctcactttagtctaacttctctaactttgtatttatgacatgtccccattttcctgagactcagtagtgctcctgatatgtaccttatgggagaatgtatctatatttaaagacctgcttatatttgatttcttagaaaaaattcaaatgatttctctttaatttctctttactttattagctatatagcctctctctctgaaatctaatggaatagtgagtctttatactgagtactcagttcctgtaattagaaacacatggcctgtcttcttcactggaggccgctggttgtctcttgctag

SEQ ID NO: 32953 - DNA, 1229 bp, Mus musculus
gatgccatatagctttggctattgaaatatttgcttaaagctgtgatactaatattttctttttctttttcagaactgatagtgcatcagccgacccagatactttaaaatactcctcatctagagataggggtgtttcttcctcttatggactgcaaccttcaaattcagctgtggtgtctcggcaaaggcacgatgataccagaggccatgctgacatacagaatgacgaaaagggtatatagattttctcctgttggggcatgcttctgttttagacctgcttctcttttttttttaaccctccttccaggtaacatctgaggttcttccaggctactgtctcatttactcatccaaaatgtgcttaaagcatctgtctgaattgaactttatttctctactcatcttgcaatgaagggatcaaaatggtttggagtcaggtagcacaggggagatgagagaattaggttgtaaatgggtaagatcctgttagctgagggaatgaaacagggccctgttaatataatgtaaacattgctgttttcaggtggctacagtgtcaatggaggatctggggaaaatacttatggtcggaagtcgttggggcaagagctgaggattaacaatgtgaccagccctgagtttaccagtgttcagcatggcagtcgtgcattagccaccaaagacatgaggaaatcacagggtaagacttggagaccagggttgacacattacccctgatgtccatgagcagatgagtgcagctggcagccatttacattatatttctgtgaacttctagcttgtaagaaagggttacaagtctgggtaatatagtatttatttgcttgtttgagacagggtttctcttaacagctctggctgtcccagaactcacttcatagaccagactggcctagaattcagagatccacctacctctgcctcccaggtgctgggattaaagatgtacaccaccatgcccagcttctgaataggcagtggatatggtaagcggagtctttttaaaatttaaatatactcacaccttgccttcttttgcagatttttgagtataaataaataaagtgctttcaacattcagaatattaaagataatgtgtattcaagccaggcatagtggtacatccctttaatcccagcacttgaaaggcagagatcagtagatctctatgagttcaaggctagcatggtttgcatagtga

SEQ ID NO: 32954 - DNA, 1174 bp, Mus musculus
gagtctgtagacagctacagtgtactcatttatatacatacatacatatatatatatatgtgtgtgtgtgtgtgtgtgtgtgtgtgtatatatatataatatatatatatatatatatatatatatatatatatatatatatatatataatctttaaaaaaaagaatctggacaataactgatgagatggaatgtgcaagacagggtctcatgtgacctagtctgctcttcaaattgctatgtaggtgaggctgtccttcaattcttgatcctcctacctccacctcctaagagctaggattccatatgtgacccttactagatatttagaaggaaaggaatccagttacttgtacaggagtgttgttcatgtgctcttgcaggtattgtgagagtagttaagtggaagagtctggcctacagaagggaaaagtgtttgggagacaggtgaaacttagggtctaggtgacttctctaggaaagagctttatttatctaatgaagatagaaaaggctacatggaggtgaatttggatttacagggagaaagtttgtagtcactagtacaactgggaacctcagtcacccaacccataaaatgcaattaagagggttgtggtaaagatggaatgcaatggtagatgttactctactcactgccgtggtagacatttgacaaaagcagctcaagggaagaaggatttattttggcccatggtttcagagtgtctcagtccatcatggcaggtatggtggccaaagtagaagagtgtgataggaaggagtcagggacccaaggacctgccttcaacgaaccacttttttttttcttttttttcttttggttttgattttttgagacagggtttctctgtgtagccctggctgtcctggaactcactctgtagaccaggttggcctcgaactcagaaatcagcctgcctctgcctcctaagcgctgggattaaaggtgtgcgccaccactgcccagcaacaacccacttatggtgaattcctaaagcagtggttctcaacgttcctagtgctgaaaccctttaatacagttcttcattttgtagtgactcccaaccataaattatttttgttgctacttcataagagtacttttgctactattatgagttgtaatgtaagtatctgtgttttccagtgg

SEQ ID NO: 32955 - DNA, 1180 bp, Mus musculus
caacacacagctatgttcatcactaatgtgcactaggccatgaataatccagtaaaggatgaacaatgaagcaaatctcaatataaaaattgagaaggaacggaaagtaacgggaaacaaactgggaaacccacaattacaccgaaaactggcatgttttaccaggtaattgctgactttcaggtgtaaatcggctcttaatagagaaaaataatctccataacgtggaggaaacaacagtgacctgcgggtcgcctttccaagacagggagaaaccctaacctaaaatgcctctccagggcagctctgcatcaaccctaagagccgaccgggcgccttcacgacgttacaatgatcgacagggggaagacccaatagagtacgtgaatcggtcatttctaaccaatcgggtgtaatccagggcctaggggcgtttcctctggctctcggtccgcggcatctatgcgtcatcaccctgagtcgagagcacgattggcggggcgtttggaccatagctgcattgtccgcagcgatgagcgccgccggagccatagcggctgcttccgtgggacgcctgcgcactggtgtccggaggcccttctcaggtaccggccgttcggggtcgtggttcggcgcggggctcttcgccggtgactatttgcagtggaggtcacggatgtcacggggaggacgtctatacgtcacaagcgcgcgacatgggggtggggtttgtagtacgtctagttgattgataggaacgggtgaacttctgcaggatgccctgccggggaacaagtgattaccagcctgtgatgtgacgtcagtgcaagtgtggaacttgagtgtcctgcagtgtccctccggtctccactcgggactttctcaagcaaagtagccttccgacgacagcatcaatctgttataaatgcagattttcgggtccccctcattatccactggattgataggttttagagttttaaaaagtgtgtgtgtgtgtgtgtgtgtgtgtgtgtgtgcgcgcgcgcgcgcgcgtgcgtgcgcacaataattaaattctagagaggccagaattggggtttgaatctgcaactagagtaacaggcagtttgtgaatccctatatatgggtgctgggagcccaactcaagtcatttgcaagtgcagtacacattcttaac

SEQ ID NO: 32956 - DNA, 2476 bp, Mus musculus
gtaaaactgagatttctccgaaagccttcccaggccgagtgaataccctccaagatgccactggtgacttcaaattaaacctgacttcctttttcagatgagcaggaatcttcagatgctgaggcttagaacagctgataggaacgtggagaggccgtcctggcagaaaggcagaaaggaaatccatccccgctgtgtaccccatcacacttgaattcccacccatgcccagtcagtatcacccccttgaggagaggactaggccaggtggcaatttcagctttttggaacttttctccagccttgttcactcctccagggaaagtgaccttagccaactggttagccattagcctttagtctccacctggccccaatttctaagatttggtgacagaattgaagaggggtttaactttgcaaggtgcacaggcagttcctctgttttccaagtgttattcctcttccgtgcatggagctgttcattcctgaaagatgcagagtgattcagagctaggctgcaatatgctttttggaattggagctgggtttaaggagcaggggttttatgtatgatttcaggtgtaggtccacagcccagcctgttcctaagaacgccccataatacaaacaaaggttgggttctgattacttaagtacacatgtcaaagggctagattttgtttgcctgagtttaaaactttgtgtgtgtgttcctttgtttttataaaacattacaaagacagagtatctcttgagatctccagcatagtaaaagctgtatttaataaatacctcatcataagcctcccttatggggcgtcccttttagtggtgtctaatttgatctgctttcactttaaggtctttgtcaatgtactgcagtcctgtgatgggactgtggagtctttactgttttccactggctcctaacctttaaatttcaattaatgtttcagaaagctgccaagatggacttccctgctctgatcactgccttgttcctcaaaaatgattggcttccctctgggagcaaagcaaactcgttgtagcttccatgtctgtgtgtgtataaagggtgctttgtcagatgtgtgtgtgtctgtgtgtattgatgtgtgtgtgtccatatcttacatgtgtgaattcgtataaagggcccttggtgaggggtgtgtgtgtgtgtgtgcatatgtacatctggaggcggaactcatatcctcaagctctacacaatcatttccgtcatcttccatgaggctgttaacctgggatatttttgttcctgtgggaacatgtgctttgtaacattttcttgtattttaagatctatgagttttaaagcctaacaacaggagttttgaataaaccaaagtttactccattctcattctacaaatcctggttgctggcatttttgcctagtgccttcatgaagcattcttgtcctcactgtggccctgaggataatctgctgtcctatgtttgtaggaatggtagataaaataaacaacatattttctttattataaaacagataacaaaatatgccaattggtatgttggttttagttagtgctgctaatgtgtgcacctcctacttgaatattttaataacttggaataaccaggcaatgtctgtatagctttaaagtgcggctctctaacgggtgtgtgttaaactcctgattccgtgtcttgaaagttttagagtatggttgtcctcaaacccacagacgctcttcatcactggttaagtgatgaagagaactgcaatactcagtaaagttgctctttgtcactgcagttagaggaagtagcattttgacatcgatggatgtgttagatgagtcttgtctcctcttggctattaagaagccaaagaaaagcaggtttgtgtgttttgaacgtcaaagacaatatcttaagcattttatatcttgctaccattgaaagccactgtttgtatttattttaatattctataaatatataataaatattgaaagtagctatatatgtgttgggtgcgtgttgtgaatacatattttttaatttctccttaataacatcttgatgttctctccaagtagctcccttttgtaatggccatctagccttccacagtggtaacacacatttccagtaactatgcagtcactggtgggtacttgaagtaggtattgtcattcttcccccataggaacactgggaaattgaactttaaaagcctttgcaaacattttcacttcccgtctgctactataggctccggttctgtttttctttctcccttctctttccccttcctctcttttctattctctctcccctctgtctgtctgtctgcctgtctgtctatctgtctgtttctctctctccttctttctctctctctccctctctatttctttctggcagagcagacctgcaggttctcgcagccacgaaatgttctcatctcagtgaaggagaa

SEQ ID NO: 32957 - DNA, 1126 bp, Mus musculus
cctggacttactagtttgttcatgaatataaaagcaagccattctcattattattttttaaatgaagatgagatatttttaaagattttttaaaaaaacttttaattctctttctgcatgtgtgtgtatgtgtgtgtgtgtgtgtgtatgtgtgtgtatgtgtgtttgtatatgtttatatgtatgtgcatgtgtatctgccgaggcttgaacccagaactttgaacatgttaggaaagtaccatgcccaccccaagcctaacacttaccaattaccttgtcctagccattcaaaaatggaaatggtagaattcacaatgatgatggtgacaataatgggatagtaatgctatgagcccgtgcccctcagtacccccacttcctgtgggtggtctcctggtactctggttctcccctggctcccagccctggagtagccactcatgttttaggaaggagcatgccaaggctcaggggttaactggcccccggtcatacagtgtggctgtttcccggagtgttggaggcagatgtcgctcaccacagctgagcattggctcttaccctgtgagaaggaccttgcactgggctggactttgttctgggagcctttggcctttggccactgttcttccatcttcatttggaaacatcaagtagccaatgccatcagaggaggcaggaatgtggacacacaggaaaacactggcggactagtgagttcccacatgtgctgtagtgaagggcaggtgtgtgtggcagtcactggctccaggcctgccctgctggctgactgtccccaaaactaagctcacaagttgctctggtttctatggaactggcaagcttcatgtcttccacagaaatgcaagtttaaaaaacacagaatgcctttcttctttccctgcttttttacttgatatttccttcgagtctttccccctctgtgtaaatatttatttttaacacataggaaaggttatatgtgtggaaaatgttcaagcaaaatgtctccctagttggcatagatcattgtagatccactttaaacacctatgaataataaaataataaaactttaataaagtttatgctacacaggatcttgaaatttaatagtttcctc

SEQ ID NO: 32958 - DNA, 1132 bp, Mus musculus
ctgcaaggaagaaagcgttgagggagggtgtagagcgctgttcttccccaggagcggaggacagagaagctctggtgacctgaaagggaggctcctgcagtacagagagaaacggacagtgtggttggtgtaagagggcagagatgatagcccttggtgactgtgatgtgtgtgagctcggatgatgatgtaaagcagacataagccgtgcctgcttcccagcctctgactgcggtaggaggccagctggaggctctctgggagcagttggcagtcacagagcacatgctttgagctctcaattccaggacagctgtccattctaacacggctgattttccccttttctccagggactatttgaagaagtggtcagctaaaggaatccaggttgtgagttggactgtcaatacctttgatgaaaagaattactacgagtcccaccttgggtccagctacatcactgacagcatgctagaagactgtgcacctcacttctagactccccaggaggaaacacagttgcgaaactgcctggaggcctcttgcagggacatgagaacactctgttagcacaagccctggggaccctgtggctcatactagcaatagtcacagtgtcaccccaacaagcagaaaccaggcatggtgaccatgctccaaggaaggctccacacttgcccttaaaattctggatctgcaaaaaggcagggtggccccaccctgaccccgctgagggtacagagccacgaggatgagcagagtgggtcctgcaattagggcgcaggcaccaatgcatggggcttgcatgatcactccaagttgacattttaaatcttgccgtacttcagtaattcacttatttccaatatttgtcgtcagctttgttaatggcgacctgtaggtgtcaaacttgtgaccacactaataaaatcattgaaaggtgaacagagggcaaactgtgtactgatcttctggtcctacagtgcctgggaggcctttcctgctttagtttcaagacttggaattatctgtgtcatcttgatgtaagcacttctgaccaccagggggcagagcggcagctttcccatcgtgcttggaagcctgatcactggcaggttcttagataaag

SEQ ID NO: 32959 - DNA, 1127 bp, Mus musculus
ttgttttttcagtcttctttttctagcatgctttacataggagagaataaagggctatttaataagcaatccggatctcagagaacatagtaatactgtctagtttaaagcctgcagtaaaggtactcagatttatggctttcatgactaacactaaacacatcagccaacaatgtaccaagaaaacatgattttatgaaacagaatgtcaccatataattccaaaaagggctttgtgcttctcatgtaacattgggattgtgtagatttgaaccttataacttgaattttaaagatagtagcattttgaagatgcttaataacctttttaggaatatggagataaagattgtttttctgattttcttccatctgaagtttgacttttatacccagccagaagttacaaaatgatgacccactctgggtataagcttgatttcctttgttgagacttacccttcattgaagagaaaaagaagacagtcaaaaaaggtccaggttacaaagttctcctcataggtggaaaggtttactgcagtgttatcctctaagtgtgataaactgtgctttaccgctccgaacactcaggactccgtgtgtatcagtgtgggctcctcagtaaggaagaggagctcaaagtttgtgtgtattaatatgaattagctaacgtgaactatgttttggaaagttacaactacttttacattaaggatgagaaactggagtgtttttgatttcatggtaaaagtttgtgtgttttacatttgaatgttcacagttttctctcagagaagtgccagacattgttttgtgcttttgaagaagttttatttatatgcattatttttattgtttttactttgactggaatgtttattgtgaactgtatttatttttatactttgattttcactagttttgcttttatgtaaaagtcaaaataaacttttcatcctaaaggaaatcttgttggatctcttttagccaagggaatcagctgaggaacgaacatgtggccaaaaaacggtgactcaggtgaccgtttacagctcgagccccggataggcataggtcattgtttcacaggaagcctggctgtctgctgctacagttgataatgtcct

SEQ ID NO: 32960 - DNA, 1181 bp, Mus musculus
tgtgtgtgtgtgtgtgtgtgtgtgtgaatgggatggctcagaaggtaatggcatctagtgccaagcgaagaaaggaccaacacctgtccgttatccactgacctccgtgcacatatttacataatacgaatgggatttaagcaaggcgtggtgatgcaggcctttaatcccatcattcggaggcagacgtaaatggatttctattaacaaaataaaaagaaaaaataaaatcaaggccgatgacggagcttgggttttgccgggccattgcccgatacaactgcggaggatcggaatccggaggaagttgcccctcacaatcatggcggatgacggagcccgggatcttcagagcggaagctgcccttcacaatcatggcgtctggggcggggccgagcttccctggatgtgagaaaaggggctggacgcggaaaacaggcgatcatgtgactgggaagatggctgtctttccctggtaaggaaaaacccgctagtaggcttcggggagggctcctctcagtgggggtgggcagtcctccttgttgggatcggtggcctccgtccccgcccgggctgtcaggactacggaagagcagaaccgctgtcagtactctgctcctctcctctgttccgcagctccttcactcagacggactccatccaaggcttccgcctccttgggagacgttggcacgcctgggagttctggggaaggggatgaattcgcccggagtctgcacctgggagacctggtcgcttgttccttgagctccttagactttctcatctgtaaagtgggaccattcaccctactctatgtagggtccccagacacgcttctttacctcgttgttcaacgtagtagaacgtattagagagaggacacgcccaaaggagagagggggcagtcagtcaactcccctggcggcttgggtagactgcagagaagagccttcaactgggtcttgcaggatgcatacgagctcaccaagcaggaaggaatagtgtgtacccaagtgactggcatacgggcctttttgtgcttagaagtgaggtgacctttaggttgtcacaggtgatttgtgtcgataaagaacccacataggataagcggatgataatgtggttggacgttggagaccttgcatctcaggggcaaaatttctgcgtttgagcatga

SEQ ID NO: 32961 - DNA, 1154 bp, Mus musculus
gtaattggactgtggaccatgatggcaggcgtgagtcagaaagtggttgactgttccagtagcactcatgccactgttggctctgatgggcatctcagtcactattgtaggtgtcagggttcacatctgggtaggggtgttgaatatttgtcttccctggtagtataaatagaaccttctagaactagaaagctagccagttggtgttaaggatgcaatggtaagtgcttaggctggcttctgagcctcagtttctccactcattgaagatgtacatgccaactcttcctagtgctggttctgtgggcccttttatgatacagagagagtgcttgtcacagtacctggcagatgctgagagggtcactgtgattattgctgaccctccaggcatggccagtggggggaatcacttccactctgctggcctcaggccagatgctttcttagtgaatcccaaagcgtgtgggtcatcttggcccataaaccctgcaggccttcctgctatctgccacctgccaatccatgtgacatgctgctcttgtttgctcacccagttgactccaatgacagcttgtacgggggagactccaagttcctggctgagaacagcaagctgtgtgaggctgtgatggctcagatcctggagcacctgaaaaccctggccaaagacgaggtgggtacccgccctctccacctatgagctctggaagccgcaaggcagggcagttacaaagtggtccattgtgaaagggaaacaaatcggagtgaattgtgatccccggtactttgggcccttggccttggctgttctccgcctcgcagcgctcctcgacacccagtttcagctcattcagcttctggtacacatgagtctgctctcaacttgcaaggtttttggtttgcgctctcgctctctctctctctctctctctctctctctctctctctctctctctctcatacatcaattagaaacaaacagaaaagctgggcacagttgcatggacctataattccagcattcagaggctaagacaggatgatcactggttgtctcaaacagtggtctggggatgtagctcagtgtccctggcatgcacaaggccctggttttaatcccagcacagcataaaacagtgtgtgatcccagc

SEQ ID NO: 32962 - DNA, 5184 bp, Mus musculus
aaaaaaccaacaacaaaaaaaaaatcatgaggtcctgaattggaattcccagaagccacgtgaaagccagacacatagcacaagtgtctgtgatctcagaacgcctatgaagtgatagtctgttgcgtgacactgatatatggaggtacaaaacatatcctcattccacatagggagccaatgtcagaccaaagcaatgataccaccaaagcctgataaacagcttaattgaggttgcaggatcctgtatgggttacttagaagagcgtgatagctgaaaggcagctgcattaccaagtctaccctagcatgaaggacatctcatgaaggctagagcactggagcattctatatgacttgcaggcagttcaatagacatgcagtccttactgcttatgtagccttgaggagggaggggccttatgaacctgccaagtttcaggattgcctaagacttagtgagttgtttacttcctcggtcttaataagctcccctctcagaatgaactgcttaaagtcagaggatcagtatacaacacaggctatataggaggatcgctggaagctcgtggccagccaagcacatgcagcagaaaaatcaatagagatcttgaagtgttcttgctatcaccatgtgttgggagaaggtagagcacagattagcttggtgtgcagtgatatttgttagaagccaatgatgggctctcaggctggtcattcccgagttgggaatcatctgaatattatcacccccattaagctctaggcctcatttcctcacctgtaatgtgggaatgagtagccatattgaatgagacagttcattgcgtggctgagagtgagggaagctttggtcttcaagggcaatgacagccttttactttccacacagggaacccagtttggccagtgggatactgccggctttgaaaatgaagaacagaagctaaaattcctgaagcttatgggtggctttaagcatctgtccccgtcattcagccgccctcccagcatgactatcaggtccaacatggccctggacaaaaagtcttcagaaatgctccagcagagtctgcagcaggactatgaccgggccatgagctggaagtacagccacggggctggcctgggctttaactctgaggcccgaaaggtcttctacattgaccggaatgcctccaagtctatcaagttgcaagattaaatattattgtcttgttcttcaaactgcatttcttgatcagttgcatccgtcaagttggcttgaaatagtcacctgcagttattgaggaccaataggaattgctaaagcctcctattttctatgttaaacattccacctccgggtgacagtattttaatagtagctagcagttgttggcacgtggagggtcctgactattttccttgcattgttacactaattatggaatgggtgctgttctcatctctatcaagttcagggataaataaagtaattaaacggcctagggtcaccttccgttaagtgccatcaagagtacatcacccagagtcactcaattatcagtgcagaaagcaagtgatatgccatgacttgcaagtttgttttccttctcccttatcaggaggcaggtgtggtgcagcaggcagacgtggccagtacctctgagctggcttctttccagccgtcctccttccatctgactgctgtgcttggatttgatgctgctgtattggctggatctcaaggcattttggacagtaggtaatcctgcgtatggacccatgacagattctcagcagcatgttttgtgtttgtgttcactagacagaagaccttggacacttgtgtgatgaaatcaaacatataaggggtggagaaaaagatactttgctgcaggcaccataccctcccacccctccctcccaaatcacagcaatcttcatggagctcctgatacagagacccatgtgacatgattttctctcccaccagctattggcagtctggtatcaaggttcagagaaggttactttcctgttttggcctgatttctcacaggcagaaacactgggtggggatggaggtgtttgatgctgcactcagccaggacattcattcatccttccagcaccgtcatcagtgttgatgccttcatgctgctaagaagatgagagacaattcccagcattccagagatgggagaaaaccctctctacaactaaagaaacttccggcagtccctcagggaacctgtgatggcgtcattcagctttgtagtttttcctgtatcagcccccttggtaaggagatgcccctcaggccagccagggagagggtgaggtgtgcagtactgccaaatgggcagcagaggtgttgctgtgccccctaccttgttcctgtcctgtgggcataggccatatgtatggcaaagacctgtttacaccactttcctggaatgaacttggcttctcatcaattcagcctcaagattcagaaaagaccacttccagtcacgtcaatggcagaattctgcatttgagtcaacttccagacaaatctccctcggccttggtgaactctgggaaccatctgcataactccaatagcttgtgttccccacaagtcacattccagcctaagtgtctcagctcatcaaaaacttgcacatggcaatcttacgggtggtagatggttttctatcttatgtcacatatgccttggaagctgtcatcaaagtgtgagagccagatctttttcttagctgttacacatacctcagtgctgaaagacttgattttgtagcttggtacctcagcgttgacttaggtgctccactagcccacctttctctaagaattgaagtctgtagtctatctccaaggcactggaggtagggtcagtgatctaacacaaccttgaacttgactgattctctcaggcatttcttaccagcttggtggcacttaagcaatatccttgtccaacagtcaccaaaatctcatgattcttaacacttgtgcttgagctgatttctgtgctatatctgcttgggcccatgaggccctgccctgaggctacatgtacaaccagactaacctgtgaaaaggctctctcagacacaggtgtccctgctcttagtactacttgggttatggtaggcaggacacacacatacccagcagaagggaaattaaagtcactaatcacatgctgctattattattgttgttgttgtttttttgagacagggtttctttgtgtagccctgaagaccataccatgctagccttaaaagtcacagcgattcacctgtctgcctcctggagtgctaggattaaaggtatacatcactgctgcctggcttccagccaccactggctatcagatagatttgaaatcagatccttgataacctgagcaggttcttttcttcacagttccctaactgatacgtagcagaagatttagtgtggaagacacttgggaaggaaaaggccacaagccaagatcacaggcaacgtacagaagccatgcagcatctctttccaccagagtacccacaaaagaacttagacatggggataccttgacctagcccagagaaaccagtgagttctgaccaacagcagtcaagacagtaaaaccacaggaagtcactgtgcttgtaatttcttaaaggaataagaaccaggaatcactcacagatggacatgaggcatcctgtttttcatttcctaaaagtctctttacatgtccttctcaggggaagtagatgctgtttgtggaggcgggcttcaaagactggactgtcagtaacacttctgcccaggtcagcagactgttgcaggagccccgtggtatgtgtacccagtgtgaggataagccgaggttaacacaagcagtgggaattccccaggccagtgtaagctgcttatgctgttatcctgggcagccttgaggcaggagagtaacgtacaaaggattatttatgaatttgccagttatttttgaaagaattagcatcacagtgaaagtgacataaaataattttagtagaaacagtttggtgaaataaaggccatttgggagtatttgaacagcaccatagtgcattctgggttctggcatgttcacagcaggaggaaaggcattttttagcatctggtttttgtttttgagactggggctcatatatcccagaccagcttcaaacatgtaactggggaccttgatcagatcttgatcctcctgtctctacctcctaactactgccgttctaggtctgcaccttggcactctgtcttatgtggggtcttgtgtctgccaggcaagcattccactgactgagccatatccttcgcctcatctgctcatttttggtttggtttttgttttaagaaattgtatcaattccttgggctggagggtattctcatcagattggccccaaatgtatatacaacagtaaccctgctctttgttgttgttgttttgttttgtttgttttttcgagacagggtttctctgtgtagccctgactgtcctggaactcactctgtagaccaacctgaccttgaactcagaaatccacctgcctctgcctctgcctcccaagtgctgggattaaaggcgtgcaccgccaccacctggctgtaactctgctcttaaactagtaaagacacaagctgtgtgtgtatgtgtgtgtgagacttaataacttctactttctgaggttagtcatgtatagtatttcagataaataaaatccatgcctaaagcacaaatatagtcttttgaatgtgtgtgttttgccctgactagttttgagcaaccctgcttccacctcccaagtagctgcaacttgaagtatgtgccaccagggcagtatagcctgaaacacagctgagccaaacttggatgtattttcacaggcagtagtaggttccaggttatgactcagcagtgcttctggctagcgacagaactgcagcccaaggcaatcaagggcagttataagctcactcagaagcactgcctaagtgcccagcagtgtgtggatctggatgtgcttgctaagtcagaagtgatcagccaacagctggaaacagctgattttcatagcccaggttgaccttaaactcatggcatcctctgcttctttctcttaagtgctaggattacaggtgaacacctctatg

SEQ ID NO: 32963 - DNA, 1214 bp, Mus musculus
cagaaccacgctgagccacaggaaaacccatcgcttagtgaggcctttcagttttgctttttttcctttccaatcctgataggttattacgctgctgggctttgttttatcttggctttaagattcagggtgggctgaatgttttgacatggagggcggaagtaggagcaaaagaagtagggccacatctactactattctgagttcgagttcacctggagaggaccacgaggcaactccacccagagactgtggcagccagcttctgacagagcaaggctgaagtgcagaagcccacggcacctgtttaacagttgatagacccgaggcttggttggggaaacggtctagaaagtcacctgggaataaccccaagctgcgagcacaacttggcatgccaccatattgggactataacagccactctgtcccctcctgagagaagactccacagaggtctggagtcagttgccaaggtagcgggacaatggcagaggggaggggctccaatgtgccagctgtttcagaagttaagatctggttattgctccaccccccacagatgagatcaaggacagccaacaagtgtagacgggtgggggaggggttgtcttttgaatttgccaaatggcagagtagaagaggacactggcatttacacatccaaggatgcagcgaccatgtgagctgatgagagcccttggcaggtgctttattcataaagagctatggctcgttttttgatagataatatatatttattaaatgtattaatgtgtattttataatgtaccctcactcttccccttatcctggctgacttgcatacttataaacaaaaattgtttgagaaatttcaagacaatcagtatgtacagggctgtatataaaatatcacagactttaaaggttgttaagcatgggcagataggttttattttcaaaatgctgttcttaacaagaaaataaaggctttactatttacctaagatgcgtggtagcttgtcagtcagatactactgaggaggctttcagccacgtctgggcattttaaatgggagaatcctggcgagcagcagccacagaaccaatgggaccattaagttaatagggcactgctgtaatactttggggctttaacaatggaaatcctttctgacaactgcctcttattgggctggaaacaactcagtgctagagccttggccccactg

SEQ ID NO: 32964 - DNA, 1744 bp, Mus musculus
atgcagaagcatacactgtttctcaggggagggtgctaggaggatggtgttggcttctcctcctctttactctctctagtttccttttaaacactgccaactgatgggactggacagtctctgagtgggaaatgacaggacattcccaggagggtgtgtgctatggctcagctgtccctgcttgttctgttgtacacatagagaagctgcattgtggattatatgggaatcactttgtgatgctttctgctgttagtttttcttgggtttttgtttgttttgtttgcaaatctgatgtctcatcactgcaggtgttttgagaaggtgtgagtgagaagagaactgctctaggtgtagacccaggggtgtttctgataaggttagggatgaggaatcactgccgggccacatatcctagtaccaaaaccaggaaagaaagctactatcccagggtttcactggactgctgtccaagctggtctgtcagcttgtggtgctttccagtgttcgtcacaggcagagattggaagggtagaagggagcagtgaatactgtaaacccagctgtccaggtggggactgtaacataggttgggaactgggtttgtgcttaaatcttaatgcacagagctagtgacgtgagaatatatacttcgcatcacacagctagaggcttgcttggtaagccagaccaagaagatatgggagaagcagagaataggcagtaccttgctaatgcagacggggctagaccatcctcaggtgtttgacatgctacctcgggtctgagattgaaaccatcttgaaaggataggccttagggtcacttaggggaacgggaggagaggatcttggtgccttcttgtggcttgctccaagatagagggacttttcttttaatagtgtaggacagagggcctgaggaccagttactcttggctcagacaggttgttctggagcagggcagttgctgcacttgggattttgatctatactttgcttttaacggcctttttatttgtttgttttgaacgagtccctactggctatttgccagttgtacagtgctgtgtgctcttgggatctaaattcactcacagattttgctctgccttcagatttgcggactttgtcttcactgccttttcagtgtgctagcgtacaggtgatccagggtaggaacttagcagttagttttaaactatagcagttaggacagaaaataaagaagcagaaaccaaatccccgtgctgacgatcagcatgcctgtcctgctctgcagagagaggagttaagcctgggcctggaggacacgtttctccaaagctgaatacagttctcagatatttttactgcattttgttcttggtacagctgaactttcaagttttcaaagttcctgatattttaaaaaataaaaatgaatttgttctgtaaagtttggcattcttttttattctgccccatattaagtgtctttctatgtgtatagtatgtttactataaaaatggctttctatgtgtatagtgtgtttactgtaaaaatgcttatatgtttgattatcaaaaatccggcctcattgttcctaaaaggtaaagatactaaatttattcctgaataattaatattcaaaaactacaagtttaaaataccttgcaggatttacttcaagcacctatcatactgagctttgttaaaggcattagctggcccttgaatcatttatacttctgatttgaagag

SEQ ID NO: 32965 - DNA, 1312 bp, Mus musculus
aaagaggattgagcaaaggagaagtaataaaacacatgagacaggaaagaggggctactgggagtgaaagggtacacaaggggccgggggtggggggggaggggaggatcagcaaaaacgtggagcttgctcgtggttcccagtggcgagaggaggaggaagcccggagcggagcggggcggctggggggggtggacccgccgcggctgctgctgccaccgccgccgccgccaccaccgctcgtggggctcgtggcgtgaggaaggaggacgagtgagaccccggggcgagcgggcggcggcgccgctgctgctgctgctgcgggagggtcggcggcgggacggcgatggcggatatcgacaaactcaacatcgacagcatcatccaacggctgctggaagtgagagggtccaagccaggcaagaatgtccagctccaggagaacgagatccgaggactctgcctgaagtctcgggagatcttcctcagtcagcctatccttttagaacttgaagcaccactcaagatatgtggtgacatccacgggcagtactatgatttgctccgtctgtttgaatacggtggctttcctccagagagcaactatttgtttctcggggactatgtggacaggggcaagcagtccctggagacaatctgcctcttgctggcctacaaaatcaagtatccggagaacttctttcttctcagagggaaccacgagtgcgccagcatcaataggatctacggattttatgatgagtgtaaaagaagatacaacattaagctgtggaaaacgttcacagactgttttaactgcttgccgatagcagccatcgtggacgagaagatattctgctgtcatggaggtttatcaccagatcttcaatctatggagcagattcggcgaattatgagaccaactgatgtaccagatcaaggtcttctttgtgatcttttgtggtctgaccccgataaagatgtcttaggctggggtgaaaatgacagaggagtgtccttcacatttggtgcagaagtggttgcaaaatttctccataagcatgatttggatcttatatgtagagcccatcaggtggttgaagatggctatgagttttttgcaaagaggcagttagtcactctgttttctgcacccaactactgtggcgagtttgacaatgcaggcgccatgatgagtgtggatgagaccctcatgtgttccttccagattttaaagcctgcagagaaaaagaagcccaacgccacgagacctgtcacaccaccacggggtatgatcacaaagcaagcaaag

SEQ ID NO: 32966 - DNA, 1186 bp, Mus musculus
acactactccatgcagactttgcccagcctgtatctgaagtattccacatcacatcggaggctatcaaatccagccagaacctggaatataaatatcacagttgtataaatctgttgaattggtaggaattacatgcatataaatgtatgtaaaaatttaaatatataattttacaaaagtatctaatttgttggaaaacacattttttttctttttttttcttggatttttaaaaaatttacatttcaagtgttttccccttttcaggtctccccttcagaagtccccatcccatcccccctccccctgcctctatgagggttcttccccacccacccactcccatcctcccaccctggcattcctacactggggcattgaacaccctcatgcccaagaatctctcctcccactgatgtccaacaaggccgtcttctgccacatcacaaaaaaacagtctacaaatcaatctttttgcaggttttatagtatagcctcagttctgggaaaataccttccattgacagacaatcctaaaccaaagctgctgtgggtgtgtccaatcatcttaggaggcccagttgtcccactggtgaagtagatggccatcatctcgtcgtgttttgtgtccacacaagtgtggctgtcactggcatatctgtgaaggacaaactgcagtgtttttatgaatgaatgacctctgaggaggatttgaaaacctatctgctttgggcctcttcaacttctgaatcagtgacttggattcacccccaaggtaaaagctacctctgtttccatcctttgacttgtgagatgtgagcatccaccttcaagatcacgcatctgctagggagaaccctcatccaaaactgatcattgtgggcatttagactgtcacagccctgagatccatccacagcccagaactcccagggtgttcgctgagagcttcacagggaatgcatagaaagtcaatttcttcctctgaccagtccttcatcctttccatctttcacaagagaactcctcaataagccccttgtacaccgttctctacctcagtgaatgctttgtatttccttatttattttatcgccagcagaccccttctcaccgaaaagcttgcactgccaactgttagttctgtaacaatcactgattattcttatcatttactgcttttct

SEQ ID NO: 32967 - DNA, 1222 bp, Mus musculus
actgaaaagactaacactagtttctagggactctaaggacagattctcattactgaaacctggttcttatttgcaactgtatgatttaaacaagttatatctgagtctttccttggaagatggaatgaatacttgtctttttaaaacttaaaagcagcccagtgatacaagtgtttaaaactgtccatacttgattttacaaaagaacccagtaaatgctggttactactatgcttctttaaaccttggtgccactgatctgttaagtggcagagctaggatatgaatcaggcttcttcactgagccctctccagcaggcaactttacaaaagctgcctcttggtgtatggcacatgcctacttaaaaacttacttcctcagccaggggatagtggcacacacttttaatcacatcacgcaagaggcagaagcaggtggatatctatgagtttgaggccagcctggtctacagagtgactgtgtagccaaagctacacacagagaaaacattgacttgaaaaaacaaaaggcaaaaaaacaaaacccagcatgtctttgtttttatttattgcagtgcttttgggtcgcaccctggcctaggactgatgaaaataaaagaggaagaagaaagtgataccccaggcgtgagagtgtgagtctctgcactttccaagtgccatttcacatgcaatgatggcaagcctctccctctttcagatagctttgggataccctctaaagtatattgtcatgttcaaaattccaataaatgcctaaaactcaaaacatttcctcctcttagatgtggtggtggtggtaatgctgggggagggtgggggtggatgagtattttgtgtctgagtttattacacaggtactgattgattcctgtagcactaccattaaatgacatatactgaggccaagaaaagaaaatccagccagtttgtcaagtttctgtaagtaactggctaaactgttgactccttggcatctgttagaaaagggggccagggggtggagataggctgaacaaacatctggcaaaagcaaagagagtggaagagacttagctttcaatcccatgtttgggaattcctcctccttgggatatagctgcagcatcactcttcaccagcaggtgtccccatcggacagggcactacttggaaactggaaacttcaaactcacagtgctaagttttaaggtgactctcacag

SEQ ID NO: 32968 - DNA, 4474 bp, Mus musculus
agtgccagacctcagttttgcatattatttttcagggcaggtctgtactgtgtgtagtgctgtttacatggttgaatttaggttgtaataattattttaaaagatttacacagatatgaatatagcagtgttaactgttagccacattgcattaatttccagacagtttggagctcttggagagccaaggccaaggccagtcaagagcatttgcagtctgacaccccaccccgtccctttaagctaatttatccaaagccctgtctccctcacttcttgctcattccttctttgacctattgcatttcatatttaacttacccatcatcatgctgtacctgtcagtcaagtgagcagttttgttttgttttgttagaacacattgtactgaaaaccacttaagcattgaatgcagagaaagcagtgctacctcagttttgctggaagtagacttctttgatagttttctttgatgtttttgtattttcatgtcataagtggaaatacttctttttctccccttttcatttgccttggagccaaagtttccgttctgggtggtgagaaaagtgtgcctgccagccgacctgaaagaaagcggtggcatggagctctgcttcaaactgttttttctctagttttgttgagtatcattagcttacttgtctggcaagtgcagaagcctgaggctggcctgaactctgccaaacaaattatccacgtgtattgaatcattaaattgtgtgccctctccctctttgctgcgcccacgttgtcacttaacccctaggaattatttattgtctttttgttaatgtcaagctcggttggggtaacgtggtgactgtttaggtttacatgaccctcttctctttcccttaccccagacatgtatatatacatatataagatatgtatatattttacctttataaaatatatatatatacacatatatgtatctatatccctttgtttgtctgctaaaactggccatgaaagagggagctgccttcaatctgtagtttaagaagatgccagggagcatcataaacggaggctattgtatattaatttagactttttcactaaaaagaacatgaatgaatttgcttgccgaaggaggaaccagttctctagactccatgctcactctacaaggccagctttggtcaagctgccactggggcctgaagagctgactctgtcctaccttattccactaaagtaccatcttgataatttccccttaaaaaatattctcaaaaatgtactggaaagtgggtggcaggagcttgtacagttcagcttccaacatttcggaacagatttaaaagggaatcttttaataaataaaagttacaaaaatatttatactcttgatacaatgaaaaagtgtctattaaatatttggaatttcctcccttgattagtctaccccaaatcctgggtacatgtttctcaacctgggtaagaattgcatgctttgagttcttcatgagtcttatagctctaggcacttatctttataaaaatgattatttaaggagatgacagtcatatttcttaaagtcggtattgacacagggaacatttttgtaagcctcacaattgtccttccttgagggatgagatgatgaatatcagccacagacttacgatagtgctggaaggcccaagtggctgttgggccagatgtaccccttttttttctagccagaataagatgaaatccttgagtaagaatccaggagcccagtagtttctgagggcacagctacattataacatttggttaagatctcatctagccagttagttgttcctaattcaggattaggtagaaatctaatgagggaagaggtggagttaggtaagactttctgtcccagataagaaagggtgtatgtggggaaagtgccaagagggagtttgccaagggccccatggactcaaggaactagatcttttcctcattgggtagaggtttttttaactgctcagtttctccaatcccaatgcctgcaccccaaccccagccatttagaaattgtgattatatttttaatcatctgttgttgagaaaccagagaaaggaacagtattcagggagggactttgggttttctgtgtagttgctttgctttgccaagagattctcagtgaggtgtaaggtttgcagttaacacttctgggaaacaaaagtttctgtttcactcaccctcagataggcttgctgcttattgggtggatgagcagtggctgggagccaaattgctcctcaggttagctagctttgtggcttcaggtgatttgggaaggggtgatatcagggtgccattttggaattctgcaatgtctaagcattactacacagaccgttggaaattgcatactttgggcaaatgactttttgagtttccatggtaattctttagtaacttattagcaagctgatatgagataaaaagttactttattgaattctttcccttagtcttccttgccaaacttgaatgtatcattctcattgacgctttgctgtacttctgggggttgcttcagcagctctctcttcattgtggcagatgcgccaacatgtctgttgggtccagaagtctgtatgtacctatctgataaagaagttctcagagctgactgaaaatccaaatttcagccaacactttgggccaagggaaagataacagaaaatgtgcaaagcagtactgttcatattagaagggcagtgaagaattaccatgcacacagaattagcttgaaacagtactgtctcctagggtgtggtctccaggccagatcaggttatgggatcccatagattatgtacgtagactgcacattggtgggaagttgctaagataaagacttgtccaaaaactaacaaagcaaaagatgtgtttattggaatgtatagtctgctgtatttcaagtggggtcttcagtgcagcaggtagacctagttatacagttatgtaagggatagagaactactgttaaaaggtttttatcccctctcaccacttaatctcctatgtatgttaggatggctagtgatgacctgaacatcttggtaacagacagaggtcttacctggaggactaaagcagtacttagcttaaatacttgaaaggacaaagttatcaaaatacgttgattaggattatttaaggtcatgtgacactgatcttttcttctgggtcacgtagaggataggttcttgccacactcttattcagagtttccttggtaagctgtaattgcagcccataccagtttgacctggcccaggactacatgctggggatgctcaccaggagtcgcccctggtctcagcccctctcctctttatttcagagaaggatgcttgagcattgggcacagatgctgaggtggtttgattagctgaaaaaccaagttctgattcaggtgttggggcatcatgttctgtttctcttggaaacccagcctgctctcatagatacctacttccatcacatatcctgagcattgccaaaagaagccatttagcagctgctgtttttctctcagcacaaatatatttgctacagaagaattctcttttctctggtcctggtccccagacctcagaatctgttaactgctcttccctgctgcactgaatatggttctaggttttgaagagggaatttgaagcaataggcaatcagggcttggttgaattggtcttgcatatatcctgtcttaatcctctgaggtgatgagacactgctcatgtgaccttctacctttgtggatccctcttggtttgtgaccttcgtaccttccctgaggttgtacaaacttgacaaaagttaatacttttgtattctctgcactgttgcactcttcaaatagccccctgaatattaacttgatatacacatctttctcttttatgtctacagtattttttccttttttttttttgaaggttatctgctgttgaattcaataaatttgtttacctaattattgatatttctgcagaaaacaaaaaacagtgaatttattctgaggtaaagtttatcaacccattgggaaccttttccaatgtgatgctatgctatattaacaacttaggaaaatgacccatgtaggataggagtcttcctccatgcacatgaatgcttgcttagatgcccattactgaaatcatctttcttaccttaggtatcacagttcccatgagaaataaaaagacagttttgagctctatgttaaatacatgggtggtccctaggtctaattaggcttgcaatgattaagtttattttttaattcatctgcaaaataaagggcattggtattaggatttaagaaaaagtctgtgaaacacccatgatatctcatagttagtgcctcatagttaagcctccttaaggttcatcaaaaagatgttaagggtattgtgtggtggtggtggttgtgggca

SEQ ID NO: 32969 - DNA, 1257 bp, Mus musculus
acagtaaaggtaaggtcatgccaaaccttatagtttggggaatctgacactgttggaatgaataacaattgtcatctattgtacattcattttttccactggttcagtctgctacgttaacaatgcagtgtatacgttcaggcatacaacttcacataaacattaaggtcactagcaaatatctggctgttttggctatttacaacactagttctgctcttccataaaaatcgcattttatctgtattagtagatcttcaccaaactcttaagcaatacaatattccctctaatgctttacacacgtgtgtgctgaaaagctaccattctttcatttgctttgaagactgcattaaaccttaaggggttttttgtttgtttggttggttggggtttgttttgttttgttttgttttttgtagaaacagcaatgcagctgattctgaactcacaagtacttttaaaacccagtcctttcctccccacattcccatgcctgtgtcaacacctcgattcttcctggggaacacttgtttgaatcttgtcacaagggtgtttcatggcagtggagctgagtttgtcctctctagagtgaatggcaattcaagtatccctattagtgggcagagtacaagtcttacatagcctgtacttcaaacaaatgggaatgactcctaagcaactcgattctccctcacaggatggtattcggagatgggttacctgctcagatctgacctagagtggaagacttgggtcagtcctcaccaatgtgtctgttattcagctgtctcagtattaaattgtgaatgaaaacccagtgtttgggctcatacaggaaccttggagaagtggacccctctgtgtgagaagcctgcagtcagtcggaggaaggacgctttccaccacctgttccgtccaggcagttctaaaaccaccactagacatgttctgtggacattcgggattgggctttgatcagtcatcagtcaaatgggtcactctgaaggaaaggtttggtggttggcattataccactgatacaaagtattagcaaagtatagttcaaattaagtgacatgaccaagagcttttctcttaaaaaagatggattttattgtaaatagtttctcaaaatatttttaactggatcatgagcatggggagagaaagtttctcagctgctatgaatttccccactgtttacttctctcatttacagtggtattgcataagattacaaaatgttaggtttta

SEQ ID NO: 32970 - DNA, 1177 bp, Mus musculus
ctctctccaccccaccaccaagttagcctattgcttgtccaacaggacagcctcagtggtccccactcccaccccaggagggcactgtgtccttgagggcagagtggagtctgagacctgttggatcagcaggtggtgttataggagctgctggaatcccagcagggctctgtaattctgtgcccacttgatttctcccctcagtgttagatagcagagttcctcctgagcaaggaagagcggaagacagcacatggttccttgcttcaggagctgccttctggtgtcccctactctctgtctccatgctttgtctgcctgggacctgtacccttctgaaccatagtgtctatctacacagcgcctgttggtctggtctctggggaacagcgggtccaaacagccaaaaccaaggcccagcagaaccatgccttcttggagcgtgaactgcagcgacggaaggagcagatgcgggcagccacagtcctgcccagcgtgcagatcaaggaggaacccctgagtgaggaggaagccgatggggctgagctggaggctgaggaagaggagcccatggacactgcacccagcacttgcctcagcaccaagttggccaatgggctgcctgctgggcgggcagtgggtggggacagcctaaatggacacccagttccaggctgtgccagcaacccggttgcctgtgaactgaaggcttttgtggaagccacctttcagagacagtttgtgctcacgctgagcgaactcaagcgcctcttcaacctgcacctggcaggcctgcccccgggccatatactcttcagtggcgtctcagaccgaatgctacaggatacggtgctggccgctggctgcaagcagatactggtgcctgtaagtaaaacctgtgtctgtcaggacagggtcaatcagagcccttcaggaggacagctgggcggtcttcgccttcttaggaatcaggcatgcggagaaatctgtgtgtcttggctccatctgtctgtcttagggacagtggctgtgagcctgcgtgtggatagggtacatgttgtgttcactagatggctatgtgagtctcagggctccctgtcctcatctgaagtgggtgtgttggttttctaccacaggaaagtaagtttgatagggccctaggcactatcaacgcctc

SEQ ID NO: 32971 - DNA, 1099 bp, Mus musculus
ctcagctgacctttatatatcccatgtttcctcacagacactttgtgtatgaccacgtgttcgctgagaagatcacttccttgcagagccaacagagccctgatgaagaagaaaatgagcacctgaaaaaggcagtgacgatgttgcaggcccagctaagtctagagaggaagaagcgagtgagcgtggaggcagagtataaagtggtgctgaaggagaacagtgagctggagcagcagctgggggccacagatgcctaccgagcccgggccctggagttggaggcagaggtggctgagatgcggcagatgctgcaggcagagcatccttttgtgaatggtgtggagaagctggtgcccgactctctgtttgttcctttcaaggagcctagccagagtctgctggaggaaatgttcctggctgctccagaagcacctagaaaaccactcaaacgaagcagcagtgagacggcgctcagcagtttggcaggggatgacatcgtgaaggaccatgaggacacttgcatcaggagggctaaggctgtgaagcagaggggcatctcccttctgcatgaagtggacactcagtacagtgccctgaaagtgaagtatgaagagctactgaagaagtgccagcaggagcaggactcactgtcacacaaggctgtgcagacctctagactactgactagggacctgacaggactggtcacgcagtctgaggcgggggccagtggctgggaacccacccctgtaagcccagagtccatcagttcccccaccactacacctccagaatacaaagcactatttaaggagatatttagttgcatcaagaaaacaaagcaggaaatagatgaacagagaacaaaatacccttctctctcctcttactcgtactgagactccagttgtaactgcttgttttcgctcacttgcctccccttcagacatgtaagtgcagtctccaaagcttgacgttgctaatgacacctgcctcgttgctttgcttagttggcaaaagcaggaaaagaggtgacagagaatgttgactccaaggtccctaggaaatctcacgatacactggccgctggttggta

SEQ ID NO: 32972 - DNA, 1249 bp, Mus musculus
cctgcttttctaagggagggctcctttaggccccacataacctctgccggccgcttattatttttatttttttcagtcaatattatcagcttgaaatgttttaggacctttaataaaatacaggtctcagctaactataaaccaacctgagtgtggctaatctcacaacgattgctcttttcctcttttaaagcatttttaaatccaatttttctgcatcttaagactcttttatacgaaattatttttttcctatcaccattgttgaatccatcttcctaaaaggtgtgtttggttcctctgcccacgctatggttagccttgagtctctgccattccctccaccttttctttgtgaatttgtttttggccatgaaagataaactatttttgaattgtatactaatttcataatgtcagaaagctttggtgctgttttctctgtgtacacgggcgttctttagagtcgtggatctcacctcctgtccatctttccccaggttgctaggaagaggctccatgtttgtgttctcaccagatcagtttcagagactgcttagaattaatccggactggaaaacccatagacttcttgatttaggtgctggagatggagaagtcacgaaaatcatgagccctcattttgaagaaatttacgccactgagctttctgaaacaatgatctggcagctccagaagaagaaatacaggtaccagttctagagggtgccaggcgtgcctgttgggcatttcttgggttttgatgtatatgtgtgttgggttttggtctagtttgtttgtagcactgggaattgaatgcaaggccagggactctacctctgcatgtatcctagtgataagaatcaggagcagttttccatggttaagaattaaacacaaatcagtgggaaaccggaaaaagggaattttccatggcagcatttttctgaagcagaggacttggcatcacagagaagatagcataagtaagagacagcttgaggtaggcagatgtgaggacatgacctcatcagtgacatgtccagatgttttatatgctttaaaaaattttggtaacatatatgtgatgtaaaatatatccctttagtcatttttaagtctgtaattaggtcagcagtcatggcacgttcgtgttatccatcttccctaagaacagtctgaaatatcatcctgcactcttccttcctctagcctgtaatcactgttgtattggcatgaatctgactac

SEQ ID NO: 32973 - DNA, 1152 bp, Mus musculus
gtgcttggtataaatgaatggcagaatacagggttccagtatgatgtcatcagctgcttaaatttgctggatcgctgtgatcagcccctgacattgttaaaagatatcagaagtgtcttggagcccacccaaggcagggtcatcctggcattggttttgccctttcatccctatgtagaaaacggtaagtgtgggcaggccagctcttctcagaatgacagtctattggtatttgcgatttttatctcatgaacacctacacatggtctagtgttgcttagttacctggaattaaagataatacagctagccatgtgtagtatcaccgtggttaatgcttattgtaatacagattttacagcattctgtacgcccctggcactgtgataactcagcctcggctgcatcagtgcctctgtatctgtgctctctgcctttcaaggcagcttgaacacttatgtataagccaagtcaagcagcacattccctcttagtctgctagtagatatctgctgaatgtcatggctgctttgttttacattttgtaactcttgtctcagactctaaaaatgatgaatgttctgttttgaagacattcatgttctagtaagtagcatttcttgaataacaggctttttaaaacatttattatcatttttagaattgtttttgtgtctgtgtgtgagtagagcatctgcagaggctggaagatagccctacgtgggtgctgggaatggaacttggggtcctttgaaggaccagtgcatactcttaaccttgaagccctttatctctccaaccgttggaatacggttttgtaaattaatggtgctgctcttcaacagtattgattgaggagtgcactggaagagacaggttctttcctgacaattagcttctgatactcactgtgaacttaataccacagtaatccatagtttaagctcaggggtttgcactttaggttatcttgaagatgatggcgctaatgctcttctgtattttaataaattaatgtacatttatataaaacttgttacgcatgctaatatttttaaagtcttttgtctttttactttcgagacagtcctcatgtagcccaggctagcctcaaacttactgtgtagccaaagatgaccttgaattttttat

SEQ ID NO: 32974 - DNA, 1235 bp, Mus musculus
cttttagtgagtcattgttcaagaatttaacttaatgtttttatttgttctagtaggtggcaagtgggagaaaccatcagaaattctggaaatcaagggacagaattgggaagagcaagtgaatagcctgcctgaggtgttcagaaaagccggctttgtcgtcgaagctttcactagactgccatacctgtgtgaaggcgacatgtacaatgactactatgttctggacgatgctgtctttgttctcagaccagtataaacacgtggaggcccaagtcctcagagtcacccctgcaaccgaccctccagaagaggagatgcatccagtgatgtgagggggacctctggggactgtcattctcagtatcatgtaggaatttaaaaagccaaaatactaattctttctttgtagtgtgtaagggagtgtttttaaaaacaaaacccaactctttgtgtatttttaatcaactctttactcagaatcacgctccaatgcaggtcactctccaattatgatggaagatattttttatacttaattgctgtagggactcattcccagacaaagcaatagtcatgatgtcatggaaccgatcaatggattgtttttaataaatgaagactggcaataaagctgtccattcaattccaaatattggttataaagtagaaccattgataactttcatgtttagaaactccttctcttactattcaaaaaatgtttttaatcatgctaataaacgtttttggagatgactctggcaccatgttcttctctcagactctgcagctttggcttcatggatgccctcagtaggagcatgatgtgaaacactcaggctgagcctggaaggaaagcaaggttcagcttgggtgtggtgcagaagcccagggaattttgacacccctagaatggcctgccttactcagatatagtgctctaggaagtgcctctcagtcagtgtacctgcttctggccacaaaacagctttgttttcctaagcttccttaattcctcaggattgaagcagtctgtggctttgactgacaggattcagcctaaatagacattcaccttcttccacttccttgaatgccatcttcccagaacttggcttatccctagatccttaactgagagtaagtatgtttgctgaagaccattaccagacacctgctagaatccaaagtgctcccaataaacccagaaacacagtgatagaggagacctc

SEQ ID NO: 32975 - DNA, 2131 bp, Mus musculus
ccaatctccttggtcattggtaagattgtgtataaaatagtattttgcaagcaggagtggattggacatgttgaacatacactggtgtatatactgtatttagcctgaagactttcctaaagtattttgttctaagaactaacctgccattttctatagattttaattttttatatcttctagtattctttcatcatcacatggagaggtgcggctttacacagtgctaactacttttcagtgcttttatagcgacttggagctgctaaggaagatttgggagcttcccacctaccggcgtcagtaagagaaagcatgtgggatgtatgatagtgtcgtacagtagattcaggtccagatccatctcacgcttatttaaaactattgtttcccatggggcaggggcagggataggagcttcatagcatatatcagaggtgtagactctccccaggccattctggagaattccctgagatccccagtatccccaagggacttggaatgcctgggcggctcccaggcttttgatgccatttagcactgcctgggctctgtgactttctcttcttgtttgcggtgagaactgaaggatgtgggtacaccatctttttgccaacagtttacggtgagaatcatcactgccatgcagggcactcaggaagagctccagttgctctggacaagaaaatgaaaaggtgtcagtccctggcttggaatcagggtgtgtgcatgtgtgtgtgcgtgtgtgtgtgtgtgtgtgtgtgtgtgcgcgtgcgtgtgcgtgtgtggtggggggctttctgacttcaaggcccgaattggatgtgtgaagtgttttatgcttggtgtgtccaggtattgttcttatttgctggtggcaggcagagtgccctgaggggtctgaattaattcacacagcctctctccagattctactctggggctgacaccgacccatgcaggagagggaaaaatgtccaggttaaaaaatatggtagaagacagtggaaagtttcctgcctagccttgcaaaccctgccctgctctggcagcaccggtgtaacccacaggcagcactgggcctcctgctcaggttcactccctctaggtcttttctgtgtagtttctggaatcctttttagtttgaaacaaatgtgaaacattttattcaaattattttggagccttttttgttgttgtttttttatgtaattaaaaagatcatgtaatacttaaccagaaatgttacctacagaggcacatgaaatttggttttagtctgtggtgagccaggcacactataccatcttcagaataatccactgtgctgtgtgtcctcatcccattgagcatcagactgcctacaaaaagtttatctgacatggtccgtattttaaggctatcaggaaaacatcagagctgggacagctttggcacagcctcccagagccgagctctctgctgctatgaactctgcagcggggactttgctaggtgctattccagactgggggccgtgtttctgcgcttgcggctctgttgggttttcctgtaggcatttgtgttgtgtagctttgctcaccaactgtgcctctcaccactggttaaaattgagttcaggcccattaccaaaatgtgtttttttgtttttgttttgttttgtttttgttttgattctcttgtgattttgcaccggcgtctatttctccagttgtcttaaaagctgcatgtcatgtcactgtacacaaaatgctttggtgtcattcacgagccaccattagtgagctctgtataagtttaattttgcagtaaaaggacggcagagtatccttcctgcaggctggaagaaagtgtatcctacattttaaattatgttaggccaagtgcatgaggtgtggcactgccttctgttatttatttgtatattttattattcaaggtgtacgcacttttaagaagcagaatttatatttttatgttgaaaacgttttatttctgagacagcagttggttgtatagtatatagttggaattaagagaaaactggaaaatgtaacaaaacataataaatttattacatgatgccttcttcaagacatatttgtcttttctctcccttgccaaacca

SEQ ID NO: 32976 - DNA, 4090 bp, Mus musculus
ttcccttctgggaagagcaggacttctgaccggagcttgagtagagaaggctccagacaaagcttaggctctgacagagccagcgtcacctccacctccacctccaaacccagctcccctcgggtgaatcaggccagagcaggggacaacagagtggatggcaagcacgtccggagctcctccatggccagcctgcgttcacctagcacaagtgtgcgctctgggttgaagagggacagcaagtctgaggataagggactgtccttctttaagtcagccttgagacagaaagaaacccggaggtcaactgatcttggcaagacaaccttgctatccaaaaaggctggtgggagctctgtcaagtcagtcagtaagaacactgcagatgacaagacagagaaaggccatcagcctcccggctcacagcagccaaacacaaatgcagttggaaaggaacaacttgtctctaaggaccctgctaaacattccttgctatctgctcgcagatccaagtcttcccagctagattctggagctcccttgtctcccagtagcaggtcgaccactgagaaaggctccaaaaagctgtcttctagcatgcaaacctctgcacggccttctcaaaaacctcagtgaccttctgcaatcgggtgttttatctgtacagatgtttatttagttagaacccctcctctcccacaccaaagccctctatgcttttattttgtattttttggggtcatgtgcctgactgtgtgagagtatgagtgtgtgtgtggagttcaaattgttaaaagtgtcgccttattctgccattgaaccaaataacagccataggcaaagcattgataccaagctaactggaataattgtagaaaataatctgaatagtccctttagcaatcatccctatttctttccagaaaactcttaatgactttattggacattagggtttggaaacttgtgaaccaattacgctatcagtgtatagacagatgaacagtcagccttgggtttcatctgagcagaatttatcttcatgtggattgttgagtggcatcagaagcttaataaaaacaaacaaacaaaaactgatgctaacaacaaaataaactgagggaaaatttgctttctgcactttggccccatctaccagtctttgtaagggcaatatcttaacactaatgtttctcaggtatatatactcagctagtccagggtggatgcacgttactaatagatggattcaagaggaaggtgacatggggtggcgactatcctgctgccacaggtagaagctttacaggtaggcataaaatctttgctactttcatatctgaagtgataacctgtcttgactctttatatatgttctaagagctgacaaattttgaatagtcagaaagccagtcactaactaatttttttttttcattctcagtttgctagctaaggccattggaattttgaactgtagcagagtagttaatgcctttgaaagattcccagagaaaaaattttattccaaactgaagcctgagttggtaccattttccttccctgatgctgcttgtttctgttagaaattgaggatctcatactgcctcgtgtgtgcatgctcatgccttgtcttgttgcttggaaaagaaagaagttgcctcttgccaagagctactgatggtctgttgatgtggggtgaggctgagcgctatacatgcagtgtggatcctggtgccagtcttccttttgactgctttccagtagcttatttatgtctactctgctctgaagaggtaatctctgacccagcattcagaaacagagtctgaatgcatgtgttcccctggcatgtagttacaaattacattcttatgtatgagaagggcacctcactgaattctcacagataaagaagacacttttccaaggcttgtggaaatctcttagaaatactttgcagctcagtttttttcatatcctctttatttatttattttttagtatcaagagaatcatggttgtgattttcagaatagcgtttgtcattttgtcattagatatagcatgtgagtttgtagttactaaattctaaggctcgtggttcccaggcctcactcttcagtatttctgtgaagggactgcagtgcatatgtgcatgcagttttgattttttttattgttcatcttttaggaatacctcttgggaaatatttccagtaggttgcttaagtttattttgctgctaatgttaacattagctggtagcttgcaggttgagggtggctggaactttgagcttttgtagtatttgaggcttagttgttcagccttttgcacattaccacaatgctgtctacccagttcagtgtgtgtaagccagtacccacaacactcagtcctatactggctgcttttatactcctcctgtccccatgccccattgtggcttcccaaagcattaaagctctctctgtcctgccttggtgtgactgaggtgactgctaccttacatgtcatcatttattcagtggcacaaggtgagccctgcttgagtttagccaccaatcttgttttatttttattttctgaaaaagcacgaaatgttgagaccattagtatcaggaattgagcatttatgtgctttgagctcctgaaacagtcttagaattatagtatgataaaacaaaggactttaataacaagctgttttgccataattaagatgaatagaaactagtttaattttcacagtactatatcattttatttttgaaggcagttaggagtggatcctctttttcctgcatatcatgtttttaaaaacaaaacagaaaaattctctactggtctttacttttccatgggatctagaaatacattttttaataatataataaaatctaaaagctacatgaatatggagtttagtgcttatttcatagttagttcaatagaaaaaaatcaggaagtgtcatggcattatctaggctgtgaaactgttatgcttgtgaggttggttaacggtaaaatctaattcccgactactgggatatatttaagacacagaaaatactactttgaaggtgctgcctacagtgaaatggcttatgagaatatcacttagttcattctgttctgaggcagggttagggacttggttattaaaatctttctcccagtgatttgggcacagtgaacatgtgtactttggggccaaactcagatggtaggtcagagtttctgcttagcctggtagggcagtcattcccaggagacacacagcaccaaccaacagcgcgatgaattggtaatgttgttttgctgttaaataaaaatcctttttattcttgctctcttttcctgtaaacattgtgtgcatgaggctacatcattccttaaatcacccttccaccttgctttaacaactcctcagatgatgtggaagggcaaagctcatatgctcctgtcacttgagaccctggccaacctcatttgtattttttcctgctggcatgaaaagcagcttgagggtaagtagtgctgtgccagacctaaagagctgtgcggtgccacagttgtgcagccatcaggttgccttgatcacatggaatcctcctttaatcattcatccatttgggcccactttgcatacagaggcaagcagaaagcttgagcacttgtgtcctggaagataccaagtcagtgtcaaggagtgatcgttgtcaacggaaacaagctggtaaatcctgtccagctaacgtccggagagctaaagtgtccttgctcatcgcgggttccgactgaactgtctgacctgtgtactggttaagatgcagtacctagtccttcatgtcacattaaccctctgtatggatggatgtggagatcattgagggatgggaggcattgtcagtccctctaaacttactataataaaactaatagggttggtatgtaaagggagcagtagtggcagtttaagggaatgtggattaaagagttatgagcaaagctcatttcaaatatcctctgtgagtagatggacatgtgacatcacgtttcattttgacattactaactagctgaa

SEQ ID NO: 32977 - DNA, 1099 bp, Mus musculus
aagttctttaccctgccttttgacagtgagactatgcaatgttggataatgcaatgttggataatgtttcgtatgcattgtgaacatacctggtctctactcactagatgctgttggccccaccccacccatttgtgataatcactcgttaattgtctctagcagaaaaaaaaaatgtccctggtgagacttacttatacttagaagtataatgagttttttgagatgaaactgttataaaattgaaatatttatgaatttcttagaacatcctgcctgggtataagttgaaatttgaatttgttttttttttttttgtttttttttttgttttttgttttttgttaatgtgggcaatttaaaatgctgttgaattaattacataaataaaatataaaggatggtatctgtggatagagtacctggtgcagccttgctggtactgacggtgagctctttttggcagcctactgtaagaactccgtggatggtctctggtattgcttcgatgatagcgatgtgcagcagctgtcagaagatgaggtgtgcacgcagacagcttacatccttttctaccagaggcggacagctatcccatcatggtcagccaatagctcagtggcaggtaacctagttcttggatgttttttcacagagcaggaggttgtaattcatggtccaaaagatgtctcagaaagctttattattgaaagcttaacgagattaatttttataattccatttaatctgggctctgatataatttcagtcaaggaagtttgggtggactctgaactgccatggaccagcagcaggtcagagttcacatagaggtaggcagagcctagccaagtcattcacagtgtttatgtgttgggtaagtgcctggaggaatagtgttaactgcctgaggtgctgttctgacatctgtttagtttatcttggaacatgtcccatctgagccacatgatcatctatctatatggatgtggtcatcgcacctactcaggggggctgatgtttgttttaacattgtgaaggtttgtgaaagcattctgtaaacagtaaaggaccattagaaggaaagagctctttctct

SEQ ID NO: 32978 - DNA, 1178 bp, Mus musculus
ttagaattctgaacctgtatcttaaaactttatatcctattgtgtctgtttggatggtacacgctcctcacacttatgtcccaaactgaacttattatctttctcttccaatatttcctatcttggaaagttgtaccatcattcattgagcattgtaagtcagaaatttgggagtaaaaaatctctctcagatttctctgctgccctctataagaatttatgggaactatagaatatctttcaaagtagctttatcaccgaagtgtcacctgagtgagaacagatgaatgtgtttcaggagaaggacttaggttttgtgtgtgtgtgtgtgtgtgtgtgtgtgtgtgtgtgtgtgtttaaaactagtcaagatagccattaatctcactttgaaataagttccttgggtgataacataaacataaaagatgtcacatgtattaatgatatcaacaaaaatgctgatgcttagatgcttatattctctggagatatagacaggttccctgttttcatgaagttggcatcctagttaggacaggctaaccccaaacaagtaaatgcatttaacctcaagtagttgtcaccatgtagaagatactggcaccaactaaaatgatagggtgtgaatgagtgagggttctgggtctacatgtgaaccagagtatgggatggtgccccaaggagaaggagtgagctgtggtagcatctggggcgaggtcatgtgcagaggaggccccagtgcagattaggagtatgatgtgtttaaggtacagaatggattcttcatccctactttcaaaaacaattttaaagcatttagcctcaatacccctttgtggtaccaggcttttaagagtggagtcattacttgtgataggaagctatttgattcatggggcctttcaggcaaatagcttcagtgttactgcagtgggaaaaccactagttggtcattaggaatgattttcttggtatttttaccactctgtgtcagcatcagagttcatctttatctagatttgtcattgcattgacattgattcagcagcttctgtttcctacttattggctgtttaggccatgaaggtaagtacatttctttcttgccaccagtctattgctgtcttagttaggatttctattgctgtggtaaccaccatgaccatgaacaactt

SEQ ID NO: 32979 - DNA, 2277 bp, Mus musculus
gtatcctcgatatgatagataaagtagttcatatcatgggaggattatttccccagggagcttttgaagtttgtgacaagtcttttctgtattcaaaatttctagttttagaaacttggtggattattctgatttaaggtccttttgttcctgaacactgtactgtcatagaactatgtagatatgactgacttactatatgggaacagcctaaaaaccaggcactatgttactagtccttgtatcctaacatccgatacagtgttctctacatgtggtagcagatgtttagtagttagggacataaagaagttgaataaaatatgaagcaaactgtggattaagcatcaagataaaggttgaaacaacctagggaagagctggcctgtctctcaacaggctagagagcgataaacacggtgtgcagtagtctgtttgagggaatgagtccatgtgcactgtgttctgtttactttagccagtatgttacagagcatctaggttccatatacagcttataaaggactttgagtgtttgtgacattttaggcttaactttactcaagaattggtacttttggcctgtgacttttccttttttttttttttttaagccaccatcagagacagatatgatgcctgagggaccttttcctgtgtgtagcacttttgtacaagaactttttcaagcccagtacaggtaggagcaaatgacatgttccctcttgttttgtctgcctgatgtagttctatgttatgttaatgtgaatgttttacatttttgttttcaaagatcttctttgacatgtcctcattgtcagaaacagagcaacacttttgacccttttctgtgcatttctttgccaattcctctaccccatacaaggtaagaatatatgtgtaaaattagcagtctgctgtgatagggtacttcttcctctgtagtctccagttaaggctttttacgtatttagttaagtaataggtataatagtaatgaacacagaccttgttaaattcttgaagctaagtgtctgtcggggtgtgcaagctgagcaggcacctgatagaggcaagcccatgctatagtctttttaaactggttgtcctagagtctctggagaccctgcttgtacttacttcagactttaaagagtttgcagaaactagacagttttgaaggaaaagacagaaccaattatgactatgttatttctgaaaaatatttttatgccatagctttttcaaagttctttcaacttgtttagtagttctgttcccatttggcttccagataaagggaagtcccctatccctcatttttagatagagtcctgtgtatcacaggctggcctcaaactctgtgtagttgagagtgaccttgaactctcactctcctgacgtcaggttccaggtgctgcagtggcaggcaaatgacacagttctggtttatgtcatattgggggaaggcagggctgtgcatgctagggacctgagctgtgtcccaggcctcattttagtttttgtgttgatttcagatcaggtttgtttcacttcttctatatttgagctaaaataaataactaatgggaagatctgactttgatctgcacaggcctctctatgtcactgtagtgtatcaagggaaatgttcccactgcatgaggatcggtgtggctgtgcctctgtctgggactgttgccagacttcgggaagctgtatccatggagacaaagatccccactgatcaggtaataacctgctaagaccaaattacacatgagccattaaagtgttgcattctgcttatatggattttttttgccccattttctgctaaacatgtttgaaatttaaaacgagttacatttagtgttgagaggcagatggatggaggaaatccagactcaaagaatctaatgtatagaagactgtttcctgcttcaattaattgtgcatataaaagaaaaacctgcttttatgtaagaccttatggctttgtaaagtatgattacttagcctttcatactgctcctgtagcatttaacagaggcttgggaacccctctgcccgttttggtggtgagagtgggcatctctccagtacggtgctctgcatatagcacatgcttgtcgggcttcttctctgacccctcttgtggggtttggacccaagaccttactcctgtgagcaagtgcactgtacctgaggtatatctatctgccagcctgttttgtttccttacttaaagatcagataggggaaaattgggtttcc

SEQ ID NO: 32980 - DNA, 1129 bp, Mus musculus
aagtcccccataccctcccacccgactcccctacccacccactcccacttcttggccctggcgttcccctatactgaggtacacaaagtttgcatgaccaatgggcctctctttccactgatggccgacttcttacacatgcctctgcctcctgagtgttgggattaaagtgtgaaccaccacatcatttgtgactactaatactgtaacgtggattttgtagggaataacacccataattacttggagcccaatacagtatatgcactcagtaaatcttaacagttaatattgtcttaagtgatacacagttatgaaggggcctctggagcttctcataagattcggtgatttaaaagtgaaatcagagcttttccagcctgttcccatttggtctcagtctcttttcactttagatgtagagtcactaaaaatattacacttgacaaagacttggaatgctcaagttgtgtcatagactaatgatgttacatctctgctgttgtcaggagatgagctttgtttgtctggcttgatttggcagtttcccagatgactgtgatgtgtagccaggcttggtaagctgtgatttagatctttctaaggaaggagagtaaaggttagaggttgaagtggagactttaatatgtcagaatgtaaagaccttagagtttgtcttccagggtctgttgccagatttgtattggtaggctaaagggcatcctccacagaggaggtgagggtgagggagtagatgaaggacacagtactgtttgagcacggccgcattctggaccctgtgtgacatactgctttgtaagtactttgcctttttcactgtttccttgcccttctgatgtgtagcactcacccattctcacaaataacccctaaggcttagttaacttagtagttatcccaaaaatcagattaaaaaaaagacaaatgcttagttatttctagcattagtttagaaaactaattttactttagatactctctgtgcatttagatgctcatatttcatatatttctttaaaattgtagatacaagttgaatatcctttatctgaaatacctagaatgagaagtgtttagagtttcagatttggttttggatttagaaata

SEQ ID NO: 32981 - DNA, 1148 bp, Mus musculus
ggtggacggtctctttatggatgaaaaccaggcttgagaactgtccagcaagtttgctgtatctcagctcagagacaaacttgtctatgacactatggcagtgggggttcccctcctggctagtctttgaagctgaccttgcctttgagttttaggctccctgggtccagggccaagaggacttcccagcaagtggagtgagtcacctaagctgctaggcatggcccacaggtgcaagaggtctgggggcatctggttcagtcatgccaccagataggatcttcagctcttctgatgggtgcagtgctctgggggtgagctgtgcactgaggccctcatgatgtttcctcaaagtctccccgactctgcaccttggcccaccactagctgctgcatttgcgcttgacaaacacacttcttagagcaattctgtaagctcattcatccatgcttctgaggttaagttaaaccaactctgtttatctttattgctaatctgatttatgtctgttgtaatcggtccatttataatcacaagaactaaggttacattttccatccccgtactttctcaggctgtgtggattcccgggactcacacaggtcatacatactctggctttcagccaagggcaactgacccaacccctctgggaatccgcgctctgtccatcactcgtgtttagatgtgaggccatggctctttccctcctcctcagtccccaagggatggtcacaagttaggttttcccaaattacaaatccataaactcatattggggcagagtcacatggaaggtgacgtcacccctcacgggttcagtgttttggagcttgtgaatctgtctgctagccttttcccaggtcaggtttgggggccactgttgaagaaactgtccacttagcaatctttcagtacttttaactagatgatgacctcgtttgggggcttacctgcctttgcctttccctgtctcaggagaagggctccagtaaccacaacctactgtctgcgtcacgcacagccctgacccggctgaaccagcaggcccaccagctggctttcgactcggtcttcttgcgcatcaaacagcagctgctgctcgtttccaggatggatgtgagttccctccgactgcaatgtctgt

SEQ ID NO: 32982 - DNA, 3012 bp, Mus musculus
cttgcgccagtgtggggactttgagcagcagctggcaaacaggtaggaggggtccctgctctccttgcccgtcattccctggggctcctggctgggaggtatttgctccagtgtatgggcagactggaagccacagggctggaggactgtctgtacctagatacaaggtgtcattactgtcatcattaaacatttactgaacacctaaaagggcaaggcctatcctacttggcagtggtcacataaatctggttagatatggaggcgtcagtctgatgaggaagcagtacaccttgtttcccagttatatgtgggttaggcttctgcttatgctcagttattgggctcaaaataaatttccccatagaaagcatgttacaagtggtgactaagaccctaagacaagcccagaggatggagattaacccaggcatccttgcagtccaggccctgggtaaaattctgagtgccaaggggtgcaagtcaaaggagaattttggggactgctctaagaaaaacctattctcccctcctgcctctcctctaacgctgccagtgcttttcctgtgatccaaggttgcaccattcagacatttgcctaccatgcttcccagtttccttattcatccatcctttaggaattaagaagcctggtgtggggggtggttgttgtttaactctgtgtgtgtgctcacgtgagtgcgtgtgtttgtgtgtgtgtgtgtgtgtgtgtgtgtgtgtgtgtatgtgtgtgtgtgtgtgttttagacaggtccttaatatgttctataggcccagggtggtctagaactcactgtacagaccaggctagccttgaactcacagagagccacttgcctctacctcccaagtgctagggttagattaaaatcatacactatcatgcccagctgagaggtgtattgattttaactttgttgccattagaatgtgagtgttgtttctacgcttccctctgtcacagtgtccttacactgacattgctccaggtatatttgttaggcatctctcctcttcaggacagtaactttccttaatcttttgccttccaaagggtgaggaaggctccggttaggaagttaaatgaggagtgcccggctatgggatgagcttgtagttgcagtttgcagcctggagagaagctgaaaggctggctctgcttcatcgagagaccacacagcctctgaaagaggtgatgtcattctggaaacactgagcctggggacagtcaccatctgtgttcccatctgggccacagcttggtgtgtggcaggcaccctgtaaagcttatcttatctccccatctgtctcgccttagaacccagactctagcagagccactccccaggggcaggcactgggcaaggcagagcagccactctggataaaactgacatcagctgtcactcttaagatctttttgcaaaagagttatgggctgtgtaaatcagagctgggtgtcacctcttatcctcagtgacttgggtgagatgctatggcttctctttaccttcctggtgttctccatgttcctataaaacactggcacaaaaatccctgatatgcaatgatcctttttgtgatgctttggctgcactctgatacattaaggagaaaacatattttaaattttggccttttctagactagccttgttcaggccatgatcctttcccacaactcagggtggtggcggtggcagctgacccacagttccccaccagcccctccctctgtgactgctaagctaaggtccaggttaaggactttaggatggtctccacgtgggcgggtttattggatctcagcccattgtaagtctcggtgtgcctgcattgttaaggtccctgtagaatacttcaagtgatagttgggtttcattgtaaatggacaggcttccacggctgaggagagagattgcttgtcctgaagggaaacgaattgaggcgctaggtgagattataccgttccctcctcagtgtacacccgctgcatgcttcaggtgcagtggtatgtgttagcccttcccattaatctcggagcttgagagtcgggactgtacctcttcggtgtccccagctgagccacagaggctgttacagtactgggcagtcaagtcttcatctcactgaggcatcactgggacatcactgggatgctgtgtggagatgaggctaagatcagatgccgttagttctttggagttagaattgtgcttatctggacactttaaactcgtctctgctacagaaagcgtttctagcatgccttgttttctttatggcaagctgacatgggcaggctgggttccccaagtgtggcctctgatccttcacaaacagctgttaaactctcttgtgtgtcaggcactgtgctgggagctggggctgggtgatgaagccactttgttctgtcctcacatctgcaggagacttgagagaacctgtggtaggtgcaaggcagaggcaggaggttgccagcagggaagggacaagtgctctgagggaaggggagcctgaggacccccaggggacacactcaggatggagtgagagtgagcctgtgatgtgtgtgtgtgtgtgtgtgtgtgtgtgtgtgggcagtggatgagcagagacaacgtgaggctgtgagggatcggctctggctaccaggctttcgcatgttttagttttatcctggagagttgaggttgccttttagaaagacggctctgttagctaggtggatgaggtggagtaaggaaggatgggggagagaagacagagtgcttcttcaatccagacctggcagtgaagtctaagggaggtagtcagggatgggcctcagatagacaaaaaagcaaccagatggctggcgggcttaagcaactgtcttgaggctctggcggaggtgggagcagcttgaacgtgcaggggtttctgaggaagcccccatctgcagtgctgcccagcaagctgtggggacactttatgggttgtttcttctctt

SEQ ID NO: 32983 - DNA, 2875 bp, Mus musculus
ctagacccctctggaggaggtatcctgtcttcctgtcggtctctaaattactctttgggactgctggggtgggctgggcttccaggatacatgcctggcactggtatttgtagttctaaagagactaagccagggtattcatggcattccattactctacctcttcatttgggggaattatgtaaacacaccgagccaagtatagtggtgtacagtaataccagcactccagaggaagagataggcctgatttacacagcaagttccaggctagcctaggccacacagtagaccctgtctcaaaaataaataagctgtaagctgttccttggagagtcttaagttgggtggaagcttttactataggcttgactctttttcctactgattgatttaacatcttagcctctcttctgtcctaggaacctatccggttgcggtataagctgactttcaaccaaggtgggcagccgttcagtgaagtaggagaggtgaaagactttccagacctggctgtcttgagcaccgcctgacttttcaaccaagactcttcagtcacgcttaggccagcgtccttttactgtctggtcgggacttgttgtaatgtagtgcagagtgccaaggattctctcctgatgttaggccttgattgccaatgtgtctgttgatcatgtatgtgtgggtgcgtgtgtgttactggggtgctgggggaggagggagagctgggcttgggatttgggcagtatgggggatgctgaccacctctgagatcatctctgctgcactcatacctgcttctgcatgttggttgacaatgttgcccctgcctcgagttggagttttataagccaaagttttttccatgtattgttaatcttttcattcatccactctgtgccttgtcagcctttgaaagtcttagttgctcccaggctgctattctcagggaccttagaaagggacctggttggtcttgcgacagagagtgtcttctggggcacactcttccaagaatggccttgtcttcatttttcattagcaaatgctgcttgcagatattcagtaagaccttctaaatggaatgtttgttgtactggttcaggcaaggggcttgccatgaaaccaggagaccacacttgttgggccaatcatgtccttcactacagtgccttagatactcccttagacggaccctcttgaggccttgctcaggccttgggttctgtgggttgggcagcctgtctgggcccttactcaggacccacaatgtcatcttcattctttctgttcacaaacatctcagagctctttcattgtgaccctgtgttcgttgttgtgaatcatagttaaggggggccagccctgagccctcacaatccaaggtggggagctgcgatgcaggtagagagccatgtggtgactaagtacagaacatcattgaataaatactgtgttcagatctgcctggtgttgagtccacaggggatgcatttagaggggacaggctggcggggaatggttttctgtcaacaagtgaggacatgatgagcagtgttctgacgagctgaaggagctggagaagaggggtgggtgtttgcctcaggtgtccccagaaaggaaactcaagctactggttgactcgagagcacctactatgtgctgggttctttggcatgcatgcttcaacaagttctgcttggctgggtccatgggagaaggaaccctgaggtctgaaatgggtgctgagggctggaaagtcctggcatccagtcttgcgggttctgcctcagaaactggagggccatctctcaattatgacatgttcatctagttggatatccaacaataattttctttaggtgtatattaatattgataatttcagtagatttttaggatagcttctggctgctgtttttgtttgtttttgagacagtcactgtagccctggctggcctggaattcaccatgtagaccaagctggcctcacactcacagtgatccactgcctctgcctcctgagtgctgggattaaaggtctgcgctacaatgactgactttaaaaaaaaaaaaaataggtctcatgtagcccaagctgacctcaaactcactgtggaaactgaaagagagtgaccttcaacttctgatcctcctgcctccaactcatgtgtaccaagtcctgacaagatggaaccccaagcctgtgcatgctaggcaagcacttgtccaactgagctgcatccccagccccctggttttttgttgtctcaagctatagtccaacctgacctggaactcaaataccatgttcaaagaaacatgatatagtagccaatatacactacacacttgtggaaacaggctagagcagggcatccaaggttttttgcctttaagttcccaggaacacgctcctcacagccctgttcccagatgcagcttcaatatcacagttgccaatgcactgtcagtcacaggagggagccgggcgggcatggtggtgcacgcctttaatcccagcactctggaggcagaggcaggcagatttctgagtttgaggccagcctggtctacagagtgagttctaggacagccagggctacacagagaaaccctgtctctggaaaccaaaacaaacaacaacaacaaaaacagttacaggaggaaaaggggaaatgccaaggctttctggaaacttcccatgatgtctgccttcacatcttgtcctgtatgggtatttggccacacctagctgcaaaccacactgggaaggtatggatgttgtgtgcagtgcaacacagtataaacttggggtctagttaccatggaaggagagattcgatagtatggtacaaaattagcaagcagtcttccc

SEQ ID NO: 32984 - DNA, 1197 bp, Mus musculus
aaatgtttcctttctcttcctctgttattcccatgcccaccagccagctcattactattacacccccagatatcatttaggggatataatcctcccatcttccatcccattagaaaccaagtcgtctttcctgatactcccagcacccacattccagtgtatggcttggtagcataatgcacagtagccccagtgtggggctattggtcatgctaatcactgtgctcccactctgctggggggacaattacagctttacccactcttgttcactcctcagcttctgacaagacttctcaagagtaaccaccctgaggatcttcaggctgcaaaccggctgatcaagaatttggtcaaggaagtaggcatttctgcagttggcgctgtagatctggcatttgacagggctgatatgatagtgtgtgtggatgtgtgttaaggtgtgaagaacagctagcttggagaagagatgtcctcctcatgctgaatgggaccagcaggatggtgattagatttgagactccttgcagagcttcccggcttcttttatccatgggacgaagcttttggtgttaacagagttaggtttgggagtctgttccagaaggattgagtctgaatgtacagttgaagagtccccaggtccagagacgatattgtcacctgcaggaattctgggcgagcacctccgctcacttaagtgttcatgacttcctgaactcccagcatgcactgcctttccctttctggtgtttagttaggagttacccaggcaactcctcttacttcttctgtccatttggtttccctcaaaggaacaagagaagtctgaaaaggtgtccaggcgagtcagtgcagtagaggaagtccgcagccacgtgagggtgcttcgggagatgctgagcatgtaccgaaggccaggtcatgccctgcccgaccagcaggccctgcaggtaatctccagttgtgacctaagactgcacctactgttataagcatgatgtattgcacccatgtgttctgtggctgccattctggtctggagagtcaggtttctctgttcctttgttctccctccctccctcctatgtccaccagccactgatacattgtttatcttttattctctaagtagaatggtccttgttttacattctttcatgggcttattgaccacttttgttgcttctctagagg

SEQ ID NO: 32985 - DNA, 3698 bp, Mus musculus
ggtggaaattaataaatccaagtttggaacatgtgtggaatactcttatactcttaagtctgtttgagagtagacctaccagcaatgctgagacggaatcatcaaaagctttctggttgtttccttctttgcttattttctttcttttttcctttctttctttttttttttttcttttcctttcttttttttacttttatttttcctagaagtgacttcaactgaaatattgatgtctttggttgcaaacatttggactgcattgtgatgagtctggttggttttgttttgtttttgtttttttctttggtattaaaattgtatgcaaaatgggggtggtgagtaagccatatatttttgtgtgtgtgctcattgattcagatagttttgttttgtttttttattatttccctatgatttcgttttaatcccaaagatgccagtttctcttttggtacctcattttcacctctttgccaggctctcttccatgtgctgctgcttgggaatggacatgggaagtaacagctgtggtcttggtgtaggggttcccacctcactgtggtggtcttcgaacagtagagtatctctcacttgattcctgtgtaccctttggatccctgttctgaggcgttccactgctggtttgcttgttgacagccttcctttagcttgactttaaagccctgcctatcaccacagcctaggatttgctgctccaaggccccctgctctgaggagccggcttgccatatagccacacgtcatacactttattttttgggaagcttcccagaactccttaagcagtccaatggttgtttgaattatgcttctccattcggtccttctgctcatgcgttcagttcaagtgtcctttatcccaggttcagagatgctgcctttctcatggaagacgtctgacccagtgggtcagcaagtggtattccaacaacagaatgggataagttgctttcaggaccagcttgctctcctggttttagccctgaccttctgtgtacatgtgaactgctgtcttttctgtaagccttgattgactgaaaggagggacagtctcttggtggatgatccttgtgctgtttgctgtttctctgctgctgtctttgcaattctcctctcactggtcgcaggctctcatagtaaggtttggtgagaaacctcccagcgtcacactttggactcttaagctgttacccgccctcatcctgtgaaatgtattcgcatgtattgcctaagatgactattccttgtgagccaattaatgacaatatttatgcccttcccttctaagctgtagtttgggaatccagcccacatagacagcctcttgctttttgtggtgtattcagtgccaagttatgcatctggacaggaaaaactactctgctttttgggcgcataagtaacgtgtgaagtacagcgtccaagaaactgcctgtgttgcacctcagtgatagttgtggattttctgttcttattggcctgcagttcctggagaaggtgcactttgctccttgtcccagcctcctcctgcacttggcaggcctatcaaggaagtgaccaagtggcaggtagagcatcttcttggcttgaatactgtcatttgtttgccaatgtctctgagacctgtcttgacagtgccacatacctagttttggtctctgtgatcgggcctctggtgttcccaccttggctctgaggcccatcctgccagccctgttttctgtgtgggtcccagtgctcttcaccgcctcctcccagtactcatgccctgccattatccccctgctgcccaagggccaaactgcttctcacgcaggccggtgtcatttcaagaggaccaaagcctctgtgagcctttttattttaagtaaaatggtgctttttccttacttggagatattctctataaataatgtaaatgacacctttcatatggagccgttttgagtattgctttccagagcttgctgaatctgcttgagctctggctcctgactctgtcagtatggaaggctttgccagaagctcttagaagacagacagtgccagaagccctgggaataagtgtttagatctgtctgggtcacagcagtatttgctattttgtcactcagtcccgtgaacagtctttatatatttcttaacatgtgggatatactgactaaatctgtgtgagcattggaatactcttccctttaggtagcatcctagtatgttttttcctcaggattatttctgtacaattctttcagtcagatgagagggcacgcaggagaaggcttctggtggtatcacatgaggctgggtaagagagtcctactcacagcaaggctcctctgcttgtcatcatgtagccactgaaaaggctgttctcccatctgcaagtggcactggtggcccttctgtaggctgccatcacaggcatcatgccttccttttcctccctgaggtgacttggcagaaaaatgtgatcacataactgctgctgagcctgggtccctcagctcagagctcttagactctgagttgcaggactcttggtaagaagtattttaatccatgatgggcctttgcaggtagctttggctcttaaaatgaagtttgactgggctaaggattactttctttgcatcctgtagacatagtaggggcctgcctggtaaggtcctcagtagctccttagttgctgctttcccttatgagggccaaagagatgaactttgctacattgccaggtctcagaaaagtcgccatatctcacccagaagggaatttttcctctttaatgtgcctggaggagcattgtgagctattgcagttggcctgcccttttctttgctaggagccaagaagggagggaatagatagatgtatgccaaggttgggcttttcacccatctgccaactttctcttgcttcttgctaccattcaggcctgttcccttggaaaaggatggtccctctgtctttaaactttgtaataaagttaacttccagtcaggatcagacccgtttccttcttcataggcctagaagtagacaggagcctctagtgtgcaaatcagctggtggcttagctgccagggtgggtggctctgcttccttggtgtctgagaaccttccttacctttcctacagacttctgcagaggtatctgacaatatgtaagtactatgtttccttgtggtgtacactctgttcttgtttgtttttaaatcaaaacgcctgtttgggaggagatgaacgtatttagtctattagatttgcgctgctggatttttttttttttaaatatgtaatcttgactagctgttgtattgtttatcctgtaagattagtctatcaattaaagtttgataattaattgtgtctctctttccttccgattcttaatgcgcctatctatcctgggggcttaccaacatttagaactgggccgcgagccatcttttgtcagctgtggtctgacttgtatggtactgtgtaatatatacaagtttattctctgaacagctgacaggagatttgattgagcctgaagtatcagagtaatgagcttgccaatcagccacccttttgcttgggcagccctctgccatgcatgcttctagttagaggaaactacctccccaccctctctgtcctaactgggaatgctgtacccttgccagcca

SEQ ID NO: 32986 - DNA, 1198 bp, Mus musculus
accctccagcacttgttacaggaattggagagggtatattaattccgccatctggcaaatcagaaaggggaattgatacacttgtgagaggaaatactgtctccgcggaggctgcagttccttcatgtactgcgtcaaacagcaatcacagtcagcaccttgagcatacacctcctaaaagtggctgcaaaattactactcagggcccggcttcatccacaaacctggtggcacaagaccaaaaaatgactatatttacagtaaactcagtagtatataaagctgtgcgtgcccatggtcagctgccaggaagtcccaattcttgttctgtaaatgatctcacgcatagtaacttgccagcaaatagtaccccaaactctaaatctttaaaatctcccagtaacactgttgatgagagaaatgaacctcttcaggaagatgaaattcttggtccatctaagaacttcaacctggcagcagtctctcctccttccacagaaagtcaaatacattcttgtactatgcttgaaggccttctgtttcctgcagaatactatgttagaacaacccgtcgtatgtcagattgtcagagaaaaatagctctggaagctgtaattcaaagtcatttgggtgtcaaaaagaaagagcttaaaaagaaaaccaaagctactaaggcggtcgtcctctccagtgaagacactgaccagagtgaaagtggcatgctggacacgagcacgggacagtccagttcaggaagcctctctcagaaactgctctcaccagctgaggtcagctctcctccaggacctgctggaaaggccaccacaccgccacctggtagaggacacagagggaaacgaaaatcagcccgcacctccacactgggtcactgccagctgctttttcctccttgtgccgcactggctgttaacaggtccaagggcaaattcaccaagcataaatgtcagaacagaggcgtggttattcatggtaagagccgaaggcgagtcagattgcgtttgatgtgacagctcatcatcaccgtgtacctgtaaattctgtacagtgttaacttactgaatcatcactgccctattcaaggcagcgatcaccctcatcttcagttgaggaaagtaaggcagagggagggtacagtgtggcaccgcaggtcagtggtgtgcttgaaaatctcatagca

SEQ ID NO: 32987 - DNA, 1193 bp, Mus musculus
ttcttttgattcatctgtacccagtatcactgctttggtggattgagtttcactgtaggaatggcaggacagttctttcctcaggataaagataaggctcagtggggctcagtggggatgagaagcccttgtgtggaacaacccacagcagtcagagatgccctctctctttggatcttgtaagcaagttctgacctcctccagctggactgagagctgtagtgtttggttcccaaacaaactcagacctttccgaagatgtatgtacccagcaaccacatggcagctcacaatttcccataattccaattccaaggcatcagaagatgtatgtagtcaacagtcttgtcagtctgaaggaccacaaagttagatcctcgatagagagtgcaaaagtctttagactttgcacaaatagtagggttactggcctccctggcttccttgcttgactgggtctctcttttctcaggactcttctcaggggagctcccagagtgcacacaggagctgatgattgacgtcaccaaaagctactaccagaagtttctacccctaacacaagtctaatgtctctgcttcatatctttaattcttttgaactcttaagacgaacctggagataaagagagccgccagtgactacaagagctgtcctgtttttgacaacttctactctcccgttgttggctttttttttttttcaattttccatggctctgagcatttaagaatttaataaggctagagagatggctcagtggttaagcatgctggttgctcttccagaggacccaggttcagttcccagcactcacatggccctacgaccatctattactccagttccagaggatctgatgggtttctggcttccatggtcaccagacatatatgtggtaaagacatatgcagccaaaatatcctacacacctaatctgtcaacagttgccataccatcgtctgaggaggacagaaaggtctgttcctgacactctagccctgtggttctgcagatggttggaacctgcctggcttgggcctacagagcaacagcaccctcccagcatggagtcacatgacccaagtactgctcagaaccctgtcctatccccaggctacacagtccacacagatgacaggccactttcctgctgctaagatgggaccaataaccacaatttcttgtgccc

SEQ ID NO: 32988 - DNA, 1303 bp, Mus musculus
gcaattacatgagtgagcacctgctgaaggcaggggccaacatcacaccccgggaaggcgacgagctggcccggctgccctacctacgaacgtggttccgcacacgcagcgccatcatcctgcacctcagcaacggcaccgtgcagattaacttcttccaggtgtgctggggcaggacgctgtgcctgggggtggcagtgctgtctccctcaccagcggggcgccttcctcccctttgccctccccctgggcacctgttgagctcttcactcgctccctcctaggaccacaccaaacttatcctgtgccccctgatggcagcggtgacctacatcaacgagaagagggacttccaaacgtaccgcctgagcctcctggaggagtatggctgctgcaaggagctggccagccgcctccgctacgcccgcaccatggtagacaagctgctgagctcgcgctccgccagcaaccgcctcaaggcctcctaggtctctctccttcggactggtgccccttcactctgctagctctgagcctgcactgtaggctcctgggggctgctgttcagtgcccctggccctgggggctgggcaggagcagggccccctttgaaggggttgctgtgtgtaagttattttgtacatgtctgggtgtgggtttacatctgcttccctgccctcgctcagcccactgtatgaattgtataaatgtttctattaaattgggactgctctttccttagctttatatatattaaaatgtgtacatctctctctctctttctctttttggtcttgtatttcttaagagtcccctgcccccagaggtttttggttttttttttttttttttgcattaacagcctgagtcccttagaccgctgcccatcttttctgtcacgcctgagactagactgagccacaggctcaactccttggtcctcctttggaccctctggatgtctcagctctttgtggcatctggcctcctggcttccagagctggtgggtagtagggcaggaagaggctctcagaggcgcaggtcctcatggcacggtgagtgtgcagcaacagcctggggaatcgctgtgtgaagtactgaatgaagccagcaggaagttggcctagtgtctggcgcacctcagctgggagctccctgtagtggtgcttctggggacgggcaggacaaggatcctggctcagctgtggcagaccatccctgataggtcccacccgggctctagaacataccttgttcctcatggcccggagcaggtctcgaactgatgtccctttgtatgag

SEQ ID NO: 32989 - DNA, 1144 bp, Mus musculus
cttgacagaatcatttaactattgtgcaccttaatctgcacacctgtcatgtcagatgacaatgatttggttggcttcattggtgtctttaaggatctgtgtcattcatggcatggtgctcagggccgactgagaggtatttctgtgaatggcattgggcgaggaggagctctttttggggttcattgcttgtctttgcttgtgttgctgatttatttgtggggttacttagagtgtctcctgcaatggaagtctgccactgagtgtggccaaccttgcaaaacaactatttctccatctgcttccatgggaacagggagtggagatgccagccacagcatggccttcaagcagcaggagccctgggcattggctcttggtctttgtagcattggttggcatggaaagacagggtaataattaccaaaggacagattaggggaaacaggacatcccatttcttgtgttttaataagactaatatattctctgttttaataagactaataatatattctctattctttggctgttaggaaggcttctctcataactgtactgagaaaggaacaattttccaactacagatcctgaatggcaacttattagagtagacaaaattatgaatacgaaagtcactttttttcatcgccatgacaaagtgcctgagagaactcaagggagaaaggttcatttcagctcatggttcagtctgtgattgctggcctctattgtttctgggcttcaatgagactgaacatcattgtgggcagcatatgatacagaggctggctgcccacttcatggcagccaggaagccgaaggagagatacagaggaagaagctgaagataggccagacctttcagaggttttgctgtccagtgacaaactttgctcaatcaggctccatcttctgcagtttctaccatcccccaacactcaattatgaacctaccaatggattcaagatcattcacttcccaagagcccatcagctaatgatccaagtctttcccatgttagcatttttgaggacactctatacctaaactgcaatgatgaacatgccttaagagtatccaaaaagccatcatttgtaataaaattttccacattattaaatgtggagaaaaaagggataa

SEQ ID NO: 32990 - DNA, 1137 bp, Mus musculus
ccccttccttcttccctccctccctccctccctccctccctccctccctccctccctccctccctccctccctcccctcccctcccctccctccctccctccctcttccttccttccttccttccttccttccttccttccttccttccctccttccctccctccctccctccctccctccctccctccctccctccctccctccctcctccttctctccctccctccctccctcctccttctctcccttcctccctcccttcctcctccttctcttccttcctccctccctctcttccttccttccttccttccttccttccttccttccttccttccttccttccttccttccttccttccctcccttctttccttcatccttcctcctttcattcctttctccattcattcatccatcctttctttcccctcctccccatcttccacgtccttcttattattgttagagcttccttaccaatgtgtccaaaaatacacttgatctagtgtcgaggtctggggaagtccaggacactcattttttccccaggtatctgaaggtgttcagagcctggtggtttagacccaccctgctttttcttgcctgctcagctgcctgtacttgggcaagctacctagcatctctgtgccctggcttcctcatttgtaaaagggggttattaatagtacctccttcatgattgttatgaagatgaaatgaattaacatttgtaaaatagatacagaatgcttggcttcctgtaggtgttttcctcaaaataattacaaaataaacctcctcctttggatacatacccccgtggattgtgtcaaggataaagggaatgtttcttttgaaaccccagatatgatgtgtgaatctgtcagaggtataccgtgctaatgatcactgacctcagttttcagttctactttttgagtcagtccctgacaattctaggagggattctggccattaagaaatcaacatggtagaatggggacagtttctgactctctgttccttgctcttgagttttctgagtctttcctcatgcaattttggggcaggactgaagaccttgagtgtttcgttgctgtttcgtttccaactgtgggagaggcactaatgtt

SEQ ID NO: 32991 - DNA, 1618 bp, Mus musculus
tgctctcattccggatcattgaaacagcctctctgcatttctggaagggaagggattggaggaaaaccacgcccgattctgttcagttctattttattttggcttttgattttgttttaggtttttttttccacccaccacaagttcttttctccccctttcatagtgtgggcgaaacgctgaaaacttcgaccggtttttcacccgccatccaccagtcctaacacctcctgaccaggaagtcatcaggaatattgaccaatcagaattcgaaggattttcctttgttaactctgaatttttaaaacctgaagtcaagagctaagtagatccgtagacctccgtcctccatttctgtcattcaagcgcaacagctgtcatggtgacattttttctttttcattgccgagttacatccgtgttttcttttctgatgaggctagagtggccatgtttcagaacccaaatgtcttcaagtagtttggagcatctcaaggagatggaattatgcaggtggcatgtagaaagtgctgcataatcgagacacgctcggagtcctactatgtgcgtccctagcatgtcggctcacagacccccacgggagagaaaatgcttgcttttctccctggtcctctgcactgccatctttaccccaaccctccaggctacatcctccctacaaaatggatggatgaaccaaatgctagcaatatccttccactttccaggctgggagcttggcttgaatccaagtatatggctgctttgccctagagggaatccctccacgctgcctgttctggaagcagttgagctttgaaaagaacatgctaaaaataaatttttatttttatttttttaactcagtgttaagaagattatctaagtcctggggaaaaaagtggggggaatgcgcttttagacaagtttccatctaaaagcacttcagggtcaaaaggcaaccagcttgggtgctgtcaccttgccatagtttctaatactgtatgtctgatagcggtaccttcatcccccaaactactcaagaatgacatttggcactgttcctggaaccacatggtcactctagccaggtcccaaaggaccctgattctacattacatttcaaatgttacttgctttttatttctgtcatcattgaaatgcaaaaagaaaaaagaaaaaaaagaaaacgaaagaaaaagaaaaaaatactcactttgttacacatgctttaagatctgtgtccagatgttattaaccataatggcctgctttgttcaaccaagaagatggctatggaacccagcagacttgtgcccatggggaggggatttgtctagatgtcccactggtattggagaggtaattgtgtgctctgagaaagacgccatctccccaaaccatgatgggtgcattcttcagtatgatgttattttgcaagatgtttgtgggaatgtttatttgcacttcagtatctgttctgatatctttctcctagcatcaagatacaatacaaagaaagaaagaaagaaagaaagaaagaaagaaagaaagaaagaaagaaagagagagagagagagagaaaggaaaggaaatcctatttcaaagaaaactgttc

SEQ ID NO: 32992 - DNA, 1162 bp, Mus musculus
agagacttcatttctccctgaacagatgggcacagcaggtggccccttacccttgcctacatcttagcaccctgctcctcacacacagtcttgaggcaaattcttattacaggctaaaaaatgtctgggtcctccagtgcttctgagagatcacacagaaatgtccaaaggaccagtgtccttgaagtatacctcctcatctttaagaagactatgcctttgggttcttccgaggcaaagacccttataggtcattctttcctggcctcttagcaactcagctttaagcttaggccttgccctgcttagatcatgtgaagcaagcttgttgtcctaacaatcttacgattttagctgccaaaagagaccagagcaatcctgctcctcactctgctattagggcacctgacatctgaagagtagaagttattttctgcttggttgatcagtggtgatgcaaacacaagtcttgtggccaatgacacaggactctgttctataacaaaataaatatctctgagccacatgtccattcccaggcaagttatgtagggtctttcatttggtcaatgggtcaccaggccttggacatatgctcagaataaaaaccacagagaaatcttgggccattggcaagtgatctgagacgaccttagaaaacagtgtaggaaggaaggatggttagatggatggatggatgaatagatagatggatagatagatagatagatagatagatagatagatagataatagtatatatgtaaatatatacactacgctctacattttcaggttcttaccattatgttttaaggttcgtagttgtcagaaatagatactcaagccaaagtgtctgttcccttagcttagcttgatgggggtgggtcagagaagcttctgtggaaataatggatcatgaatcagacctcccactgcttcctcggccaccagtgttctagatcagaggaagccaagaagcagtttccatcacgtaagatccttaggaaatattttaaaattttatccaaaaaagaaataatttgtttttttttttcatccatccatttatacatcttccatccatttgagtagcatttattgaccaccaactgtgtgccaggctgggtgccaggatcctggtgaaaactatgaaagatgc

SEQ ID NO: 32993 - DNA, 1532 bp, Mus musculus
cccgctgcacaggcttggccaagtcccttcactgacctgtgccctggttttctcatatgtccaacagtgggagacaatcacatcagctttgccttctccagacccgtgaggtgagattgggaagggctagtaggcttacaggagccctggcgaggccagcacatcaaaaagccacccacattcacattctctggcagaacgtgcctcaaactagtcagcaattcctgtacacatgcaggccagcaggcagaccggcaggcaggaagaaaggaaggaagggagagagggaaggaggaaggcaggcaggcaggcaggcaggcaggcaggctggccaggttacctactacaagagttgagcagttttattcttcaagcttgccttcatactttaagctttgtatagaagcacaccaccagcatctttggagagactctggctactgaagacccagattctacgctagtgttcagcttttgagcagcatttcagagcctagctttcaccaatttcttttggggggcggctgaatctaaaatatgagttaagtagaccctaacgggctggccaactctgagtcagatcgtctgacacaattctggcaccagctaggctgtctgtggtcagcagtgagtctcagacagtatgaggaagaggtagatggtgtttagcttcttgcaatgaacactgcttccctcacatggctatttgccttctgagagcaatgtgtatatactctctctctctctctctctctctctctctctctctctctctctctctctctctctcttctctctctctctctcctcccccaacaaagtcagctcctggccacaggggtcgccattgagttgttttcttccaggatactctatctaagagccaagtctatggcattagctgtgagaagtagttaccactgtaattcacctcaaagtcgaagcataggactcccccccacacaaacacacatttctttagggcaattcttaaaaaaaaaaaaaaaaaaaaaaaagaggatgaatcttttcttctcatagaaaattggcaccaagtttcctcccccaagccagcatataacatgaactgagagctgatgtgaggcatgcagctgctccacgctgtcagcacagggctttctgaccactcaggagcttccctcggccttctggtaactggcatgtcctggtcatgtttgctgctgcttctgcttctgttttaatgtgttcgctttccatttggcagagagacaagcgagacacctccaacttcgacaaagagttcaccaggcagcctgtggaactgactcccactgacaaactcttcatcatgaacttggaccaaaatgagtttgctggcttctcgtatactaacccagagtttgtcattaatgtgtaggtgaatgcagagtccattgccgagcctgtgtgtaaggcttcaggccgaatgtctgttaccaattccagtcttccaggattcatggtgcctctattggcatccgtcatgtggagagcttgtcttagagggcttt

SEQ ID NO: 32994 - DNA, 1148 bp, Mus musculus
gaagaaaagtttgtgcaagttccatacattttttttctccaaatattttcactctgcagttggctggatgatgagggcaaacctgcaatgggggagggcaggcctcagcaggcatggatcgaggatccacaaccctggagagtcaggaagtgtgtgtgtgtgtgtggggggggggtgtatgtaaaggtggatgtcagggtagcgtcacgccactccacccaacacccacaacctaagccacagtccctgtaaataaagctgcccagctgccaggccttgagggaggctggggaacaaggaagtctcaaggccacagctttgctttcatgtaccaagctcctccatgccggagaagccaggcagaaccacttatcaagagttatttcaaggcttcacaaacaattatcaacaattatacaactcctgccaggtgcctcggggcagacagatggcacgcatcacacaaggttggtgccctttgggaagtccatccagaagcaagatcttaaaccaaaccaaaacagtagactaaaggcgagcagatagccggcatttggccgggcttcctgttgtctctttggtccctgaggatggggtgtcccttttcggggattctccacgggacaactcaagcctcctatggaagccagtaaaatggagtctatggttcagagactattcatcccagccaggcacaccccatgctgtgtgacatcaagcctgtgacttcacctctctgaacttcgatgccttgtttataaaatggggatgatgctgagattggctcacagggctgatgatttaaggagcaaattagagaaaagtatttggcataggtgtggtgaggagaaatgacctagccaccgtccctagctgctcggatgtttatctaggttagagctgcttcagaaagagatcttctgttgatggccacttgagtgtcccaaacattacaggattcttgtgcaccccagcattcagtaagctgctttaacaactctctcagttttgtggggctccttgtcttctcttacttcaacatcattttactagaacccagggagatggctcactgggtataggtacttgcccataagcctgataacctgagtccaatccctagaatccaaagaactgacttccaaaag

SEQ ID NO: 32995 - DNA, 1191 bp, Mus musculus
gagggaatccagcgacgccctcgccgccgcccgaccgtttccgggcttcccgacgcggtcgtgggctcagaggcgacaggagcgggagcagcgcgaggagcagcaagaggaagagtcgggcagcctcggtggtgtccccggggccaacgaagccgccttccggggcccggggtggtgaggaagggcctcgcggcctagctgggccccgcaccggctttgtgtcaggcggcggcgggggggaggcggagccgaaccgggcggccgctggaaggcctctcctccgccgaccgcgcgatctcggcctaggccgcgggccgctcgtggcctccggggagcaggcgccagggtgtgtgtgcggtgggggcctgggcctggggacgccgacgccggtcgtccggaagccgggaggaggcgagaggccgctcgtggactccgggcctaggccctctccccgcaaccttctcccggggcctgggtcacccccatccacggagagagactagccgggaggtgcggccgctatggacccctgaccccgcggggtcattcggactctaacgtgtggactgaccgctactgactgcaccgcctgcccccgtctcctgccggcccttagcatgagcgagtgggacccagccgggtgacattgtgccggttggcggatcctcgattgccccctttcctgtcttgctcctccctcatgaagcgattctgagtacggggggttccggattattgttctcacggacccccgcttgtggttgggggggtatttaatctgaggccttagggtccttcgttgtcttttgagtgttttgtgtgtgtacatattttgctcttaagtttataaatatacatatattgagagtgtccacgtctcctcgctgaaccttaggaatcttttgccacaatgtcctgtgtgcactataaattttcctctaaactcaactacgacaccgtcacttttgatgggctccatatctccctctgcgatttaaagaagcagattatggggagagaaaagctgaaagctgccgatagcgatctgcagatcaccaacgcacagacgaaagaaggtaagaggcacacgggccgcagatatttattggggggaggggggggcgtcaaggttggtattttaagtttcttgtttcaggcttgaactccattcttacccgttgtcatacacag

SEQ ID NO: 32996 - DNA, 1129 bp, Mus musculus
tttttccatcaggagaggaaagcctgtgtaaggtttcctattggttaaagcagcagtagatataacttgttggctaatctagcagcgttttgaagctgatagcaattgtccactggccttttatttatttatacggggttgcttgtagaaaaggtatttttgaggatttagttagtgctggaattggttttgtatttaaaaaaatgttctgaggtgaacactctgaggtgtaattccagaattagtgatatttactcaaaagttatattctgtagcccagactggcctccaaccccaacaaccccttttgagcttcccaagtgtggggaatgcaggtgttagaccacacttaactgttaagcagttcagaaaagtttcaaagtgcaaggccctgggctcttcatccgacaccaccaaaatatatgtgtgtgtgtttttctaaaaagaatgctaccatgtgtgaatgtaagtaagccactggttataaaatttgagctcttcattttaaaagtaattgggtctaggtcccatctgtctgtctgtctctctgatagtttctctgtgtagtcctgactgccctggaactcggatccacctgcttctgcctctctagtgctgggattaaaggtgttgcgccaccttgaactcggatctcttgcctctgcctttgagtgctgaaatcaaaggggtgcaccaccacccctgaaaacatcatagtactgggacttgctgcctttgagtgctgaaatcaaaggggtgcaccaccacccctgaaaacatcatagtactgggacttgaatggtggcaatgtcacagtcttctctgactctaaacttgttttgctttctttttctcagggtagtaatgctcatgggatgggctctgttagacttctaacattcattgatagtgtgagaagagagttctaaatggagttgttttatttatgttatggtcttaatttttggccttctctacttagatcaggctagcctctgactcagatcagcttgcctctgactcacagatcagcttgcctctgcctcctgagtgctggtatcaaagacatgttccaccaagctaaatttgataaaaggtgtgggatagggtttttggtgaggttttgggg

SEQ ID NO: 32997 - DNA, 1150 bp, Mus musculus
ttcaggatcccattatgaaaattgccagcggggacctgtgtcttctacaagtgactgtagcacaagctgtaagaatgctgtaaacgacttgttggaaaaagaagcatggccctcagcccctggcagtgatcctgagttggctccagaatgtatagatgctgattctgcctccaattctgagtcagagagaaacatcactgtcatggcttcagggaacacaggtggtgagaaagatggccttcggaacagcactggacttggttctcaaagcaaatttgtggttggtagcagcagcaataatgtgggccatggaagtagtactggcccatggggctttccccatggagccctaataagcacatgtcaggtctctgtggatgctcctgaaagcaaaccagaaagtagtaacaataggatgaatgcttggggcactgtaagttcttcatcaaatggagggttaaatccaagcactttgaattcagctagcaaccatggtgcctggccagtattagaaaacaatggacttgccctaaaagggcctgtagggagtgggagttctggcatcaatattcagtgtagtaccataggccagatgcctaacaatcagaatatcaactctaaagtcagtggctcttctacccatggtacctggggtagccttcaggaaacttgtgagcctgaagtaagtggtacacagaaggtttcattcagtggtcaacctcagaatatcaccactgaaacgactggaccaaataacactactaactttatgacctctagtttaccaaactccggttcagtacaaaataatgaactgcctactagtaatccaggggcctggcgtgtgagcacaatgaatcatcctcagatacaggctccgtcagttatgaatggcacttccctttctcaccttagtaatggagagtcaaaaactggaggctcctacggtactacatggggtgcctatggttctaattactctggcgacaaatgtgcaggccctaatggccaagccaatggtgacactgtgaatgcaactctaatgcagcctggcataaatgggcctatgggcactaactttcaagttaatacaaataaagggggaggtgtatgggagcctgggacagtgaattcccagagttcaccatgg

SEQ ID NO: 32998 - DNA, 2621 bp, Mus musculus
aaaggagcactaagttgggctcgccgcctgcagccagggcacctgtgggaacagctgttttctgcacattctccactttgttttccccaaaacatatcagtttgaatacttgaatcatgcaggccaatattataatgtgaaagggtatctatctatttacactcccaaacagcgccatacagctaccgtgtggaatgagctcacttgtgtattcatcatgtttagccttcggattccttctttcctccatttccatccccatccccaccttttatttttatttgtattttttgcaaaaccgttttggggctgacgtatgagcttttacctttgcactgagtgatgttctccgtctaatcggcaatatgggggcagctgttccagtgtagatgtttactcaagggtgttctcaaggcgtgcgctctctactatgcctcatgttgcctaccttagtgtggtatcgtggagttgaaaagatcaagttaagatactgacgtaggattcttaatgaaagtattgcaccagttttttcatgttgtaaaactaaagaatttcgctctacagtttgagaaactgtggccaccgctgtgacctgcagcccgcctgctgcccaggacgggccctgcactttgaacaggctttccatgttgttttgaaggttcccacggtgaaccttcttgtttacagatttttttgtttgttttttgagaaaaaaaatgtttactcttccatcatttaaaaaaaaaaaattaaaagacaaaaaaaaaaaaaaaggagggtggtttaaaagacgcttctatctctgggaaaagagcagcagttggccatgttcttctgttttctattcctgtcctaaatcaaagagcatggttctcaggaaaccagttccccggtcaaaaaatcttgtagtttcttataggaaagaagaaaacccaacttttagcactgatactacgtattgctctgttcaacattttctctgccaaaaaaagaaaaaaaaaaaaaaaagaaaagaaaaaagaaaaaaacgcgcttcgagctggagttgccgtctgctttcagatgctgtcctttagtagtgagtgatgatggtttgctaatcgctaggtgacttttgtaaccccatcagtggctctcatgtctctgctctcttgtgactgtgttcatgtttaactgttgtaccttaaagccgagatcagtaactatgcatactgtaaccaagacattgggcttacagagttgtttgttgtataaaaaattttaaatgttgttgcaaactaacgagttacaccattttaaaatttctttcctccctagcccctgttgttttgcccacaaatggtattataatgcttgcttagtcaaagagagactaaacaagggtaaacttttaacagtacagaatacgccatcatttcattgccttgattctaactgtttgtgtcctaagatgcaaaagaggtcagtggcttttaactgtttacaataggatgtgattgtaaatgtacagtttggttgtgtttgaattatgaaatcttcaaataataaaccatgactttttggctgctcaacattaattgtctcttttttgtggatttatttgtaggctcttttataatgaaagttacaaagttgctgcatgtgagagttcttctcatagagcggcagattaaaaatctaagcaaatatttgaacattttacctgaacttgtccacaatcaccctgagataatgtgagaacagtgggaactgtagcttgctcctcctcccctgagcatctgtgggagcttgttgttgcccaaagctcttctctggcttcaccttccccaccatctgtgcccatctcaagcctcagcgggaccattgggacacgaagctgactgccgtgacagcgtcctagtgttaacctctcatacctcacacagtggggatgccaccacctggactggcctctcttccctgtgcccttcgcccctcctcactgaaggagctctgggcacagaacctgtatgacttcaaatcacgctccacttgccaggtgtaagctaatgttggacaccgtaacctaagcaaatgtttaatgcattcggtgtgtgttgatgtccatactggtttttccaaaaaccaaaggtagctttgaaaaaccatgtgtggagatgtttggaccgttaagctgagtgaccgtttggggctttgagtagtatatatctgacttcatgacttcgttaattgtattgttaaaagtgtttgggagtttttttgcgcttgttatgtggaaataaagtgtttgatttaaaaaatattttaagtggttttgctttttgccttattaataactgctgctttcttatccccattgtctccaaatcccaggtgtcattgggacctccctcttagccttcccttcccacaggcctgtgtctgacagagctccccactccttggggcctttgtgagtgagcctgaactgactcgtgcagcggctcaggcctagggcagtgtgctcctgcctacacttcagccagaagctgccctgcagtctctcttcagtgtccactgatccggagctctggggtgttacagagggtgattcttagagctggaactccaataaacccaaa

SEQ ID NO: 32999 - DNA, 1144 bp, Mus musculus
cctggctgtcccattcaacacctgacctgaggagtgcacgctgagctgtatgtcggcatgaaaatggaggccatccatgggaccaagagtgcagataacaaatacaacagtccagttagctattcctctttaagtggatctacagacactgtcaaacacatgaacacactcacacaggtatacacatatgaatacacacatgcatacacacacatacacacacaggcacacatgcatgcatacacacacatgcatgcatacacatatatgcacgtgcatgaacacacacacacacacacacagctgagctggaagcagagctggttttgatcctgtaaacaaccatggatgctgcagacactttctcaagttgtgcactgcacacataaggcacagaggatagaatggtctcacagtctatttccccacctgtcttagtccttttcaagaccgatcagaactgggagtcgggacatttttccaggcccagctccaggatctctcccattcatctccccacaggtgggtgcatccttgttcgccagcaatgttggaagtggacacttcattggcctcgctgggtctggtgctgctgtgggcatttctgtcgctgcctatgagcttaatgtgagttttcccgtgacgtggacatctcccctctgttctgcagtagaaaccaggggatgcatgacaatactcacttggtactttaaagtgggtgctttcttttcgttaagcaaacaggaggcttcaaaggtgctcctggccaacaaaagttatttgtgtctctctgcatctgctaggtgggaacctataggcccacaaccccaaaattcaagaggacgaggactcaggatgcttccttgactatgtaggaagcgacaggcagcaggtgtcaaaaggccatatatgtcaggcatcagttagccatcactgggatgaaatgctcagcactgtctgccctccatgtcccaggagacacagagatagatggattcttcacgctcctctccattggaggcatctcacagagtagcttttccgagggggaacttgtgttgttcataatcacaaatatttgtaagtggtaactcttaccctgtcacagccacagacagttatgtcacatacacgctcacatgga

SEQ ID NO: 33000 - DNA, 1141 bp, Mus musculus
atccagaacaccccacccgacatcagtgctgcacacacagtcattatgtggattatttagggaggaatgttgaaaaggtctgtacttctctgaatattcctggttcatgtttggttaaactaccaaatatggaaggccaactgcacctcccagaagaacacgagtgcgtatctcagctcatggacacatgtggctgatcctcttcttcctcttagggagagccggttcccctgtgaccttcctttgctgcgctctttctagatggtgtgtctcccaggcattccaaggtggtgagggctatcctgtggctctgtgggatggaaaagaacaaagaggagcccccaagcaaagcggaacctgtcatagtttccttggaggaaaatcccttggtgaaaaccctgcttgacgtcaactgcattgtgtgcatcagctgcgccatcttcctttggggatacttcgcataactcagggtgagccaggaaacgacaataaagctgtgtctgtttactgtagagcttcagaggtgctgctgacaagccaatcggcgttctcatcctagaaggagtgggtggatggccctggggctttcctcactgtggtactcgctcctccttacagcctgtgagaagcagatctgtgggcagtgccctgaaaccgctcccactgtgaaaatcaggggctgtgtggtggcacgtgcctataaccccagccgcttctgaattaggactgcaagtttgaggccatggctgctcggccttttgactaagttcaagtgcaagtttgaggccagtttgggctaccagtttgggcaagactctgtcacacacacacacacacacacacacacacacacacacacacacatacacacacacacatgggaagtggagaaagagtgagtgagagagagagagggagagggagagggaaggagagaaactaaagcacagagttgtggcccacagccccaatcccagtacctgggaggtagaagcagaggaccaggaattctgggtcaaggccaccttgctagggctacttgaaaccccgcctcaaaatacaataagaagaattaagacatgaggacatgagggaactgtgtgcacttctccagttctagcttagtggctgaagagatggc

SEQ ID NO: 33001 - DNA, 1213 bp, Mus musculus
ggtttctgaatcacttcgcagcatctttcctgaaatacattcagacttggcaagcaaagaagtgcctggccacatcctgctggacatagacaatgacacagaaagtactgcattgtgaagaaagccacttgtcagcctttggccctccatcccagtgaacggaactgggtcaggcaagcctctgtctctgcagaccaaacagtgagaagcttttagtgggggaaggaaggtctgactacgaaggactagactcccacggcccaaggagaaggtgagggccagtcctcaaagctgaatgacctgtgtcgtaaagaagttggcttgctttatctaggatgaaaatcatgccaaaaatgatcaggacaaagaaataccgacagcaggagtattactgctgagaggtgtatgggaagctgttgccagagctgtcagctcagacagctctgattgtgactaagaagagacttacctatctatttaataaaacattaattatgcaagttgcctacttcctgctacttggactttggttctcacataccagaaggagcttccattccttcagacttgctgcagaatcattttgtattaaatagtctgtctcctccaacccccagaacctcgagcattggcgactgctggctctgtcgcctcagcagaatggatgcaagtcgtgccttgtggattgccagaatatggagagaaatataccgttctttttaaaaaaaaaaacaaaacaaaacaaaactataattgctacttgataaagagcgaatgttattctagtttcatgtttaatttgaattaaatatattctgtggtttatatgaaaacttgctaattcttagaggcaaattctgggatatatacatttgtgtttgtgcatatatgtgcatgtgtgagcttgcctgtgtgtttgtctataggaatttgaaacaataaagagatgctagcatggtagtttcagcacttgggaggcagagggctataagttcaagaccagcctgggatacacagcaagtctctgggaatgggagtggcaaagcaggtgtggtgtgacaggcagaaggaccaggtgtttaaggtcatccttaactacatagtgagttgtgggccagcatgcattctatgaggccatgtcttagaaagactgcccagctgtgaccagctgcctggacctgtacggaccatccatggttaaggcctctttgca

SEQ ID NO: 33002 - DNA, 1102 bp, Mus musculus
gacagttgtttggactatcaaaagtagaaaataaagcaggcaaggctagggctggttggagctggtttgtgaaggtcagaggattagggttttattctgtagctagtgaattttccagtttctcttgttgtgatcatgggatccacagaggttcccatggcctcctcctcaggagctggttgtatggatgttgtgtccccaggtgttgcccctgcttttctcagtacagcccagctgcctcgtgcactgcagtgtgagctcctgatgcctgatgcagggctgggctcagttcttttctgtcttcctgtcctcgaatcaatcattgctgctgcttagcaaaaatgggtaggagagagatctattgtccttgagctcctcctgtggactaccgaggctctcctcccactggggcattggagacccccccccccccccccgtgccaagtctcacatttgtttctcttctgacagaggtagaattcaatgtatcagaagcatttgtgccacttgctaccccgaattctaatcactcatcccatactggaaatgactctgactcggggactctggagaggaagcgacctgccagcatggcagtgatggaaggggacttggtgaagaaggagaggtacgtgcagagctggtcacttccacagaaataataggtgtcatgtaggaggacactcaaccatgcatctggtactggcttaatggcctcctttgtgaccgtgacctacagagtctagataattcaagaaccacattgtccaactctacaggcattaatctgtgcacaaagtagggggcgtagcctgtctgttaacatctgcaccttgtgcaccagcctttacttgatggcctatttgtgcccacggtaaaaagagtgctgtcacacacactaaatccacttacatgtgtcttgagtgttaaggaaacatagttaacgtgtggatttttggctgagaatcatatgaagacaaccacatttcccagtgagctgtggagaaacatatttttggccttgatatatttgctaactgctgagagaagccccagaatttgacagtcctggatgggagaaaatgtatgttttaaacttcga

SEQ ID NO: 33003 - DNA, 1222 bp, Mus musculus
gaggatcgtctctactaagagcttagccaggcacaagggtcagtctgtgttcctctatgcttggacatgaacgtgcatacccccccatgccagtgtgtaggctcagagttagtactgaccagtccttcagtgtccctcactaccagggtggccaccaaagcatggaaggtagtgttctctaatgagtacatttcctgaattatttggctcatgtggtgattgtatgaacttcaaagtgttaggcctactttactttctttttaaatatgtttttatttaattgacccatatataattgtatatttatgaatctaagatatgattataatgattgtatctaggtaattggaatgcttatctctctctctctctctctctctctctctcacacacacacacacacacacacacacacacacacgctcacacgttaaggtttttctcagaaacccacacaggtttccatctttgcttccttgtactaagtcattttcctcaatgacatcacaacagtgatgctgtgtactagcccaatgctgaatgctctctaagtactcgctctcttggccttcagaacaacctcggcattgggcaggacgaatccttgtgttcatacttgaggcagggaaaagggtgagggagctgcctgagcacagagccttcttcagcttcttcagcttcgatctgataggacagccacctctcaccacaccacaccctctccacggagaactggaggggcgctgtggaaaagaaggtctagagggtgggcggagcctgtggagtcacacatttgcgcatgtatttggggttacatcagctgtgtgcttaaggaaaatgagaaggaagtctgctgttcagtagcacagtgcttgtggcacggaagtgttagtcagcctcctcatctgccctcgagaaccctgttttatgatgctggggaggaacccacatcggtgcatgggaagctggagacccagtttctgtgttgactctggagaaggcacctctaaggctacactcactcagatacaaaaccacatgtaaggagtgacctttgcacatgctaaggtttttctgggtattttgagaacactcctctcacctaacttgagaacctaattcttgtttaagttatgatctcactcttcatactttatttcctcccacatttcatacatgccagagacagtccgtccctccttcccttcagcttcctgttcgc

SEQ ID NO: 33004 - DNA, 2174 bp, Mus musculus
cacaggtaaaacagggagacgtggtcttccacgtcttccacttatgtgatctgttacctagatccattgcttttccccttaaagtatttctggaatctacttccttctttccttccacctctgctcctggtttcctggtgcaaggtgaggttaggtatgatcagagttaaggcactcctctgcctcctgggcttcctcagtcattctttcttctactccataagtcatagtgaagccggaagttgtaaaaggctgtctggattgtgtccctccgtggtttaatagtttcctgttgacaatggccttacccagttttgcagggtcctgcttgttctgctataggtccccagtatcacttcaccctactctgcctccctctcagctctccttcctcagagccatcaagcatgctggtccctctgctttagactagttggtttcatgtcagtttatagaattgtacttacattcacccagaattttttttttttttccgagacagggtttctctgtatagtcctggctgtcctggaactcactttgtagaccaggctggcctcgagctcagaaatcctcctgcctctgccacccgagcgctgggattaaaggcgtgcgccaccacgccgggctaagaattctttcatgagtgcctgctttgtttatggaagttgtgttctagactatagctatagaagtaaacaaatcaaatggagctcttagaaaccagacaggaagcaaaccacatatgtgtcatgccagatatgatttcaaggtggaaaggtcagagaaggtcccactgagaagatacatctgcagcaaacacttgcagaagctgagggagtgtgccctggagacatctgaggaaacagaatcccaggcagaaaatagagcggaaatggtcccaagcctgctggacttgttttatatgcagcaatacagagtgattgggagggagaagagtctgtgcatagtaggttcttggaacttaaacaatccttaatattattgtatgtgtctgagtgctttgccagtatgtatgtgcgccacatgcatgcctgccaggtgaccactaaggtcagaagtggatcctgggactggagttacagatggttgtgagtgatggaagtcaactgggtcctctggaagagcccaagtgctcctaaccacaggcaactttccgcctcctcttgtagcttttctcttatgagttaggagccattagaggattttgagcgggagaatgaagtagcctgggtttttaaaggctgagaacagaccgtaggaagcaaggatggaagcagggagacgaagactgttaccgccaggaatatcttaagcgagagctgctggtattcagggcaggatggtcatggggcaggactgcaaagccatcccattcatgatgtggaaggtggagcagctgatagaagtgctgactgatggctgaggactctgaagattattccaggttgtttggcttagctcagatgggatggagctcccccagacacctcgatacatagcatgagctgcatggctttgggattgacctgattggggtgagtggaatgaagaaacgacatgtagagatacatactggaaaaggtggaattggatgggccgtgcttctgaaggagatgcgccagcagcctagaaactcaatgtactggctggctttatgtgtcaacttgacacaggctggggttatcacagagagatccagctgtggggcattttctcaattagtgatcaagggggaagggccccttgtgggtgatgccatccctgggctggtagtcttgggttctataagagagcaggctgagcaagccagtggaagcaagccagtaaggaacatccctccatggcctctgcatcagctcctgcttcctgacctgcttgagttccagtcctgacttccttggtgatgaacagcagtatggaagtgtaagccaaataaaccctttcctccccagcttgcttcttggtcctgatgtttgtgcaggaatagaaaccctgactaagacactcaatgtgctttgttatgtgctgctgaacaagaagtcaagttagctgatctctgtaggagaggagtctcaggctgcagtcaccccagaggaggaggcagcggctgagactttctgcacacgctgccagcatttgtacgaggacgc

SEQ ID NO: 33005 - DNA, 1153 bp, Mus musculus
gagtgtaagagccagacgatagggtaaagggctaggaaatgctgtcctgccagacctgacacaccattgcagtcattgattcacaccagctggtgtcctgcactgctccacacaggactccctctatcaacaaccagtcaaggaaggaggaggggctcacagagccctaccctttaccccaactactggctatcgatggattttgggaaaggagtgatggttgtttagagttgcagctgtgctgctgagcacatcaggctccagcagatagctcgaaacccatgctcacgcaggtggcctagtgaatcttggtggacttaaaacaaaatgaataaaggtgaagtgagagatttgttggaagtggggaaggggaggggtaatagagtgggtgagggtacccaatatgcaaggcatatgtatgtggaattgtacaaaatatattacaaaaagaattatactttctgggtaactatagaaatgtattgtttttcctgtttcataaagtattgttactttgtgtctggtagatcaatgcatactaatagtttctcgaagaatataaccatttgaaatgacatgtgttcagctttttaaattaattattttgtatttggttttgggttgctaggcaagctctgaaccacttagccattgtttttcatctccttatggcaaaccttcacttaatgggattagattctgttaatgaacataataatctctgtgtatttcagctcagaggtttgaaacagttcacatgttgctaaggattctgtgagttgcagttctttcttgaggccaagactgctgatagctccagggcccacctgagtgaccagcagacgggctagctggcagctggcagcaaagtccgttcattttcttcccattccctggctttctggagttctttcatttctgtcaggattccattgtaggaacaggtcatgctcagtgtgtgtgtgatctccacactgtctgtctgctgctgccctttgacaagaacaaaggtctacccagccccagttccaggctaggagaataatctctcgtgatgggagagactacagggttctgttgcccatggacagtaggcacacagcagcagcagacctgtcttcctttctacagtctgccccatgtccttattttc

SEQ ID NO: 33006 - DNA, 1590 bp, Mus musculus
aaaaacatgtttcatactacagatctggaaaagaacctgtggctaacaaactcacagtccacacccttcctcctctgcctctcacaacttcatcaacaactctctaaacagggtgttaatctggttttgcactcgaagtagattgttcaaaagtccttcgatttataaactcctctatccctgtgatttccaacgaggtgacctctcctgcatacttggcacaatcctttccatttttcagaagacaccaactaaaggcaaatatctgaaccatgaatagaagtctgcaaagaaagatctgtgcaggacacttggaaacagctactcaccactcttgctcttgtgagaaaccatataacactaggctgcaaaaagttcaagctgaagacttaacaccctctctgataaatataggaaagggtccaaattaagcatttcagcataaaccatggaaacaagtgatcattattttaaaaagttaaaaatgaaatacacattgccagaacatgtgacgtagaatgggattgacccaaaagaactggaagacttcaagttgcaacatgaatcaattatgggcttccccaaagccaaggtctatgaaggaagcatcttgaaggctgactgtgacattctgattcctgctgccagcgagaagcagttgaccaaatctgatgcacccagagtcaaagccaagatcattgctgaaggtgccaatgggccaaccactccagaggctgataagattttcctggaaagaaacatcatggttattccagatctctacttaaatgctggaggagtaacagtgtcttaccttgagtggctgaagaatctaaatcatgtcagctacggccgattgaccttcaaatatgaaggggactctaactaccacttgctcatgtctgttcaagagagtttagagagaaagtttggaaagcatggtggaactattcctgtggtccccacagcagagttccaggacaggatatcgggtgcatctgagaaagaaattgtgcactctggcttggcctacacaatggagagatctgccaggcaaattatgtgcacagccatgaaatgtaacctgggattgtacctgagaacagctgcctatgtcaatgctattgagaaagtcttcaaggtgtacaatgaagctggtgtgaccttcacatagacagctcacagccaacttctttaccacctcttcacctacaatttctgcagacctgtcacaagcttccatgtaaccatagaaatctgttcttgtgactcattaggtaacggacactgttctgaacaagtcagttggaatcagccccttaagagaaagagattaagttagaggatcatgtacaagctgatggtataaaagtaggaatcacgtgtatccaagccagttaggtggtttgcttttaggtaaagtcttgctcctgtgctgccttgctctgggcccttcccagcagagtcagtgctgttgtcagggaaggagtcaggagcagtcagtcacttcttgacatgtctgggaactcctacacacataagaagtaggcgtgtggcattttccaaaggtggcatggtcctcaaatgagt

SEQ ID NO: 33007 - DNA, 1151 bp, Mus musculus
ggttaaactagaaagtctacctgcctcgatgggcccagtcaagctgaaactggagaggggcgctcctttcccaccttccccagagctgctatgtgctcccaggactcagaacgtcttagccaggtgtgtggcacatgggctgagcacactgctacaaagcttggacaaaccgtccagtgagcgcctcattaaagtgcagggctgggtttggagcattctgggccagggactgggacccatgcactcccacgagttctcaggtgctctgtttgacaggtagcttaaggcctgtcactccctgtgagacccaggaagctgggaagcatgacagtggcctccacaattgccgtttctatttcctcccgttagaaacgctgcatatggtagcaatgagtactgtactcacagcctttctaaacagatccagctcgttctctgcaaaatccgtagccattttggaaactgaagttgtagcaagattcacctaaaaataaaccacataaggatcaggccacgtgtccaccacaaagctgatcactttctcacccctctctcagaagcatgggtcccgcacgagccactgcagagccctctgagccagtttctcaaaatgccactagagggcgctgcctcgcataccagtgcataaatgggtctcccatcatcttccgtgactcctttctttatctcaatatacagagactccaggacactgttgatgttgttgatgaagtcctccagcttatctacagtcgcatttcctggaaataagcaggcagggatgggagtggattcgtcgaaaaagcacacacagcctgtttcaatctctggcccctgaccacactagcagccccaacagaaatgttttggctttcttgggccaatgccaatattgtggtttctttcttcccggagtgctcaaagataagctgagacagatggtgtagtgaggcagaaaggcggacaagattgttatctcagaccactgagacagtagccttccttcctcttccccaaggcttcatgctgcaccagtggccctccacagctccctcctcctagaaagctagccaggacacatctgaaggccttgggccagcccaggcctgagccacaacagggtaagtgaggcactcacagcagaagaggcc

SEQ ID NO: 33008 - DNA, 1175 bp, Mus musculus
tttgtagaaagaacacaaggccttggcttagtttctccagggctgttgagctggtaagtggtccagactcagggcacagggtacagactgagaattaccctgtggtgattggcacagctttgctgctttcctcggcactataatgtcacctgtgttaactcactgacttacaggagttcttgggagaacatttctgtcaccattcccactttttaggttagaaactgaataagatggagacttgagtggtccgggtcaccactttgcaagtagttagttaggagggctgagaacctgtgcttatggctccagaacctccagaaccagtgggatggactcgagccgacccagttctttttacttctggagtcatcagcacaagctgaactttggcagccacatgcagtgcgtgtttctgaacatgatggagtacagacccccaccattgctcttgtgtgcacggaggtgacggtgccacctgtttttcagctccctccaacatgcagggcagcacgaggagagcaggagccatgacggatgtgcaccggcgcttcctccagctgctcatgacccacggtgtgctggaggagtgggaggttcggcgtctgcagaaccactgctaccaggtccatgaccgtaagtgctgtgtccctgctcccacagcccctgctgatgatgatcagagagtagcgatgctgggatagcaacaagagaagaatgatctggtagccctgaccggaccattcaagactctgatctcgtctttctctacctccccaaagtgactgccatttagtctgagaagcagaagcccggattctgaatgtgtgaagttacagttcacagcagggctccagcgtgcacttctgtactggtgtccatgtcttcagagtcggaagcgtgactgtaactcacgggatcctgagagttgaggagtgactaggctagcgcaggaagagtgcttgggtgcctgttgttagaaagagggctgtttagcacatgggcagggcacagccttagatccagccagcctggtacgagtgccggctgtgtgccctgtggcctccagtcattggaagggcagtagaagcaatggggtcagtaaggaaagctccttagactcacaggaagccgactgtgtccagcgtccgaatgggagagtttgtaaatgagaa

SEQ ID NO: 33009 - DNA, 2284 bp, Mus musculus
ttagacccattgcagatgaagagagggccttcccagccagcctgtatgcctgcccagggcagcccctcagtcctgtagctgagcgacagcacgccagaggggttgcactcttctgccctccccaggcagggcccacagagcccagcaaggctttgtaccctggatctgactcccaaggcacaaatggaccttccatttcagccatggccaccagagctagcaaaacccacccctgccccattcgacccatcagccctgggttagtggcagctttgtgcccgaggcagagctgcagctgctgtggggacatctgagtgacagtggggagggttccggtttaggctttacttgcacttagccagggattgtcctgccagggagagccgtgggcagacagtgcccaagctctgggcctccctgagccagagtagtctgtctgtgaccagcatgtatgtcccctccttctcccgtctccagtggctgtgagagagtgtgtttcgtcggccgcccatggcgaggtgtggatgggcacctgaacatgcccgtgtgcaaaggcatgctggaggctgtgctctaccacatcatgtcaaggcccggcgttcccgagagctgcctgctgcagtactaccagggcgtcctgcagcctgttgctgtccttgagctgctccgggtagggcccagggcgtctcagcccagctgtgtgttggggtggggggagcacacctcgggtgtcaccacctcagcttaaccttcagtgccttctggccattggcagaggggtctgctactatccttgccctgcctggctcttgattcccttctcctgtgcctgctgcagctcagccctgcagcaagctcactggcccttgggtccgtttgcacttggtctgtcttactctgcctgctgttttccacctgactcgcactcagggtcacatgctcacaggtcctcaggaatcctgggtaaataaatggaggtggcgaggaaagctgaggactgtgtgacctctgcacaagcagctacttcccagcctgggctagcggctgccctgagctctcattcccatggtgttctgggctccagcttcctaacagactaggaacttgacatttagtggtgacattcccagaacttcctagtgggaagccaccacagccattgttggctgaagagtgcctctcctccagaggtcactgtggcacccacaccttccatactttctcctacccatcttgatgtaaaccttcctgctaagccctgcctccctcaaggccatgtttggccatcttctgcctgggaacactgtgtacattccataagtgcggcaacaccagacccctgagcaagcagagcctttgtaacccacctgtctgtatctgcagggcctggagtccctcggctgtatccagaagcggactctgaggaagccagcgagtgtctcgctcttctccaggcctgtggtggagggcctgggtcaggccagtgaggctgaggcgctctcctgccacgagagcactgtcaccttctatgagcccacgctggactgtaccatccgtctgggccgtgtcttcccccatgatatcaactggaacaagtggatccatttatagacgctgccccaggccagcagggaagcctctgcttcacggctccacctggactgtccatgagccctgtcctccccagctgttcccacagcgcggccccagcccagcccagcccagcccaggtgtagcaactagcaggtgacttgagtcccctccacccgtgctgctcttgctcccaggtgcccagccttcctgcaggcccatgtcctgccctgaactcaggctccagcagtggcagcagcagggtggatgttgtttggggagcagagctgatgaccaagccctgactcacctgaaacccaccacaccattcagactctaggaagggctttgtgaagacacgtcacaggggtacctgacagaatctgctcctcttactctagggcatcccaacttggcctggactgagccccagtctcccgtggggacccctcctgccagaagccaggcctataggttttgcttttgtttttgtttcatttttctctctttccattagatacaggcccctggcatgtatttatttattttgtaattaaagtgagatgaaatgtacgttgtgtattggcctaatgattgttgtttcccaagaacttcccttctggagtcttcaccttgtgggggcagtgggggtggggaaccttagattttcatctttttgttgaaaaatgcaagc

SEQ ID NO: 33010 - DNA, 1209 bp, Mus musculus
tgcggtcacttcctcttgttgtgggaccaccagggttacctgctcagccatccagtctgagcaagtggtgtatgtacatccatcctcgtgggagtgtagacatgagaatggaggtatagaacccagaaattgaatcggggcctctccctctcatttctgagagcatatcaacgttctcatcgattcagctacactggctggccagtgagttctcgggatccagcacttcattacagacctgtccaatttgggacgaggagctgcagggcagtacccagagttttctgttggtacctttctaaaggtcacaggaagtgccgcagggaaggaaatataagcccagggcccttaactgtggcagagccaagcatggccttcatgggaggggaaggagagggtttgggtggtgtcagaaaaaaagggcacctcaaatgaatgttgtctctgacaacaattgccgcttgatgatggctgtgtagcacaggtgggccaggtccaaggccaggtacctagttgtcttctcttctgcagcttggggaaagatggtggcttggatgatgacgaggaagaggaagacctggatgaaggttcagggaccaagcgccagggtgtggaagtaaaggcccatcaggcctcacacaccaagtacctgctgatgagaggttactacacagtgcctggcatggtcagcacacgcaacctgaaccccaatgacagcatcgtggtcaactcctgccaggttaaattccgactgcgcaacacccctgcatccacccagcttgggcccactggtgagtgtcctgccacagttcaggtatggccaggcacatagccccggagctctgaagggtggcattgctgtctattgcagtcaaagtgagacttcagctccattgtcaccacccaccacccacctcctttgcaggtgccgatcactcaggaagctctagatagcataaacctttctctttgctgggagagaacggggttagaaaggccctgcccttctccaccctgcagccagctgtcctttgtacggtcagggtggatagtgtttgctgtcactttttgcccagtcagagctctattctgtgtgaagtttgaagcatgcaaaaatactgtgccaacctataggttgctatgtcagctaaagaagccctcctggctattgagcaaaagccggggaacatggcaggagcctggggcacc

SEQ ID NO: 33011 - DNA, 1187 bp, Mus musculus
tgggatgaactggaccaacacagtctggggctgctcaagcactgcccacacctttctccctacagttcctggactcgggcgctccataggcttccttcccaagatgccccgcctaaaggcgatgcacctgttcctgtggtacctggtgtatgggcatcctgccggccacactggggagcagcctgctctccacagtgagaggaaaacgggcaagcaggagtccagcagaccaggggctcagccctcctcaggagatgactgggacacctctgaagccaaaaacaacacagaaagcagctcctgggagtcagaaatggaactctccacagagataggtgagagccgcgggtctgtatgttggggtggagagtgtagggagagacagataaatgagcgccatgggcctgttggtaggagatggcagggtgagtccattttctcctgaccatactcgctacttgaagtgactcttgatgtcttgcagtgtatgtggatgagatctcatggatgcgctacgtccctcccatcccgatccacagagactttggctttggctgggctcttgtcagtgacattcttctctgcctgcccctctccatctttgtccaacttgttcaagtcagctacaaggtacctgtgattctgggtcatctcatatctacgggtagtggggcaggaagcctgtgctctgtgtgatcaagggcaagtccgtggagtttgccctgtggtgaatgagtggatgctgagatggccagtcaagggaaagcatttcaggtttgaagcgttccattgttattccacatagagtagggtagaattgataaaagaactagctgggtggatgggtagtcagtatacttcagaaagctagctagggaagaagataataaatatgttgcagcaataaaacacctttttagaaacgtgataatgtcaaaaaggaacaaatagaaatgacccaaaaccttatcacccaaaggtaatcactggtcatatttttggtacattttcttctagtctttcatgtgtgtgtgtgtgtgtgtatgtgtctccctgttcttaaaaactgaattatgattatacttaaatcataagtcctctccacttatacattatagcagtgttttctatttggggaatagaattagcagtcatccctccctgctgagaggatgccccttttgcct

SEQ ID NO: 33012 - DNA, 1138 bp, Mus musculus
tggatttccagtagctcttaaaaaacccacacaatttgtctttatgaaagactggttcttataagcagcatagggcacagtttccttcaggtaagctgggtgccagccactcatcttccacaccagtgatcttgttctcatttgccacctgttctgttcactatggcccagcggccccttgtgtccttgtccctgcctgccaagctctctcacttagccaccctcaagtggttattttccctgtaattcatgtggaacctgtcaggcccccttgtttctgaagggaaaggtgtgtgctgttctgtgtgcttagaatgttctgccctcaccccagcacctatcccagctttatccgcacccctcactaagtatcttggctgcccaggcactatcagttagttaactgtgagaaaagcgtgacatggtgaacagttaagggcatttgggtctccaaaattagaccatttgcagcaaggccattgaattgtgccaaagtcactttccatgtttgttggcagcattcttcccttaccaggagaccaccagcttcccactggtagagtctcttctttgtgctcacactgaacttctaagtcacacaggtgcttggcagagttagcacatgtagtttacttctcctgttaggccatcctacttgggttagaagttgaggcatcaaattgagagtttccggccatgctgaccttgtgaacctctcttaactgtctggttgctgccatttcataccagccatgccacctctggtcttccagagctagcctgccctgtcaatgggcagagcctgctttcttgcccttctccttcccacctgcctccctgatggctccagaggtttccatgctgtgctcccactgctgaccactgatgcttttgccgaagctttctgcccagagctattctgtctggagttagatcccatgatgtgcttgttcattttttggcttttcccttatgaactttttaaaggtagattattgttttttacttatttgtcctggcaacatatactctgttcagcatctgttcaccaaaatgatggccacagtcacaaaataatgtgcagtatcaggagtcatgggaccagtgactgggcaatcttaatgcagatgaaattggg

SEQ ID NO: 33013 - DNA, 1171 bp, Mus musculus
acgacagtgcctaggctgcctctttgagaaagttctttgattcgtagagtccatccggctttgcagagagatgagaggggatccatttggcaggtgctggtgcagctctagagtgctcccatcgcgagcactgtacatttctgtttggggtattttccacttccacagtttgacacatcagtctggtgacatatgttttctttttgctccattttgtgcattcaggatcttgacattggtgctaagaacgtgaaactctatgtcaacaaaagcctcatctttgatggcgtgttagagaaaggaggaggtgaagccccttctgattgtaccatccccgtggaccttcagagagagaggaatgagagctcagacaaggccttgagcactggctggaaagaaagcaaaggtgccctcaagatggctgccttgagtgatgctagggagcttgggctcagctgctcacagccagcggaatccttggatatgacagtttcctcacaaggagatttccttggtgaaaaggtgaattctacatctggcctgaagaacagtttgtccaagttacaggaagatgtaagactgttggcaacccctgcctctatgggtgatgggcccagtgtcccttcttcatcctctcctgggaaatgtcttcctctagaagaggagccctctttgatccaacagctggaaagtctcagaggtaggaaaatccccgaaccgaccgggaaaaccccacactggttacagccttctctagcagggatgggcaagaaacagacagtcaggaagcccaaacccctgtggctcagtcctgaaaaagatctggaacagaagagcaggtttccatctgaggatgtcatgggtgatactcctggagaggtggagaccagggaaaaaggccctcgtcgtgagcaagggaggactagcagctggaatgtcatcactgaagagagagcccccaaagcattctccaaagcctgtggcgatgacttagacatctttagccagcttcctaacagggatcgccctgctagtgggaggagggccctgaagaaggaagccagcagtagccatggtgatgaccggccagccagcaaaggtaagcttcaagctgcccccagtggaatgaaaccatttgtttccttggaccctgctttccttatctaaaaaa

SEQ ID NO: 33014 - DNA, 1186 bp, Mus musculus
gcatgtgcccctgacccaacttggaatcgtattaaatgtttgcatagagccaaaagcacaggtgtggggcagctcatgagtttggcagatgggtagcctaggctattagggtctggaggaccttcaagagccaggcttcagctttcccctgcctttcaggacctaccatcgttcacccagaatgtgcacaggctggtaaatgatctccgttactaccgactctgcaatgacagcctgccccctggcaccgtgaagctctaggagtgcctgcttgccttcctggctgctcactgccccagggatgtgcctgctgccaccaccacctacaccacctgcacctgtgccacggaagtctgtgacaagccttgaccactctctggattggtgtgccctgagcaagtggcctgcctctgccctctcctgctgcctccagcacagcaggttttggagttcatttgacactggtagagtttctacacatttggagcaggcagagggacctatggccagatgccagggaggtacccagagaccccacagcgtggttcatgcagatcgtgtgtatcagtcctgagtcaaaatggccaaggacctctgacaacagtgccaccttctcaccattccacctcccctccgctcctggcccagccagcccaggagaaattcgacattggaactgtttctgtcgatcctcctgcccctccaatggccttgaagtctctgctctttgtcagagattcacgaagactttttttgttgttttctcatcattccattgtgatactaaggagcttaatgactaaataaaatgcttaagttgttgttatataaacactagtgatggggcatctttgtacctgagcctccttaaggccggttaccacggagccagcaggggaactctgtgtgatgcccgtgttgtcttgggagagtagtgagaggaggcccaactgctgtggacatgctgcgtttccctcacactacctaaagaaacatgcccaaggcttggggagctgctctctatgacagtgagcccgcggcagaggcaggaggtatcgtcccaaggccgtcttgctgctggattcatattcctttctcccagctgagatgtgtgggactctgggacgtggctcaccagtgactggccttagggaaggagagagcacgggcacccaggcagcaggtg

SEQ ID NO: 33015 - DNA, 1155 bp, Mus musculus
tgttgtctgtgcacatgtgaatctgcctcagtgtgtgtgtgtgtgtgtgtgtgtgtgtgtgtgtgtgtgtcaaaggacaacttgtgggagtaggttctatcctactgtgtttgtgtgtgtgtgtgtgtgtgtgtgtgtgtgtgtgtgtgtgtaggtcaaaggacaacttgtgggagtaggttctatcctactatgtaggtcccagggagcaaactcaggtgaacaggcttggtgacaggtgcctttaccctttacccactgagccatcctaccagatgttgttttaggctttttgataacataaatgctgtggtgctttagaaaatggttttgtatataaccttacttcacaacgctagctgttttcttggaaagaattggagatcagatttttttttttttttttttttttttttccctgtctgaaaattagcccttgggttttctttgatagcttgtccattttgtttgttttgggctctggtgcttgctgtcatttttcacctattgctttgttaacaggttggtcaaagttactctgtatggatctcagataaaactgtacaacattgaaacagctgtgccatcagtgttgaaacccgacctcattgatgtgtaagtaaagagtagtaactgtgccttcttgagagatgttgaccctacctctagatgaactgcagcaaccaacagtagtggctgccacacataaagggaaagctctttatctgaccctagaaagacagattgttgagtatggtgtggtaaatgtaattggttgaactaaagagagcaaggatgaggctctacagggcaggcactgcaggaaacagcagagaagggctgtgaagttgagaattggtgagcactaaaggtacgtgggaatggtgtagaaacacctgatccctgtgtctcttaccctgcacagggttcacgttcactgacagttggtgatagtgggaaaccccaaccatctcacactcaaaagctgcaccaactaggggcaggggatttccgtgctttttcctctaattaactccagttctgttactacttggtagcatcatgctgaggatttaatccccacgatatcacgtctgcatctgctttccagtgccagctgctgctccagctgtgtttcttacgctgctgactgag

SEQ ID NO: 33016 - DNA, 1175 bp, Mus musculus
cacctatttgagtatgtagatgctaccagtggtaggcagtagttcttaatgtttgaaactttagttcttgttggtgttaggaattgtggttgacttctgataatgcgatgtcttcttggttacatcctttatatcgataagaaactattatttgatgatatgttgttcaacttattggcattttttttgttgagatttgtgttttgattgttttaataaaccttctcttactgtggtcagattttcatgtttcattcattttgtcttatgaagttttgtctttggtttaagcctgtaactcacttagtctgtaattttatatttggcgttttggtattatctttagttggtattgaatattaaagcatattggttttaggttttgcttttatggtgactaaagtgttttgggaaaaggagaattcattgcagtgtttcaagaggtttggtacggtgtgttgtaaaagcatgttttgaatttccaggtgatttactgagtaacctgttgcagagtcctagttcagccaaactgctgcaccagcccatccccatcctggatgtggagagtgagtatgtctgttccctggccttggagtgcctggcccacctcttcagttggattcctctgtctgccagcatcaccccatccctcctcaccactatcttccactttgctcgatttggctgcgatacccgggccagaaagatggcatcagtgaatggcagcagccagaactgtgttttgggtcaggagcgtggccgacttggggtcttggccatgtcctgcatcaatgaactcatgtccaagaactgtgtgcctatggaatttgaggaatacttattgcgaatgtttcaacaaaccttctacctcctgcaaaaaatcaccaaggataacaatgcccacacggtgaagagcaggctagaggaactcgatgagaggtaatgagaacaggcgggagtcgtgcccgggaaagggcctggctgcttgtcacaccatgtcatgtggtgtctgtaatcccctttggtttcagaatatgggctactgataaagatagaaaggtaggtgtttcagaatattcaggctgaactagaaggacttgggtggttaagggaagtgaaccaagtgtgaaagtgctggtgtagtgtgtagacctgttgtctctttccccatccat

SEQ ID NO: 33017 - DNA, 1218 bp, Mus musculus
aactccagacctttggaagagcagtcggatgctcttacccactgagccatctcaccagccccagataggaatttttcatgtctagtgtaatcataaaagaccagtacgtcttttaaaggtccatgcggtttgcttatgacagaattgtctgtcattcagtatgagtatctcttcacgtaaccaaaacttggttgggaatttatttagatttatacaaaatttgtcctgtttgtataaagacagggttgtttccagctgctttttaagttcctgctggtagaatatgagaacttgagaataaaatttgaagggttagtaaagcaaagtttcataaatgaccctctgaattctttttcaaaagtgttgcttgaggtagtctgctcatatgaggctcaacacttcacttttagttgaattttactaatcctctttgtagctcattagttctattctgctcagcatttgctttttcctgtcagttgatccagtcccctgtgacaaccccccttggactgatcatgctgaagacaacttcggaagagctagcttgtccacgtgaggacctcagcgtggctcggaaggaggagttgcggaagctgctgctggaccaggtgcagacagtgcttgggctcttgacaggtgagtgagcgctttgctggtgcctggagacaggtccactgcagagagctcaggtcttctaggtattatcgactcagtgtaaatgtgggaagaacttagttctggtttctagcactcagggccacagtctagtgcatggtaaaacctcagaggagatttataagtttattttctaagagtcttttttttttaaattggtcctcactctgaggtacatatataggccaggtagtaggaatgtgattctcatgctgatagtgtaattggcgtaggtaagtggcaagctctttaacataatttgaatttaagattagaagtaggagtagcaagatgaaaaaaattcctctgtagaatagtgagacgagtcttacccgttgccctgggttgtagttgtatgtggcatttcatctcagctatctgatcagagtctgacagtgtgcaaggggaaggagggggagaagcctatcacacagtgaggcaggaaggtagcaagaacatccccaaagactggaatgtgttgtagaaattatttaatcccaactccatgtctctaccccacctttgatcctttagttcctg

SEQ ID NO: 33018 - DNA, 1148 bp, Mus musculus
ctaaaccatctctgtcatctctccttcagggtaatgctctttccccatggcctagttctcttaatgatgacctcattcatccactgtgcatgcttaatgttgagtcatagttaacttcctcttctgctgtacctgttgatggtattgccaatatgtttgtgtcccaattctggccttctcatcttgtttggttgggtcaggtcctcagtctctgttttgtttttttttttttgatttttatttattattatatgtaagtacactgtagctgtcttcagacacaccagaagagggagtcagatcttgttacggatggttgtgagccaccatgtggttgctgggatttgaactctggaccttcggaagagcagtcgggtgctcttacccactgagccatctcaccagcccctctgttttgttttgtttttaatattttttgtattttattttttaaagatttatttatttattttatgtatacgagtacactgtacctgtacagatggttgtgagcctttatgtggttgttgggaattgaattttaggacctctgctcactccggtcgatcccactcattccagtcctaagatttatttattgttatattaaatacataacaaagatattgtagctgaattcagatgcaccagaagagggcatcagatctcactatgggtggttatgagccaccaggtggttgctgggatttgaactcaggaccttcagaagaacagtcagtgctcttacctgctgagccatctcgtcagccctgtttttttttttttttttgtttgtttgtttttttaaagataggaacttggagtgctggctggactcaaactcaggatcctcatgcatgagtgctgggtttacaggtgctcacccccacaccagctttgtgatagtgctaaattggcaacttatcacacttgagagtcacccgggaagagtctctggacaaacctgaacagacctgggattgtttagatcaagctggtcagtggacatatctgggcggtgattgtccagcctgctgtgccgttcctgggtttgtgtcctccagtgtcctccagggaaagggaactgagcaaaaggagcatgggtgcgttcatttcgtctcttcttgactgtgtgtgtgtgactagct

SEQ ID NO: 33019 - DNA, 1296 bp, Mus musculus
cggcttctggcgctagagcctgagcggcgtgggcccgccaaggaggtctttcgcttcctcaagcacgagctcacatccgagctgcggcggcggccttcccaccgcgcacgcaagccgcctggggaccgcctgccagggtccctgcgccttgaggctcccgggccactcaagcgcactgtgctcaccgagagtggcagcggctcgcggccttccccacccagcgtagggcccgtggtacccgtgccagtgccagttccagtacccgtgcctgaggctggtctggctccgcctgcacccccgggcaggaccgacggccgcacggacaagagtaaagggcaggtggtactggccacggccatcgagatctgcgtctgagccgctgcagcgcagctgctgcggggaagccgcgcgctctaacccgtactggggacaaggagcagtctctgcgcggcagtgggaaggagtagcgtagactaggaggcccagacaccccggtcggtggtgggctggtgacatagctagtaaatgaccatgcgtacggccggcctcagcctagaggagccgaggcccctgacaaaggctgggagcttgtgggccagactctgagctctggaacctgaacactcctggcgcttcataccccttggcagataaccctacagtattccatccaaacctgggcacagaaagggggctttggtgtcgggcagatatgggcatgagatcgatccttagaaactggcaaaggacaggcactgggttgataacagtggtctccaggaggtcagaggaagaggccaagccctttaaatgtagcaaaagttgtgtgcaggaacagacccgattatctagtgatacccctcacttcttcctgctgatgggaactttgaacccaggagggagagctattactgcagccacgaggcttttgggaacagagctccaatgtgtgcccctcctgggagtaagggagcagatggctggggaacaggaggctcggcactcctgtgtccccagggcaatggagtccatgcacagcccagctgctccctccagagcactccacaagcagggaaacagttgtgacagctactcctgggtttctgttgccgtcacatgtcagcctgggttctaggccagtaccctttcaggggcagagcaggtcactgaagtgaggagggagtgtgatgtgtgtctaagtgtccagacacctcaccaggcagctgccaagagccaggcctctgttttagcacactcctcagggaaccccaggaggtacctgctgttggctccggt

SEQ ID NO: 33020 - DNA, 1547 bp, Mus musculus
caaggaggttccatcttggggctggctggctagctagctacaaggggcaccaaccacccctcagcctggagccccccacctctacacacccccttactcccaccacaaagggctataggtctccctgccctgcctgagtccagtttacaaactgtggttgctccagggcctggtcctactctcctggggtgccaccacttccctagtggacacagggccacatatgccaggtaagtagcaaacccctcctcctgccaagagccgagtctcagaaggcccccatcactgccctggcccacctggggccattaggccctccttcccagccgctgcctctcctcttgccttaggcctctccaccctgatctgcaataacaaggaagcgagattccacggtagacatcccgcatcccacaagcgcccctctctgttgagatcctgtgtgggaggcttctcccttgtagtatctaggatggtagtcctcagaagagaccttaggtacgtagcccagccccattgtttagaggcagcaaccagcctgacctggaacaggactcggactgggtcagcctctgctcttgccaccgctggtactgtctctgtcggttgggttgggaccctttgccccttaggagaggtgttggttacagatgtttacctcagtttgaagaaacaaaactgttgaagaaacaaataataataatagcaaaaaattagtaacacggtagacatggaggcttagaagacaaaccacagaggaaacctccccctttacaagttttctgtgaagtacagtttgttcacgtacgcacacatatgtgtgcatctctgtctcaccccagggcaggccaaatcatctattgacacctgtcccagcctgtgtgtccctcacactgccccctgtcctttggtgcttcccaggggcccctttgagctggcttgtggggtataggagagctccccggatgggaagtgaggcctcgggttagctagaggtctcccaccaggttctgtgagcagagagccctatgactgtgatgttccctgagcccacaggacagtcctggtggctggcaacagtgtccagttctggggcagagcctgggttgttctcacgcagtagagcctcacacccctgtctcgcctctcctaccccatgtgtttgtaaatactctggcttcctttggccctgaggaggtttttaaatgtgttatttacttctctaactatgacaattgctataaaataaaaatttagaaaaatgattgtttgagctgcagggtggaaggggtacactgatcttcatttacagcacactctgaggtagcacctgcagtgtctaggcctactcggcctcaagtggactcaggccaggcctgaaggagggttatgcttcctggactttgtgcgagaggggcagagagaattgtcctggcttagaatccagcatcagcttagacttgtgcagcctggaccaaaacggaaagctcctggccaccaccttggctgtatttagtgagcgcctttgttatacatgtcagcgacca

SEQ ID NO: 33021 - DNA, 1128 bp, Mus musculus
cattcaactaccatcccctcaaattgaatccgctcttcatctttagtatatgggagtcacttatctattagtatatctattagaactgaaatggaaaaaaggaaaactatcccataaaaaggaaatttaagaatgcttcagaaataatgagggattccagccggtgtttcctttatagcttgatcaatgaataagagttcagaggggctggacagaaggctgggcagttcagagcacgtgctattcttccagaggaaccaagtttggttcttagcatccatatggtacctcacaactgtctgaaaccccacttccaaggaaccatgcatgccctcttctgtcttctgtggcaccatgcacacatgtggtgcacagacacagatgtgggcaaaaatctcagacacataaaggcagtaaatgggggaggggagttgcataggaatgattcccttagactcatgtgtgggaatacttggcccacaggaatggcactattaggaggtgtgggcctgttggaggcagtgtgtcactgtggaagtgggctttgagatcttacatgctcaagctaggcctagcacggcttacagtctctccctggtgcctgtggatccaaatgcagagctctcagctccttctccagcaccatgtctgcctacgtgctgccatgcttcttgctatgatgataatggactaaacctctgaaactgtaagcctgccagcctcatttaaatgttttcagggttgaagagatggctcagtggttaagagcactgactgctcttccagaggttctgagtccagttcccagcaaccacatggtggctcacaaccatctgtaatgggatccgatgccctcttctggtgtgtctgaagtcagctacagtgtactcatatacattaaaaaaaaaagcctcatttaaatgttttcctttaagagagttactgtggtcatggtgtctccttgtagtaatagaaaacaggggaattcaaggcttgccctatcttggcaccacagttgggaggggtcagagggagagagaagacatcctcacctatgaactataaagagagagaacagtctcgtcttaaacctgcacgtgctcatgaaatattgttcaactttgttat

SEQ ID NO: 33022 - DNA, 1115 bp, Mus musculus
ctgaccgcctccgacggagctggcccccttccttcctgtccgagttccgggctctgcagttctcgctcatgctctgtgctttcgttggggcactgggtggtgcggccttcctgggcaccgccatgttcattgaagatgaccgccggcgggctcaactccacgtgcagggtgagtgagggtcactgtaggtccaccttcacagtaccacctgcctgtctgtctgtctccgcgtatgtactctacagttctccctccactcagactagcccatccattcatgccaccagctgggggcaagagtcccagcatcccaggctcatccagcttagctttgggtctgtctggaagtggattgggctctgtctgtgtgcagttctgagggctctccatgctgcctcatctgggcccctctgcctgtgtccccttgctgcctgtgtccccttgctggctcttatcttactggccttggctctgacccctttctcgcaggtctgttgcatgagtctgggccctcagatgaccggattgtagtacctcagcgaggccgttctacccgagtccccgtgtccagcgtgctcatctgaggagccggtgcttacccggccactgatgcatcgcagctgggccttgggcccacccaagacggttcccaggcagaagccctcaccaggcccaggtccaagaaggaagccctgggatatctcccagctcccagacactacatgggcagcccagggaagagatgggagtccagaaacggggaaggggtgtcctctctactaggacagcccaaggggtttggtgctatttgtaatggaataaaatttgtaatcagactcctgactgactgcttgtctctctgtgggtgccactggcctcagggaatatccatagtcccaggacttagcaggggctgtcaggtcaccctgtgggtaagtccctgtcttctgagcttggtaatctagaaggagggctgctcttttctgagtgagctggttcagtatgactgtgactcaccgtggtcccctggaagtcgctctcccagtagttaagcctgggagctgggggcctgtggtgccctcagtgccctcggtccacacaggccttggcagagc

SEQ ID NO: 33023 - DNA, 2672 bp, Mus musculus
ctccaccctgcaagcactgccatttcaggcatgtgttgcatggtcagctaaaagtcaacttttccgttttggcgctggggaataaacttgctagaacattggacttgaaagtgtgtgtgtgtgagaccactgctcctggccaccaacccattttctgtctatctctgtaggttctcccagcctgcctttcacatttttgcatgtgttgtttatatctctatgcaggattctcctcttaaggttctcatgtcacactatgaggaagccatgggactctctggacacaagctctccttcttctttgatgggacaaagctttcaggcaaggagctgccagctgatctgggcctggaatccggagatctcatcgaagtctggggctgaagctctcaccctgttcggacgcaaagccaagacatggagacaatagctcccaattttattattgtgatttttcgccccataagggctaacagaaactgaattagaacttgtttacttatttatttctggtgctggggattgaaccccagactatgcacatgctaaggatgtatgaagtggaggcaaaaccaaggcattacctttagccagcctctagtagactgtagtgtcaagcaagtggctacttggtagttgtgtggctctgtgtatgtttgtgctgtatttggcagcccctggggcacatagaagggaccttggcttccctaccatttcacgttcgctggtgccctttccttcatcagatgacttctgtgaagctgcctatgttgagtgtgttgaactaaatgagctctgctttgggtgtccaggcctggggtttgtgccgcagttggagccagcagtgacttcactctgacttgggactgagaatgcatttcctggtggagacactcgggtgcagaaatataacagaaggtgacatacatgctgaagctgaggactaggtcgaaagttaacgacgttgcattttcagccttgggtatcctctctgcctgccaggactctagccagtgtctggtacacacttcttggcatggacacctagccataatcaaatacatagagccgttgagtgttagatcactctagttctcggtcttcctccctcacgctctctctctccagttagtacctatctgggatattggtacctttggatatgaatgtccttataagaaaatattctgaacacatgtggttttactgtatacacacggagttgtgcaatagatagtctgtcttcagtcagaatgagtaacagtctagccatgttagcgccttctaggtccgtcgttgcttggatctctgtgggtgccacatagtggcattagatgcttttactcacacattgccttaagggggatgcccaagtctccagctccttgggaccatattccaggccacagcaaacatctttcatgtgtcccctttgggcctgggtaggtctttctttggtgtgcttgtccaggctgggactgtggcttatacaggttcttttttcttggggcttctctttccttatctttaccagcatttggcgctgttgaaatcctgattttggcagtcagtgtgtataaagcaccacatatcttaatatccctttatctgaagaccatttcttacgcatggccaccttctggtttttctttgtcagctgctgtattctcgggaggcggcttcctcttgcttgtgtttcctttccttgaggagttgcttgtgttctgggcggttgcaaaaaccctcagaacagcactttgtgtatccaggggattttcaccaaacatacattcttaattttaatgtatacagttggcttttgttaggaagttttgttttgattttttgtttttaagggaaaatacaaaggagcttccagagtgggggcggggggtggggtgggggtgggggcggtagtggagaatctcaggattgatacgtttgggtttccaagctagtttaagagactttgattttcttcttttagctccatagttttttgttcttttgtttttttttgtttttgttttgttttgttttgttttgttttgttttgtttttttctctcatattgagaccactagatgagactagagttctaactggtctactctggtgtaggtagattgttctgagccctctacccaggttctcactggttgctgctgggctcctgactattgtgtgttacttataaactgtctaaaatgcacctttgtgccggagaacaagttgtattttgtttttaattataacgagccagttttctaagctttgtctactaaaacaaaataaaaacattatagtctgattttcacaaaagtatgccaactccctttttttgtgagaatatatgccattcctttgacttttgtaacatttttaaaaatccatgatatagtatagcttccaggtttttcagctcttgtatgcccattggttagtaagtctgaacacactattatgtatccatccaatctcaactgaataaagggagatgccttttggagcacttgctggtttctgtctttgtggttctcatgtgatcccacttgacatttctgtgacagagacattagttattcccacacacccatccttctttgtcctcagttaacacaatccacagcttttaacccacacaaactctcagaatgaagacactgtagaca

SEQ ID NO: 33024 - DNA, 1131 bp, Mus musculus
ggaggaaggatgtctaactgacagggactttaactcccacctcacttgtcatcctgccctcagcacctgcgcttgtcactaaatgaggagggacagtgccgggtccaacatctgtggttccagtccattttcgatatgcttgagcacttccgggtgcaccccatccctctggagtctggaggctccagtgatgttgtccttgtcagctatgtgccctcccagcggcagcagggtgagcagagcaggtctgcaggggaggaggtgcccgtgcacccaagaagtgaggtgtgtgtgccaggaagacggggttgggggggtggaggaaaggccctgttagtggggagcagggcagtcaggtacctgggcagggacctagaagggaagcagaaggctgacaggatgcaggcagaggctcctcttggggcaggggcagtggagagctgggtgctgcattcccattccattggaccctccgcgccatcattgtctgtctcctggacccatcctcctcggccttgtctttggccttttgggggattcatggcctgatcccctccttcctcccttgatgtctgatgtccctgtctgatctctcactttcccccacccaccatcccatctgtccccacgttgcccctcccctcccctcccccaggccgggagcaggctgggagccatgcaggggtgtgcgagggcgaccgatgctaccccgatgcctcctccaccctcctgcccttcggagcgagtgactgtgtgtaagtgtggtcctctcaccaccgcccatgattcatcttccatggaggggggttgctcaggagatgggacatgggggagatagcacatggctccttggggaggacaagcaaaggggaggtcaccataagaactcacttccttccacaagcaatgtcttctcaccattcttatccagaacggagcacctcccgtgacccagcccagccctctgaaccccctccatggacagatcccccacatcctggggcagaagaggcgtcgggggcgccagaagttgcggcagccacagccgcagcagccaaagagaggcaagagaaagagaaagcgggcagtggaggggtccaggaagagctggtccccgtggctgagctggtc

SEQ ID NO: 33025 - DNA, 1615 bp, Mus musculus
ggggcactgaaactaattctcttctacaggcccatgtccaaactggagtcacagcagccccgcccccacaccctggggctccccacccgccccaggtgatgctgctgcaccccccccagggccatggggggcccccccaaggcgcggtgcccccgagtggggtgcctgcactctcagcttccacaccctcaccctacccctacatcggacacccccaaggtgagcagcctggccaggcgcctggatttccaggaggagccgatgacaggattcgtgagttctcgttagctgggggaatttggcatggaagagctgaggggctgcaggtggggcaggatgcacgggttctgggtggggattgaggggtcttggaggcagggctgtcccagagggcgcccgccgacccacacctgtctgtgaagtatgtagggtgggcagaagccacagtcgccgccgccaggggcttgctcctggctctgtcctttgcttccctccgtcctcgctcagttgtgatccagcagcccccctccccactgcctccccagctctcagtgaccccgactgtctcctgacttagccgaggtaaggtcagcgcagcagacagggccagactggggcgtggggggctgagctgggcaactgagtaagggctctggcctactgggaaacagcgattgacctgtgcttctgacagtcccctgagactcctcgaggaggccgctcctccccacacccctcaccccctggacgcattgacagagggacagctgctcgggttctaatgctcctgctctctctctttcccctccaaccagttcaatctcatccctcccagcagctccccttccaccccccggggaactgaagattgtcctggccgcgacctgagacctccatgagtggagggaagagtgatctatgtctcttccccccagcagctgggaccagtcctagccccgtccccaacccctttcccttggggagttgggggaattcctgccaagcaccttgaatgggaggggtccttcaagtgggccgggctggggtccaacgggggtgggggaggttcctgctctgccccagctgggtcctacccagtcttgtcctcccatcctctcatctattcccccccgccccctggagacggaagatcttttattttctattatttataacctcagacttgggccccctgttcttctccattaacttgagtgttctgtgtgagaccaacagacagatgcctcaaggacttttactttttattacataaaaaaattaaaaaaaaataaaataaaaaaataaaattttaaactaacttaacctgcctatgggtttgattcttaaaagtaaatttccccttccataggagatagtttggagttttgtaatctgagcctgccaaggacttgggtagtccttagtgggctgtaggacctttgggccataatacagagaacatgtgctgtgttgagggcagagaaaagcccccagaatttgggcatgacagtattgggtgagagaaagggacaaagtaaggctgatactgccctcaggacacatggcacagggaagcaggggaaactggaaagccacaaggtgttcactatgtgga

SEQ ID NO: 33026 - DNA, 1187 bp, Mus musculus
gggcttcgagatttcacacaaccacttagagctctcttagtttgtgaatgtccatcttgtgatttgctatgaagcgcttagggaaagtgtaggatatatttgacacaggtggatttaaaaaggctgaagtgggattacagaaatatctcctcttgtctcttacagaacaaatctaccagtactccaacttcaccagggccccgtactcattcaacaccttctataccggtgctgacagcaggccagagtgggctctacagtccccagtacatctcatatatacctcagatccacatgggaccagctgtacaggtaggagagagtgagcccaagaaaagtgctgattgtccagctcaggctgttctgagcacctgctgagccccagatctttctcaggcgcctcagatgtatccatatcctgtatccaattccgtgcctgggcagcagggcaagtaccggggtgcaaaaggtgagcagggttgggaagaagagctgggactgcctagtaccttttggctaacgctgcttgagctttgtactgtttactctccacccacaggctcacttcctcctcagcgctctgaccaacaccaaccagcctcagcccctccaatgatgcaggctgctgctgctgctgctggcccacccctggtggctgccacaccctattcctcctacatcccctacaacccacagcagttcccaggccagcctgccatgatgcagcccatggcacactacccttcacaggtaacgaacacctgaaatccaacctgatggggggaagcagggttattttgagtagtggtggctgtggggttggcagtgtccacttgaattcctgtaacaggacattgaacctttgctctcgggttttccctctgaattaaggtggttactgtctttaaaaccactactgaggctcatgctcctatgcacatggaagctgacaggacgttccaagcaggtctgcttagcattttgttttgtttctttagccggtgttcgcccctatgcttcaaagtaatccacgaatgttgacatcgggaagccatccccaggccatcgtgtcgtcctccactcctcagtaccctgctgcagagcagcctaccccccaagccctctatggtgagttgtggtgcccactttgtcaccaggatatatgtatccatttggtgtgctcagca

SEQ ID NO: 33027 - DNA, 1182 bp, Mus musculus
gtaactgagtcaagttgttgaaatgctgggcggtagtttgtagatgcttggtgtcgggcagggtcttggattttatcattccagtttttttttgttgttttgtttttgtctttttcaagtcagagtttctctgtgtagccctggctgtcctggaactctgtaggccaggctgactggccttgaacttaagaggtacagctacctctgcctcccaagtgctggggttaaagacattcagctggatttaatgtaatctttttgagaaagaactctagttttctttggttctaacatgtcagtttatgggttgtagctggttatcaggtgttttgttgagacttttttttttaaccagcattttagaacaggagaagttataccacttccagtctttttgaactacccagagaaaccattgcctttgtgttacttacctgccctgggcttaacacaggaaattgtgcctctaggtgaaaaaaagcttgtaaattttctatgggttttccccctatatgcactacttcctggccagcaataactatcgtgtagctctcccttttcttccagtgggccggatgtaccctccacggtctcccaagtctgctgcccctgccccagtctcagcttcctgtcctgagcctcccattggttcggcagtggcgtcctctgcctccatccctgtgacatcatcagttgtggatcctggtgcaggctctatttccccggcatctccaaaactctccctgacccctacagatggtgagaaccggttgtaaatgctggagaactgtgggtatgacttgagagcaggatctaattgcctctttttcttcagtaaaagaactcccaaccaaggagcccagtaggaatttggaagcccaagaactggcccgcatagctgggaaaggtgagggcaactttactctgtagtcccatttactcgagggagcgtttccctttggaagcagtgtagtgtccatttgcccttcgatttcatttatctgtttgtttgtttgtttaagatttattttatgtatatgaatacagacacacctgaagagggcattggatcccattacagatggttgtgagccaccatgtggttgctgggatttgaactccggacctctggaagagcagtcagtgctcttaactgctgagccatctctccagccctcgttt

SEQ ID NO: 33028 - DNA, 1200 bp, Mus musculus
cttccgaaatgttgacttcaattatgctactaaaggtatcgctctgaactgttgtgtcaagaagctgacgagagctagcccgcaggttgaacacgttgacttgatttacttttcagtagaggtgacttgagttcttgagcacatagcttgatgcctgatagagtcgagtgaatgtgtctagcggtgtaggtactccttttttcatgttttcaagtttagcttttagattagattggggctttgtttttctgttgaggaaggaagggtctttgtatatatggctagcctccttagactggcagagatcaaattgcctctgcttctgagtgctcgcattaccagcattcaccaccccatctagatagacctgtttcaatagttctccctgctcccataaactaaatctggtgtttcttagtttcattttgttaaactgcatggggtggggagtaaggatgagaagtgggcccatcacctgactctgttgctcccctctgccaacagataagttcactgactcagccattgccatgaactctaaggtgaatggagaacacaaagagaaggtgcttcaacgttgggagggcggtgacagcaacagtgacgactacgatctggaatccgatatggtatgttctcccttcctgagaacaggcgggctgagttgtggtcaacatgggttgctgatgtggacgttcattattttctgttgggctatgtttgttcacttttgttttgaggttgttcttggtcagttttcccatcctctgcattgaaaaccattaaagtttctccgtggcagcacttgtaattgtagtaaaaagtataaggtgggcatagtataacccatacctctaatccagccttggggaagttgtagcagaagaattgtgaagtcctggacaatctgggctacataacaaaaagtctttaaagaaaagcagaggagagaaatggaggtgtataggaggactattgtatatatccatgcttcttcattctgtttcttcgatgagcttagagttctaaattagtctgacaaggtgggtcagataaaggtgcttgccaccaagccaagtggtgaaaaggaacagattctcgcagatcgtcctcagactttcacatacctacaatcccacaggaacaggtccacattacggatggttgtgagccgccaccatgtggttgttaggatttgaa

SEQ ID NO: 33029 - DNA, 1182 bp, Mus musculus
ccattcccttttcctatgtggaccttatcctgatttatctgtgtgactttagttcttagctattcttcataatgaagcctttaccaagcctccatcaccatacatacatacatacttccacattttcccctcatttattttttctctgttcctgtagtaatttttttaaagatttatttattattattcataagtacactgtagctgtcttcagacacaccagaagagggtatcagatctcattatgggtggttgtgagccaccatgtagttgctgggatttgaactcagaacctttggaagagcagtcggtgctcttaactgctgaaccatctctccagctcctcttgtagtaattttgtcctgcacattccatgtctagaatggtagacagacctaggtaaacagtttgcctgtggctatcacctctgtcctttgtgcttagatcctgtataaccgtactatggtgcaactgggcatctgtgctttccgccaaggcctgacaaaggatgcacacaatgcacttctggatattcagtcaagtggtcgtgccaaggagcttctaggtcagggtctgctgctgcgcagcctgcaggagcgaaatcaggaacaggaaaaggtagagcgacgccggcaggtgccctttcacctgcacatcaacctggagctgctggagtgtgtctatctggtgtcagctatgctcctggagatcccctacatggctgcccatgagagcgatgcccgccgacgcatgatcagcaagcagttccaccaccaactgcgggtgggcgagcggcagcccctgctaggtgagtgtggacctctgtggtcctgtacacatcttgaatctttgtttgcccataagcattaaaagaagttcatggaataacttcctcacaagatgacccctcctcttcctggcacagtctctgagaaataattcattattcaagacacaatgagtttgaggtcagcctgctctaccaaatttccaggttatccagggctacttagtaatcctgactttttttcttagatttatttatgtaatttatgcatatgagtgctctacttgcatgtgtgtttacacctcagaaaagggtggaagaatcccagatgttcctgagaggacttaggccctctggaagaatggtcagtgctcttaaccactgagccatctctc

SEQ ID NO: 33030 - DNA, 1140 bp, Mus musculus
agctcctgggagagggtgctggttttagggtataaatgaagaggggaaaccaaaatggttggattgctggagatggaaggttggggaaggcagtacttatgtttgagatgaggatgggtgtcctccttcccagagtatgtggagcacctgaaggatgaggcacaagtgtgtgccatcattgagcgagtgcagcgctacctggaggagaaaggtaccactgaggagatctgccagatctacttaaggcgcatcctgcacacgtactacaagtttgactacaaggcccatcagcggcagcttactcctcctgaaggatcctcaaaggtgagagtacttggtaatcttgaggagcaagagaagtgtgaatttatcctccttatctattaggccttgatgataagtcttctacccccaggggccttttgaagtagaagggggcagggtcggaggggttgcagtgagattggaaagagcctctggtagtctttgctgggtagccattactaacaacttcccattcctctagtctgagcaagaccaggcagaaaatgagggtgaggactcagctgtgctaatggaaagactgtgcaagtacatctatgccaaggaccgtacagaccggatccgtacctgtgccatcctctgccatatctaccatcatgcgctccactcccgctggtatcaggcccgtgacctcatgctcatgagccacctacaggacaacattcagcacgcagacccgccggtgcaggtaggtaggtgggtggaggagacggctggcctccattaggtaaatggactcaacaggaattagcacgtttagctagtgtggacccagacaggtttgggtcttttccaacctctgtttgttttcttcttgtttgctttttgtttattttcctaactacctaggattgggttcagaacattaggagctgatcttacttttctaaaaagataaaaagggtctttgaagtagttgttaaattaggaggaaaggggtcctagataactggactgtattgggatatgctagagcgaaattagcaggattcatgacagtaggagagccagcaacatcttgaggacctttttatatatagagaaaaaatacaaatagctatatctgaggtgtagatc

SEQ ID NO: 33031 - DNA, 1239 bp, Mus musculus
cgcgggcggtggggaaggactcctgggcgcgtgttccatcgtccgggtcttctgcccgctaggaggtggaggacacgactctgaaccgttgcgcgaccagcttccgagtcctggtggtgtcggctaagttcgagggaaagccactgctccagagacaccggtgagccccgggagccagcctctcacccagccaagcctcaggctccggatggcagcccgggcatccgctcgccatgggtgggaccaactcattcccaaagcccggagatgtgacccatagccccgagggtgctcctgcctttgtgattggattcctgtcctctccttgaatccccacttcttggagacgtctccgatctccttggtcaccctagcttcggagcccatcactccagctgaggccgctcatttcccattcccttctctcgctccaggctggtgaacgagtgcttagccgaagagctcccgcacatccatgcctttgagcagaaaactctgaccccagagcagtggacccgacagcggcgtgaatgaggggcctaggcctgaacagtcattaaaatttaaacctggcccagctggtctcagtgtgctgtttgaagaccctgaggccaagtcacggatgtggcttttccctgactctcctccagccattgtttcagcaaatttggatggatttctttcctgagccctctaggtcccaacttaaacaatgaagattcggttcttaagtctgccaaggctttactgtcaaaccctgtggtctgtactgtcaccaaggtcagacctcaaaaagcagggtgttcctgctctgtcagccctcagaaaccctgagcattctcccaggttccctcactccaggttcctggaagtagcagagacaagatacagaatttctgtcagtctcttcacaggcgtacacactcaggaggagggatggacacaatgcacgctgatgttcagttcagctctcccacagctagttcctctccactgtggatctttgctttggttttgtctttcagacaggtccccatatgtttcccaggctgcttgtaaattcatgagcttaggggatcctttggccttagtcttccatgcagctatggctacagacgtccagcacaatgcccagtccttcccatattgtcaaggcttgtctcagccacccagtttcctgtctccatcttctcttgatttcatcacagaggttggtcaagctgggatcatagtagtcag

SEQ ID NO: 33032 - DNA, 1121 bp, Mus musculus
gcttatcaacaccacctgcgaccttaaggtcagaggttaaatgcctccctccctctccttccctggtcctggggcctctgggtggctagcaagagcagccttggaacgtggcaagcaagaacaaaacagtcagggcaggggcacttcctaggccggggaagccttgggcaatgtagttcagtggcctgggtttgattccagatctgtgattttggcctggcccggattgctgaccctgagcacgaccacactggctttctgacggagtatgtggccacacgctggtaccgagccccagagatcatgcttaattccaaggtaggagagtttcccatgtctgcgagggagtcctagagccatctcagggcctaggcacaatcccgctgacccttgggccttagcaagatgtagagagtagagttttcctcggctctgtcctctgccctttgctgtgttagatctaagttggatatggtgcctgtcccaaatactgggaatggccctgatgaggctggccgggaagctcagcacactttccccctagggctacaccaaatccatcgacatctggtctgtgggctgcattctggctgagatgctctccaaccggcccatcttccccggcaagcactacctggaccagctcaaccacattctaggtgcgagggcctgtctggccgagaggggtgggggttagcttctcagaggtgacatttctggagggtgagaattaggtaccacatatggagcctcctccagcatctcacggtatttcttcccatttgaaagctggggaaagcaaggctaagccgtacccctgagaagactgcagccagagtctgagcccagggctccctggttctccgctctctgcccttcgtcgctaccccagtgggtagatggggaggactggcggcacgtggctgggcttgggctcctggcggcacgtggctgggcttgggctcctggtcttgcttcctgacctgttgccagaaggaggactgatcttctcaccaagacaactggtttctccgcaggtatcttgggttccccatcccaggaggaccttaattgcatcattaacatgaaggcccgaaactacctgcagtctctgccctcga

SEQ ID NO: 33033 - DNA, 1337 bp, Mus musculus
tcagtgtttttccagactgccctatgtggcagaaaatgaccttactgccaggacaaaccttgatcataatggttctctgggcatttttttctccttagagcttctctgttctagcatttgctatcctgtctcccagatcccctagaacaagcctctgcttaatgaggaaagatgcacgggcttttaattccttggtataatagacaaccagaggagcccacacactgtccttgtcttgtctcagacacaacaggctggggagtgagcccccgcggggcaggttacctgtttggcagtgacgtggtcgcccagttcaatgcagccaacgacattgatatgatctgccgtgcccaccaattagtgatggaaggctacaagtggcacttcaatgagaccgtgcttactgtgtggtcagcgcctaattactgctaccggtaagctggcaaggccaggagcccgggtgagggtaggtatctgcgccaaccattgttaactctacttttcttaaatccagctgtggcaatgtggcagccatcttagaactggatgagcacctccagaaagatttcatcatcttcgaggctgcaccccaagagacacgtggcatcccctccaaaaagccagtggccgactatttcctgtgactccttggccccagcccctctggcccttggaccactgtgactgccctctgcccagtcggaggctgggtctgaggggctgcctggctttgcttgccccagggtgcggacttgctctggagaggtggagccttggctcctggcttcctctcctttctcccacttgatccatgaagttttcagtcattttttttttcttttttccttttttttcctttcttttttctttttgtttttgtttttagataaaacattttgagaaaaaaagaaaaaaattctaataaaagaagaaaaatagacttaggttctgtcaggtttgattggggtggacatggagacctgctctgcttgtccgttgggcccggagccttgaggctccatctgctaatcttctaatctttcccaaaggcttccttagtgcttcatgaaatctaggttcatggacagccttgattcttaaagcaaccattgtgaggaagcttttccatcttgaaggggacagcccagagcaggccctttcctagccacaagggcagggcaagcagctggaccttaaagctgtggctcccccagccccacccagggccaacaccattagctcaagtttcctgagcactaatgtctttggagttttattaacaaaaatactctgatcctgagaacaaattggcatggcttgcactagtaacaaggccc

SEQ ID NO: 33034 - DNA, 1457 bp, Mus musculus
ccctgttttccacctttccctgctgtgttccaggtcctggcggctgtctacaaggctctgagcgaccaccatgtctatctggaaggcacattgctgaagcccaacatggtcacccctggccatgcttgcacccagaaattttccaatgaggagattgccatggcaacggtcacagcacttcgtcgcacagtgccccctgctgtcactggtgaggcccactccctcatcttggcctggtgaggtggatgcaccatcacatttgactttgtccagggtgacgcctcatggcttttcctgctccgcatctctaatgcaggtccctttccttctgtgcttgttctccaggggtcactttcctgtctggagggcagagtgaggaagaggcatccatcaacctcaatgctatcaacaagtgccccctgctgaagccatgggccttgactttctcctatggtcgagccctgcaggcctctgctctaaaggcctggggtgggaagaaggagaacctgaaggcagcccaggaggagtacatcaagcgcgccctggtaaggcaggcaggcaggcgtggaagtgtgaacaggtgcctgggcggggtggggagggactcaagaagagaattcctctgattcctcttcccttttaggccaacagcctcgcttgtcaaggaaagtataccccaagtggccagtctggagccgcagccagtgaatctctcttcatctctaaccatgcctactaaccagagctgaactaaggctgctccatcaacactccaggcccctgcctacccacttgctattgaagaggggtcttcaggctctttcccatcactcttgctgctgccctcgtgtgcggtgttgtctgtgaatgctaaatctgccatcccttccagcccactgccaataaacaactatttaagggggagtctgttgttcatgtcttgtagggtataggggagggcctgaggaaagagccttactttgggtttcttcttcttggacagtaaaaggaagggtttttttgaccagagctttgagaaaggcatagtattatgggatgttctttgcctacatctaattgaaggtaacttttacctaattaatattcagtttaagccaaccaagggcttaatgaatacttggcaaggattgtatcagggctaacacatttatgcgtttttggggactatggagccttttggagaacgcagaatcctctcctgcagtgacataggtatacagctcaactgcagaactcttgggttccaggttgagaatggagcctcagagctgctgatgttccctggtgatagaataagaagcacatcaaaccatgggccatctgtattcttgccacattatattgagtgtagtcggtgtgctagtgcacacctttaatcccagcactcaggaggcagaggcaggcaggaggccaacctggaactcactacaaagtga

SEQ ID NO: 33035 - DNA, 1459 bp, Mus musculus
tcgggaaatcttggttctctcttaactctcgcctttgggttgctatgtggctttgagcacagatcatttctttcttgggctctttcagatgagggtattaggctctctgccctattcgtgatccttaaattctaaaatattcccggttcaattttgtttctaggcaaggtgacccatggcaacgcgcaggccagatgggtccagcttcaacatgacccgcctgtccctggctctggctttttcctttcccccagttgccagtgagcaaccccactctgagctgggcaacacccagcaacagacagagttaggaaaggtacaggaagaggcaggtctagtatagggaagtcgggagtaggggagagctctgggacaggaagtatcccaggaccctcagggagtggggcaggggaggtgggggctagtgccctggcctccagggaagctttgttaccggggagaccatgggatggtccaactaagcgctggtctctgtctgcctccctcacccaggaaagcactgccaccggcaccatgccccacccatacccagcactgaccccggagcagaagaaggagctgtctgacatcgctcaccgcattgtggctccgggcaagggcatcctggctgcagatgagtccaccggtgcggtacaggcagaagaaagggggaggagggacccaaggttggagctagcaggctgatccccttatctccccacatgaccctcctcccttcaggaagcattgccaagcgcctgcagtccattggcaccgagaacaccgaggagaacaggcgcttctaccgccagctgctgctgactgcagacgaccgtgtgaatccctgcattgggggggtgatcctcttccacgagacactgtaccagaaggcagatgatggacgtcccttcccccaagttatcaagtccaagggtggtgttgtgggcattaaggtaagagggcagactctggggggggggtaagattagaggtggatctggagaaagggattaataggtagggagggggtgaatattgggctagcaggcctagagactcaggtgtggatgtattcagcataattttttgtcagtgtttggggtgaacttaggtccttgtgcatgttaggcaagcgctctgttgccaacttaatggtttccctgtgatacaagaaggtgatttcatggtgaagaagtgaaaaggttttctcagtgtgcagtagcaccaggtccctctagtccagttaacatttctctcaaataatacacatcttttctcataaatatttgcaagccatgagaggctacagtgaaaggtgaagtttgggctgggtagaggagacaggggccataaagctgactgctggtctcctccctggcaggtagataagggtgtggtgcccctggcaggaaccaatggcgagacaactacccagggtaagaatgatctgcctgcctcc

SEQ ID NO: 33036 - DNA, 1136 bp, Mus musculus
aggggaccaggcagcctggaaaggccaagaaaggagctgcaggatggggtggggcactggcaggagactcccacgtggccctgtgcacgggtggttgcatatttgcaggtaacagcaaggcaggcaggaggaagtttgcatatgtgaatatagctctccacagtccctcacaagaagacaggcccgtcacagagactcacaaaaataagacaggtagtgtggggcaggggcatcccaccccatgtaaacgtgcaacacactcgtgcgaaggttgggtactggacccggccccagagggcctgtgatggacagctgctgttcactcaagccaaagggtaagcccctgctgcagggggcagctcgctggtcagagtatgccagcgctccagggctgtgtccggctgatgtagacagtcattccagtgtttctgggcctctccccgggctcctggccccagagacacaccacctgaagaacaggcaaggcaggccaacgtgtcagcgcccactctcctccacttccctcagagcacctggtgggctctgccactcacctatgaagtcattggatttgccaatgtcgtagtcccagactgtgacctccagggtcttagtggccagagtggagagttcaatctcatagaagaattcctgagaacaaaggcaggcggtgctttctgtgaggcctaaccacatcgctgtccccagcccaactttatttctactccctgacatttttacctcattaaattccggatttagtgtcttcttctttacacatgttttgtgcttggatttcttatccacatctggtctcaagtacctagggggtaagagaggaacgtgaagttggttagagacaggctaggccccagagcagttaggctggggtcaggcttgggcaagggctcacgtcttcacataagggtcagagtagccgttaacatccattgcagccaggtgcgcacagcgaacaatgcccaccagcagcccatgccgccgagagctgtagctgaggctcagcaggatgcgcccgcgctcttccagcagcccaggtccctgctctgcctgctccagctgccagagaagggggcagaggtgagtctacaggctctccccacctcccacccagacag

SEQ ID NO: 33037 - DNA, 1190 bp, Mus musculus
ttctagagcgatcactctggccgcagtgtggaggaggagctggagctgggagaggctgaaggcagggagtccagttaggaggctggtacctagaccaggtgagctgagagaaggtcctggcccaggctggtggctgctggggtcccaaggaggggctcatccacgatgtcacagaaactggggagcaaagctactgcttaggcttctggcttaggtagcctgtgatgcctactataacccagtgaaccccacaggtggaggagggagagccgaccagtggtggcaggtggtgcccagaggcaggaagaaggcgctggtcctgaatctggctgtaactgctggcacagagcaaccagagtgccttgctagaaagggaagagcccagcttttctgtcaggctccctgtcagactcccctcaccccatccccatcatgcctccatcactgcccctcaccccaggaacttcatggcgtgagattgaggggctgcggtgggcccccgcatacaccttgaatgcctttcagtgggcactgtgcatcttcctcgtgccgatgcctctgactagacctctttacgtttctccctctgctgcagatgtcggttggaccccctgactgccccgtgggtgggccgctggctttcccagccaggggttctggtgccagtgttggggcagccctgacccccctgcctcctcccaagatgcctccacatacaatcctgagcaccgtccctcagcagatgttcagcgatgcaggcagtggggatgacgccctggacggagatgacgacctggtgatcgacattccagagtagccacccagtgccacctgccaggcacctcacagcactcctcctgtgccagcaaactcaagcccacttcctcaagagatgtttattgatgcccagttgccatgcttcggccactgacacaatcagaaaaggcgtaaacatgcacaatgtccccgaggaaggtggcagggtcctgcccttacatcccagccccatccagggaacagttatttaaacgagtggccaaaagggtctgctacatcttcgggaggtagagacctacggtggccgcccctttagaagagcagctacgcagggctgggatttagtgaaggctctgtattaaagagttggctctttctttccttgtcctttcctctatttggaaacgtcctcc

SEQ ID NO: 33038 - DNA, 1184 bp, Mus musculus
ggtgggcagaggagtagggcaaggtgggagtgggtggtgcctgatcctacaggcagtgtgcttgaagcctacacagtggtggtggggacagatgttggctccagctcccccatcagacctcctcatctcatgagcttcttggggctggccagtgaccccaggccagcttgggcattggtgccccaaggctgaccaggagccctgcctccccaccatggtgccagggtctccctccatcaccacctataaaaggtgggaactgtgagtgtcaaatattcatctggtcccctaggggaggggaagggtgggtctagatatattatatttcagagaattatacaacccttgtgatggggccatgaactggggacaacagggcccccagacctggtggaatggcagagcaggtctggtgccaaagcaaggagaatgggaggaggccttcctccagaaggatcaggggtcttgcagtcagggtgcctgagtctcaccattctcctattgctgtctgacgtcctgtgccgtcttgtctttttttttttttttttttttttttaaattggggtcagggctggggcgggggacaagggaaggaccttggaaagggctgctgccaaacctgggagcagtcatgggagcccctctcagctatggggctggcacagagccctagggcgagcttttaataaactgttggttattctaacagaccacaggatgtctccctttttgtctaaggtatgtgtggagaatttatcagtggcaagtgatagtattacttgtgcttagttgggtgacgtgattgaagttgtagtgattttagtgggtgcacatatgactagaaggtcatcagcttaagtccttattctgctttgctttgggatcccatttgtctatcttactacacctgggctctgattggccagacgggtctactaaaactccctgtatgaggctaagagaccctggcggcatgggaatgaagatgaactgagcctgagagtgtgtgtgttgttggggttgagacccagggctttattcatgctaggcatacattcttggagtcaactttacattgctaaggccagattggccacactggaggagggagagccataccctctctgataccatctggtgacagactggatgacacagtacaggggctaggacaactctggaat

SEQ ID NO: 33039 - DNA, 1185 bp, Mus musculus
ggcctcctgcccctactcctcctgctgctactcccattgctggcagcccagggtggaggtggcttgcaggcagcactgctggcccttgaggtagggctagtgggcctgggggcctcctacctgttcctttgtacagctctacacctgccccccggtctgttcttactcctggctcagggtactgcactgttggctgtccttagcctgagctggcgcagaggccttatgggtgtgcctctgggccttggggctgcctggctcctagcttggcccagcctggctttacctctggcagctatggcagctgggggcaaatgggtacggcaacaaggcccccagatgcgtcggggtatctctcgactctggttgaggattttgctacgcctgtcacccatggtctttcgggccctacagggctgtggggctgtaggagaccgggggctgtttgccctgtaccctaagaccaataagaatggtttccgaagtcgactacctgtcccttggccccgtcagggaaatcctcgcactactcaacaccccctagctcagttaacaagagtttgggctgtgtgcaagggctggaactggcgcctagcacgggctagccacagattagcttcttgcttgcccccctgggctgttcatatactagccagctggggcctgcttaagggtgaacggcctagtcggatccctcggctgctgccacgcagccaacgccgtcttgggctctctgcttcccgacagctaccaccagggactgtagctgggcggagatctcagactcgcaggaccctgcctccctggaggtaaccagttccaattctccacccaaatttagggcactgagcactttatctcccatgactcagtaaagtttctccagtctcccagcctctcctccccttctgacctttcttcctcagtatgttttcccaagtccaatcccggccccagatctaggtttttagacaggcagcctcctctgctatggagtccagaaatgacactctttgtgttttccccagtcccctaagttattgctgtcccctgctgtgtgtgctcatcctcaccctcattggctcaggcctggggccaggggtggcagggatggaagtcatgggggttttccctctttgattttgtttttctgtctcccttccaacctgtccccttcccctccac

SEQ ID NO: 33040 - DNA, 1213 bp, Mus musculus
accttctgtttggtgttgtcactatctctttaatcctgatgattagacccaacctgtgaccccaaggacctggcactgccaagcaggaagggtgctcaggaggccctgcccatccagctggtgctccgggaggcctgactgaagactgggtgttgccacacatcctgctgcctcagtcctggggtctggagtgagactttggggacatgtgagggcaaaggagtcagactgatgtcattggacctggggtaccaggctggggagggaaggggccagctagatccttccctgaggccagctcctctctcctgtcctgctctggaaacctccacaataaaggggggccccttcagtctttttggatgtgtttactttgagacactcttagatgatggcccagggtccatgggagctggattagaatccacctggatgctttcccaaaggtggctggctcctccctgtcgttccagtgatctcgagaggctttgtggctcctcaggttcacaggcattgtctctgcccacctgctttatgtccctagctggccacttttgattgtaaccttgatattttctaccctcatgagaatgtgagcttcatgagagcagacttatgtctttcttgtctctgcctagagtgaaaactagcctggcatgtggtagctgcttaataaatattcatgggaagatggatggttttctcagagcatggtccttaggctgagagtgtgtagtgtgtgtgtgtgtgtgtgtgtgtgtgtgtgtgtgtgtgtgtgtgtgtgtctgtgtctgtgtctgtgtctgtgtcttggtcaacctgaccctgctataccctgtagccacacacacatccacacacacatgcatgcttggacgcacacatgcacacacaccccgcacaccacacaccttgcttcctggaactcctggtcctactttggcctttttcacagtctaccaccataccaacttaagggttagtgtacactgtgtactgacttaagggttagtgtacactgtataccaactgaaaggttttttttttttttttggacttttcattgctttttaaaaaatgatttattattttagtacattggtgttttgcttgcatgtccctgtaaaagtattggatcccctggaactagagttatagacagttgagacccgccatgtgggtgctgggaactataccgcgtcctgtgaaagaa

SEQ ID NO: 33041 - DNA, 1135 bp, Mus musculus
gtacagatccaccattgtcaaccagaggagtccttttaagtgaggtcccgtctttcctcagcttgtactactcccgaggattccattccagagaggaagagcatgtccacggagagtcttaagttttctggcctctacccctgccccaggacctttgcacatgatggttatgttccccagccattgcattatgggtatcttagtctaataccagccatcctgtgtgtggcccaaacctaaacattagctcctctgtgcccctgaggcctaagaagggagtatttaacaagatctctaagtgtgggcacttggagggctcacgtctcaatgctgtcatgttttctaccatcttaggaagctcagcccggagccagaaacgggaggcgcgtctggataaggtcctctcagacatgaagcgccataagaaactagaggagcaaatcctccggaccgggagagacctcttcagcttagactcagagggccccagccccaccagccctccactccgatcctcaggaaacagtctctttcccagacagcggaagtactgactggtgctgctcctgcctacaggtgcagactgttttgtgctgggcatggccagcctttcccaacccaggctctggggaacttgtaatggggaaggcctcaggctcccagcgcagtgcctctcaggagagtgcctgtgtgttctgtttagtgtctgttcgcagttttgagctggatgtgctaaatctaataaaagatgcccgatgagttgggcgtggtggcgcacgcctttaatcccagcactcaggaggcagaggcaggcggatttctgagttcgaggccagcctggtttacagagtgagctccaggacagccagggctacacagaaaccctgtctcgaaaaaccaaaaaaaaaaaaagatgccgggtgatcttctcagaggagagactgcagctcaacccaagcacgcattctcacttgggcagaggcagagctgtgttcctccacactgtaatattgaagccagaagaggcagaggctcagccagccaccatcccccacccccacccttactgctgcatcctctgatttcctagtctcggtccagacccgccagttagcactgattcagaaactgcccc

SEQ ID NO: 33042 - DNA, 1791 bp, Mus musculus
tgcagacccatctggggggggccgcccctcctatcccgggagatgccccccagccacagcctacctgctgagggggacccctgcacccaccaggcaaggtgtgggacatggctggggggggcagcatgggatgtgtgggacaagggaactcaaagggcccaataggggatcgcaggaaggccagggatgccagtctgtcactcagattagggagccttgggatccagagagggcagtatggacatgctcagtctgggtaagcaggcaggccgaagcctctggggaccagataggaagtaacggctgtgtcccaggggaaatagggaaatagttgaaaagtctggggtatggaacatgtttcttgccatttaggttgtgctgtgatccttggtgtttctccctataggtactggtgaggtttgtccaatggcggcagcggcagcagcagcggcggcggcggcagcagcagtggtggcagccccccccacagctgtgggctccctctctggggcagagggggtaccagtgagctctcagccacttccctcccagccttggtgagctccaagttgatgggggagaggggagagtggaggaaagctcttcttggtacagtctcctcttcccaccaactcctcacgactcttcatcaaccaaggagcctccagacagagaggaggaagaaggaattcactaggttttaacaatgtttctcctgctcctttcttctccctatcagagctgaccctacaaacacctgtcccctgagttgtgttgaagtcccctggacaatgagcaggggtggcagaggacagcagcagccactgccctcacctttaaccccttgccttgcctcccagggatttgtgagcctttcctagaaggtcctgtgctctcctccttctgtcccctcccctactgtctgctgccccttcctggggagttggtgctttcttttttgttgttgttttttcccaggggtagggaggagagaggaggggaaagaagattctgtcccagaggagagaaaaggtggtattgaggaggggcagaagcggggaaggcagagggatacttgagtaaggttgggtggttaaaccccaagcatcctactggagtgtctgtccagggagaagccaaggggagcatcagaaggagccactggagccagaggcagaacaagagagatggaatcttagggggccagggcaaaggaggggagccagggacaagaggtgcttcctgggggtgggggaatgcagccacagtgtctcccccttccctcttccaccccagctccagccctggtctttcttcctctttcccataacagaagctatggccctggccatgtcatcgtgttcctgtgtcccttgcatgttccccaccctcccctccctccttttgcgcagaccccattacaataaattttaaataaaaacttgtctctgagttcctaagttatcttcaccaagccccctgttgtgtgtgctcatgcctcacccctcccagggagagggaggggttctttgttgaccttgatcttggtcccaacctttcctgctctgcaaagtggtagcttctctcttctgaggtacaacctctagctgcagtacaacacaaatttagggtagggccaagaatccagaagttatggagagcagattccaggtcttcagggaatacccaatctgaacaggcacagaatacccactggagattagggatgccaagctagttattgatgctgtcctgtctacaacccagcaccaggctgcacatacagatccc

SEQ ID NO: 33043 - DNA, 1153 bp, Mus musculus
tggattggctgctgactggatctaatgtggcccctgccctctaagaactgtagagcctatttaggaaatggacaagtatttaagaatctctcacataaaatgaaaaatataattttctccacacaaaacattagtagaactgtccccattgtaatggcatgatgcagtttcccccgcatgggttttttgtttggtttcccttttcccccctgtactggaaattgaaccccagccctcaagcatggaaggcaagcgctctaccactgaattacacttcttcctaatcaggattgatgtgtgcgctcagtcactcactgactcttcacagcaactgagaaaggagctagcaattaaagaagcacaacaaaattagtgaccagaggggagaggccgcagagagatggactgtgcctcgtcatggcagtcacccactgcctttactggcatttctgttacctcatagctggagccatcccctgagtcagaagctgtggaaaaggatgaggactactgggaggtacagattagcccagagttactggcacatgggcgcaaaaaattattggatctgctgaatgaaggctcagctcgggaactgcgcagcctgcagcgcattggccagaagaaagcccagctcatcgtgggctggagggagctccacggccccttcagtgaggtaacaaccctggggacaggtgcagtgggggggtccccgtgctgtgtccactcccttcctagtgttgctgtcccactaggtggaggacttggaacaggtggaaggcatctctgggaagcaggtggagtctttcctgaaggtaaggccacctttgccctttctgcatggtgttcccccaccgcagcccaccttaggctgctatgctaacgcacgttcctcttctttacaggcgaatctcttgagcttggccgccagccagcacagcggtccctcttgacactaccttcttttaaaaatccttgtatagtgacgtgttgtgtaaatacagtttttattccatggttgagcctggtttttgaggatgacagggctggggtcagagtccataactaccctgggggtcaggatcaagctctgcaggacacccatgtaggcgccatctttgggaaacccccaaactaggccaagattgtaaat

SEQ ID NO: 33044 - DNA, 1683 bp, Mus musculus
ctacccctcgcccccctgcagtagcttctgtagcttttaggtgaagtataaacttggtagcacttcaaggttgcttgagccaccatgtgacacagaggggggcaaagtgcagtggcttattggagatgccacagtaatagagagctggccatggagctaagtctcctgaccttttttggcataaagctttttcttgcttggcctttcaggcattgtagtgtacgtttcctgggctcccacatctcgggcatggggctggtgcctcgaggaaacagtcggtctggcccttccaggaatctggagtgcagtagagggctgtgggaggcaggcagggcctaagttttcaccccaccatgctgctctgctcgcctcatctgtctccaggaggcgccccaggagctacaaactgagaacttgggaagtagttcctaggctcagctcgggcttggtggtgggtatttgatgcagagacctccaacacatctaacaactagactggttcctgccagtctagactgcagttgccttgacttcaagaagcccattagtagtagtaggacatctgatgcagtgagtcactgagacagcagaaaccctccaggcattggtaaggtgttaactgttacagaggaactggctttctgaggtacctggcatcttgggacgagtgaaatctagtcaggtggcctgagtgttcacaggtgttgggggatagatacccaggtgtcactcagttccctcacgcttggcgagttctccccttctctgataacaccaaggagggggcagaatagtgatccctgaagatacccacatcctgagctgtgtgaataccactttatgagttatgtggcagagggaaagggtaaagtgacattgaggttttgttttgttttaattttttgaaatggggaagggggtcctcactgtgtagccctgactggcctgctgcctcccaagtgttgagactaacgtcatgcaccatggcgctgggcaaaattaagaaattttgagactgggagattgattacctttgattatttgggccattgtagtcatgggtccttgctgatccctaatgagagcagaggactctgaaagctggaagtgaggcgtatgtctcagggtgcaggtgcctggagagacgggaaaagcagaagacagattcttctcagacaggtgcagtcccacagtgataacccagttaacccactttgtactgtaccctctagagtggtaagataataaatttgtgtcaagctgcttacattgtggtaatttaataaagcaccggtcggaagtgagtctgcgcccagctacgctctggagagccaccagagttccttgtcttcccggccaagcactcacctgacccaaccctgcttaggttcggaactgggtctattctgggtggtaagaccatggactttgttaagcacaaagccagtaattgtttggatgggtttttgttgttttgagacagagtctctcttggaccctggctggcctggaattgattatgtagaccaggctggtcttgaatttagagagacccatctgcctctgcctcccaagtgctgggtaaactgccttcctctccacttcctctccagtaataaaactacaatgtgctttttttgttgttgtttttttgagacagggtttctctgtgtagccctggct

SEQ ID NO: 33045 - DNA, 1673 bp, Mus musculus
agatcgagagaaggagcggcagagacaagagaaggagcgggaaaggcaggagaaggagcggcagaagtgggaaaaggagcaagagaaggaacagcagaagcaggagaaggagcggcagaagctggagaagaaaggccaaggccggaaactgtccttgcgtcgaagggcagatgggcccccggcatcccatgatggtggggacaggtcagcagctgaggcccggcaggatgcttacttttgacctctggttggatctggatggcatggccctcctccttcccctcatcgagagcagccctggcaggctctcccagctccccttggcaggctcttcctttttctgaggaaagtggcttgattcccctgactccttgccagctgctgatccgtacatggccaggacagccacagtgcaagggacagctgcattacctagggtaacagtgaccaagtctggagacccttttgtccagttaggctcagcttgggtctctgtcacacctatgaaatccttctggggtgctgtcttacactccggtggcttcccttagatggtggagctaggttccttttcctgtcttggggccctgcctgtcaccccactgcctactgggggccaaggctgttttctctcctggatatccttgtgttgtaattatgtacagaaggtcaggttggcctggggtgggtgctgtcctttcccctctccacagcgctgcttcactccagtttatttaagaggatatgctaggaagtgtcctccgtctccttcccacccgtgccctgctctctcctaactcacttgctttgtatgctcaggcctctctgctgcagtcacaaagtctgtcttcgattttgttcctttctagccatcaagcccctctctgaataagggtcttcccttgagtccaggggtggaacccaatgtttacattctcttctgtcttggtcccacctcagtggcagttttgtggcgctttgaggaaccggaaaatgaacctgctgttatatctgtctcccgccttgttatttgaagagtgctgtagagtaaggggagtgggggaggcaggcacaaagtctgactttccataggttcagtctgcaggtcttggcaggaacatctggaccactggttctcaatcttcctaatgctgtgaccctttaatacagttctttatattgtggtgactccaaccataaaattattttcattattacttaataacagtatactactgctatgaatcataatgtacgtctctgttttctgatagtcttaggcaacctctgtgaatagtattcgacccccaaaaggagtcacagtaaacgctcacttcatctctcatcaacaaacatagtggtccagctccttcctcctcagctttgcctggattctgctgctcccactctcactggcctcctgggatcctctgcacagcttgcaggactgggatcgcctttccaatggcttcagccccctggaagctgaaggaggggcctgagagtgtgtgcaaaaccaccatctttagattgggctgggttcttggtcagcagcttggtgcagttccctgggcgtctagggtagactaactgcctggggttcatcccagcaggtacacacaaccaaactgcgcagctcttgttttctgtggctagatctttgccacacaccc

SEQ ID NO: 33046 - DNA, 1158 bp, Mus musculus
aaagcgacagcctcgagacccagtcccccggattctgggagaaccccggtggggacagggcagtaatgaccgagctgctgtgtgtggtgagtgtggcaagagtttcaggcagatgtctgatttggtgaaacaccagaggacgcacacaggggagaagccctacaagtgtggcgtctgtggcaagggctttggggacagctcagcccgaatcaaacatcagcgaactcacactggagagaaggcctacagggtccggccaccggccccaggtcctcccaagatgcctcgatctcggattcctgctggtgaacgccccacgatctgtggcgagtgtggcaagagcttccggcagagctctgacctggtcaaacaccagcggacgcacacaggagagaagccctacaagtgtggcatctgtggcaagggctttggggacagttcagcccgaataaagcaccagcggacacacagaggggatcagctgccccggccagtggttccccgacggcagccatccccggcagctccggcggctccacacagacccaaggcccaggacaagccgtatatctgcaccgactgcggcaaaaggtttgtgctcagctgcagcctgctgagccaccaacggagtcacttaggccccaaacccttcggttgtgatgtgtgtggaaaggagtttgcgcggggctctgacctggtgaaacatctgcgggtacacacaggtgagaagccctacctgtgccctgagtgtggcaaaggctttgctgatagctccgcccgggtgaagcatctccgcacccacagcggccagaggcctcacgcctgcccagagtgtaaccgtagctttagcctcagctccactcttcttcgccatcgcctcacccatgtggagccccaggacttcagtctcgcagcctaccccgtggtcccgctcatccccagccctcctccacctcctctcggcaccagcccctcactgacgcctcggagcccttcacactccagtgatgggccttttggcctacctggcttggaaccagagcctgggggcccgcaggctggggagccgcccccacctctggcaggtgacaagccccacaagtgtcctgagtgtggcaaaggtttccgacgaagctctgatctggtgaaacaccatcg

SEQ ID NO: 33047 - DNA, 1114 bp, Mus musculus
tcttgaattcatagccagactgatctacagagagttctaggtaagccagaactctttggtgaaacaaaaaaacaaataaaaacccttgatcctttcagccttagtctgggagagcagattgttggaattttaggtgtccagacaaggcgggggcatcttggccaccctgggggtgaagtattgctgtggagaaggcagttctcacctcagcctgtggggcactgggcgtggttttatccaagaagggcactttgggaaagagcttatgtctgtatgatttgagggtccttcccactcagacactgggacctggtaaaatagaagagccacgggaggcagaggcaggcggatttctgagttcgaggccagcctggtctacagagtgagttctaggacagccagggctatacagagaaaccctgtctcgaaaaaaacgaaaacaaacaaacaaacaaacaaaaaatagaagagccagcaggaaccctcagagcctccagcctaggtcatcgtgtggacatctgcaaaggccagcctgccgagcaagggcggagccagtgcaggccagaggagcttcaagtctccacagctaagtgtctgtctgtctccttattaataaattgtcccttgtctgaggtttgtgtgtggttatgtgtatgtgtgtgcatgggtaagtacaaaggccagcaaggactgaagcaagtacagagactctgtaaagccctcagccatgagatttaaatgggtcccgagccttatgtccattaaataaaagacattgtcatagacaactaagctgctttcattggaggaagatgacagggctcatgcctgtagtcccagaatttaggatgaggcaggaggatcactcagatttgagacaggctcagtagtcttcaggttagtcagctgatgtcctaggccaaggtctggttgcccacaagaacctagctacaacacgaacccttgaaaagaaggtgaggtaccaaggagggaggaccagtgactgggaagcaggaggctggtgatgagtgagcctggaaagaagttgccagcttgcctggtacaggttcagaaagtctggatgctaatttgtcaagggatgttggaagaccca

SEQ ID NO: 33048 - DNA, 1174 bp, Mus musculus
acctcgcatacactttggtttgaacactaaggacctaaggctccagagattaagatggacttccattctcatcacctccctaccagctgacaagtttctcggccttgttagtttttcttgcagtactaagaattgagccaaggctttacccgtctctgtactgtagccaagcccttttctattgaggtagagtctcaaccaagttgcccaggtgggcctagaatttattctgtagtccaggcaggcagtcctttgaccttggcattcctattaattgagtgggatttcaggcctgagcaaagctacttggctttctaccttctctgtgcctcagtttcctcatttgtacagggagagcatagcagcacttacctcctggagatgtaaggactgagtgaatatgtgagttagagctatgtcttgcacataagcagtgtgtaagtagttccgtttttttctctgtgtgtgtaggtgagcggtgtatgtgaatgtgtgtcctgtgcttgtgccggagctgggcaggtacagcaggtacctgctccattactgtccacctgattcccttgacgggggtctctcactggatctggaactaggctggtggcctacaagtccaactgatcttcccctggcctcttactacagcaccaaggggtacaaggggtacaaggcacacctacctggtttttgtccttgtttgtttgtttgtttttcaagacagggtttctctgtatagccctgggcagcctataacttgccttataggccaagatggccacttgcctctgcctcctgggtgggattaaaggtgtgtgctactatagctggctccaaccattatgtttatttgttgtgttcgtgagcgtgtgtgcacgtgtgtgcacgtgtgtgtgtgtgtaggcactcaggtggaggttagaagacaacttctgagagtcacttctttccttccactaagggttctagggacagaacttggttcttcagggctacatgataagcccttctacctgctgatccaacttgctgacctctccgctcattcttatcgaatgtttttttaggctgatttcaggaattggatagagtgaaggcaaactacctaggcagtgggaaagagttcgggaaagatattgagtgtggaccttgacggcttgtgtggggaggagaggtg

SEQ ID NO: 33049 - DNA, 1191 bp, Mus musculus
cgaacctgcggcagcaccggcggcgtcacaccggagagaagccgtacgcatgcgcacactgtgggcggcgctttgcgcagagctccaattacgcgcagcatctgcgcgtgcacacgggcgagaagccttacgcgtgcccggactgcggacgagccttcggcggaagttcgtgcctggcgcgccaccgacgcacgcacacgggcgagcgcccgtacgcatgcgccgactgcggcacgcgcttcgctcagagctcggcgctggccaagcaccggcgcgtgcacacgggcgagaagccgcaccgctgcgccgtgtgcggccggcgcttcggccaccgttccaacctggcggagcatgcgcgcacgcatacgggcgagcggccctacccgtgcacggagtgcggccggcgcttccgcctcagctcacacttcatccgccaccgtcgcgcgcacatgcggcgccgcctctacatctgcgcgggctgcggccgagacttcaagctacccgccagtgccacagccgccacgcccaccgagcgctgcccggagtgcgagggcagctgagccacggcggggcagcgaggggcacttgggactggcacctgaattgttccttccatgcctgcacctgggtcggggtgctctgggactgggagatagggaatgccataccggggtccctagaaccatgcctcgtccccgactacattcccttggcccttctgagtgaataaagtattctatcctcacctcacgatgcctgtaagtgaggtgggtgggaaggggaacattaggtacggaaccaaatggggcaataaactagcctgggattgggagacacacaccaggctggctatgcctcagtctcagttctgaaaagagccataaacaagacatgtgcttggctagatgattgtgttttgcagtctttgagggtcggtatggcaaaggtgagaaatggggccctgtaaatagatttaagtacttatgtaaatatattagcgccctctccccatttaattaaccctaagccgactcactatacacacctggcttcaactggggatcctctgaatcctgaggttacaaacatgcaccaccatagctagctccaaacctcattttatctccacttttgcagacagctagtgaacggtacagcaggaactgtgccatttgtcaaggaaactgatga

SEQ ID NO: 33050 - DNA, 2145 bp, Mus musculus
gctcagccttcccctcgctgagcattggcatggactcctgcgtcatccccctgaggcacggaggcctgtcgctggtgcagaccaccgacttcttttaccccttggtggaagatccctatatgatggggcgcatagcttgtgccaatgtgctcagtgacctctatgccatgggtatcactgagtgtgacaacatgttgatgttactcagtgtgagccagagcatgagtgaaaaggaacgagagaaggtgacaccgctcatgatcaaaggctttcgtgacgctgcggaggagggaggcactgcagtgaccggtggacagacagtggtcaacccgtggattatcatcggtggcgttgccacggtggtgtgtcagcaaaatgaattcataatgcctgatagtgccgtggtaggagatgtgctggtattaaccaaacctttaggaacccaggttgctgccaatgcccaccaatggctggataatcctgagaaatggaataaaatcaagatggtggtttccagagaggaagtagagttagcctatcaggaagctatgttcaatatggctactctaaacaggactgctgctggcttgatgcacacttttaatgcccacgcagccacggatatcacaggctttggcatattaggacactctcagaacctggcaaaacagcaaaaaaatgaagtgtcctttgtcatacataatctgccaataattgccaagatggctgcgatcagcaaagccagtgggcgctttggcctcctccaaggaacgtcagctgaaacctctgggggattactgatttgtctgccaagagagcaggcggcccgcttttgttcggaaatcaaatcttccaagtacggagagggtcaccaagcttggatcgttggcatcgtggagaagggaaaccggacagcccggatcattgacaagcctcgcgttattgaagttctacctcggggagcctctgctgctgctgctgctgctcctgataattccaacgcagcctctgagcctagttcttgaaatggaatagcggttgttgggaactcggagccattctacccgctcagggactgctggccagggttgattttaagacctttccaaaggctgcttgcatggttcctccaggcccatccaaagcttcctgtatgtgcatccaggcctgtgagtaatggcgctgcggatgtgtgttcatctgttgagagcatgaggagcaaaaacccgtttcccaaagcaagaggaggctatttcagttttagggatttttttttttttttttttttgcactgagttgattcatttctgcacagggagtaaagattattaagattacatatgagaaaagtaaacctgcaacatgaaaaattatttggaccaatatattgataaatctaaattgttaggagaactcttactgatttattgtcaaatttgttattaatttttttctgagaaactgcctcttttcctgttctggacaagagttgagcagcttgtccgacaggaaaggaagactagccacctgacttggtctctgataatgatgtctctccctctaactcccagtaaggactgggagaggctgaacaaacctcagagccaggtgtcggtggccattgaatcttacactgaaacttctggagatttaattaataaagagaatttcttacagtaactaaataaaagggactttgttggaaaacttgtggctaatgtttggttctgtggatcactttcttgtttcagacaggttctccggtgccttgattttgcttctgcctccagtatgctgccaaaaccagctggaacgcggactctctttaccccttgacattacatctggaacttgcaaaatagaaagtagatgttgtccttgcccctgagtcaagggatttgggtttgcactgtcccttgagatgacaaaagaggacttggaatggatataaactctagggattttaaggtagacagaaaatggggaaaaaagtcataaaagatgacttaacagaatagaagagactgtctgaaggtgaggaggctaacaagaaagagctctgaaaggattcatcgaggtgaaggcagggagttggcgtgagaagagacgctggctaaaagcttatacacagaacaattatgtcct

SEQ ID NO: 33051 - DNA, 1204 bp, Mus musculus
gtgttgggattaaaggtatgagccaccactgcccagtgacaaatgagtttttaaaatgcaattaatttctgtttcccaggagacattccaaatgagacagagtggggctgcaaggaaggaggagagagaccggcagaggctcctgctcagttgcaacctaaagaggtggttgaacataagacttattccatggctaccaagtcctctgcaggggcacagccacctaccaaagctgccccagaccagatagcaggtgtgcagcttcctgtccaggtaccaaacaccgatattcaggccagccagcgacgtcatgtgtgtgtggactgtggacgccggtttacctatccatctttgctggtcagccaccggcgcatgcactctggtgagcgacccttcccctgcccagagtgtggtgtacgcttcaagaggaagttcgcagtgaaagcacaccaatggatccaccgttcctgctcagggggtcgccgcggccgaaggcctgggatcagggctgtgcctggagccccagtccgaggtgaccgggatccaccagtgctctttcggcactatccagacatttttgaggagtgtgggtgagttgaatggccgcctccgtctggaggtccggagcctggagttgaacatgaacttggcaactgagacaaatgagtcaagacttcttgaggatctcttgtaaacttgtaaaaaaaaatttgcctgtaaagattcatacagattaaacctgacacctcccctccccagtgttttgtgttaagaaaaaggcgggggagggctgggctggggatgtaagttggtacagtactgggttaggctggggatgtaagttggtacagtactgttttagtcagagttctcaagaggaacagagccgagaggatgactctgcacgctcacacatatggtatagaacaggtaaacggcaaaggaacaggcaagaggaagaaataacttttgacattgcctttttcttctggttcctaccaaaaggggctgcacacagtgaaggtcactgtgaaaataacttttatttctcttgtagtaaatgttgtttggaggcttgctgcctctgtgctaactgaggtctagtccaggatgcatctagcctctgtacaatctaatctagtcctagaatgttttcagcctctgagacttactgctgaataagctcaccctttctagctctttc

SEQ ID NO: 33052 - DNA, 1176 bp, Mus musculus
gggtgaaagaaaggcttgggctcaggccttggctggctcctgtctttatactcactcattaccttggtctctggatcagaaaacaccttgtcttttgaggctcttaactccttccccttcgttgaacccaacctgcagagatggtcaacagtcaggacaagggcatacacagcaatgcactcgtcttctgccagtgaatactaagcaagggaggcaaggctcaggctgaggccagagttccagagggggagtgagagcactacctgggttctgccggctcgcagaagaaggaagcaggggcattggctgagcaagatgtagtgagagaaggagagactcccactcctccaagagggaagacctctttccggagacagggtcgaggaggtggtggggtccgggccatctccccacaacccacagtatgtctccggggcctggactggcttggctgggatgggacaggaggccagctacctgggtcagggggccctagatcagggcaggagtagcttcgtcccagagatgacttagagacaggtgctagggaattgcactgagtccgccactggcggatagggggcctggggctgacagatgtaattttctcagtagccctggactgctcagcctccgagatggcaatcttcaattctaatttcatgggaggtgaagggggtggaggctgtggtgttttgttaggtgtgaagaagatatcagcaaagctttcaagctttgatcggacggaacggaagagaggggccaagccccagggactgagacggggtcgtaaaaggcttgacgatgttggaatcaccggggtctccagagcaggatctgcagttggagaaaggacgctcaggtgactaaaacattacctcagaagcctcagtttcttcctccaaacactaatctgtctctagaggagtgagcctgctcctaaaatgctgtaataggattgcctaatgccataagccctggatttgatccccagtactgcaaagcaaggccataactgctcaactccttgagcctaaatcccattgttacacagcctgctctgccaagggagccggctaagctccacccacagttctgctcctcctgtttcaagcttaaccgtggcagttccaaattcttcagtctcattcctctatttgagtccttacctggtac

SEQ ID NO: 33053 - DNA, 1487 bp, Mus musculus
aggggcaggggcaaagctccaccccctttccccataccttgtgacaaaagtcctagggctgaagtttttaagccagggttggaaggcaaaggtcacaatttcatggtcatctctgaagtcatggacctgggaatagaatccccagaccccccccccccacacacacacacatacacacacacacacacacacacacacacgcaagtatctcgtggactgtggggtcactgggaggacagaggtcactagcctctagagagaagtgtgtgcgtgtgcatgagggggttatttcagaggttatggctcatgacttaaggtgcaccaatgccccctctaagggcctctaggcccttggcctgcctccccaagggctcactaagccagaggccaaagtgcccccctccctttcgcctaccacccaagttctcatgccctccgagggctgaggaaggaggaactaaaggaataggggtttcatgtacatatttatcaccccttccacaaatcccccagaccttttgtacatttttacaggggtgcccctccctataattcccttcctggttaattaaatcctcagactggtgctgtgttcctagcctctggcctctctaacctctggtagggtgtcccagggaagagcctggagaggacaggcagggacccagggcttgaccctgggtatgtgggatccagaaggaggtagaccaacggggaaagggacctagactataagctggagggaagagcaataggacctggctgtcagcccaggcttctctagacttgttcctattaattctgtgtggcccacagctctaagaaggctcagcctttaagcttcagattccaccttttaatggctaagtccctaccaccaccccatttctaagtgccccccaggattcctgggccctgttccacagaaacctgtcccaaactaagggagggagaggtggccagagaaggccaccgtgaaacacacaccaaagaagggggttggttcaggggtgggcaacataggcagcttctttagcagcctcccagcagcagccccaggcttcccaaagcagcaggcacctccaggctgggccccaaatagaaggcagggctcagtttaacaaaaccataacgttgactttttccccagtggggcttattctgtaacatgacttgcgaatatttatataaaaatgagtgttacaatgagattaccccctaccctccggctcctctttgagtctgtgtgagttatccgtcatgggttgtactgggtcccagaatgaggaaagagtgaggacagtactgaccatgtcctgatcaagggtgccccccctacttccagatgggtgagttgtttaatgatgcgtgttggtgtttttcaaatacattcgattcaaataatgcagaaagacactgaaccgtctccaggggtagcatagccactatttggtgtgtgttctctttctgtttgttgtgtgttctct

SEQ ID NO: 33054 - DNA, 1153 bp, Mus musculus
tttttttttttttttttagaagtaccatatagatcagaaaccccttaaagatttttagttttttctgaatgaccaagccaaagtctggcataaaggtagtatccctaagtagttggctaagagatataaacaagtgaatatataggtgactgatatcttttgtgattatgttaggtggtacaattcaaacaacagtctcggcttgaagaaaaacgtaagaaagccttggacctgcacctggacttcattgtagggcaaactgagaagtactcagaccttctgtctcagagccttaaccagccaccggcctccagcaaagctggctcctccccttgccttggttcttcctcagcagcatccagtcctccacccccggtttctcgactggatgatgaaggtgtgtgtgctctttggtcctgttactcttccccaagtgccctttccagagctgaaaaacccaccctgtggcttgcagggcccgtggactttgtgaccttgttctcctgctatagatggggactttcaaccccaagaggaagaagaggaagatgatgaggagaccattgaggttgaagaacaacaggaaggcaatgatgcagagacccagaggcgtgagattgaacttcttcgacatgagggagaactgccactggaagagctgctccgttccctccctcctcagttattgggtgggccttttagcccctctcaaacaccttctcatgacagtgatacccaggatgggcctgaagaaaatattgaagaggagccatctcaggatttagaggtataaacagaaaaggtacaggaagaaagattcaaggggaaatagatgtaaagttttgctctcaaatcctgtgcataggttgatccatggttttaagaatctgggttaaggacagttggagtttcattgataggaattgatcatttgcaaaccaagttgaagcctgcaactggcaaggtttctaatataatggaaacatttattgtacttttaaaattcctagggggagggctggagagaagtagcttagttcattgcctcatctggctcataacacaaggtgtgtgcagtggtatgttacagtaatctcaacattaagagcttccttgtctagctaaatcagtgagctccgagttcattggagag

SEQ ID NO: 33055 - DNA, 1122 bp, Mus musculus
agtgaggatgaggaagatgaacattcagaggaagaaatgagtgggagttcacagtcggaagaatctgagtctgatgagtcggaggatgctcagtcccagagccaagcagatgaagaacaagatgatgagggagaggatgatgatgttgatgatgacgatgatgatggttttggagtagagtacttgcttgcccgggatgatgaaaggagtgaggttgatgggggcagtggacctcccacccccggtcctacgaccactctagggcccaagaaagaaattactgatattgctgcagcagctgaaagtctccagcccaagggttatactttggctactacccaggtacctacagattcatccttctcatatcttgacttattgtttcctgatagcaggtgtttcatttccaccatatgtgataatcccctttctattaggtgaagacacctattccgctactccttcggggccagctccgagagtaccaacacattggccttgactggctggttactatgtatgagaagaagctgaatggcattcttgcagatgagatgggactaggaaagacaatccagaccatctccttgcttgctcacttggcctgtgagaaaggtagatttcttttcttgggacctcatagccaattactggggggagcttgtttagtggtgatttcacctgcaggaaagtgaattactggtttatcttactgctgctgtctttgtagcctcattgattctagccagtatctacataaagaggacagcataggtgctgagatcttaagcattatcagaaagatgctagttagggttgtttaaccagagctccaaagtggaaacatagtctatgtgttttgtttgtttgctaaacaggtaactggggtccccatttaatcattgttccgaccagcgtgatgttgaattgggagatggaattgaaacgttggtgcccgagttttaaaatccttacttactatggagctcagaaagagagaaagctcaagcggcaggtttgatcttccatgtgatcgattcccttactgattccttcaatgttttagatcttttcctctcatgaatactttgcctcattttcctgttactcagttccattgct

SEQ ID NO: 33056 - DNA, 1105 bp, Mus musculus
tgtatgttgtttacaattattgtgtttcccttctctgtaaacagtaagttacatgagaggagagtttgtgtctgtgtgtaattaatatctgccatgccttacttttggtgaattaagccagtaactttgcctatcctggagccaagtcccatgtaggaggactctggggagcatagtgcccactctgttagcaccctaatcatttgcctttaggttctgcgaccttttttgctgcgccgagttaaggtggatgttgagaagcagatgcccaaaaagtatgagcatgttatccggtgccgactttccaagcggcaacgctgtctctatgatgacttcatggcacagactacgtaagagaggactgagggtggatcctggtactctgggttagaacctaggtagttgtcaatgtctctttcttacttttcctctgtcttcagaactaaggagacactagctacaggccattttatgagtgtcatcaacattctgatgcagttgcggaaagtctgcaatcatccaaatctatttgaccctcgacctgttacctccccgttcatcaccccaggcatctgctttagcaccgcctctctggttctaagggccactgaagttcatcctctccaggtatgtagttacccctaaggttagtggttttattatacaaactttctgtctccactctaaggcctgaccttttgtacattaactatttccctattttatcaactcagtactattttcatagctttattgttctttagtcatgtgacccttggcctaattattggcctaagcttccttctccatcaaagcaggaattataaagcctagtttacagtgtgcttgaaattgaagttaatacttttgaaaacaaaagtctggcgtacctataattatttggcaaatgttacttattccttccccgcactttttttttttttaagacagggtcttacagtggatccttggctggtttggaactcactatatagaccactctgtcatcaaacttagagagatttccctgcctctgcccctccactactgagatcaaatgcatgcacctccagacctggctctttcccacctttttaagaaagta

SEQ ID NO: 33057 - DNA, 1144 bp, Mus musculus
agccagtcaagatgaaggtcaacaggtacatgcttaaaggcataaggggatgggcttcttgaaataaatagagcaattagaatagagagacttgaaagttaggtcagtttatgaagcttccatcagagtgtgctgcagtacagggattgaggaagcaaaataactggagaattctgggaggtactcctgtgttgctggtgttttgttctctcttcttggtgctttctggttatctctgattccttgccccactttatccttaaggtggtggcttttctttcttctttttgcttgtatagattttctgtcttgccttaattttttttgttattttaaacctttgatttttcctcatagaatgctgcagccagtgcccaagcaagaaggccgtacagtggtggtggtgaacagcccacggcctccccttggccctgtcccagtccgtccccctccaggccccgaggtctcagcccagcctgctcttggtccagttcctccagtgttgccagcaccactcatggtgtcggcttcacctgccggaacaccagttgttcctgcatctcggccacctggacctgttctcttgtctcccttgcagccaaatactggtcctctcccccagggtaagttaaaaagaaaccaagtgtaatgggattacttctgggtatgaaatagtgacattgacatagttcaaggttagggagcatagtgttcaataggctagaaggaatggtaatatggagacttttcagcccagctaaggtgtttgtcgagatgtatctgacagatgtttatatctgcagtgttgccatcccccgtgggagtcatgagtgggacctcacggcctcccacaccaaccctgtcactgaagccagccccacctgccccagttcggctgagcccagctccacctccaggttcctccagcctcttgaagcccctcacagtgccaccaggctacactttatctcctgttgctgctaccaccacctcctccaccatagcaactgtcaccactacagcagtgccagctccgaattctacaccacaacgcctcatcttatctcctgaaatgcaggctcgtttgccttgtaagtcatcagggctatgtgatgagggtcctcatgctagagagctgtaggaa

SEQ ID NO: 33058 - DNA, 1154 bp, Mus musculus
tagtggtaaggtcatcaaggtaatacttgagggtgatgctgactctgcggtaagttactcatccagtgtgtttaagaccagagggagagggtgaagagatggtacagagcaaggagtagtgcttacctgtttggtgtctggccattagtgaatataaaaaagatgacagacaaatggcattggccacaaagctctcagtggcggttcactttgttgaacatgacagacaaatcatgggaaggatttagattcagaagtactttgtgggggtctgagatgtggttttgaacatgagccctgtgtatataaggctttctctgtttgtagctggagaagtggtcagcattggacagttggcttccttggcacaacgtccagtgactagtgctgggggaagcaaacctctcaccttccaaatccagggcaacaaactgactttgactggtgcccaggtgcgccagcttgctgtggggcagccccgcccgctgcaaagtaggtaaaacccaccccctgtcctgcctttttcttccttactctgtctttgtttgtgtgactctttttagctgtcagccttaatgtttcttagctttggtgggtagggccaaagggtatggttggaaggggtctttgctaaaaataggaagatgatttctagagctgttacttcctgcctattctctctcttgctcttgcctctgccttcaggctgataggtacttgtttctctcccccctccccacctacctctctctttctctctctttttctcttctcttctctcttctctctccccccctcccctctctcctcccttaacccagggaatgtggtgcacctggtgtcagcagggggtcagcaccacctcatcagccagcctgcccatgtggccctcgtccaggccgtggccccgacccctggccccacccctgtctctgtgctgccttcgacccccagcaccacccctgcccctactggcctcagccttccgcttgctgctaaccagggtgaggctcttggcctttgtatttactcagcccttacttgttggccttggtcctttcaggcatgccctgggcctactatgtgtctagccttccctcagtgttgtttctcttgccagtatctctagtatctgtctgcctcttttcctttcc

SEQ ID NO: 33059 - DNA, 1046 bp, Mus musculus
cgcttcctgttctggctgcatcacagactccgcttccagctatgactccaccatcaatgtcaggaactcctttaccctcatcatcattggtatcagctccaacttctgtgttggctccctcatcaactcaaactctggtgtcaaccccagtttcatcacctctctcaagcctggcttctactcagacattgaccctagccccaactttagcacccactcttggtggattgtctccgtctcagacacattctttgggaacagggagccctcaggggccctttccaattcagacattgtcattgactccagcatcatccctggtaccaacaccagcccagacactatctttagcaccaggaggaccagtaggtccaactcaaacattgtctctggctccagtaccccctctgcctccaagttctccagtgggcccagctccaggtcacacactgactttggctccagcagcatcatctgcttcactcctggtcccaacttcggtgcaaacacttaccttgagccctgctccagttcctgtgcccactctggatttatctgccacccagactttagcactggccccagccttaacacaggctccagcttcccaggcgtcttcccttgtttcagcatctggtgccgcttccttgcctgtcaccatggtaaaccggctacctgttcccaaggatgagcctgagacactgactctgcgctctggtcctcccagccctcttcccactgctacctcgttcagtgggccccggcctcgacgccaacccccgccaccacctcgttcccctttctatctggtaagttttacttccacaaaggaattgacagttgagttttcttgtagtgttgatagagtgactggaacaatttcaaagcttagtttactattggccagatcacatttgggtagactcctccctcatgggtgtgtattccaatatgtaaaatagaaatgttaatgtcttattttcttataggatgtttggctcaggttttggtgctagggattgtacccggcaccaaagaaaagagta

SEQ ID NO: 33060 - DNA, 2285 bp, Mus musculus
ttttttttttttttttggttttttgtttgtaaacctgtactccctgattttcatgtatttttttttccccttttttgagacagggtctctcactatgtagccctggttgtcctggatctcatagaaatccacctgcatcccctcccaaatactggattaaaggcatgtgccagcatatgtggctcagtgtctgctgttttgttttgttttgttttaattctatgtatttgtgcatgaaagtgcacattcacattccatggagctacttcaagaaactataagttagatgccctcagtttgagtgttacatatgaaaattgcctcaattgttggatatgtaggttttattttgaatattttgcactgtgctttaataagcatacaggaaagttagttttctcttgtagaggtgtcatttagcactgtgaaaacagttttagacatgataaagcacaaagttttgttgtaaactcttaagtacactaatttctttttttttcttctttaggactctctggaagaaaagcggaagcagcagcgatctgagcgcctggatcggattttccaacttagtgaggctcatggggctctggcacccgtgtatgggactgaagtcctggatttctgtaccttgccccaacctgttgccagccccattggtcctcgttctcctggccccagccaccccatcttttggacttacactgaggctgcccgtcgggctgtactgtttccccagcagcgactagagcagctgtcagaaatcattgagaggttggcagggctaagtgctgttggggagtgggtttgggggcttagttcttaggtctaatgaaggtgctaatttctatggtatttcagggtcatatcttttacaatgtttattttcttcttttcacaggttcatctttgtcatgcctcctgtggaggcacctcccccttccctgcatgcctgccacccacctccttggctggcccctcatcaggcagccttccaggagcaattggcctgtgagctctggcctcgagcccgtcctttgcaccgtattgtatgtaatatgcgtactcagttccctgacttgagactcatccagtatgattgtggtgagttcttgtctatttcaggaccctcagtacttgtttgatttggtttgagacagtcttgcgtatcctacgacctcctctgtttactgctggggctgaggatggccttggactcctctccaccaaattattcttgagtctttgtgtcaagatcattacatcaaagaaacgatgcttagaggcaacattttgggagcttttgtggaagtgatgtatatatgatgttaattgatttgtttatccagtggttgtcatgaacatctgtcattttgcttatcatttgggataataagtgaggcagcgtagtatagaatatggaagcacacctttaatctcagcagaggaaggcagatctctgagttcaaggccatgctggtttacaaaggttctaggacagcctgtactgcaatagagaaacattaaagatccaaaaacaaagcaactgggtctgaggtgcacatatgtaaactgtaatactcaggacaaagaggcaggaggattgctgcaagttcaagatcttctgcttatcattattattattatataatttttattgtttctgcttttttagaaacagggtctctttatggctctggcagtcttggaagcttttatgtctggctgggctgtagaccaggctggctttgaactcagaaatccctctgcctctgtctgtacactgaatttttgttcagcagttgagatgtaatatatgagagaaaatttctctaaaaaatacattatttgtgggaggggagagacctgggatggttaatacaggctcataatcccagcatttgagaagcacatttgtgcaagagggtaactttgaggccaaccttgtttacaaagtgggacctggtcttaaagaaaaaaaaagaaatttttcttgtgcatataatgtgtctattcatacatgaatatgcaagtctacttgcctgtgtatgagtttagaggccagaggtcaattatttttctctattactttcccatctattttctataatggattaaatttgttcctttaccatatcatgttgttatacagacaatttcatgatatatacataacacacacacctcatttcactctctctctcccccacctttatttttgatacggggtctcttagtaaacctggagctcactatttcagctagaatggctgaccctcagttcc

SEQ ID NO: 33061 - DNA, 2097 bp, Mus musculus
tgatctaccctgtggatacgggaacctaacctggctcctgtgaaagagcacttgtttcttgagtcccaaggtcaattctgtttgttctatgatgactagataaccttttaccatcctggtctgtcttttcctatggttgtaattgggccttaaattcctttctgtaaaccttgactatagatttattgataattctaatgtgaatctattctcatttcagctggcctgactggttagtacttttgagccttcttgcttataaacactaagaacacacattcctactctatcccctgatgatctgttgctctgtggcttcagccctaggttaaagaggaattaagtcccagataggaacatactataagaaagaacctttaagggtaaaaagtagggagtttaatggttttcattcgttagactagttgaaaccttgacctaagaccttcattcagctggagttgtcttgtgttactgtctgtctactgttgtgtacctcacctcagacgccttcatgcttgttttggttttttggttttgtttttgttttttttttctttcaggaaagttgcagacattggctgtgctgttacggcagctcaaggcggagggccaccgggtgctcatttttacccagatgacccgaatgctggatgtattagagcaatttctcacctaccatggccatctgtatttgcgtctagatgggtctactagagtggagcagagacaggtaacttgagaattcttagccctccagagactcacctcagcttttgtttcttttacgaagggaccttaaaaattaaaaagtcttttgtttgttttaggaataaatctccaaataccatcttttttccctttccttctaggccttgatggaacggttcaatgcggacaaacgcatattctgcttcatcctttcaactcgaagtgggggtgtgggtgtgaacctgacaggagcagacactgttgttttttatgacagcgactggaatcccaccatggatgctcaggcccaggatcgctgtcaccgaattggtcaaactcgggatgtccacatctataggtggtgcctaatgttcctcccctcccttccccttcctctatgtgtagggcatgcttggtatatttgtaggtttcacacctcacttctcatttcctaggcttatcagtgaacggacagtagaagagaacattctaaaaaaggccaatcagaagagaatgttgggagatatggccattgaaggaggcaacttcactacagcctattttaaacaggtaccaaataaaatccttctatctaaacagaaaagaacttttgttgttaaaagagttccctatttgctagacagctgctgcctttacttccacagatttttctgcattggtagttcctctcatacttcaaccctcaaagtttctggccttgaagtaatattccattggttgacctctcccctctgttatatctaatagcagaccatcagggaactgtttgatatgcctctggaggagccacctggctcatctgtgtcttctgttcctgaagatgaagaggaggctgtggccagcaaacaaactcatattttggagcaggtaacagaagaggtcactcataaaatagcactgctgctcaaatacatgttgtctttccttttcacttgagtttgtccaggagagagtacagttgctggtgatccccagattatagtcagtgttttgattcattttgatttttctttgttttttaagattataatgtgattacattatgtccccttccttttcctgcctccaagccttacttgttgtcattcaaattcatggactctcttttcattaattgttgttacatacatatacatgtaaaagtatatgtgtgtgtgtgtttgtatattgctacataagtgcaacctgttcagtccatacattgttactcaagtatgttttcaggggtaaccttttggtactagattaccaattagtgcattcttctcccccctgggaagactatttctcattctcacatcattccctagtgcttgttgtattttgtgtagggttgaagcctcgtggtctttcccctatatactt

SEQ ID NO: 33062 - DNA, 2287 bp, Mus musculus
tatgtatgccaggactccttttttttttttccccccccatctttcctggtgatatggtaatagtccctgagttctaggtccttatgtttatcaacttatattcttccctacagctgactcccattgagcgctatgccatgaagttcctagaagcttcattggaggaagtgagccgagaggagctcaaacaggcagaagtaagtcttcttatgtaggaagtaaggggaataagatagtgggaagctgttcatttccatcatgccttgctctgctcgctcttcctcttgctgacactattggccacgttgttggtaggaacaagtggaagctgcccgaaaagacctggaccaagccaaggaggaggtgttccgactaccccacgaggaagaggaaggaccaggggctggggatgagatgtcttgtggaagtagtggagccagccaccggcgcagcaagaaaatcagggctcctgagaggctggggactcgtgtcagtgaacgtcttcgtggagctcgggcagaaactcaaggagcaaaccacactcctgtcacatcctcccatcatacctgcaacacctttgtgcctccccaatgcagccctgtgagagaaagaattcccaggccagtgcctaggcctcgtcctcctcctcctcctcctgctcctcctcctcctcctgctcctcctgcttctccttctcctgctcctcctcctccgcctgctcctgcttctcctgctcctcctgctcctcctgcttctcctcctgctgcttctccttctcctgctcctctccctcctgctgcttctgttgcttctgctataacttctgccctagccacagctccaatacccatttcagccccaaatccagtaaccattcttcctgtccatatcttgcctactccacctctgcttcagcttcctcctagttcgtctcctgcttctaccccgccttctgcctgtacccctctacccacttgtacccccttacaagctcaaacctctgtattaacctcttcttcaccagccccacttgactccctttctgttcccatctctcctggggttaccaacctccccttggactcaggagaagtagggctgtgtgcacaagaattggcacctgtggagtctctagagctgcctggaatgaccaattctgaggcttccctggctagtcttgtgtctccaaaggatcttttgccagtggctgttgatatcctgcctgaatcagagaagactcttccttgtattcctgcacccagttcaaccctggaagctgagagcatccccaatggtcagcagcaggaggtgccaggtcctgtggaggggaccaataccacactgctacctggtagtgaggaattgaccatgagtctgaatgagagcaatgggctggagctcccaccctcagcagcatctgctgaaccacttgatgagcttttggagactcataggaactcgggagaaacaagagaggttcagatcccaatttccaactcagaaaagccacaagaacttgttagagctgaggttacagccccatcaacctcatcttcagccacctcctctcctgagggtcctttgcctgcccgtcctccacggcgtcgaaccagtgctgatgtagaaatcaggggtcaggggtctggccggacaggacagctcccaggtcccaaagtgcttcgaaagctgccaggaaggctagtaactgtggtggaggaaaaagaacttgtaaagcgacggcgacatcgggcacctgccagcaccctagtacctggggtatctgaagttagcgccagtccaagaagcccatcgatccacagtatgtcagggccagaatcctcacctcctagcagtgggccctgtgaagctgctcctacatcttcactgtctaccccaacccaatccaccttcatagcttgtcgtcacaatgaactggggacgactactgggggaagcccagagaatggagaaggaacagagcttgccatcactccacctgctgtgaaacgtcggagggggaggcctcccaagaagaacagatctccagcagatgctgggagaggggtagatgaggtaccttcatccatctctaaggggaaaaccaatggggttgacccagtccccggccctgaaacagtaactgttgcagaacctgacctcaggccccaatttgttcctgggccccagcctcctggaccccaaccagttcacagaccagaacccaccatcctatcgcctgtggagaaaagacggcgtgggcgtccccctaaagcaagggatttgccca

SEQ ID NO: 33063 - DNA, 1102 bp, Mus musculus
tcctgatgctacgcatgatcatggaaggccaatatcagtttacttcacctgagtgggatgatcgttcaaacaccgtcaaagacctggtgagtaggggccatgaaacaatactagggaagacccaagatgtgaccctcatgctataaagtttctctagatctccaagctgctgcaggtggatcctgaagcgcgcctgacagctgagcaagccctgcagcaccccttctttgagcgctgtgaaggcagccaaccttggaacctcacgcctcgccagcggttccgggtaagcccgagagtagcagggtctgtacccaggccttgtcctcttccctgtgctgggcgttttactggggctaatactgtccctttcccaggtggcagtgtggacaatactggctgccggacgagtggccttaagcagtcaccgtttacggccactaactaagaatgcactattgagagacccctatgcactgcggccagtacggcgcctcatcgacaactgtgccttccggctctatgggcactgggtaaagaagggtgagcagcagaaccgggcagccctcttccagcaccagcctcctaggctgttccccattgctgccactgaactcgaaggagactccggtgccatcacagaggatgaggctacactggtacggagctagggccgtatccctgggcaagccagaaagaaggactctccaggaggacatttttttttctatcattccaactgtttgggactcagaccttagccctgccttgccaagcctacaactgagaatgctgcttgtcacagaaaccagccctttacccctactactctggacttggagatcagggcagagatggaagggagcctcttcgagggttgtgcctggcctagctatcgccacctgcgctgcatctgaaataaaacctgccacaagcctgggagagccagtgccatgtctgctgtctagtttcacagggaaacccagaaggtgctcgtgaaggtgggggatgggacactgtggcccaggtctttattggggaagatgctgggatcacttggtcttggtcttgcctttgctgggaggtgtctggaacggctgctcca

SEQ ID NO: 33064 - DNA, 1220 bp, Mus musculus
ttccctgagcatctctttctgccttgatgctgtatttcaatgtgtgtgaaatccctttgtgttttgcctctttgtattggaggctaggtcttgtgatgtggtcaggctggcctcagacttgtgtagctgagagtgactgagactgatcctgccatacttgccttctaagtggtgaaactctaggctttgcaccaccttacctagcttcaaatcaaacgttttcttactaaacttcagttctttctcttatgagggaataataaagattccgtggaaatgaggttctatgtgaggaatagacagtgcttacgttggtagttagttggtagttacattggtagttacgttggtagttagtagatagtcctgtgcagggctgacctcctattcccccaagagcccttagaaaacgcattgctttggaagtttataggagcttgggtggggtgcgtgctggacgactggggaaaatactgcccatcctggtcttgcctaccacagccccttccacttcctagtttgagatgttgaatgcagagctggaagaaaatcaggaattggccaatagccgaatggcagagctggagaagctgcaggcggagcttcagggagccgttcggaccaatgagcgtctcaaggtcggctgtggttaggactggaagggctaggactaacctcagatcgatcctgctgctaacacaacccttctggacatttcaccgccaggtggccctgcgtagccttcctgaggaggtcgttcgtgagacaggggagtaccgcatgctgcaggcacagttctccctgctctacaatgagtctttgcaagtgaagacccagctcgatgaggcccgggggttgctgctggcctccaagaactcccacttgagacacattgaacatatggaggtatggtcttggaggagggctggaaatgagactagatctttagacttgagacattcctcagcttccaaggggtcttgtggacctgctgagagtcccttgggcatagattgttccttggccagaggtgagactaggggatatatctatttttcttttttttttttttttaatggtttttcgaaacagggtttctctgtggctgtcctggaactcactctgtagaccaggctggcctcgaactcagaaatctgcctgcctctgccttccgagtgctgggtttaaaggcgtgcgccatcacgcccggcttttctatt

SEQ ID NO: 33065 - DNA, 1164 bp, Mus musculus
agcaactctaattttgaaaacttggctctgagcctgtatcctcgttcatgcagtgctggttcccaccttcagaagttatgttcagaattagaggcctcaaccatttggtggccttagcctggagtctggggacagtcagacttgctccagacttactgtgtccgtttggtctaggcccggttgacctgcccctgctgtaacacccgcaagaaggatgccgtgcttaccaagtgcttccacgttttctgctttgaatgtgtgcggggccgctatgaggcccgccagaggaaatgtcccaagtgcaacgcagcctttggtgcccacgacttccaccgtgtgtacatcagctgaacctgaaactcaggggactttgaacacccgaggggctgtgccccagctccccactcccccaggggcaatggccccaacctccctttcagactccatgagcccagcccctatgtgcctagatggtttggggctactggtgcgtgcaggagaggtggggtcacccaagctgagtgccatcttttcctgaatgtcagatctgcagcctcggggactcccaggtacacagcatcctactgtaaccttggaagctgaccaaaacctgtttctactgagaagacagatacatccttacccctagaagggaattcctccaccaggaaagggctcaccacccatctgcacaagctcagtgctgaccagggacctgggcttcacattgggtcctggcccgaggagccttgcttcacttacttagccccaggcctgggcagggatttggccttccagtggagtttcctgtaccctggtgtagcttttgtgttgaagacactcttgggtgtgcaccctattcaggtcagggacactgccacctcatggtctgattcaggggcatttttttttttagccagactctttccaatctcctcctttcctcccaagtccactttaccctttctcacgcatcctggtggtcccttgggtacctggccctagccctgctttctttcatcctggtgatcttaattgtggaggtgcaacttgccaggagggaagaaacaatctagcacttgcaggcattccaggtagaagagctttgcccgtgctccagctagcctacactgatcctgcctaagcagggtcctgaacgccgga

SEQ ID NO: 33066 - DNA, 1233 bp, Mus musculus
gcgtgggagagctggtcccagcaacttgtctgctgtttgaggcagagatgatgatgatggcagggcctcatcatggccctgatggaggagagatgcccccttctcccatccctcctcgtccctagtcacctatgacaggtaggaaaactggacctgtccctcaccaggaacagcactcaggagagtaggcctacaacttgtctgggcagcacagtagccatggtcctgatggcatgagcaccagcggtgagccacccggtaggcatgagaccatgagaacctgagagctggctgtggcattggacaacctagccaggcagcgctggagaccctgccctggtagtgtgggagcagaaaagctggcaggctgaccagcccggacacctctcaggcccagatgcagggctttgagttggcccaccccaacatctaccccattgatgaacagctggagggcatgggccagtcctacagatctaaaactacaggatctccataacaccggcaacgacaggatatccaggaggaatctcagtgaagtcccaggaatgatagagtagcagaagtcaggtaggtgccttgcaacagaccaatgactcattgcagtggacatttgcaagtagagaagtgtgctgtgggacacactgtgacacactacagcttccacagtgaggtttttttttgttttttgtttttcttttagggagaggttgtaagggtggagagtggatactgggggttttgggctcatgatgtgaaagtcacaaagcaccaataagaaattaaaaacaaaacaacattttataagcacaattaatacaagatgatactttataaaaaaatcagaaaaatttgagacatggcaaagggaatcattaaaaagaacaaaacaaaacaataaggggctggagagatggctcagcagttaagagcactgattgctcttcagaggttctgagttcaattccaagcaaccacatggtggctcacaaccatctgtaatgggatctgatgccctctgctggtgtgtctgaagacagtatacccacatacatgaaataaagaaataagtctaaaaaaatacagtaagaaaaaaaaggaataaaagaaggtaaaaatataaaaacacgtgcctgtaggcctagcatttattagacgaaaagagaagtattaagaattcaagggtagtgccgggcatggtggtgcaagcctttaatcccagcacttgggagg

SEQ ID NO: 33067 - DNA, 1218 bp, Mus musculus
gcttcattctaccacttggagctcctcgcccgcctgaactatcaaaatcccgcactcgatgatgcaaagccagacgggaattgtagtcttcctcgctcccctctttatcttctgtcgagacaatggaagtgagcggggcggggactaccacaaagatggagggtgaaggagcacatgatgctatgggatttgtagtccaaccgctaatactattctcggcggatgtgtaggagaggactactacagagatggcaacctagtcgcttgcccctcggtgccggtacctggtgggttatgtagtctctgctttagttgtacagagaaaggacgctactgttgaaatatgtatcaccgtgaacacgccaaattgctagcggacggaaacggaaagtctctttgctcttggcctccttttctaaagggcttgcagggaaatgtagtcccaagttttcattctccagtggcggagaattgatgtcacctgtgggaatcagtgcgggagagagaaacatcggagtgacctgggaatatagaatgtccgccttttcggatcgtgaagatttcatattttaaaagaacgcaaaccataaccaatattgtcgcgacaagggaggcgtggttctctccgaaaagtatacccacgctgttgttccttataaagactggacgtctcgcacacgatgcttcctatcttaaacctttgcaaattaataccttacacgtggtgcgaaccaaaggaagacgaccttggaatatacaaaatctcctttccaccgtaggaagtcatcagacctaagtttcttacccgaaaggggttatgattaatactcacctccacgctgaattagcgttaaaagtattcaagaaagtaaccagttctggcacggggcgtgtggctgcagttattttttcgagctccctttcagcccagccgttttggaagcccaggaatccatcatgccggacagttagcttctgcgaaaagaaaattgacgagtaggctacccccatcttaacccccacccctccctcttcagtcctcatctgagtcttccaaccatctctacccagcactcttcccagggggcgccctctctccttttaacagaggacgcacacactgaccaaattttctcaacctgaattgtagcctttggagctgtgaagcctcatgccttgtcttttgagccttggaggcttccggtgaactctcagttg

SEQ ID NO: 33068 - DNA, 1157 bp, Mus musculus
agtcacattgtctggagacttctgcctttaccctaggcctaaagcagctgtgaccttatatgttccaccgacctttcctactgggctcactgtgggcttccagattcacccttggacggccccctgaacaaccttagaattacccccagacttgttacttctttaacttgtctgagcgttgtcatttacctgtggtctcttccactccaagccagtcccgagtcctgtgctaatgataataatgacagtagccgtgtctcagcccctcatgtgttgtcttgttcttaaccatggtcctgtaaaggaaaggtctgtcaccccatcttagcgacagaggagtggtgaggttaaatccatcgccgaaggccatcctggcaaattaagtatctggcctatgggttctgacctccttcatcctatagctgatgtggaagagcctttaccctccagcttggatttgaggtccctgacggcccctctttcccaacagcccgtgctcccacacacagctgtgtgcctcttgtgcggggaggctggaaaggaggatacagtggagggagaagacgagaagtttagtttgagcctcatggagtgtacaatctgcaacgagatcgtccaccctggctgcctgaaggtgataatcctgggaaccaaccctgcaacctggctggggtagactgtcggggagcaaggaagtaggccacactgtcccagggcatatcctggcaccttctattcattatttggtctcttgcctacagatgggaaaggctgagggtgttatcaattccgagatacccaactgctgggagtgcccccgatgtacccaggaaggacggacaagcaaggtaaagcaggggctaagatagggacagggtggaagatccggaactagctgggggcctcatccccagcttacactttccaggatgcaggtgagggtccagggcgccgcagggctgacaatggtgaggaaggcgctaacctagggggtggatggaagctgacagaggaaccaccacctccaccacccctgcccagaagaaagggacccttacctgctggccctacccctgacgatgtgcctgggccccccaaacggaaggagagggagggggggaatgagccccccaccccaaggaaaaaggtgaggagca

SEQ ID NO: 33069 - DNA, 1383 bp, Mus musculus
gtccatcccctctggggagtgggtcaagaggtactggggaggtgctgagccaaagggatggtgggagggaggggcggtgaaggtgcaagtctggagtagggaaaatgaggtgacatggtatcttgtacacaggatactgggggctgggggaggcgatggatgggtgtggggagggcagaaatcagaccaacaagggttcagggaacaaagaccagttgggtgggatggggggccaaaaagggaaaacagaggagcaattggggatccgagtgtcaagacagggggcgctacaagccaggtaatgccaggactgggggctgggagaggagcagatgtggggatagtaccctctgcgtagggttgcctctctccccttccctctacccagatttcagttttccccgaccttgactccttgaacgtcactgaaaatggcagctattgcaaggagtaggggccgcgggtctacctgctgttaagctcggtggcccaggggagtggtgaggggtagcccagacccctgcctggctctctacacaatacttgaacattcatctgtactgaagtgttacttgaaccgggggaatctcggacttgggggagtgtgatgtgaggggaccagcttgaccgagactgggctatgggtacccagtttggactgtcccacccctagctctcttgcattactgtcttgaacagctccacccttcacttgagttggggtggggaaatgtcagcttaaagatgggcaagatgggactcctccagtttggctcttcccattctttcatcgtcatggaaactcgtgtcccatttgcccagggaactgccactcctggttgccatggaaatagcagccaatggacacctccggaaatcagtgctaagactggaaacggtccctcttagttgctgtgggaacttagtaacagactcttggcacctcccctcttcccacccctttccttcttccagtgtgggggtggggtctcaagagcctgagggaggagtcaggtctaggtcccactcaacttaggccagggggaactggattgtactacatgggggtggggggaggggaatctatccacatacctcaggtaacaggaaggtgcgcgggttgggggcgggggctgggcggaccaaaggcaggagggggggcctggggttggagaaaggcttgacggtggggccgcttgcgggaggggaggaggcaccccggcgagggacaagtggggcacccagccgggctggacccctaaccccacaagtctgtacaataaggtttgctataaaactcagaatctagccggggccgctgactttttgtgtctgtctgcggtgtcgagtctgagtggtgggtagggatggtggaaggggctc

SEQ ID NO: 33070 - DNA, 1099 bp, Mus musculus
agcggctccccaataccctgtctctacatctttgctaccactgtgttatatttatatttatatctggcttatctttttttttttttgaaacaagtactccctaggtagccgctggccttgaactaagaatcctgtgcttcagcctcccatgtgctagcattgtaagagtgcacggcacactcggctctgtcttgtctcttttctgaatgggaacttttcctttttttctgtttctagtaattagcttatgctagtctgtaaccctgaactaatagattactttcttctattactttgtcctatgtatgttaattcttgttttgtgtgttttcttcccagttgttgctatatgtcataagagggcttgaaaaacaggtcactgctaatgtacctctcatgagcccccttgacgtctctgtcccagatttgtcttaatctcatagatgtctctgaagtttcccaaatggtaaggaaactgctcactatggaagcccgagaccaattcttgtctttccacagctggatgagttctatattggacagataccactgaaggaagtaacttttgcgaggctcaatgacaatgtgagggaaaccttcctgaaggatatgtgccggaaatatggagaggtggaagaagtggagatccttcttcatccccgcactcgaaagcacctaggcctggcccgtgtgctcttcaccagcactcggggcgccaaggaaactgtcaaaaacctccacctcacctctgtcatgggcaacatcattcatgcccagcttgatatcaaaggtgaggactcgctgcatgttgcctaaagttggtttctaacagggattctatatgctgatacttaattgggctcagccaagtaatcagggtcatgattaccaaaattcctgaagtcacgtctgtttcagaacttattagattttaaattttagagatacattttgagattcatttagatatttgtgtgtgtgtgtctgttttgcctgaatatatatctgtgaacagcatgtacgtcttacactcatggaagtcaaaagaaggcatcagattcccctggaactggtttaatggttgggagccaccatgtgg

SEQ ID NO: 33071 - DNA, 1163 bp, Mus musculus
ccttgtcttaatcagtcaataaaaatagaaagagggctggtgagatggctcagtgggtaagagcacccgactgctcttccagactgctcttccgaaggtccagagttcaaataccagcaaccacatggtggctcacaaccatctgtagcaagatctgactccctcttctggagtgtctgaagacagctacagtgtacttacatataaataaattaaaaaaaaaaatagaatatagacagccaggcagtggtggcgcacgcctttaatcccagcacttgggaggcagaggcaggcggatttctgagttcgaggccagcctggtctacagagtgagttccaggacagcacagagaaaccctgtctcaaaaaaacaaaaaagggagagagagagagattgtagtagacttgagacctgaagaagaaacaaaatgaccaattcagagggttgtgtttccttctgattgtggattctcatttctctccatctaggccaacaacgaatgaagtactatgaattgattgtcaatggctcttacactcctcagactgtgcccactgggggcaaggccttgagtgagaagttccagggttctggtgcagccgctgagacggtgagaagcttgtagctgccgctgtgttaggcacatgtactcgttacctggtcaccaaagcaagagccatttgggaaggccctgaagtcccctattaagtataggaagaactaagggaagatgtttaggtgtcttcagatacaaagctgcaatctcggattggggcagtagacagttttaaatcgtgcctgatcttttttccttgactccctttttctttagactgaagcccgccgacggtcttcctcggacacagctgcctatccagcaggcactactgtggggggcacccctggcaatggcactccctgctcccaagatacaaatttctccagcagccgacaagatactccatcttcctttggccagttcacccctcagtcctcccaaggaaccccctacacatctcggggtagcaccccctactctcaggactctgcctactccagcaggtatggaaaaccacttctctcgggccttagccatttgattctgggagctgcagctggaaagaacaagctccaagtgtctgtgagaaggaattggaagcta

SEQ ID NO: 33072 - DNA, 1097 bp, Mus musculus
ctgcctcctgagtgctaggattaaaggcatactttcaaggcatgtactgtttatcccagaattctttctattttctacagaacttcagtggtctaggccaactgattgccagtctccaggtctacctatatctgtctgtcctggaactctttctgtagaccgggccttcatctctatttctgtgtggtagaacatctccttcttgggtttagcatttaggcggggatcttcccaacttgttcttccagcagagcccagggctttccttccttcactctgatgttgtcactctgagcatgcacttgcttatttaacttcttgagctttcagcacctggcctagagcctcacatccagaggacttcgtcagtgctccctcctcttgaccactaactaccattgtggatttccaggtgaggatgaggacagtgactcgtcctcccagtgctctctgtatgcggattcagatggtgaaaatggcagcacatcagactccgagagtggcagctcgtcttcctcttcctcatcgtcttcctcctcttcctcctcttcctcatcagagtcctcctctgaggaagaggagcagtcagcagtcattccctcagcttcaccccccagagaagttccagagccccttccagctcctgatgagaagcctgagacagacgggcttgtagattcccctgtcatgcctctctctgaaaaggagacattgcccacacagcctgcaggtaggtggcatgggacaggtgacatgattaagatacatgtttatcagggtcttggagaatggccttggggtgctgtgtttatgtggaacagttacatgggcacagagtaacactaacgcatgactgagctcttgtgcccttgtcaagctcttgtcattcaatagttcttgttatcatatatgcatatgatgggcctcctgtagggattatttattcatacagtagggtttatcgagcattgctactggtaccaggagcagtgtgaagatgtgatgatgtgtctgacaggcactgctctcatcctcacaaagctttcggtctgtaaggagagaaaggccagttaagcaataaatgcatagaaataact

SEQ ID NO: 33073 - DNA, 1880 bp, Mus musculus
ctgctctgagtttcccatgtctgacatggacatactccattgtcagctggaataatgaacaggtacagagcccgttctgttgagggagatgacggtgctgagagtgataggagcaggagcgaggcagacagcagcccctgtgtaacacgcaggcttgtgcatatggaagcacgagtgttctaaatggaagctgaggcaggacagggtagaacttgataaaataaggctgccttgctccaggagagttgagcccacgtctcctaccttgacagttctgtctgatgaggttaaccctctggtctttgcccatgtgtttccattcccaggccctgctgaagaaccacctcctagtgtaccacagcctccagcagagccacccgccggaccgccagacgctgccccccgcctggatgagcgcccctcttctcctatccctctcctacccccacccaagaaacgccggaaaactgtttccttctctgctgcagaggaggcaccagtcccagaaccttccacagctgccccactgcaggccaagtcttctggtccagtctctcgaaaagtcccccgggtcgtagagcggaccattcgtaacctccccctggaccatgcgtctctggtcaagagttggcctgaggaggtcgcccgagggggtcggaatcgagctggaggtcgtgtgcgctctactgaagaagaggaggccactgagtcagggacagaagtagacctggcagtactggctgacctggccctgaccccagcccgacgtgggttggctaccctacccactggtgacgactcagaggccacagagacctcagatgaggctgagcgcccaagccctctactcagccacatcctcttggaacacaactatgccctagccatcaagcccccgcctaccacaccagcacctcggcccctggagccagctcctgcccttgctgcactcttcagctctccagctgatgaagtcttagaggcccctgaggtggtggtggctgaggcagaggagccaaagcaacagctgcagcagcagcatccagagcaggaaggagaagaggaggaggaagatgaagaggaggagtccgagtcttcagaaagcagcagcagcagcagcagtgatgaggaaggggcaatcaggaggcgtagcctccgctcccacactcgaagaagaaggccaccactcccacccccacccccacctcctccttcctttgagccgagaagtgaatttgagcagatgaccatcttgtatgatatttggaactcaggccttgacttggaagacatgagctatttgcgactcacatatgaacggctgctgcagcaaaccagtggcgctgactggcttaatgacacccactgggtccagcacacaaatatcctaagccacagagcccatctgatttgaaccctagagtaagacacagggctggggccttccctggagtggtgtggcaagaaatgttatcctcaggtcactcttagggctgcactggtttcctatctgtctaaattactgtgacttacttagccttggggttctccaactgccaactgtctttcctctctgccttgtgtctcttctgatagagcaggtaaggtctagatttgccttctcctgtctgtctccttactgagtattctcaccatcagacaagctaccctgtggacagggcctgggttggacaggaggtgtgggccccaagagacttgccaatgaggaatctgttcttttccttaatgccatgcactcaccaacctaagcactccaaagcgcaaaagacggccccaagatgggccccgggagcatcagacaggctctgcacgcagcgaaggttattaccccattagcaagaaggagaaagataaatact

SEQ ID NO: 33074 - DNA, 1151 bp, Mus musculus
ctgttttctctcccctctttttcctcatgtcccacaccccaacggtcccttcatttgtctgtctacctctctccctgtccctctctttccctcttcctctcctctctctctctctctctctctctctctctctcatctttctacctgcagaagaaaattatgatcatcatttgctgtgtggtgctgggggtggtcttggcgtcatccattggggggacactgggcttgtaggcccctacccttctcttccctaggaccctccccacacatcgggagcaataccccccgaccctttcaccttttccctgctccaagctcactcccaaaacagacccaggcagttccagccactctcaccctcatgcagaccctggagtccctggctctcaccttgccgcacatagatagcagcaggcgtgatcacacatgcacaccaacatgcatgccgagggcacatgctcaagacgtgtggacaccccagcgtgtgtgtacttgtgtagatgtatgtagatgccccgaccctcttgctgccaccttcatcctgtgtggtctgaacttccctctctatctggctgctgtgctgactgtagcagcccaccatggcccaacctgtcctgtgtgaatagacatggatagtgtgtgtgtgtgtgtgtgtgtgtgtgtgtgtgtgtgtagatctgtgcccatacagtgtatgtacattgaattttgtgagtgtgaaaacccaatgcaaaagcaattcctccactgaccttctctcctgtctgctacatctggagtgggaggagaattcacatcctcggaggatccagagaggcccagcgaccatgctgcacatcttatgtgatgtagaacaaactctcctgacttgcttactgccaggggtcggtcgcatcatgtcctggggactctctctctctctctcaatctctctcccaatctctctctctctctctgtgtgtgtgtgtgtgtgtgtgtgtgtgtgtgtgtgtgtgttgggtcttggagttcaggggaagcacgtggaagcctatgtgtgtaaattataaacagcctggcttagtttggatgaatgtgaattttccttaacaaatgatgtaaagggcttctgcacgaggtgtgtgtgtgtgcgtgtgtgtgtgtgcgtgtgt

SEQ ID NO: 33075 - DNA, 1193 bp, Mus musculus
ttcccagggacactctgaacagatgagattgttcagatctcagaaaacgcctttagctgactcctttaagggacactggcatctaggacactggtctacaaggtatccagtgctggctctgagtgttggtgaccttgccatccctcttgatgaggacccttcccaagatccctcctctgagtctagaactgataccgtccatgttatgtgcgctgggtggagggacagaaaggtagagtcaaccttgagacgcagggtagggactgctcatggatctggccttgctttgcttccaggcgaaagacagtgatgatgaagaggaggtggtccacgtggatcgagaccactttatggatgagttcttcgagcaggtagagcgcccgggtagccctggcccagaaccttgtcccttcccctagctttctttgccttgtgtattccctcgtccctgcacactccttggccttcacggtttggccgatttcactgaacgctggctaggtctcatctggccctccagcctggataaggtgtcactgatttcctgccccaggtggaagagatccgaggctgcatcgagaaactgtctgaggatgtggagcaagtgaagaaacagcacagcgccattcttgccgcccccaaccccgatgagagtgagtgctgccttgtggggcccagggcctagggccccacccctgttctcacctcccaatttgccttctcccccagagactaaacaggagttggaggacctcacggcagacatcaaaaagacggcaaacaaggtccggtccaagttgaaaggtgaggaccgcagttccgccactgcaaacagctctctgccccacattagatcagagaaaccgggacactggggggtcagagtcctaaacattgagaaatgtacaagcccacttttgcccacgtcctttggaaacacttgacagggaaatgagccaggcagtgtttccgcctgaattgcacctgagagccatcaatcagaaaaatacagatttccagccagtgacggtggggaggtcccgtaatcccagcaccgggaggctgccacaggaagagtgagagttccggatgcgtgtgggctgtgtagtgagactctgtttcaaagaatccaggaaggaaaggggaaaggctgagaggaactcgcttttccaagaggttttaattttgatcag

SEQ ID NO: 33076 - DNA, 1201 bp, Mus musculus
cgtaaagccttaccgctgcgagaaatgtggcaaggacttccggcagcccgccgacctggccatgcatcggcgagtacacaccggcgaccgacccttcaagtgcctgcagtgtgacaagacttttgtggcttcctgggacctcaagcggcatgcgttggtgcactcaggacagcggccattccgctgtgaggagtgtgggcgagcatttgctgagcgagctagcctcacgaagcacagccgcatgcactctggggagcgtcctttccactgtaatgcctgtgggaaatcctttgtggtgttatccagcctcaggaagcatgagcgtacccacagaagcaacgagactacaggagctgccccccagcaggagttggtgctgggactggcactgcctgtaggtgtcgtaggtgagggctcggccgcccccgtggcgggtgcaggggtaggggatgctccagcggggctgttagggttaccccctgagtctggtggtgtagtggccacacagtggcaagtggtgggtatgactgtggaacatgtggagtgccaggatgctggcgttggggaagcgcctagtaccctgggagatgcaggagaggtggggggtgaggagactgatgagaagcccccacagtttgtgtgtcgcgagtgcaaagaaactttctccacactgacactgctacgcaggcacgagcgctcacacccggagctccggccctttccctgcactcagtgtggtaagagcttctcagacagggctgggcttcgaaagcatagccgcacccacagctctgtccgcccctactcctgttcccaatgtcctaaagctttcctgagtgccagtgacctgcgcaagcatgaacgcacccaccccgtgcccatcgggacccccatacccctggaacctcttgtggctttgctaggaatgccagaagaagggtcagcttgacgtctatagatctccactacactccagaagcccatccctagtctccaaagccctgcctctgggcaactcgctcaactcttgtccactattagctgtgggcagtggaggcagatagcacttctgagggagactcattaaagcattggctttgctaccaagctgtcttctgtattgtggttcagtttaccttcagtggaaatctgggactagcatgcagtggaagggccttggtgacagacaggctctcacagc

SEQ ID NO: 33077 - DNA, 1099 bp, Mus musculus
ttcggctccccagggatctgctggaacatcagcagtcccatgaggggctaaagcaggaacaaccatgggaagacaaagagatgcctaccacaaatggacacgcagatgagaggagttggggtcagctatctaaaacagggatgttgaatggttctggggagctcagctcttctggacagctagaagatggcggctcagaggaatatcgacctttctgttgtggagactgtggccgtacctaccgtcatgcaggtagtctcatcaaccatcgaaaaagccaccaaacaggtatctacccctgttccatttgttccaagcagctattcaatgcagctgctctgaaaaaccatattcgtgctcatcatagaccccggcaaggagctggggaaggtggtcagtcatcagtgtcctcaactgctcttacgtcagccgagaatactccaaaagtggacgaggtccccactgccagcctggaccatcgtccctataagtgtaatgagtgtggtcgggcttaccgccacagagggagcctggtgaaccaccgccacagccaccggacaggagagtaccagtgttcactttgtcctcgaaaataccccaaccttatggctctgcgcaaccatgtgcgggtacattgcaaggctacacgccgaagtacagatccagggactgaaggttcacccagccctgtcaagaaagaacaacatgatccagtgggaatggaagcagcattccacggagatgaggaacatgcatgcaaacgtgaagaagaggccaccagtaacccctcaatggcagataggacagtgccacaggtgtgtagcatttgtggaatgttgtttgaagatctcaaaagtctcgaacatcatagcgtgacccacagggaaggagaaaaaagcaggacagacagcacggtgtcaccaactagaacatttgcttgccaagactgtggcaagagctatcgccactcaggcagccttattaaccataggcagacccatcagacaggagacttcagttgtggggcctgtgccaagcatttccataccatggctgcgatgaaaagccatttacggcgtcacagtcggcagtggaacag

SEQ ID NO: 33078 - DNA, 1103 bp, Mus musculus
ctttcttcttctttctttctttctttcttcttcttttttttttttttttttttttttttgtcgcgagaccctcggcggaagacttgtggtccggtgctggcctcgccctgctcgctgggtcccttgggaaggggcggggccacctcttcccgcctccgtggccgcgcagcgggagcggaagctcctggctggcctgcgtgtccgtgggattgggaggaccgccaggggatgaccaacggagtcagggaccccggcctgagtttcccacttcagagttgagttttcctaaggccggaaggaaatcagaggagtcgctctccgaggccacaccctctcgctgtcagttttgtcccagtgcgggggtagagcttgggtttcctgcagggagctgctgagctacagcttcccagattgttgaaagtgctgtctgctttgggtgcgcatggtaggcgggagctcagttatttggagccacacgtcgggaaccttgggagcaccatgccatttgggggttggagagtcccattcttctagctgcttccttgggcttgaactcaactgtgtaatagcgctgactgtcaaagttaatcttgacatccggtgataccacctttcctgtatacagagctgctgtgaagatataaaatgtggtgacgtgtgttgcaggccttggaaagacctgcaacaagtcaaaaggatttttaaacttaagggatgatctgtattttgagtttttttttttttttttttttttttttaaagattgagccaggtttggtggcacacacctttagtttcaggactaagaggtagaagtaggcagatctatgtgagttcgaggtggtctacatattgaattctgggatagatacataatcgagacttctgtctcaaaaaagaaaaaaggcaaaaaggacatgatgttggattttttttttttgttgttgttgttttttttcgagacagggtttctctgtgtagccctggctgtcctgaaactcactctgtagatcaggctgacctcgaactcagaaatccatctgcctctgcctcccaagtgctgggattaaaggcgtgcgccaccacgcccggtccgatgtggg

SEQ ID NO: 33079 - DNA, 1147 bp, Mus musculus
cttctcacagtgtagaaggggtgaccccgggggtgaagggtgatttaaaaacagctcagtagttaggatagggcttagctgagtttgtcttgctctaaggggaaattgcctttggttatgactttttatggaatggggttgggtctgcttgctgctttcaaagcaaaaaccacaaaacaaaacaatgaaaaatcacgtgttcagggctatctcagggcctggtgtgaaatgtcttctgggaaatttggggtagatcttttaaaccaactgctgggttgtccaccacttgctacaagaggaaaaaacatctacgtcagaagaacaaccaaggaaaatgagctttttttttccagaggatatagataaaactttttaaagtaaaatccttaactgtgtctgagaaattgcacacgtgtgtgtgataagctcaaaggtcagacaagggtggtcaggaaggggtatattttagtagcctcttgaatctttttcccaaaacaacaatccatgtttggggaatattaaaaaaaaaacccaaaaaaaaccaaaaaacaaaaaaccaacccttttgtagccgttggaagcttcatgtcctttcttctaacttgtcttctccagcggaagtgaccgcggtggcttcaataaatttggtggtaagtgaacagagtttccaaaattcccaactcccagcaatgctttgtctgattgttcatttgcagatgtcttagcgtgttaagtgtcaaaggtttctaaagtgtctgtagccacctccagaaggggtggggtagaatgcctcctgctgccagatgtgtgctaactggaggccagcagggataagctcttggcagtctgctatgttactaaattggttttacacaagttaatagtattatttagtaggcctcttggtgggtgttgccacatctagcacttagtgaccacaccatcctgggcaactgggggatgttctggaacatgtggtgccaacttggctttaggatccttttgatcagtgtgtccaaggtgtgtgtgtgtgtgtgcgtgtgtgtatgtatacacaatctcccaaatgttttaatttagggagagggacatgaaatagtgccctgccctgaagatggtaaagttggtgtatatatatttatattaa

SEQ ID NO: 33080 - DNA, 1294 bp, Mus musculus
ccaggaggctctcatatgggtaagaagggagcagagctggaactgagagctccagaaagagccccacacttgagatttgcaaaggtcacgggagggaaggtagaagaattgaagatgataacatgactttttttctagggggaaactatggagatgatcgacgtggcagaggaggatatgaccggggcggctaccggggccgaggaggggaccgtgggggcttcagagggggccggggtggtggggacagaggcggttttggccctggcaagatggactccaggtgagtaagtcaaaacaaaagtcaagaaaattggtcagagatcatgaggaaatcaggtttccctgggaaagtcagcttagctggttacatttttgggaaggaagaagaaaagttcagaacccagtctttgaggctgttttgctttaaagtcatttgttgggtagcagagacttgaagggtgtgcatgggtagggtagttcagtaacacgtaatctaacataactttttctttcaggggcgagcacagacaggatcgcagggagaggccatattagcctggctcctgaagttctggaactcttcctgtacccagtgttacccttgttattttgtaaacttacaattcaggatcgctcatggatatttttttttggggggggtggggcggttgtgtgtgtatgtgtgtgtgtgtgtgtcagactaccctaattgtaaccatatctctggttcccattaaaaaacatcattttagttaaattctgtttcccccagtttactttctgaagaatgggtccatgttattaatgtggggcagtattattcccccagaaattgtcttgcacagcaagaattggaataatttttttcctacctagcaggaagtaagataaatacattttttttttttcctgagacagggtttctctgtatagccctggctgtcctggaactcactttgtagaactcactttgtagaccaggctggccttgaactcagaaatccgcctgcctctgcctccgcagtgctgggattaaaggcgtgcgctaccacgccccgctcagataaagtaatcttgatgcaggagagaaaagacaatttgtcttgtgtggtttctaagaaagtaaaataattgctattttctcaggaaaaggacaatacatacagaggtctaagtggatcacatcttgcctaaatccagctgtgtctataggtcatttgacatttgatgctttgaactcaacattgtgtttcagctgagattatagaattatagaaaattaatatagccc

SEQ ID NO: 33081 - DNA, 1197 bp, Mus musculus
ccaatgggatacatgaaagttgcccattgtttgttctagactgttccacttgcttcctcagttttctaagcagggaggcaaatgtcaggaaggcccagaaacagtcctgctgtaggcttcaagggagcctcaaggcttcctaaaatcataatacaaacacactcggctagaggttagtctggaaagggaacaaccatttttccatttctaaaatacttccggcagaagtccttcttgtcctggtcgttgttcccgtctgagtaccagctccctattaccctgagggcgggcgagtgcagccgagaaaagaaggaggcggaaaagaaattgtcccagatccctgcagtctttccgtaggttgcggtacaacgccaggcaagagaagaggaaggaaattaaccagatcggtgaaggtcgagttgagggtctgctgtagcaggtggcactgcttgaaccaagggaggaactttcccccggatcagtagagatcagaaagactgttgggcgtggcataacccacaggaaaggaagaaggggcaagctgctgttttaaggaggtttacctctgtaagcaattactgtggccttgaagtgacttgaagaagatcactctccacaggactgcactcaggcccgaaggcctcttcccttatcttgagtgactactctatttcttggtccctgccattgccagggacgattgcatgggctacgccaggaaagtaggctgggtgactgcaggtctggtgattggggctggagcctgctattgcatttacagattgacctgaggaagaaagcagaacaaggagaaaatggctgagggtggctctggtgatgtggatgatgctggggactgttctggggccaggtataatgactggtctgatgatgatgatgacagtaacgagagcaagagtatagtttggtacccaccttgggcccggattggcactgaagcagggaccagagccagaaccagggcaagagccagggctaccagggctcgaagagctgtacagaaaagggcttctcctaattcagacgatactgttttgtcacctcaagagttacagaaagtactttgtttggttgagatgtctgaaaagccttatattcttgaagcagctttaattgctctgggtaataatgctgcttatgcatttaatagagatattattcgagatttgggtggtc

SEQ ID NO: 33082 - DNA, 1225 bp, Mus musculus
caggctgctggctggaagacggagaaacaccatctagaggtggatgagtggagggccacatggcccttgtctccagaaaagaaggtcttatgagcagccgtgctccaagcccaggacccagaacaggagcccagagaccaggatgaagccgagagcaacgatgtttcagccacaacaggatgttaggagggcagttttatttttgtataggcaaacctctatgaccaattggccatcatcttgtgggaagtgacaaccaatcaaatggactggaccccgggtaaagaggaagggaaccggttccttcctgctgtattcttgccctgttccttttctgggatccactccaagctgctcacccttactctttgtgagggtccaacatggcctggttgtagctcatggcatccaacaccctcgactttatgcatagaagccccagaggaacacagccacggtcatcatgagtagggcattgaggttgactactcgtgcccagcggggatcctcactgatgtcctccagccgcctggtggttgccgccacctcctcggtagtgggcggaggactccctgacccactcttgctcatcccacagaaccaaagcaggcaccggcggagcaggcctggagccggggactggacctctggaaggaatggggagcacacagttagcctggaaggagttagctcccagagctccccagggtaccctcccggggtcggccttaccttccatctccattgcacattcctggcccccgttctgcacaggagcaggggctggaccttctaactcatcagcatccaggtcctcccgctcctccttgctgtgccggagactgaaaaccaggcgatggagctgggaagttagggagaagggaccaggtgggagttctggctgtcaccccaggtccatgctggcacacagctttgtcactgtctacacacacacacacacacacacacacacaccccagactcccttctggcctgcaggcctgcccaggcccagcacactcagactcctctttccaggacagtctttgccttcacactgaaccccgagctcttcatctagcattaaagtcttcggccctgcccagtcccgtgtttcaccccaagttttaggtctacaccgagaatcatagttcttcagttctgatacttcatattcctattgtcatttgctctgcttcccaaaaatgtcaagtaaatgtgcttg

SEQ ID NO: 33083 - DNA, 1123 bp, Mus musculus
cttgtctaggcctaggtgttcagcctctgagacttgctgctaaaaatgctcaccttttcttgttctttctgagctctgaccggctggttcaactcagctgttctggctcaaactcctctccaagctcactgattcagtctggctgttctcttagcctctggcttgctctgcttggcctcaaagtaactctagcaatcttttctattcttctggctccttcttttaacccgtgactgcagagctgcccaggtcagactgcatcctctgtctgcagtgctcccgtgagcagcttccctctcctctctcttctcaggagagttgggcaggtcccattctgtcatatctttccttgatctgtcactttgtctgccactcaattagacatcactttcaaacatggctgcttccttctacaagctaactctatcttcattgtctgggattgaaggcgtgcaccaccacacctgtacctaagcttttctttgcctgatacatatgtatgtgctctatagcaggctggccttgaactcagaaatgtgcttacctctgtaccttgggattaaaggcgtatctgtattccatctggatcacacagacctagaacatctttggatgtgatctctggccagagcaaccttgttctgaattaaaatttctctagggtcagtgggccagcaaggtgcagtagccaaacctgccaacctgagttcagtttctgggctcaacgtggcaggagagcaggggctcctgcagattctcctctgacatccatgcatgcgtcagcacgtgtgtacatgtgcgcacacacacaatagtaaacgtaggaatcaaattaggttacttgcctgagccactgctctctggaaaccttaaaggcttccagttttctatttggaaccagactgttccctgccagtcacttgagcctcatcttacaccacttttctcttgattttgaataaattagttcctccacctttatagctatacttaagcttcatcaaaaacccgtctgtcatcattctgtgtctgtcatctacaagagactcgatggtcaaagttatcagtggctctagttgctttctagagatctcaggagagatgtaagttcgttaatccaggg

SEQ ID NO: 33084 - DNA, 1567 bp, Mus musculus
gtactgtggaggaattgcttcggggctgacaggtgcagtgcttggtttcctagtcaccttctctgttgatattcggcactattggtatcaatttcatggttagcatgaacttaaaacagtttatttgtatatttttctttgtatagatcaacttatgagacaaacattttcaccatttggacaaattatggaaatacgagtttttccagagaagggctattcgtttgtcaggtatcgttcaagctatgagataattagtacttgtgagtcctcttcattccttttcacttacgttattggatccttactagatgttcgtttacctatggaatacataatttgagaaaaatgccaactgaaaggtgtcaattaatgagttcctgtgttctttgcccaagttcttcaaagatgaaggcaaaacttgactgtttcctcctagattttccactcacgagagtgcggcccacgccattgtctctgtgaacggcactacaatcgaaggacatgtggtgaaatgctattggggtaaagaatctcctgatatgactaaaaacttccaacaggtaattcaatttttcttagcatcttttaaggtttccatcttacatacctacataggagctttgggaattataaaataaacagtaaaataaagcatatagctgctttcagttgattgtgtaaaatgctatttcaaaattgttttatggtattaactgaatcttaatactttctttttacaggtgtcaccaccccaataaacttagacagtgatagataacagagtcctattcacagaagggtgcttacttagtttttctcttccttgtctcccactctttcttcaaatacggtgtttgttcttgttccctaaaacagtcatttgctttttcctaggttgactacagtcagtggggccagtggagccaagtgtatggaaacccacaacagtatggacagtatatggcaaatgggtggcaagtaccaccctatggagtatatgggcagccgtggaaccaacaaggatttggagtagagtgagttgttttggtttttccattgtagaaacagatgcgcttctggcaaaagatgcgcttaacagatgagcttctgtgttctcctaggggagagtctattggaatgattgtacattaaggcatttgggctgtagatgttacagtaacaaatctcaggaaatatggtttgtaatgcttttaattatagagatggggaatgcaatgtgacctcttggtagaatttgactcatctacagttgcattttcatttaattttgtgtatataaacatctttgtctagaatatgctcagaaacatgatgtttttgtattttacctttctaagacatctttgcaagttacatgacagagcagtttgctttctgtggtgatggtggagtggatatgttgcttcactttctctcctaggctgagctacacctttattttcactgtttaattgagaatactgcaaaagtcaatgctgtaacaagagtactgcctgctaagttgtttatttttatttttgtaagacaatgttttcactgtagc

SEQ ID NO: 33085 - DNA, 1221 bp, Mus musculus
gcaatttaccgaactaagttaaacccatagtgtaagacagaaaaccaaggtagtcatctcttgggggtaaggtggtgacttttcttttttcttgttaacatttttaattaataggtaattttggaggaaaaaaatcctccaacttttcagttaaaagtattttttgggtttatcttaatttttctctgaatttctaaagaactcttcttaaacttttgttatcctcatgaagttgtattttgttgatcctgctacttttttttaatgaggaagtttaaattattcaattccctttttcttagagcagtgaaggtgtgccatccatcagtaacaggcttctttagccaaaagtgggacagaccccagcttccccaccccacctactttgttttgcagaactgaactcctaccctcttcttggttcatgttttgttttgcttggcagcgttaagatgagcccactaacaacgactgtctagtattagttcatcaagatgttttagtcaatcagtatttgtggtgtaaattattataaaatagagaatatagctattacagggctaggcatgactggataaatttatcaaagacagagacttgaaataaaagatgacaaaatagcaggttacaggtgcagctaaagaaacagtgctgataatgttttgttttttgttttctctctcagatacgtaggtaacctctccagagatgtgacagaagtccttattcttcagttattcagtcagatcggaccctgtaaaagctgtaaaatgataacagaggtaaggtcttcctggctagatgtgccacctgttaccctgatactgagcatttttagatgatacgtgagttgattctaaaattctaaagttcattttaacttaagcttcagattattctgttggagagattcctgtttgtggtgttgatgtaatccgttgatttggctagtaatctaggtatggagtaaagtctggtgtgagaaggccaagactgcactgatgttacacagccctgatggagttaccttcaggtgattctgcttgtgaacagtctgtctgggaaagatgacagatgatggtattttacatactccagtgcaaatactgataattcagtctacatttcaagttcaggtttggtatgttttgaagtcagcattcggttattatgtgtacagtggagcagcaagcatcttatgtatctttagaaaacactaaa

SEQ ID NO: 33086 - DNA, 1220 bp, Mus musculus
tccgtagaccctgaaggacgagctgatgtgcggcaggccaggagagatggcgtcaggaaggttcagaccatcttggaaaaacttgagcagaaagcaattgatgtcccaggtcaagtacaagtctatgaactccagcccagcaaccttgaggccgagcagccactccaggaaatcatgggtgccgtggtagccgacaaggataagaaaggtcctgaaaacaaagatccacaaactgaaagccaacagctagaagccaaagcagccacacctccaaatcccagcaacccagcagactcagctggcaacctggtggctccctagtgtcccctgggaccatgctgtagagacttttaagttgcatgcactgcgggacttgcagtcagctggctgccattattcatagccgcttggtatgcagtaacttggggtggaggtaaaacactaacaaagggggcttttcttccatagtctattctgtataaataataagttgcctgttccagaagtctaaccctaacccctctggttgtctgggacccctttctgtgcatgggtgcaatgatttagccatggctgtgggctatctgggtacaatgatttagccgtggctgtgggctatctgggtgcaatgatttagccgtggctgtgggctatcttcctgttagccttggactgaaggggttttaagttttgaggggtaggaagagagttacaggaatagagaacctgtttttgagacatgttgtcattttgatgagataaccttcatctcgttactgaaatatctaacttcagctagatatgagctatgcaaggagccataggaatagctatatgttggaatggctttaatgttgttacatttgaggggggatggaaaataaagtgattatataactctcaaaatgtttttttgtggtttctaaaagtttgaagagtgacagatggcatcaaggttattccagtgggtgaagcgaggatcccatataagcactcaggaggcagaggcagggggatttctgagttcgaggccagtctggtctacaaagtgagttccaggacagccagagctatacagagaaaccctgtctcaaaaaaaaaaaaaaaaaaaagctgggcacaaataacaggcctaccaacgggctcagtgagagtgctcttgtctcaaacaatgaggtagagagcaattgagggtgacagcccacattggcctcagcctc

SEQ ID NO: 33087 - DNA, 1172 bp, Mus musculus
actcatgggataaacttggcggttgccaaagttcagaagagtccagcagaacccgaagcggttaacgaaattcaacaaaatgaacttaaaaatatgtttacacaatgccagacacgaataattcagatttagattttagtcacattcctttgtcttttatttaaaaattcaaaatgaagttttcacctttcaggctattttaacctgtactgaatctagggatttcaaattctaattatgtttattggcaattgttttacaaggagtctgaaccttagcaaatttccagatatgtaagctaagactacaggcagtcatcctggaatatggaccagagtagcaaacactagaatggtctgtgcatctcacttgggaaggagcaggaaagaaaccaagctcgtgtctagagggggagacactctcaagcaggtgtggtgtggacatctgtttatggtggtagcatttttttgctctgtcagttcattcctcaatactgcttcataaaggaaattatgcatttagattttagtgatactagtgtgcattagtatctaaattaaaaaagtagtctcgtggcttaaccattctctgaagttgagaattaacaatggtaaaactgtatttttcctttgaccccactctctcccgtatatacatttttttttctctctctctcaaattcttaagtatgggcttgcccgtcataaaataacttgctgcaggaatataagatcatgtttattgactctagagatctctagaaaagtcgtttgaactctttcaagggggacatttagcatctcttgtaggttctagaactatggaaaacatcaaagtccaggttaaactggttttattcagtaactaaccaccaagaacctcttctgtaacccagagtgagaaagctgtaggcatattctagcaggtatcaatgtctctggcatcctttagagccttactctggttaactgactctcagtttaacattatgtctgttaaaactctgacaagcattccgattttgttatttattagcagtgtcaagtcttgtgactattaaaagaaccactgtaattcaaaacatcagcgtatgagaatttcttgtatagcatttaatagtaagagttgtcttcaaagaattcataaatggtaagtttgctttaaccaaacac

SEQ ID NO: 33088 - DNA, 1149 bp, Mus musculus
accctgaccaggcagctaggtctctttggaaataaccattgctttaacttctgttgtcacatctcttcatgggtcatttctttggaaacccaaacatgcattatcttcccatctggcctggcttaatacttaactactctgaagaccctaaagaaaaaaaaaaaaaaaaaaaaggctacagcattcagtttttaatgtctgggatttaaaatacagttttcatttttaaaattgaaagttcaaaacaagtgtttggttaaagcaaacttaccatttatgaattctttgaagacaactcttactattaaatgctatacaagaaattctcatacgctgatgttttgaattacagtggttcttttaatagtcacaagacttgacactgctaataaataacaaaatcggaatgcttgtcagagttttaacagacataatgttaaactgagagtcagttaaccagagtaaggctctaaaggatgccagagacattgatacctgctagaatatgcctacagctttctcactctgggttacagaagaggttcttggtggttagttactgaataaaaccagtttaacctggactttgatgttttccatagttctagaacctacaagagatgctaaatgtcccccttgaaagagttcaaacgacttttctagagatctctagagtcaataaacatgatcttatattcctgcagcaagttattttatgacgggcaagcccatacttaagaatttgagagagagagaaaaaaaaatgtatatacgggagagagtggggtcaaaggaaaaatacagttttaccattgttaattctcaacttcagagaatggttaagccacgagactacttttttaatttagatactaatgcacactagtatcactaaaatctaaatgcataatttcctttatgaagcagtattgaggaatgaactgacagagcaaaaaaatgctaccaccataaacagatgtccacaccacacctgcttgagagtgtctccccctctagacacgagcttggtttctttcctgctccttcccaagtgagatgcacagaccattctagtgtttgctactctggtccatattccaggatgactgcctgtagtcttagcttacatatctggaaatttgctaaggt

SEQ ID NO: 33089 - DNA, 1264 bp, Mus musculus
ggtttgtttttttccaagatggcagtgaggtagggcagtgagaaagagagaagggggtggacacagagaagaggaaaagaagagagtgagttttcctagttccttcctaacactaggtaacttactttaaaccagattcctgtctctgagcgtcggtcagacaacactctccagagagcgctggctcagagcaaagcagctggagctctccaggaaggcccggcttcagcagcagaagagtgtgaatgggaacgagctttagagcgccgagcgtgcagggaacggcaagctacggcctctgtgcgtgcagtccacagtcctttacaccacattgttttatagggaatttgtatccaaaaacacagtgacttttcctgaaatcaagtctggtgacacctaaagtttatatgattctctgtaagggtttttaccttactggttttatggagttttggagtttgttttataattagttatgatgtacaaaaatgtatttgatattaaaggtttaataatgataatgttgctgatcacaccattttcttagccacagctacatcttaggccagactatgaagtgccagcttcctctgcagagttatttgaagagctgtgttaattcagaacaggtctgagcgacaagttcgagatatgacttctgtagtgtcattttctacacagctgccacagacgcagtttcccacgtcccagctgtaccagccggcagaactggcctttcccagaacaggtggcggttcctggctttcagatttcatagactggtaatacctttctgaggtaggggtgccaattgattttgccaagtcatttgaaagaaaaaaagaacaaaacacactgtgatcactattttgttttcataaaggacattctcagaacacgagcatcttttaatggaataaatgcagctttgtgaagaccaccacattgtccttaacttttctcatctcctgcatctgtcatctgcaactgacatattatgggattgaggggaacactgccccatggaccctggtccagacatgaaaaaaatgctacttaaacagtcaagttttcggggtggggaaccatcttttttttttttttttttttttttttttttggtgctgcttatcaaaccctggcttctcatacatgctagagaagtgtagtctccctggagctacatccccgggctgtgcagggtgggatgtttttcattttcctcattatttaactgacttgatgaatgtactgcattttgagc

SEQ ID NO: 33090 - DNA, 1216 bp, Mus musculus
gtcctatgggttcatacacatatacctggaatccactcaagaggtggaagcaggaagaccaccaatttcaaggccagcctgggctatatagtgaggctctatttttaagtaagcaaaagcttgggtgagagggttggggacgaaggcagtagcttcatgatggagcatatgctcgccgcgtttgagacctgggtgttatctccagcatttggagaagagacagccaaacaccaactattattgtttataacctggaacactaccattctaaaccctgtttgcttttacagtcattggagacttttctgtccattttaatcttgttgctcttttttttaagcaatttattagaattattttttaagttcacaggaaaactgagtgaaaagtaaagattttctatgtaacatctccactttctccaaatggtgatgtttcatcccagagaagtatatttgtcccagttaggacatccttatggagctgaggtgactcagtggcttgctaacttaatgacatgagctctgtctcagaacctatgtctaaaggtggacgagaacagttgtcctctggacccgactagagtcacagtaactacacaggaactgtaactataaccagttccatgggctccctcttctgtcccctgtcagcttccacatggtatgtatgtgtatatatatattcaggtaccacatttccatataaaataacatgatgattatttaaaaagttgtcctgtgacctctgttcacaaggccctgccccaaatgtacatattttttaagcaaataggcgttaacatgttatccagagtccatagtatgcactgctagggcagtgtgataggaatatatttagcttagtggcagactgacagactgggttctgctccccagcagcagtgaatggaaattgctgtgttaacaacgcctactgccaaggcagagagagcactctgtgctgatttgcatcccagggttgcctttttggcttcttaggtttggtttggttttccttgttggttttcctggggttggggggttacacagggtgtctgtgtagcactggctgctctggaactcagagttcctgcctccatctcctagtgataacaattgaaggtgtaagccatcaccaaatggccagaatttgttttctttaaagatcagtttgaacactttctcatctacatatagtgtggttagtattctgt

SEQ ID NO: 33091 - DNA, 1117 bp, Mus musculus
gctctggcctagaggtgtggatttaggaagtgctcctagggtaaagcctgcagtgtgttgaggtcagtatcttatgatcggtgctagtttgagaaatgcttcttggactaagtcagtctgttctcttactgggtgagtgattccacagaaggctcttgattgttggggatgaacacagtcctgtgaggctcacaggactggagagtgatggagtcggagtatgttttggaaaagcagaaggctgaagctgagggagggcctgggcaggaaggcattttgtcttcagtattgaagagactgctgataagactctttctttttccacatttaattaaaaaaaaaaattctggatatggtggtgcacagctttgtttgatcctagcatttaggaagaggcaggtggacctcttgagttcaaagccatcctggtctacagagtgagttccaggacagccagggctacatagtgaagctctgtcttgaaaaataattttttttaagattggcttttattgttctgcctgcctcagtctggagaggctgcgactgtaggcatgtcttctgaatagtttgcatagttcagaaagacagccttagataccatattctgattggaattgtgttttgggcattatggccaaacctgtggagtggcatcccttcactaatttggtatgtgaagtataactgggacagcctggaagctgtgaaggaggatcactgtgaggtcacagagaggcagagctttggcagttctccaagggcagggaccacagtgtgcctgttgtgctgggagtggccccacacagcggatggactgtaagccctgcagcagttgcagataagcttgaccagaacaaggcaaggaaagattacaagggggagctgggaagagtggggtgaaggtctagttcatgggaaagcgatgccttgggcattacttgacgtggcactgttgaagcagagaacatagtagtgaggatgatgctggccaaggggaagtgaggagaaatgagcctagaaaaatgagattgctagtgacttgccattttgtgattctttttagcattttttatttatttattatgtgttatatgtggaggatccgagaatactt

SEQ ID NO: 33092 - DNA, 1151 bp, Mus musculus
agatggggtctcatttagcccagggctggcttctaactcaccaggtagctataattatccagtaactcctgatcctcctggctccatatcccaagtgctggggttacaggtggatgacggtacatctgctgtgatattactacttaaaaaaactcaaactatttcagttggctcctgattgtgttgttaaaacttgccctggctctttgtagcagcgcactcctgtgatgtcagcactcgagaggatggggcaggaggactgctgggagcttgagggcagcctgggctaaagaacgagactctgcctcaaaagcaagcaagcaaatgagtaaatgaataaaagtcatgattttgagcaatacagattatcttgtgttttccaataagaaaaaaagcttaattgtctgtctttgagtattgactagtagcgtcatgaacgtattttccagtgtgcctgctaacgttagaagaaaatgtcctctcggtttctagtgcagccagatcctgagagtgtggttctaggcacggatggcggacgctacgatgtgtacctttatgaccgcatgaggaagtctgtgtactgggaagaggagccaactgaagtgagacgctgtacttggttttacaagggggacacagacagcagatttattccttatacagaggagttcagtgaaaaactagaggtatgatatggttgttttatttctttgtgtacaagacaggcttctgtgacagcactcacagtggagatggctttccatacagggaaaggctggtggttcaaacctttaatcccaacactggagaggcagaggcagacaaatctacagagttccaagacagccagagctacacggagaaacccttgtcttaaaaaacaaacaaacacaccactgggtgctcttacagagggctcagggttgattttcaacactcacacgcagataatagctattggtaactccagttacaggggctctaacactctcctgacttcctaggacaccaggtgtgcacatggtacacatacataccggcagaacactcacacattaaaaaaaacagtgactcaggagtagagctgaatactgtgtttgtatatgtacagtctcagcattaacgcctgtctcctcccctccaccccagag

SEQ ID NO: 33093 - DNA, 1147 bp, Mus musculus
acacaacttataaccccctcccattcttatagtgctgagcatctcaggaaaaaaactcagtctctactgcttttgatttaggtgtgtgcttcccagcataagcatctgaagtaatgataggctgttttgatggttaatggtagcaggacctccacagagttggctcggggagcagttcttcttcatttataacatctgtattgggaagcgtagggctttttatattaagcacatcacttagaagcaggtttagtgtggtatatttctgtagtccaagcacatgggaggcagaggcaggacgatggctgtagattctggtctaactttatctagaagagatcccagtcaatctggggatgggtgttaagaccccatcttgaggaccaactgaaccccccccccccccaagatactgcttaacttaagttgggaaatgactttgctaatgagcctgtggtaatcttgtgtcttgaaggttattgtccagttccagccttcttcagtgccagatgagtgggggacgacccaagacggacagacaaggccaagagttgtaaaacgcgggattgacgacagcctcgatgaaattcctgatggtgtgtttagtttgcttgagagaaaagcctgtttgtgctgctctgtcagtgtcctccttcactgtgaggaaagatgcagttaccagaactacttcagcatgctcagaagtcagccatatgctgcccacagttctgtctttttaaagtattgctcctttttaagttttaggttaattaattaattaaaatgtgtaggagtgttttgcctgtatgtatgcatatatgcacctgtgtgctggtctggtgccaacagagatcagagagggattcagatcccctgggtgttagggttggttgtgagccaccaagtgggtgctgggaactaaacctgtggcctctgccaggacaagcagcactttgaaccactgagctgtcagttctacatttctttttgatttgaaatagggtctcactatgtagtcctggcagtcctgaaactcagagatctgcctgcccctgccgccacctcccaagtgttaggattacatgtacctcagaacacaattgtattacttttatgtctttgtttttggaattcggtttaaaataca

SEQ ID NO: 33094 - DNA, 1204 bp, Mus musculus
cttctcagagcacaattaagctggtagcaaccaatatgatcgccaatggcaagctggcaggtaaggcactttgactgcagtggtcagtgctgggctgcgctgggcagttagagacatgtctctttgtatactctacaggaaactagcgctgcttgtggggcgaccgcagtcatgttagcggagcttatttaaagcatagagggaggcgtcattgattgcagtgacagtagacctagtcctgcagtcctaggagcatctgaatcatgctctaagatatagtcatacttactaccctggttgcttaaggggtaacattgattatagagcactgtctaatactctgttttaaaattcagttcagtagcttcccgttaggtccaggttgaatacccatttgaagtaattaaatgtgctcaccctacatacaaatctacagtcaaatgtggctttacttcttaatgatttgctagagggagcactgcagggtcagatgactgttctgtcttccagagggtgttcagttactctgcttgatagacaaggctgcggacgcctgtcgctacctgcagacgtatggcgagtggaatcgggcggcatggcttgcaaaggtaggcatttccagtatgtgtcctgctctcttcatctgaagctgttccatgtttggtaactttcagttccacctctgagtattagctaatgatgcttgttggaagacagagcttgcattggtgtggtcaggtgaaagcagctggctcctgtctgctggggtctggtgcatccaggtcccacggcagcctctgggctgtggaacagagcaaagcctggctgcttgtttcagagaagcccctccctttgtttctctgtaaagggtgctctagcatggacctctctctcaggttcggttaaattctgaagaatgtgcagatgttctgaagcggtgggttgaccacctttgttctccacaagtcaaccagaagtccaaggccctcctggtcctcctctctctgggttgctttgtcagcgtggcagagacgcttcacaggtaagtcctgggagccctggctactcagggtgtgccaggtgagccgttgacagtgtcttatgctctgatggtggcggtggtacctggtgtgatgtgaacggagagtgatacagatcaggtgtgtgagacagaacctagatcgtgcaggggcatctctggtca

SEQ ID NO: 33095 - DNA, 1282 bp, Mus musculus
cccaaccccttgtgctcttcagttccttaactggggtttacagaagctcattgctgccatctacgcagactatgcccggagcctgaagagcctcggctttagacagggagcagtgcgttttgcttcaaaagctggagcggctggcagagatttgttgaatgagcttgggtccaccaaggaagagctaacggaaagttgacaggctccgcgcaggaatctgatgtcggaagcgaggggtgaggagagctgacctggctgtgctcctggtcacagctatggtcagtccagacctgcgtgagggcttggcccttgttagctgtgacaccaccttcttaagttcgaaggtgctcagcagcataggcccatacactaggagccagttctgtgtcccaggtgacctcaaaatggggacacatagtgggaaagtatatggtatttatactttggaaagtgcttttaagatctctgtgaatacttttcaatttttgtaacttaaaaattcaaaaaactgaattactgtcctttctcattagctattttgaagatgtttaagaaatctgtggcaagagatggggcttctgatggattttcagatatgtgctgtgtgtgcctgtgttgataagcagtcatttaggacacagcagggcagaagcatttgaccaaccacagcacctcttttcttgaggacgtggtggattctttgctttagacattgctgaactttgtatttggggctcatagtcttcatggagcacgtctaagcttaatgtttagcgtccgtggtctctgatggtctgaattttaactcccaggatatgttccagaaacctcatttctgaagcctctttgtacatttcccacctttgttttcttccactagatgtaattattataaattattactcagaacttaaacatctgtgactataaaaatgataaataaaggaaaatcccagccaagactttgttgtttgagtctcttctttgagatggggtcttttggccccacacagccgaatgaacaacagcttcacccctactgtatcttttcaatattgtgttttactgagaaacacaacatcaggtcaaatttagtcactggttccaagcaacttggggtggtttccagcaaccccatcttccattgttaaagtcagggaagtcagggtgcctcagtgaggtagcttgttccagaccccgtgtgggaccttggccaaaacactgggtgtgaggtgaggtaaagaaagcttagcccgtgctttgtggtgtacccagagctgct

SEQ ID NO: 33096 - DNA, 1617 bp, Mus musculus
acgctaagaaattaaaagtcgtttgaaatcctcccaggcatagagaaaggagcattatggaaacccacaaatctcttgtccaccccaaataaaactgtgcattccttgctatgtagttgccctcggtgaatgtgtgtgagattgaagattgcagaagatgtgataggtaatctcagtattcttcagtaggatgggatcacatatatgaccttggcattgggcagccaggcatatcctggtaggtggtatagccatgctaccagaggggtttgtttttgggagggggcggggggtcagcccaacatcttaccctagctctgagtttctcctgcagagaatagaggaaaatggctcactgtccctgtttctagactgatgcgcctaacctagggtggccctactgaggcttcagagcgtcttgggcatgaaaactctctcttcagctcagttgctttgtattcattctttcctccctcctccctctatcctctcctcaatacagtttttttcgactagtatgaaaccttagggttctagatgttgtcgaagatgtgtccttgggtgggactgaggagatagcccagttagtacagtgcctgagttcagttctctagagcccatgtaaaatgttgggtctggtagtgtgtgtttgaaatgcaggcactggggattcagtagaggagtacctcttgggcccactggccactggcctagccactgggcatcgagccactgagagaccctgtctaaatggagttggacagcatttatgagaacattaggggcttgctaatattttgagctcttgagtgagtgtccatcacagctcggttaggacagtcaagaaagtatcccaacttggcatttttgtaaagtctcgctgaggcggctgattctgtcagtgattttcatgtaaataaagatgcgtgcaagcctttcagggacagtgtctgacttctccaggtaggaaggtctgtgtgttccatctccttcttagtgtccccttctgagttcaggtagagtcacaccttcctccatgcctacagcgtagggctcattttgattctcagtgtaccatctttatttaaattattttcagttctctgagacttttgttacttttattacaggtaatctgagcacttttatattctaagatagaaactatattatcagatgaatatagtcactcaattaaaattatttagataaaattattgtttatgttttctttcaagcaatctatcctatttttatccatttgcaaatgccagttttgtgtggtttcttagcatatcaaaattattatgtagaagaatgtttctagctttctgaacagcaaatagtttggtgtgtaaatattgtattatttcagtgtgaataaaggtgagagagaatatgaacatttaaccaaagtgattctactgtggctgacttaaaagaacggaaggaagtgagtggggatttgacacgtttgaattacgagttattcagtgtgcgttcctctcctacgggaaccactggccagaaggcaaagtaagtctgactgcattggagattttcgttcttgtaaaaaagcccaaaataaaaatactaacaataaagctgtgtcggccg

SEQ ID NO: 33097 - DNA, 1396 bp, Mus musculus
gtgtttataagaatcaccaagaagacccaagtgaggaggctggtgtgctggagtatgcaaacctcgtaggacagaagtgctcggagaggatgctgctgttcagacactgaaggcctgcacctcagcccagcgccagcctggcatctcttgccacagtcccacctgcttctcggctcctgcagccattcaccaagtacattcgtagagctttttaaaaatattttgtggaattgtatttatgagaatcttgtggttaatataaagattttaaaatattctatgacctagccctttaattgggacttgtcctttgcagcttgcttctggagcaaggtgtgcttcatgtctccagtgaatatttagggaaggaaaatgaagaagtcaatataagtcattttgtcacagttactgttctgtgctggagaaattctgacacagagactgttcttttagaccaatggttcttaacctgtgggctcaccacactcacaggccgaatgttagatagcctgtgtgagatcaactcataataactcataatcgtagcaaaattacagttatgaagtagcaacaaaataattttatggtttggggtgggatcaccacaacgtgaggaaatgtattaaaggatggcagtattaggaaggtagagaaagaaccactggctaagacccatgcaagacattagcttatgctgggaaattcagatgggcttaaaggtgaagagcacattccatcccaggaaatgtgcctttcccacaaaccagaaccctgttactctgcttgatagtaaacctgccagtgttgtagtgtataatagacaacaggaactgtaaacattgcaaacatcaggtgttcactttgggtgtctgtccaggactgtcctgcctatgtctgttgtcttggcataattgttttccttgtcactagtgttcccttgtgccccagagttatctctgtttggatgataaaatatgcagtgatcttagtggtgtttgttctatttctacaaatataagaaacaactttctaaagaaacgtcgtaactcctgcttgatctgaggcttatccaaagaaaatagcttcctactttccattctctggaactcagacgcttttttgtggttagtgatagaagtgattattatctagtcccgtagctatgcacagccgtagtggagttggtggggcctctagcctctgcattcctcttctagttgtgggtcagagagtaggcgctgccatggtacttcagaatggagaccagccattcactttcattcttgtgctgttgggccttctgcttgttcaccaaatgcctgctgtcaaggaggcaggcagccagctacttcgtgaggcacatcagacctggtgaggagaggcttccctcaggtgc

SEQ ID NO: 33098 - DNA, 1196 bp, Mus musculus
ctgaggggggaaggagagagaaacatcaagtttcttattgttaactacactgttagctatggtttttgtggatgtttttaaacagcttgagacatctcttccctgtcgcttgtagaagtttttgttcagctgttggaatgtgtcacatatttcctgataaatggactgaatattgtttgtgtgtgtgtgtgtgtgtgtgtgtgtgtgtgtgtgtgtatgtgtagtccggtggatgaggtgggtcacattaattatttttttctctttctttttctcctttcttttattcttttcttttcttccccttactcttctccctccttccctccctccttctttcccatcctctttatttttaaagattgagtttttcaggctaactcactctttatctggatggtggtcacaaaaaaacaaattttaggacttattaactcaaacaaaataaaaacctatttagattaagagatctttttaatgtagagaaaatgacttcctgctgctgtgcctgtgtctgcttcttcataggcagagcaccctgctgatggaccagaatgtggttatggctcctttcaccagcagtactggctcgatgggaagatcattgctgtgggggtgttagacattctcccgtactgtgtgtcttctgtgtatctctactacgatcctgattattcatttctgtctttgggtgtctattcagcattaaggtaagactgctttgtatagttgtaatgaattatatcaatttatctatatttcattgtgtaataggaggagccctccttttgatagtatgctactttgctggtacaatagtcccatagctgtatattaatatgtaaaagtaacagttttaggattctggagagatgactccgcagtttaaagcacttcccgttctttcataggataggaattcagttgccagcactcttagatagctgctgacaaccacttgtaactccagccccagggaaccctgctagccctcttctggcttctataggaacttgcatgtaatatgtgtgtgtgtgtgtgtgtgtgtgtgtgtgtgtgcacgcacgcgcacgcatgcaagcatttacacataagcatgtatatactcacatgcacatggggagggggggaataaaataaacctatctcaaaaagatcacagctttagaaatgatgccattgtttgatggtaattc

SEQ ID NO: 33099 - DNA, 1177 bp, Mus musculus
agtcaggactcaatagtatagtgtagcccatcataaactgtaagaatttgctattgataatacttaaattgccaaaggctttttacttctaacatttaagaaatgaattacatttacttaaattcattgttgcaaaggtattcttgaatttccagcataatgttattagtattttgaggggagatacaaagtgagttcaagctagttcagggaacatttatttgttcttacaatttctgttgtttaaaatttcctaaaagttgtcttagatcacaagtcagcgtcatgtataacattagagataagttcttcataattatatgtagctgaacttttcttgcatataatagagaattaaagaatttatctaaagaactgcagatggttagtgcagggcagcatgtagaagttagaactttttacgtaaaaccatggggctgttatgttggagggttgaagatggcctaaataattaatatagaataaccagcatcaatgaatgaagtattgaactaaacaaattttccaaataattaaagcattctgtgatctctgaaaatttaaaatgactgtcctcccacagtgtactttgttcttgtctgtgctcaaacagaacgcttggcaggacctgcctgttgacagtgactttcatgtctttaggagtattcttttgctcctgctgtagttcagtttcccagtgctcccacaaagttactgctctgtgtcacctcttaagccttcttgctttcagttcttgtattagtttgtcaagtattcaaatttcttttttaattttttgataatatttgttaagacatgtgttgtgtacctcctagtaaggcactgtctccaaggcattagtgcaggtagcaactcagcgaagagtcagacggagatcccttgcttttgtgaagcttcctttggctgagtaagactgggaatggtcagagatagtcattaaacaagcataatgaagtggtagtttgcaggttagcagggcttattttagaaaaggtagatataaacatggtttagaaatactggtcattagctggaaaaccaggccaccaaatttgttgttagtaatctagaaagtggaaaaagatgcttgagagatgttttggcaaataaaacaacttaaaatatttactctgttttaaattatgtagatgtgcct

SEQ ID NO: 33100 - DNA, 1204 bp, Mus musculus
ttggcttgtgttttccttgccctgaaggtgaggctagtacctgcctcctttgaggacccagagttcaactcatccttcaaccagtccttttctttatataccaagtatcaagtggctatacaccaggaagcacctgaaatatgtgaaaagtctgaggtactgtctcttaaacattttttccctatattgacaaggttgtcaagaagcatgatctatcttaactattaagtagagctgattgattactctgagcatctcttactgagctttgtggaaaagattcagacctagcattttgaatcctttaataaaaaatgtaaattcaaaaagtttttccaccaggaacctgaatacagcattattagggttttgtcctgcagcctaagtcagcacacatttactgactataccttgaagtggaagaagcagacctgttgagattgttgtatagagcatcatctaacaagcactttttgaggttctccactttccatgttgtagatcttaaatgagtgagagattctaccattgtaacagggatagaggtgtgttgggataaaggaaccgacaggtgcagaggtggcactgagtcgggcatgggcagatgggtaggagtatgtgtggcctgaaggagagaagagaagggtgttgttggcagctgttcagccttgctcaacagcacggtggctgaagtacacagtgtgcttgggaaccactccttggctgtgtgtaaggcagtagaggcaatgaataagctgcgcagtttacgttaggagcaagacttctttttaaagttattttgcaagcatgaaacccttcaactctgttaatcactcagcagttctcaacatgctgccatctttgctttgtctccctcttcatgttctttgttattatgttggattattttgctccaaatcttggccactgtaccattttgtctgtaagtactttagtatatatcttagtaaaaatgtttgataatgagctaagacaatctaggaagatttaaaaacatgtgtagaatactttagtacttaagaaagatcaacttaggaggctagagagatggttcagtgcttaagagcactgactgctcttccagaggtcctgagttcaattcccagcaaccacatggtggctcacaaccatccgtatataaagggatccgatgccctcttctggtatctgaagacagctacag

SEQ ID NO: 33101 - DNA, 1194 bp, Mus musculus
gaatggtgatcagcatgtgggagtcagagagacaggtgttatgtatcaccaagtctttgttatactggggttattaagagactatgggttcggtcccggctgaagagatggttcactggttaaaagcacctcttgctcttgtagaaaacctgggtttgattcccagcacccacaactccagttccaggggatatgttgacctcttctgatctccgtgggcttcaggttcacacatgccctgtttacgtttacatacatgcaggaaaacactcatacacataaaataaatctaaaagaaaaaaaaaggagatactggttcagtgaccaggaatatgaaagctagagagtgagctctaagactggtgagcggtgggggaggttttggtgtggtggggagggaacctgttatcaatgtctatgggtccatttccagcctcctggggattgttttggcttagtggaaagatcctaagaagtacttgaaaatttagggggggggggcgtacctgtgggttacatgggtttcttaacatgtatttcttgttctacagtgtcacgagcaagagaggcagttctggatgcccagtttcttgttctggcttcagacttgggcaaagagaaagccaaacagctgcgctctgacctgagctcgtttgatatgttaagatatgttgaaactctagtaagtttaaagctacagaattttaattaaatgcttctttaaaatgtcttattatataattctctacttgcccatatcagtttgctgatgattttcactttatctcctcttatttatttatttggtcttagagtgttctatggaggtcttaggacatttacagattaaacagatctctgcctggaactcagagatctgcctgcctctgccttctgagtgctggaatttagggcgggagcttggagcagtttgaaacctcttagtgttctcttctaagactctgtatgttctggttattaatagtcatttcctctcctacttcctaaatgttctaggtcattctaggacatctatcctaggctggaccagagctcccactgtggaggtgaaggttgagggcaggcagctcagggtagaggtcagctgtaaatgaccttatatacagacatattctgtcttggaaaatttttagaatcatgcaaataggatgggtggttttgtattgaatttag

SEQ ID NO: 33102 - DNA, 1204 bp, Mus musculus
tactcacgaagagtcaactcactttactgacaggcctaagataaaacctctggtcccgaggtgcctggggattttagctctcagggaaactgaagcaggaggaggtcctctttgtgtccagcctgaaatagttggtttccagacctgagtctttacaagggcagcgcgtgcttgtgtgtgctgattactttgagctctctgtccacttggcacaaccaagaatcacctgcaagtgaggaattatctataccagtatggcctgttggcatgtctgtgtgggcctgttatgatttttggtattttggtttggtctggtttggttttggtttttttgagacagggtttctctgtgtagccctggctgtcctagaactcactctgcagaccaggctgactccaactcagagatctgcctgcctctgcctcccaagtgctgggttaaaggcctgcaccaccacctatggctttattctgaagtttgaggtgggaagaatatgggcagtgcctttccctagacatctggttctgatccatggaggacaggaggagaaagaaaggctgaggagaaagcagccaggatccccatgtttctgtgttctccctctgctctctgtgggatgtgactcgccttcacagatggagattagcctggaatcataaaccaattctttcttctcctaagctgctttggtcagggttgtttatcccagcaacagaaaagaaacaaaaatactgtgtcaaggccctggctgctgcctagtagtgggtacaggtccagcttcaaagccggtgcttgtttcttaagagcaactgagagatgaccgcgggaaggtataggaaggagacagaaatcttcacagcagagaaaggcatcccaagacacccagtaccaagagagggtgactcaccactatgtacacctaaatccacagcatcgcctgcattatcggccagcgttccctgctcagggagggtttctctctccatggctccgggccttcaatccgctcacacttggtaaaatcttgaattctcacaccttttgtaccagctgtagagctgcggggggggggggggggggcgggggcggggggggcagtgaaaggaagtgacatcatggaaatgtacagaactgcgcatgcccactttccagggtccagcgtccatcagagtgggctggtttcgtgtttctccccttcaagaa

SEQ ID NO: 33103 - DNA, 1164 bp, Mus musculus
gtgtgtgcaggtgcccttagataccagaagaggatttggaactcctagagctgggtttacaggaagttgtcagccacctttgcaagggcagcaagctctcttaactgctcagccacctggccaattcaagttaaaaatttaaaatgtttttttaaaaggtacttaaaggtccagcaagctggttcagtggataaaggtgtttggtgtcaagtccaatggcttctcaatcccctaaaacccacacagtgggaggagaaaatatggcccctagaattgtcctctgacctccatcctcatgccatgtgtacatgcatgtgtgcgagtgtgtgcgcgcacacacacacacacacacacacacacacacacacacaaatgcaataaacatttttaagaaaaagtaaaagggtatttaaaggaaatggagccaggatcagtggctcgtgtctgaggtcccagctgagcaggagtcagctttgcctacatcaaaagtttgaggcctgcctgcctgctgtatgaggctgtattaaggatttaaaaaagagggagagagagagagagagagagagagagagagagagagagagagggagagaggccctcccctgccttcagggcatctgctgatgctcttgggtcaaagcagagtgtctcgtgttcttcccaggaagggagctctcactctctctgagggattccgtagatgaaaggaaagccacttcttcatgtcctctctgtggacaccattctgctttgacatgctttttaatatacaaaaccttgggcccaagttctctagaacattttacaaatgactagattgctcacatccatttgcactcctatctgctccgtgttttcactcaaaaaggaaaaaagccagaatggttttcctagagaaacttttagtgctgtcacttgtgagcggccgagcagggtattccggtcacttcaggacccacttgactccagtttcttctcagtctggaatccaagccggtggtctctccttgggtcctgagtggtcccatcaataccactggaaaaccactcacctccctgctttatgccagacttactgtataccagagcaactggtgggagtctgacagctggccatacttagaatctggaccatcccagtccccaggggtgttcccactgctg

SEQ ID NO: 33104 - DNA, 1417 bp, Mus musculus
agtagatcagcaggtcagaggctttcaagttagatcacctcaagtcccctgagaccattgtccaaaatgagtggtgtctttagcaatgggtgacttgccttcaacctgtgagagacctgcaccctgctattcccctctctcatggtccctttatacttgaccagtgtctctgattacttttaagacagggtcagtcattggcctagaacttaataagcagactaggctagccgaggatccccctctgtctgcctccctcccatactgggcttgcaggtgtgcactcccatatctgaaggattctgggattctgggggctgagttcagatccttcagcttgcaacacatgggctttgctgactgagtcatcgccccagccctgtaactggctcaatttcaaacaccaagaacacctctcttgtctttcattttcagaataaagagatagaagaactcaccaagatttgtgacgagctgatcgccaagatgggaaaaagctaactctgggccaagtgcgtggacttggccgttgcgtgcaatacgagcgtcggctcaactgtttgtccttccgattccgtgaacagcgtctcctttcacttccgtatgcactactgtgtcctctttctaaataaggttggtttgaccgtatgcagtgccgagacctaccaggattccttgctatccgtttgcattttctagtataattcatagcaagttgacctcggagttcctgtatcagggagactgtcagattctctaatagactacaaattgctggccttggccttggcctttggcgagcagcatctgatgggacgtgaacatatgcatcgggactcttgccttaaggagtgtacaattgatccacatttgctggtttggttttttaggaaaaaaaaaaaaaaagaatgcatgtttcaaataaaattctctattgtaaataaagttttttctttgagtcttggcagcgagtgtggctgtgagttattttctgggaatggctgagtcctttccttcattaaatcatatcaggttttggtctctgcctcttttgcttattgatttaaattgcatttccttcattatcgtgtctgggtttgtaagagggagcaaatgagaaatattgattggggcttaaataagtaagtggatatattggattagcttagatttcatttttacaaagccttggccattaggaaaaaaaaaaacaaaactgtttccttttataactctgtggaggaaatagcaagctgtcagtctttctgtcctgccccttggtgcctgaccaaccctgaaacactgcctatttctttataaatggttaggaaaggcccaggaacacctggtgggaggcaggcaggcaattagccatttagcaacatgaccactaccaggctccctgatgctctgacct

SEQ ID NO: 33105 - DNA, 1198 bp, Mus musculus
gagcactgtggctaagagcatggtgatgagttgagtgttcggttttaggcgtgtacggccatagttcactgcccttcacagctatagtctgggtaacattgtaaattctttcctaaatgtttaaagaagaaaagaaaaaaagatttgtaaaaggtcaatattaaaagaaataatcttgaaggatatttttactgacttgagttttaaaagtcaaaagtggaagcaggctttcaaatgtgttagtctactgtcagtgtagcagctcctggtcccttgctggttgggagagtggtgaagatggccatagttttttcctaagcagaagtccactatttctaaaatgtctttttccaccataagttctaacttacaagctagtcttttaaagttgtagcagaaatttcacagtgattttttttttttttttttttaaatgacagctgggacaagtaagctgaattttgggttaaagaacaaccgggccgccctgcagtgttaaccaggcctttgcgagccaggcaggtcagatggagagacacttcctgtgcaggtcttgccacccaggaactcatcaaatactttaggtctgctccgtcctctagctctgccctcattcctgctgagtggaattttactcccttgtaacttttgagaagtctgtagcctttttatttatgctagtcataaatgctgaagtctgttttactcagtttttcttctcattattttcttttctgatattgggacattctattgtggtcacagtaaatgcctgctaaggacacatttagatccctcctatgaaatcgtcccgtggagcagaagcacattaggtacctggctgtcctctgcccgttgatttggctctccggtgctcattcacagttggctgatttgcaggtggcgtgggggttcttcatcttagtgtttggatttgactcactttcattcagagttggttttgtaaattctaagggagttaatttatttctgaattccttgaaaacaaggttatttcaacttaagtaatttttattgtaaactgtcgctcaagtgttgggaattgtgccctgcttaggcttcatttgagggctgtcagcagagggccaattgcacaggaaaggattttcagcatgacctgtttcttctgtattaaggacttttcagaaatccttaggcgtagcagaaccctcaccct

SEQ ID NO: 33106 - DNA, 1183 bp, Mus musculus
atttttcatttttgtcctttgtggtgttggaataccactgaccaagctagagacttaagtacagttttctgttcccattcatttttttctatttcatgtggttatttcaattttctatcagggtgatacaaaagcttgttatctttacgtagtttaatagtaatagtgaaacaactgaacgctttgcttggacattgccagagaaacacgtgttactcatgttgtccaagtacatcctaaggaatagtttggttcggaatactttggccattcatctctgttctgagatgcaaacccttttgagaaattacaccttaaaagtagccctgttgtcaactgtcctgtgccataccatagcctttatgatgtagattctatatatacctagatatacctgtattttcagtattttactatcttttactagttttctgttagtgataatgacagatcagtagatagtaatctacttttcccattccttaatcatttattattatagtaatattcctttaggaatacttaaaaacctcttttgtgggtgttagtttggtaactgcctgcattttatttgactctttaaacagtcaagtatgagattctctgcaaaaacaatgtctgttgggaagagggaaagttggagaagggtgtttgtgttctgtgctttgtggtgggggcaaattggactgtccagctgttactatcagcagaattctctcttttcctccctctcccaatataggttaactctaatcttagctttgcactgtgttccagatgcggcaggccagaaggctgtcgaacccttgtatacagaggtatacatcaagagctggtgaatgcagcacgtatgtgggctctcatgcaaatgtgccttcttagtagaaggcctggactcgctcctccttacagctgatcatagaaggttgagttaaccggactgccttttgcagttgtcatcactaacgcaaagtattttaccgtagtcatcaggttggatatgtatagtttaaaaaaaaaaaacaaccatactaatggaagcttccagagcttcataaactaactgactgaattgctgcaagagttttgatttccatgttttatgtattttgagatttatatatatatatatatatatatatatatatactacaacacttgaaatgagcctttgttcttctga

SEQ ID NO: 33107 - DNA, 1864 bp, Mus musculus
atgtgtgaggaggctctcgtgggctgcctgcgccactcaccctcagtgtccttccgtgaggcttctcgccaaagatgatagagggtgaatgatctcagtgcatatgtcatactgccttgtgggtggactctaagttggcaaaccaaggatttagggagtggcctagtcaacataattctttaagaaaggaaggagaaaagctgtgtccatagtgactgtttgaagctttatatgtttgggtggtgaaaatgtgtgtgtgtttttttttttcttaagtgactttgaaattttaaataacaatttaaaacattaaaatttcttattatcttggtcatttaaacctgctaatatgactccctttgaaatattcaatatttacacattcttatcagctaaaattatcaagtgggccattcccagatgaaaatttctaatctcatgaggtctgtggtgctgcagaatttatactgcaatgtggactgtttagaattctaaccatttatgatattctggctgtccaggtgagtggaaatttttgcatagatttgactagatgattggtgtaggtggcagtggaacagggcaagcagaagtggggagactggaggtcagctatagctaaaattgttatttctctggggaggggactttttttatctttatttttattttggagattggatttttctatgtagctatggctgtccttgaattctctctgtaaaccaggctgcccttgaacttgtgatccttctgcctcagttgcctcccaaattatagggttatgtcaccaacttgcagcctgagacacttgttttaaaaagctcagtgttttatttcagtaaaaattatttggtcataaattttgggaagaactgatttctttttttaaatcaaagttttgtaaatagatcttacttctgaatttgaatcggtggaagacctcagttcacatgctaagtcaaaacggcccttagtcacgaccttgttgtggcccctcccttgtcatcagtagtaacctatactcaagtgcctgtgtcttctcatctcacttaggattgtaccccaaagtcctacatgattggctttaaatgtccgggaaaactaatttcagtagcgtagtttgataggttaaatgagatagcatttttatatcagagacaccagaatgttggtggtcaactacctgtgcaatatttatgtcttgaaaaccagatctgagtatgcattgaacagtggggatattataaacagaagcgcctctctgaagaacccggtttccggtgttgagtgatagactggtttgagcgagtactgttttgtggtgacatcttaggtgtttcctttctcccaggctgctgctctgtggtatttccagtctcagacttgtgttgtggagtcatggtgttagtgttctgcctttttatgttctaagactacttgttagaggacggaagatttgctacagtggtctagagttaaaatgtgctctttagttgcccagcacaagaacgtaccactcaccttttgtattcataagctaatatgttagagttctatgtagttttctcttgtgcacctgcatcagaaaaccataggacaacaaggtggctaggcagttatcacccctctgctgccgtattcatcacccaggctctcttacaagttccttgttaatgcacaagcgtagggacccttgtacagactctggcagtattgatgagcctggcgctgtttgctttggtgcagcctccacagtgcgcgttcattttatcatattttggtatcggtaatttgatatatttcatggtggcaaaatattagctctattttgggactttttctagacttacatttattcaaa

SEQ ID NO: 33108 - DNA, 1243 bp, Mus musculus
atagtaagcagacatttaaaaacaatctttaattggccacagggtaaagggagacaaccctgtttttcctaatattttgtacattttaagacaatgatcaaatacagtgaacaataacaaaatcagcattattattattattattattattattattattattgcatacaaacagagcaactgccttagaagttagtgctcaaggatctatttagtaacaaatcccagagaatcccttgggtttttctacccgtcttcatggatgtgtagacaatgctgcaactgtctggcttctgagtcatcaaacactgcttgctgataagatacggacctgattccagttttctggcatactcagtgagagcaagtgggagagctcacaccagggccttgctctggatagcttctctgtggatcttcagtgggcccactgtttggaaatactcagtttgctcttctctgacctctgcctctctccttccccgactcggacagccttgtgagcatcgggaagagtgatcccccggatggcaaacagcaactttacactgcaggtagaccacatcgtagcttttgaggaagctgaaggcattgaacttgaactgggccacgttcttctcgggagcatggaggttggagtaggaactgtctttgatgcagctgatggaagaaacacccaggcctaaaaggttaactaatacaggacatgaatttcccccaacccacataaccatgctccactctaaggttctgaatcccaaatggggtgctttctactacctccattttctgaagcaacaactactactagtttccattgttaatggaaacctcatacctggccataaacagaagggaacaattacctacagtgaaaacagatcaaggttttcgctgcaacctttgccttctaggtctactctattttgcctacagggaagattacaaagtcgttgctacatttaaaagcgcacatagattatttaagaactggcaatgcaggtcagtgcttgcgtacttggctagcatctcctatgctccaggtacaatgcccaacactacccaatgaaagtatattgtaaaccatagggcggtgtaagtggtgcatcaagaagagataaaatgaagttatgtagaacatgcagctaaaaaagaaccagagaaggcagaaaagacagtgcagcagcttttcattttgtacagaacaaacttccaagagaacagaattgtcggggataagagg

SEQ ID NO: 33109 - DNA, 1218 bp, Mus musculus
gctatctctgtaattgcccagtgggcacatgaacagagtgaccacagtggcagagatggaggttatgtatgggctcaacaacataaatttccactcactgaggctaacgttggcaatggctgctgatgctgagtgccagatctgtcaagagcagaaaccaacactgaaccccagatacggcaccattccctgagataactaagcagctatctgatgccaggttgatttcactggactagtactccttcctggggtagatacttattctgtttgtggaattgcctttcctgcacagtattgcttctgaccaaggaactcgcttcatagccagagaagtacgacagtgggcccacaatcatggaatcctctggtcttataatgctctccaccatcctgaagcagctgccctgacaaagatagaatggccttttgaagacacagttccagtgctaattaggtggccgaagcctgggacactggggctgggttctctagaaagcagtgtatgctttaaatcagtgttcagtgtaaggtacagtttctcccatagccaggacctacagttccaggaatcaagaggtggaaaaggcagtagttctattcactgtcacccctagtgaccattagggaaaattttgccccctttttctgtgaccttaagttttgctggcctggaagttttggtcccagaccagatctggaagcattcctaccaggagccactaataaacattccattaaactggaagctcagacttccccctgggcttctgatgcccttaagccaaggctaggaaagaaatgacagtgttaggaggggtgactgatccagattaccaagggggcattggattcttcttcacaattgagataaaaacgatgtttggagccacgagaggtcttgagggtctctcttggttactaccatgtgttatggttaaagctaatgggaaactacaacagtctaatccaggtaggatgacaaagggcacggacccttcagcaatgaaggtaacgggtcattctgagaaaagagccaagacctgctgaggtgcttgcttgaaggtggaggaaatacagaatgggtaatagaggaagatacttaaaaataccagctaaggccacatgatcagttgcacaagtggcttataattggcattatgatgctctccaccatcctgaagcagctgccctgactgaaagatagaatggcctttt

SEQ ID NO: 33110 - DNA, 1256 bp, Mus musculus
agaatcttagttctaaatatcaaaaatagtagaaaataaaaagtgtagcttgtaggccatataattgacaataacaaaaagtcccaaatgttattttaaccaacaaaaggagtatgtttggctgctataattgaactatatgaaagatgtattatgtggtggcttttagcagcccatttaaaaaacatgtccctgtattagttttcaactataaagtttaagtaatttggcctaatcatctgaaaataatttattagatcatgcactattttttggtagtatgatttatttctgtattttaattgagtattttccctcaaacttggttattggactttatcctaaatagtaattaattgagaaattcaattttggttttcaaaattgattcttaagagaaatatacccccataagaaaataatatcacaatctcataaggatagggaatggagacttggtagtctgaaaacatacattcagtataaatatatgtagtcatttatatagtatattagataattttatatttgtgaagacaaagatctatgttttacaatgtaaatgaaaaacaggcaaagcctaatcagatatccagctggtgaagccattgatcagtgttagggatttacagtcgggagaagacgctctagttgcagaccctgagtcccctggagagagaagtagacagtagacaaacgagtcgcacatttccagaggaaacatcacaagttagatgtgaaaaatgcccgaggctcacgcagttgctggaaataatcgttacttctagatagaaagtattttggtgcttttgcaaaaggataatgtttattaagaaacttgacattttctaggtaattttgctttgcacagttaatgtttattgagctaaattaatttccacaatgcaaatcatagttaaatatgcaaggttgtataaatacagttgaaataggaattacattaaaacagtaggaagaaataaaacaaatttagaccttgaatccaaagagataaggtctacttgactttcaaatgggggaaatgatgaaaggcctcacccagtctcagaacagacagatgagtgtgataagaaaggaaggggtggatgcagaccctgacagggcagacaccttccactcctgtaataatgggaaagagcagggcttagagatgatgcagccgcgggagtcaggatgagtaaacagcctgccctcctttcctagactcatggcaatcctcctgcttcatgtgtaac

SEQ ID NO: 33111 - DNA, 1198 bp, Mus musculus
gaaaagctttgcttcctacaaacacgcgctttccctgaggcctgcttgcagccattggacacttggtctagtgtgtggatttctatgtcttctgtcgtaacagaattgtctctgtgccctgtgattgttttgggtagggacgctttgtatccttgtacagtagtcttgacgattctcctcccctacgccatttttgtttgtgtttgctatctaaaactgttatatttttctgttgtctaataaatcagagatttggaacttttaaaagttgggtgtttgtaaacattttggtagtgtcatttattgcataacaaggcttttcttaggcaaagtactctttgtcattagaggtgtcatttgactgaatgtaccatgccttatttattatatctgctcttgtaccagggggtcagccctgggtaaaggaatccacttgacttctttcagccagtttttgctcctgtttctttggaggctcagtgaggcctgggagccagctctgcagcttctcaagatgggcactgaccggcagcatctgcgtggctgctagcagtgccagtgtgggtagggctcatgcttccgtgggctgacgataccatcctctgtagacagagccaaagggcaggcccctctggacttagccatcagctgctatgtcactgaagccctccggacgataaatggtgtaccagccaggagctactggtgggattggtcttgtggtgtagtcgtatgctttttaaagtcataaccacgtgagcataaatttcaaacattgtataacttaaaaagagaatgggccttgttaaaggtgaccaaattaaagccgtgttatggacttgtgtttgaagtggtatagagagctgctgatggttccgtttggctgtccctctgtccctaaatgtgtctcctaccccttgtgtgccacctgtgcagctcaccctctcaatttgcctgtttattaaagttacctttgctgccagttttccaggtgtgttaccttggtattctcttttttttcccttttgaggtttctttattttattttatgtgtttgggtgctttgtacaccaacagtgtgcacagacaaagccagaagagggcatcaaatcccctgaaactggagctagagacccacgtaggtgctgggaattgaattctgggtcctatggaagagcagctagtgatcctaacctct

SEQ ID NO: 33112 - DNA, 1147 bp, Mus musculus
tatttttgttagctatccagaaataggaaactgaaatcagttttaaataagtcacccaactgaggaacctgctgacccagggctatcccagctcctaggacattctatgcaactccagaagacctcatctcgtgctgaatgctgagggcctcagaaaacatgcagcccatggagagcaaattccaagacagccagggctatatagtgaaagcccatctcaaacgaaccaaagtaaaagaggaggaaaagaaggaggaggaggatggagatgaaaaacaagaagaggaggaggaagaagagaaggaagaggaagaagaggaggaagaagagaaggaagaggaagaagaagaggaggaagaagaggaagaaggaaaaaagaaaaagaagaggaagaggcagaagaggaagaggcagaagaggagaaggaagaagaggaagaagacatggattcatgaccattcttctagtccaacgctggcaattacttgctggaaaagaatattaggggtcttccacatggactgtggtgacagttgtgctgttaagggtcttctctaggctcctggctcaggtgatttggatatacagctagtcttgcccccttggttcctctgtctttgttttccattaacaaacaataaaaggaatctgcaaaagttggctggtagtttttgaaatggaggcttgagacacaactgtgccctttgttctgagtggtggtgggtatccacgaatgaaaacactgctctgtgtgcccacaaagtctgggttggtttggtctgctctgtgtgtgtgtgtgtgtgtgtgtgtgcgcacgcgcgtgcaataagggaactgggccttttgaaagcacagtgacagcccatttaaaaacttctagtacaggggctggagagatggctcaggggttaagagctcttgtttttaaagccctggttcgattcctagtactcatgtgacagcttaacaactgtccagtttttgggtgtctgacaccctcttgtgacctctgtggggactaggtgtacatgtggtgcaccgacagacatgtaggcaaaacactcaaccaaaaataaatatttaaagaataaaaatgtggggttggagaggaggctcagtggttaaggtcctgagttcaattcccagc

SEQ ID NO: 33113 - DNA, 1254 bp, Mus musculus
gagtttcatgtttatgtagtcccttttctgaaatacatcctctccttctgtatatgccaacattcctgaatctggaaggagcctttctggccccaagcactgcagacaatggcgttctgcctgtaacagtctaaacttgtcattcaaacctagttatatgcttgccaaggaatcagtaaggcaacctcttgagtaaagcagtgacttagagctccttttcctgacactggggacactctctggtggggctgcactggctgtgcctatgaacactgggtgttcatatcttggaaccatttttcttgtagactgtgatgcttggaaggtgtgcctgcgacttcgagataacgggcttctggccaagccaacccacggtgatatcatcaggcttgcccctccccttgtgatcaaggaggatgagatccgggagtccgtggagatcatcaacaagactatcttgtccttctgagagtaggaactctggggagccatcttcagacagggctcttgtgaaactctgcttgcagtggccagagcctgtctcctgaaaggcatatatttcagttgatgcataatagagtgacacctaggaacctgcaggtggctgcgtgacagaaaagtgagagcgagaggcgaggcgtctctttgttgaggtttgactgtgtgggaactttctaaggagaaacggacccatctgcgtacagcctgcagatggaggcctgcagtcatttacgtgcgtctttacagtttccttgctgatgtgaatggtttgtatttagaagttatttctgagatactacagaacagttaaatcattataatcaatgaatgttaagttgattgaaggttaagcatatgtaaaatactagtttaaagtaaacttttcattggccaacaccagaatgtattatatagattctgagaattcattactaaattacactttgcttgattgcaatttgtaaaacatttattttcagtatttctttgaataaagcttaatgtttctttttacgccaacagagtattttgtatttccattttggtaataatcagtgtattatttcatcctgatgactggcatttcatcacctattgagatcactgggtgtgtttcaggccttttattctaaataaagctatgaccagtttctgtctgtacaatgatgtgaatctatttacttatttatttatatttaaattttgtttcatttttctctagtgtgttttgtgtaataacttcacaggagatgt

SEQ ID NO: 33114 - DNA, 1181 bp, Mus musculus
cagaagtacaggcagatgggtacgtggacaaccttgcggaggctgtggatctgctgctgaagtacacggacaagtgaccagccttcagagacagtggacaagggcacccctgctcccatactccatcactgtgccctcttcccacatacttccagggcaccaggccacccaaggctttgccaggacagatgctagaagttctagggtgcttgttcctgggccagagccagccatccccttcacccaccctctgcggactccttgtcaacattcctccctccctagcgtctgggcagaggtttgttcccctccctggcccatgccatgtttcccctaatgacatccaagaaggtgaaagagacctgtcaggcctccagaaaatgaaacccttgggctgaaaggtccctctgaaactaagtccctgaactcctttagtcacctttggcacgtggtcctttaattgaccatccaattggatgagatgcactgcctcctcgatgaactctctgaatgagaggagcctacagaaaccacagagctgagccagcctgcccaccacccatagccctatctggccccagtcagaatgactgatcagcactctgcctccaacccctgtcttaggaaacaggctgggataactctcaggaaactgaagagtaccctcccacagagagaaatgtccacctctacagtcaagactgaaggcacagaaagctccttagagttgggatggacagacttaaccatgttgtctccagtgtacagaacaagctaatggctcaataaacttgaccccaacagccccactttgactcagcctttcttagtaagggtccagagtagtaagagaatggagacccccagcagggtcttagattccgacgcctctgaacagtagagaggaacttctcccctgccctgacctctaagaagttaagaaatagactggcggggctggtgagatggctcagtgggtaagagcacccgactgctcttctgaaggtcaggagttcaaatcccagcaaccacatgttggctcacaaccatccttaacgagatctgactccctcttctggagtgtctgaggacagctacagtgtacttacatataataaataaataaataaatctttaaaaaaaaaaagaaagaaagaaaagaaaagaaatagactggcagg

SEQ ID NO: 33115 - DNA, 1099 bp, Mus musculus
cactcctgccttactcctgggtggtgaaggtagaagctggccagcaccacgggctcccttcatgtaggtccatggaacttgttctgcccacacatgcagatgtgtattctcagaaagccttactttaaaaaaaaaatttttttttgtagcaggaaagttttctaaatttgtatgcagaaagttaaataaaatgaaggcccacattaaacaggacatgctcactcccccagtttctagatgggtctcctatgcagaccaatggccatattttattatgggttcatttagtgttcacagcagttagaactcacccctggatcctgcaacccatttccactgatgtggttaaaattacttgaatgatggccacttaaaacgtaagccaggggccagggctcagggacgctccgcccatacaacccatgatgctgccccttgccatgcccatgctgctggtcccacccctgcccctggtgccaggcctctgaaggaggcagagaaagatactctagaattgcagactgatggagctcctttaggctagataggatagcctgacgtagcatagtctcattggcaaatgaactgcatcgtcagtgtttgggggcacccaggggtcagggacagatgagcccacaggccgtgctagggccacgtgtgccgtcccagccaggcagcagcagcagcagcagcagcagcagcggtactgtttgaggcagtgtggtgaatggcgtggtgagccagaacccatcagggctgcagcctgtaggctgcccatgctgggtctgctcgttagcaccacgcaccatcgcctgcctccccccctgacaggccgtgactgtcttgcactacagccactctagtctcaggaatttgcttgttccttttactgtgtaaataaagcttcctggtccaacacccggctgcctgcgcatggctgtgtgctttttgttgggggcagtgaaccagcagctctcctgtcagctctggactgggagaactgcgggacggacttctgtccccatgcctcagagagaaggcgaaatgctgggtggctgtgggagtaactgctgcccatagccacagccgccatcgcagg

SEQ ID NO: 33116 - DNA, 1189 bp, Mus musculus
agatttcactgtctgctggctgagcccaaatggctgttacctttctcctaaagaaagaccttgatgggaaccttttgtttcaactttaatttgtccatacaccagaagaaccgaggctcaagttctgatgtataaggcaatgtttctctaaaaccagacccaaagtacaggaagccccgctcctataaccccaggttgggtagcctggtgggtccctgtggtggtggtcggggcccagctggccttgggggcactgagaaagcaaagtagaaagctggtggaggcatgacctacaagccctgcctggtggatcacagaggaaggtagttgagagggcgtgggatgcacaccccagtgccctggttcccagaaagcccacagtgagggattctgttatctgaaagaactttatggtccctaaagctattcccactcccccaccccccaggaaaggagaggctgggctctgtcccctggtctgcttcacacaggctgttaaggccaaagcacagaacagttgccagctgcctctcctgaggactgggacctgagctcctggtggcaggtgtgtgtcttaaggctgatgtgtggccggcttgtccgtagactagctctcttgagcctgctggcggaaggacaaacaggaacttgctgagtgacagcttcatctttgcttcctgcctctaggagactgttccctgggcggcagtactccaaacccggggtgggggttggccctttgcagtttcctcaggcttttcttgatgtccctgtcccactaaggcctcagtccaagcacccagcaaaagcagccagaaaagatggtggtagcttttctgcctagtgtgttcatttgctttctgatgttcttttcatcaagtaaagcaggttttgtctagaaggtttccagtcagctttcagcagttgtgtgacccagacagacccattcatccaccccattcactggcccccagacctctggtcttggatctcctggaagaaggttcacctgggaggtccactctgtctcctgtgtgcgtggcagcacaggcagcaggcagactggctcacccgagtgccacaccccagagaagctgagggtgggcttcaccactcacctgcctaggcagcctccaccaaagccgactgggcctcttagcacgtgacatcccgttcactccagaagcca

SEQ ID NO: 33117 - DNA, 1198 bp, Mus musculus
caaaagcagtgtctgctgccgtcatggcttttttgcacagtctgcagtgtatcactctgtctgagctagcgcctcttcataactatgctacctaggaacacctctgtcctttccactgcagagcaccctgagaccattggccacaggcattcagggcttgtgggttcatggtgcccgctgtctgcacactgcctcacacagagtcggccccagttgcgctcacattgtgtgtctgtctcccagggtcttggggacctgctccagcaggcgggatctaggaaccatcttggattcctctgtacttaggagggacctgctccagttctctatcactcatttaatctgtttctttctggcaaactattgtgctggacagtgaaagcatagcccatcctctcattggactcatggggagggtagagggggggcagatctgtttgatgcagatcctacaggtgcaggatccagtgttgaactagatggctgagggccctgatctctggaaacttctgtctggtatggatagacaataaacaacccagactatcatgtcagacagcgttgtgaagacaagaaccatgggtgatacaatagaggtggtgggcacaaaaacagaaaaggcctttccataaaaggtggcatgagaaacctccagaggctggcaacagctaaccatggctgggcacagtacccagcagagaagaggcgctgaatgtccactcgtgctagttgaactccctccagaaccgggaggctcctgcctgatcccagcccctcttacgagcaagtggtcacctggatgctgatcgctcatctttgggagtagcaaaacccacttgtaagatgtcttctaggatcccaacagcgtggctctttctcttcctcagcaatgtctggttggcttgaggaagtgaggtgatggcatgtcagtttcaggagctcgggattttctgacagtcatccaagcgggctgttgcttccaggccagtgggtcttggtgccagccctgaatgtacatgggctcactaggtcttctagccatctgtgtggtgtgataaggtatctttgtgggagtagccctggggtttgagtggagagatacggtaactgtatccagaatctagccatgtcacctgaatatgacagaagtgtccagtgtggtgtgaacgtacaaattgtttctagactggacctgggg

SEQ ID NO: 33118 - DNA, 1192 bp, Mus musculus
ctttatagaaaagaaaggctggggaaatttcatagtggtcaaggtacatgccgtgcagagcccagcacccttgggaggagctgagtgtggtcttgtgcacacctgacactccagctgggtttggggagagagtagagactagagaatcactggactgtgctagctgctagccaagttaaaaaaaatatgaggtggaggtctggggagatagcccattggttaagagaacttgttcttacagaggagacctgagtttgatttcaggcacacacacagtgactcaaaattgtctatatctcaagctctggggaattcagtgccctcttcgacctccctgggcactgtgcatgtatgtgatgcacaggcatacatatgagcaaaacactcataaataaatcaactaaaagaacataaaaataaagatgggatggaaagtgacagaggacgctcggtgcctttctgtggtctgtgtactcacacatgtgtgcatcctcatacacgtgtgcatgcctcatacacatgagtacatgcacattttaagaaaaagcaattgcaaaaagaagcggctgcagcagaagagcctgcagcttttctcctgtgctcaggggtcagctttcctgacatagctcctctacaactctggccagcctgctaggcttgtgctgttggtaggccaagtcctgccagctgtgcgggttggagtgcttggcatatggccttcctgtttccttagagaaagatgtgtccatgggtaccatagagctttggtgggggaatctatgcttcaggaaaaccatccacagacacctggttcccttcttgtccccaggttctgtaataagccatcttctgaaggtcactcagatcacggcccaatgttgacataataggctcgatctcctggggaagagaaaaaaataggaattccccctgggagcatgccaggaaggcattcacatgccacttggtgattttccattcctcacttgaaaggcagtggtgctctggggactccaggatccttgggagtgagtgcctcttcctccctaggacagttccctagatgagagcccctggaaagttccttatcaaactgggagcacctttggcttgccagacctgcactgtgtgggcatagtcttagaatccctgtcttctagggcccacagcctctaggcagaaggaaagcagc

SEQ ID NO: 33119 - DNA, 1163 bp, Mus musculus
ctgtgtggttcatcctcctatccataggtaaagtgatgtgctgaccccccccacacacacacacacatatttgttcacacattctcactgttgtataaagttcacacttgtgaactgggtgcactgggaacattgaggagcattttatgacacaataggaatggcataatgtaggccatgtgccattgagatggaagctcggggagtccccacctggcctgtgaaacatagatttttaaggacctgaaaagcaaagagattgttttctgtaagttccctgtcctctgtttgcccaaagcggaagcaaaataaacccacgagcttcgtcttaagaatcagttttgtggcatccaagaatctgcatctctactgcctacctccaagttctacctcctccctccagctggcaatcctggaaccataccttggaaaatccctagtacagaaaatcctgctccccctttagcctgagtccacccacagacattggtccccaggtacagaaagcagatccccaacacaaacgtgtttttcagtgttgttctttcagagttacactgatggctgccacctctgagagattgctctgggcactttgctgggcctgtgtcttcttctctcagcagctgagagagaataggaaacgtggagaactatgattcaaaccaagggccttgccctttctcactctatcaagtgactgttgctcctctgaatccatggcctttgtcactttggaaagagttccagttgtttacgaagaagtggtaatgttgaatggcagggcggggcacttgctgtcttctgctcagagctccttgtgctctatgaagttggggcttcacacatagggctgttgccattacaagttagcttctgtgcctgttcttttgtgcggggatctgacccaacgacttgctttctgggccctcagtgaagggtggaagcccaagagctaaacatagcactggttgtctttacttgtttgtatttgtacttttcaaagtgacaagattggaaaccattagaatctgtgccgcagacaacacaagtggccacatggatgctatcgatacgcaccagcagtgctttccttttgcaaactagcctttatttacctctatctagttgtctgtctgcttcatacatagccaatcaaggcc

SEQ ID NO: 33120 - DNA, 1197 bp, Mus musculus
atgtctcttccaagccctgtagggtttgctcaccagctctgactcctgaggtgggattgggcagtgaacctcctgttcacctagttcccaggaaggctggcaaaggccttgacccagtcaaggaaagggagaagacagagtgggcctggatgagctcccgttggcccaagggtgggctgcagtactgcagcaaagaacgccatgccagaatagaaggtgagaccctgtgtggagcagtggtaagccacagctgaatgggtgtaacttgccttggggagatacctgtccattcttttagtttgtgtgcattttagacatactcttgtgtgttgtagagaagactgcaggaagtcacaattatgtgacatggtttgctgctacataagtgcatggccagtagtctgctctcttcccctgcagagcttcctggctcgctagcttcctgctgggctttgaaccaatatgacatgcctgacccaacccagtcctctccctgtatttggaagagaacagccaagcacagccactcctgtccagcttctgggggaattaaagttgggaagggacctatgatgttggtagctgttgggctttgagtacccctggagacagaggccgagtttttggtgttgagctggggttgaagagaggactgagccccgatgctgccgccagagaggatggatgcccgtgtctcagttcgcctttgtttagtttgtggggcaggccccttgctgctggtgatgccagggctggatcctagctggttatgtactgtgcttctggagaaggtggtagtcttagtggtacccatagtagatagactgaggagaggaaaaaggacaggtactctgtctgggtggggtctaaagttctgtcccaagtagagtaagaaacaagctttcactcagttcatgttgactcagttcaggcctcctcctgtggagagttgtacgactctggaaggcgttgcagagagcagtggccaaggacaggaaagcacttttccatttccttgtgggaaagtggtgctgtgctcaacagcctggattcacctggttcttcggtgtatcaaatgtcacatgatcctgcgcagtagagggtatcgaccacaggaggctggcttttcctgtggttactggtgatggcatggagctgagaacagtatgtagggtcactcaagacatgtcagactct

SEQ ID NO: 33121 - DNA, 1214 bp, Mus musculus
gtgcgattcatggatgtactagtgaatttaggcagagtgacccctcagtgtagtctgttcttaagataaatcagatcagagactgagcacaattagtctataaatagtctgtacgtcagaaacttacctctgcactatcatgccttgaaacttgctttttcaaagggaaacgaatttagcagcagccttcaaagaactttctatgatgagccaaattcatctttgccagaaaagaaattttgttaattccaagaagcctaattggaacaagtcagacattccttctctcatctgcatggttttgtaagatgagaagagagggctttgtttcaacttttttctactagcctgatacgtattgtcacttaaaatggttgcctttttaaaatgtaggaatactaatccccagcgagtactcatctggatcaggcccttgtcttttggtgcacgccagcgatgctgcgctgcatgcagtcatggagggaggccacacaccagcagatggcagaagggagaagccaggcctgagtctgtagtgaacagatcccagacacagtggatttaactaagttcctatggaaaggatgtaatgtacttaggtgtggcggatcctgggctagagttgtggaggaaagacgtttttgagaaaatatccaggaatcttggtgactacagagctacttcaagtatgaataaccatacttcttttttcccctaaagttgccatttaggggataattgcaaatgtgcggagaccattgggatgcacttacgcttttatttaattactgcttgttttctagttttgcccagaatgtgtgaaaccactaaaaaccatttttgagtatgttgggctgctggattggaagtggcaagacctaccatatatggcaatcaatcagcccatgatgcttggcgctgaactgccttccttggactagttaaaacgcgtaaggatgaggataccgttaaaaggtttcaaaggagtcatctcgtttgatagtgatagttactcaggagctccagtgcgcagtctcagacagtggatacagtcttagagacgagatgctgaccgtcctgctttgattgtgccccagggtctgcattgtaactgctatcctggttttctgggctcacaccacttccgtttgatttgaatgtcgagggtcactttatctgcagtgcgttccagcttttatcagctacctgctagc

SEQ ID NO: 33122 - DNA, 1492 bp, Mus musculus
tttttggaaatttatctttactatttttggaaatctccaaacaaaagtagaataatccaataagaaatttacatgtgtcttttaagaaatatatattttctaagttgaagggtattttttatttcgggggcatattttcagagatggaattatgtagctattattttaataacaatgtcctaattatttatagcttcctgcctgacataactcacttcaagaagtacacaatgtcagaacatgggattaagtgggcctgtgaatattgtacgtatgaaaactggccgtctgcaatcaagtgtactatgtgtcgtgcccagagacccagtggaacaattattacagaagatccatttaaaagtggttcaagtgatgttggtagagattgggatccttccagtactgaaggtggaagtagtcctttgatatgtccagactctagtgcaagaccaagggttaagtcttcatacagcatggaaaatgcaaataaatggtcatgccacatgtgtacatatttgaactggccaagagcaatcagatgtacccagtgcttatcccagcgtaggaccaggagtcccacagaatctcctcaatcctcaggatctggttcaagaccagttgctttttctgttgatccttgtgaagaatacaatgatagaaataaattgaatacaaggacccagcattggacttgttctgtttgcacatatgaaaactgggctaaggctaaaaaatgtgttgtttgtgaccatcccagacctaataacattgaagcaatagagttggcagagactgaagaggcttcttcaataattaatgagcaagacagagctcgatggaggggaggctgcagtagtggtaatagccaaagaagatcacctccaactacaaaacgggactcggaagtgaagatggattttcagaggatcgaattggctggtgctgttggtaccaaggaggaacttgaagtggactttaaaaaactaaagcagattaaaaataggatgaaaaagactgattggctattcctcaatgcctgtgtgggtaagtttctgggtttttgtttatttgtgtgttttgggttttttgttcatacgtttgggcttttttggccttattttgaataagatgggaaaaggcattgaaatggcttgaaaataagaggaagatcagtattacttcgcatttgacttatttggtgtgatagttcatgtatgcatgcataaagttctgtatctgtgaccttgtctgccttgtaccaaagtgtccacatttacttgtgaacatgctttttaagttaaagagactgttaacacatctgtgagaaagtatatacttggagtttgaaattgtttctcttatttattgtaacaagatgtgacagagcaacaccagctgctgtttctgaatgtttgtaaacagtgtgagcatcttgtgatgatagaggctttagtcagaagttaaaaatatcataaaaatgtgtgactccaag

SEQ ID NO: 33123 - DNA, 1157 bp, Mus musculus
gttatgtggactaggctaggtctaaatgtgtgtgccaccactgcctggtgacattcttctttagtaacatgagagttacagttggttgttcatgcatggcaaaaggctagccatggggcaagcttcactcccagcttaaatgtagtcggcttttatttatagtttgagttgaaaagttttgttgttattacttaggcgctcattaagctcttaggctcactggatcctcctgtctgagagacctaagaactagtactatgcagtccacaacatcatgcatgcgctcttatgaaccctatcctgaaaagtttgtatgtacatgttggggtttggggccagagttagatttgtggaaaagatccatgacttttcagagtttgaaaaattgtaaagctgacttcattcatgtctcacagatgtgatttaaaaggatttttgggaagattggtgtcatgtacttactgtcttttgtgcttctcatattgcctagagcacacaccacagatatcctgtgagtgtgaaaattaaatgatcaattttaagattggtttctttaataaagaggggactgttgtgttataccaggtataaagagtacttttatctcgattcctaatttaacatggcaattaaaatgcctttcaaacgcacactaagaatatttttagctaattttagcatttacttggaagaatgtttttttctgatacaacttaggaaacacagaaaaagttggtaatttgttttactgtacttattaaaagctagtgtgtattatctccccctcaaggctgtttattatccatgctgctcagtaagtactttctttacttaacattaatttgtgtgatggttaataacatagttaaatgggaatagaaggtttatggctttgaaaatggtatttattttatattcctattctaattgttttattttagcatatttaaaattgtataaggtttctttttaacaactatcactgccctgcctgtgtagtgtccccccccacccccccagtagaccatgttgtatggagatctgtctgcttctgtttcccaagcgctgggattaaaggtatacactatccactttctttagagacattgtttctctagcataggctagcctgaaaatcattgttgtagtccagactt

SEQ ID NO: 33124 - DNA, 1192 bp, Mus musculus
aaaagacattcatggtctgtgataaacagacacagatattaaattttaaaatctttgttttctacaacttactctagaatgaatatatttctgtgttaaacatttttggaaaacaaaattggaagggatttggaatttgaattatttattacagaaccacaatgtatttcacttatttagaaagtttacactaagctgggcgtggtggtgcatgcctttaatcccagcaccctagaggcagaagcaggtggatttctgagttcgaggccagcctggtctacaaagtgagttccaggacagccagggctacacagagaaaccctgtctcaaaaaacaacaacaacaaaaacaacaacaaaagaaagtttacattaataaattacatataaatattcttataggtaatatttttagcccattaaatattttgtaattgtgtagacatgaaaatgaatgtattatttaaatttcttatagagctagaggaagaatctcccattataaactggtctttggagttggctacacgtctggacagtagactatatgcactttggaaccggactgccggagattgtttacttgactcagtactacaagctacatggggcatttatgacaaagactcggtgcttcggaaagccctgcatgacagcctgcatgactgttcacattggtgagccgacagccttccttgtttcagtgtagaactgcacttgccagtagtgggctacttttctcacatataaatttttttaatgtgtacaggcattttgtctgcatctgtgtctgtgcaccttgtatatgtctggtaccaaggaagccagaatatttgatcccttggagctgaagttacaggcattttgagctgtagagtgctaggaatccactcaggtcctctggaagagcagcaagtgctctaaactattgagccatctcagccaggtgtggtagtgctcacctttaatcctagcacttgacaggtagaagcaggcaaatctcttgagtttcaggccagcctggtctacagagtgagttctaggacagccagggctacacagagaaaccctgtctcaaaaaacagcaacaacaaaaacccaaccaaacaaaaactattgagccatcttcctagcccttacataaaaaagttttaaagatttattttatttctctcccctctcccctctctctc

SEQ ID NO: 33125 - DNA, 2870 bp, Mus musculus
gtatcagctagttacatgttctattcatagtcttttgtgaatcattgcctttttgtttttaaagatggcctattttgagcctttgtataggtacattcctgtttttgtgacacaaaagaaaaaaaaaactttaaactgtcccaaacagaaaaataatggctatcagaaatgttttgttttagtgtgagttatcgttactgtatttgtttattgtaaaggtggacattttagcattcagtgcagttttcaataaagtaattaaaatttcttttaagtcctgacatttaagtacatctcacctctgtaaaagctagcccttgagatgtacatttacatctcgcctatgtaaaagctagcccttgacactgtcagtcagtttcgaactcttgtggtgacagtgtcttatctcacagaagtccaaattaggtaggctatcctaaagatgaggcagtgctttggagtgaagtcaattccagaaacaaaactggttaatttttagagttttgattttaatatgcccaaatgtagatgtgaactctttgtttgggggagggagggtaacctaatatttataaagtgactgaaaacttccacttgtacttaccttctgaagtagcactcaatgctcacaattccaaggttcctgttcctgagagaatgaagtgtcttacaatgtaagcctgtctggctgccttctttttaggagggtgctctaccttaactgcgctataaaatgagctcacgtggagtaccttccgtattacagatcttgtcagtgactgtggaaaaagaggccccaaccatctacacagcagtacttaacatttgttatggctagtgtagtaaacctaacagtgagaaacagaaagtcagatctgaatccatggtgtgcctaggttttgtttaattagattgtggttgctcaaacagtcctttagaaatgattataaactgactccaaagaacgacaacatcaggataaaaacaaagtactggtttcaccctagaaaaagaaccataaagtccacgtagttataaaagtattactgtccagtccatctgaaaatccctatacctgccacccagccatgtatcatcttttacaaaggacggcattacactttcttgggacaataattatggctgttggtttagttcaagagcttaacatagcgctgatttcccaaaggggttggccatttcacagccagcagtctgctagagaaactaatgaaagccccattcctatcttaagagtccaagaaatggagccttctttaattctttcccacagggaagaatgggtacctatcaaattatgtgtggtcagggtcactggtcataaataaataaataaataatataaatacagagggaactcaggaaaggacactcaagaattgacaatatgcagaacaaggctcaatcctgagcctgactctgtaccacaaggtttgggtacaacacagatgcacctagagaccagtgttaccctctcagctctctgtggcttatttgggaggaaggttttgcttaactggatctctgcctcctgaaaaatcaactctacacatggagatcagctattctagatgctatggatgctaagtacttagaatgacagccttctattgacttggttatcattcactgatcaaaatgaaaacgaaatagtcaatttgtagaaaaacactaactactggaacagtaacatttaccagtattgttaccacaattcatttatatggagtcacctactgtgaaaattactttctggttttagcatgcagcataaatgatctttcatcctgagaacacctttttattaagtgttcacaagagagagaactaaagacataacagctcataagttttttctttttagtattccagcaaacttaaaagttgtatacacttcaataccatctcatcagaaaaacaagatttaaaggtttcacagccttttcattaaaggggaggagaagaggaaatgtgtgtatttgctactttgcaactgcttgccacatcagtctaagtgcttatcaggacactacatgttgtgtgcctgaggaggtcagaaatgtttacccagtactaacatatacctgaagtggtcaattaacactctccataaattttttttctaaaaagtatggttttaactttaaataatgctacaactaaccaacatgcaaaaattctcagactacacagaaactgatcatacaatgcattgaccaccttactgcattttaaaaatctttattctgtactgaactgtattcccaatcagcctaaccaaaggcctgcccctaatacagggtctgcttagagcagaggtgacaaagacaggaagtagctgaagactgtctgcatggccgcctgggaacagaacaggttgagtccaagtaactgtcacataacccacccagggatgagtgagcctgctccctttccatccatccatccatccagggtagaagtgcacaaatgcaccgcccagagtcgagtaagaaccccctttacagggcactcttccaaacaaatacctaaataatgaaaggggcaaatcggaaaaattgaaaacaacagaaactaaaaccctcttcaaaaaacaagagacaatgtttatgttaagttcactccaaaaacttgctagtttttcttgtagtttgttcctaagggtttgattttttttttttttttttttttttacttttattgggcacaacaggaactaaattattaataaaataaaggcttgtttatttttatcttgccgtggataatttgtacaaagtttccaaatctctaaaacaatgggaaatgggtctggtgtggtgggagcaggatgtcaggtgctaatgaga

SEQ ID NO: 33126 - DNA, 1219 bp, Mus musculus
cagggaaacatattggtgatgtctggacctgaggaaaggacatgtgacattcattacattctaaatgggtattggtttgaaagtgcccatgataaataataatttaaaagaatcctctggggctggagttggctagtcaactaaggtatgtgctgttcccagcatccatactgggcactttacatctctctgtaatgctagctctggggaggcagtttctcaattgagatttcctcccttcagataactctagcttatgtcaagttggtataagactagccagcacagatgccctcccggcctctgggtacctgcacttacacgtacaaatataaagcataatttaaagtcttttttttaaaaagcctgtggcgtcttgacagtctgaggagacacattctgctttggtatggtaactcggtagcacttgccagcaaagatgataatctctggccagtcatgggataaaggggacagcatacaagatctgcaggcctttctttctcacttggacattctatctctgcacaggtcgcacagggcaggcagttgctgttcgagccaaggcctttggattcagcgtcatattttatgacccctacttacaggatgggatagaacgatctctgggcgtgcaaagggtctacaccctgcaggacttgctatatcagagcgactgcgtctccttgcactgcaacctgaacgagcacaaccatcacctcatcaatgacttcactatcaagcaggtaatgtgaaggcaaatgagctcttcttagcttcactgcagagtcaaatagcacctgccacgggcacagcagactacagggaagtgtccctgggacaaatcagtaatagagcttaggacccagctggcttccattcaccccttcgggcagacaagcacagctccaacattttgtaccttatggccctgtcaagaaagagaatacttctggcctacttttacggtcaagacttccaacctcttcccctgaactgctgctgcctatggtggggaaacagcagagccgcagagctccaagcttgcccagctttgtctcggaagcttctgttccagagattctccctgctactctaatgagataaagatatagccagcttctctttccttctgcagatgaggcaaggtgcattccttgtgaatgcagcccgaggtggcctggtggatgagaaagccttagctcaggccctcaaggag

SEQ ID NO: 33127 - DNA, 1117 bp, Mus musculus
gccagtcttagaatttagacatgtgggacggccttgagcagtgtcttgtacctgggagcctaaactccattttggaaggaatcctcattaagcaccgtgcctttggcttccttcccccaaattcccctaggtattgaagaaatgagccatggctccaagccagtggtcaacctaatccccacctctgagggccacgtgcgtatcatgctaatgtagtttacagtgggatgtacctaatatattaaaaatggttcagtttgtcagaattgttgaaagagatgggaaatctgctggtagctgtctgtgtttgggcctctgcctttgattttgtgttccctgatatgcagatgacgtgttcccagttctcctcacacctggtgccaggtggctcctgtcacctaccctgccacccctgtttagcaccctttcccagccgataggtctctacacacacacaccccaccccaccccctttagtttgccctgctattagcagattggccgctgggattcatacctctagccttaacaagatgtaccacggacccacctcagcctagggaaagaacaaagaatgggattcaccaaagaaaaaggagaccaagtcaggaagggaaacgatcactaggcaacctggagtctgttacccgggtaacagatacatgctctgatattgcagatggacatcttagttggtggctctcagccactccagatgcactggatgatggctcttgtccccggtgctgtcccccttggcgaggtggggtaaattacacctaaatctatgcctaaacttctgactttgtgcaatgaaccaacctgttagcccctttaaagccaagctttttacagactgtgagtgtagggggttcttacttgtgtgtcctggtgctgccagcccctctacccacgtcttggagtttggccctcagtagagagcaggcagggctgatgtcactcaggctcatgtgccacagcctgagtgctcatctgctgagcggatggtgctccatggctgattgactccaggatgaatccaggtagagctgtgtgagatcactgccacctcacttgcccctctgtgacctgggcacagtagccatctccagcacct

SEQ ID NO: 33128 - DNA, 1177 bp, Mus musculus
tacgtccagcctccatagtgttccttcagagaaccacttcacccacccccacaagttctaaagatgaggcctgacatcttggatctttccctgggagagatgatccccagggaaacaggccttgtattgtggtttgctgaactcactagtgaactgtgaagtcccaaagatgagcctgttttctgtctcagtgtctcgctcaaaagatcagcaaaatcaagccctatataatcttccaaatgcacactggtttttttttttttttttttttttttttttttttttgcccccacagcaagcagagacaaagactggcaacatcctgtgagccactaccccatatcttcaactcccagagatggttgctcccaaggtcaaggttgaaggcaaaaccctgattttggactattgagtagggaaaggtgtgatgttgcctggtttggctccttccttctgatgggtccagcaggatctgtgtgaatcagaataggtgctggcatttcttggatccaagcaaaattcaaaatttcccctgaatgctctggcttagactcctacagcttgttcgttctcgttcgttctctctctctctctttctatagacaattttccacttgcctgatatgaaattatatgttatcttttatgaagctttctgtagttgtcttcctgtataagccagcagaagaaaccagcatttgccaacatctggctctgtgttgcacacactgtcttgtgtgtcttgtctacctgcctgcatgtcttttatctatccattcacccaccacctcattattttatttaatgacccagtgctcaagacaggtgacattgtgaacctgtgtataaaatctttctttttacattttatttttatttcatgcatatgagtgttttgtctgcatgtggtgtatgtatgtctgcatgtatctatgaatgaaagaatgaatgtcagtgtcatatagtgccctcagagggcaggaactcttgaaactagaattacaggtgttagtgaactaccatgtgagtgctgggaacaagcccaagtcctttgaaagaacacccactgctcttaaacactgagccatctctccagcccaaatcttttttttttttggagacagggtttctctgtatagctctggctgtcctggaactcactttgtagaccaggctg

SEQ ID NO: 33129 - DNA, 1101 bp, Mus musculus
gagatgggaaagatcaacatgcgttagttagttagtagctgtgaccacggggaaacccaaggtgagctgttcccacttacttaccaggctcacaggatccccggggactggtgagacagctctgtggataaaggtgatgggagttggcttcctagagcccacatggcacgtggtaggaagtcctttggcaaggtagcctgtgccctccatgtgggcatatgcacattcaccccgtaaataaacgtagtaaaatttttaattaacaagagggtgactaggtaaaggtgcttgccaccgagtgtgaagatcttgagctcagtccccagaacccgtatgaaggatggagaaactcccgggttttcctctgacctcaacttgtagactgtgtcttgcgtggatgcctgcttcctacttttcaaattaatactttttttatttttttattcttcttaaattttttaaagagcacagtcctcacacgggtctgagctcatggtcagggtctaaggcacgcatggcacccgtcatgctatcctctcactgtcggacttaacagctgagctggcctaccttcagttggaaccctttactttcttctggaggacagaggcttgcattgctaagttgggaaattgaggactgttctgttccaaatgatacagtctgatttgggttcgtggttagcagcagagcaatctcaaacactgtagacagaaccaacagttgaagaaagacgtttactgggggacaaggaaacactcatgcagctgacacagacaaaaagaccctttgtgacgcctagcagttttcttcgccacatttagggttgcccagtctgaagataaacagggtggtccgaaactacgtatgacacccacggatccagcctcggacttgctgaatcagtccatcagctggtgggagactaaagttgccaagctttggtctgaagtcaggaagttgaggaagaagctggccttggagattcatcacctttattaccttggacatagtggaccttctccctatctgttgcctaccaggagtctaactcctagtctttcaccataactggaaagagagaatggaatgggtcctcgt

SEQ ID NO: 33130 - DNA, 1128 bp, Mus musculus
ctttacaagttctgacttctgtttccttaagtagacttatggaagcttgatttacctgccccttagtgaagttaagcagagtgtaaaatgccttcatggtagttgaatttacactctgttaaaatgatttgtgcactttgcagaaagccatgatattagatgcataaatattcagcagtgttaactcaggggaagattttatttgacaggatcgcagcaagtgctgaggtacagacaggttcagaaccatttagcatggtggccagtaatggacagagaatgccagctagggttttaaaattctgcctaaaacgttggaaatcaacaggaaaaggtgtaagtgcttctttgctggtgtagagtggaagtggttttcattgaagaagagctgtggtttctgttgggctctgtttcatttgagagaatgcctggttaataaaatcactgctgagggtagacctttgtcctgattttggagctgattatatgcaaattagtaaccccgacaattatttggatcttctgtcaatgggaacacacgatcctctgagaatggaccagtgagggagtccatattgggacatttcagggaaatgaatagactgctggttcttcacgcactatggtgtttacatctgtagtggcattcctggttgtcagcatgactatatctggaatgaactataatccagaattggaaggctcaccagtgaatcctaatctggaggctgggagatacaagtttctgacctggatcttggcatggagatcttgagacatagtggctatgaatcccagaagattaagactgggagatctctgagttcaaggccatctgggccacaccttctgctggagacctacttaaggatgtgaagaaggaagatttctctctcccctttgtctgcttgcctctttggactgagcaactgctagatccttggacttccattcacagctgctgctgaccattgttggggcgttggactacagactgtatgtcatcaaccaattcccttactatatagagactacccataagctctatgactctagagaactctgactaatacaacatccaaacattgatttgatttttttatattcagtgagctgtttcaaaaatga

SEQ ID NO: 33131 - DNA, 1174 bp, Mus musculus
agcactctggccaggggagatgctttctccttctgtccagatcagattattttattacatgaacatgaaaaccaggagcacacacataatcagggagtcagcaggttcacacactactatctcattaaattttcaggcaaaagctgcaaaaattaattggagacgtgtaatagtttagaatgtgaaccggcttacggtgatataaattacaggaggagaagacagctttatatactgagagaggcaaaactggtttcctttaatgagaagagataggatgcggagctattttttcattaccgatgcgctctaaagtgtttggacttcgctgatgaatagagttaattcgccgctacacttccaataattcatgttgcacagtttaatgacttctagataaaaacaggattgaaatgttaatttctctgaagaaatcggggcactcttgaatatcagacaaccccccccccatcctcatgcatgcgtgcattaaaccgctagttaatttcactaaacaagtatccaggacgtgcttcttgccttcttgctgcggtgatgttggtatttcctaccttcgtctgcccttttctcagtctctacacatgtgagattgactgtcttatgcaagaatctgtcaagaggagcccgtctctgtaactcaacctgtcagtgaccgcaggccacccgccacctctcttctgagcacagagaacttacttttagacttgattggctgttgttagccatgaatttaaatatctagcttgtctgctagtgattggtctatattgggctcgtggaccaaacatggtttggtctcatcgggaagacatattttctttaataattgtgtatgtgcgtgtttgtgcctgtgtaggcttcagtcacagcatgtgtgcctgaagctgttggttctccctcttcttcctccttcatttttttttttcttttgagacagggtctcatgtatcccaggctggtcccaaattcatgatgtagcagaggatgacccaatgttcctgccatgtgccccctttcatcaggtgccttcaaggtagcaagtctctggtatcccacatcggtggaaaattaacttggctgtaatcagcaccatctagcttctagtttctggttccttagaaatttcatgattcttttaaggtaacctttctcg

SEQ ID NO: 33132 - DNA, 1160 bp, Mus musculus
ggatttcatggaagtgaactgaagaggtcttagcacctggtacagttagggaaatcctctcctcactgtcatcacctgtagcagccacaggacctgcagggccatgagttcagcataggaggggctgctccatctggagacaaagctgcccagggtgccagcacctgtggtcaataataatgaaaacttggtaggcaacaaagaatatagaatgattgttttctttgtgagaattaggggatgggatgcgtccttcctttgcagcagcctagtggtcttcacccagccatggcaggtttgggatgtctccgggttcaagtctaattcttgcccacttttgtggaggatatgctggtaccatgatgcgatgcgtcagccgcctgctcctatgatgggtgcatgcagtagagtgaacacctgctaacagtgtgcatccttcgtgtccctcttgatggcttgagaccccacaatttgcctgaaacttctatctgtatactaaagactgttgacttatgaagaaaaacaattattttcaatctgctcagagccaaggactctggaaacacagtcattagagggctgccttgtgtgccatagggtgagagagagcctctcacaaggtggttagggcacagagctagtcaaactgccgcagggtaccaccctcgtagctttccctgatttttttgtttatttctcaaaggctacatctccaaatacatgacctcatctgaatttaggatcaagcgtccaacatttgacctacgggaggggaataccttcaactcatagttagcagggcctgagtgaggtctcttgcagcctccatctctccccagcctgggagaggatgaggacatgatggggctttatctgagagaattgggggaaatgctggtgagcacccaccactagacatgaaaggctgttagattcaggtcactgggtttggactcctgcgttttatggcaaagtctaaaaatgcagatttgtaacaacgaacgttaatgaattcagactgtttgaatttcacgctgaataatggctagaattatcagagcccacagcttttgagatctgggatcgtgcaatcttttctcaagattaaattgatagaatgatgtaatactgagttacttttattaacagccctggccgta

SEQ ID NO: 33133 - DNA, 2264 bp, Mus musculus
agagagacagagacgtaaacattttgtattctaccaagcgaataattgaaaatgggaagagtttctctggcacaccaggcaggacaagccatactacacggagatgagctgttttgatcattaatacttgatcccctcctgtgctcagagactaaagaatcttgaacactgactaaagaggagggaaggtgttagaggagataacccacgagtataggaggagagcgaggtgtaggtaactagtgctgccaccgcaggaggaggatggtcctttggatggaggctctagacctttcaaagctgtgcatgtccttctgttcctgacactcaagagactagaatgactacattatcctaccatacttgggatactgggtgcttggtttgtaagatagtggtgatacagtgggcagtgaactgcttctttgcctgttagcccggcctccttgttttaaatgaggaatgctttgttagcgacctagagcatcttcagatgctaggagtggataggactgagcatcttgctgcatgcctttaccctagcatccctgaggtagacagtcccttcctgacccccgcattgttatggtgggggacatcatggctggctgaggggctcgttagtgactttatggcttttgttagagtgtggtggttttttttatttgtggtgatactgaccaggttaactggtgagtttgcggggagagggcagacaggttaagattgtcggcaagggttcatgtctgtaaagtgtggctttcccctttctagcaggagggtgttttccgtgtgtgagcactgtagttgcatagcaacccccactggtggaattccatcttcatggaaaagccacagagaaagacacctggccattcttccaggccagatgttggctttttcctctcatccacaggactggcttcagtaccctgcccctgctgctgctctgcctgcttgagcagcaagcaggtcaggtgcctgcgatgctaccatgtatttccccctgctctacctgggtaaaatgaatgtgagtgctgtttaatgcaatacctagcttcatattgcatttgccaagaaaagtgcgattttattgaacgttaggattgaattcttaactgggtaatcaatttcagtagtgagttaaaatgccttctattaatggacagcggcagccgttcatcagagttccagtagattagcagttgtcagcatttatgctaatagcacttataaaccaggagcttatgaaatgcactttataattctgtatctcttagaacacttgctaacactttttgcttggaggtattgattgtttggttccttggcgtgctatgtggccctgtaaaggaagccaagtgatattttcatgccgatgacactaccacctttctggttctgcactcttggctttgtgtcagagtggatggaaagggtccatttgttctggtgctctactgtttaatttgatcagctctgcggctacagcaagacaaatagtatttttaatgaaaccatttaataaccctggtagctttgagttgaaggcattgggaaaatgcaattaaagaatggctggatgtaaacagatcagggctgtttcctcgctgactccatccattgcatttgcagggcttcatcactgtaaatggttgcaagccgacaaagctgcacctcctgaaaaagacggacagcccatcgcgtgagctgtagagtttgtggacgcatttctatcggtgagttactgtaaaatatctccaggtaaaagttgttttctaaaatcccctttggaaggtgttttcaattagcagatgactatggatcgctggcagcctctggatgcttcctcgggatgtctcatggcaggagcatattgattgtctttcaattaattgcatctggtattttcatttatcaaaagcaaaatacatgtaattaactctgaagcaatacagtccagtggcaagagatccctgctgctgctgctgctgctgctgctgctctggagataagtcagcggaaattatcttacaaggaaactctaggatggtaggacttttggacgtattaattaaagagaataaaaatgaattagggagatggtttcttgccatccagttactttgtaagatgggagatggacggcgttaaagggtcgtggccggctggcaatggcggccggcatggcatggcttatgcttttggagttccagccttggggatgtcttgtgcatctaatgactttttttttttcccctgag

SEQ ID NO: 33134 - DNA, 1196 bp, Mus musculus
caagtctaatactggggagctccagggtttttttttatccgaagtggagatgcctgtgtttctaaccttactggttagagtaaggtacttcagtgcgtactcgatttcactggttggtaacattttaacatctctgtaatcgtggttattaaatcaatccacgccatatcttgacagctgtttttcctcgcttgtggtttataaagtcattctggtctaagttttactttatggtgccagagactgaacctggagcttctcatatactacacagtttgctcttctatttgaagatagggccacaacaactaagtttgtaatcctcctgtctcagtctcctgcccagctccctgctatctctggactacatacactgcatggatggtcatctccctctgcctcccaggccctctagcttcccccaagagtctgttggcttggcttcggcctgtggaagagcctgattccaatacacatctgtttgtaatcaagtgagttagagaaatcaggttgtttttttttttttttccgttctggacaggaggctaaatttcttccctaagatttcaggatgcatccctccaaaactgagaatcctctaccaggtggtttcaggatcttccctgatgcaagagcgatggctagtattgcatcaagggtcaccgcagttgagtcttttatcgaagtatgtgcttttatcgcagtgtcctgccatctggcaatgaaaatggagtggatgccgcctcaaccttttagagtgtctgcactgtattttaactgggaagttacatgcattttctctacttaatactttaaaaagcctcttgggtactgagagaggcttgtaagtacagctgcctgtgacctactctggaacgggaacttcgcattgagaaatcccactttatttaatggcagccttgttagaatcatgtgttgtttagcagtgtccttccaaagggacctgacaagctgttgagccaaaaaaaaaaaaaaaaggctgtactaccctgacaaggcttggaatgagagagtcaaatgccctgtgggctgctggccttaatgagcctcgaagccatggggaaacctgggagtcgttacccttgtattctgatcctttctctgggatgagatcataagttgtttgtttgtttgtttgtttgttttaatgtattatgtatatatgggtgtgtgtg

SEQ ID NO: 33135 - DNA, 1198 bp, Mus musculus
agggtagctgctttccggggtggttttaggctgtgactgtgagagagccattgtggccatgacttgaactctcactgatgaagcctgggtacactggaaagacacccgaggaaaagggaaggggctagcctgctggaataagtgcaaagtggagtctttgggacctaacgacttcctgagtttgtgattgactgtgtttatgaagtctggcgcacacctatctgcttccacacagacatcttaatagagattaagtacagaaggaagccgatgcatgggcagagatactcccataagcaatattgtagtgttagacagtctaattatgttctgtacacgtcccaattaaacagacgtcactggaggaactatctcttagctttttggaaaagctttataatttagtaagtcaagtgaaaagagatgtccagtgtggggtgtcatatacggttaagtctttagaaaatgctttcctgacctgattaaaatcaggtagatatactactgtgtgctgtagttccaggagagcctggagcttcaggggcagctggaacaagaggtgggccattcctagggtcagagtccttttctcctagtgggttgggccacgtgattgacttctgctgtgagtggataagtgcatcatctccagatgtgttccaggtacttcctggggaagctgggccaagataccacatccctggctttatggtttcatgcagggtgtgggtgggtgagggttcattcaggtttgttaaagttcttgggtggccctcgttgtctctctctctctctgaagtaaggagcgttaggtaagatgagtctggagagaagtagtgtttgggagtttttggctgtgagttcccacttcatttgaagatgatggtgggctgctgaggtagctcaattgatagagtgcttgcttccatcgcagctccacataagcaccgggaagagtggagtcaaaagaatcggtcttcagctatatagtgagtgacacagatagcctgggttttactggatagctccagctagcctggaacttgctgtgagtagctccggtggctgatctcacactcagaacaattctctttgcctcggcctcctgtgctgggattaaaggataccacaccctcccagctgaagttatttcctataaaagccattgctgtgcctgggaaaatgaaccggtgttcac

SEQ ID NO: 33136 - DNA, 1239 bp, Mus musculus
aatggaatatgtgtcatggagttatgaaaggttttttttttttatttttttaaagccctatctctgagttcagaaaattatatttaataatcgccaaaaacttcagaaccagttttatagtggctcttttgatcatgatttaatgaaaagtatccaaaagctatcagtgtgactctaatgatagtcacaaatgaatgtttgggcctaatctggagtttgcttttagatgtcattattaatgtggaaggcctaaattatggctgctcttgggcattcagaacttctcctatgaaaagaagggccttgcacattgtgtggaagagggggattcacagatgaatatagagtctaaagtggtgaaagagcctggccattgtttgtgcggaatgttgacaaagggagccaaggggcagttttccccttctgcaggagaacacaacagggatgggaaccagcctggcattcatctgccttggtcaggcatggaaatttggccagcttcccttcctgagtttttcttagaaggtggtcttactggactccaggagaatacatgctttggttcttagcagtctgcattctttttgaggaaagattacaagggcaaatagaagcagtttccgagaaaagcattaagaatgacaactccctcacccccccccccctttcaaatgtgatcttaggagaacactatctatacagtgccagacactgaggcaactgaaatcccaggaaggacctgactttgtgtttaattcctccctgtgctccggctttgcctttagggaccggatcctatacttgactatttgctatagggcctgcctgtttgtggctcctgctgttatttctgaaaaggcttctttgagtcttcattctcagagcctttcctcgcacttccacgtgggacccatgatggctcaggtgacaggcattcctggtacctcgtaaaaatctccatccaaactggaaccatgtgggtaattgtctattcccagggctgcgtctacctggtatttagcaatgtgcactcataattttgaggccccctggcagtttccatccaccaagcttggtcccctgtgggtgcttagaagtgcccggcttgagctgtaggcctaacgtagatttaacagttggctgctagagtggacttaaatttcatagaaattgtgataaaatggttgggttctgactaatggggcaagcagtcatgctagttttaaaaggaattgtgac

SEQ ID NO: 33137 - DNA, 1159 bp, Mus musculus
taatgggactttaaaaggatcttgtttttataattacttcatctcaaagagtacttcttaatagcaattacagagtaatattttaaatgccaattcaacattttcagccccagcaactttaacgtgaaaacaaggtttcctttttagtgttccaaataacaactgtatcttaaagttggaacattgaatatccttttgtctggctctgacacactcctggaaaaacccccagtgccctttttatagccccccaaagaaaagttaatgagctggtaggtttcaagctagaagcaggtcctccctcttgcaaaatatgcttaaagtcgccattgaagttgaatgttagccgtgaatgtacttgcctttaatgaaaccagtttaatcgttcacacttgatcaagtataacatgaccaaacaaaggaaataagccagcatatttctgtagtgcattgaggggtttagtgtaagtgttgatgatgggtcgcccctccccccactctgccccagttcaagggagagcgggttgaaagctagggggatttatgacactgattggtttttctgtgccccaggggtaggggacacgggtacgtctctgtggaaagcagctattagagggaatccaaagatctcaggtttgcagtgagttccgaacctgacaaggtgcgtttttggtttcttgtctggggagatacttaagctgaaggagtataatgcccgcctccctcccccgtggtaatggcaccttaataagggagagtggagggcggtgtggtgtgccctgctgaggggagctcgctgccacgtgagttatttacggtttcatttgggagctttgaaactgggctcttgaatgggtgttcttgtgggggaggggcagggtgaattaccttttcttagctgtgatttaaaaaaaacaaaacaaccccccccccaaaaaaactcaaccctttgtcccgcaaaatgcatttccttgctgagcttgagttgcaatttatgtgtgggatttagtcgtcaatttaagtgaagaaatgtctgtaaaatttaagtgtgtcatttcagagttaagaaacttaaaaaaaaaaagaaaagaaaaatcatccaccaaaccccaaacactgcctctgtaaaaaacctgtgacatacttggtgaaatat

SEQ ID NO: 33138 - DNA, 1246 bp, Mus musculus
tccatgcttgatcagccccagctcccactcaactttctccatgacatattctttgaccatgtttttgtgactgctcccagtgcctttttccagtgcctctgctgggaaggcaggggtctttctctggtttactcaacagccatagataagtcagatactctaagaagtgcctgttgtttccagcccctccctctattccctcacctgtttgtttttaacctcagcagtaacgctgaagaagacatagtcctccaaaccaacaagcagatttactcccagcttttgagagcgactgccaacagaaactcaactctgctggaaagaattgaagtcgtcatctgtttgctggagcagcttgcctccggtagcagccgatcgagtggcagtgctgtcccctgactgcagtggtactggaggactgtcttgtcagtgccttcccgtcctggagctgtctgtctgtccactcggtgctgagacttattaaatatgaggacatagcgtttaatcaggtccacagtggatacttgcttcccatggcaggcagaggatgtggggtggttcggcttcttgtgaaggtgagaaactataatggaaccgaaagctttgtaaatgtatttcctcgagaagtacatggttccttagtgataacacctcctgcgatgtcgcgagacttaaaatattcttgacgttaaaacacttaggtgtaagatgcgattattttggataaaatgttactctggccaagggaactcttattcaagtgatttcatggattcaaatggcatgtagaaacagtgcgcatcagcgtctacttctaagtgacacaaaagtgtcccctttccaagctgtggtgtgcgcgggaggttttgacgactgagaattgtgcaggtctcctttcagtgcatgctctgaagagactccttctctgactgtgtatgacattggtaaagaataggtactatcactttctcattttaaacttgaaactgtgaataaggtaagagaattattttgaataaataagctatttatttaaaataccttggtagttcccacttgcattcttcacactgctgtgatttgatctgcttgcttatgatatcaaacctttacaaagtacatggctcctaattttcaaggcaaaggtttcccctacattcctgctcctgggacattctgctgtgccctgctgctctggggatcttgtccagtgcccactgcatgtggggccgtcaagctgtcacta

SEQ ID NO: 33139 - DNA, 1116 bp, Mus musculus
gagtcctgcgcagtctcagcagaggaactctgacctgctcacaaggtcagcagccaggtgtctccagccttgcaggcaggtctctgtcagagctatcagaccctgcggttggaacaggagaacagggggaatataaactctggttcttgcctctcactgggtctgtaacatgctggctgacccttctggagacttgcctggggagctgctgggctagagtgctggcatggctgtggctttcctcggaggttaggagctgggcatcttcttttcccttagcacattgaatgggtgaagagagaaggacttccaatgcttttcaaacgatgatggataaaacagagtatatttgttatgagctgtagcttctcaaggtggtattggcgtttgtgatttgcaaacgtgtgtgctaaagtcttctgagcttctcctgccctaagatgctcttattgccagaaggctctctagcttttacattgtaatgttcctctggaagctgctccttaaaacagccctgccttttggactgaggcctcctagactgtagacagaccctgggcagagccacgagcagctttcagaagcaggcagggaatggtagagaccctcagcaagtttctggctctccactttttgcaatatggaaatagacagctgttttgattagctttgactgtcaacttgacatagcctagagtaacccgaggaatcgcagtcgaggaattaccgagatcagactggactgtggatatgtctgtgggggattgtctggattgataattgatgtaggagggtccagcccactgtgggcggcaacattctttggtcaggtggtcctgggttgcctaagagagctagctaagcctacgtctgtgaaaaagtcagctaggagcattcctctacagtcagtttcttgcttcaagttcctgctcttactgccctcagtgatggactatgacctgaagtcaaccccttcctccctaagtcgggttttgtcagagagcctatcatagccacagaaatgagtctagagcatctttctattaatttttaaatttttttattttttatttatttttattttttacttatttactttctatcttgctcactgcc

SEQ ID NO: 33140 - DNA, 1175 bp, Mus musculus
tcagaatagagctagggagtttaagatggttcatcgttaccattccttgctgtttgctttccccctttgcccatgtggcatgtatgtttcccacataaacccgggtctcacatgtagctgtagctggcctgggcttcatagagagccacctgcctaagattaaaagcaaggagcgccatacccagctatacatgattcttcttttctttttggtttttttcaagtcaaggtttctctatgtggttctggctgttgctatacatgattaacaggcatggtctatatagggagtcccaggtcagccagaactacacagggaggccctgacttgaaaacgaaacccaaagaatcttgggtaaagaaacacagagcaggatgacgtcattcagaatgtaaagaggggggggggcagacgggtctggagggaaagggttctgaacgttgccactctgcactcaggacgcgacggcagaaagacaagctttggctttgcaaagtggaaaattggtgttgtacttctttccagccgaataacgtgaagttgaagtattttccttttaaaacagcaaacagatgtttcagaagacagtgatgatgaagtggatgaagatgagatctttggcttcataagccttttaaatttgactgaaagaaaggttagtttcactgagtggcttttgaagcctgggatctgcggtaaggacggagtcttctgtgtcagactgtgatactgtcagggcaagtgctccttcctgctctgttctcagtgtggagcagtcttgttaggagtgatttgtaccagcttaaagctgatttcttcaggtggcatggtcactaacattgtagtgtctggtgttggggcagcgctaccgacgctggatctgtttgcgggatcctgcagccggtctctgctctcagtacagtgtgcatacagagggagggtttattcagcagcttccaaagttgagagccggcccttaacatgggttttgttatctctctttattgactcagaaatgagttctgataaatctatgccagccgcttattctctgagaagaaggtgcaggccacaggccaccttcagttttcaaaggaacattccagttaattccaactggttttgtgaggtgtagtaagattgctgttccagtgtgtgagtgtaaattataaac

SEQ ID NO: 33141 - DNA, 1100 bp, Mus musculus
aaaaaaggccctagaccaggccagagaggagatatggaacgacttctgagaagctgcggagctaacatcggcaagttaggaaatatgtcatgagctggatcaagcctgggatgatgatgatagaaatctgtgagaagttggaagactgttcccaaaagctaataaaggaaaatgggttaaatgcagtcctggcgttccccactgggtgttctctcaacaactgtgctgcccattacactcccaatgctggtgacacgacagtcttgcagtatgatgacatctgtaagatagactttggaacacatataagtggtagaataggattgacgttctgcgatgtcggtgaggccattcaagaagttatggaatcctatgaagtagaaatagatgggaagacatatcaagagaaacccatatgtaacttaaatggacattcaattgggccatatagaattcacgctggaaaaatggtgcccattgtgaaaggaggggaagctacaagaatggaggaaggagaggtgtatgccattgagacctttgggagcacggggaagggcgtggttcatgacgacatggaatgttcacactacatgaaaaattttgatgtggggtatgtgccaataaggcttccaagaacaaaacacttgttaaatgtcatcaacgaaaacttcggtactcttgccttctgccaaaggtggctggatcgcttgggagaaagtaaatacttaatggctctgaagactctgtgtgacttgggcattgtagatccatacccaccactgtgtgacattaaagggttatacacagcacagtttgaacacactatactgttgcgtccaacctgtaaagaagttgtcagcagaggaggtgactattaaacttagtccaaagccaactcaatgtctttattttctaagctttgttggaacacattataccacaagtaatttgcaacatgtctgttttagcagtggacctgtataataccgttacccatgtttaaaggagtttgatcaaaggcaaactgtctacatgtaattaaccaaggaaaaggctttcaagactttaatgttaactgtttttcccatctaggaaatgct

SEQ ID NO: 33142 - DNA, 1125 bp, Mus musculus
gggcatagccttcatagctcaggccgggagccagctgcctccatctgagaaggagagacctagctcttcctgcactgtccacatagggagcttaagctgcctgcgagatagaacgaagaagaaatgtctgcaggcagaccccgtagttggcttctgtaccccaccctttaaggatgtcccctcagcctccctgtttctcaggttgtacaccccttgtgctgagtgtgaatgatggaaatttttacctcaggaaaacactctgtgatcacaggagctaactcatgtcaagcagggtgctcagcctggttacttctcacttcctgggcttggtcagtctttgtcacaagagctatcctgagccttgaaggatgcactttctgtctctgggtgggaacccccccctccccccccccccaccccatgtctcagtcattgctaagcatttcctaggggaagatggccaagctctgacttgttttctgttgctcctgctgctcttcctgctgctcttcctgctgctcctctgctgttcctgctgctcctgctcctgctgctgctcctgctgctgctcctgctactcgtgctactcctactgctcctgttactcctgctactcctactgctcctgttactcctgctacctctgctactcctgttgctcctactgcttctgctgctcctgctgctgttgctccttttgctcctgctactcctgctgttcctgctactcctgttactcctactgttcctgctgctcctgctgctgttgctcctgctactcccgctgctctcactgtcagcaaagtgtctctctgtgccactgaccttgcactatgttctagttatttcttctgtcactgtgatcaacaccaagaccaaaagcaactaggagagggaaaggtttatttcatcttacacttcagtcaacgttcattactgaggaagtcagggcaggaattcaaggcaggaacctggaggcagggactaaagcagatatggtgtaggagtgcagcttattggcttgctcatctgcctttccttatagctcaggcccacctgtttagggttggcacagtccacaatggtctgggccctcccttcaacaaatgagctaccaagaaaatg

SEQ ID NO: 33143 - DNA, 1150 bp, Mus musculus
ccggtttctgtaaccctagcacttgggagtgggtgggtacaaacaggtgcattcctggagcccagtgcccagcccattgaattgagtcaaactccagattcagtgggggacgttgccttacaatgatagtagaggaataaatactcaaggctggacatctacccatgcacttgtgcatgcacctgcatacacacacacacacacacacacacacacacacacacacatacacacacacacacacacacacacacacacacacacacacacacatatacacacacacacacacacacacacacacacacacacacacactacagatatgtcccttttctttggatctttggaagctagaatattcaatcctggacagctcagagggcagcagccagctgctttaaaagggttctcaatttttcacagtcttcgttgttccatagattatccagtttgtagtttcaggacttcaatttgttttatattatttaaaaaaatagacatttgttcttgagcatgacgagccatttgggggataagggcttggcagctctttctgtgtgggtagcattagtaagtgttccaggggttagcagctgtctccaataggtgggggtcatcctctgccccatttggttcctaaatgcatgttgaaagctccttcatggaaatcatttcatggtaaatgtggctagaaatagtgaattcaactatatcactattatgtatgttagcgctcagtaatgaagtatttagcaagtgaaccttttgaaatcgggctgagttttcttctgagatgtatttgcagagaacctcacatactctgtgaattccagacaaagtccgtgttgttatgagagctgaatctgctgttctgtttgcagtggacctcctggggctgttgaagtggagatccaacaccaaccttctgcagcagaacttgaggcagttgatgaaggtggacggtggtgaagtggtgaaggtaacgagggctgcggctgcggagggaggcttggtcttgtgttttctgcctgttattatgtactgactggggaagtgccaggttctggttataattgcttaacaatgacttaggtgtgtgcgcagtgctgctgaactctctttggaagggctaagcagcttaacttgg

SEQ ID NO: 33144 - DNA, 1210 bp, Mus musculus
acctttggctatatgtagggaccccttctgcatgcttgtctctgaccaacagctactgtgtccagagagggaggctcttctctgtccagttccgactctgggctgccgaccgaccttgtcatcttttttgatgccattggtaggcctatggcagggagtttgcaggaactgtgatgagctggctactcagagaggctgctggcagggatactaggctgttagcagatggcatgaagttttgacctttgcagtgatttacaatctgaaaactatggggaatgtaacaaggttgtacaaacccaaaccatcagagttgataaagatcttgtcatgtccaggctcgagttcttgatggaaacagtagtttatctcttgctagttgtcccattttctcggtgtagtggaggctgggtagcatagtacagatttctgtctctccgagcctcagctctcctgctagtttttctggttttaaagcataaagcacaggtgggtagttggagctggcactagtttgggaagaggttcttgggacttgtgtcctcactcttcaaaaggaatatacgatgctttgtgttgtctacgagggcctttgggtgctctgtgaaggctgaacttctcaaaatctgggcccaatatctgatgcagccatccctgtgctattctgcctgtgactacttcacccacttactcttttttttttttagttaagtatttatttcatttacatttccaatgctatctcaaaagtcccctacatgctcccccacccactcccccacccacccactccacgaccaatgggcctctctttccactgatggccgactaggccatcttctgatacatatacagctagagacacgagctccgggggtactggttagcccacttactctttaaaaaaagttttccctcctggttttgagatgtaacttatatatcataaaatttctccttttactctgttcagttcaatagctttaatatatttatagaattgtggcacagtcctcagtatgatctaagaacagtttctctacccacaatagaagttcaagcctgtcagcagtcacttccctgagcctctggcactacggtctagtttctttccctgtatttgcttcttgtggacatttgctataaaggaattgtgcagtgtagcttctgagtccttaatggacagagtgtctgtgctgtcaattcccca

SEQ ID NO: 33145 - DNA, 1146 bp, Mus musculus
ttttctcagcggacatggtgctccgtgacttatgtacattactcgtggcctctgacgcttggttcgtaagaatgagtctgacgtgtccttatgaaaatgtggaagagacttgagaagggtctctgagtggagtgggtgacatagggcctctcccagctccagtcttcttctggttggcccagggtgacctccttttgtgtggaaatcagtcatgtggaattttgcttcagtcacctgttacctgaataaaatctggtaaattactagtttaattacttaattcatacatttattgaggcagggtttcactctgtagttcagctgggcccaggactccctttatagtgcagacagttgtcctgcccaggcctcctcagtgttgggattagaggtgcataccacaattccttgactggggaaaggtgggtaacgtcagtgttgccagagaccatgtctctgggggaggtaggatgcaggtacagttcagtgacctcttgtgtctttgcagttccttcaggacaccttggatgccctcttcaacatcatgatggagaactcagagagtgagacgtttgataccttggtgtttgatgctctggtaaggggcctccctttcatcctctcagagggtgaggtgttctttcatgctgcagcctttgaagggggaagggacccatcccagtcaccttgaaagagagtcaatcaaaaaggaagcccggaggagtgcaaatatactttgaatgtgaaactatagttatgttaataccctctctagggtagacagatataaatctgggaatggcctctgcctggaccatttccagctcgtttcctgatatcacagtggataattccaaaatggttttccttgtcccactcacgagaatgttttggttatgttgataggtctttattattggactaatcgcggataggaaatttcagcattttaatcctgttttggagacttacattaagaaacacttcagtgcaacattagcctacacgtgagttctcttacgttatttcaaaccactgctttattctccgatgtttgcaatcattttccactgtgactttggcctatgaccatacgtttctccactcaaaactctgagtttactggcatactttgtattgttattg

SEQ ID NO: 33146 - DNA, 1100 bp, Mus musculus
tctaatgaattattagagctcaaaaataaagcctgatgtgtagagagcaagcactaagcagttgttggggttcatttgctctgttcaacttactctcttatgttgggatttaatgacatgtattcaaattttgtattgtgtaattgcattgaaaacttaaaaaaaaaaaaagtcatgctatttcttcaagaacaccatacttagaagttagtctgtaaaatgagtccagggccccatctgtggttcttaggagactttgtgaaagcctgttttctctgactgtgtagctgtgaactcaaggtccagggatgccagcttatgaagccagtgggtggcacaaccctgtgttgggctgcatatcccttcttgccctgtactgcatgcttatgagaggtggtgggtagagtcactagcaggggtaggagttgtagaagctacttaagcttgcagaacaagctgtgtagagccttttattagtcttctgttactgtttactctgagccctctgttggctcgggggagatgccctgtaggtttgaatattggacattttcttatagactctgggaaaggaacaaattggggtgccttcttgccttattgactaagcaatggctattcagggattgtagatgtggccagatgcctaagcacgtagcagagtctccatatgtagctgatttcaaatttttcctgtaagcagggctaatcatctgttttgagagtagctttcatactttaactcaggaaacgaaagcactactgagttctacctgtagtatcaaatgtctggtgtgtgccttgctcactggtggaaaaataagatagaagagttggaatccctggagtatagctcagtagagtgagtacttacgtagtgggcctgaagctcttagttttagttctagcatcttagggcctgggtgtgatgggttactctctgtgggaggagtcaggaggatcagaaattcaaacttacaggctacgttagtatgaggatagcctgaattataggagaccccacttaaaaagaagtggtgtgtggtgtgtgtctgtatttaggtttggagaaattaatcaacgggagagtttaaagcctc

SEQ ID NO: 33147 - DNA, 1120 bp, Mus musculus
gtttctgttaaaaaggtacttgtataggtgcaaagaaatgagcggaaaaacggggggtggaggttcgcgttgtcacgtgaaatcaagagagaactcttgattatacggcagatttttaaaaatgcctaaaaccacctgattcacagcttctccctaagtatgccatttaatacaattttctgataggctaaatggaggcaatggtaagtttggccattggtagcagctaagggaaacaggcagtttctctctgcgatggtcagatctcacacagtagtgacaaagcataaagaactatataaaacacctggctgcactcgcttggggataaagaacatccctggggattgagctacaaaaagaaaaaaaaaaaaaaaaaaagaaccagggctttctgccgcagcctaggcacccgtgatttataggtaactatattacccattgtgtatctctgtctgtttcccaattcttgccagattcatcacttggcctttgggtacccaaagaataaaaacaagttctaagaaagcttagtgtccaggagctctgaccctgtcagcttgcaatgattgaaggcatatcatgactcggggtgggggtgggagtggttcctggctgctggccatttgggaaatgaacagtaaacatgtcgtccatctggagatgaagaggggtctaaatctgtggtgtcaatttgacactgagatgtggtcacttggcttagcgctacagcacacaaaggcagatatacatagagtcacatttttcgagattattcatggtctccgaccacttgaaaaaaaattgtgctttctccggaattgaatgtgctgaaaactgcactcgcccctgcttatttcataatgaaaggtaaaaatgaagtcctttgccaacacaaggcttgctttctcttctcatttaaaaaaaaataataaagagccaaaaataatgagaagttctactgtctacaaagacagcctgccgtatggaacactggcatctcgatacaaattcttaggtaagggggcgctgtcgggggttagagtttttccttatctttgactacgtaagttttatttcagactttataccccataccagtgaactgcaaaggacagct

SEQ ID NO: 33148 - DNA, 1164 bp, Mus musculus
agacatggtttttgtttttaagtgcccaggtccacattggaacagtacgaatgtctttgtaaatatctgtttatatttggtgaccccctaagtccacacacagattttcagttgcatttttactcctaatacgtttttcttccatactgaaaattcttggggattagatgagcaggttgttcccagtattgcaggccagggttctcttcattcagcataaaccatgccatggtaccttatgggcatgatacactctaaggagcgtgtgtctttagagcttacttcttggtgcctttctgctagttccactgtgcctttaagctaaagtaacattcaaacatttctatgaacatattttatgtgcaattttactcccaggatttaaagaatagcatgggaatgtgtaaatgctgcctacaattcttcatttgtaaatagcttgtgtcggtaatttcaagtgcagtgggtatagttggaacacaattctgaaccccttggttgcagctgtgacagccccttctgcaaggaaacttcaatggggtcccccaagcccccgcagaacctgaagtagggaagagccatgaggtgttggcatctccttcttggtgatggaggccttttcttcttggcacccattggctcagtatttcagcatattaagcaaagaaagtcactgtactttatacagtatgatatatacatgtatataggagtgtgtatgtgtgtgtgtatgtgtgtttgggtgtgtgtgtttatgtgtatgtgtgtgtgtttatttatacagcttttgctcagtacaaagacaacaggaaatccaaattcattctgagtgtgttttcagtgtgaatcccaagcttttgttttagaatgtattgactacctgaaaaggattccgtaaagctaagcagcttataaataaaaggcaggaggcgagtcaggagactgcatggatgttatcctcagtggccactgggggctcccttcatctcttctcatttgcaaatggagaaacctgggcagtactgagctcagttctctccatgacaagcaggagaagccaaaacaaaacaacaataacaaaacaaaccaaacaaaaaaccatctctttattagatatcttgggctatggtgttaagctctgatgttctagtaaaagatcaaatt

SEQ ID NO: 33149 - DNA, 1113 bp, Mus musculus
tgtgtgttcctgcatgcatcttgagtgtgtgctcatgtccaagggcagtatgtacacatgaaggctgaaggacctgatcaagtagtactgctagggctctagtaccttggtggtttttaagataaggtctcttactggcctttagctcactaatttagctaagccagctggccagcacacctagaagaagcaagcacacactgccacatttggctttttcatgtcagttctaaggagcaggctcaggtccttgtgcttgtgtagcaagcatttaaccaaagcagccacctctagcctggtgctttgttaggattcagacatcattcctgatgggtcacaatacatccaaagacccctgttgcctctctctttgaaccatgcctttcctcgtagaagtctgtggttaccagatagcctggtgcatggtgcctgactttacatatctctgcctggggaaagagcagtagctgccctgctaagacattgctttagatacctatttctttcagatttgctctagagcctctgctgccgaagaagatgcactccaggtcccaggacaagctagacaaggacgatccagataaagagaagaaggacaagaagaaggagaaaaggaacagcaaacaccaagagatatttgataaggaattcaagcccgctgacagctccctgcagcagtctgaggctgtgatcctttctgaaacggtaatttaactgtagatcggaagagctctgcaggggtgcctgggacccacctaggctctgcatcttaccgagagggctgtcagttggattttattgaatttttgcaaaatatagcaacttaaaagcccgaggtcttttcatctctgacctcaaataacccaaccgtcagagacacagagcagtgctgtcttttctctgagggcacatgctgtcttggcctttatcctcttttagaggggctggataggtcagtcccctacagggacctcatgtgtctaggctccttatagctccgttggacttggtgcccttgtgtcctagcacctcagagaacagaagcatagtgctttcacaagctgtactcactcatggatagcaaatgtcttccctaccccttcctgacta

SEQ ID NO: 33150 - DNA, 1152 bp, Mus musculus
catactcctgtttcctagcaacagccacctccactgcccagcaaaacaccacctcctccccctccgaagacgacccgaaagcagacctcagtggactctggaatcgtgcagtgaatcctgggaggagaaggctaacctcctgcttctctcctacatctgccgtgcctgccgatgacctcctccgggccctgggatgcttcgccttagtgtgattggcttttcttggaaagaggtccatcctagccacgggaccagaggcctgaagtgtctcagcacagtgggaatggagccaagtcatacatagtctggattggtttttttttttttttttaagttggggactcagagcatgtcagcctttctgatagcctcagtcttgccctgaaactctttccttttgtgccaaatgacttatattcatttgcagagagcttgtccagtgtgagtcagccaagcgggagggatgaggcaaacccctagccctactcccgtgagaagctatgcagtagccttgtaaggatcctcactcggcctctccaacccagactctagctcacccccaagggctgactgctcaacccctatccttgatatatctgcagtgtgactcctggggtggagtgtcacttcagctgacatcaagcagctaagtgtaccccttcagagaagatctcaatttcccgtggcataatttaaagtaggaatatctcttgattactaaagagatattaatatacggcgtagagacaccattatggatactggatcaaatggaaaattaatatgagcataggaaggtgaattttcattctttttaaaatatgagccccctataccaccagaggtggttttaattgggtggcttctctgtgtgtacagaatatttgtatatacggtggttctcagagctccggtgagtgtctgtcacccttgcttactccagcgggtctctgaaaacgagctccagtgtgtcttcatgtttaactgctggaaatatttgttttctaaataccgcaaaattgttttccagatttccaaggtcctgaaaatgttggtggacaatgattcgtttgtttaaaaaaaaaactaactttgtataacctaatattttatttgatcatctatatttttttattcactctgatcatgata

SEQ ID NO: 33151 - DNA, 1085 bp, Mus musculus
gatggaatgaaacagggaggtcaccatggcacccttcaaagattgccgggccttgtaccttaatgatctttaaaggatcagcagttcatttactgcctttgtgatgggcattcttcagtagtatgaactggaatgtttttgatatgcattatgattgacatcctggaattataatttgttagtatgtattctttttccataggaacaaagtagccaaggcattgccttgaatatcatagataactcttagcaaattaatcaatataaaatttgttattttctctttttatatttttgcttcttttttttttttcctgatggatcttttagatttcactaattttgtggttgtcttctcattcccttacaaaacaccccagaactctaggtaccgaaagaaaaccaatgtaaaacagccaaggcccaagtttgatgcatctgcagagaatgtcgggataaagaaaaacgagaagactatgaagactgcctcccaggagacagagctgcagaatccagatgatggagccaagaaatctacatctcggggccaagtcagtgggaaaagaacatgcttgaggtctagaggaacgactgagatgccccagccttgtgaagcagaagagaaaacaagcaaaccagctgcagaaatcttgataaagcctcaggaagagaaaggagtctctggagagtctgatgttaggtgtttgaggtccagaaaaactagagtcgctttggacagtgaacctaagccaagggtaactcgtggaaccaagaaagatgcaaaaactctgaaggaggtaaggacccttgctgtcttatattgtgtgagacccagaacattctaatctttatgcccaggttacaaaggcaaataaggacatgccagcagctcctgctatgctagtgggaaagccatcattcgggccacttactttcttgtgtctgttttggtaattccactttgaatagtgaatttacctattgagggtttcattccagaagagctagctatttatatctaataccattttctgatgtttgtgatgtggcttatcttggttatagatgacattttcagcctctct

SEQ ID NO: 33152 - DNA, 2249 bp, Mus musculus
ctagaagacctggatggcttccaagaactcttccaaacaccagctggtgctaatgactcagtgactgttgaggaaagtgcaaagatgtctttggaatcttcacaagcagaaccagtcaaaaccccggcaagcacaaagagactctccaagacagatctcagtaaggtggatgtgagagaagacccttcaatacttgggaaaaaaacaaagtcaccaggcagagccccaggtacaccagcaccagtgcaggaagaaaatgactgcacagcctacatggaaactccaaagcagaaactggagtctatagaaaatttaacagggcttaggaaacagtccagaacacctaaagacatcactggtttccaggatagtttccaaataccagatcatgctaatggcccattagtggttgtcaaaaccaaaaaaatgttctttaattctccacaaccagaaagtgccataacccgaaagagcagagagagacagtctagggcaagtataagtaaaatagatgttaaagaagaacttttagaatcagaggaacacctacaattaggagaaggtgtagacacatttcaggtatccaccaacaaagtcattagatcatctaggaaacctgcaaagcgtaaactggattcaacagctggtatgcctaacagcaagaggatgcgctgttcttcaaaggataacacaccatgcctagaagacctgaatggcttccaagagctcttccaaatgccaggctatgctaatgactctttgaccactggaatctcaacaatgcttgctagatcaccacaattaggaccagttagaacccaaatcaacaaaaagagtctgcccaagatcatcttgagaaaaatggatgtgacagaagaaatttcaggtctctggaagcagtcactgggcagagtccacaccacacaagagcaggaggataatgcaatcaaagcaattatggagattccaaaggaaacactgcagactgcagcagatggaactaggcttaccagacagccacaaacacctaaggaaaaagttcaaccgctggaagatcacagtgtcttccaagaactcttccaaacatcacgctactgttctgatccattaattggtaacaaacaaacaagaatgtccttgagatctccacaaccaggatttgttagaactccacgaacctcaaagagactggctaagacaagtgttgggaatattgctgtgagagaaaagatctctccagtgagtctgccacagtgtgctacaggggaggttgtacacatacccatagggccagaagatgacacagagaacaaaggtgtgaaggaatccacacctcagacactggactcatcagcaagtcgaactgtcagcaagaggcagcaaggggcacatgaggaaaggcctcagttctcaggagacttatttcatccccaagagctctttcaaacaccagccagtggcaaagacccagtaactgttgatgaaactacaaaaatagctctgcagtctccacaaccaggacatatcataaacccagcaagcatgaagagacagtccaacatgagtctcaggaaagacatgagagaattttccatacttgaaaaacaaacacagtcacgaggcagagacgcaggcacaccagcaccaatgcaggaagaaaatggcaccacagccattatggaaacaccaaagcagaaactggatttcataggaaattcaacaggacataagaggaggcctcggacacccaaaaacagggctcagcccctagaagacctggatggcttccaagaactctttcaaacaccagctggtgccagtgaccctgtgagtgttgaagaaagtgcaaagatatctttggcatcttcacaagcagaaccagtcagaaccccagcaagtacaaagagacgctccaagacaggtctcagtaaagtggatgtgagacaagaaccttcaacacttgggaaaagaatgaagtcactaggcagagccccaggcacaccagcaccagtgcaggaagaaaatgacagcacagccttcatggaaactccaaagcagaaactggatttcacaggaaattcatcaggacataagaggaggccacagacacctaagatcagggctcagcccctagaagacctggatggcttccaagaactcttccaaacaccagctggtgccaatgactcagtgactgttgaggaaagtgtaaagatgtctttggaatcttcacaagcagaaccagtcaa

SEQ ID NO: 33153 - DNA, 1100 bp, Mus musculus
agactttgtagtatatggctttaattcaaggacttggaaggaggtaggagggtcacaactgcttccatgcagaattggatttggatattaaacaagtacagtagaatctattacttcattagtgaatcaagataataagtgactgtttcagaaaaaatattgcctgtattcaggtccatgtcacacatgttggcaggctttagaggacccttcttaaggatacttcacaatggctcttctctgttaccaaataatatttaatagatcataaatagaacagggtcgagatcatctaggaactgcttggtagaaaagaagctaaattattggttcttatatacttcctaaagataaaataataagctgatactaggtggtgaaaaatgatacatttttttatgtatatatttttctttcttataggagaaaaagtgctatccagtactcggaatgcagcaaagcagcagtctgatagatattctgcaagtcctaccttaagacggcggagcatcaaacatgaaaacacagtgcaaactcctaagaatgtccataacattactgaccttgagaagaagactccggtctctgagacagagcccctgaagactgcatcgagtgtgagcaagttaagaagatctagagagctcagacatacccttgtggaaactatgaatgaaaaaacagaagcagtccttgctgagaacaccacagcaagacatttaagggggacatttcgagaacaaaaagtagatcaacaggtgcaggacaatgaaaacgctcctcaaagatgcaaggaaagtggtgaattaagtgaaggttcagaaaagacatcagctaggagatcaagtgccaggaagcagaagccgacaaaagacttactaggaagtcagatggtcacccaaacagcagactatgctgaggaactacttagtcaaggacaaggaaccatacaaaacctagaggaatccatgcacatgcaaaacacatcaataagtgaggatcaaggaattacagaaaagaaagtgaacataatagtatatgcaaccaaagagaagcactcgccaaagacccctggcaaaaaggcacaacctctagaaggg

SEQ ID NO: 33154 - DNA, 1206 bp, Mus musculus
tggctcaaagaacagtgttagccaagactcatcagggcatgtagaacagcacactggcagaaacatagtagagcccacttctggggatctctttaagaagtccaggtctacagggagcagttacagggaaccgaagtcttctcctacacagagccttagcaatagcaacgaaaaggaatctccctttgagaaactttatcaatcaatgaaggaagagttggatgtaaaatcccagaaatcttgtaggaaatcagaaccccaacctgaccgtgcagcagaggaatcgcgggagacacagctattggtgtcaggcagggcaagagcaaagtctagtggaagcacccctgttactgcagcctcttcacccaaagtaggaaagatctggactgagagatggcgcggtggaatggtgcctgtccagacttccacagagacagctaaaatgaagacccctgtgcggcattcacagcaacttaaggatgaagactctcgtgttactggcagacgacattctgtgaatctggatgaaggtgaaagtgcccaggcagtccataaaacagtcactcctgggaaactggcgactagaaaccaagctgcggtggaggctggggatgttgccagccccgctgatacaccagaacattcctcttccaaaaagagaagtattcctgcaaaggtagaggctccatctgcagagacacaaaagcggctctctttaactcagcgccttgttccaggtgaaaagaaaactcccaagggttccttcagcaagcctgagaaactggccacagccgccgaacagacttgctctggcctacctggtcttagttccgttgatatcagcaactttggtgattccattagtaagttattttatgtagatctactttccctaataggttactatctatcttatgtattatgagttaataaagtgtttgtttagtgtaaccagctgtgtgctaaagaacccactaagtactctgatacaggaagaagcaagctttatcggatgtatgggtactaaagactttgtcatttataaagaggcgtaatagagtaggtgcaacgagtgcaggagggaaccatatcacagaaactacttcaggaaaagaaaatgtgacttttcttttgcaatataagggctttaatcataatagcttttcatttagtgccccattttgaataccagttatatattgtggg

SEQ ID NO: 33155 - DNA, 1111 bp, Mus musculus
ggagtgattgtttgtaaccaagagacagggtcaatattaggctgtcttgaaatctcctctgccaagtttatctttaggcagatacttaggaaaagggtggaaaacagccacattctttgccaaaatatcatgggaatgctctgtagcccagatctataatgtggcaagggggtacctggtgggtccataggtatccccaaggtatccccctgagcaatcacaccatacaacagatctggtgtaagggagtttctctgggcgaggggatgaggatatggagaaggggtagaggcagagagtagacctgggtcttagtttcccttcatagggacaatggcctggttggctagggctttctaggagcatagtagaaaagaaccatgctgtgtatatagaagtcaagtctcactgtgacctctgggtgcttgctgtgtggctagtgcaagctagaggtcagatttcccattgtattaccttgtcattaccttgaatttgaggagccatgtgtaggtaatagtagctgtgttgggaagggtaaccccctggatttggggtgtatcagatggtatttcattatcctcagttgattcaaattctgacctccgggtttatgtgccatttgttctcatcagatcggttctgagcacctagaagccctttctgtgctatcacaggatccccgctttccctctgctacctaactaggaaccgtactccagggcagcccatagggagatgaattttccccaacaggacaccagcaacatggtacaggccgaaggagaacaggaaaaaaaaagagtattgatgatattttgtgttacaaatatgtaaaaataaaatgaagatgttctagattctgggcatgcgctgctatttggtttttggcgccccttgactgaatttttgttttgtttttgtgaaaataattttaatgttatgatcatggttttctttgtcagtttgtaagtgaaattggtttctatgaggtaggaggaaggtgatttcaagtccagaacccaggattctcttgagtgtaggcaggattaatacagcactggatgctgccattgacaaagtcttttctttgagtcttaaaatatctgctttg

SEQ ID NO: 33156 - DNA, 1171 bp, Mus musculus
aggctctgtgaccacggctgggcaaagggtgggtttgtcccatgggaaagggtcctgtccaaacctttgaggagggtttctcatgcacatggaagtgcagccgaggccatagtgggaatctctggtgcaatggtacagcttcaggctcataaaggtacaggtgtgcaccacttatacctggtgtgagcacctctgggaatcacagagcctcagacatcctaggcacgggctctgtcaatggagttatgttccccagccttagcagtatttccgggccctcagctgctgacctgcagagtctgttcttgactctaggagccagggtccctaccgactcaggagtcagtggtgggtgcttatgtgaacataggaaagcaactgtgaagagagcagacttgaggaatgtccagcctgttgtgatgtgacgggaccaccagctcacatggtgtctgtttatgctgtgtctgattctctgtgacattcattcccgggaatttttgaacctttaggcactcagccatgaggaacttgccaaatcgtgtcaccgtctgtacctgcggcagctgaaccatttgcttggatgcatggcctgcccagaatggccagcataatgttggtgtacaacctgtgttctaggacttctggacatcagggcatggtgagggctggtcaggccacttccctcatctaccctctctttggacatctaccaccgagtagatacaaaaatctagagaagagaagtggaaggcactatggtccttccctgtaagtattttatgtttttctttatatacatatgtaaccttttagccttgtttctggctttttcgttaatgtatgtaaaaatattaaaaggccctgtatattacattcaaaactatgtcagctacccggcttttttctatttattaaaacttttcaagcagtaaaaacattttacttgttaatgaggggaatgggagagttaatgacacagagccccgatcctccacgatgcctcttcctaaccatgcgcggcaactctcccaccccatgtcgtttaatttcttcgacggggttcagtagacacatgcaaacagatttcagatcatccctcagtttaatagcatctgatatttgggtcaaagactctctctttggagagtggcatagtatctagagcgaaatg

SEQ ID NO: 33157 - DNA, 1180 bp, Mus musculus
gtttactgtcctactactctttgctgacagtttattcatcttttaatcttaaagccagactttagtccttaacaaactcaccattatcgaaccatttctgggaaacattaggaagcttttgccaggatattggatagatcttggctcatatatgaattgattgtattttgttgctgagtttaatctttgactggttgatcgattgattaattgattgattgattgatgattaaggcagggtctttctgcatagccctggctaacctggagctaactgtttagtctaaaaagctagccttaaactcatggcagttctcctgcctccattctcaagtgtggaaatacagtcatgtatggccaaagatagcaagcttctacaaatgtaggtacaaaactttgaggtaaggagggcatgaacacgttctctgcagacggtatttcgatcatggttctgccttccctcatatactggaagcaggttgtcctataggcccaactgtggtctctgtctctgcagtgagttctactagcaacttaggaggttcacacaggctctcctcattcaccgtctcatctaaggctttgatcaggatcactctgtccctgtgattctcatcttggtgtctcaactcctttgagggtcaaatgacccattcatggggatctcctaagaccataggaaaaacagatacttatattttgatccctaacaataacaaaactacacttatgaagtaggaacaaaaataatgttatggttgggggtcaccacaacatgaggaactgtattgaagggtctcagcattcacaagtttgagaagcagtgttctaggacttgcttatagatgcatacactacagccattttctccaagccatctggctttaggaactgtgacccatcactgtccccgacatgcttccaaatcatcttttcctcttgtctctgagttcttccatcaatgaccttcccaatagaccttcccattttttagatgaaaaaagaaataaataaaaagaaactagcttagggttagctcagttggtaaagagctcaattcacaaatgtgagggcccatgttttatcccccaggacggacacaaaagtgttgggtgtgttgttctatgcttgtagttcccatgtcactggggaagcagtgacagggtgaaccccatggtct

SEQ ID NO: 33158 - DNA, 1183 bp, Mus musculus
gtgctgactttggagagaagaggtcagccagtacacccagggagccccagccatctcctggcagagtaggtaccaaccaccacagagacagttcttgggcctacaaaacatagttctgggatcttttgtagggcagccctatagagctgtgccctttggttaattccagcatggccctagaattacaagtccttggcctctcggcttgctgcaatttgcagatggtggttgctgggcctgctcactgggggccccatttgctagtggtgagttttaatttctaacacataaaaatgggggatactcttttttttttcaaccatcatagagcatctttattttctttctcttctaatctaggacttctttttacagatttattgagatgtgttcacatagtctaaaattcttctgtttaagggtaagtattagtatagtttgtgtctattgctacagtgtaatactagaatattttaacagtctccaaaacaatggtcccagggtcgattgagcccttatgtcctctttcctctccagtcaccaggcaggcattggtccttttctgccattgtgacgttctattttggatattctgtgtacttggagtcatgcagtatagggatatttgtgacctttttcctcccctgccaagtatgatgcttttaaggtccagccatgtcatagtgggtaagtagtttgtttctttttatggcaacactcttcatgtgaccagatcatcttgcttatgtcattggatagccatgcaggtgtctcagccttctggctgttgtaagtgaagctgccaggaacattcctgtgtgtatatgttttccttcttcttggttatgtatgttgttggaggactaccggatcataagataattccacactgagaattttgagaaagatgcagcattctaaactagctgagccattttgcattcctgtctgtagaggggccatgctccaggtagaggggccgagctccctttcttcatatgctcaccagtttctacacattgtatcttttttattttaaccattcccaagcagtgcaaagtgtctgttcattgtgttaaacgggagtccccctgggaacagcaaacaggatgccggtgagatccatagctacagaaggctgcagggggaacactctcataaagtaccattgctaaagcacact

SEQ ID NO: 33159 - DNA, 1109 bp, Mus musculus
ggtgcttaccccacctgatttaacttgcatccacatccagatgccccgtggctccgggagctgaggactgtgcttcacggattcttggttcaggacttaacagactgtgtgaaggactgcacttattgtaaggtggtacatgtggttttcaacaggcataaaaacctgcttctcaggatagaatcgttagcccagtaaagccacatccattggagatgctctaagagctctttttttgtttgtttgttttttcgagacagagtttctctgtttagccctggctgtcctggaactcactttgtaaaccaggctggccttgaactcagaaatccacctgcctctgcccctctgcccctctgcccctctgcccctctgcccctctgcccctctgcctcctgagtgctgggattaaaggcttgcaccaccacgcctggctgctctgagaactcttgaccaccttacccctctagcacaccgcaggatgtgctttctctcctgttaggcagggcagtactgtggcaggaatgaggttgggctccctcggcccctcctctcagaaggccccaagtgctgtccactctgtcctctgagtggtggtggcagtgattgcccctcctcatatcctcagctgtggaggatgtcagggtagctttcatgggctccaccgcagcttagtcaaactttgcctgttacagagccagaggtccaccctcatatcccttggctgatatcctagatggtatcctagatggtatcctagatgatatcctagatgatatcctagatgggccatgttggatatgaggccatgcttaaagactctggcgactgtttctattgggtaaaggtgccctaacatgtggcctcctttattgaaacaacataaccaaaaactcgcagaataaagcagaatctgctccagcccctcccccagagcaccaaatgcagcacattttgcagccaagaattcagtgtctcacccccagttgtatgctctgagtgaccctttgtgttcttggtgtgggtctttgtttttaatatcttcatccagctctgggcccgtgacacctggcactgtgtatcaggagaaccctgtgcacccaaggtct

SEQ ID NO: 33160 - DNA, 1172 bp, Mus musculus
gagcccgggcctcaggcactccgtgttgactgcactttcctgctcgaccactgagcctttcatacagtggtccatcccggacaggaatgaaaggtacctttgtggcctcttgagtctcccccacccctgtagcaggccatggatctggtgtgtctttctgtctcctttcctagtcttggctccctggccagggccttatgggagcttggggtagaagttatcgttgttggtattcttgtgttattgctgaacttgaaagtcagagtctggcctaaggggatggctcatttgagaaagtgcttaccacatctctcaattgctgttctgctgctatgaggagacaccatgaacaaggcaactgtgatagtttgaataggaatgccacccccccccacccccgggttcatgtatttgaatgctctagggagtgacattaggaattgtggccttattggagtaggtatggccttgttgggataggtgtggccttgttgggaagtgtgtctctggaggtggctttggggtttgaaaagcacatgttaatcccagtgctttctttcttcttgttgtctgtgggtctagatgtagaactctcagctatttatccagtgctatgtcttcctgcctgtcgccatgatgacagtggagtaaacctctgaaaatgtaagcaagttccaattaaatgctttcctttatgagttgccatggtcacggcacctcttcacagcaataaacgttgactaaggctgcagcttataagataaagcatttaatcgagggctttcttactgtttcagggggtgagtctgtgaccatcgtgacaggtagaatgacagcatgcagggaaatgtgtcactggtgcagtattagaaagcgcttacatctgaaccacaaacaacaggcagactgggagagactaggtatgggcttttgaacccttcaagcccactccgagttgactcacctcctccatcaaggccacacctcctaatccttcccaaacagtccaccaactgggaaccaaacctttaactgtatgagtctataaaggccctttctattcaaccctctataccaaacaaacaaggacctgagtccacgctcccatagcccacattaaaaagctgtacagtggcatgaacttgtaaccctagtgctgggaggagatagag

SEQ ID NO: 33161 - DNA, 1154 bp, Mus musculus
gccatgacgccggcctcaggggtcggtgggcacagatggccatggaggccagcctcgggaggctatggggagacgaccgtggacgccggcctcgagggtctgtaagaaggtaaggccggggcagaggtatcgagccatgtaaggaagatgcggccacaggtctttggagtctggggtgtataacgatcttaaatgcatgtctcactagcgtctgtacggagtgaagaaaaaggactgtagacactaggcagcgaccccgggattccgctaggagttggtaccacggggtgaggtgaggtccatttttgtgaaaggagagagataggggggcatggcagttgatcttgaggccctgtggggtaaatcaggtcccagacactaatgtgggagcccatgcaatataaagggtctttcatctatctccctggcacccgtataaggtggaaggagaaccatgcagggttatcagtctccgggggcccatgctggactggactcaggacgggatggagcaccgagtgctctggataccctgtttgtggtcgtaggtgtgctagtctgtccagtccaatctctggccaggtagacgtcggtcagccctggatctccacctcttgttgttgagcaagaggaacttatttgtcatggggtctcctgaagcgctacagtagtggcggttttctttttttaactgagtagtgttttctcttcccacactgctctttaaagtcacttctccagactttgttttttgatgttgtcccatccagccaagtcctgggatttcaaacacacactgtgtgtgtgtgtgtgtgtgtgtgtgtgtgtgtgtgtgtgtgtgtgtgtgtggtgagcataggcctgcctgttcgtgctcctgcacgtgtggaggttagaggacaacttagcagagttggttctttttaccacgtgagtcccagggatggccatcaggcttgacagcgaatggctttacctgctaagcagtctcatccacccacttacagtttatttttgttttttgaaacagaatttcatgtacctcagattggcctcaaactccctatatagctgaggctggcattgaactgtttgtttctgagacaggatttttctgtagaacagccctggttttgtgcaccaggctgacctcc

SEQ ID NO: 33162 - DNA, 1760 bp, Mus musculus
ttctctgtgtagtcctggctgtcctggaactcactctgtagaccaggctgtcctggaactcagaaatccccctacctctgcctcccacctcccaagtgctaggattaaaggcgtgcgccaccaccgcaccggctctttttgtggtttttttaaaccttttttaagtaaaactttcagtgcatttaaaattttaatttgcaagtcttttgtatgtatgtgtgtgtataatattattaaaattttaatttgcaagtcttttgtatgtatgtgtgtgtgtataatatcatgcgattacctgtatttttctttttaattgtatgcgttcaccgctttctgttacttcttaatccatctttttgtcagctagacagagctttgatattgttggatttatcagtgatggttgaaaagggcaaaggcagtcattggcagctaggacttgtaccaacaagagtcacgacccaatcttatccaaactcaagcttgaagaaggaatgttggggagagataattaggaggtggcatttcaaggggtttatttcgtgtgctgatgtttggatttgaggtcttaaggtatggcaaaatgtatgtgttgaaacttgtagcttgtgaggctttatgttcagctctgcaaaattccatgaagccctgcccctgttttgtctttctgcagtcctgggcataagcagtcagatgtgccctagacattaagtctgaggtcttttgacctagcaagcagtactcagagagtctaggggacagagggcagggtggagataggctggccaggcggagcaggatggctctgtttgagtttcgtgtttttaatctaataacccccacccccacccccatacagtagtgaactgtagacagtttgctgcattatttttatgtatataagaattagattttgctctgagtcaggtcagctctttggctgaaagtcatggtttcattgtgtggtaaatgagtcctgcatacctgaaaatgggagcaaactgagctcacagggagattagtaattgtgatgctgatgcccagatgtgcaggtggctgagggagtgattggctctccttcccctgctggagagtagacaaagactcaagaaacaaaatggccaggccaggggacttgcaagtactgagcttaggaatgctcactcactgctctatttgggaaaattttgtggtgtgcagtaacctgcagccagcctctgctctctgtccctgaacatgctttctgctagtgaacactgcatgacattacaaccttttcatgtttgtgcttggtagactgagtccttaaggctggctgttaactccctttcctaggccttgcacaggaccaagccaaaaagcagtgatacttaacattattgggtacttggtgttccagaaattgtgcagaggcactacctgtgccagttagttcagtctttacccatctgaaggctgttcatcccagtttcagatgcataaacaaggcaccaaagagtggtcagttcagctccatagctatactagagcagagatggggtatgaaactatgctccctgtctcgaaggcctgcgtgctttactgtgtgctgtgttttagccagccctggggaagcgccttgtaggagccagctgtctgttagccgaaattgtacctccagcaattgaacttaaccctttgaaaacacaggagaatagcttgccttaaaaaggattgtttatcagataaaataaggtcagtaataagagttcaagtgttat

SEQ ID NO: 33163 - DNA, 1113 bp, Mus musculus
ggaaatctcagggtcgttatggtaatctagctgtgtctaaagtacaggaaagagagagtgaagaggactttaatttttaatttcatagtacttggaattgaacacaggaccttgatgttttgggacaaggaacccagaatggcttgcattttgggatctcgcccccaccttcctggtgctaggattacagacctgaactactatcccagcacctgcagagaggctttcctgaagaaaagtgagtgattttatgtgactcctcactgcagatattgttagctagcataacactggtggcattgctctacatacatgtggtcctaaaatgtcagcacttactaggtagctaattgaatgccatgttgagggggccttgcagggaatcagttatgagtcttcctagactgacccagtacagacgtcctgtaatgagttgtgagtatggctgacatggcatggttgatgtatgaaaggagcaaagaaaagtagaaaacatgggaagacttggagcaggaacatttgaacatggcctgggcaataggtcagagaaagtaaatgagagaataaaatgaaattataagtctgtacaaaaacagtaagagttaaaattgtatgatcaaacatgtttaaaaagcaaagattactctggctggggtgatcccacatgggctgggatctgctctggtagaatgttacatatatgaaaaatacatgcttaatgttcaagagtatagtaagaatgttgatgttattgtagacaatggacttcatgattctaatttggcatccaattagctagcttgtaactaactcgcatcttaagaccacaggtattacagggcagtaccactgctcctttgctgactaacaaattagacttgccatgactgctgtatttcaaagtcactgatagaacttctaagcagatagtaagatgattcagtaggtagaagcgtttgctaccattttttggataaccttagttcaatctccaggccctacatggtggaaagagagaagggacgaaacaagtcttctgattttcaatgaacaccatgtgtacacacatgtgcacgcgcccgcgcgcacgcacacacacacattttaaaaagg

SEQ ID NO: 33164 - DNA, 1194 bp, Mus musculus
ttctgcaatgacgtgctatcattatatgtagcctatgtcttccagatggtcttccttagtaaacaaatttaggcttcaagaagagctgtccttctcagcactagtttgagtaaatgcttcgtgttggcactagcttgcttccagtctgccccatgcagagccagcagccatcacaagttcctacacagagaagaatttcagaagccctagagaagcttcaggaaaaggaaatgtatctcccagcctaaagcatgagagggcgtgggcatggagatgagcgggggtccagtagtcgtgggtgagacctccccctgccctgggtcccgggtgaaggtggagggagggagctgttagctgctgcagacaaagctagtttttctgtggaagaagcagtgacactctttcattcaagtcactgtggaaaatgaccactcgctacaaaaggcaaacgtctttgctgtctggtcttgtccagtagtcccattgtgtacctgtccactggattgttggcttaaggtccagggcagtctagcagtcctgcagactctttgccttctgacgagcaggcccttcccaaggtgagcagagcactatgcctctgctccatacacccctgcagtgtggacagataggcaggtggcacgtcatgttcccatgtatactaaggtattggtgccctgcgtggatttgaaggcccgcaccttgtgggcactgatggtaggggaagacaatcagaaagctagggaaatgaggatggcaccgagcccttcagggtctctgagcccctgctgactctaggatggtagtcttctgatttagcagggtaactgaaagtgctcactttggttttgggttgtttttttgttttgttttgttttcttcagtttttgaagagccagaagatcccagcagtagatccttcttctcagaaataatctcatctatatctgatgtcaagttcagccacagtggtcgatacatgatgaccagagactatctgtcggtgaaggtctgggacctcaacatggagggcaggcctgtggagacccaccaggtacatgagtacctgcgaagcaagctctgctccttgtatgagaacgactgcatctttgacaagttcgagtgctgctggaacggttcagacaggtgaggctgccagcgtcctagcacgccggcacccgaaagtgctggttc

SEQ ID NO: 33165 - DNA, 1254 bp, Mus musculus
ccttggctcatgccattgccatgattccgctgggtattcagtgtccctcttttgtctcctaaacagtgccattatgacggggtcctacaacaacttctttagaatgtttgatagaaacactcggagggatgttacactggaagcctcaagagagaacagcaaaccccgagccagcctgaagccccggaaagtatgtacagggggtaagagaaagaaagacgagattagcgtggacagtttggacttcaataagaagatcctccacacagcctggcaccccatggagagcattattgctgtagctgccaccaataacttgtatatattccaggacaaaattaattaagaaaactgactggaggaccaagtgttgtcttgcatatgtacgccggtcaattagttttcctgtcaaaaaaggcattgtcctctccattgagaatagtggcgcacttctacttccctaatagatacaggagaagaagggctctcagctggagtcggaagagatgagtgccgctgctgaagggaaaacctgctcgaagctgaattggtggactctgctcaataaaggccattactcaaatgtatttatttaagtctgagccttcctttccagtttatagaccaaaaaactaacatctgagaggaaaaaaaaaagctcatcaaatctctctccagctcttccctctgtctctgccatccatccctgggccttatcctggacatggtgtggccaccacccacgttcctctctggccctggagccccagtgggctgcatcaccctccgctggtgcatggtgcgtgggtgcccgagcaggctcaggcagctctactcacccactgcactgccgtcacatcttctgtggagctacttaataaacacaacacactgtgaagtgtttttaaacccaaatgccactgcagtctttatttgtttcagttgcacataattattcaggatatttatactttggaataaattgaaaacttttttctttttttcctttagcaaaatggtcaagtttgtacagaacttcaaattctaaatgtaactgtcccaaattgccacttggtttctgtagaaactccatctgggaaagccaaaattgagtcaacctctggaaaggaaacatgcatgaaagagcaacagaagtgctgctctccggttaacacctagcttaaagtagggcccagggtcgtcacaactaatgtgtatatactttctttttaaatattgataaaattatatgca

SEQ ID NO: 33166 - DNA, 1346 bp, Mus musculus
aagagctagcatggtccttgggtgtttgcactatgtgtgttaatttgttctgtaaatgcggtgttcctgatttagtgagacagaatagactcttgtcatgacctataattatacctatgggatcaattaataagcatgtcagactgatgcctattgtagcatttactagtaaatttctttgaatattagatataaatagtaaatttctttgaatattagatataaatagtataaataattttaatatagtagcaatggtgtatttaaaactgatctgtaatcataatccagttaagacactttacacttcaaaagaacaagtaagtgatattaaaatcattaaagggttttccccaaaggaatattgtggccttataatcctattacatagcagaaaattaaagggtgcgtgcgggttatctgtaaaggcctctaactttgtgaactgagtagcaagtagaagctaaggttacccacgaaccccactttgcagttccccctcgtcctgctttgcaggatgaggattctcgccttgctgtccaccattaccttgggtggtcagttttgttgcaggcacctttatcactctgctgaattctcttgtttgtatttaaatcttatgtgctctgaaaatcagctgtctactttaaaagactggaaatgaaaaacaaaatctttgccaaatccactggagaatactatatttgcatatccattaatcaggatccaaagctgcttaaatcgggcgtcctcccagtcttctcttttctatagcatggttttaaagcctgcctccttgacatgctgtatatatcctgttgtatttgtttcactgtcccacacttaactcaggtgtgctaaaataaaagtgacattttaacagtcttttgtttatatttacataattactagacatagcctatatccctttcatttggagcaagatcctacaggatgtaatagtcaataggtgttttcttgcttcattcagtaaagtatttttgtaagaaattagatcgctgtactggctagttttatgttaacttgacacaggctcaagttatcacagagaaaggagcttcagttgagaaaatgcctccatgagattcagctgtaaggcattttcttaattagtgatcaagggggaaaggccccttgtgggtgggaccatctctgggctggtagtcttggttctataagagagcaagctgagcaagccaggggaagcaagccagtaaggaacatccctccatggcctctgcatcagctcctgcttcctgacctgcttgagttccagtcctgacttcctttagtgatgaacagcaatgtggaagtgtaagctgaat

SEQ ID NO: 33167 - DNA, 1156 bp, Mus musculus
gaagaatgtgccatttccagaattctaatagataggcctgctaaacattgtgttctttcttggtgcagtttcatcttagaaggaatatctcaaatgcctcataccaccagacttacacttcactgaggtagaaagcccttgaattatttctattctctgtgcacatatgtgttacaagtccaaagtagttagttcctacccacttctcacttcatccaaccagcataatgtcatcaatagagggaatcagtgtactattttgtagaagagatagatgattaagatcccttcaaatgaggtctggtattgggccttagtggaaactgaacatttgacaatgggccaccaagttaccatgtgacccgagctgcctatcatgagtggaatgttatatggcccaccaagtgattgtgtacagcaacaatccactatcaagtgaaagggctatctatatatctgatcaggtccaagtaggtcccgaaggcacaagcaagttacatggccaaatgcccatggtttctattccttgaacccatggatccctaacaatggtatatattttgtttgtttgtttgttttgtttttcgagacaggatttctctgtgtagctctggctgtcctggaacttactctgtagaccaggctggccttgaactcagaaatccacctgcctctgcctcccaagtgctgggattaaaggcgtgctccaccactgcccggcaatggtatactttttaaatcagcatccaatatatggtatagtttctctcataaccagaatccatgggttcaagaatcgaggggtagaaaaaggagtagttacaacaatcacccctagtgacccactaggaatttatttgcattctgttcctatgacctttttctacttgcctaggtgtgtgtgtgtgtgtgtgtgtgtgtgtgtgtgtgtgtgtgtgtgagtgttgggggtgggggaacttatgccaggtgtcaaaacaaccattccattggactggaagctgagtttcgggtgcccttaaatgaacaggctaagaaaggaatgacagttttaggagggtgattgatccagattaccaaggggaaattggattgcttctccacaatggaggtgagaaagattatgtctgtctgggttcaggagatcctttagggt

SEQ ID NO: 33168 - DNA, 1191 bp, Mus musculus
gctggagcaacggaggaggtgcgcctgggctgggatagcatcaggattgggagacctccccatgatcaaccatgttggtgtggttttgtctccagcctcatcaggggactgatggcttcagttcctacccaggctgggtcagcatccctcgtgtggaagcctttgcttgcacatctctcgtggcctacagttctttgagaggcccaggctcttgcccagtcattcagagactccttgtgggatttgcacagcatgatagttagtgggtatcctttgagcagttgactgtcccctgcctctccccaaggcctgcctgcattttccaagtgccttgagctctttgcccataacacacacacacacacacacacacacacacacacacacacacagaggccacatacctttctcctcctctgcccatccctagggcctgccatcatatctaaggaatgctcttagaagtgaccagccacctgtgagcttctcctgtcggtggcacactgacaccactgacacacttccttcccttgggtttctgtgcctagcttgtcagccccaccgttctcaacagctattctcctctgccctgtagctctactggcaacccagctgtgtcctgttatgggcaccctccagccagccggtatggaccacatccacagaaccacagggccccaaacctcatggttgggtttggccagtgggggatcccagtggatttgtacgcacaggttaaagtgaggatggactctctatgtccttagcttctgtgagcttcctagccatatcccacatgctgcctttgacttcctcttctttcccttttagttatagtttttcttactgtccctcccctgtcctgtcaggatcagggatcctggccacatcaggcacatgtccctgaaacctcccactcctcccccctgaagcctggctataaataaacctcttgaggccacaatcaggaagtctgcctctgtttgtctgggatctaaccggggacacactgcccacaagtagcattcatggtagcctatggctggcagcatagcagacaccctgaagtcagtttcctcttccacagtgggttgtccacctttgctgagagcatgcggtgtatacaaagaaccggtgacttctctccattgtcctactacctctgttttatgcccccttgctgagcagctc

SEQ ID NO: 33169 - DNA, 1165 bp, Mus musculus
cctctctgtaaggctggagatagcagatcaactttcctttatgacgttagtagctgcatctttctctggctgtctattgagggctcaccagtcttgctgatttttttggatcctcaggtttcttctgtcctctggtgttggctgtattcagggttaaatcacacagagcctttcttgagtgttctatctcaccctcctgccttcaccgctttgtcccacactaagctgatgtgtgagagcagctgagcagactgtgtgtcctctgcagggagaaggggttcacctttttctgagcaccctgagtcagtttgaggttttgctcacgtttgcataaaccttgggagaacctcatcaggggcacctttgttgacttaatatgtagatggaataagcaggcaccaggtaagggtcagcttccgacagaaggatgaatgccttggtgtcttctgagccagctgtcctgccacactttgccaagctccaagcatgtgagagaacacagcacctctgtaccctgctacctgcagcgttgccatgttctagtgagttttcctctgtcctaacaaggtttctacatcgtgaccaaaagcaacttggggaagaaaggatctgtgacatcttatagctcacagtccaccatgaaggaaaaatcaaggcagaaactcacggcaagaattcagaggaggaactgaagcagaacccttggaaggatgctgcttacttctgcgatccccgtggcttgctcagttttctgcccatgcatgtgtggtccactcacagtgggctgagtccttcacatcaatcactcatcaagaagatgcctcacaggcttgtataaagaccactctactggaggcgtcttcccagttgaggctccctcttcccagatgaccttagcgtacgtccagttgacaaagaaacctaacctgcactctctctgttgactactgcgactgacactaggaagaaagcagcatttcaggaagactcttgaagaaatgacctcggagcgcttcccattcagcagccctttgcagcgaacgcctgggggcatctgttttgtgtgcacaccctgtaggcttggagaatatggagaccaggccaacctgcctcacttgggctgtgactcatttgcttgtcttattcctgatgatggcctttgctg

SEQ ID NO: 33170 - DNA, 1891 bp, Mus musculus
cctggccttccgaatcgcacctggggcaggtaaacctcacgcccatgtacacaagtgttgtgtcgtgcagtgacgtggtggtaaatatggctcctccttgctctcctttctgcagcttttcctggtgtgtttgatcctttaacaaacgattaattccactacagggaagaggtgccagcgccgcgagaggatcctcgagaggcctccctgtagcagtgtatccaactcatcctcctaacagctgcatcggaaccgcccaagcctcacctgctagacggccggccccacacttcgcttcagcctccggacctccggaaagcctcacatacctcactgtcgtgtctgtcacgtgacattgtagacatattgggtgtaatcaagccacagtcctattgccaaaactctaacagacagcagagcgcctgtattttagacttcacagttttccatttttaacaattgtctgtggaggaagcttctccatttagagccccaggtgtccagcgtccctctctgccaggaggagtgtgccgggcactagcccaggcagccaggctgccacgtgtgcccaagcccgaggcccgaggtctgactctactgccatgttacgtggcgtgagaatcacactgcagctgctttccatttttatatatataaatacatataaatatatactttttaaaaataatttataaatcttaccaaaacttatgctgaatatactttccagtatgagtgcacgagtgtcctgagcaggcagaaccgcagtctagatgaatggcgactccatcagcagtcggcacctgttcctgagacaaggcctagccagtgcccagggcgaggggccctgtgatctgcctgtactagcagtttgtcactcttctgccttttctgtgtaatattaagaactgaatgtgaagtttatagctagcctgggtgtaccttttaagaattttgtaaactgttttgtctgtcttttgttaccgttttatggtgccaagtagcctacattaaaaccataatcttgtgggagaattagaagtagcctcgtccacttcccacagattgcttctagcatgggctgtgtgtaaacctggcagaaaagcgacgggtgatgctgggcacagcctgttgcctggactagcacccagcactgagaaccacggaaggcgcctgcggagcctgctgaggaaacacagcgtgcttttattgatttacttctgaacactacagttcctggatggggcggaggcgcgagttaatgtcggtttccctagaaatcactcaaggccggcctgtgtccttgatgccagggtcgggtctgtgactgccatggtcgctgcttgccaatgtgccatgtccgcagcggttgtccgtgggttccagctgtgggtccttcccgtgaaggcctctggaagtgactgctcggttcctaagcaataaaattgatcatggtgaaaacagttcctgctgcttattctcctgccttccctctcccttgcctttgaaatgctaagtgccaggagtggccccctttgtgcgggtttgctctggcccgttctgattctgggaatttcagagttccaatccgccacagggcaccaagccctcagaaaaatcacctcttagacttttttattattattattactgtagtggaaaaggccatccattccctcactctactagagggaattaaacaaaagcttttctttggcttcgctcaaaacctttatcaacatttctctgctctgaactttggctgagaaaccacacagaaaccacacattgccccatttaagacggggaaaaaactcttgcttccttttaaagaaagtcagtgattcaaaagaagctttgactttgctgatggagccaaaacagcaaaaca

SEQ ID NO: 33171 - DNA, 1270 bp, Mus musculus
tttctgtctatcactgatttgcctaatatgtttttaaaatggcttatttatttttattttatgtttatgagtgttttgcctgaatgtgtctctctgcaccacatgtatgcctggagcttacagaggccagaagaggtttcagatttcctagaactggaattagagacaattgagagcggctatgtgatttctgggaattgaacccaggtcctctggaagaacagccagtgtcctttaattcctaagctatctctccagcccctacgaatccattttaaaaaatcataaatacttcttttatttttttcaggaaaataccaaatgaccgatgacgccagtgcagtgggagggctgggaggacccgggggcccaggattaggggcccatagtggcttccacggagcttttggcagtggtcttagaggctatgttagtgatcagggctgtggctgtgatccaggcagcggggctcgtggaggtaaagctgaagacaaggagtggatccctgtcaccaagctgggccgcctggttaaggacatgaagatcaagtccttgggggagatctacctgttctccctgcccattaaggagtctgagatcattgacttttcctgggtgcatccctaaaggatgaggttctgaaaatcatgccagtgcagaagcagactcaggctggccagcgggccaggttcaaggctttcgtcactactggggactacaatggtcacgttggtcttggtgttaagtgctccaaggaggtagccactgtcatcggaggggccatcatcttggccaagctttccaccatccctgtgcagagaggctactggaggaacaagatcagcaagctgcacactgttccatgcaaggtgacaggccactgtggctctgtgctggtgtgtcttatccttgtccccagaggcactggcattgtctctgatcctgtgcccaagatactgatgatggccagtatagatgactgctacacttcagtcagaggctgcactgccaccctgggcaactttgccaaggccacctttgatggcaccttcaagacctacctacctgaccccgacctctggaaagagactacgttcaccaagtctccttatcaggaattcactgatcatcttgtgaaaacttacaccagagtctctgttcagaggacccaggctccagctgtggctaccacataagggtttttatacaagaaaaataaatgaattaggtctgtttaaaaaaaaatcatagacattgaatttcatcaaat

SEQ ID NO: 33172 - DNA, 1602 bp, Mus musculus
gactagaaaggggatgggctagaataagcaaggcacaggccaagaggaactaggtaggcgagggggcggggcggctagacgatgggagggtcgcaacgaccaggttcagacgcagagggcggtgcggggtccttagagcgtgtgtgggcggctctggaggagccctcctctctggtgaggccacgccttggagtgcacgcacctctacctggctcagggatgctgcttcgtccccggaggttgcccgctttttctccgccgtcgccagctagccccgacgctgagctgcggtcggccggggatgtcccggtgactacgtctgatgccttcgctacttcgggcgggatggctgaacccggctcgcccaaggctcccgtgtccccggactcggcgcagcgcacgccctggagtgcccgagagacggagctacttctgggcacgctgctgcagccggccatgtggcgctcactactgctggaccgcaggcagactctgcctacttaccgccgcgtgtccgccgcactggcccgtcagcaagttcggcgcacgcccgctcagtgccgccgtcgctacaagttcctcaaggacaaactccgagactcccagggccagccgtccggacccttcgataaccagatccgccaactcatggggctattgggggacgatgggccgccgagggttcgccgccgctctactggccctggacgtccccagcgccgcggccgctcgtccctctccgcgttagcacccgcacctgcaccggtggagcaaggtaggagcagccatgtgggcaagaagggtctgggtctcctggggaggggcggagccctgagttgggattccgtacgttccgcgcgtttctctcgtagaggccgagctgccgctggctgcggaaaatgacgaacctgcccctgcgctcagattcagttcttccacgacgaagtctgcaggtgcccaccgcattaccagctctcctcctcttacgagcaccgacactctgcctcctgagccgggccataccttcgaatcctccccgacgccaacccccgaccacgacgtggagaccccgaatgagcctcctggcctttcccagggccgtgcttcttccccgcaggttgctccccagtcgttgaataccgcgttgctgcagaccttgacgcacttgggcgacatctcaacagttctgggccctctgcgcgaccagctgtcgaccctgaaccagcacgtggagcatctacgaggttccttcgaccaaaccgtttctctggcggtggggttcattctgggcagtgcagcctccgagcggggcatccttggggacttgcgccaataaagctttgttatcagtcctcttctccagaaacgactcccagtctaccccgacccctgttactgtccccatccccatctcaaacctaggttcttaccaaaataaagattgtgttttctacttaatcctgtgaatgaattcggactccaggtcgcggtaagaatggaaccctaagggtagaggctaaaagacacagcccctcgccccacagttgtgcatcttttcggtgaagatttggcggagtggtacacagttgttacctgatgttt

SEQ ID NO: 33173 - DNA, 1161 bp, Mus musculus
cttctgtgtgtaacagagaagacccatgacaacccatggcttttcccaggccttggacatcacaattcttttcctcagctaattccggcctgttacacacatatgagcagttactcttgggaattgtctgttaaatgacaccagttattcccttcctgttgcagctgacctttggatacgtgtgcctctattctcatgtcttttaaaaatgcccgtgccaatctaacagagttttactctgattggttcctctgtgcctgacccctggtttagcatttctcactgatgtttcgttacctatgtggctgtctatgcctttaaaccaggcttgatgaggcatctgatgggctcaagctccacacttctctctggccccgtgattttgcttctctgccctgcccactgaggggtctgtgctctggcttcttgactgcacagggtcctcagtgttgagggcctttgccctctgccccacgtgtgactccatcctagattatgctatctagatccaagtgagttattttatttttatttttttctgagataaagtttttctgtttagccccggctgtcctggaactcgttgtgtagaccaggctggcctcaaactcaaatctgcctgcctcccgagtgctaggattaaaggcttgcatcaacactgcctggcttttaagtgagttcttaataacagatctcttttcccctgtggcctgtatctactggctgctcatcatctttatcctttgtttctaagatgagatcttgaacttattctgcttaaaaacgtgccatcctacctgagcaaaggtgtcttaggcctttaattccagtacacaggaggtagagacagatgaagttctgtgaattggaggtcaccctggcctaaagaacaaatttcaggatattcaggatacagagaaaccctgtcttgaaaaaccaaacaaaacaaaacgtgctgtctctcaatctttgatgtgtctggctttctcttagcaccaacgaacccagtacccttcatggtgcagtgctgagcagtattcccgggatttcagaatgttctagaactcacctgagcccttagaatgtagccaagtacaatcacaaaactaaattttactttatttggcataggatctcactctagtccaggctgtccttgaa

SEQ ID NO: 33174 - DNA, 1201 bp, Mus musculus
caccccttccttgtcctcccttgtcacacttaatacactgtaagatgctggttcaattttgtttggtatttttccctatacaggcatgctgataagaggacagggctagcatctgctatgcacatgtgttgtttagaagccagagagtgacccgtccagcaggtccagttattcgagggtctcaaggggaccttctcctaataaccaaatgggggggtagagagagacgagggtcttgtgcaaataacgacacggaaaccgttctggattgcatcaagaccccaatgtattgtgaaaggcccaaggcttaaatgcacaagcaaaaggggaagtacagatacttatcagcaggaggggtggggcaatacaagcaaaaggagaagtacttatcagtgggaggggggcaatagaaattctttcttttggcagctacaaggggaagcaggaacttggtggtatcagggtgtggtcaggacatcggtgatgacttagagctggaacatcctgtggttattctcggaatcaatgcgtcggtggcccacttttgacccccttttcttctcggggggtgtagtggctattcctggttgtcaacttgactatatttggaatgaactacaatccagaattggaaggctcaccagtgacccttatctggaggcttggagatccttatctggatcttggtttggagatcttgagccatcgtggctatggattccagaagattgaatctcagagtttaaggaacacgcctttaatctgggctacacctttcatctgggattaaaggtgtggtggaacacacctttaatctgggctacaccttctgctggagacaatataaggacattggaagaagggagtctagctcttgctcttgctccttcgcctgcttgctgcgtgagactgagtaactgctagatccttggacttccattcacagctgcgactgaaccattgttggaaattgggctgccgactgtaagtcatcaataaattcctttactatctagagactgtccataagttctgtgactctagagaaccctgactaatacagaagttggtaccaggagtggttctagagtaacagaagtacaaggatgaatcttttaaaatactggaattggcttgttgatccaccagcactttcaactattgaaacctctccagattctctccctactgggagctcaga

SEQ ID NO: 33175 - DNA, 1200 bp, Mus musculus
cacatggatttttccggcgtctcggacacttgcgtgagcatgtcctgcaagtacaggtgccgctgcacatccccatcctacagaagacacgcgtcaagagctgtgggtggactccggcatcgaagccacgccctacagctcggagccacgccccaacccatagagctgtgtccagccccttgatccggtccacaggtccggtccccacaagccccgcccacagcgacagtcttgcttctaggcccctccctgtggggctcaggacatcttccgcccgggttgtcacgcacctcgaagaattcgtgatcccgcgggaagcgcacggcacgcggcgcgaatcggaagggtgcctccccagccgcagggttcctctccacgggcagcggttcggctgcccccggctccccggccaggcgggaatatagtgcagggggaagcaacatcaccacggccgccgcggcccttcggccaccgtcggaggggtggtgacggacgtgacgtctactaacttcctgtggcgaccctgcggggcgggacgcgacgcgcggaggtgagtcagggctgggtctgtgttgtggcgggaactggtcggagaagggcggggctggagccgggcgcgggatcgggtaccggagccaggctggcctgcagcggggaagagcctgattctcttgggcctctgccgccggcggttccgtccgccagcccgggcttgtctcgctccacggtgcgactgcctctctggctctttcagtcctctccaggagtccaattggaggcagtggccttgggaagttcgtggttagtgtgactcctctcttgacagccccgcggtgactgcggtgctggcctgcgggttttctgcatctgctgctggtgctcggggttcaggggtgaagggatcagggcctgctgcagtagagacaggtgtggaaagaaaccctaacctaaacaaaaagacgatcgaaacgtgcggctgacactttgaggggctttaactttgctcctctaccaaagtaggtcaccctcccccagtatgaatataagtgtcaagaaagaagggacgctactgtttaatagatacaaatgaaagccttttgggattattctccctctctctcagcccaggccttgctcggtctgtttctctttctctctgttctggattcttccaaatgtctctggatgttttctctctta

SEQ ID NO: 33176 - DNA, 1448 bp, Mus musculus
ttcccaactcagaccctcccagatccataagcatgagtttctggtactcttgttatcactcctgattgtgtcctgcatggtttacaatcccctgtcccgagcttagcactgtttctggggaatcccatatttcatgggccacaggtaggcctactgcagaatcaccgtcttgttgatgagctcagagaacaggcaaggagggagacacaagagcaccttggagatgcaggcagtcagctgagggcctcaatgggaagattcaaacttcatctctctcttcctttcctgccaggatgaccggagagaagggatgactgcatttgtagagaaaaggaaggccaacttcaaagaccactgagaactggcagctataccgtttgccaccctggaaagctcagcctgtcctttgagaggcaaataaatgatccaaaagggtagtagtgtcggccacagttcccaccgaaggcttcagggctgtggccacagcttgggtactcatggcgtggcctgcagccttcaccagttgttggaagtcaggctcaccccgtcttctgaatcagaaacctgggaagctttcaaggtgtcttgatttttttttaacttcactgtaagggcaggtgcacgcttgggccagccactcccctgtgcattctccgcagctcatagctcaagatgtgagcttcaagagggaagtggccctctctgctgattcccaactcaagaattcaatgaaagtaactacttcacagtttagtttcgactcacctgtagttgtctctagagagccaatgtggttttttaaaattattattgctattttcttatggctaaggtttcactgtgtatccctggctgcctggaagttactatatagaccaggttgaccttgaactcacagagaccagccagtctctgttttccaagtgttgggattaaaggtgtatactaaccatgccgtaactatttgtgtgtttttaacttcatcatcttaaccacatacagcgtcaaacactttagaatcagtgtgcagccatccccaccatcatgctctggggctctggtctctagaccttcatcttcccaagctaaaactgtctctgttagacactgactcccaaccccacttcacagcctctggcaccaacccttttactttatgagaatgggatgactccaggtgcctcaagggtgaaattagaagccaggcagtggtggcgcatgcctttaatcccagcacttgggaggcagaggcaggtggatttctgagttcaagcccagcctggtctacagagtgagtttcagaacagccagagctatacagagaaaccctgtctcaaaaaaaaaaaaaaacaaacaaaaaaacaaaaaaaaagtggaattagagtaattgttatggtgcttgtataaagcaatgcacagtattccccccccccccaacacacacacct

SEQ ID NO: 33177 - DNA, 1103 bp, Mus musculus
gtcagttgtcatgtaaagaatacctctggagcagggtataatggctcatgcctttaatccaagcatttggaaggcagaggcaaatggatctctgtgagattgagaaacagcctggcccataaggagggttccagccaaccagggctatgaagtaagaccctcacacaaagctaaacaaaaccgtcttgcactttaccgctttatgctttattactgtatctgtgatcgcgtcttcccgtagtttttcccctggtcaagaacgaaagcatacggccatcacaggggaaagggcacagccatgtctcccagtctggcttcgtaaaccgggcacccgccaagggcacaccaccaaagtgatgcaattaacagactactccaagaaccgcagcccagcaccccacgctgccccaccccgccctctgtaccagcccgctcaggtcacgggtccaccccttaagcttccgtcttcatcccgcctgggatctggggcggagcgattctgcaggcggggcgattctgtgggcggaacacatcgtctctccgccatggcggccctgcgtgctctgctgcccagagcctgtagctcactgttgtcctcagtccgctgcccagaactacggcgcttcgcctcgggtgagtgcggacaccggcggggtgcgtcaccccacccacgttgggtggtttctccacccataacctctgggtggtccctaaaccccggcctgcacgcatcctcacttgatcctggcccttctctcctaactctagatcttttgtctgaccccctacttccacaagcatgcactcccaacacttgactctgaagtacctggaccctggattcgagtacgcatccccacactaaacccagatttcctgcaagtgaccactgactctagcttggtgatcttccttctgagcctccaactccagcgctcgactgaccccttcccaattccttaccccgttccccgctcctcagtctgaccttagtctcaccttacaagcccagccagatcctagcacctcgaagccatgtctagtgggagggctctgggtgtaatagcttctcaacgctcgaacttttatgagtgtcagctggg

SEQ ID NO: 33178 - DNA, 2219 bp, Mus musculus
ggggaagtggttttgtttttcttatctgttggagtctggcttggtctgatcatggatgccccgttaagtgttgtacgcataaagcagttaacattgcccttgtgtagagtacttctcattttttaaaaaagatttatttattatatgtaagtacactgtagctgtcttcagacactccagaagagggtgtcagatcttattatggatggttgtgagccaccatgtggttgttgggattcgaactcaggaccttcagaagagcagtcagtgcttttaaccactgagccatctctgcagccctagagtacttctcatagtgcatccagttctcaacctgttccacccattccatgtcctgtctctgctccttctatccctagtccatggctttcctctctgggtcctttgggccttagggcccatggttgccctttgtcctgttattggaggcgttcccagggttccccacagctgttgtccaggactatggctaatgaatcttcctttgatcattaagggattggtgtcaggtgccctagactggtaggctaaatggtcctgtagaactgagaagaccgtgaggcaaggagatgacacagcctatcctgacctggcttggggatttgggagaaggtgaagaataaaaaggcttaaagactattgggggttaggttggccaaacacagggagggcgtggtgaatgagagaatatggagtaagggtgctggggagccaggtgtgtgtggtagatgtgaggagtgtgctaggtaggtcaggctcttggatatttttgtagtctggtctcattgtcgtcacagcagctgcagaggacaggtctgttgctcctggttacagcggagacaggacatttagactattaacttcctcatgttgtagctgccacagggcttgcacatctcctctggagatggttgaggctggagaggttggtgtagcgagcctatctagtgagatattgtctcaaaagggtggagctccagagggagctcgaagagtttgcagagacgcttgtcccagcttgtcccatccttgcacagcatggtactgtcactagccccaggtttggcatggctgagggcaagccctcctgcttgtatttgttatgtttacacttttgaaacagctctaggcttgcttctgtccagtccagtccagctctctgcttggctactcatccttcaggtctttaaggcttgccctagcccccatcccagcagtttgtcatgaagcatgttatatcataaggacacttcctgctttaatgtcaccaggctgcccttgcaacaccatggaagaaagccagtactctaacaggtttttactgtagtctacagcttgaggactgagaaagcacagatctttcaagggcaaaagtctttgttgttgacactcagggacacatttcagttttcagaggagtgactttgcgggacgggggacaggcttgccaggaggatctgagctgctagggatgggttggggctcttccatgatggagactgccttgacagacctaggactttaaacttacaatctgggcacatcccctcactggactcccccattttccttttgagacaacatctcactctgacccaggctggctttgaaatttctattctgcctcagtctcacaagggctgggcttatagtatgtgcctgtctggaggcctgggggtgatagtagtactgggtatcaaacccaaggcttcctgcattcaaggcaaccattataacattgagttacatgtcaaccccttttatttgagatagtgtctctcttagggtagtttctaatgcctggcttcccctggcctctatcatccttagctggtatcacaggcctgttctaccaggagcagctggatttgcatttagtcttacaactatgaagcccacttcactctcattgtattaatgggaatgtagtcggtatttataacagttacattaaaatgtcacacttgaaaatggaggcattacaggtgtgtgtgtgtgtgtgtgtgtgtgtgtgtgtgtgtaacacttgaaagttctaaggcaggcccgggaactgataggggacaactcaatttccttacattgatttatatgagtatacgagggagaaagacgactttttttagactgcctcatgaagctcaggctgaccctgagttcctgaccctcttgcctcaaatctctcatatgctaggatt

SEQ ID NO: 33179 - DNA, 1227 bp, Mus musculus
tcaagctgaggaagacgcggaaagtgaaggttctcacaggcacaggtgagtgtggctgcacggtatggtatgaggcccttactctgccttctgttggggacaggagtgagacacagaaggaaacctgtgggcaggacactgtggaagtttctagggtggaaggaccttgtagtttaggctttggagggtggtcctagctctggacagtgctgggtggctatgatgcttgtgttctttctgaacatgccctggtccctagatttcagggggtggccctagtggtctctcagggccgggctgtcttaggggcccctttctcatcagatcctctgtcctcaggtaatgtcaatgttatccagcctgattatgccatggcagcccgagacttcctccggaccttccgcagtgggctgttgggccaggtgatgctggaccgtgacattatacctgcttgctgatgacgttaacccctggactggctggctggagtatggtctcctgcatagtccatgtgactgcagctggagtgtttaatgcttaggactgttcctccagttcagaagctctctgtgctggtaactgaggctcaggccccagctccaaagggcgctatgttctcttgtctatcagagcctggtcagtcctggttactaccatgagaccccaggagtgctgtgtatgtggcttggtcaggaggttttctccatctcaagtaagagacaaatgctatctcagaggagtctaagttataatctgtaatttaaaataaaatgggttaaaaggcccactttaaaaaaaaatctctctctggcttctcttattttactttatttatttttttgtcattttcagacaaagtttcatcatgtggcttgggctggtctcaaacacattccttctgccttagcctcttgagtgctggaattatacaggtgtgtgccatgacaaccgattaaaagacctattttctgatggcgttttcattgtgcacttagtatggtgagcccataagttaaatctccttctatcaatgaatgctgaggagtggtagattagaggcctggggttcctaagtcagattctcaagtgtctcaaagtcctgcaatgagggaaaagcctgttaccagcagagggctttatttcacaaggaactcttcactgataaagtgcacagacacggacaggaggtctgcagcagagaagtccaggaatgtcatctccccttgc

SEQ ID NO: 33180 - DNA, 1466 bp, Mus musculus
gcactgacttctttccacactatcaggcagatgttcaaggatgagaacaagaaagctgaggagttcctagaggctgcagctcagcagcacgagcagctgcagcagaggtgccaccagctacagcagaaacggcagaggtaggcacggagctcctgtgtcctcatttctcccaggaaggtgaatggcagctgtttcccctgttctgccggtatgtctcttcatattttcttgatttttctgctttcattctcgtccttcacgcttcccggacaggctgaaggaagaactggaaaagcatggggtacagatccttgctcatagtacgcaaaacgaagaagacagctcatggaggatggtaaatccgggaacagaagggaaaggaaaaaagtggtattctccagagtatagtctgtggaaagggcattcctctgaggaggcacagctgaggcagaggtgtaaactcatggtagcatgggcacagaaaggtagaaaggggtggtaggagcagggaaaaatgcctgggcctttacctcccacaggccagtcctaaacctgtagaagtccacgaggagacagcccaagaccaagagcgcccatcaagcaggacctaataccctcctcagcctggaggacttactgacttcagacatcacttgcggatgttttgtgtagcctgcttcatctgagtatgtgccgagtggaagaatgggtgttggggccaagcccctcaagtctttgaacctggagatgtcttggctcaattttgagtttcacctagcttagggtccacactgcagacccttagtaaatgctttccctgtctcttgctcaccactagtatctgacacacgcttcttctcttgagcagaggatgctgatctgaaccttctcacaggatctgaagccacttggtaatttagttccctcatgtaggcccagaatagcatatactttgaaacaaaaggaagacacatcaccagctcttaattctcactataaaccacctcattcttcaagcaaaataaatgaaatttaagtctgcatgtggtctatattgtgtgtgagcaatcccaaactgttgccaggaacatcttaaactaaaaatgctcttttggttggggaggacataaatgggcagaccttccccattcatctttggttctattgggtccttgtttggttgctatttgttttgtggttttcctggtaagatgcaaatgaatgtatatttaccttaaatatggaaggggacaaaaaggaaagattctgtcaaatccagctcagtgaataaatgagttagcagggagatttacaagagctatctatatcttttaaaattctgcctcagtcaggttcttttttttttctttttcatcttacagaatttagtggaatgctagaagaggattttgtaagggtctcctgagggtcttttgatacttcccttccatgcagaagtggatgct

SEQ ID NO: 33181 - DNA, 1219 bp, Mus musculus
gcaaagcctttaacagtgggttaagcctgaaacaacatcaagtagttcacactggagagaagccctacaagtgtaaagagtgcgagaaagccttcacgcagattgcaaagcttacagagcaccagcgagttcatactggagagaagccctatgagtgcaaggaatgtggcaaagcctttcgcaatttttcagcgttcaattaccaccacagaactcatacaggagagaagccctatgagtgcaaggaatgtggcaaagcttttaccaaaagttcagatctcaaaagacatcacagaattcacagtggagagaaaccttacaaatgtaacgagtgtggcaaagcctttgccatgaatgtaagtctgagagagcatcagagggtgcattctagagagaaaccctacaaacgtgattagtgcagcaaagccttcaaccactgttcacacctcacactgcaccagagaattcacaccggagagaagccctacacgtgtgaagcctgcggcaaagccttttccaggtggtcaggcctcaaataccataacagaactcatactggagagaagtgttcctaatgcaaagactatggcaagctgtgtgtgtgtgcacatgtgtggacacatgtcactatgtgtggaaggctgaggttaatattgaattcctccattgctctaccttcttgttttttaaattacattaagtgccaggcagtggtggcatacgcctttcatcccaggacttgggaaacagaggcaggcggatttctgagttcgagtccagcctggtctacagagtgagttccaggacagccagggcgacacagagaaaccctgtctggaaaaaaccaaaaaagaaaaaaaaatacattaagcatgttgttttgtgtgttcatgtgtatgtatgtgcatgcatgtgacatagttggggggttggttacatccttccatgtggtcttggggatctaactcaggaggtcacacgaggtcacagttcctttatctgctgagccatcttactgacctcaccttattttttgatacaaagtctaattttttttaaaaggatgtatttttatgtgtataatgtatgaatgtctgtgcatcacatgcactgcccacagaagccagaagagggcatcagattccccggcagtggagttacaggcagttcttagagccagttggttgccgggaagcaaacccaggtcttctgcaagagc

SEQ ID NO: 33182 - DNA, 1094 bp, Mus musculus
tctgtggctctgctaagtggttctcagaagcctttagttcccgcttccaaccgtcaggctcctcgtgtttctatacatgggcagccagaggcgacattgtccctctgcatttttttggttttgttttgttttgttttgttttcaagacagggtttctctgtgtaactctggctgtcctggaactcactctgtagaccaggctggcctcagactcacagagatctgtctgcctctgtcccctgagtgctgggattaaagatgtgtaccgataccaccgtcaccccacccccaccccccagctgtccctctgcatcttaaagaggcataaccacaagtaatctgacccctgtgggtttccatggggcatccagagagctggcgatccagcctttccgtgtgaaacccccacagctgaaagccacagactgagattcattagatctgaggagccatgttgctaggcagagggtgctcaacgcctatgagcttggtgagaaatggctgcctggcccctgagtgctgtccgtgaggaactttgaatgggaaatctgttatttgcttttgctgtttcctgagggtagtgtgtacctcaggtgtgcagacagcgtcagatgccttttgtttcgttcgtagccctgggtcgtaggtgtaactgttggttttaaagaagcgagttgtttgacccaggtgacaaagttttccagaagtgggtctggttttcttcactttctcttcttaaaggtctcatagacccggtacaggcaaggatgaacttgaacttcagatctgcctgcctcccaagtgctggagttgcaggcttgtaccaccatgactggctttaatgtgtctatacctttttaagctaattgacacccagcaccatctttggctcttagctaacttccggcagcatggcctctttataggaggttgttaggaaccatctggtgaagtgtacagtgtagctccatcttacctggggagcatatgtcagtgacagaagcccttctgcagacccacaggctgaaggaatgtgtggcacctgtgctgaacgtgttgacagaatgtgcccgcatgcaccgtcctgccaggaa

SEQ ID NO: 33183 - DNA, 1100 bp, Mus musculus
tactcagaggacgaggacacggacacagaggagtacagggaagccaaggccaggtatgtgcccctaatgtatacttgggttccctcataacccccattctcccatccactccctctccagctcgaaccagtagtacataggacaggataaggaatagataagacctggattcaggaacttgtgttctgatgactagttatgtcctcggtgtactaaggcccagcaagtgagctatctatctgggatccaggaggtcctgggcaagacttgtcaggctggtgtttgaggggcatctccctcctgaagtcccatcagcaccaaaaccaaaaccaagaaggtgggttcttgctaacccagccctaagcatgaagatggagactacctgccccaccgagtgccacttttcctatagcatcactaacccatttccacgcactgttcctgggaagtagcatcaaccctgtgactggaagggtggaggagaagccgcctaatcctatggaaggcatgacagaggagcagaaggaacatgaggccatgaagctagtgaacatgtttgacaagctctccaggtatgtgttatgaggaaggcttgtagctagaagacatgcgaatgattgttttgtgagcccaaggagactggcttagaggtgaggatcctggtgaggctgtattggacatttgagataacttgccccagaggtaagcctctggcaaagagaagaaggtacagtcagcattgagccctgtttctagatgacaagaaggtgaaggactgtctaacgtctcaaagctagttaggtggtggttaggattggggcctagttaatagttaacctagtccaagtagcagcctagaaatgagcaagagccccctgccctgcacacaaggtcccttccccaagcactgtgctttccctcaggcacagagtcatccaacccatggggatgagtcccaggggtcacctcacttctctgcaagatgcgatgtgtgagacaatggagggacagctctcctcagaccctgactcagatcctgactgaagatgccagcggccttgctccccttcagaactggtgctgcttccagacatgtcctg

SEQ ID NO: 33184 - DNA, 1178 bp, Mus musculus
tacagcatatgtagctgttctcctacaaaaggttgaaaccatttactgaattacaagtgttcttcatgttagcatttccgtgcctggtctccttgtgcatgggcagtcccctccgtgtgtttgtgtgaagtgctaatgtgagttgttctacaaaagcttacaggcacctctgaagccccattggcagctttaatattttcacactatttaattctccacggccccgtggaggtcaagtggtcgtggttttggtttatttctcagttggtattggtttagtagctctgcactcccgtcttctctgctaactgcctgttactgtcttctactgtgtccttcatacttcctggctcactgcccctagagggcgtggagctagatcctttgccagtctattactttaaagatcttttaagttggaagacgattttacttcttgtgtataggaaaccattgaagatgttgaagagatgctcaacaatctccctggtgtgacgtccgttcacagtcgtttctatgatctctccagtaaatactatcaaacaatcggaaaccacgcgtcctactacaaagatgctctacggtttctgggctgtgtggatatcaaggacctgccaggtaacccagggccctcacagttctcagcgttgagggagtccgaggctgagcatagcagccatggcgtgctgaagggaataggtcttagctctgtcaggtgttcatcacttttaaggtggaaagtttaatgtaatgtacattttagattttatatcatatttgtctctagcgctgagttaaatcctatgcaagctcatctttctcggtccctttactccgctgcaggcccatattagtagctaagtcagattgtagtgaagggtgacgggcatgtgagatcccatggctgagacctctgctcaaaaggagttcatacctgtgggaataaattaccatctttcaagaatctgagggtggaagaaaaagtagcctgagagtttgggtaaaaatacaaggagagtgtgtttgaaagaaaatttgaccactttcttgaagctgttggtggaaaggagactggcaactcctaaaaatgcagataaagcttcgattactctctggtaacaggaagacattaggaaagcgagcagtgcagccaagagaggagaaaatctgaagaactg

SEQ ID NO: 33185 - DNA, 1298 bp, Mus musculus
gacgtgggtgcagccgcgagtgctggatttgcagcaggtaagggggctgggcccctgccctttgcgggtttaccaatgctgtcctagttttatgtggacagaagccatttaggaagcggacgctgtcgcacacaaggtgggattactgctgtggaggcctagcaaagcagccctctgaggtctgcgccctgcacttccaggctggctgcgctgctgatgcctcctaatcctgaaattgctgctccagcagacgtgttcctggttttgtgacttgatcccatgccctatcatgtttcccggacatttaatcctgtgctttcctcattcttttttctttcatgggagattttagaatgtcctcgtgatcagatttggcacagtgactccattacacacctccaccttcagctccattgcccttagcttttcccagaaaagaactagaggctcagccctcccagactcccttgcagctgatacccatgtgatcccgatttgcctttagatcaaggggatgaaggaccgtctggagctttggtgcactgatgtgaagagcatggagatgctggtggaacaccaggctcaggacatcctcacctagtgccccggtgtcctgcagaccctgccgcaccttgcaaggcaattctgtggcccccgaaaccatcagcagagatctgtattcacttgggatggagtttaggatcctgctcggagtgggaactgttcttgctataaaagcagagaactgtcgctggtgggggggtgactacttggagaaggctcctgtgtggggtcttttgtagcctgcaaggggtgggaaggggggctccaggcctaggtgatgagaaagggcacgaatgggaatggggacagggtagtctccacccagctccacctgagtggactttgtccagtgtggtctgagtgctgctctaataaatgccttggcattgttctcttggtgcttctgttctttgccttagctccttagccaatcctgtgtctgaaagaaaaaagaaatgagcatgtacgctgggactcagggtcggtggggacttgccttactcctcccctatcaccatgcacaggaccaccaccaaagaagtaagttctgtattgtcagacagggaggcattagttcctttttgcagtcgtcttcagagcattctcagactcaggcatccacactcaccacccagcatcactaaggcaccggatattaggagtgccgcgctcaagaatctgcacgagcagtaggcagatggacatgtttaatgaaatctctcagggatgtgcaa

SEQ ID NO: 33186 - DNA, 1236 bp, Mus musculus
tgaaaaagccgcctcccaaaatgaggcctgtgtggttgctcttgctttcttttcatctgggtgggcccactacacagtggggagaggcagcctgaggtctgaaggaccccactcccagcccaggaaggtaatggtgctctgtggtactgagagtgtgtctgcctttccccaaccctccctaggttccttcctccacaccctggaaggccccagcttccgggcttcccagcggatctatgctcaccgtgtgttaccccatgtcctggtcttcagtgtgtccattgcacgcttgaccacagggaacaaacccatcacagtgccgttacgggcagacttctcccccgaaagcccagacctggacctgcgtgtggggcctgacttccagggactccggtaagaatcacactgggtaaatctaggtagcccagagagcagagcgagccctttcttaagactcagctatgcccttgcaggtacctgcatggccacgtacttaaccctgagcagcctggagagccacagcaggaagtgcatatgctatggatgcctgtccccccagccttgacccttggggaagaggagaaggacaggacctgggagtttctgactgttgtgggtagcagccaggctgaagcccaggactgctttgctgaggccctacagctgcagaccaggggtgttctgtatacaatccatgcagactcctggggccggctctgggcaggctgtggcctggatgtggctgggcccctggccctgcgccaggcccttcgtggctctctctactacctgttcagtgagcttccccagcctggcactcaaggattcatcagccatgggcttagccccggaggactctccaatgggagtaaggaggaatgctactggggccatatcttctgggatcaggtacatcctaccctgcactggttacacagggggagttgcatgcaaagattccgggcattgcctttgcactacctgagatcaagaccaaacatgggagctctagataggagggcttcctggaagagatggttggtttctcagaagaaaggtgtgtaggaatgtggtagaaaagagtggtccaggttagagcaaacagaaggcgcaaaggctgagggtctgcaacatttgaaagcagagaaggggcctcatagctggctaagaacaccagagcctcagagtgagccaggtgcaagcctggagcttacaaaaggactggaaaaaccatag

SEQ ID NO: 33187 - DNA, 1197 bp, Mus musculus
gtccttaaaggttgcccatagaggaattcccactgtagttcccgaatagcactgagttcttggtttctcataggactcctctcccctaggaggctctcagagggtgctgctgacccagaatggccactgaatctctacctgcagcctttatttatgctgagactatggttaggaccctgccagaggccaaactgtgcctgtgaaggaactaggtccagccgagggatatgtctccttgagccagagtcctccgtcaagatttagagtttagcctgtgctctacagttgctccgggggagggggggtcccctagacaccatgaacatgttaacatcttgtttctggtgctgccctgcaggcccgagaccagaagatggctgggaacttggaggctgcaaggcagtatggctccaaagccaagtgctacaacatcctggctgcaatgtggacattggtgcccccattgctgctcctgggactggtggtgactggcgccttgcacctgtccaagttagccaaagactctgcggctttcttcagcaccaagtttgatgaggaggactataactaagagttccgagcctgtccctgaaccgaggacaaccatgtcaggtcagctgtgcccaacaccagctcctgggagttacagcctactatagcacctcgatccctgcccagccgtgacctcagaggcggccctcttgtccacgatgtgtatttgatgctgccccactcagatccctcagacttaacttataacctagagggtcctcagtgcttggctttgtccctttccccacttaccaggccgagcctctgttcacgattaaaagtggcagattccagaaatgtgtgggctcttcctttcctggtggtagttgtgtagggagccccagcaccaactcatctggccaaccccagttatcttattctgttagcttggctgtccgactactgcttttgcttagcggcctgtggcttctggggtggaggagcctgagtattttaggatgaagttcgggaacgcaggcctttgattcccactgccctgtggtttgatgggctgtgtccgagaacatgtgagggtgtgccctgactcctcatccgccacagtggtcttcttggactgtgcggaaggcagacaggggccatttcctatgcgggactggatactggactcacagcggacagcaacat

SEQ ID NO: 33188 - DNA, 1110 bp, Mus musculus
aatgccacaaactgggtagcaataatcttcattgccacctcaggaagggaagcagagttgtcgggtggagggatggttggcatagacaagccggaaggtgtccaaaggtagagtcatcgtggcagccatagcaggcgagtgtcagagaacccagctgtggcagaatatttgttcccactgtgaacccggagattatgttgtttcctggaaaactctgtttcaagtttgtggtgtgactcagccttcacacacacacctttaatccaatagctttctgcttgaatattataaacaggattgaataaaatcaatcatgggtcaacaggcatttgttgacccaaacaattgacaggatgtgaacagaggggggaaaacagatcaagagaaagtcaggaggacaaatgggaagtagaagggagggacattcagtttgaggggctgggggggggggttgttttttgtttgttgttggtatttttttgcttgttgttgttgagatgtgaggaaagagcgggctcttttgggacattggctgaggaggaaggtcagttgggtgttttctctgcctctctgacctagcaggttttcaccccagcatctggctcctgagtctttattggtaaaattgaacaattaagattttgtttaaaaaacaaacaaaacaaaacaaacgaacaaacaaaaaaacaccccatccaataaggtataaatgacatccctgtcacaggtggggatctgaagatcaaatctagatcagttatcgcatccctcaggtgagttaaggaaacagtaggatccatctatgttcacctaagaggcatccatagaaggcaacggatactaccccctgatgctttcagaggtgaggtaaggtcttcatgtattaacttggctgtgaagtgccttagagtggggtgtctcctgctgggcattatccctctaaaggatacccagaaattcaagttaccacatatcagttgtgagggagaaagtaaaagcttggttacccatagttctctcagatcaagatgtctgatggggatgaaggggacatggcaggcataaatgacatcagtcacatcctctgttccctcctcaggagagcagcag

SEQ ID NO: 33189 - DNA, 1208 bp, Mus musculus
gtaaacataaggaagtaggtttctgagaaacagaccccactggaggaaaaaggccggcccactgcgcagcaggctccggactgcccagtttgaaaagccttctcattccttccttattctcactctgcagcttcaaaagccgagagatgcctaaggagcagcaagaggtggttgtactggggtcaccccacatctcaacttctgcgacagccaccacaatcaacatgcctgagatctccacgcctgaccatgtggtctggtccctgttcaatacactcttcatgaacttctgctgcctgggcttcgtagcctatgcctactccgtgaaggtattgtatgggcctcaaccttgacttacccaggtggtacctgggttgtgtgtgtgtgtgtgtatgtgtatgtttgtgtgtatgtgtggagggaatcccaggaggtgcctggggatccgtgggtcaaggtatctccatcatagcctaaagtttgaaggaagtctccttacttcctgattcttggaatgccccccccttttaaaaaagatttatttatttattataagtacactgtaactgtcttcagacacaccagaagaaggcatcagatctcatagatagttgtgagccaccatgtggttgctgagatttgaacttgaaagaaagaaagctaaattcaagacttcaaagccctagccagaaagtttattcaaggtccttgactcttgcggcttgctagttaggagggctttttgggcttagagcaaagaacaaaggctgtaaagtcatcctaggtaccaactagccattgagacaagaaaggcacgcaaggacaatctccaggacaagctctgatgagtaatgggccacctgctgatatggtttgggcttagccagatgtcctgccgaccaagataaacaccctccctttagagttactatcacatacagctctctgatgtttaaattgcccatttgtgtgtaactgtgccaatcctccccctacccccactcctttcctatataaacccctaactttagagcctcgagaccgacatcccttatctcctgtgtgagaggacctcttggaagagcagtcagtgctcttaaccgctgaaccctctctccagccccctggaaggttccttaaccctgaagattaacactcctggctggatggaaagttcactaggaactaacaggaaacagtagagtaag

SEQ ID NO: 33190 - DNA, 1193 bp, Mus musculus
tctttaaaacacaagaagtaccgttcatcccacctgtctatgaagccaggagaactggcgttcatagtgagaggctctctgggcactctttattgctgaataaagaatagagggttctttggggcctggctgggaccttgataaggaacagtgaggttctgcagctgtgagcgtgagcttggttgactccaggacccctcactcttaaacactgaggtttgggccttgggacaagtcctgacttgggctcctggcctggaagttcccctgattcacaatccttcctgacatcctgccctggagtaatttgatccgcaggctttttagatccccgcccctctgaacccagagcagtttcatcaagccaaaattcaggaaaaggaaacttctgagaaaccgaaactgccgcagaaagggcagacccgcagcgcgctccatcctttgcccttcagtgctgcctttgctccgcaccatgaaccacacttctcaagccttcatcaccgctgccagtggaggacagcccccaaactacgaaagaatcaaggaagaatatgaggtggctgagatgggggcaccgcacggatcggcttctgtcagaactactgtgatcaacatgcccagagaggtgtcggtgcctgaccatgtggtctggtccctgttcaatacactcttcatgaacttctgctgcctgggcttcatagcctatgcctactccgtgaaggtgagtgtgctagaatggggggagtgatggtgtaaaaaggtgtgtgtgaacctgaagctccatctacccagatggcaccgaggtatgagtgtggggtcctttgtttaaaataagtttgtgttcattcttctgtggtgtgtgtgtgtgtgtgtgtgtgtgtgtgtgtgtacacgtgtaggcttaaaggctctctgggggcagacacagggtgaggctgcctggggattctggagtcagactcttccaatgcagagatgcctatagcaccttcactcaacagactgggattctagcctgtgtggaaaatgttcaggagattcatggggaacaatagcctacagtggggtgaacaacaagtgctagggcctcctggatgatcagaggatgtaaaatgttcctgacctaagatggggagatgcagtccacagggagtacgtcaggaaaactgtcagagcatctgcctatcagctcc

SEQ ID NO: 33191 - DNA, 1774 bp, Mus musculus
catagccagataccaaggactacagtttgtaagtgcccggtgtgggaggcggcggcttaaagctaccctttgccccaggccctacccctgagccatcggccctgcccgcaggtgtacctgtccttcatctaccccaatgaccatacccgtctcactcacatggagacagacaacaagtgcttctaccgtgagtccccactatacctggaaaggtaggtgggggcgtggcctgtcagaagcgagaatgaggagcctcgatgaggaaggtctctgatgcactttctccctcaggtttgggttctataaatacatgaaaatggacaaggaggagggagaggaagatgaggaggaagaagttcagcgtagagccttcctcttcctcaacccagatggtgagtgtctcggtcctgctgcactcccagcccaaatgccaggtacttgagcttaccagaccctctctgcagacttcctggatgaggaggatgagcaggatctgttagacagcctggagcccaccgatgcatctgtacagcagagccacaggacccccaccccagcagcctccactggaacgacagccagcccgaccccacctacaactagtcctctggacgagcagaccctcagacactcccgggcactgaattgggccccacgccccctgcccctcttcttggggcgagctccacctccccgaactgtggagaagtcgccttcaaaggtgtacgtgaccagggtccgacctggacagcgggcttccccgagggcattgcgagactcaccctggccacccttccctggcgtcttcctgcgccccaagcctctgcccagagtacagctgcgggtacccccacatccacctcggacccagggctataggaccagtggccccaaggtcacagaactaaagcccccagtcagggcccagaccagccagggaggccgggagggccagttacatggacagggactcatggtgcccacagtggacttgaactcctcagtggaaacacagcctgtgacttccttcctgagcttgtctcaggtatccaggccacagctgccaggagagggtgaagaaggggaggaggatggggccccaggtgatgaggccacatcagaagacagtgaggaagaggaggagccggccgctgggcggcccctgggtcgctggcgggaggatgccatcaactggcagcgcacgttcagcgtgggcgccatggacttcgagctcctgcgctctgactggaacgacctgcgctgtaacgtatccgggaacctgcaacttcctgaggccgaagcggtggatgtagtggctcagtacatggagcggctaaatgcaaagcatggcgggtacggggcagacggctgcttgaagagaaggcatgccggtgtctgcagggatcgcagaacttccttggctctcagcaactctctgagccccttctccctctctgtaactactgtcttacttatccaggttgaagggctctctggagcccccctcaagactgacttcatctctcctcactgccaattcccacatctgccaccttagacctagacccagggatgaacccaaaccatcggggacagtagtcaggagtagccagattgtgggcagacaaccttttcaggaaccagagacactaaagtgtcatgacctctacctgtggagcactgcagggtcccaactaggggactgtgtctagttcaagggagcctttggcctcctaggtctcaggcttcaaacttgtttctaccccattttgag

SEQ ID NO: 33192 - DNA, 1246 bp, Mus musculus
ctattgcctgcagcattttgccctgtgcatcaaactcattgctgcgtggtttgtgcctgatgtgccccagaaagtgaagaatgaggttctgcaggagaagtatgacagaattcgccatagaatgcggtagggatgtagaggctcacctggctggagcaggtctctgcctggggacaggcctggcctccgacccataccaaccctatccttcctgcagcttcagttccaggagcacggatgtatagacgacctggggcaggtggagaaatgccactttccaggagcctggactaggaataagtccccacctctacagcttgcccctatccataacaatgtgtatgtatgtgttgagggaggctgtaaaatggcccatgtatatgtaggatcctggatggtctacatatatgttaatacatgaagatcaaaggagggcctagactatatgtaggtgtatatgggcatcctacgaagcccatgtgtatatgttaaccacgggagacttgtatatgtagggatcattgaaatccatgtatatttagggtatttatgaacggcacagatgtgcctgtggggtttgcttcaactttcctacggttcagattggtacagacctgacttgagactcttgaatgaccctagtacctatagaactgcaggttgctcataaaacccccatgcagtaaaattagcctaaatgccatggacctcctggcttctgggcctcagatcctgctctgtggcctcctgctttgtgggaagccatggacctcctggcttctgggcctcagatcctgctctgtggcctcctgctttgtgggaagcctagagagtaacttctggatcccctccctcccagttaacctggatccgtacagcggcaaaactttttacaagcaaaataaacctgtgtgtattgatttctgagcctcatgatgtagatccagtttctagagattatttcttccctgggctagattgagatgggatgaattatggcagcctggggccacctggctcttctttggtttgcctcattgtctttggtttttgtttggttggttggttggtttttcaagacagggtttctctctatagccctggctgtcctggaattcactttgtagaccaggctggcctcgaactcagaaatccgcctgcctctgcctcccgagtgctgggattaaaggcatgcgtcaccaccgcccggctttgcctctttgtctaagcgcggggcaccttatgg

SEQ ID NO: 33193 - DNA, 1167 bp, Mus musculus
caggttttggtgactgtgtgagtaatagggtgaacattgacctcaagggaaaggtctatttattcagatattcctggtctactgagaagaaatagaaaatagtactcctttcaagatcgtagacagccaaggatgccctcaacttgctggctacttcaaaaactgtgaagatcagagcagtacagaaaccatggagctaaagtaatttctaaggtcttcggaaatgagctggggattagagcttagtggcagaatacttgtctagcatatgtaagaccagaggcccagttctcattaccagaggggaagttgggggaagccttccacatttactgttaaatgtgaccatatctacctgtgttggaaggtagtacccctctggtacccacgggaatggtcagtcagcttgggagtgcaggtgagccccgctcctgtgctgggtgactaggtatcacgtgagtgcttggtgatctctgctctgacactacctgtgtgtttttggattcaggcgtgcccacactttaactgtgctgttcatcctcacctgtgcgctgggctacgtgactctcctagaagaaacccctcaggatacagcctacaacaccaagaggtaactgcttctgttcagagggtgtgatgtcctgtggagctctggccagccggggctctgcattttccttgtgtgtctgattgactggctttcacaccttcccctgaagctgtgtggtattccttgcccaggactgtgggaactcgtcacctttgagtggtagggatattttgctttagccttcagggtgactccctctagctggggtgcagaagccttgtgagatcgaccacatcatcacaccagcagctcccctcagacgtaaggattctcagattgtctgggatctagagccaccagcagtgaaccctgtgatggcacttacatccttgttgcattcaggttccgaagctagtccctagcatgtagggacaagttactccagagtactgacagacttttctgttgctcctctggttctctgggctgcatgtctgccctgggaaggcaggtcagttactgttagttactggttctgtgcaggtcctgcttgctctgggagggctagaggggaggcccgagagacctagtgaggtttccaggctgctttggttgct

SEQ ID NO: 33194 - DNA, 1112 bp, Mus musculus
agggagtgagggaaatggcaaggcaggaagcccaggacagcctggccccagatgcacccccacaatggtgctgcctgtccgtcccaacccatggcttgaaccagacctcctgttagagctcaatgccaagtcttggggccccttcatgttgtctgtaaaccttcaagttagaacggtagctgttcatctgctacgtttacggggggacctgctgaggctgggggcggaagtcagggattgtgtttgaggggtgctgtctgtagggaaggagtggcaaagcctgacgggcgctgtctggccctcagacgctcatgatccgtgactggtggatgtgcatgatcatcagtgtgatgttcgagttcctggagtacagcctggagcaccagctgcccaacttcagcgagtgctggtgggaccatgtaggtgcagcgggcaaggcacagcctgggtgggccccgccgtcatctcaggccccgtggttaattcctctcctttcctgacccagtggatcatggacgtcctcgtctgcaacgggctgggcatctactgtggcatgaagaccctcgagtggctgtccctgaagacatataagtggcagggcctctggaacattccaacctacaagtacatcttgggagttatagaagggaaccacagagcattgggcccgcaaggacaaggccttgctacttgggagggtggcaagcaaaacattagagtggtagagagtgactgctagtcctccatctggctccctggcttgcttctctcaagaggctgtgggcctgatctatccacctctcctacagcctaggttgtccttagacttgctctgtactctagaatgactctcgcccccaactcccgggagtcataatgtgtacccctatgccaagtttctctgctacctataagatttaagaaagaaaaattgtacctgaaatggtggtatatgtctttagaggccactgcttggtaagctgaggcaggagaattccttgagtacagaagttcaagtttagtctaggcaatccagggagacttctctccccccaccccccaaaaaaaaaaaaacacgcacacacacaggaaaagtgggagctgaggatata

SEQ ID NO: 33195 - DNA, 1330 bp, Mus musculus
tgtactctctgtgagtctctggttctgcctggcagatgcaggtgcttgaggtgacctgtcctgcctatagctgaccctctacttgctattgctagaattatagcacatgtagcctcttgtagaacgaaggtagccaggtgtctgtggggcctatgctggggctgctgcaggaacaggtggtgaggtagctctgctgccccacagggacatcaccatgaggtacaaggagacccggcgacagaagcagcagagtcaccaggccagagccgtcaacaaccgggatgggcaccctgggccagatgatgacctgctagggactggaactgcagaagaagaggggaccaccaatgacggtgtgactgctgaggaggggacctcagccgcgtcatgagcctcaccctcgtcactggccttgtgccaaggggctgtcccatttctcccttcctcgtgctccctgcttcagaggcaggggtggggggggcatccacactccaggaggggcacctgagaatacatgtttgtgtgcaggtaggtgtatgcacatattggctcctgacactactttggggccatgagctgaacagtgagcctggaacttgctctagagcaagagtcctttctacctggtcaacaaaggccctggtccatggtctcccttgtgctcaatctcagcaccggctaggggaggtatcttggtatctcggtactctttctccactctttatggggtaggcagaagccccatgagaccctgtggtcccacccacttacagcagcataagtgaaggatatcataataccaacatgtctgcaaagtggtgggtctagagtcagcactgagccatttcctttggagccttcctttaaccacgcaggactataaactgaatggtgtatacatgacagtcacagattggccttttgcggccagagagcccaacttggagacctgtaccccaggtgccagggtgctgtcaccatggctcccttgagcaaatggaacaaataaagtgatgatgaaggtgcatagcctctggctgccctttgccccgtgctctatgccttgcagaggaggggagtgtgtgtgtctgtctgtctgtctcctgggcagctacccgtctactacattgtttctcactgggtgtggggctggtgatcgctgaagaataaccacgagaaatgactgtgagccttgctttacggtcacagccattgggaatgcagtagcaaaccatttgtctgccaacaagttcaattttcccacgaatgcaaatgtgcaagtcatgcccttagcttactaaggcaacgggtcgtgtctttggatttttga

SEQ ID NO: 33196 - DNA, 1257 bp, Mus musculus
gttcccatgggcatgtggcttgtcctaaactcacagagaccttcttgtctcttgtttcccagggctgagatgaaaggcgtacatcagcatgcttggccaaatgcatgcagcaacacctgagaacctatcccatggagttggacatggcggtgcacaccttcagtcccggcattcaggaggcagaggtaggtggatctctacagttggggtctacatagtgagttgaaagatagccagggtatgcagaaagattctgtctttaaaaggaagaaaggaggaggggggaagaagaaggagaaggaggagaaggagaataaggaggaggagaagaaagaagaaaggaaaaaagaaagaagggaagggagggagtgaggaagaggaggaggaggaggatggaataatgagactatggttgatcttttatttttcctcttatcaaaagatttaactttgctctttgtctcgggcctgagttcgtaggcgcagccagcctagcgaggtcaacatgccggtcgccagaagctgggtttgttgcaaaacctatgtgaccccacggagacccttcgagaaatcgcgtctcgaccaggagctaaagttgattggagagtatggactctggaacaaacgtgaggtttggagggtcaagtttaccctggccaagatccataaggcggcccgggagctgttgacgctggacgagaaggatgcctctgtttgaaggcaatgctctcctgcggcggcttgttcgcattggggtgctggacgagggcaagatgaagctggattacatcctgggcctgaagattgaggatttcttggagaggcggctgcagacccaggtctttaagctgggcctggccaaatctattcaccatgcccgtgtgctcatccgccaacgtcacattagggtccgcaagcaggtggtgaacatcccatccttcattgttcgcctggactctcagaagcacatcaacttctccctccgttctccttatggtggcggccgtctagggcgaatgaagaggaagaatgccaagaaaggccagggcggggctggagctggtgatgatgaggaagaggattaattaatacttggctgaactggaggattgtctagttttccagctgaaaaataaaaaagaattgatactaaaaaaaaaaaaaaaagatttaactttaacttttaaaagatattttagacttattattttgtgtctacatgtggtttatatgcttgttatatatgtctgctcacct

SEQ ID NO: 33197 - DNA, 1193 bp, Mus musculus
ccttacccggttagagttaatgacatggcctgatggccttgtaggtcctcagcgagcaccaagccacaccctgcgtgactctgggctcaaagatcttcacggacaacactgactggtccattgactgcttcccgctctcagagtctgagcctgatgttcaccctggtgaacagcagtgtcgaccttcatcaccacagaagggtcgggcaaaggatgctggggccaggcgcaagaagccagggtaggcgcaagcttctgattctgcttcccaaaacttgtccctttcttccctaggcgtcgccttggacaggactaccaccctggctcatgctatcttgcattatgcccagctttggctggaactgactaggatactcctcaggtctttcccatatctccaggccaggtgttcgtcagcacaggcactccagcacaagcggactgagggcctcacgaactcttcaccccacagagacccgggatatcttgccactcctaagttcccgaaagcttcttccctctggggaagtccttacacagcaggaaggtgtgaaggctgagacgtcagagctcctgcccgtgatcccagagtgtccctccagactgtgtcttggtgaggactcactgggtaggcaggagtacaaggtccaggtaagtgtgatgctgtggccggagacactttgatccgctagcccacatggctcttaggccccagtgttttctgcaggtgtgccggaaaagcgtggacctgagttgccccatggtggccctgtcagtccagaacacagccgagagcagatacggcttccgcttcctctgctaccctcccatcactgaggaattgtgtcggcggttgtaggtcagccaggccaggcaggcagtgacaacttcataatttattgaaccaaccattgcttgcaaagtaaagcacatttctgcatacctgagagttgaaaatgattcgcttggcttttacagagggtatatggtgtcccaacagaaaggaactgcccccacataaggaaacctgcaaatcttcccaggatgcttgcgcaattttgaaccctaggataagcaggctcagaatttgggccatatagatgacccagagtcctgggatatctaaagggtccagccccagctccacctacttcactgtggccccacctaggccaagagatatcagcaaggga

SEQ ID NO: 33198 - DNA, 1214 bp, Mus musculus
aggctgaacccgtctctcctccacaggccagacaggtcgatttgtccttgtgcagcgtcttagggagaaggaacgacagctgctgccacaggagtgtccagtgggagcccaggccacttgtggacagtttgccaatgatgttcagtttgtcctgaggcggacagggcctagcctgtctggaaggccctcctcagacaactgtccacccccagaacgatgcccagttcgtgccagcctccccccaaagccatcggcgataccaggccgtgagccacgcaaagcactgaccttcaaccttagatgtcccaagctggtccccagcccatctattcctgagcctgcagccctggtaggacccataccagacggctttgcagacctgcaggacctagaactcaggatacagaggaacactgaggagctaggccatgaggccttctgggagcaagagctgcaacgagaacaagccagggagcgcgagggacaggcacgcctgcaagcactgagtgcagctactgctgagcatgctgcccggctggaggccctggatgcccaggcctgtgccctggaggcagagcttcgactggctgctgaggcccctggtcctccttcagccacagcgtctgctgctgagcgcctacgccaggacctagccacccaggagcggcatagtctggagatgcagggcaccttggccttggtgagccaggctctggaggctgctgagcacgctctgcaggtgagcccagatctggacccctgtcaacttcgctacctgctacacagccagtctcaactctccacctgctgcacaggcagtttggggatctgttagagaatcagaccagggagcatactgtatatggaaaagaaggttgtggcctcgtccctgaaggtcctctgtacccccaggcccaggctcaggagctggaggagctgaacagggaactccgtcagtgcaacctgcaacagttcatccagcagacaggggctgcgttgccgccgccacctccacagctggatagaaccatccccagcacacaggtcagagtaattctgggaagaggtggtggggctacccccagatctatctcggctgacctgctttccccacaggaccttctgtctccaaatagaggagaactccagggagtcccccagagccacatcctagtgtccagcctgagtcccgagggtatgtttctctccctacc

SEQ ID NO: 33199 - DNA, 1170 bp, Mus musculus
cggggtgggggggcgtttatgataccataggtaggacagctgacctgtaacattcccgttgtgttgtgcagggactattagtgtccactctggaaacagagtagtttcagtgtctgttctgatcatatttcacatgtcattgaacttgttacaggaggtgggaagggttgctatctgacttctgttttttagctcctgtttctcttcagcgaaattctgtgactcaatccagagaagagtccaggctcagagacaacccgcagcctggggcactaccctcagagagtgcatctggtggattcgtgggagacagacaaccaaactcagggctgagctgtgggaatagaacagctctgtgctgtctccctgcccgcattgcccagacacctgtgaggtcagatccctcactgactcctcgctcaggtctgtctaggaccctttcagatgagaacaggcccagccggacacacagcagcagcccccaactcaatggctccaatgtacgggttagttctgcctcgactaagatcgtgactcattctagctttccatcgaaaaatacagcttctgggcttcctcagagaacaggtcccaggagacctgatttctccaagctacccaggataccaaagatccatcgggatggcaataagagcacgcaggaccaggccccagccagcggccacattgtcgagctccctagcacttgcatcagccgcctgactggcagggaaggccctgggcagccaggacgaggccgagtcgacagtgagccaagcagcaggggtccccaggagactggctcacacacaagtggttctcgacctcctgcgcccagctcccatggcagcttagcccatctagggccctcaagaggaaagggcattgggtctagctttgaaagtttccggatcaacatccctgggaacactgcacattgcagccagctgtccagccctggattctgtaacacgttccggccggtagacagcaaggtgcagaggaaggagaccccgttccccctcttctccatcaagaagccgaaacaactcaaaagcgaaatctatgacccctttgaccccactggctcggactctagccctcctagcagcagcccagagagtcttggtccaggcctcctaccctctgagatcacaagaactatctcca

SEQ ID NO: 33200 - DNA, 1202 bp, Mus musculus
attatacagtcgtcatcttcttgtgattcttctgtgagacattgctcagttacctgtgacattcagtttgtataatttagaaatgagtgacgccaaaagtagtgggtggcgtagctggtccttgttcatattcctgccatgctgtaagttgacattgaagccagcctgtgtgctgtgctaatggacagttcattggccctccctctggggcacagggtctgcgtacccattctttctgaggcagagactgctgggcgtagttctctagaggctccaggctcacaccttgagaccacatgccctggaggaagttctttggcctctacctgagagcacagtggcgatctcttctgttgaggctcatccatggaaagacactctgtggttctgaaactctgtaggtttctaggaagctcgggggacctttttgaagtcactttggcagcacagatagctgtcactggtgtccgtctgctggtgtggtagaatgttgtctctgaaaaaagagactaatcttggggccctcttccattttttttttttttttttcagaaaagctgcagcgttagtacagagagcccctgtgacaatcacaggctgtcctccgggagtgtgtcagtcacagctctcttgtcccgcctctgaacacaaacgccagctctacagtgggtttcattattgctgccatttttgtgctcagggctgtctgggacacacatactaccccagcacaagaaggggaggggtatttcccccagctacataggccaggctgctcccctcttctctgcagctctgaagtcaggcaggtcatctgttggacatgctcagactggctcttctcacagtggaactgacaaaaagcttcaacaggaagaacaaacctgccttaccacatcctgtgtttagtggcaatccttgcagcctggactaggctgcctgccattgtctgctgtctctccttctacagacctgaccactaagcaagttcacctgggagctctcctggacaggagtcaggagttaaccaaccagtttgtctcctgccctattgatctgtctggtcacatatttctagcagggtgaacacactgatgttctgttatagccagtgctgtcttccaaggtcctgtatgtctggacccccactcctcccatagtgccttcctgactctggcctaccaattctatctacatggcta

SEQ ID NO: 33201 - DNA, 1187 bp, Mus musculus
tttggtgaaattgctatgtacttgataatggcctacttcctccagttatttcagtattttgcaacattattagtcataataacttgacactatttaactcttcttcaggctttccttcagtctgaagagttccacgggcactacatatgtttggtgatcatatatacatgcaagtaaaacagtcatacacaaagaattataaaattttaaaaatatataacaagctgggtgtagtggaatacacctttaatcccagcacttggaaggcagaagcaggtggagctctgtgagttccaatccagcctagtctacatagtgactaggccagagctacatagtgagacctatctcaaacaaacaaacaaacaaacaataaatatcaatatattagcaaatagaacccactaactgtcagttgggcacagtggctggtcttgtactgaagctggtgatggaacaggccttgactgctgtgtgaccagagtcacatggctggtgggaacagaccagagggaagtgaagaaccctgtcaccatctggctcctgggtgcacagcccagcatacataatgatggctttgataaatgtgctaaacacagcagttagtccctgagctctggtaccctggagggttctaaactagaactcaaatcttttgaggactggccctcctggcacctcattagagtcctataggaaggctctgttgtgggtccctaaatgtacaaagtaggagggggagggaattgtggtgaatagctcaggtgtcttctttttacgtgtagaaaaagtgtggattttcttgagattggctgaaacataaacatctaaacataccaactggaacctaaacactaactggcattactgagtttgcatcctctgaacctgtactctctgagaaaataatcccttgccatcacagtttgatttgcaagcagtcctgcttgatcacaggataaaagtggcaagcaatgcttgtgttggagtggaaagaccatgctgggaccctttctacttggggtgtgtactagggccatctgagaagcctcactgaggggctttcaggaggtagtgcaggagttaatttaacacggctggaggggtcctgagtctgccaactttcacattttatttggaattttcaaatttagcctagctgaagcaatttgttacaggattttctg

SEQ ID NO: 33202 - DNA, 1167 bp, Mus musculus
ttgaaaaaaacacaaacaaacaccccaccccaccccaatgggagatagtcagagactctaaagtatcacagagtagcattcagggattggtctttttaagtatttcaggacacaacacagaaccattgacgttgctgtaaagcataagtctctaggtataaatcttataaaatatggtggactttgtgttgtgaaaactagaaagtgctgataaaggcagtcagcaaaaaccctggatacctcaagtcagactgcctcacggaggggaggctcagcatacatagtgagggagctaacttcccaactgacaggtccagtgtagtcagaatttcaacaggattctctaggtacagaaagactgattctaaagtttatatgaaaggatgaaggaaataaagtagccaaagcagttttgaaaaagaagtctcaaagttaggtgtggtagcacaggcctttaattccagtactcaggaagcaaaggcaggtggatttctgtggatagaggtcagtccagtctacatagtgagtttcaggccagccagggctactttatgagactgtatttcaggaaaaaaaaaaaaagtagaaaaaggcaagtctgaacttgccaagctccactgggcttctacaggttctctgttgctgtggtcagcagctacagtgtatcagcagggaggcttgtacaggttctctgttgctgtggtcagcagctacagtgtatcagcagagaggatcagggacctctgggaactgagcagagtccagctgccaaccccatctttccaaccgtggtgctgaaccattgaatgtttctggacaaggaatgaactttgacccaaactacactatagattaaagggaattcaaattgtagcaaagatctaaccatgagaggacatgctgtgacattttagaaggaagcacctttgtgacaacctagggttagagtcagagtttctaagacatggaaccaaagttaaatactgctcagtagtctgggctttgtgggttttttaagctttgacttccactagggcagcaatctcaacctgcgggtcataacccttgggggttgaacaactcgccttacacaggggttgcatatcagatatttacatcacgactcataacagtagcaaaattagagttatggagtggctcgaggtc

SEQ ID NO: 33203 - DNA, 1236 bp, Mus musculus
cggttgtgcctgtgcatgtgcgtgcgtgcgtgcgtgcgtgcgtgcgtgcgtgcgtgcgcgcgcgcgcgttaatttgaaaactaaatagaggtctatagaaaggcagagaaggagtgctgcccactgaagggttggcactaccctttagcaatgtcctcatgtacctgaggggcttggacttgggcttggggatggagcatcatgggcttccgggtcattctgtgctctcatcctcatagcctctctttgcccaggtccccagtctcctcctaccccactggcacctggccaggagaaaggtggtaccaagtacaactgggacccttcggtgtatgacagcgagttgcctgtgcgctgtcggaacatcagtggcacgctctacaagagtaggctcggctcaggtgaggcagtgcttggctacaatcattccatgttaagtaagactttgttcttttgtgtgaccctcttagtaaactgggccaaggaagcctgtcatgtgcaaatatggtagaggagaggagacagatgtgcaaggactgtcagccctgcgttcatggatccagctcagaccactcatgacagaggatccctgaagtgggctaatgctcactggagacccagcacagctcacagtgaccatggacagtggatttgagatgacttgccaggcagtgtattgggtgactagaggccatgcagggcagagaaattgaaaaggcagtggaaggaactgatgtcatcaaggcaagacagcaacaggccttgatagattctaaggaccgaacctttcatttcaggtggccggggccggtgtatcaagcagggagaaaactggtacagcccaactgagtttgaagctatggcaggaagagccagcagcaaggactggaagagaagcatccgctatgctggcagacccctgcagtgcctcattcaggtgtgtgctgggactacatcagccttaggacctggaacatggcacaagtactcacactatgaccagagcagttcagctgccctctagatgttcttgtcctagctgtgtgctggcattgactcagagaattaccatggtgggggagaaggggcagatggggtaacagtaggcacagaagagagacacctcagatacatgggaagagaggtagagagtcaagagcagggtccagccacacctgccttgcttttgctccgatttcattgtaaggaaggaaactttttctttaggtttattat

SEQ ID NO: 33204 - DNA, 1149 bp, Mus musculus
tattagagttttagttgtatatttatatatcagaagatttctaatttcttcttgtaagtttttgaagtctgataatatccaggtagctcagtgctagctgagttcctaaattaggtgtgccccatgtatggattggttatggacaggatctagacaggtacaagggtacaggttggtcagggctggattaatggggctggcaggactccagttggcatctttgggtattttccttatgccaaaggcttccctgggtattgggcattttagaatgctgggcggcagacagaactgatagagattggcaaggccaactacaaaggatccatagtagcaggcagcaggatacagaagaacctagagaccctgtggcaggaagcctcagggacctgacacatctttgtagagctgctctgaagttgctgctggtagacctgccccgaggagtgaagttcatgttgcaggagcggctgtggcaggctgatgtgtttttcaggaggaagagtttctggggaaggatgtcatggagacctcagacagtggacacaagactgtaggatggcctgagctatggcagtggagagggatgaggctggagtctgccatgtcttgatcgacaaggaggtgtcctagacctatgggacttgcagcttctttgcaaagggagaaaggccagtggtggagtgggaatgggtggttatggtggacgtttttgctgcatgtgaaaggctttggtggggaagggtagagattccccttttctgggagaagcaagtattttagactggactagagatgtcagctgagcattaacagaagtattaaaatgtctgggtggacacgggcgctttaaggctcacaagtaagatcattgccttttgtgctctcccatcaccgtgtgtgaaagttccaatctgttccattcttttgtagaagtgaccacagtgactgtggccaacgtggggtcctctgcagataacgtcttcacaacatcagtggcaaacgcagcatcgatatcaggacatgtcctggtaagctgttcttgggtgtagttcagcgtgcctggcaactctctttagagccagcccttgactttgccgcacagtccatgagggtgatcctcattctcaagaccctctcgggttagat

SEQ ID NO: 33205 - DNA, 1111 bp, Mus musculus
caaaggccagttcaagtgtgacatgagaggggcaagagagtcatccaaggcaggcaaccttgcaaaggtaacgatgcagaaaccagccttgctttatattgtgacatgagctgctccgtgctgtatctcctagtcttcctatgcagatatcccctccttctccatcacttagttttccatttttctccttctgttttctcacacaaagagcacccgattctcatgttttatgacaaatggagccttgagctgagctgtatcaccctgtacaggtgataccacaccaaactgcctcctacaatcccaccacacaccccaccctttgaccttcctgagtgttgaactccctaccaattggagctcttatatgttttatgcttgtacatgcgaatccttggaagaccatcattttgccatgcgtcttgtttcgttctttccagtgtgaagctgcaggcttggcattgggcttttattcagggcacatcagagctgaagcttaactctgggtgggtgttcagaccgttggcactggaacgcagtggtggagaacccttgcttccgcgtgttttctgctgtacctacctacctgaagcctagatccagtcacaggagtgagggaagcttcctagagctttaaaaaaaaagatatatatatatatttttatgtgtatatatgtgattgcaggtgcctgcaattcctcttggagctagagttacacatggttgtgaggacctcacataggttcttgggtcctctgaaagaacagcatgctcaaaatttctgagccatccggatctcttcccagagttgttgttcttctttttctaaagttaatttatttaatgtgtgtggctgctttgcctgcatgtatctctatgtttgcttgatccccttggagtcagaaaaaggcttcggttcctttggaactggagttatagggagttgtaagccacttatgtgggtgctgggaattgaatctaggatctttggaagagcagacagtgctcttaactgctgagccatctctggtccctttcctggagcttctttctctttctttctttctctctttctctctttctctctttctctctttctctctttctctct

SEQ ID NO: 33206 - DNA, 1152 bp, Mus musculus
accgtgtgactatcaacagatacaaggcagaaattcactgtggatataaaggaataaatatttttttggtgtgacaaaggttatagctaccctcttctggtaggacttttctttcttgcttgcttacttgctttcttgctttctttctgaacaaggatctcttatgtagcctaggctaatcttgaatttataatcctgcctcagtctctcaaatgctaagattataatgttttgtatgtttgttttaattctgagataaggcctcactatttagttttgacctgtttggcctggaactcatagccatcttcctgactcagcctcttaattgttggattagtggagatagccataatcccagactggaaactgggtgttttatgtgacttaatttcaagaccattttctcccctagaactccctttttactgtaaccaggcacacaacaacagcactcccatgtttgtggcagctgttaaacaaagcatatagtagggatgccctgcaggtgaggctgcacgtgtagtacaatcacatttctgaaatttgcttcattaaggaacattgggaaactggatggatggatggatggacaaacactggtctgagctggctaagaccagtttctgttccatattgctagcactggaccctgcctgcatatcatctgagctcagacctcctcatttagcctgggactcagccatggtgaaatattgactacagcaccttctggctgcccgggactcaggttagccacaggtgtgtgtgtgtgtgtgtgtgtgtgtgtgtgtgtgtatgggtgtgtattcacccagggtaaactgacattatgccttggttgtgtctggtgtaaaccaggtatgccatgggtgtaccaaggtatacttcaggtatgccttggaggtgctgaggagaactataagtgtgcttgggatgagctgaatgtatgctatgaatatctggagtctagcgcatgccagaggcatgctatgaatgaatatgtggtaagctgcaggtgtgacaagatgtaccctaggacacactgggtgtgtcacagctatacctggtttaaaaaaaaaaaaatcccatcaaagccaacggactcaaagttccagaaagccaggaatttgagaactggggaagaaaagc

SEQ ID NO: 33207 - DNA, 1099 bp, Mus musculus
cactggaaaaacaggaaacagcagggccctgtcctgtaccctctttattccccaacctcccggctgaggcccaatctctttttcctagaaacaacaaagtgggtcagaactggagaagctcatgagcaagatcaggagggccgaggacagctataccagccaacacacttcaccagagtcagagggggcgccgcacctgtaatgggcccaacccaaatgcatggagtattatttttatatgtgtattattttataccaaggacatagatgggctgggtgtaactggcttacctgccctccaggcagagtcctgtgtatgagcctagctacacctgtgggtagctcttttaccacccgagccctacccccaacccaatactcttcttccaaaaccaaggccagcctcagccaaacctgtacctggcagtgccagtcccttctcaacctgctgccaaggccccaggactctcccggtgggcaaggcctcttcccctggtcttcttggtgcacatgaaggtccttgttccttacaatgctgggccccgactctgcagctctcccttgtgttgcttgtttctacattcacgttttcctgcatccgctgtaccccaattgcaggatgggcctgagccctcagctgaccagcctggtgtccttgcctacatatttgcccactcccttcacgctgctagcatcccaggaacaacctggtcaggggctccaggacaggaggccttgggtgacctgctggtatagagtatgctgtattctttcttctttgagacctaagaatgaaccagacataggttctgacttcaaatgtcccatcccacccaaagagcctgtgataacagatgtctctggctatttccaccagcctgttcgctggtgtctggtgcgtttcccagctctggatggagccccagacccagagatgagagtggggactccacagctatgtcaataaaccagatgtctcctagcaacttagatatctgtttcttggggtagaagtgctctgacacccaaactgcctcttcttcctgctccttttctctgggatagtgcattggccctgaactctgaatcgtcatcctgc

SEQ ID NO: 33208 - DNA, 1867 bp, Mus musculus
gcccaggctgtggcctgtgctgaggcgggcgtgacgctcatctctccctttgtggggcgcatccttgattggcatgtggcaaacacagacaagaaatcctatgaaccccaggaggaccctggtgagctaccctttcaggtcacagactgggtggggtgggggaccaagtgagggtggggtcagacagctcaggacggctctagggcctttgtggaacatgcctgggtctcctccaggggtcaagagtgtcaccaaaatctacaactactacaagaagttcggctacaagaccattgtcatgggcgcctccttccgcaacacgggcgagatcaaagcactggcgggctgtgacttcctcaccatctccccgaagctcctgggggagctgctcaaggataacagcaagctggcgcctgcgctctctgtcaaggcgggtaaggccaagggtgaaggttggctagccctgaggggagacgcttagcttaggcctgagggacagtggtgagtccacgggtgaggcaggcatggagagctgtggtatcccccagcccagaccagtgactcggagaagatacatctggacgagaaggccttccgttggctgcacaacgaagaccaaatggccgtggagaagctctccgacggcatccgcaaatttgctgctgatgccataaagttggagcggatgctcacggtgagttcctgagtgggtgggcagctctgggccttttctttcacccaggggcagagtttgggcagagttgaaagttactgtaggagcctggcatggtggcacacgcctatagtctcatcactttggagagtgaggcaagaaggtcacattcagtagcctgggccaggaatggtaggtagcataggcctttagtccaagctcctgagaggcagtggctgtcctaagaacaacaatgatacacaaacacacacacacacacacacacacacacacgggggggtgggggggtttcaggagaggatatatgtgtggtgggggaggggatatgaatacatgtgtgaatgttttttttcttgggaccttggtgggtcttggctggggccctcccatgactctggctctggtcatttccaggaacgaatgttcagcgctgagaacgggaagtagtgcaacacccgaggccccagtcctgcaccgaggctgaccccagacctgcactgcctttgagctgggtcctaattgcacatggcttgtgacgaatgaatcttgcattttttagtgatcggagaagggatggatcataggattctgattttatgtgaaattttgtctaattcattaaagcagttgcttttcctatgctgtttcatttcaccgtctttgtcaccacccgcctaagtaccagttgccccggtgttggctgtgactgaggctgagactaggagatgaaccccaggccatcagcatgatgtcagcagttgtggtcctcacctccatcttctaagtcacagctgggacgtgagatggcagaggtcattgtttttggtgctgggactctatccaactctggcatcctgctccctgaaatagaagtagtcccccccccgcccccccaatcacccaagaggctagtagtaccttggcgtccacctagcctatgccaggctggaagttaagagactggctcagggtcttaactaaagctggagctcctggcccatcatggagtccctatgccctgcctgttcttacagggagcactagcagagtttggagacgaatgctgggctctgctcctggaggacaggcaacggctgaccagagtgctacagagccaggcctttccactgcccaaggtgtccagcattgtccttccctcatccaagtgttctg

SEQ ID NO: 33209 - DNA, 1624 bp, Mus musculus
gtcattccctatgctgctacaacagttctctccttgcctgggtgatgtgtgctaagtgtaagaaggcaaacacatcctggaacctcagccccttacctggacatcatgggaccctccaagggaatccttccagaggatacgaggatacctgcccatctcattttggtcacatataccttgatgccgtagtggcttagtccctaaaagatgtcagctttgcctttaccccatctccccctgcggatttgatctgcctggtccctggggttggtcctttgggcagtagggcattggactgggtaaagccactagctggtctgacacaggccctgcccttgcagccttcagtgtacgagctcatcagagcacctggctttgcccgcctaccattgatcgttgaggactttgtgaaggactctggtgctggcttcagtggtgagttcaagttggtgccccttcacttagatgggcgaggctacttgctgtgtgttcacagatccctaatgggtgggagtgggtctgggcctggtctttgtgtgcctaaggcttgtgccttttgccttagccagtgagcccgacgctgtgcacgtggtgctggaccgccatctggtcactggccagaacgctaactccacagttcctgctgtccagaacctgctcttcctctgcggcagccggtgaggctcccgggcaagggtttgggcgggttcccgctttgtgactggctccctctgctggacagttttgtctgtgacactctgtctgctggtgctgagcctggaccatgtattcatcctataggaagtaagcttggatgcagtcctggtggcctagagacaaggactgaactcaccatggtctcctgtactgacactcgatgggacactcaagcctccatcaggaccttgtggaatgctggaagcctccagggattaatacttgtggactgtcagtcctaatgtagactaggcaccctttcctccatcccagcacagtgtcttggctggccaggcagtccctgagaactccagattgacgattccaagaagaattgcccacgggatgtagtcagctgtggggtctcaggatggggcgttactcttctgtgggctttcggctatttctgtcccttccactgttcatgggaatcgtgtggatggaccacaggctggagcttgctatgaacttcctttctcgtctttccttttttttttttttttttaaaaaacttgtttatttttatatttcctatgcaatggtgttttgtttgagcatatgtctttatgagggtgttggataccctggaactagaggtacagacagttgtgagctgccgcttgggtgctcaaaattgaacccaggtcttctggaagagcagtcagtgctcttaaccattgagccatctctccagcctcccctatcccctcccccttttttgagacagggtttctctgtggccttgcctgtcctaaaactcactctgtagaccaggctggcctggacctcagagatccaccggcctctgcctctgcctcccgtaggctgtgattaaaggcatgtgccatcacctggctgtgaactcatttttgttgttgtttgttttttttttttaaagaagacttac

SEQ ID NO: 33210 - DNA, 1099 bp, Mus musculus
cccgtgttccagaggctctgggctcgctgccaggtgccccacttctcctggttcctggtcgttttacgcccagtatccaacacttgccttttgccaccagagggagcacttctctgctcctcaggtcatcctggggtcagagtcacttttccccctggggttacagaagagcctcggcaagtctccatgcaggtattgacagggtagtaccaagggtggcgggaggtggtgcctcagcagacaggagggcactgaaatggttctctgtctaggtagtgcatatggctggactagagctgagaacccttctggaagaatcagaggcatcagtaagccctctgctgtgcctttcacagagcggcccccccagcttcctacaacctgtcactgtgcagttgcccctgcctcctggcgttacaggtgaagctgcacgccacaggactaaaggtgggtgcttagaggggggaatagcattcagaggggcttcagccttctgtcattttccatccaggcttcagtctagaccgctcccacctgcatctgctctaccgaacacccctgacaaccacctgggatgatatcaccactcaggtggcactggaattcacccacctgtatgcacgcttccaggtcacgcacttctcctggtcagtgtcccctagcttccgcaggaccccttctgcccttcctctgtatggccacacctcaactctggcacttccaggtactggctctggtataccaccaaaacctgtgtggggggcctggcccggaaggcctgggaacggctgcgactgcaccgtgtgaatctcattgcactgcagaggcgccgagaccctgagcaggttctgctgcagtgcctgccacggaacaaggtggggcagcaggaagacagaggggtgacctgaaggccaggctgggtacaaagctttggcctctgatccctggtgggtgccccacaggtagatgccaccctgagtcggctgctggttcgctaccgtggccctgaaccctctgagactgtggagatgtttgagggtgagaagttctttgcagcctttgagcggggcattgatgtagatgcaggtaggtctctttt

SEQ ID NO: 33211 - DNA, 1184 bp, Mus musculus
ggggtttgaacgctacgcccgtgcccgcatggatttcgggagactctcgtccatgttgcagaggcccctggcacttgaaaaatccctcgtttttgttgtggggaagacatgacagggaaatgtcttccttccggtgcacccttttcgtcaatgggaggcgtccccgtgcgccgccgtacgcgtcccgggggcttctgggtagcggtttacccccgcccactgcgtcagcgtcttcctttcgccgccggacgccgccgaggtcgcacgcgtgaggtctgtcccccgcagccgagtgagtagcctggccgcctgggccgcgaacagtggtggggactgcggggttggatgacggccgggaggcgagggtggcgcagcattctgtgaccggaggcctggcgcctcacgtggcctcacttgctgcttaaaatggagggggaagcagaaggcctctcggataacctcaccactgtacccactccctgccccatttagcatgcgctacgtcgcctcttacctgctggccgccctcgggggcaactcctctcctagcgccaaagacatcaagaaaatactagacagcgtgggcatcgaagcggacgatgatcggctcaacaaggtagcatgctgcttgcttggacccgctggatccaaatgtctaccagcggcggtccttatcctattatgtccggattttacttttaagaaaaattgtagataacctgttgaaaaggatggatggaggaggcctacacccatcttagtcatagttttctctttagtccttgtgcaatcgaagaagtcagtcgtgataatcgtgcttttatagaagtttaatacaactcatgttgtgtgatcttattttttgagacaaggcctcaccgtgtagctctggctaacctggaactcactgtgtaaaccagttttctaacttttttttttttaaactagctttgcagtaaaggatgtatgtgtgtagatgccaacagaggcatctgtgtctccttggacctatagtgctgggactctaggatatgttagagtccaagtctttagcagtggagctatctcatcgccccttaagattcttctagaaagggttcccactccacccacctaggttgtacatagaacctaaacttcacagaacggtagaattttagtatctaaaacttcctttgccaaaa

SEQ ID NO: 33212 - DNA, 1535 bp, Mus musculus
tgcctccaacatctataaagtggaggtaggtgggttctcagcaaggggcggggctaggccggactggtcttcaggcagcctggcccaccacccttctctcccactagggtggctgtatcactaagctggagaccttcattcaggagcacctgcgggtcattggggcggtgggcattggcatcgcctgtgtgcaggtcttcggcatgatcttcacctgctgcttgtaccgaagcctcaagctggaacactactgaccacgatgatgtcaggccgggcggccagccttgcactactgaccacgatgatgccaggctgggcggccagccttgcactatgtcccagccccactactgaacactactgacttagactgctgactgccagaggtagctaccctcatgccatcgccatgaccccccctggcatgccacctcaggggcatgcaccttcaagtgcctttcactgcacaccaaagtcccaaagctcgaagcagcgtacttgccccagcattaagaaggggggggggggtggggggttcaaatgccagtgttgggctaggcctggctagtagaatagggtttagattatttgacagaagtgcctcttatgcagactgcttccctttgggtagctgtgatctgcagtaagtctggggagaacctgagtacaccactacacgttgggtaaaagcaggtggggcctttctggttggattaggcacccttcatgcctgctaccaggaactctcagatctgcttgccccaaacaaatggtgtaagctgagggaaactccaaccccacacttgatgctctgtcctctccacacaggcctcttgctcctaacagctcagccctggccttttctcactactgatagcatcatgtaaatgctccatgttcctgtacactgtctccttttggagcatctctgaatggagcatggctgttttcatctcactgctgtattccagatgctgcccacaaatgctcctgctatgtaacaggtgctcaataaatgtaaatgtataagcactcgaatcagcttgctgacaggaccttatggtccagggtagctggagtactcacaagagtcaaggttggtgaagcccaatggcaattacagttagggtgagcactggtagctggaacatccccccagcccactgtggcctggacttgtccatgctcaaggaagagtctgtaggccttgctagggtcagagggcaagggaggcaccagggcctgttggggatgccctggctcctgtttctctggctttagctcatctaagcagctgagaagaggtcctaagctgattttgttccccacagtcttctgtgccagctggaggaggccactatgggttctctggactctagcctaaggcaaagcctttttcttttttttttttttttaaagatttatttattaatatatgtaagtacactgttgctgtcttcagacactccagaagaggatcttgttgcggatggttgtgagccaccatgtggttgctgggatttgaactctggacc

SEQ ID NO: 33213 - DNA, 1180 bp, Mus musculus
gcagggctcatggtcccatttctcctgcaggaatcgcggcgggaggcatgttgtcttctacccaactctgaaggtatgtgccatgtgctttgactgtcaactataatgctgtggtgggagtgagttttggccagatgacatcagtggtatcaatacttgccatctgcatttgaggtctgttctgtgggcttgattccaggtcacacattgcccccatgtctagggtaatttgggatatattgtgggggtagtaaggaaatgggtggagcaggtgcctacacctctgtctgcccccagtctctgcaggtgcggctggagctagccagggagcttggcgtcggggtctccatctgggagctgggccaaggcctggattacttctatgacctgctgtaggctggaaagcaacccccaagtgactggacttttctaagccatggagtgactggtgaaatataggccttttctctgtttaccatgagacagctgctatgggtccacacgcatgggtgtctcctagtccaggatttgaatcggaatcctttctactcactactcactgctgcctgctgtgggccaggtgaaaacgcaacccccatcccctaggacagcctggctctggactcaggcctcgagtgcttttcaaggcctgtgtgggatgtgggtttggaagatgtgaacaatcacagactcttctaaacagcccttctcagcatcacccttaagcctgacaggccctgccttcatactatgatcacctgcctaccacaaacacgggtatattcaaggtacctgatacctggagcaggttctacacctacccccactgggcttgatgtgaccaggttgtgcgatcatgttggaaactggcccagagaagctggacttacttctgtgaaacaccatgggccatagccctgactgtccaccagataacaggataggatcagcccatggggcagcagaaggacctgtgggctgagtgggacaggtatcatgagatcagaagggatctgtctatcttagtaaacagcaacaggctgatccagtgctggggagatgtccaagacttctaaggcaccaacaggtgaagaatggctgacctacttatttcttcactccttcattccaagtgccctcatcccctgctggatatgatctcaaggtagtgatctctggt

SEQ ID NO: 33214 - DNA, 1116 bp, Mus musculus
aggccaatctacagagaaagatccaggagagccaagcttaggcagtgaaggagttggaaaacagaaagccagtgacgatgtaatagtacaagggggtcatgttctagttcctgcaagcacagaactcagcagcttcagccatgtggctctggctctagagttaagaatggaaggaactactgggaaaattgatgcttgttagctggagctaaggaattagcagtgatcaagaagagaccagcatcactgaggtgaaatcttctggaaagtgttttctgggagcacaaagaagctgtgttccagagatacccaaggttgtacctcttgctgcagctggacttggtaatgtgtaagagtcactcaggtggtactgcttgtgaaggaatgaagggatcatggagagaagctgaggcttagcactgtgagaggccagggaaggccattggggaaggtgaagcctcagctgtagttgatggcctaggactgaaggggtcatgcaaaggatttgaggcttggcatcctgaagagagcccatgagaggctattggtgaagtctagttggagtggaataccccagtgtattggagatgtcagtaccatggagtgatcaccaagaactgcagccgtagtggagtggatcaacttgagcttagagtgctacagagggcagagctggaaaagtgatgccaggccttaggaggagtccaaaagttcaagtggaatcccagacactgaaacaagaagctgtaacattgaaattgccttggagactcaaagatgttaaagatgccagagccatgggatacatgctgaggaaagctgctaacagggagtggaaccagcccaggagaaagcagtttgttgcagtcaacaaagatgaaaaaggagtggagatctgaagaccgctttgacatcagccatggagatgcagagtttggagtttgcccagctggtttcctgccttgctttggggattacagttaattaagttgaatgaatctcagaagagaccttgaactttgggcttttaacattgttgcgactgccctagactatgaggactttgaaagttggactaaatgcattttgcattatgctatgtttacctatggcccc

SEQ ID NO: 33215 - DNA, 1153 bp, Mus musculus
ttaagatttattttatgtatgtgagtacactgtagctctcttcagacacaccagaagagggcatcagatcccatgacagatggttgtgagccatcatgtggttgctgggaattgaactcaggacctcaggaagagcagccagtgctcttaactgctgagccatctctccagcccaggtcaagcccttgtgtattgagaattctgcatcatctttcccctcagttcatttagagagctgccaagtggtgttaaggggtcgttctggaagagcttgaagcagccctgggccattttgggcctcagggttggcagaggcaaggccagcttctgcctggttgtgtctttatgctgttgtgtagctagtccacagacagtggttacattcatcatggtccaggagacaggataggacaattgttaatgaacttaacaggatgtcaaggccctgggagcagtggctgtagccctctgttactgtgaagctggaatacagggaggccagagctagcttaccttctctacctagtcagccatcttgggggaaatgggtggggccgacacagaacaaatttatcgttttcatagtggagtgcctacccctgtcatctagtaggcagaggtctaagatgctacaagttgtgtcctatgcatgtcacaggcacaaagcagagaacactgcaggtctctgtcactgagctgtggtgcaggaactttaagccaacccttggcacctcaaccttgagcactgtgaagcacaggcaggtagaggaaccaggctggagagaactgccctgtggaaacaggttcacaaatatagacgtgggccccaggatattgatgaagagaacccattacagagctgagaggctgtgggaagttcaaagactgactattgtagactgtaagcagaaaccatagagaacactgaggagtttgaggtaggagattacagtgggtgttgggatagaagaagggctagagttcagaccagagaggaaggaagttgggcaggatgcaagtgtgagctgctagcaaggcctccctggccatcttccctaatagtcaccatgaagtcctgtgacagacacctgagtgttgcctgctgtgctccatcagggatcgtggctcagatgtctctgttacattgctgccc

SEQ ID NO: 33216 - DNA, 1144 bp, Mus musculus
cctgccatgctgcactggggtctgagctgctcccatctgagcccaggcagtctgtggggactctgcagggaagcaggctccagccctgggactgggtcccatccaagttaagaaacagccgggctgtgaagattcaaataccttggaaagttctgttttccactgtagttggcacagtgattgaagataactagagtaggtggggacagaggtacacaggtgacaggcagaaaataagactctcaatcttcccagttgccccctgctacacctgcaagtacctaggccacgctggactagatttccagtttccagagagaagctagccccagaaagagccagtatgtcctgcctcagttttgtacatttcatgggtcagtcagggcaggcctgggggccaggtggctatgtaccacagggtgtactttatatgtagcgtcagctgtggtgcctgtgtctcctgattagagtcttggtctttcagggggtagtgactgcagcgactagcctcatcaccaccctggcccagaagaaccctgaggagttcaagacctctgtctcgctagctgtctcgcgactgagcagggtgagtccacggcggcgcacacagggtgggcttgattttctttgcttgcctgaatgtactactttacatttagaagcaggatatgttgcccacactgtaaattccagaataaaaattgcccctgcctgggactgagagttggctcaggttaagagtactggctgctcttccagagccctgggttcagttcccagcaaccacatggtaatgggatctgatgccctcttctggcatgcaccatatacactcattaatttaattaacttattaaaattaaaatttgcccctgccagtccttaacatgtttctttctctgttggttgagatccagctggctggtgcactccccactcaccttcactgcagctatgactggccctagctttgttagcggctctgtgtggcatacttattttatatgtgtctttctgtcagccttgtatgtgatccctttatttttgtttgaagtagccgttgctgcttttctgatcctgcagagaagtggctatcgatggaatgcagtgtagtcatccctgttccctcaagccctttgttcct

SEQ ID NO: 33217 - DNA, 2179 bp, Mus musculus
tgtgagtggtgaggccaggcctcaaaagtacggctaagattagcccggggctcagtgccactcaccctgctgctctctctctttcagatgtatagactcaccttgcgtaccagcaaagacaccgtctctcagagactatgtgaattgctgtcggaacagttctagtccgcagaccagaagatcaggctctttgtttgtgcgtctctcttgtctctctcgtttgtctttgtaccacactgcagataaacaccccttgtctgaaaactgccattcacggcacctccaggcctatgcccacagccagcccctgggtgtggagggaatgcaggactcagtttgagaagggctgcagcaggcctgccccgtcaaagaagggtgcctgagcctgggaaatcagggcagtcctgtggttcaacctacaaattaaagggaaattagaagtttgaacgaaagtggaaattttgttcaaattttattaaaatgccactggctcaatctcagaatccagaaacagcgccatgtgcttttagggttaacccagggctgcgtggctctgctggatggtgacagcggtggcttagaggtatgtgacctcatgggctaggcagtgtccatggagtttgctggagcactgcctggtgtataactgtttgaaactccatgccccacgcatggcagggtcccgtgcctaacaagcccagtgttcttggagggacagttgaaacattttaccacttttttgagatcttaggtttgcagcatggtgggcaattcctcttgactttggaagacatggatatcacccatctttgtttttaatgaatgtcctatccctatggtacattctggggacctgaaagctaagtgggcgtggggtggtaaggtaatgactgtgagacatgcttctctccagagggtcttgattggtgcccagtgttacatcctcacttctgtgaagcccttgtggctgggtggaaaagagagacctaagtgtggcagtggagtgacagtctggggcgagaatggcaacccaggcaggtgctgcgctaaggatgcactggactccctagctcatgggccatttaaccctttgtgggcattggactgtatgtacggcccatcaggggaagaacataggcagcgtcaggagctcaggcttggggccttgcactatgtcttgcagtaatgcccaggattgctatagactgagctgtatggggtcatctgtacgtacacagcagtgttgtgtcccttgcccactggagcactaggtgtggtcagttatgcacgggtcttttttttttttttttttgcctcagcctcaggctgccagcctgccatgtgggtttgaggactgcagcagggctctaactactcaagctcccgcagccccactctgtatagcccaggcaggtagtttccgaacaccaccacctgtgtgctgatccttgcgttccacgaagcccttggtctgcctatcgtgttgtgacccacactgccatggcacaggcttaggttccagatgatctagctgtggccacaatgagcctccgaatccccttgctccgtagctgtccattgtgtgcagtccacgcagtattgcatggaccacgtgggtagctcaacctgtgtggctgtggcttgtgtaccacgtgctgcccagtgatggtgtctgtatcagtaatgtcccagcccacgggagctgctggggcacaggcccactctccgtgactaccgggcctccattagtccagtgtgcttgttctcagaggaaaaaaaaaataaatgctaggacaggaaactggaacatgtgtgtggtttttgtggggagtgtcctgcatagtcctgagtccattccttgaggaattgagtacagcttagagccaaggaccctggcatgctacctgtctctcaattgagaagtacctcaggaagtgactgtcctgacccctaagtgtgtggctgcagttccacggaaatcctgtacctggaggctttggtctaagcacagggcctgagggctcaggacttcagagacggcccttgcctggagagtatggaagatggtggggttcaccacagactgcaaaatcctgggtgggagcagctcaagggctgctggtctttctgtcctagccccaccaaggacatgggcctccccactctcaggtcctgatag

SEQ ID NO: 33218 - DNA, 2164 bp, Mus musculus
ctgtcctggaactcactctgtagaccaggctggccttgaatttagagactctcctgttgccttacaagtactgggattaaagtcaggcaccacaacacctggctgaacccactctttttaaccaacctcaacttttgttttcagggatgcctgctgtctgcagccctggcatggtgccgatggccatgcccccaccagctgtggctcctcagccccgctgtaatgaagaggacctcaaagctatccaggacatgtttcccaacatggacagggaagtaatccgttctgtgcttgaagcccagagagggaacaaagatgctgccatcaattccttgctgcaaatgggtgaagagtcctagacccgcctgtggcccttggcttcacaccactgacccttggacttgtccacccagggctccccagggtcaccatccccacaagattccaatgaaagaccatccacataccccttccttggacatctgcgccgccccttcctacatatttcggggatgcatgtggatttttggttctaagcaggcagtcctcttcattgttgctgggggacagagttaggggacagttctctcctagtctctagctgggtgatggtggcatggccctgttattgcacagatcagtggtcctgtttggggacctgcatctcctgtcctcaccctattctggaaagcattcttacagaaagcaactgcctctgccaagatactagaaattgtacagcatccttctgagttgatggatggatggcatggagttactcagtccagctgggatggttgttgagggtgcactgagttcatgtgcacttacttacaggttatttttagaactttcaagctaaaagctccttccctcttctgatgttgtatgtgaacatgggcccctcagctagtcctggccagtgagatatgcttcccagccatatccagtgggtctctaacctcctgtctagcttatctgccactgtctggctaggcttcagccacagaaatccaacttgaatacagaaggtatccagacctggtgcttggttggccaggccccacattagccctcactgctggaggctgctttccacatcctcttgtttagtaccagcatcatgggtcttactccaggggctgttcttgttgatagaccttcatcacagagcccagagtcaagcgaaggagatgggtgggtgtggcactatgtgcttactactaaaattcaagcattgtgacactactgacctgcagtatactctgtggacccatactgtagcttggcttgagtgataaaaattcatgcttaaattaaactttcataaaggtagaggtgcctgtacctgaccagtggatattgtatagtgtattttaggttgcaaacctttgagcccgtgacctggccatacatgtatttagggagaaattgagtggtgccttgtgctaagatacagaccgtgaaagctttctcagaaccagtactgtcacaaggtgctgttaggaagctccagcattgccacagggttatggtgggacagttttgccttacattgccgttactttttgttttctgagaatctgcacacccggtttggatatgtgatccaccaataagggcatgaaggtgactcctagcagtttggactgttgtgaaggacttcaaataagaaaattagtgcttcagtttttggtctttgcctcctaaaaacgcggtaaaatatcctacttgctgttatctacaggggtgctttttgtcaaatgtattgtttataagtatttatttttgtaagcctaaaggcagtatgtggtgatggtgagcatgggatggtggtaacaagcacttttctttagttgtaggtctttaaaccttttaactgcaaaatggagaagaaagaccaatgtttattaaatagattcaaccacttactttaacacaaccaggcactggaagcctccattctagactgttgatcggccttgtgcttggtaagcagatgccctcttgcagggtggatgagtcaggcaggcagaacctccttaagtggtccacttagtgttaccagcagactgcagacactgcagagcaggaacctcactcagtacctgtctctaggtctcaggtgtggcggctgtgtgcatccgcatctgccttacggagg

SEQ ID NO: 33219 - DNA, 1193 bp, Mus musculus
aaaaaccaaacaaaccgaggtactgctgccatcctgtgtgtgagtagggtgccagctcagggccttctaccccttctcaatcagacaccaaaccaagatcagcctcagcctgatgcagcagagaagtactgggcagtgcttctgggcagcaggcacagctgaccagtgcaggctgacgccctggatcctgagctctcgtgtggaactggagctgctgctaagtagtaataaaacaacccgggacagagctaaccacatcgttctttaaatatatatatatatatatatgtatatgtgtatagaaatagccaagagcaaggagccgaaacacaaactctagctctgccccagcggccccaccccacacccttttccaaaaacaaccaagaaaagaaagtttataaaaatatcttgcaggaattcttttaaagtttacagtagcttgccagtgctgcatccactggctggctctccactgtccccagccccacagcggctctgtcctcagagggaacctgggctctggacccaccctgcccaagtcagacagacagaacaaacagacagacagacggcaggagggtgctgctgctgctactcctccttccctgaacagagaacagagacataaagaaactcaataaattaaaacagcaaataaataatactggtctcagcccagctccctggcagctctggagcacccaggtcttttatctccacttcagcccatgagaaccatcacagctggagctctgcagcctggcaaggtggagcaatggatgcagatgagaagaggtggccctgcgaggccaacatgtggaaaaggcgaggtgagtggcccaggaggcctccagatgcggcgtggaggacaatccattcccactgcttcacccaccatggtcccctaccctggaagatggtggacaggttgtccctgctgaggatctggtcactgggatccagggtggctgggcgagaagaggaacccctgggcggcaggccctcctcccttgggccatgcggagctgccaggggacaggcagaggtggtggatagtgggctagcctctctgcccagcagcagcagcaggaggagggtggtccgcagcagctgccttcggtcagccagtgtccacacgcagcacagaggatggcctcgtggaggtgacatgttaacttttcgggataatt

SEQ ID NO: 33220 - DNA, 1368 bp, Mus musculus
ggcagctccgcatggcccaagggaggagggcctgccgcccaggggttcctcttctcgcccagccaccctggatcccagtgaccagatcctcagcagggacaacctgtccaccatcttccagggtaggggaccatggtgggtgaagcagtgggaatggattgtcctccacgccgcatctggaggcctcctgggccactcacctcgccttttccacatgttggcctcgcagggccacctcttctcatctgcatccattgctccaccttgccaggctgcagagctccagctgtgatggttctcatgggctgaagtggagataaaagacctgggtgctccagagctgccagggagctgggctgagaccagtattatttatttgctgttttaatttattgagtttctttatgtctctgttctctgttcagggaaggaggagtagcagcagcagcaccctcctgccgtctgtctgtctgtttgttctgtctgtctgacttgggcagggtgggtccagagcccaggttccctctgaggacagagccgctgtggggctggggacagtggagagccagccagtggatgcagcactggcaagctactgtaaactttaaaagaattcctgcaagatatttttataaactttcttttcttggttgtttttggaaaagggtgtggggtggggccgctggggcagagctagagtttgtgtttcggctccttgctcttggctatttctatacacatatacatatatatatatatatatatttaaagaacgatgtggttagctctgtcccgggttgttttattactacttagcagcagctccagttccacacgagagctcaggatccagggcgtcagcctgcactggtcagctgtgcctgctgcccagaagcactgcccagtacttctctgctgcatcaggctgaggctgatcttggtttggtgtctgattgagaaggggtagaaggccctgagctggcaccctactcacacacaggatggcagcagtacctcggtttgtttggtttttttttttttaaattaaaattaaaaagtttaaaaaaaaaatcaaagccagaaatggagttagcagagtgctctgcagtgggttcctcttggaggtggcgagggcaaggggcccacaccactgcctgctgcccaccaaagcccacatcacttccctcatcttcagcttttgtctgtgttccgttctgtctggctgagccagtccctcccagctggcccaaggtgcctggcatagcagcaggaggggctgggggcaggtttcatgcatgcctttgctcttcccctcatgtacagattttaatgcttctattacattcaaccaccacaggctgggatttc

SEQ ID NO: 33221 - DNA, 1119 bp, Mus musculus
ctcagcagtgagagtttggggagagtctgggagtatttggctaggctatgagggccatgctagcttgtgccctgttgtcaaaggggctcctacagtgatgggaaaagaggtcattaagcttagagttagtgctttgagtaggctgcagcatggatacttgccctgaccagggacataggagcccccagtagcactctcctcttagcttttagctgtgttctacctaaataaatagtgtttcgcagaactggcctgagagggcttgtatctttaaggtcctcaggcccctgcctgcttgccatactccctggttattaatattcatcccttgagtgttgttattctccaaccccagaatgtgttagcatctccttccttaatgttagccccagacctctagaggttaacttctggtccctcattgctaaatccccactctatctggcccctcactgtttacctagctggggctgttcaggtggcagggtgggatgcaagcacattctctgtctctctagagacctaagatgtccacactcagtgttccttacttctttggagtatatgtactttgtctcaagactcttggatgcctcccccaccaccctcagaccttagtgttcttaagtcctttgtcttcatgacttgccatgtatgtctcccccaagtctgagcatttctctcctagagtgctttgctttctgagcatctgtgttgggtcagaggctgaggaagttaaatggggctttgtggggagggtgcaggctaagcctcactgcagggcaagaacagatgggaacatagcatcttatcatcctggtcccagaaaaatgctgctagcatacttcccaccaacaatatcaaagccattctagcctcatgattgacaccacattgtcatagagattcttgttattaactctgcaaatttcttttgctcttcattggtcagactttcaataagggttggctaacacctggtgctagggatgtcaaagagttcagtgttatgggatgtggccagctagaatagaagatgtgacatttcatagttggggtcttagaggactgggggggggttgccatatgggcagggtgggcagaacactgtggcagcag

SEQ ID NO: 33222 - DNA, 1532 bp, Mus musculus
ttgtgtatcttagtatatgattccttgtgagaaggtgtccagcctgcccacggtctacctgaagctaggaggcaaaaactatgaactacacccagacaagtatatactcaaggtgagtcggtgtgggcggtggcagtgtgaagccgggacaccttgagtgaagtgtgggtaccgtgtgatcacatgtgcccattctggccttacaggtatcgcagggtggaaagacaatctgcctgagtggcttcatgggaatggacataccccctcccagtgggccgctctggatcctgggcgatgtcttcattggttcctactacactgtgtttgacagagacaacaatagggtcggctttgccaatgctgtcgtactctaacttgctccttctccactgtcagggaactggatcagagtccagtagaggaagccagccagccccatccctccacctgccccactcacacatagtcacactcgcttagtgttgctggacccttgggggagacctggctggagcttgtccagctgttctgttctgtggttcctcaccctgggttcagattgctgccctctgcctgtctgaaggaggccaaggcccacccagtacacgaggctgccttcaaaggcccctactggtttaatagctgctgagatggattgtcttgtcctgccgccctttgctgtgtgggcagtactctgaagcaggcaaatgggtcttaggatccctcccagaaacctgctctgacccagacccatcacccagcttggggatggcaccacgttctactgcccctccaactctggcctggcaaaggcctgaaggtgagcaggaaggagcaagaggacagaagcaaaactatgaacctggggggttacctagggcttgaccccgccctcctgggaaggcatgcctcagcctggggtagaggtaggatgactgactggttttggctggcctctgctgccctcatcctgggctaggcagctgggagccaaagttgaaatacaaataaagttgttttgggccttgatctctattggtgtgctctgtactgtttctgaattgggaccttggcgacggagctagctagaccagtagaacccagtactactgagggctaattcggggacacgctggctgtggagaatattggggggggggggggtagggagtgtgctagagcccagacttggctttcagcaccaggccagtgaacagaggggactcctgaggctctggcttgctatctggccttgtgggcaagatgagtctgaactagaactggcaggttctgggacctcaggcagtagtcaggccggatgtggccttggctggaggccatggagcgggcctagaattctgtgttaggtcctgtgttgaatcattttcagaggtggccaggccagcacctgctgtgctttgccagggaagcagcctattcccagaagaaacggaataagccttgatgggaatcttgggctgcatacattcccttttcaacagtcagtcctttaagcctgggtcagaaaagcc

SEQ ID NO: 33223 - DNA, 1126 bp, Mus musculus
gatcctcctccccctaccttgaaccctcaagatgaaaggtgagttctcttctgccccatgtgggtgggagagggtgggatgccaaggacaggggtctcattctctcccacccatagaaatggtgctacccagctcatgtctgggcctttgaatccggggacttctttaagtccgtctcgttctgaatcaagaagatgctgcaatcagaaccactacactacctgcctcaggaatctgctccaaggtgagctggggcaccctttggaagcttgccaagcccactccccaccccaccccccgccccacctcatttgtctttattctctttgcaggtgaagctgaaagaacagatggtgtcaacattttgaaagagcagactcatagcacccacccacccctgagaatccatcttcatggccaactctgcctgacccgggagaccaccacccacatcatcctggagccaagcctctaccccgggatgacttcatcatctccctcctgtctttttcttcttcctcctttcctgtaattctgtttctttccttttgttccttccttgcttgagagactcaaagcacccgtgactctgtttccccatttacccccttttgaatttgcactaagtcgattgcactggtttggagtcccggagatagctttgagtctctccgtatgaatgtatacagcgagtgtgtaaacctctttggcaatgctgccccagtacccacctgtcgtccatctccgtctgagggcaactgggtgtggccgtgtgcttgaggcctcgccttcccctcgcctagtctggaagcagttccatcataaagtgttcaacatgccctacttcatcctttgcccctcctcaccagggcctcaccagaggtcctgggtccatcaataaatacagttacagtcattggtctcgtggacttcaatataatgcgactcatggggggaggttgggggggcaggggaaagaaatgagggaaggggaataaaagggatagggtacaccatccatgatgaaggggataatgaaatggggagggcctctaggatggaatggggaataggagatggcttatgaaaaggtgggtggcactgggataggaggctcatgggatgg

SEQ ID NO: 33224 - DNA, 1155 bp, Mus musculus
aaagagccattgtctgacctgtgatccattgagattggggaaacacaggtgtgtgtcaccattttgtagaggcagtggatgcaaggcaagcctgataactaacaaccccgtgttagttactgcactcattcctgggacaagatatttcgcaaaagcaacttacaggagggtttactctgattcaccatttgagagtagagtccatcgtggtgaggactgaagtgtggtgggagtacgaggcagctagcagcactcagctaagaagcagagcaagatgggttctggtgcttccctttgcttgctttttttcatttcagtgcccctgcccagggaatggtgctacccacatttagggtgaatctgttgatctaatctgaaaaaaaaaatcacctttcagacttgccctgagatttgtttctgtggtgattctaaatcccagtaggttggtaatcaagattaactactgcatactacaaagctccatccagcttttttgaagagctcccacgatgctggtagctgttcctgcttctttcccagtgcctccaggcagcacctgcacttcatatgcaatttcctattactcggtcactgatagagaacaagtcttggatccgcttccaattgttttggatccgcttctaattgctttgcttgtcatgcgggtgacctgcagcctcctatgaggaatggaagcaccgaagcagacaggacttggagcaatcatcctggttattctacttgacctagaggagagataaggtttacaagttccatgctttggtggccattaggtcatgatgatcagggaattggaaggaaagcatttgggggggggaatggtggtacgaggaggttagagcaaaggtttatctcttccacagtgcacagcacagaggggaaaggactatatctctcatgcagtgcacagcacaaggtgtgaagagacctatgtcccataaggatgttgggcacagaaataaacccatgggctgaagggagctctatggtggatgagccccagatatcactgtcactgccaaaagggcttgaggagggcatgacctggagatcacatgtggactggatggtgcatggttgtccattcattgaggttcatctgctagggttcctgcttggcactcactgatgggt

SEQ ID NO: 33225 - DNA, 1106 bp, Mus musculus
cagcctggaacagatagaagtcctttggtgctgctggtggtgatgccagaactacatagagctcttctacccactctcagtcccctgcctccctttgttcctttttctgggtaccaggactccctgcagcacttatctctggcagactgctgtggcgggctgggtccacacagtctccctatggggtctcacgagacattggccttcctagaggagggcaagtgcgggatagatggggaaggtccttgccttctagtttccttgcctgagaaggagccatgtagtctggccctggaaggggcccagctgggtggcccagcccaatctcttgaacctcaagacagcagtatattctcccatggccatgcctgggccattcacaccactgcccctagcctgtcagttgggccccagagctaggcatttgctttgctgcctatttttagatgctatgacagtggcttcctgagacgaggggccttgtgaaaggaaccatgcttcctgcccaaggcgaggattcctgcccctctctccagcttccttcctgagcttcctttggtagactgtaagtctttacctctcctaggaaggcctgagcaagatccattgtctctcagagaggaatctggccttgtccccatcctctataccccagaccaggcccaggaccccagctagaaggacagcacctaagtcagcctctacctaaccaatgcccctaaaaccagtctgagcctctttactctgacttatcccagctgcccagggtcttcacaacctctgccatcacaggagaggttcttgggcccctcagcacctccgaattgcttaggtgggtgagcactttgtggtgcaccttctagcttgcatcatgtactcaggaggctttgagtaagccccaaccctgtctgcctctgcctttggttcttctcttgcggcccaaatggtaactcaaaggaacaagctgctgttacagccagcctccaggagcattttggggtgctttgtggtgaccattcatacctaccaagctggtttcaggagccctgtcccttcctagagaacttcatatgggtagcaataggaatgcttcagagaagccccta

SEQ ID NO: 33226 - DNA, 1945 bp, Mus musculus
ccctggtggaggttgggggctcatccctcctggattggagtgtgaaaaacgaaattaagcacttaaagaggagtctgagaaactgagaaagaaggggtggagggagagggagatggtgatcaggaaagtacccctccccagcttcctctctgagggttaagcagcggacatgatcctagggtagaagaaggcagatgggtccataggtcttctttcctgaaccagcctgcttgcaaatttctcccagagctttcttgagcttgtgttctggcctggatccccagagtgaagagcagatacttttttttagacccaggttttggtttctatttgctgtttctgctggggagtgccactgacccttcaagaagaggagacctggcgctggggaggagactgccttccttggtctgttctgaggcccagcttctgctcccaggtacctgcttctctctgcggggcctggtggcatcacatggtcacccctgaggacttggtgtctccaccacagagttcccagtatcctgcctgaagcagtctctaatcaatcccaggactgttgggacagggtacctgaggagagcccaccagcatcctgagtggctgggcctcactgtggccatttctacggtaaaaatgttgcatagttggtcaatctggaacagtaggggggggggatgtttcctgctgattttggagacaaggtttcatatagcccaggctagtctcaaactcacatgaccttgaattcctgatcctcctgcctctacctctcaagtgctgggatgacaaacaattgccaccaaaccctacgtggtactggggattgaacccagggctccctacatgcccaagtactcttatcaactgagccatatttttcagaccaaacttcttgtatgtgtcttgcgctattggaggtacacttgaattctgttctggagttacaaccaagaggagctggtgggacccagggctcagtggcagtggctcagacaactgcttggcatctggctccacaactggaagtgagggctctacatgataagcattgtaggcttccattggccccagtactctggcctctatatgacactgttcctggttttcatttctttctttcttttttttttttttttctagctggctggaggcgtgatcctaggtgtagctctgtggttgcgtcatgatccacagaccaccagcctgctgtacctggaactgggaaacaaaccggcacccaacaccttctacgtgggtgagtaccaaggagacgggttccagtcacagtgcagaacagtcagggagggcttccaagaagaggctgatggtccaaatctggtgggtgaggcgttagagctgggagtggcctaggcctagtatgagctgggtagggaggctgcctataagaggagaatgagttggctgtggtgctgctggtgaccccacagatctgagactagactaggcagaaaggaagcaacggggtggggcaggggccttgtaggaccttgcttattttaacatgggcatttctagtgaacctccctgggcagggtggggcaggatgcctgggctagcaacagctgaggctccaggagtcctgagttgggaagggctggagactgggccgacagtgaatgactcagacaccccaccccaccccacccccaccagcacacagcccagactgttacacctgccttatttggctgcctgtaggggctgaacaccctccctcctaagtaagatgatggctgttgtgctgtgtggtcctatgctctggtccactacactgtgctgaaggagaaaactttcctctttcctccctggaagagggacctggtgtcctgagaactgaagaagtatttggagatgtctttacccttccaaagctcctaccttcatcagggctctgatgtggatcttccttctcctcctgtgg

SEQ ID NO: 33227 - DNA, 1569 bp, Mus musculus
tagaccatctctattactggggtaccgggtcctcacagcttgagttaacccctgcaacatcccagaaaactgttctcttgagtggtccctcataccctggtgaccctagggtgctagtgaggtaaaaaaacactcccctgtgacaaaaggctgcaggcagcaggtccgtgtgtcttaaatttgttttggggtggaagataagctgtgatacataggtcctgtcactgagtagggtggtggctgtgacttagccactgatggttaaccacgctcttgccatccctgcagcaagattgtcatcagaaaatcgatgagctcttctctgggaagctgtacctcattggaattgcagccattgtggtagctgtcattatggtaagcacagggtctctggtgggtgggtgggatccttcccagggccttaggtgctgactatgcccctccctcctgcagatctttgagatgattctgagcatggtgctgtgctgtggcatccggaacagctccgtgtactgaggccctttgcattgcaccagaggatccctggagtgaccagaggccaccttgggggacatggcctgtgtatataatatttctgtatcactctgctacacttagtctttttacttttgagttttttgttttgttttgttttgtttttgttttagtttttttttttgtcctgaacttttcctgttaccttttgggagctgacatcacacatgggtggcatatgtgggatgtaggggtggagctggccctggcttgcagggccctgtacgtctgggacccctggagagttctgcctgctgagccaaacctcctctacagctacttgcccagaggctttgtagcctagctagagggccatgcccacccactcaacccactgtgggtcacattgctcacatctttttaatctttgttcctttcctgcctccatttcaagagctgggtttgtaagccctcttatgccttcaatgcacttattctttctaacgtgtcaccttcaactgtaattaaatcttgaaacagtcatttaataaaggaggaaaaaaatcaggcatgctaatgggactgccagacctcttcctgtgctagcggtgtcagagacctggctcatcagctctgaactttgccaggcacagggtgagcaggtccaatagaggctgtggaacacagtgggtggggagggctgggaccctgggagcactccatatgggtcctccctcatttgtacctccttatactgggagctcaatgctgactttacgccagccttgacctcatttccactcatctgttggacatgacaggtcaggctgagtcgggtaggaggagccacctaagcagggaaattcagcacagaatgatggagataagctgcaagaacaccctccttttcagggacaagacagtaaaggttagcccattaccccatccatctcaagaaaagattccacggagctgggtggctctggcttgtgtctcaataagtaaaaggcaagatggcagttcacttacccctgtgaactgaggatcaggctaagcaacctcccggacgccagg

SEQ ID NO: 33228 - DNA, 1159 bp, Mus musculus
catactcatggaaactggatgctctagtcaatgataacttggtccaggaaaaaatttaaaactttctagaattcaatgaaaatgaaagcatagcatacccagacttaatgggacacaatgaaagcagtgttgaggacaatagcactaagcgccttcataaagaaactgatcctatactagcaacttatagcacacttgaaagctctaaaatgaaaagaagtaaacacatccaaagggagtaaatggcaataaatagccaaactcaagattgaaatcaacctattagaaacaaacaaaatacaaaaactcaacaaaaccaagagctggttctttgaaaaacaccaacaaggtagataaacccttagccaaactatctaaagggaacagagccagtattcagtttaacaaaatcaaaaatgtaaagcgagacattgaggaaattgaaaaaaacattagatcttactacaagagacttaacaaaactggaaaatctagatgaaatggttggctttccagacagataccatgtactaaagttaaatcaagatcaggcaaactaaaacaagaacaaacaaacaaaaaccaaccaaacaaactacaaaaaaaacagcccagcgccagatggttttagtgcagaattctaccaacattaaaaaatgagctaatactaatactcaaactatcccacacaatagaaacagaaggaacactacctaattcattctgcgaaggcacagttactctgacacctaaatcacacaaagactcaacaaaacttcagaccagttttgcttttgaatattgacacaaaaatacacaataaaattcttgcaaattcaatccataaacatatcaaagccatcatttaccaggatcaagtaggcttcatcccagggcttcaggaatggttcaatatatgaaaatccataaacatcatccaccatatacacaaacagaaaaaaaacatgattatctcattagatgctgaaaaggcctttgatattaaaattcttggagagagcaggaattcatggcacatatctaaacataataagagcaataaatagcaaactgacaaccaacatcaaattaaatggagagaaacttgaaacaatcccactaaaatcaggaacaagtcttcccactctctccctgtctt

SEQ ID NO: 33229 - DNA, 1132 bp, Mus musculus
aaccaacaacaactctacacattaaaaactcaggatagggttcacaagacccaaggggaaaaaaaaaaaggtctgacaacattatttactaactcatgattaaaacaaaacaaacaggaaaacttctggaacattaaatactcaagtaagtgatcacaagaagtaaaaatatcactggacacaaaagtgcatctgagaaaattctttattaacttgtgatttaaaataaagaaaaagaaaagaaaaccaaacaactggggatcattaaaaactcaggtaagtgatcataagaaacaagaagcaagaaataagttacagaaatctgacaacattctttaccaataataccaaacaaaaaataagcacacacaaaaccctctagaatattaaaaacttaggtagctgatcacaagacacatgaagcaaaaaagatattacatgaatatttcactacacacaaaaacctgacaacattctttaccaactcataatacaaaacagaaaaaaaaagcatacataagacatctggagcatcaaaagctcaggtaaagatgacaagaagcaaaaagaagttacaagattatatcactggacacaaaaatgcatctacaaaattccctatcaactcaagataaaggaaagaaaagaaaaacctaacaactctggaccattaaaaactcaggtacatgatcacaagacacaagcaaaaaagaaattacatgatttcactgacacaaaaatgcatctgacaaaattcctcatcaactcaagatggaagacaagaaaaacccaacaactcagaaacattaaaaacttaggtaagtgatcacaagacgcacacacacacacacacacacacacacacacacacacacacaccccacaggaagttacatgattatttcagtagacacagaaacctcacattccttatcaactcaacataaaaaacagaaacaaagcaaacacaaaaaccctctgaaacattaaaaaccatggtaagtaatcaaaagacacacacacaaaacaacaagaagttacatgattatttcactagacacagaaacatgacaacattgtttaccatctcataatacaaaacaaacacaaatcctttggaatattaaaaaat

SEQ ID NO: 33230 - DNA, 1105 bp, Mus musculus
ctaataacttacaaaacatgcacagagctagatgctaagaagagccctgacaatactacaaaccagtatctatgagagatttctatacgtaagttacctcaagctacaagtgaaagcaaagacaggattgttaatagtctgtccaaatattgaaggaaaattccagtttagttaatttacaaaagctggacgaatcctgccctccttttatacctcgctgtcataatgaactgaacataaatgaaaggaacagaacttcaaagaccacacataacttcacaaaagaaaaatagcttgggaataaataaaaaaaaagcttaaaaccacttaagtagcattaaaaaatctggaggcagaaaagaatctaatgtccacagttataatataaataattgaaaatatagagctttaaacaaagaaaatatggactatacagagaaacaataacaaagttccttcccacagaaagccgaaagaagtatagacacactgtacttaacttgacaaaaaaataatttttaattaggctaggaatgtttcagctggaaaagggtcttgatacttaagccctgtgacctaagtttgagctccgatcccatataaaggtataaggaaagaactacataaaatcagcccctaacctagaaatgggcaccatggcatgtacagtaatctcattgataataaaataaaattagtctaagttatgctgaaagataaaaagaaaatgataaagaactaaagaaaacaaagaatatgaagaatgagataaaattagaaaatggaattaaacaaattctagaactgaaaagtattaacaaatgaaaaaatccattagagggtttcatcagcagatctgaatgatataagaatcagtggacttaaggatcaagtctgagcaccagggggggaaaatgagcatttcaagaattctatggtaaactaccaagtatgctaatatctttgttggaaatcccaaaaagtaggtgaaagaaggagcaggaagaagaattgacctagtggctatgcctccccaaatttgattaaagacaaaaattactatgtacaggaacataagcaaaaggacccagaaatgataactgag

SEQ ID NO: 33231 - DNA, 1668 bp, Mus musculus
aaggccagtagtcctgggagcacatcaggttctaggacccagacacacaccaggcctatggtcatgctctctgctaggacttccaccaaggatggcactagacttctacagatgtgggtgtctaaattcttagatgcctcaaccctgactccaactctgctttgaccagattatattttttgcttaagcctatgatctctctatctctaccttaggtcttttaactcagccccaccgtgggctcctcctttcctcctttcccaccttcctagattggcttgttcccagctgctgcatttggaataagttggcctagaaagagtcttggtgtgttcttgggtagagacttgactggataaagactgtccacctactcaggttccaggagtgctggcctgagaagagctgtggtacctggaaagatggtgacacactaggcctatagagaccaagaaagcatcattcatgtctctgaggttctgttacagatctgttatcagatttggcctagtactctgagcagagtcgtctaagtggcttagggctgcttctagaacagatagacagtaaatgtctggctccaggagctttgagtatactaataccagcacaggtggccttttgcccccaaaggtgtggttatagggcatctatggactgaactatggtcatgtatcaccagtttccaccctcccttgggacctcgttggtgctcacagtagctaggagatgtgagacacatctatcaaggtagatggtttgttgagagcgctactctcattgtagctgcttctgtgtctggaggttgctccatggccagaagaataaaatggaatggataccaatgagaggtgagtgatcagggggataagaaggctgactggtctttctaggcgtaggcaattccctgaggcctgctatggttgccatggtgctacttactatccttactcctaagcaggcactggcatatccaacaccagccacaagacaccagtgtttacactttgagttgtctcatgccgtggacttgatggagagacttaaccatagtgtaagctatttttctaccctctgacgccagcctatacctgcctagcctgtctggactcctgttcccacacctctgttcccgcttgctaatgcagccagcctgtaaggctatcttaggagggagagtgacccctgcttctcaataacattctcgctctctctaaacccatgaaccctctctacatcttacaaaccacgaggcactgctaacctcgtttaagtttgggtggtctgggaagatagtgggcatgccttgtttgatcataatcattcctctgacaagcctgccttcccccagggtggcctcaacttggctatctggttacttaagaaacccccagcactgtgagtccaagtttcttcagtcattgtaaagtcaagcctgaaatctaggcataggccagaagcgttatgactacacaaggttaaggacatgaattttagtagaaagagtggaagagtctcagaatgcgaatctcaggaaaactaagagcatggcattaacatcctggcacagaaacacttttctagaggagtgccccgtggggcagtggtcagaagcagtctgagtgacctgcctccaccacatcgctgcctctcctgagttttggtagg

SEQ ID NO: 33232 - DNA, 1182 bp, Mus musculus
ctgcttagtgctacctacttcaatgaacctagttctgttggggcagcaagtttaggccctaaagcaggataggtaagaaccctgcctgagagtatgtgtttgtagagagctctatgttctctaagcctcatctttcacccttcttacctgcctacaaccccacaacataaatacctcctaactaccttgcaaatgcagcctcatttctgcctcagttctccagtagggcaccataagccactgttaggacagagtaatacttagagtttgattttatatgagggcttacagccagagtcctcagagagaagccaggtagaataaaagtgatccctgaaaacatcttgaattacacccttccccagtaatctctctcagagccctctgatctcttgcttctaagttgttctcatgtccccaaagaagaaaaagctctcaggggacctgccaattgtctctggacttctggggcagcagctccatgtgtgacgagattacgtaggcagaatatctaagcagatggtgaagccaggattatggagctagaaatgcttggctgagtagagacttagactagacccctatctcttgcacgcgccggactcgccagcagtaacaatgctgcaacaggatccttctgcacacatttattgggagagcttgattgcagaggcgaagagaccccgagcccagaactggtgctgcttatataggcctaggagaggcgtgtctcacacctggattggttatgcactaagcctcatttgcatgttcctcatctgattggctactctctctctgtacctcacagagcctcattatcatacctcatttgcatgtctcacatctgattggttatactctcaaagcctcattatcatgcccgggccaggcagtgtctttgcaaaaaattttactgcatgtgtacacattggttgtttgtccaaacttatgcgtggtggccagcagtagtgagcgccactctgcaacagcacatgtggcttcccacacctatctacttccccccattctcttccatgtttccaagatgtcacccagatcacccatagatccagccatgggcttatcgtcagacctctgctaaccagtcattgccaaggagatgcgtctcaggtatggcttttgccaaggacacctgaactctcctaaaaggaatacaaa

SEQ ID NO: 33233 - DNA, 1205 bp, Mus musculus
ccacccacgtgtctctcccctctaccagtttctgtggttgggagtacacatatgcacacaccttctctaagcaggaagctgctctttgccaaaagtgaatggaattcagatttccagagggtatccttggtctcaagctccaacagccatctgacgaagaaagatgctagtgtgcgcgctggggctgtgaagagaggggcttccgtgtccattcaaatctttctgggccccaagaaaaaccaacaactggctgtgctctccctagccccacccagcctcagtcacattccttcccttcctgagcccaccctgggtggccccacaaaccagcttccactcctcccttcccactagtggggagacctaactcatgtactcatcgaacagccaacagtgaaaatgaaggtcacactgcaagcccagaacagcttaaaagcagagaagggtcctccccaatgtctgttctcaccccagtcagaggctattccctttttctctgtctagcagcccctaggactaagcgttcataccttcctgtgcttgcttccaggaaatcctagcctacttctgcctgtaacattcttggtccgggaaatgaagaggctgctgtttgggctgctgtagccttcgctactagaatgttccaacatattagggatctctatccctacctaagccttccaagccccaggatccagcatccctgggacttgtacatttatacatgctgacatggttttgataatgagtcacagtagggatcagcagtgacaaggtagactggctggtcctaagcctaagtttctgggatttgtacttgtccagccagggagggaacatgtggagaaccttctgcagctgtcagaaggaatgagtgactatggtggacattttggttctgtgctcagcaagatacctagggcagagacttggctcaaaggctgcaaatcaaatcctttgatttcaaatgagactattttcaatgccatagtctcctggaagcaggattatttctcctgagatcagttctggaggcgattgaggctttgccatatgggcattgctctctcacctggttctggttgctaccaggtgctcagcttgtctaattacagttgactgtctctactgtctatggctctaaggcccagtctgatcctcttgcttggtcaaaagtagtgttgtcctagtggattttctgggtg

SEQ ID NO: 33234 - DNA, 1197 bp, Mus musculus
tcccccttacaacatcctggaatcccagccacgagaaaaacagcactgtcacctgctcacttgaatgtgcatatataagtaaaactgctactcagagttgcaacatatcgtaacaagccagtcctgtgcagacatctgcaagactacggcacctacctgtacataagacacacgtacaagtatacaagaatgtgtgccacccatgtccaaaggaggcacagagacatgtatctttgcttatataaagtctctgggaagacctagcagaactaaaaacatttaggagaagaaacttgggaattagggttggggtaggagacccttagttttgtgtttttgtttttctttgccatattcctttctgtaccctaattttcactgtttgatttgtgcatgtatacacaaggatgtgtggtgcatttgtggtattttttttaacataatactagtataaaaggtttgctctgatgtgcagtgcattttactgtgatgtttgcttttttagcacaacattaatactttacaaaagtcttgtttggacatagcaggtgtagttccagatcgggattggctgtaggcagccacagtatgcatgctgggtggacagcatgccttggagctgggagtctctggttcatgtcactctggagcaggggctgctctagcacaaagaaggttttgaaaggcaaaggcagagccagagtcagggcaggctctgggcaggctccaagagagccagcaaccctctgctgaagggtaccctgaaccccattgcacaggcgggcacctcctgtgaagtgagactgctacacaagtctcgtcattatagacttttgagtggagtgattctgaaagaagagaatgagtacggcgtgtcctactgtgcctcattaaatatggaagtttttatgtaactttcctccatttcaggtaatctcaaatttgataaatgaagaatgacagcagttcatctttcagttcatttgtgcctctattgatctaattgaatgttttctatacaaatttatttttaaatctatcttagatcttagtctacaaccacatttcatattgccaaaactgcattagggagggccaagttatcttcaccattgaaacaggtctgctagtttggctctgtctgtcctgtggaaatgacacaatgttgacctaagaggggggtcctcacttctccct

SEQ ID NO: 33235 - DNA, 1189 bp, Mus musculus
agtgtctataacctagaaccccagtcatgtgctgccagacctggattttatgtgtgtgcttgggatctgagctcaggttctcatgatttccagcaatcacgattcccagtaagtactgtagctactgaaccatctccccagcccaatatcaacatttttttttttattattattatatcagcaaagtattcctcccgcttcagggtcttaaggttagccactctgcctgacttttattttcctgtaattctcatatctcactgcaagtgccttttctaacctgccatatcaattagtctcctcagctaattgctacctcagtctcagaagcatgggctacactgtggtattcttgttccttgggcgtgtccacttaagttagctgcctgtctcctccactagaagggaggtcctgggtgagcgtgtgtgtcttctctgtagggttagcactctgtaggcatctcacacatttctggtcagtggcttcattgatttgttaaatgaaaggaaagagcaggccaggaaagtgttcttccactttcagaattcagtgagaaagtaagtggtgaagatttcttaactgccaccttggtgttatttggtgaaggatgggggttgaggggagaggggtgctctgtgttgtagtatgtttcacagcctaaatggcatttacctagtccaagtagtcccctcacagttgtgataacaaaacctgcctcccaaggttaccacatagctcttggggtgggggtgggggggcactccctgccaggtctgccttagactagttgcaaggagctagaaagcctttcagctttaaacacagggtcctttaaacacagcggaccctggcctttatcctgcaatgcactaaatccatgcccttatggtccctatgaagacgaccctggcctatgcctgtataatagaagcacctccatctctgctcattggtgtaaatatattttgacaggtaatcctgtcctcacaatgcatggggttccattaaaatctttacaacattcttaaaacaaatcaacaaacaaacagaaccctacttattgttatgttgatgaatgtcttgtctgcatgcatgtatgtataccatgcatgtgcctggcatccccgaggacagaaggaaggatcaatcccctggaaactggagtttcagagggttgtaagccgccac

SEQ ID NO: 33236 - DNA, 1759 bp, Mus musculus
tctgactttgtgagaatcaaaatagagactgcagatgagttatgggcgtatttattcctcagaccatctgtgacctttcctgggagggtctgagaaggcttctcagaagtttctttggacttttctttgaaaactgctgaactacctgaaagataaggttttgcagcaaaagaattatttgggtatatacagtatacccaaacaaacaaatttttaaaaccccacatttctttataacaatagtgatgtaaaagatgtaagaagtgcactcagatacaaattagaatagcaacgagattgtctggtctttttttaagacagtgtttttgggaaaactgtaaattcccattggagataaaggaaggtatttggatgtgcagagacatttgttttcttggaaaatttagcgttagaatcctcagtattttgcaaatctgtaaatttagttagattgcagtcagacttctagctggaggatttaacatctcttcctcaaaaatgtatgtgaaagagaaagatgtacaaatgccaagtgaactttgaaaaacattccatggcttagcagccagaagggtggagtgacagagacccagaacagagctcagtgagctcagccccgagtctggggaaggtgacatgtgatcaaagtggcaccacatatcagtggaacctccttggaagatgttaaaaaacaagtaaaagagaaacatcctgtgaactcagagtccttagaaagggggagctccaaactgtaagtaaaaggtagttgctatttattaagaaaaactacagagaatattttctagggtagggtggaagtcttaagtaggataaatctcaagactcaaatttatgaacttgaataggtgcaaaaattaaggatttctatgaaccaaatccatcatggccagtgccactagttccataattgaaagacatgatttgcctttttatcccttctcatgcaaagttctgcccatgacaaattacaagataaccagaacactaaaaccagggagcagcagctgagacgacgagaaagcaaatcagaggaaaaggtaagacaagaaactcgcaggagggttaccagtgaagatatgctcaaactgaagtcaccagagaaatgcaaatcaaagtgacatttatttttcttctgagaacccttagaaagtaggataatgccaagtgttggcagaaggtagggagcgagactccccgcctgccgcaggtgagaggggagaccgacacagacattctggaaagctggccagcattttttttcctcaaataaaatattttatacctgcggcgcaacagtttccctcctgagtaaacatgctggagcagttctcccccagaacaaggagaggctgtgtgtgcctgctcagcacagcatggcctgggggtggtggggtggtgggcatttggctctggttgctgtggttagaagcaggggactagatgtacacttcacaagatggagacacatggaaacggtgctgagtgacacagacagcaaacagaaggagggtttcagtccctgccttggtgtttaaattcaaattacacccctcccagacctgcgctaactgggcatactgtccatacgtacaatgatattaataagctactccagagcagctgtctgagtggaagggagtgggggttacaggatggagataggatgcaaaagcatggaaggagcagagtggtccttttaaacagaccctttcacagtaacaattttatgggcagaagg

SEQ ID NO: 33237 - DNA, 2419 bp, Mus musculus
tctggtttacaaagttccagaacagccaagactacataagtgagaccctatctcaaagcaaaagagtaattttttttccccagcacttgagagaccaatgcaagcagatctttgtgagttcaaggtcagccaggggttcatacacagtccttctctaaaaataatagattttttgatgtggtgctgaggaccaagcccagggcctcgggcatacccgacaagtgctacgctgctaggctgcatttctagtctttgttacttggagacatgagccttgctgtgtgggtcagactggccttgagcatgcattgctctgcctcagcctggaaccactgtgatttgaagttgtagttcccagggattctggaaatcaggcgagttgagtacatattttagctctgaggcagcagtaaggtccttgtctgtcctcaggcttttattgtcctacatacaaagctcccaaatcttggatgtgttttaaagacaccaggtttgtgtgttaggttagattgaagtcaccttgttcttcagacaggtgtgatctggactcatgctctgtgagactgatagacatgctctataggaactggcctctgaccatttactcctgcactgtgaaccactggagttgaatctgtttgggtattgcagagagcaccagccggctcggaaggactgccttcactgcgtgaatgcccaggactgggctgccctagagagaggaggttgctggcacagccggtgtgatctatacctgcagcaaagactctcatgtggctagttccttgtagtggccccagcaagtgtctgctagcacattctaagttagactttacattattagaacaggaaagcagacacctgggactctctggggagctgacctatttctgggtcagctcttaaagtccatttgtgggagccatctttttggtaagaaggaatgagctcattgggtcttggttcttatgggaaggggaggcttgatgagtgatacttgttttattctcttcaaattctgtattcttgcagaaagaacccagccagccagcggagtgcaagcagcagtgagaagcagtgaccctgtggggccgccttgtggatggctgtcaggaccgcaggccgcaggcaggggcctcagtccctgccaaagcagaattttgttgacagtgctgtgacatctaaccatttccaagtgcatgattcctctcccctttcccttcttactttgctaaacttgtacagtggagactgctgcagttcagaataggagattagttgtagcacctgcagctttggtgcctgaagatcacttggggtggaccgaggttgtgcctgggattgacagagcctgtgattgtgtgcacccggccctccctactggcaaggccccatgatttccagctgctgaactgcgtgggaagctgctccagctgctgtgccctagtcatcgcccaagcactgtagaggaagctgtgctcgccttagagcattttttttcttgcgttttggttttaggggtgggtgggttgtggcacacacctctgaggccagagccatcgggttcaccctcgtacttatttatttacttgtgcttggggagctttggacttcactgtcctcccacttacgagaccatgttgctgacttgatcaggaggatgtgacaccaagtggagggaggctcatggaggaagccctgctgcttcctgccaccaactgctgtgctgtgctgtgctgtgccatgcagactacatgttattgccgctggaagttggcaggctgtagccaggggacagaagttctccttcactagggatctctggcctgtggagtacagcttcagcttgtactgtgcacaccagggccacacctgggtttggtgaccagttggtggttggtgtgtgtggggggaggggtgtttctgagagtatggtggtgtctctggtagccaggacagccatgtccacagtgaccagccatgtagagtgtgctcagccttacccaataacacatttgtaactgaatacggtgttttcaatttgtacagaatagttaggatattctattaaagttgtgaaacacaaactgagattggtttttttgttgtttgattggttggggtttttctgatagcccacttgctccttctgactgcccacaaccctgctggactgagctcttgagtggctggaccaaagattccagtctgcagactttaacacttggttttgaggctgtgaaaacccattcttaggagcaagctgtttgactgtggaaccagcctagggctctggaagcagttagctactgtaagaaaggccttagcaaatgatcatagggggcttgagcaatagctcagttcacaaacccacatgatggcaaacaaccttctaggttaacttctaggggatctaaca

SEQ ID NO: 33238 - DNA, 1101 bp, Mus musculus
atccccttcaagggcttgttatcccagtagtagcataagtggacactgctgcctactgcctggcatgggtggggtgtggagctgtggtttccttgtgtaaacctgctgcctcactgttcttacctttccaatggcctcttctgccaccctaataaagattattctcctcggtagcttcattacctaaactgctatggcttatgttttggatttttacatcctcgagttttggttttttttgaagacaaaaaattttacattcctgtggtcaaaataccacttcctttaagtaacaggataaagttcaggatgcctatgttctgaggccgtggtagggaggcacctaatccttgcccacttgttttttacctgcaatgcctttatttttctgtgctgggggagacccccgttgcatcccagcccctagagctcccactccttcccttgtgtgcattgcttgccttcttctctcctatccctgctgtactcgcttgggacaccctgcctctgatgctctctaggtcagtaggttagtgaccatgaccactgtgttgactacctctagatctagccttggctgtcttttgacagctcttgcttgattggcatctgaattgagcttctctagagaaacaactgatagaatgaatccattataaatgggatttattagagtggcttatagtctgtgattcaactattctagaactgactgtctcccaatggaaagttcaaacatttgatccttacttggtccacaaagttgggtgtctcagctggttttgtgtatatgtcaccatcccaaagaaataggctctaacgccagtgaaggaatggacttgcctgacagtgagggcaagcaggtaaagagcagaaactttctttctccatgtcctttacataaactaccactaggagctgtggcctaggtttaaggtaggtctttccacttcaaataatcccatcaaaaaagtcccccacaggagtgcccaacagcttgggtttgagttaattccacatacagtgaagttgactgctgagaatagcacagcatctctgggcttgggttccttgttgacttacaaggcccctgaaacacag

SEQ ID NO: 33239 - DNA, 1222 bp, Mus musculus
ctggtatgcatgcatatgtgctggttcctgtggagtgcagaaggcatcagatagatctcctgaaacaaaagtttgcagtgtctgtgagctgcctgacatagatgctaggaactgaattcattgtctctgcaagagctgtctgtgctcttaagcattgagtgtctgctctagtgcagccatactttcctgtgtttgacagtgtggagtctgttagagtgcatccctacctggcttcttttgtaagaattagcaagtgttgtgcagagtaagctgtgtgttactttgtacaggttcaggtgatgctctttggtcacaccctagtcatcatttttttgtctctctaatacaggaattggaaggtgatgaagaaggagaagatgaggatgatgctgatgttaaccccaaggttagtaatttggggacgtcctgagcctaccagtattgcacggtgggacttttgaagctgttcccactttgaggcaatgatgctaagaatatacatgtcagaaaatccacagttgaggaaaggcaactcatatgcctggaacattaggcgtcagatccaaccaggtgttactagttctctgtagacttgaacatgcattgcttccagctcttccctagagggatgttgtgacaggaagcacccgtgtgcatcagcagagcacctggtatggattgtgtgcgatagtaaagaaaattagcttgtaatcagaatttttgcttaggagattgacaaaaaagcatcgtatgtacatatacatatgcatagtgattgttgcaggacaggaagactggcaaaagaaacgacaatctgcaccaccagtttcacctggaagcttggggttttctctgtggtctcaggagactcttcattagggggctttggcacccgatggcaggatgccctgagctgctctagtgcagccatactttcctgtgtttgacagtgtggagtctgttggaatgcatccctgcctggtgtccctgtgccttgcatctctgactggctagtgtctgtctgttgtccttgttttccctgggtggagtgtgtgctaaaagctgtcagtgcagcgacttggtggtgtgactgctgtgctgctgagaatgcatgcacacactgggaagtttccagagggaaaaatgggaaagctgccaccacccacacgaatgccactcccctctaaaggtcactcatgggtcatggagactatactacctg

SEQ ID NO: 33240 - DNA, 1196 bp, Mus musculus
ggaaagacttaacacaccttcatcagattcaggagccaggaccacttaccacggtgcctcccaccttcttgttacccacagtaacccccaggagggatagatgccatgacaaaaagtaggcttgagcggggcagtggtggcacacgcctttaatcccagtacttggggggcagaggcaggcagatttctgagtttgaggccagcctgggtcaacagagtgagttccaggacagccaggattacaggattacacagagaaaccctgtctcaaaaaaaaaaaaaaaggagaaagaaaaaggaaagagttggtttgagactgttaaataaatagatgggacttgaatttgaaaatgctggccaaagcaacctttaccaggcaaaaggactaatttctttactttccttttttttttttttttttaaatttcatgtgcattggtgttttgcctacatgaatgtctgtgtcagggtgccagatcctctggaactggggttatagacagttgtgagttgccatgtgggtgttgacaattgaacttgggtcttctggacaggtggcagtgctcttaaccactgaactatctcgccagccccccaaaagactcatttctaagaaacgaagacaatttgttcattcctgcttggtaaccttatttgctagccaaactaaatgctttttataaattgacatggggaggctgggctggtactgcactccctgctccagccccaggctacattgaggaaatacctccctgctacccttgtcagcagcagtgaaggcacatagcccagcctagtacatttcctccctccacagagacctccagtcaggtaaaattggaaccttgattgtaccacagtaaagaatttcaggacaagtcatagtgaagcaaagttagcaagcttattaagcagagataagaaatggtgcatgctttggatttaagtataggcatagagtaagagacagtcttagatgaaagatagttcatatttaagacatgagtgcatgctgctgagagaaagccaggctaacctgcctaccttaagatcagctgttgatgtgaacttgtggctaagtcagagtgctcaaagaatgtaatttacagtgatagttaaagattaagtttaaactgggtgatggtggtacatgcttttaatcccagttcttgggaggcagaagcctctgagtt

SEQ ID NO: 33241 - DNA, 1178 bp, Mus musculus
tgagatgcttctccttatttttgtgttttcatgcgtattgttcccatgactgacacttaggactttcttgaaaaggcgtcagaaacccagggtcatagtcttcatgactgtacagcggccatactcaggtatcagccacctcccctgccccagacagggagggactaggtctcttgtctaccttgtgtctcttttcctgctgaaacatttctctgtcccttaccttttattttaaaacagggtttctatggaatatccccgcaggccataaacttgggatccttctgccacagtgtcccacggaacagggatgccacttctttgcgggcagttccaacagtcatgtgcttttcaaggagtgtgcttagcaaaggctgaagttttcacgcttgtcaggagaaagtgctgagactctgtccccacaggttctccctcctgatgtcctaacccgtgtcagtgaatatgtgccagaaattgtgaacttcgtccagaagattgtggacaatggttatgggtgagcatgagaaacctctccttctgtgccaggccgcacagctccatggggagagagtctgggaacgggagccacaccttctcaccgcccggccccgcacctgacctaactcctcttcactctagctcccctgcaagaacttgcactacattacggatgaaacccttgcttcatacatacatagtatgccgttgtcacaagcatttaactgggaaaatgccactttgctaattgagtcaggaagcaggctggagaggcagatctgaccacaaactagcacccagcagccattctttggaaactctgttacaggcttcatgactgcccagaggcctgtgctcagctgtcctcagcctcctcttcctgccgacagggaaggaccaggtttttctgtctactgcgtgtttgttttcccactaaaccagccagtgtggtgggcattatgctagcagagcaatgagaatccttctgagtggcccagtggcctcccctaggtgttatcaggaagacctgcctgaatatctgtttggcagcttgacagtgatgaccgtgtcagttggggccatgatagtgcacttggatactgcagggcccctcgagacattggtaccattcagacacttgaagagtgtgtctcctgttgcttggctgtgattttagtgta

SEQ ID NO: 33242 - DNA, 1151 bp, Mus musculus
aatcaaaacctctgcattactgatactattgattctggttagctggaaccaagaaattagtggtgattaggaagatatcaccaacattacttaggtgaaatcttctggaaagtgttttccaagagcacaaacctcagcgttttagtgaggctgtgttccagagagacccaaggttgtacctcgtgctgcggcttgacttagtaacatgtaagagtcacccaggtggtacaggttttgaaggaatgaaggggtcatggaaagcagctgaggctcagcactgtgagaggctgtggaagttcactggtgaaagtacagcctcagtctcagttgatggcccaggactgaaggggtcatgcaaagaaattgaggcttggcacaatgaatagagcctatgagaggctattggtgaagcctagttgcagcagaagacaccagtgttttggagaagccaataccatgaggcgaccaccagtagagtataggcagcagtagagtgcaggcagctgaacagttggagtttgattttgcttttgattgtgactatgccctgatatttttccctcttgaaggaagaaggtattttagtggagcccacagttaagagacttctaattgtaaaaagactttggattttaaaagagattggacattttaaaaggattgaaattttaatatgtaagaattttcaaagactggaacttttaaagttatttagatcttggggatatataagaaagtaaggattgaggcttaatagtgatgtgtttgtgtgtcaagttgtgaaagactgtcttccaagaaactaacttccttgttttcttctgtaaagtaagtctgatgctttgagaaattacattcagatccaacaccctcttgtgttcgtgtttgtttgttactcgccaactccttgcccacctgagtacggggaccctgccttcttccccaggtggaaagactccgactgggtccagctggtggcagttcatgtcacaggcctgaacccacctggacacactcactttctgttagcacagtctcatgccactgctgccagcactcttactcccttacattctggtcctccacaccagctcgaaggcaagtgattctctgctaatacaaaatacatttttctctatgctctatttagt

SEQ ID NO: 33243 - DNA, 1180 bp, Mus musculus
tctcactgctcagtaaatttccacttacctaagggtgtggtcagtgccttgctctcactgctcagtaaattctccttgcctaggggtgtggtcagtgccttgctctcactgcttagtaaatttccccttggctaggggtgcggtcagtgctgtgccttgtgctcactactcagtaaatttccacttgcctagggatgtggtcagtgccttgctctaactgctcagtaaatttctttttgcctaggggtgtgatcagtgccttgttctcaatgctcagtaaatttccccttggttaggggtgtggtcagtgctgtgccttgtgctcactactaggtaaatttccacttgcctaggggtgtggtcagtgccttgctctcactgctcagtaaatttccacttgcctaggggtgtgatcagtgccttgctctcactgctcagtaaatttccacttgcctaggggtgtgatcagtgccttgctctcactgctcagtaaatttccacttgcctaggggtgtgatcagtgccctgctctcactgctcagtaaatttcctcctggctagtggtgtggtcgactatgtggtcaactatgtggtccctatgatggactgaccgaagaggagaagactagagcctggtttactgatggctctgcgcgttatgcaggcaccacccagaagtggacagctgcagcattacaacccctttctgggacaaccctgaaagacacaggtgaagggaaatcttcacagtgggcagaacttcgggcagtacacatggtattacagtttgtttgcaagaagaaatggccagatgtacgattattcactgactcatgggctgtagccaatggattggctggatggtcaggcacttggaaagatcacaattggaaaattggtgagaaagacatctggggaagaagtatgtggatagatctctccaaatgggcaaaggatgtgaagatatttgtgtcccatgtaaatgctcaccaaaaggtgacttcagccgaggaggagttcaataatcaagtggatacgatgaccccttctgtggacagtcagcctctctccccagccatccctgtcattgctcaatgggcacatgaacaaagtggccatggtggtcgggatggaggttatgcttgggctcagcaacatgggcttccgctcaccaagtccg

SEQ ID NO: 33244 - DNA, 1168 bp, Mus musculus
gaaacgtggagcttaggctatgagcacaggacatttgcctcgtaatccaagtgcccctgtgttttgtgtctctgctgagcacgagcacagtgtcctctgaatgcaaataccggtttgagtgcaaggctgctatgttctcccctgcatggacactttaaggtcacagtggcatttaggctgcctctttcaattgccagaacctgaaccttggtgtccacaaagctggatgagctatgtatggcgagatatactacttgattacatgtgtctttggagagcagggaatatggctcagtggttaagaagagcactggctacttttgcagaggacctgggttcagtacctagcactcacaaggcagctcacaactgttcagctccctcttctggcctctgagcgccctgtacccacatgatgtacaagcatgcagataaaacacataaaataaatctaaaacaaaattttaatgtgtcttctgtctgcttttaagcaaattcacaggcaatttcttctacaactatatgatgggaattgagttcaacccccgcatcgggaagtggtttgacttcaagctgttcttcaatggacgaccagggattgtagcctggaccctcattaacctgtccttcgctgccaagcagcaggagctttatggccatgtgaccaactccatgattttggtcaatgtcttgcaggtaacttggtgcgcttgcagccaggaagggcagggtgccacacctgctggactctgagagagttcccagcatgctgtcctgtacagagctggcccttccaaggtcacagtgaggacatgctgaaaatctgccactacatagatgccattgtgccagcccccaaagagacaccatgctgtcgggcctagtccaaggacgacgactcccttaggtgctgccctcagataggatctgagagtatatgggcttttgttcaccagctagagaagagagatggcaggcatgctgtgggctcaaggagtgacctgtggagtcttcatagtgggagtgggagaggttgagaccctgaggaaggtcctctgtcctgagcagccactaggaagctcatggccaggtgggacaaacatgggagttttccatgcttcagttaaaggcagttgtcactcaggaggttgtggcaggattgttatga

SEQ ID NO: 33245 - DNA, 1808 bp, Mus musculus
acccccaatgccttgggcatcctgctgcttggcctcgtgggttactatatcttccgaatgaccaaccatcagaaggacctgttccgcaggacagatgggcgctgcctcatctggggcaagaagcccaaggccattgagtgctcctacacatcagctgatgggctgaagcaccacagcaagctgttggtctcaggcttctggggtgtggcccgccacttcaactatactggtgacctgatgggcagccttgcctactgcctggcttgtggcggtggccacctcctcccctacttttacatcatctatatgactatcctgctcacccaccgctgcctccgtgatgaacaccgctgtgccaacaagtatggccgtgattgggagcgctacacagccgctgtgccctaccgcctgctgcctggaatcttctgagggcagccttgggaagcatagagaggtgtcattgagtgtgtggagttggatgcatgggggctggcatctggctctcccctgcaaactgcctcctcagtttgctcatctggagaatggagagcctggtgtcccacagtggctgctgacagctggagagctgaattcacacggataccccagcagaatggcttgttctctctgttcagcatcctgatagcagaggccctttcatgtctctctgcttggagcccaccatctattctgtctagataacttaggcttatcagatgtctccgatgattgggccatcctggtaaaccggagaccatgcaggatttaaagagtttggcaatgccatcacccccccgccgcacccccccccccccatcctggtgagctaggctccatttttgtctgtagcatgtgcagtgttaattgatcagccaagggttcagaggccattgaagaagggaggcttttttgtttaggttcttgattttttgtttctttgtttgtttttgtttttaccccaggaatggcagacagtggactggaatattcagggggcactgcccactgcacagtccctggctaacttgataaacagggttcccaggactccccaagtgcccacctagcagctcatccacctgccctcttctggaaggtgcttcttgtttacccctgagacttggctcggacaacccagaacgtatcaccagtcagtggccttagccacaccttccccaactggagacccagtgttggggaaggaacacattctcattagggacactgcccccccccccaaactcagggtattctgtaaaactagataggcttatcttagccttgcaggcagttctttgtattaaatctgctttgttaaatgagttatgttgtactgtctcctgaatgggcttgaccagtaccaggggtgggaattggtgtgggagtgagggctgtcgtacgttgttggatggaaccccaggaagtattagagccaatgcctattaggacactatcaaagcttcatgtcctactgagcattggggacaccctcctccataattcccttatcagtccagaactctgctgggccatttgcttgtcagaggtgaggcgttcattccatttgccagtgacaggaagccacacagtgaatggagaagccacatagctgggcctggacttctcttgtttctggaaaagtagaggtgcatgagagatgagtggtacccacagccagggcacaactggtctgcttccagttagagctggttgaacgtttaacaaagggtttctggcatctgtgctagtcagcacctttatttttccctcgggcaaagtccttttaaggaacctgggtgtggtggttg

SEQ ID NO: 33246 - DNA, 1294 bp, Mus musculus
aagctgactgtggtatgtagccacttcaggggttgcgcttctcactaggttggcggtacatgtggccttgtgcccacccccatccccattgtagtcaggttcccaggatggagacagtgctcctggggtggccactcagtgaggaggctctctggggtccagtgtttggaagaggaggaaaggggaccaaagggaagtgaggtcctagagcgttgacactgagggaagtcctatctgtcagtcctgaccacttaagccaggaccccatgcttcctttactctgtctcctcatctctgtacctcccctgacaccccagtcctggttggccctttctcctgccttgccctgaagtcttaccttctcccattgcattcaaggcctatagcacaaagtgcatctcagagatgtgctagtggcttatcctgggcttggcctgcaacatgggaggcttgggacgggggtcttggacctgctcatgacccctgagcagcctgcaatgaggtgtgtgtgcccagccacttggctgggcagggagatagatagcttcttcctgcaagcttccagaagcacgctgtgttctttttgccaaatatgttcagttatagtcagctgatagattgatgtggctgaaaacaggaccgagtgaactgatgctcccacctgggtgcctccatggcttccttgagcaactgtccctaagatgctttcaagtgtatgagacatgaggaggctgggccactctggttatgcacagtcaggcaaactgtccttgtagacgagtccccgactctgggatacatgaggatcaatgcccgttttctccccgtgtgctttcctgcagaatccttgcctttccgttgttaggttgggttttctatatgaattatcatctggaattctgtagcacacctcataggtatggaatttttttaaattaaatattcagaataaacttttttgatccatttactgtgtgatcttctgcagtgcttggtctccatgttttgctttgaaggtggcattgggccaagttcccaggggccctagcttaggtgccctttgtcaactggtgccgggaatgaagggcaggattgggatagctggacagatgtctcaatagctaagaccctgcattgttcttgaagagtaacggagttcagttcccatcacccatgttgggccacacataactacctgtaacctcagcttcgggggaccccatgcctctggtctctgatctggttcttgtaggcaccagcacacacaagggcatacccacatacaaacccatat

SEQ ID NO: 33247 - DNA, 1684 bp, Mus musculus
ccacccaggcagatcccaggggctctcccagcattaactccgccccccagtgggctatgtcctcccatatcagtcatcaagaaaatgccctatagtaggtcagtctgatgggggcattttctcagttgaggtttcctctctgagaggactctagcttgtatcaagttgccacaatgctaaccaacatagccagctccttctggtgaccttgggggtttgtagatgggactctaggtgacatttacagaaatcaaccctctatctgctgatctaagtgaagggaagctcagctgcgctgcctctgggactggccacatggtcctgtgtggatttagacccatattcctcccacatacagagccttggaggcaggcacagtgaacaaacaggacagcaatctcgctgactcacaagggcatctgtattcctgtttgtcctgctgtcgggtgaggtgcatgcctggaccctgacatggccctgcttttcctcccctccagcattcacaagcttcgagagaatgtcttccaagaacaccagacgctcaaggagaaggagctggaaacgggacccaaggcttcccacggctatggcgggaagttcggtgtggagcaggataggatggacagagtaagtggctgaccgggctgagctgctggcctgcatgggtgcatgatgtgggtggcagtcagacttttcctgagtcatagtgtagagtggggtttgctgagggtgaggggttgctctgaggggtcttctatagctgccctctggtaaagttcttctgtgtctctagtagctgttttacattgtcagaggccccagccagtggctagtatgtagggggggctctctgggagagatcagcaccatgaccggctttgtgagcacaacagagtctggaagcatccgtctcacagacgtcattgtcaccatggcctatggttgagatgggcgaagtcagctctgagggcccttagctcccatcacatctgtggagtccactgacgcttagcttatgtcctatttgcatttgtgggccactctgtggccaggtggggaggatgtccatcctgtctcagctgtgcctgagcccctgggagtggcatcaatggttctgactgacaagcagatgctgtgggcatttgctgcataaaccatcagtctggtagtgttttgcatcttcttgccccaagatgagggagtggagcctgctctggcgctcactctaggctggctggtttttccagagagaaagttgcagtatgtgagtgtgtctcctgcagagcaggcctttgcgctctgttgatgctgtaacagtgtagtcctgagtgagccgtatggggtggttctgatgagtagacagtgatgctgctgggtagacatggaagagaggctcagctgctgcctgtctgatgggtgactccctcacacatggattgtattcagctatgctaggcacagaaggccatgaccgtgtctcaaggagacaccactgtccattagaggagtggactcattagcctgcgggcaccctgactataggctgtgaagagacaccatgaccatggcaactcttatgcaggaaagcatttaattagggctagcttacagtttcagaggtttagtccattaatcgtcatgtcagggaacatgagcacacacagacagacatggtcctgaagat

SEQ ID NO: 33248 - DNA, 1179 bp, Mus musculus
agtggtttgccctggctgcactgcctgggccttgccagtaagtagcccaagctccagtaagtcctcaccacccagtagaccctcacagtcagaacttacagcccaccccccacccccctcccccagcgtccaccaggggtcaggcctctgctggctcacccagagtgagtcaccagttcaggccctgagtcaacactgcttctctgtttgactgagaaggttgtcaccagaagtttgaaggagggagaagcagcttttgtgggagcttcagatgtagaagagtgcagaggtggggttgaagaactgattgtggtactaggtctccagagcaccctgggccttgctagacagcttctccacccaactttagccctggccctagagctgacctttaattgagggcttatgacagttatgcctttaacaccttgtaaaatgccagggaatttaattggcccttcagactttgacctgttagtcgggaaggcacctggcataactccgcaccgtcctgagcatccttacctccttgtgcccctggtctttgtcctgggcatggtcgtgtctgcctaccagcttgtctcttaatggagtcctgggcaggctagcctactccgtctgtgcactggcctccataggcatggggtgggggttgccctttccataacaactcctgacccagccacctttgctccgctgcgctataggtatcaggttcagggcctcaagatggtggattcctccatcctgtgactaggtcctctctgactgagcttcgtgctggctgtgtggggctgagtggctttctctgtccccgtctgatttctatcagctttattgatatttcaccctacacgtgatcacccgattgaagggttcagtggttatcgatgtattcagagttgtacagccatcaccacaaacagttttggccttctcagagatctacatagaatgtgcatgcccatggtcccagtggctgggaatgctgaagcagaggaccttaagaccaaggagttctggccagcctaggaacaaacctggagtctgtctgtctgtatgtgtctctctttctactcctccctcccactccctttttggtggtggttgggatgcatttgagacggatctctatagctttgattaaccggaaactcactacgtacaccagcatgcccc

SEQ ID NO: 33249 - DNA, 1239 bp, Mus musculus
cggtgtagagctcgtctggcaacttttgctatgtggacccaagatattttattacagagtttttaaactagtgaagaaaaaaatcataaataccatagagaaaatattttagaattgactgtttcttatatttatgtaaacttatgcctcctcatttatatagttacttactctttcatgtatatccaggctataaatatccttttgagtcaactcatgttcttatacctaattttagtcttttaaaggaatgtactgtaatgcttgtgtataaatctgagcaaatatagggcttttgtaaattatgcatttactgtaattattcctgtttaattttttaatgatgaacccgacagaggaaaggattttgctacgtttataaagtcatcatgatacaagccatgtgcattctcctctacccagctctgtaacaatcattctgaaagaagcagactttatttccagatgttttctgtcatattttaatgactgaccttaaccatactttttctagacaaaatctcagcttccattagacttgagactgatggtcaggactctgtgaacagcccttaccccaaccacatccctagccctgctctggacatgggtggattgtctccagaggctgagcagggccctgagctggtaacagcactctacaggggcagggtggcctcacctgcagactgagcagctgatggagcctcgaagccatctccctccctccacactcatcaaggaccaatcatggggcaggtgctcatttcctggctggggcagagcaggtgaaagcaagagacttcagcggagcaggcagcctgcaactccaataaaggccttatttttcttgtataaactgtcttacatttatttgtaactgttgtaagagtggacctagttctccactcagctgtcttgctagcctcctgactgacttcagtgaactaagaagccacagggctcaggcacacatgtgcgtatttattgtgtagctgatgtgggagaggcttttatatttgctttctgcttttaattcatctggacagttggttgttctgtttttctgttaatcgtttgtgaccctcccgattatataacagtctgtgcagtcaacttctgaactgtttttatcacagtgttatttattgctgtttttcaataaagtccccagcattttccactgccagttaagagtgctgtgaacaggcgtcggctgccttatgctctgctgaaggt

SEQ ID NO: 33250 - DNA, 1154 bp, Mus musculus
ttgcatacttggaatcagcatcccctttacagcctcctatagcagagcatttagggttctaagatagcttttacctttggcagcctaccctgcctccctgcaccatactgagggagatgaaactcttctgtccctccatgcatagagaagcagggcctagatcactcccttgctactgagagctgttccttgatggacaaacataggacatgcaggatgctggtgtgtgagttgagggagtgagtgatgagcatgctgtggaccagaagcagttgggttttcttctgccattggtgcttagcataccttcacctgtgttaagtgagagcacaggaacattgtagctctcagtggagggaggcagtctgaccagtgttctgtgttagatgcagggtctcctgctatagcccagatttgtcttgaaggcacttttttcttgctgtagcctctagctgctgggctcacacacaggaccccccaccccagctgaaattcacttgttctgtttacacacacagagcttcctggtgaagtatggccttgtttgtattttaggctgatacaagaagagaaggagaatacagaacagcgggcagaggagatcgagagcagagtgggcagtggaagcttggacaatcttggtcgttttagatcaatgagctccattcccccctaccctgcttcctcgcttgctggctcctctcctccaggcagtggtcggtccacaccaagaagggtccctcacagtcctgcccgggaggtggacaggctgggtgtcatgactctggtaagtggggccttttttacttcagcctgctggggaagggttacacatggaaatcacatcttccttcaagaggttccagattataaatgctgaaggagtaaagactgaggcaggtgatctctgtgcgtttgtgtctaacctgatctgtgtagtgaattgggttagccggggtatatcatgagaacctgttttttgtttgtttgtttgtttgtttgtttgtttttaaagttaactagtatttagttattcagtaatgtaaatttgtaaattaacatatataataagttaattatataaattataatataaaaatcataatatacaaatatatattgtatagttaacataaaatacttcaatgaccaga

SEQ ID NO: 33251 - DNA, 1223 bp, Mus musculus
tcagtcaagtcacactgctcttttccctcctagatctgcaggtggcatttgacattgtgtgtgacaatgtggggagagactggaaaagactggcccgcgagctgaaggtgtctgaggccaagatggatgggattgaggagaagtacccccgaagtctgagtgagcgggtaagggagagtctgaaagtctggaagaatgctgagaagaagaacgcctcggtggccggactggttaaggcgctgcggacctgcaggctgaatctggtggctgacctggtggaagaagcccaggaatctgtgagcaagagtgagaatatgtccccagtactaagggattcaactgtgtcttcctcagaaacaccctgacaagcctacagctcctctcaggagtcactgtggacttgatcacaccatgatgtagcaccaagtgccttttgtgcccagtgccaaaaagaccttgctgatccagggcgggtcccctcccaccagctcctggagtatatctgtatctacggaacctctgctccctgggctttcggaacacatgaaggttccccgtcgtgttctccaccactgctcctcccccccacccccccaagaggtctctggtcttgcaagaaggaagttgaagctgatggcacatgtgctgactgcagtttgagagccttcttcttgttccttgggggaagacaccatctcagttaagatcacttggttgccttacagttggccaagaggacatctgtctcacatccttggaggccatcagacagcagctcctgaccccccaccctcaaacaagtgcaagacccctgtgaggactgtggtttaaagggtagcaccttgcctccatggtggtctgtaagcaagtgccctgggcctacctacatatagtggctcactctgaaatcctagcacttgagagttgagaactgcactttacagcagcctgagctacaaatgagatgttctccccaaacacacaaaagcaagtgcctttacctggagataacttgtgtcaccaagaatttctattatattaagaacccttctaacctcagaaatccctcccatcaggctgactgaggtgtgcttacagccctgggtgctagttgtgaatggagtgatgtgatttccttcacaccagcaggggccctgactgccacacttggagcccaataaaccattgtctcagctttctaacctttggctgggtgtgataat

SEQ ID NO: 33252 - DNA, 1150 bp, Mus musculus
acagacttagcatgccctgaggctccaactgagatattctgtggagggtgaagaaggcagtgatctgcgggcttccctgcaaggtgtcagactggctgtgtcctgagaaagggctgaggtgctacatgcaagcatgtgtttgtgggttcttatgtctgcaaatacccacaagcatgtgtgtagaagggtgttggtgtattcctgagaacatgtgtgtgtgaagcatgcacacaaactggccctgaacttttgacttccaggcctctgcctctctgcgcgcacacacacactcgcactcctgtatatgaagcgtatatgtgtttctctgggaactgtttttatcaggtgaagtacttcctttgttcttgctacccacctccagggctccaggatctccagacagccaaccctaagacaggcccagcttcctctgtatctctgtgatgagaaccttggcatagagctgccctcaccctcgggatagggcttatgttccccggaacgagccaggcacctcaacagctcctggggaggaataggggactgggaagtgtctgttggctaatatttaaaactgacccaacaggagtctgggccacttcggggatctgtcccttgcccttagtcagaggccagtggcttcacactgggcgtgggttgggagggaggcaggaacattcatgtcctgctcagttcctatctaccatttgaccctggttgacacaacacaaccttttctgaaaggttttgctagatgtgagtagcttacagaaggccatgcaggctcagggaaggcaccacgataagccattagtgtcctgatgaagaaatttggctgtaggctgggacacacacacgcacacaagccccatggggaggcacatagacattcagagcattccaccagtgagattccatgtggacctgggggctaagtcagggtgaagcttccacagctaagtggctggaggctgccctaaaagctcaggaggcaccgcaagcaagccttgaaaaaccttacccaccagcttgaccttagacttctggccttcaggctgtgacaatacattcctgctgtttaaagaaccatatggttggtgatgttttgtttgtttctggttcttttgtgttggtgttttttgtttgcggg

SEQ ID NO: 33253 - DNA, 1099 bp, Mus musculus
tccctagcaagcaaggccagcagcagctctacctgccactggaggatgcggttatcccaggctgccaggtgcatcagaatgcctcattaagggatttggagacatggtgtaatccccactaagggatagatagatgctcaagtgtctcctctaggtctcaggacctggctgcatttccgttggtgttctgagtaggaccaggaatgattggtgcaagcccaatgacagaggtttggcagaaggaagccacagctcccagaagctctggtccaaattactgattcctcggtgagggggtgcagcaggctcttcggctcctccatcagtggccaggtcacctgctggctccaggttcctcagataccacagaacagggacattcacacctaggagaacagtaccagggttctgcccagttcacccccatcaggccagaatggccacagttgggtgtgggggtgctggtgggggaagggacccttccagatccttagagtttgacatgctcctgggttgggaagttctggcctccacacttgaaaatctctggggaactgatgcccaatgtcttgccagctttctgtccttgccttgggttacctaggaggaaagtgcgggtctctgctgtccctgaatgtcctcaacctgagttctcttagaagcacccactccgtagtttagacttcccatcacctggaagacccttaaatttccaagcctctggggccagaccaagccttgcctccctccctccgatcgtgccctacctcccggctcccttagagttacaccctgatagccaagccacagtgtgacttgcctcccaccgtcagctcaagccagtccttggcgcagcagaaaggttctggcggttcaccaagtgtcccgcaaggaaggagcacaggagatgccctggggagcagagagccaaggggcgggatcaacaggttcgagtgcggggcggagccaagagtaaggggttggggtctctccaggtgacagtagccaccgccaggcccgcgcctcctcccccggcggtgattggcaggcggcctgcgccccggctcccaggcgaccgacgccccgcggggcaggcgag

SEQ ID NO: 33254 - DNA, 2836 bp, Mus musculus
gtaagaacgggcggaccaagaaggggaaccgagtgtcgcctaccatgaaggtaacccacttccttcctagactgtgaccctccggagccctgcctcagcctcggaagcacaccctacccctcaggaggagcactttctctcgatggagaattgtttgcaaaaaaactggtctaagatatttaaattatttaaatatgtatatatggacgcccaattatttataattttatgtattctcattttcggggggggggatatgaccaaaagaacaaacaaattgcagctcagacctctttggaatagcggaacagacttctttcttcactatcaaagatatgggtgtgatgctgtttcatgtgtgcctctaaaacttggtgacatcagtttccaagggtgcctggcctgtaactggaaaggcctgcctgggacctctgaggcagtgagaaggaccctgagcgttcccgatcgggagcattctgccgtcgccgctccctctgcttcctttggtatgaaccctgtcggatcggtttactccagggacagaagtcctcccgcctctgtttttagatctccaagactgatctttgaactctcttgcagtcaatcatcttcttggacctaccggataggagacccttagacaactttataaactcctgtttgccatttttggactggccaacagggcacgttgcttgtagccactggaactttgcttttctggagaggaactaggaatggacaagagggtgtgtgcgctcgccacaactcaaaactctggggatgaaattctgttttgtgatagaggatgatttgttgggatataacaatgtattttgcaagaatcaaactgagaaaaacaggcttccctgaatatgggaagctttgtgctggaactccataatttaagggtgagctgccctttcccaccccaggcagcctttatgcaggcagactgcaggagtccgaattccggtgctgccccaaggtgaaggaattctatccccatctacctcagagttcctgagaccctggtgactaagctggaggctctgctgggtgcatctgcctgcttctcttccacatgtagtatctggacccttgtcacgttccagctatctttacccaatgatttacttttagtaaggggtattcatggtgaaaatatgcacgaccagctgtcggagtgcactatatggtcaccaagtcaagtaacccttatatttttctttatatattttacgaatgtaacccctgtcactgagaccaaaatggaagagcagggtcggtggcatttaaaaaaaagggctgaggtgagggagaacaattaattttaatgaatgactttggagtttatacaaaatgaccttagctcgcttcagggaatgcttctccccaagatgttaagactctgctgggagacttctgagcaacctcccgaattaactttatgggaggctacagacagcaagactggaaaatctcattggcattttttttttttgtctttcacattcctttagaaaactctttgtttggatgctaatgggatacttaaaatactattctgtaccacagcccaagatggaagaagccacaccccaaagctgaggtgggagctcctcccaaacttcctttctgtctggtggctcacaggacaataagattttgtgttttttaaatccaggccctaggctccaagagtgttggggagaagacagttgaaatgtcttttcttcttgttattttctaaaagacggtctcatagcccaggctgtacctgaacttgctatgtcactaaagatgaccttgaatttctgatcctcttgccccatttcctagtgctaaggttacaggcattgcccaccacgcccactccttaggtgctgggaattgaaatcaagtgcctgccaggccactccacagagataggcctccctcttttttgtgggggaggaaatgtggggtcttactctgtagccaaggctggcctactgcttgagcccaagtgttgagactacaggtagaaggcacctgccctgttctgatgggattctctgcagctatgttgcttcaggcaggctgtggtcctacctgacacctattacctgtttcttcagccagctagctccctttcctgcgcccagggacaagactgtatctttggaattttgttaccagaatgggtttgatgtttctgctctgtatctgccactgttaccgagtcggtctgtagttactacaggtgtcgacccagagatagtatgtgctatgcacactggatgctccatccaaagagaagcattcaatcatgtatagacagccccatggactgatgggaatgattgggagagatattaaaatgacaaacgtgtctgcaagcacctgtgtctgctttgtcttttttctatttgcagctgagcagagtgggagcaaggaaactagttttagccagctgtgtgcacacacaaatgtggcttggaaaatagtcccagaggcaaaggtatatcacaaagttttaccgcatcctgtgtctcccctcagtggggttctgtggctgcccactcagtcactaacccgggtgtaagggtctgtgtccacacggtgaatacttaccccatgaagcacaatgaggcagaagctggccaggaggagcacagtcaacacatatgtttgacttcagccaactgctctcagtgaagatatgaaatcatataagtcatcaaagataccagatcacaggttgattattttataaagtttctgtccctgcttcatcctcttaaactcttaagattatgggtttgtactactacatctggttgaaatttggtct

SEQ ID NO: 33255 - DNA, 1539 bp, Mus musculus
aggtaatttgcacacctctggctctgtgcctttctattaggactttttggcagaaggtggagagcgggaggcttaagaggggatgtgagggaagaggtgaaggtgggaccacatgggacaggccacggctcctctcatggcgctgctaccgatgactcccaggatcccagacgttcagaaccagattctcattgctttgtatctttcacgttgttttcgctgctattggagggtcagttttgttttgttttgttttacaatgtcagactgccatgttcaagttttaatttcctcatagagtgtatttacagatgcccttttttgtacttttttttttaattgtgatctattttggcttaatgtgattaccgctgtattccaaaaaaaaaaaaaaaacaggttcctgttcacaatacctcatgtatcatctagccatgcacgagcctggcaggcaggtgggcggtctgcctccagggatcctgggaccctgatggcgatcgtcctgtcatgctgggcccttcatttgatctgggacatagcatcacagcagtcagggcacctggattgttctgttatcgatattgtttcttgtagcggcctgttgtgcatgccaccatgctgctggcccggggggatttgctctgagtctccggtgcatcatttaatctgttaggttctagtgttccgtcttgttttgtgttaattacagcattgtgctaatgtaaagactctgcctttgcgaagccagctgcagtgctgtaggcccccaagttccctagcaagctgccaaaccaaaacgggcaccaccagctcagctgaggcatcccagccaggcaggacccttgagggccgctgtatccatggtgatggggtgaggttttggccaaaaggccaaagactggtggtgggtccacggaatctgccctgtgacatgaaaggctttgaggggctctggctggtggccaggttggctttttgtatttctggttgacacaccatggcgcttcccagcacagacatgtgaccagcatggtccaggaaaaaaaaaaagacaaaaaatctagaaaataaaattggtaaaatctcagctcactgttgtctgtgttttctgggaacaggagtggggtgatgccacagccatgtggggtggcatctctggccctggcaccaacctgggattcccaaggggaagggtgtatgcaagtgacagccaagagcaaagtgggagcctctggcgtcagggaggccagcgacagccactgatcagaagcggctctgggtccatcactgccagctcaccctcctgcttatttgcagatggaagatcaacagaacccgcgttcactgccccttgtctggcgcaaatgggtgtttgctctgggtgaatcaccgtttcttaggtgctgccaagcgcccagagagccatgcttagtgttagggccaagacccaaggtggcctttcacatagttctgcagacctgagtggcctggcaagactcctgtgatgtcttcggggtggcagttactcatgactagtat

SEQ ID NO: 33256 - DNA, 1186 bp, Mus musculus
catctgagggccaccgggcaggcgggagccaccaagtagtggcacccgcaaagaggaaggagccagcccgggtgctcctgacgacgtcccccttggggacatgttgttaccagaagaggaagttttgttctctttgttggttgtttttccttaatctttctcctttctatctgatttaagcaaaagagaaaaaaatatctgaaagctgtcttaaagagagagagagagagatagaatctgcatcaccctgagagtagggagccagggggtgctacaaaaatagaattctgtaccccagtaatcaactagttttctattaatgtgcttgtctgttctaagagtaggattaacacaggggaagtcttgagaaggagttttgattcttttatatgtttttaaaaaaaagcttaagaaacattgctttaaaaaggaaggaaaaaaaatacagcaaaccattgttaaagtagaagagtttttaggttgagaaatgtactctgctttgctgaaaagccacagcttaggccctcagcctcactccctggcttgctcagtgcctacagccctgttacctgatacctgtgctttatcccaggggtgggcagacctcttaaccttatagatggtcagtgcgacctctagtggtctcatggcgtgtggcacaacccccctccccagggctcagcttaatgtgccctctccccccaacaacctgcaggttcacagcaccagccacacagcggtagggatgaaatagtgacataatatattctatttttgtaaccttcctattttgtagctctgtttagagagatgctggtttttgcctgaaggccctgcagcctgcccacatcaggttaaacccacagcttttgtgtgtggtttgttttgttgtgttttctttctctatgttccaaaaccattccatttcaaagcacttttggtcagctagctggaggcagtgttgctggtgtgtgttggggggaggggttctaatggaatggatggggatgtccacacacgcattcagatggctgtacaacaggttgtagggctggtagtatgaggtgcttgggaagttttgttgggtcaagaagagagaactctgttctcgcaccaccgggatctgtcctgcaaagttgaagggatcctttggtgccagctggtgtttggaagtaggaaccatgat

SEQ ID NO: 33257 - DNA, 1195 bp, Mus musculus
caccctgcaaaaggggggcccccggagtttgagttgctggagctcaccccccgatgtccactgagctcctgaccctcggcttggatcaagggtcgtccgatggttattttcaggtcgtttttaggcacctagttattttttaaatatttttaaatattttttgaaaagatgacgtctgggaaatgcagcgcggcggcctgggacgccaccattgtgtctcgcgtgcgctcgagcggcgcccagcccccggcgccccgccagccccgcggtggggttctctggcttgtggcttcctaatttcaacaggggaccggggtctccgtggccaccattgcttcgaccggccccgccagctgcccaaagactttccctttcagtttcagggtgggtgggcactgggaaccctcggagcaggagcgcatcccagggagttggccaccggaatccctctctgtgcaatctaggagaagggaatggggtcgtatcgagcgacgcccccctcccacgttgacggtcagggtccggatccccgcaggtctgtgaggagcagaagtgcgaagaggaggtcttcccgctggccatgaactacctggaccgcttcctgtccctggagcccttgaagaagagccgcctgcagctgctgggggccacctgcatgttcgtggcctctaagatgaaggagaccattcccttgactgccgagaagttgtgcatctacactgacaactctatccggcccgaggagctgctggtaaccacgtaacccaccaccgacaatccctctttatgctgggtggtgggagctgcaaatggcaggagatccagccatccatggacagatctcctgccccacgaaaggcacccgcaccgcaccgcacgacaccgaaatggcagtgagcagaatgccaacccattctacctctgtgcccgccctctttccgtactggactccccaccatgtctgtggtgaaaccactctgaaatgtgggcggtgtgcgccccctagcgacgtgcaggccacggcgctggcggtgggagattctttttgtccgcagtctgtccccttagtatttctacaggcacattttgttgtttacctgtatggggtcccgggttgacccaactctttagaccttctcgaatcagcctgccttccttttgaccgtgttcctcattctctgcagcaaatggaact

SEQ ID NO: 33258 - DNA, 1193 bp, Mus musculus
ccttcatccatgctacactgggagatagccagggccccaggcttctgcaccttggtgtgcaagtgtgttttgaaatagatgattgattgcctggggtgtggggatttctatggggtagagtcctgggggaacagtcaggtggctcatttgctcagagctcagagaacatagcgcagcagggggacctgggtttgagtccaacttgtacctcatactaggctttctctgtggctctggcttatttcccaaccctggtgtcatgggacattactgcactatatactatatatagcactatatactgtatagcactatatactttagcaacagggtctgaggaggccccacagatgtatatggtagctgtttgtcttgctggagtgatcttaacccactcatagtgggtcctggccccttgcccttcacaggtggtcaatggtgtattttgtgctatggtggctggtgtcctctgttatctggatcaacctgtttctggctcttcttctggaggtaccagccgtccctgtcctgtccagacctgggattgcctactgagttgttgagagttttggtgggtgagccctgctagccaagtctacaggctaaaggcagcctgattggggacctctgagctgcttgctctgctggtctgtggggctctcaggaccccaagctggcttaagggtgaagctgggcatcttgctgtttcaggggtgtggctctcacaggctctgcatccagatgtccaggttgggctgtcccccacagtgactgtactgtgactgcagactgggaaatgggggctctgaagctggtatcacatgggtacttacaccctttttccctcctgctccagaactttctccacagatgggaccctcaaggtcataagcagctccttgttgggaccaagcagatgtctgtggagctcatgttcaggtgtgggcttgggcgtgtctccagtccatgggactaatggagaggggtgtgggtggaggaaggctttctggcagggatcctcttccacccagtcatctggactgctgctgagctggcaagagatgctcacagcatgatggtgagcacttctgtttctaccagggccttgtatcatgtgctctgcttaggatccagcacatggaagggaccatctatcttccattgtcttgtagcttctggctggtaccatgggg

SEQ ID NO: 33259 - DNA, 4240 bp, Mus musculus
gaaacagacagaaaacagaacaaaacaaaacaaaaaccaaacctgacctacagagcctggctctagaattatatgctctgcagggttgggctttgagaaggtttcattaatctaagagaaggattttattttattttattttactttttttcctcattcacaaaatcagttcctcaaattgaccaatagctgctgctttcatattttattttgggaaagggtgtgtattcctaagtgtgtgctcatctgcacacctgtgtgcatttgtgtgtatgttgtgtccaggttagagatcacagggtggggtggggtggggtgggggtggggtgctgtgtaaaatagtctctggactgatgcttggtgaattggctcccgaagctcctgctgcttggagtgggtgacctcatattgtcctcttccttctcatgaactgagagtctgtgccctcgagagagtcttctcagtcacatcagaagtcttgctcaggtgtcttcttccccttccctttgatgatgttttccgaaaacagagggaggattatttggtctggattctttgaggatctttggaagaccaaacaaagcaaaggggacacacacacacacacacacacacacacacacacacacacacacactagaaggaagtaaggcaacaattttgagaatatatttgtaacatatttaaagcttatggaatctctggtatgagcctaataagttagtatttctttgggagcagtggtgggcacatctgcctgtgtggggacacaggacaatatgtgagtggcctctgggtttggtctttgaaacacatatttttctgggaattataccacattagctgctagccctttaggactcggggagttcttgtggagtctgtgggtaactggatattcgactgtttcagatagtaacattgactggatgtttcttgcttggatacactggtggttacctggagctgagatggccttccagaacacctgtgttcatctggtttttctctgcttgtgtacctcacttcttcaaggcctacactttgctcaatcattgtataaacatactaaactcagatcccgaagaccaatgacacagatggactttgagaacactaagcaatatgtaaggagatgtacccttccgatccccgctggtctcctccacctttggggcatctggctattctctacactaaactcccacagctgctcttggcgtccagggacctcagcttgggccagatatagtgcctgagtttatttctcaggtgcttatgtttgagtctctagagactaaagtctggaggagaaaacatcagagactttcttctcaccaccaagaactcgtgaaaggatgtgaactcacaacttctctttgcataaaaccacagctgctcaagtaaaagaaacaactatggtgaactcaaaatcctcccagaggttctttcctgcgtgcatttcccacaaatatttgatgcctttcttctcccttaggagatatgagataaagacacactggccaccctgattaagaacacaaggaaacataaatcctggttgtcaattgctgtggaatttatattataaaaattgcagcatgtaaaaatgttgccagggaactcaatgattggcataagcatcaagagttacagttacttttacccaaaacactttgtaaatagaaggtctgtgcatcaatggaagacaccgtaggtatggatattttttgtttatttttccttttcacagtaaatttgtagtgatgctatactagcagaaattttcacacctttctacttcaaaaggttttcttatagtaccggggaaagtatttattttaatatataagatcactcttgaaaatcacttttgtaaaaaaatgttatgaatgtaaattttttttttatcaaggagaaataaaaacaggtgagtgtgggtcattttttttttccttcttctcagtacagtctacctcagtgtcttattaggatgtggttcagtaacagatgttgaggcttcaagattctggctgaatcattctctgagttggggagctgtgtaccatttgatttttaaatgccagggactagggagaactttgaaggagagagtttagattaaaaagttagagccttcctgtgaacccaaagtcttcttgttggtgatattcttcagagtatattctccatacaaaaacccatctgttgattgcacactcctcacacacaagccacacttcaagtcatcatgatttagctctttggaggcccctgatctgaggtctttgaaaagtgggtgttccttttactgatgaggctgtgagccagtaccttcagaagtcacatgaaatcccccggacatgaatgcaaagggaatctgggttttctgaccatgatttctcaccctgtttagacccatgaggctgtttgtgggcacctcttacacaaatagctgatgcaagggtatttggagaaatcctgctatgaaacctatcagtttcctgaacatatcttaaacaataagataggaaccctatgctggggttgggttgacttcaagctgacactgtttggccttgtgcaatcttgagaactctggaaatcaaggcggggccagcatggctcctagtttcaagctttgacatattatttcactttagaacactgtccttaaaattttactcttttccatcttttctggaaaggtgcaccaacttgggtgaccctaccaaaaaggactccactaattccatgttgatatctactgttgctgggaaggaaacaagtagctattgggtcatgagactcattttggtttcagaagatgttagctttgtgagatctagaaaatcatggctatcctgggagttcgtagtgatggatgaaagagagagagaaaagaaaatagaaacaaaagcaagttacattgatatttcttgttgagttttgggagatgtctcatcattttaaaactactttcatgatcatgatgaaatgcagttatttcttccaggatagcagcagacatgttgtctggttcaatgatgtcaagcatacatcaggagatgttcatgtacttggagcctttctaaatgtttccctgtcatttgatgctagcttgaagggaagagccttgatggctttctggatttaggctgagcacagtttgggagagtggagattggcaggaagagctgaactgtattgtgtggcagctgggtgtggtgccaccaacacaagtaaaaactatccttactatcttatcaggacagacgttctaccatgcacagtgattattgggttaagggctgtaattttatttgaaacctaccataacactggctggtgggcagtatcactgtgagagtctggttcatactggtgatcttggtaaatgaatgatggttgttctagtaatggttctattttatgatagatggatgtattccagattctagctaatgaattcttgacaacataggctcttcaaaaattatggttttgtcggacatgcgaaaagaatagtgctgattttgtgtaaatggtgcacatagcatatagtcatttttagaaaaaccttccagtatgttcctcagaatatgaacttatacaaaagatgaagttgggcaatgggaataacagaatatcacttgtttaaacgacacaaaataatatgatggtcttttaagaggtaatgactgaaggcatatgcatcctcagatagtactcaagaaatggagatcaatgagtatttgagctaatttgataccaatcaggatacaaaaatcagtctctggtcaaatttttatctgtatgtgggccatttaaaaaacaaacaaaatgaaacaaaaacatgttaaaaatcagatcatggttctggaacccttgttattatttgagaagaaaggaaggtccctcagatgtgtgtgtgtctgttcacatgtgcaggaatggcttgtttggtctttatcctttgtatcaaagttgctgcttctttcccctttatgtgcctgggtggttatatcccatgtgtcaacagtgtgggatcaaatgtgccatagcactgcagaaaacgcagaaacacaaaacccatccaaagcacagtgacattttcctacaagagccaagtagcatcatgtccagaatatgcctttttttgtgtggggaggagagggactgaaattgttctgcatgtataatacaggctaattacttgtttatattaaaatttggaata

SEQ ID NO: 33260 - DNA, 1136 bp, Mus musculus
ctgctttgaaggataatccactgatccaatcagtactacccatttgtagccattcattggtatatgtgcaacctatctctggtcacaacttcacaggaaagcgactctccttcccaaccaggcattagttgccaatagctcctcagagagggatagccctccttctcctatgttggaatttttacttggcttgattttgtacaggtctgtttgtgagctcagtagccatgtcatatcaagaggagagtatttcctaccctttgactctcataggtttttcacagcagacacttgggggtggggttgatataatatcccatctactgctgagcactcccagtcacttactctcagcagcctgaactgcaatgagtctctgcatccattagtactcactgcaatgagaagcttctctgatcaaggctgagagcagcacagatctagggatagaaacacaaacacatagaaggctgtttgacaacatgactattcagaaaagcagcatcaccttgccctatggctttcctagctgaggatttgaccatgttcacagtacctggcaattcctaatgtgtccatgtctgtctgtctgtctacctatctatctatctatctatctatctatctatttatcatctattaatctaatttataatttatctatctatgtatccatctattaatctaatctatctatcatcctatctaatctataatctatatctattaatgtaatctatcatctatctaatctataatctatctatagtaataaattaatttaatctatcatctatcgtgtctgtcctctctctctactagtcatctatctatctatctatctatctatctatctatctatctatctatctatcatctatatctctacctattaccaggcctaatctgacctctagtggccaactgaaataaaatctgttgtcattgaaagtctagagttttttgaccttcattctaagctggatttctcatcttatcccaagttgatatttggggctagattactcaatggtgagaggaacattttgtgtatggtagcatgctgaactctgctcactccatagcagggacatcacagccttccaaagaagtgatggaggcatactcttgttaac

SEQ ID NO: 33261 - DNA, 1102 bp, Mus musculus
ggggtctggagacatgaattgtgatagagtgcttgcttagaacctccaatgaggagacatggctgtggcctaaggaatgacacccaagaatgacctctggcctaaatatgtgtgtgtgcatacaccatacacacacacacacacacacacacacttgaactaggatttgtttatctgttccaccttaccgagaaagcactgtggtgctgtgtgtgtgtgtatgtgtgtgtgtgtgtgtatggtgtatgtatattggagtatactttatgtcatgtgtatgtgtgtatgttgtgtgtgtggtgtgtatatgtgtatgttggagtgtgctttgtgtcatgtgtgtatgtgtgttctgtgggagacttgagcccacattctgcctctccctagggctgaagctcccttcacggacctggtccccaccctttgagtctgatgattctcagaagcacaatcagagtgagtatgacgactcggccagtgagtgctgctcatgccctaagactgactctcagatcctgaaggagctggaggagtcttcattcaggaagaccttcgaggattacctgcacaacgtggtttttgtccccaggtcagagctttgcacgggccagctctctttctgtctgttagcttggtgccatgacttcttagggaatgaactcaggagactgtgtaagtggggaggtggctggagcctgagctcaattgtgtgcttttggttggagggggaaaacagtcttgtttgttgttgggaagagggcccacttaggaaagtatttgccctttttaggacaaagggcacaaggacctgagtttggtgcccagaacccacataaaaagccaggtgtgtgcttatattcccattactggggaggcagacacagtattcctgggcctttctgttatccagactggtctaactagtaatgtctgggcgtataaggacaaggtggacagcatctgagaaaccatagccaactctgtcctctggctttacatgcatgtctacctgatcacacatgtgcacttacacacatatgttcacatgtaagtacacatgtgacccacaggtgtatttgtgtacacacacacacacaca

SEQ ID NO: 33262 - DNA, 1212 bp, Mus musculus
cacaatttactaaaacagaacaaaaaaacttacaacccaccatcaaattagagaaagtgaaaatgtgctgttcatttagttgatggattctggattctgtctttgattcgtttttggttagcaatatccttagcctgtgaccttgtagaagcaggccaagggggctgctggagaggtgtggctgaggtctgtccttgaatccacccctggcctggtatctggttttggctaagtcacagcagcaagtagtctgtctccttttgtagagaggggcagaggacagatgactcctgggaacagtcccaactctaagatcatgtgctatatgtatgcctgtgacatcattcctgccttggccaggatcaccagctaggtttatctccttgcatactttatatagtttgggagcaagtccagtcctaggctcagcactgacttgttggctctgaatttgagtataggaaaccaccagctagccaaagctatactttttgttttgttttgttttaaaaaccagcaacttaaaaaagtttgattgtgctgttgtttgtttttaaacaaagtttcacatgacccaggttggccttaaactcatgatgtaccccgaggatgaccctgatcgtcctgtctctgccgatggagtgttagggtgacactctccactatgccagggctactgcagccaactttcattctgtaggtggaaattccagattgcagaagctgaggatatagcttagtccgtagaaagcttcctagtattcaggaagccctgggctccattcccagcaccatatagacccagtgcagggggttcagtcctgctactgcagcatttggaaggtggaagcaggaaagttgggcatttaatgttatccctacctacatagcaagtttgagtcctttctaaggtatatgagaccctgtctgaaaacaaaaacaaaatcaccttacatccatgaataaccacaagggtattttaaaaaatggtgataagtgaatattacagaatttatttgcacttgaatgagtatagatgcatacacatttctggtctgactgagacacatttaagaaggtgaatgcatatcttcttaaatgttacacacggtcccacactcttctggaagcacacgaaggactttatttgaagttgatgacaggtgtcttgctctgtggatccttgttttctgaggtaggacttttttttta

SEQ ID NO: 33263 - DNA, 1211 bp, Mus musculus
aagtagacagatcttttgtggtctctgactagccagagtagcctttgaggtgaatttgaggcctgatcatttaccctgtctcaaaacacaaggcagcactcagatgtgtatgctgttagtcccagcactgaggagacaggaggcaggtagacttctgtgagtttgaggctagtcaggactagagtctgtttcatcaacagacagaaaaaaaaacaggtacatggaacctgatgctcttctctaggtccatgtacacacacacacacacacacacacacacacacacacacacacacatctgcacctaagcaccaaatagaaaagaagagagaactctccaaggttcccatcccactttagtactgagcttgacacttacacagtggtaacccacctctccctcttatttttctcaaaagcccttatcagaatgtgacagagtttgatgggcaggatgcttgtggctccaacagctggactgtggtggatattgacccgccccagaggtccaacgaccccaagtctcagaccccaagccaccctgggtggctgatgcggggcctcaaaccctggacccaatacgccatctttgtgaagaccttggttaccttctctgatgaacggcggacctatggagccaaaagtgatatcatctatgtgcaaacagatgccactagtaagtgtgtcctgggaacaggggtttgctgatgaattgacactattatctttggtaggcagcttctgtgacagggtttctcccgtggttggcatctagaggagctaagggctgagactcatattttcatagataatgaaactataacccatgaactacttcagagttcaagagttcccttttgggcttggaagatggcttggtgggtaagattatgtggtgttcccagtacccacactgaaagctaagtgtgcccatgttcatgttccagagtcctggttacttgcatctattcccagagcactggggctcagggacaggtgcagggtaacactaggatttgatagctgccagcctagctttagtttcaatgaaagattctgtttcaaaagagtaaggtagacaatgatagaatgggatagaataggatgcctgacctcctctgcttggctctgcacatgcacatgcatatgtaacacacacatgtacgcctccccacatataatacacacataccacatataacataccacac

SEQ ID NO: 33264 - DNA, 1203 bp, Mus musculus
tactgagctatatcccaggccctcactggaggattctggttacattactcctcacccatgccctcagtcctcaatggaagattctaggcaggggctctatcccttagtcacactaccaatcctttattcggggattctaggagcatgttatacactccatgaaaacaacttctttgttttccatattcccaaagatttttttgtgtctgtacatagaatgtattttgatcataatcacccccatgcattcctcatattccacatagacccaccccaccccaccccaccctacctcaccctacctccctctcaagttcatttcttcttttttaaaataaaattataacccacttagtgcactctgtggcacctgccatcctcgaactaagaacattggttttgagtaactagttgtgtgtgtccctgtaggaactattctttttatgccttggacaaccagaacctgaggcaactctgggactggagcaaacacaacctcaccatcactcagggcaagctcttcttccattacaacccgaaactctgcttgtctgaaattcacaagatggaagaagtctccggaactaagggccgtcaggagaggaacgacattgccctgaagaccaatggggaccaggcatcgtgtaagttgcttcattcttagatccccagcagctgcccccagggtcccctctggcagccactaccctagctgccaggaaggtgccattgttgtttgttgagctacagctttctgtgagaggagttttgaaatacaaaaggcaggtatagatgtgtgtatgtgtgcatgtatgtgcatgtgtgtatgtgtgtttatggatagacatccatgtgtctctggaagccagaaagcaacctcaagtataattccctggacaccatccactagttttcttttgctagattttttttttttctgcctaaagcccaacagttggctttataggctgtgtaagaacctcagggatccatctttcctatttttttcagtgctgaggatagaagtgctctattgctgtgaagagacatatgatcaattgttataaagaaaagcatttaattggggctggcttaatttccttctgaagcctaggctgtcatcatcatggtgggaaccacagaggcagagagacaggctgagagcttatattctgatccacaggcagaggcagagaaaagaga

SEQ ID NO: 33265 - DNA, 1205 bp, Mus musculus
tgtgccacattttcttcatctgtttttctgttggcagacatttcctcagctgtggtgaacagagcaacagtgagagtagatgtgcagtggagtgtctgtgatatgctgacctagagtgctctgggacatacacccctggttttttttttttttttttgtgtgtgtgtgagaagccaagaccaatttcaagggttagttgttcctcaggtgccctccatcttgtctcttgagacagggtctcttactggcctggagttcactaatagaagtagcccagtgagccctggggatccatctatctctaaatgccccctgccctcacagacatattatgttacacaagcttattacatgggtcctgggcatagatgctaggccctcatccctgtacaacactttgttgtctccccagttctaggttctagttccgttagccgttctagagtccctggctcacctactttgctttgcctttattatctgccttctagtgtgccctggtatggacatccggaacaacctgaccaggctacatgagctggagaactgctcagtcattgagggccatctgcagatcctcctgatgttcaagaccagacccgaagatttccgagacctcagtttccccaaactcatcatgatcacagattacctgcttctcttccgtgtctatggtctggaaagtctgaaagacctcttcccaaatctcacagtcatccgaggctcccgtctcttcttcaactatgccctggttatcttcgagatggtccacctgaaggagctggggctttataacctcatgaacatcacccggggctctgtccgcatcgagaagaataatgagctctgctacctggccactatcgactggtcccgtatcctggattctgtggaggacaactacattgtactgaacaaagatgacaacgaggaatgtggggatgtctgtccaggcaccgccaagggcaagaccaactgtcctgccactgtcatcaatgggcagtttgtggaacggtgctggacacacagtcattgtcagaaaggtatgctgaaggcagtgccttttaaagatttctccgtggttagtatgcccaggagaagtagactcctgtaaaagtttaggtgatggaggttgtagggtacaaaccctagaatctccataaaaaatacattcgtccccttatctgcgaggcatacctatttga

SEQ ID NO: 33266 - DNA, 1233 bp, Mus musculus
aaatagatgcatgggcagggaccttccaggtgtgatggtggtggagctgtgtcttccggaagccactggagtcctgtcattcaggacagtcggccatgaagcttgtagggcaggttccaggttatccctttttcttttcttctttgtcttttgctttttcctttttgttttgttttgttccaagtcaggtggaggcagagcccaggatcaccataaggaagggcgtggtgtgtgtgtgtgtgtgtgtgtgtgtgtgtgtgtgtgtgtgtgtgtgtgtttcctttccttctaccatgtagggtctgggaaatgacactcagactggaagaccttgggttagggttagagtgaagggttcccccctttcttgtgttcaaataacctttattttaaggcactatggatgataaagttaaaatgccacagaacgagggaagtacttttgacagttccatgactacgtacattatttcctttttattattaacttactaatttcttactatctatttatttatggttagcatacagactggtggctgtcacagtgacactttgtacacaagtgctgttgaactttgtgcatacttaccctcctgagaccctccctcatcgcaccgccatcctcatcctcccaaatagccttccttctgtggtactggttttgtgttttgataaaaggttatgtagaaagggtatgttgtgtagaccaaatttgccttgaacttgttatataacatagattggagtttctggtccttctgcctccgtcttacaagagctgagataagactgtactaccatgcccaggtcttcattgtttgtttgttgtttttatttgagacagagtctcacgttagccaggaactctctgggtaaactaggctagactgaaacctgttctgtttgtgcctcccaagcactgtgactacatataccactgtgcctactttttattagttttattacattttttaaaagatttatttatttatttattatatagaagtacactgtagctgtcttcagacacacgagatgagggcatcagatctcattacagatggttgtaagccaccatgtggttgctgggatttgaactcaggacctctggaagtcagtgctcttaaccatctctccagccctatgtatgtatgtatgtatgtatgtatgtatgtatgtatatatgtatatatgtatatatgtatgtatgtatatgttcatgtatacttg

SEQ ID NO: 33267 - DNA, 1373 bp, Mus musculus
tctaattcagtctggtgaccatgtggtagatggaaagaacacacaccaaaccaacgtttgtttgcttttcttttaaggctagagcacacacctctaatctcagcacttgggaggctactcgggagggttggggtggggatctgtctgccaaagtgtgcatatggagttcagaggatagcttgcaacatgagtcctgtggattgaacccaggtcattgggtttggcaacatgtgcctttacctactgagccatcttgctgttccgatgacaatgatgactttgacagtgacagtgaccataaaggcaggctacagtcttgagtcttagagtccatatggaaaagccctgtcacctcagccttctactcattctggaacatcaagtcagtccatggaagctggttgaccacttgcttagctccaagaatatcatattcttggggaccacaggaaacgtgcgcagggctactgagatcattccgagctgactggcctctagccaagcccataacaggatgggtgaaacttcttcatccaaactatttattagtgaactgtcatgaacctgaaaggaggctgccccaggccaagctcctgtgcgggcatctaaacctttgcttattactttatcatgtagagaatgatgagggagaaaacctccttatctaggctggaggccacacagactactggaggggcctgaactaccttgtgagaggctaagatctaaaaactctcagcagttgcctgaggcaagccagctgtaaagaaacccacgctccagtctaagtgaagtcttcccagccccaacattgttggcattggagctaaagagactgtggtgggctgccctggggaatgtcttccaggagtacccttgctccctcatggagataactagaggcaatacaggaactgagcatgttgctcaggggttggaagtgtggcttaaagatggaaccactacctagaatcccccactgcagagctaggagtgtggcttgggtggagaacctacctggaaactccagagagaaccctgtgggcatcatacatggcttagcgtgtacaaagcctgcctggcatgcatgagatcctgggtttaaaccctgtgtttgcctgcttttgacaaacgccatcctttggtgttatcagtgtctactggacccttcagaaagaaggaacccaaagactttgctttctgtcccatccccgaccccccttccctctacagaccctgcctcatcgacccaggtcatacccctgcatcatctgtatccttccccctcccgacccctatgtttcacagggtacagtgttctgctcacctgtcattccatcctcgggcttccttaaaggccttaccatttgaaa

SEQ ID NO: 33268 - DNA, 1222 bp, Mus musculus
agaggcccccacacgcctctgcaggcaccaacatttctcatacccatacccataattgtatatgtatatacataattaaatataataaaaatcccctttaaaagtttgtgtgggcagtatgccagacactgaatcaacataaagggatttggccacctacttctagccttgctacctgcttctctttaccccagatctgtgcatcaagggggcgtggggaggttgcccaggggtaccgtgtgttcagagtagaactctttggttgtttataaacagctgcactaaaggcagaaagtcccactaggtagagctttgtgggactgagaaagtagctttcttcttttccccttttatcctgttggtaccctcagcctgtgggatgtggctgttagggccagggtcagtgtcccacacttagctagtctactcaagagatcaaccagtcttgcttgctggcttagatgctccttatatcatgctaacactcaggattaacccggacaagagctgtggatgcccgggggacaagagagatctaaggacccgtgcttaaatccttggcacgtgtgaacagctagccatggctgtgtgcacactcctgtaacctcagcactttgctgggtggagacaggagaactgcttaggtttgggggccccagcatagctccaggtgcactggaagactctgcctcaaaggaataagcttgagagtgagagagcaggacacctgatgtcctcccctggcttctgcacacacacacacacacacacacacacacacacaccattcttgtatttcctcacatgcacacactagttaataaaacaatgactaaacagcaaaagataataaaacagtggtagaaaaactaagaagttaaagcaggagaaaataggagcttggggcatagcttagtagagcccttacctaacatgcagaggctctgagtccagtctgtatcagaagaatttaaaacccaccacagataataacccctgaggtggtagcagtggtccttacagtgcagacaggtatacctggatgcctgcctgcgtgcccttcaacacaaggatgtgatggtctgtatgctgtcactgagaggttggtggcatacagaagagctccttttgtcctctgtgaggtcggagtccttgtgatgacatcatttccagcattgtactgggtctgacttgcagagggggcaggaaggggcttggcagg

SEQ ID NO: 33269 - DNA, 1205 bp, Mus musculus
agatggatctctgtgaattttaggccaacctggtctacacagagttccaggacagccagggctacatagagaggccctgtctccaaaaacaaaaaaacaaaaaaaaagtttatgagtagtcagatataagttgtgtggccacatttgagagagagaatatgaatatggctcagtgtgaccatgggtatacacatactgatgtgctccaagaactgtcaatcaccagaagcaactatagatggaagcagtgctctgcagagtgcagaatagaccttcctagctgcagactggatgcagagctgggtgggcaacacccattcatctctgagcatttaacagccatgtttgatcctccccgggccaaagccaccagaaggctaggaggcctggtgtgggttaatagccaccagcaggcttagcagcagtaggatgtgtcttccgttacttccaggcccaacctgcaagccaccctcccagcttcaatggcgatgggctggaggggcactcggccccagccaaagcaccaggaacccaagggagcgcgatgctacatggcacaggacctgacaacgtagagcgacccgaggtggcccgctgggacagtgccccccctgagagccggccagccaagagcgatgtgcccatccagctactcagtgccaccaatcagattcagaggcagacagccgtgcaacagcagatccccaccaagctggccgcctccaccaagggtggcaaggagaagggcagcaagagcaggggttcccagcgttgggagagctcaggtgagctgcaccccacccccaccactcagagaagctgcacacccctcccagtggacctgtcccagcagcatatctggaatgcagacagggaggcagataggcaagcaccagtgtgcgcaagaagacagagaggttcacttttccagttgcatttctgttgtgataaaataccctgactcacagttccaggtttgagtccatcgtggtgaggagtcagagcagtgagagcttgaggcagcctctcatagccattcaggagcagagagaaatgaatgcatgtatgcttagtgtccggccagctttctctgaaccacggcccaaacctaagaaatggtggcgccccaggctgggacttccacaccagttaaggcaaataagacagatactcacagatcagcctgatgtagaaaatccttccct

SEQ ID NO: 33270 - DNA, 1131 bp, Mus musculus
gttcttagtctccagagcccatcgtcctaagaaaccactacaaagaccctgccctgtgatacttaggtagacagtaccttagatggtctgcagactgccaggccatccccacctctgtggaacagggaagtgtcagaggctgctggcatgagcaagagccctccagagccaagacctaagcactcatgagctcagggagcgactgtgggcgtagttaccaagaatccaaccgcgagctagtaagacaacagggtgctgaaagtggtggtctctgacgacttccgggtgccaggaatggagcagggtcccccttgtcctcatccctaggcctatggaccccagcacccgaatagctcttactcttgtccttctgtttctatcttgtgtccggagtgtgtctatatcttccagacctcattgtgccatgttgctaatcagtgttttgtggtttgttttgttggtttgggttttgttgttgttgttgttttgtttctgtttttgtactgagatgtatctgagcactttagaaaagctgacttttaagttcccactctgtgaagagaacattccagtacctaacaagagctgggtgggctcaccaccagacaccatgactttttggatttagaagttcaaatggtttccacttggccctgggaaggattcagtgtatcccccaccaggtggccaggtggttctcagctgtgtactgtaaacagtaggacagtgtcatcagttacctgtcaccagcagccatgggtcccttcctggcagatctcatttgtgaagatggtgagccagcagcattcaatctcccttgtcaatcgtgtccatgatcttcgcctacccctgattattttcacagcgatagcagagcatcctggcaacagggtattctggaaccacgctagaacttgtgaccagattctagcaataaaattatccagagcatctcaggctgaaacagaccttctttggggattgggaatgcagagcgtggagctgtgccctgccaaggtttttgttgataaggaacacaaatgtcgaaggtgagccagtgcagagtagatccgaggatgtggttcagtcagaagagcctcgctgagcatgcatgaggccccacatcctatt

SEQ ID NO: 33271 - DNA, 1172 bp, Mus musculus
tgcataaagtcacccctccccaccacatgctcccagaacaacttgatttaggcactacttcattgagactccactcctagggtattccagattatgtcaggttgacaattaaaattaaccatcacagtgtgttaatggccctggggcaggaagtatgtcacaatgtacaaactggttgtttctaaagtgacatttatcaagcaaggcttgagatgaaactagttttgagtggtgagggtttggcagctctatttgtggctatcatgtagatgtcacgaagtggatacatggctgacgttcaccctgtctggataacacacatgtattgcctgtccctataggaagaagagaagtccacactccggcaacgacgctttctgcctcaggagactcccagctcagtcgcagatgcctgaggatcttgacagggaagccctgttcctagactgggttatgggtgagcttgtgggggagctcacactattattcccactgctgctatacttcaacactccctgggcccttcccccttggctccaaggaccacacactggactgacttgccctgtccctaaggggagggcagaactgcactgataacctttgaccaactatgtgaccttcccccaaataaactcttacccctttcgaagcagcctggtgctgtctttgggttcctggggctcctcaccatactgtctgtgctcgcacgttgggcttagtctgaaggagcctacagcttgtcccactgaagtaacaatacccatgtgggtactctgtaccctgtctccagacaagttctgagcatgctttgccgcttcttacctggcttttgggtgatcccacaatgtcttgggtaccttttactctccctactaaatccccacagccatagactatagagacagctcagaaggggcacaatgtgctctgatttgcagaggatcagagttggactactagttcccaccccaagtagctcacaactgactgtaactccagctccaggggatctgatggcctcttctggcctcctactcttcctacactctttgtatactacctctcatatacacttacacaaaatgaaaaacctcctacagcctatgcacctcagccagtcctactgtgtgcaggagctatgtgtgacagtgtatactacaaactaagtc

SEQ ID NO: 33272 - DNA, 1175 bp, Mus musculus
gctctgttggccttgctggcgaggaggggcacggtgccttcactgcctgagcacccagtgcgcgaggctgacctgaaacaccagccaattctcatggtaggctctgctcctgacctatgaagccctgcctaccaggcttggctcctcccctttgcactttcctgcaaagtttctagcttgtgcttgaacctcccttcaggctctacccactaattctcgttacactccccaaatggttcctctagccatgccctcaagctcagcccattaggtgtagctcctccaaccagttttagcccctcccacaaagcttagctccccctatcaagcctacctccattttccaagcctagcttttccatcaagctaagggtgtcacactcagttctgcagatcatacctggctcctccctcaagttgctatacccttccactcctcaggttcctccagttctggccttggtttctctagatgggctactctattgtaaatcctggtgtcttagctcaaaacccagcccatgtgtgacctctttcataactgtagctctcaaggtcccacccagcaatccctgaccccacaccattccctggccccactcctcccacttctctgggattggaggcagaaagagtagctccctgcccagtcttctggtctcatcttccagcctttgccccaacagggagcccacctagctgtcatcgatgctctcatggttgccttctcatttgagtggacaaagacactacctggtcccttggctctgagcagcttggagcacaaactccttttctgggtagacacagtaagtagggtgggccaggccatgtggagtggagacaatgacgttagccaagtgaccaggcactgacttctctctgacccctagactgttcggcggctgcaggagaagacagaacaagaagcagcccagcgtgcatctcctgcagcccctctggatggggcctctcctgcccagccctcggtgaggctaggacaagggatggatggatggatggatggatggatggacaggtggatggatggacaggtggatggatggttatgaggcaggtgggaagggatgggctgcacctcctggccattgctgagattgagggtgggcctggaggtgactctcttttcctctttttctctgcactttttattg

SEQ ID NO: 33273 - DNA, 1172 bp, Mus musculus
aagccgcctgcctggcagtcgagaacgtgactgggagaatggaagcaatgcatcctccccagcatcagtgcctgagtacacaggtaagtgagaccgggtaatgttagaagctacgcgttctctacctgcctttccccaacccacgcccagtctctgctgactgactgccctccaggtccccggctatacaaggaacccagcgccaagtctaacaagtttatcatccacaatgccttgtcacactgctgcctggcaggcaaggtgaatgagccccagaagaacagaattctagaggtgagtcccacagctgtctgggtgggtaagactagcgggtagagcagtagtccagcctgaccagcttcttgccaccatccctcaggaaatcgagaaaagcaaggccaaccacttcctgattctctttcgggactcaagctgccagttccgggccctctacactctgtctggggagacagaggagctatcgaggctggcaggctatgggcctcggaccgtcactcctgccatggtcgaaggcatctataagtacaactcggatcgcaaacggttcacccagatccctgctaaaaccatgtctatgagtgtagacgccttcactatccagggacacctttggcaaagcaagaagcccaccacgcccaagaagggtggcggtacccccaaatagtgcccaccttgggcagtgcactcctgggtcctgtctggtcatgctgtggggggctgagctgggagcttcagtgactcagggctcagctcagtccccttgtctgtcctccactttcttgaataaaataactgaaaagagaagctgagacacggtgtctcctccctaagcctgaccaagtttacgtctcgtgttttcacaagccctaccttgtcgtctttgcccttttgctggccctgtggcagctcctgccaacatctgtggtgaccttcctgttgacactccctcctctagatgttctcagccacctctgatctgacctggcaagagattccagaccagctctcctctcctgggcctcctccacccccacattttcctcctccgtgtggttgcatttggtgtgcagccaacttctaacccgatccctgtttcctgttgccaacctgccttcatttctgagcccagttacagtctctgagctggggat

SEQ ID NO: 33274 - DNA, 1148 bp, Mus musculus
gatggggcctcagagggtgccctccagtagtctgccctccaggagtctgaacctagggagcggtggggctccctaagaggtagaggaataaagcctgaaagaggtagccagggccctccagggggcaaaatttgaggacagaggtagggacttacaggggcctctggtagggagaatttggggaaaggcagagactcagatagagaatgggaggagtggggtttgggaaggaggtgtctttgcaagggtgggccttagtgaaggtcttggagggtagggcagaggtgtgcttagagacaggacccgagtgagagttggagattatgaggagtgcttagcttgtgctcagttagatgaacttcaggatgagatagagtggggttatcttaacaaagtccctgatttgcccctgctctgttgcctccccacaccttcccacggcagccagctgcacagctaactcttgtgtcatgcaggacctggccatgggctctgatgcagagggtgagaagatcaaggacgccatgaagctgattgtcccggtgctgctggatgcctcggtgccaccctacgacaagatccgggttctgttgctctacatccttctgcggaatggtgggtgagggaatgaagggccagggatggtctagatcctacagccgttaaaactacaaggccctcatcgcctagcatgcctcttagtgtccttcctatcgctgtgataaaacaccctaacagaagcaactcagggagaagggggttatctgactcactgaggtcaagcttgaagcagctggtcatactcacagtcaatcagagagcagtgaattcatgtaaacttgtgcttgtctctgcttctccagtcttacacagctcaggatcctctccccagggaatggtaccactcgtagtgggcaggtcttctcacctcaactaatgaaactaggaaagtcctttagcttcttaactaagaaccgtcacttaatggtaaaagaaattagaagagtatttttttaaaagacttagttatttagccaggctgtggtggctcacacctttaactccaggcctcgggagacagagacaggataatctttgagtttgaggccagtctggtctataaaactagttccagggctacacagaga

SEQ ID NO: 33275 - DNA, 2315 bp, Mus musculus
attcctctccactgatcccattagccactaagccctccaccccacccgcccaggctctcagtggtaagccttggggcttagtggaaaatccctcattatcagcatacccctggcaccctatctgctctacatgggtgggggcacacaaaactgcaccccaggaactggggcagcgaggaattccttgcttgtgactctagctttctctaccccctgtgttcccctgtaagctctctcctgtcctccagaagcctctcatgctggcccctggccccccacactccaaagcctcataaccaaataataatctatcagaggctctgtctttatcagtttgtggaaatgtcctggtacctcctgcttggggacccaacaaccttgcaccttagcttcctggattcctgggtccccaagagacaaggaagcatagacagtggtaccatggtcatttcagttgctgagctccactggctggggttctttaacccttcctgtctggctccccaggatgtggtggaggaccggctagaccgaaagctgtggccctttgtgtctgaccctgcccctgtgcctagctcccaggcagctgtcaggtgagggccctggagaggcctgggttgggggttgggagctgccagcctggactgacctctacccatcaccccagcagcgctcgctttggccactggcacaaaaacaaagctggagtagaggcccgggctgggcctaggctcatcgtgtacattgtgggtggtgtcgccatgtcggaaatgagggctgcctatgaggtgaccagggccactgagggcaagtgggaggtgctcataggtaagtagccagaactggggtccttgggagtatgactgtggggattcctggggaccagggctggacatggggtcccttagagtctgcagttagatttgttgtcctcaaacgcctaagatgtggggacttgggcttctctggagcctgagcctagattctgagtccttaaaagcccagggctagagtctggactctttctcttgggggggggggggggtgtcctgtgctggactctgtagtctattgagatctaaggctgagctctgaggtccttatagggcctgcgactgagctctggtctttgaggggctggggctgaactcaaagaatccctaaagggctaggattagattatgaaagttctgggcttgggggtgggaatctggggactttgaaaggctggggctggagtcttcagtggagtaatcacctggggctggatacccctgttcctaagtttctgaacccctcaatcattgagaagacagggccctggtttgcagaagggcaggagtttgttctcaccagccaggacacgagtcaggagggagggactctacctcctcctttaaccttcccctcctgcccaggctcttctcacatccttactccaacccgcttcctcgatgacctcaagacactggatcagaagctggagggtgtggccctgccctgacacagccccttgcctctgccctctcctattccagagaaataaacgcttcccttctgtcttcccaccagggctcacctcattttcttcccagagggagctgtattgagccagacctccccctgcgttttcactgtcctgcccgaacctttccccggcccccagaagcatctgtagctttcattaacgctgagaacctgggctgtagggtcagtattggcttgaagtttaggaggcactggctctcttgctgggtcctccatccaaacccaggcctgattttggcagaggagatagagaggtgcagattaggggttgccagggctgcaaccccactgtcactagagttctttaggctgtaaggttagaaatataggaaaaattttaacctttatctttattttgtgtgttacacttgtatgtatgtttatgcatcataagtatcagtgcctgtagaggtcagaatagggtgtgggatcccctggaaccagagttataaatggttgtgtgaagccatgaaggttcttgagtctgctgtgagaacagctagtctcttacccactgatgcatctccagcaccagaaatagaaacggaaatagagtagacctgaatcctgactcttccccggaacctcccaggagctactgcaagtagaacttgaatccccaattccagcaatcagagctagcatttaaaatacagcaaacttggggctggtgagatggctcagcgggtaagagcactgactgctcttccaaaggtcctgagttcaaatcccagcaaccacatggtggctcacaaccatccgtaatg

SEQ ID NO: 33276 - DNA, 1449 bp, Mus musculus
atgttgggagccgcgcccacattcgccgttacaagatggcgctgacagctgtgttctaagtggtaaacaaataatctgcgcatgtgccgagggtggttctccactccatgtgctctgccttccccgtgacgtcaactcggctgatgggctgcagccaatcagggagtgacacgtcctaggcgaaggataattctccttaatagggacggggtttcgttttctctcgctcttgcttcttgcactcctgctcccaaagatgtaagcaataaagttttgccgcagaagattctggtctgtggtgttcttcctggccgggcgtgagaacgcgtctaataacaataagcagcatcattttccttgttcggggttgttctactttcgcctatgcaatcaatgctctcccaataaacgtgtgcagaaggatcctgttgcagcgtcgttcttcctggccagttgagcgcatgcaaaaattaaggttatattctaaattaatctaccctgattctcagtcaagtaatgatatgcagacctctaattaagaaaacagtgggtcccccaacttcttagcggaacaagtggcgctcagccacccaagattgagcaataacaggtctgtgatgcccttagatgtccggagctgcacatgcgctacactgactggctcagtgtgtgcctaccctacacaggcagacacgggtaactcgttaaaccccattcgtgatggggattggggattgcaattattccccatggacgaggaattcccagtaagtgcgggtcataagcttgaagtccctgacctttgtacacaccgcccttcgtgattggatggtttagtgaggccctcggatcggcccgccggggttggcccatggccctgggggagcgctgagaagacggtcgaacttgactaaataagaaagaaagaaagaaaggaaggaagaaagaaagaaagaaagaaagaaagaaagaaagaaagaaagaaagaaagaagaaagaaaacagtggggttgagcaccactttaaggagattataccaattgtaataggtctgtagttgcatgggccattgcttcactacttgttcaaaatagggggaatctgggccagaatcattggcagcttttctgattggtgcgaactctgccagaagagttgaaatcaagggcctagtcactgcatcagggccaaaactgacagggaaagtctcacgatatacctgaggggaatgaggctcccagggaagaggcagtccagcatgagggacaggcattgcaggagtgagcaccgcaagagtgatcactagaaggcaaagttcccctaaatcacaccaggggtaagctaggggtacctctgatggggtgggagcagaaggattagtgagtgagggacctgagacagcagggctagaggacaccttggaacctgacagcaagagggctgaagtag

SEQ ID NO: 33277 - DNA, 1249 bp, Mus musculus
tggtgatctcccagcattatccaattttaagaaattaagagtaaatattataagggatagagccatctttggcatcatagtctctatcccccctttttgtttttgttttttaaagaagttttaattctcctagttatctaatgaccggtttgagatagaggccttcatatacattctgtgtcctccccaggacatagcctgtgggagtcggttgccttgataccaggtgtaggtcatgaatgtttctgactaacaagaacagaacatttgtttctagggtggcttttcagcccagtcatatatactatttagatttacaaaataaacagctaggacttctctgtttagtctttcttgccagtggctaacttcagcttaggaatttttcccttgataggagccaggtaacaatgtatgggctctaatatgttgaataaaagtgggcggaggaagctaatcagcagggccacgtgctgagtgctcgtcactcttcggcccctgagaaggtctgagactggggcctcccgcggccctaaccgggctctccccaagcggggaggtgagttcccagagagcagggctctacgtgtgggcaggctgggcaggagaagtcccgagtcggggcagatgcctccctcgccggagcttggaacagactcatggccagcagagcgaattttaaccatttatattttttaacatgaaacacagaacaataatcattcaaacaacaaaacaaaaacaaacatgaattgacggatatatggacaatttgttttggtgcaccaaaaagagacaataggcagacagggaatagaactctgtgtctcaaagggacacagatatcctaaccagagctaagaatatctccataggagccagagaggaagtaggacgtctcccattttccttctgttcccaggagagctctgaaatagcttattttcattttttctcttttttgctaaaagatcccaaacaggggataactgcttttctaaaacttattttctctctctcatgttcagactctacttccttatctccttcttctgggaatactgccagataatggagaggaggcacagtggccctgagagctatctttaagcctttaatgaaggctgcctctttagtcaaagtcctcgagaggagggtaaattgacttaatttatattatcctttgtatctttatattttatattatcctttgtatctttatattttatattatcctttatatctttat

SEQ ID NO: 33278 - DNA, 1099 bp, Mus musculus
tgccacttatgttacagctgctagttcacgaggacgatgacatttcctccaacatcactgggttttgttatgattatctccatatcctgaaacaggttccagtgctctcggatcagcaaaaagctaatgtagaggcaatcatgttggccgttatgaaaaaaaattgacttatgatgaagaatataactttgaaaattagggtgaagatgaagccatgtttgtagaatacagaaaacagctgaagttactgttagacagacttgctcaggtgtccccggagctcgtgctggcttctgttcgcagggtcttcagtgccacgctacagaactggcagaccacgcgcttcatggaggttgaagtagccgtgcggttgctgtacatgctggcggaagctctcccggtgtcccaccgcgctcacttctcaggtgacgtgtcaaaagtgagtgctttgcaggacatgatgcggacgttggtgacatcaggagtcagctcctaccagcacacgactgtgaccctggagttctttgaaactgttgttcgctatgagaagtttttcacagttgaacctcagcacattccgtgtgtactcatggctttcttagatcacagaggtctgtggcattccagtgctaaagcccggggcagaaccacctacctattttctagatttgtcaaatctctcaataaacaaatgaatccttacattgaggagattttgaatagaatacaagatttattagccctttctccaccggagaacggataccagttcttgctgagtagcgacaatcagctcatttacgaaacagccagggcgctgattgttaacagtgaataccccgcagaaaataagcaggccttaatgaaggacctcctgacaccactgatggagaggttcaaggttctgttggaaaagctgatgatggcacaggatgaagagagacaagcatctcttgcagacagtctcaaccacgcagtgggattcgccagtcgaaccagcaaggccttcagcagcaagcagactgtgaaacagtgcggctgctcccaggtctacctggactgcttacagaccttcctgccagccctcagctgccccttg

SEQ ID NO: 33279 - DNA, 1708 bp, Mus musculus
tgatacaaataaccaagaacttgtgtgaattttaccactcagaacccatcatagctctgtgtagcataatcacccttcaacaggcaggaagtgagccctacccatgccagctgaccgagccagtctattgcacaacaggcaggaagtaagccctacccatgccagctgaccaagcaagtctattgcacaacaggcaggaagtgagccctacccacgccagctgaccaagccagtctattgcacaacaggcaggaagtgagccctacccacgccagctgaccaagccagtctattgcacaacaggcaggaagtgagccctacccatgccagctgaccaagccagtctattgcacaacaggcaggaagtgagccctacccatgccagctgaccaagccagtctattgcacaacaggcaggaagtgagccctacccatgccagctgaccaagcaagtctattgcacagccgaaccccagaacaaaagttcagcacatcactgacctatcactcctttggatacaggtttattgtagatttggaaacgttttcacttttctattaattgtgcaatgaatagtctattttctcattgccactactcccctgtttcccggacagcactgttgtagatgtgcagaacttcagacaatgcagcaataagaatgtgcaagagtctacgtctctgctcacttctgctccagtatgctcttctggtttcaatgccacgctgtgagttgaagtgggtagaactgctctgagaggaactggactagttacattgcctagcaaagtctccttagaagagacctagcctggtgccgtgggtctcctgcatagaaagtgtgacctggccagatgagcatcccaccctgagtgttccccagatgaccagactgatttcctgaagagagcacatgtatcgtcaggtggattatctgttcttctctattgtactgctaattctttctggtagttctagggttaacgttggaaccatctcagaataactatggatttgaaaacgtgtttacagtgtcttttaaactatcatttaggaacagttgagtcagatgtcaagatgtttcgggataactgctgctttcctgaccacccgttgtgagaccttaagaccccgtacctctccttagtatgcaaaaatctggaaagactgtctattttttaatataggtagataggattgccatttatttcctatttagatatacagtcattcatccatatgaaaatatgcaggtcactagtttattttgaatggactatttacttttggtgtaacaaggcataaataaaactttgaaagcaaaaaaaaaaaaaaaaatggggctcagagctaaacaaagaattctcacctgaagaataccaaatggctgagaagcacctgaaaaaatgttcaacatccttaatcatcagagaaatgcaaatcaaaacaaccctgagattccatctcacaccagtcagaatggctaagataaaaaattcaggtgacagcagatgctggcgaggatgtggagaaagaggaacactcctccattgttggtgggagtgcaggcttgtacaaccactctggaaatcagtctggcggttcctcagaaaactggacatagtactactggaggatcccgcaatacctctcctgggcatatatccagaagatgtcccaaccagtaagaaggacacatgctccact

SEQ ID NO: 33280 - DNA, 1158 bp, Mus musculus
cctgagttcaaggggtgcgtgggccagttacctggagggtgttgctctcctaacatggacaagggccgaaagtggggaggccccaggacttgttaataagcaggaagcttcctcctcctagtcagcttccctttgggacaagggaggccctgctgggtggggcccaggaactacaggtctgaggaaggaggggcaacttggactggatattagcaccccaggacaggttctctggacacagtgatattgagcagccagtcccttgccactggggacagatggccaggctggacttttctgcctggtgcaggcatcatggcccctgcagcagaaaccaaagcccccagcccatcctgtctgcaggacataccacctggggtgtgagcagtcagggggaaccagctcagacctgggaagtctctccccactctctagggctatagaagctgcaaagaagaaaccctttccctagagcacccatcttcctctggggagtactaatatcacacgtgttggctggctgtaaaagagagaaccccgctacttgggagttctcagcctcggtccatttattcctgtggacttattccacttattctggctagagtttcccagtccgttccctccccttatctcctcagagtattcccatggtctctgcccagtcagagttgagaatggtgccaaagtccatcaatgctccccaggctcctttacccttcaccccaccccaacccgcatcttggacccctgggggctgaccccttctcagtgctcctagagcctcaagtagaatggtgcccacagcattccctgggtgcttcctgggtggggcctccagctccgtttccattcctggtggcctgctcttcaagtgttaaaaaagcctgggggctggagcagggtacccctgaggaggccctcttgtgtgctcctcatgtgcccctccacactgcccaccaccattttgcacactgcctgttcacactccatgtctccaaggcagaaaagatggaaaataaagtgtatttacacagtcctaagggatgccgaatagagagccaaagggctggggaatcacagccagaagttgccaaacctccatccgtgtgttctagaagttcaaagatggatccagtggctaggtggtgtgagaaa

SEQ ID NO: 33281 - DNA, 1133 bp, Mus musculus
ggggaaaggcagcctcctgtaggtgaaaattctgttcactacctggccacctggcctgactgaccttcacagcttgatcatcttcctgaagaggcattcaggattccctccatccctaccccttctggacaaagtcttccacgtttccttcctgggagtttcttccaggaactggagatacccagaggtggggatgcatttcactgattctgcctgggaccagaggttgggcccctgctggattccagggccatccctccacggccctgtggatgagacagggttgggaatagggttctaggtgccataagagctgcctgtccctagagcagagtaagacctggtaaggctagtggctggcaggccccaaggagtcccctgcaggtgtctgtctctgtcagctccacaccttcctgccatcatcccatctctgttggtttctacccatctctgcagtttggtgccttgtgcctccccctcctcttcattatgatttgatttcttttctgttggacaaatcggttgtttctgttgtgatttattgtggtgtttttttttttctcttttcttcctttccccatccagttattgtgatcactctaagccctgctcctgccccgtcccagcgagcaggtaccagcctttttatcattgctgcttgcatatctgcacattgacctaaccgctgccccagctgcagaatgccatccctaccctatgctgtatgtgggtgtgtgggtgtatttgtgtgtgtgtataacttagggagagagagaaggaaagagagttctgtgtcttcattttcactctcccttaactacagaaatgtgagcctggctatactttctctgtgtccattagtcttctcatttcttctctggctcaatctggaatcctagaagatgaaatgagctcccttaatgagcaggagtctgctaagtgggcacacaatgatgtgtgtgtgtgtataaataaagtaggtagagataggtgcactgctcttatttaatctgtctcaactatgaagtgaatgagtgtcattatttgtgtactgtgtctcctttcagaaccaggaacctagcagtaagtaaaacagatcaagctcctatcctgtggggctgaggatgcaggat

SEQ ID NO: 33282 - DNA, 2587 bp, Mus musculus
cccccccccaacctggccaacccagctgcccatcaggggacctgggacctggacgactgccaaggactgaggacagaaagtagggggttcccatccagctctgactccctgcctaccagctgtggacaaaagggcatgctggttcctaatccctcccactctggggtcagccagcagtgtgagccccatcccaccccgacagacactgtgaacggaagacagcaggccatgagcagactcgctatttattcaatcataacctctgggctggggtaacccccaggggcagagagaaagccccttgtccccatccccccaaactcccagtgtctgtcccctccaccttctctcgcacacatgcttgctctacgtctttccttctgtcccctccctctctaccactgtccctttctggttcccctgtctccctcccagcctctgaagcctgggtgccgccactctaccctcagtggaaggaagccccaggttcatctaggcttccttaagtctttgtcctaggatggctttgtgggcattgtgactgcagccaaatggttgctgtctctgtgtctgtctgtctctctttgatctcagggggtccttttggagtttattgtattttattgtacttggtgggggtgtgttggggggggggtgtcctcatggggtcggtaccttcagaaaattttaccaaagtaatgtttagctgcttgtggtggccccctctcctccattgcctcaggcattgggggttggactgcttgctgctccttgtcatttctggcctaggagaggccaggctccatgggggaccctcacatgggactgggagctgctgacagtttggggttgagtagaagagctcaggtggcacagagggagaccaggggcctcagccacacgatggccttcagggaaggtgtatgagggatgcagtagagagtagcaggtagcagggagggactgttgggaacagtgacaggagggaatcctgccaaggggcaggaggggtcccgagaagtcagggattaggagtgaagggagtagatgtggaggtccgagcatgtgaatcagggacgagacggacaggcgtgaatgcaggggaggccagagtattgggatgcgacgcgacttactcccaacatgcccctgagcatgctttagctcacctagagctgaccagctccaacccaacctgtggcctggactgggccaggtgcctgtcccattgtcctgcagtttcgaggacagagtggggtatgtttcctttttgttggtgatgcatgcagttcaagtggacaagagaacaatataacaaaacaaaaaaatttacaaccacaaatcccagcaccaaagttgagaaaccttgctggaagtagctgatgcaaccatacgtaggcttaggtgacactgtggctcttaactgtcctgttgacgcctcttcatcctattctcacaatgccgcatgcttaaatcgtaatagaagtcatcttctatgcccgggtagggtagggcaccctctctccttatctcctgtgttggggaggcggaatgaagtagggagagagtagcaagcccggccccacccttaccattctgaggctggccgcagcatggctagcctttgtgtgtacttaggtcacatggctggtcccagggccagcacaggcccaagactgggcctgatggttttatttttatttaactttattttctgtgtgttgtctgtctgtctgtctgtctgtgttgtctttgtctactgccctctaatgttaagtgggagtctggaggagtctcccacttccccaccttctcccaagtccttccctctgtcaccagccatccctcaggcccaggcagagtgggtctcgggcaggtagggacctggagtggcctggtcccaccctctgacctcctcctcaggccaccagtgttgccctcttccctttttaaaacaaaatacccttgtttgtaaatccttagacgcttgagaataaaacccttcccttttcttccgagtctggtgtcctaagcctggtagagtgtacagagatatgggaagggcctgggaggagggcttttagtgtggttagggatgacattcatgggaaactagccgggccgggagctgggtgggaggtgtttggagtgaccgaaggcatcaggcagctttgtgaggggccccccttgtagaaatttcagtacatcaagaaagcccttatccatggctggccttgagcatgtgctcagatgtcagcccctccatcctccgcccccgctccctgcttcccagggtggcagcctcaccaaggccagggctacctacccacacctagagggctgggtacagcccagccaggtgctcgctgccggtctggagcactcgaacctggacaggccgccatggtgggcactgcgctcctgctcctggccctgctccctgggacctccagtaagcacggtacaccacgtggtacgtagaggctgccacggggtgggggcattgtgtcccacttgcccattgtcccttctcaactgcgttttgcacctggatgtgtgtggtggtgtggggagggggaggggtgcc

SEQ ID NO: 33283 - DNA, 2587 bp, Mus musculus; identical to SEQ ID NO: 33282

SEQ ID NO: 33284 - DNA, 1143 bp, Mus musculus
ggtaagcccattcccttggcaagtccaagggtgtttattaatagggtaccaggatgccctatacatcaataacccaggggtagagagccactgggtttagtcaggcagtggtattgtatataatctccaaatttgaaggagtagagaattgccaggcccctcctaacactacccaaaaagaaaagaaagaaatgtagatctggtacaaagtcagtaactccagccaggcactgacacttgagccatagtgtctatggccatctcttgtgtggatcaccttcagagcgtgcagaggcagagggtccattctaggtctagcagtggaagatgaaagacttcctcccgtcctgccctgacggctcttccccattaggtgctcaccattgctgctgcagaacccctcagcctcctgcactccaggccaggcaagcccacaaaggcccgtggaaaggcactggtgttcttgagcaaccaagatgggcagaaggatcctgcatctgaaggttctgggcctgtccccatgactgctgctgaccctactcgtgaggcttctgtctctgaccctaaggcctctggagccaaccctgagacctctggccttgcctcagaggtcactgtccctgaccctgatgccccaaccaagtccctggctggatcctccacagagagagaccttgctgtggactttgagaagatctacaaatacctttccttctcctccagaggtggccatggccctgagctctcagcagctggtaagagctactagggaggagagggctatactgtgtttgtgttgcgagggggttgtctgggggatgttaaaacctgtcctctcattcttctcctttccttctaccagagtcagctgtggtccttaacctgctcatggcacttccagaggaactgtcccacctgccttgcacggccctgctggaacatatgaccaaaacatatgctcaactgatggctccccagaccgctctccctggagagaagaggcccaggcctgggactgaagatggagggactggctccacagggccagaggagcctgaccaagctagtcctcaagcttctgagcccatagagccgaggctggcctggaaagcagttgggatctgcccactgaacccgttcctg

SEQ ID NO: 33285 - DNA, 1180 bp, Mus musculus
agctcattggaaaaaaatcactcctctaaagtcggggagggtggtaccatacctttagcacggcaaagtgtcagactataggacaagtacagagtgcaactttggggcgtttcatctccagggttgtgagcattgggtggaggtgtacagttctgaggcctgtacttgtgtgtttcctgcagctggccatgggcaagatgatggagcagggcccagtgctgatcgttacctttcaggcccaggtggtgatggtgatcaagaactccaaaggcgaggtgtatgatggtgacccggtgagtggtaatcaagggaatggaggtttgggagtgcttctcacatacagggccctgtgcattgcacgcctccccagcacagagccaggcagaagcaccacaagtacgaattgagagctttttgaagtcagagcaccgtttcatctgaccactgaccagagccagcagcccgggaaccccttccctgtccccctcagtagcccttctttctgtacacccaccaagcctgacccctcaccctgcccggtcttcacaggacaaggtgcagcgaatgctgtacgtgtgggcactctgcagagaccaggaggagctcaacccttatgctgcctggcgccttctggacatctcagcctccagcacagagcagatcctctgagggcagcaatggagtctaggcagctcgaggctagaccatcatgggacagacacacagagacactttgccacatctgatacagctgtgaacaagcttctgccccaagttcttcagggcagctgtgaaaccagctggacaagggaagagcttggggtgtctagcaggatggggactgtctcccagtgcgtccgtcacaggggttgctggcagtgtcagaaggccccagcccaggactcctgtcgggtgaggcctggcctgctgttctaagtagtccactggcattgccttccaagccactttaggtccttttgttttgttttgtttttgtttttaaatcagtgctcttacttcctgtacataagcctaagatctggacctaataaaacaccaaagcgcagaagagcagtttgaacggtttgaagtgtacctctctgctgggaaggctgggactgagggcctgtcagagacctaggtcagtgaaggattgtagccagagagagtgctgctttct

SEQ ID NO: 33286 - DNA, 1098 bp, Mus musculus
aaggctcatatgcccagatctgaccaaaaaaggagaggggtcctctgctttgagggtgcagagtgcacctccccgtgggaccaaaatgttgtgataaaatacgcatttctagtttcttagccagcattcttctgagtggaggtgggattctcctcagtcgtgtagcctttgtattccacacctgaaagagactgtgtctttaaaggacctggtgctcagagctagcaccttaatcactataccatccctaccacccaacacctgtttactccatagtaactctgagaggaactgggggaaatgtcaccagcttctggaggtcacttcaagttcgacattttctttctgtgtggtctccactgtctgggtagcactctagataaaagtcccagtgcattccttgatgagctttctttgtcagtgtctagaagaaagtagctttgaaaaggcattcctgaaagcagttttcattctatgaaaggactaggtcctggccctggacgcgttcatgacagctagtcaggctgggcagaaatacagaacccagacgtgtgtgtagctcagagattaaagcacttgcccagcatgagggcagccctgagctctgtccccagcattggaggaaaagtcacaacccaagagaaaggggttttttttgttttgttttttaaggagaaattcatcctgtttttattgagcaagttaaggccatttcttttgttgggaaatctgatggaaaaaaatacagagagtaggtaatgttcattcatcagaaatatggtttgaccaataccaaagaggctttgactgagttctcttgacctcctctggtagtgggttatttcttgagccacctccaggttcttccgcctacttctggttgggttgcctgtttctttcttgagtgattctctcccccaattgaaacttctaggtaatgtgccaagccatcctggctgtgcctctggtcacagaagtgtgactatatctccctcctccccatactctgatcagctaccatcttccttgactacctgagaaccaaacttcccttggagggtgggatgtgatgccactatattgaatgggttctgtctc

SEQ ID NO: 33287 - DNA, 1966 bp, Mus musculus
gggtgtagatcacatgagtgggatttctggtgtcaatgtccccggcaatgcttcctcgggctggtgcatcttcatctacaaccttgggcaagacgccgatgaggggatcctctggcagatgtttggcccctttggtgcagttaccaatgtgaaagtgattcgtgatttcaacaccaacaagtgcaaagggtttggttttgtgaccatgacaaactatgaagaagctgcaatggccatagcaagtctgaacggctaccgcctgggggacaaaattttacaggtttccttcaaaaccaacaagtcccacaaataactcgctcatgctttttttttctttccttcttttttttttccttttcttttttctttttttgtacggaatagataattaagagtgaagaagttgaaacttttttgttagtgtacaactcattttgcgccaattttcacaagtgtttgtcttagtctaaatgagaagtgcaaaggtttttatactctgggatgcaaccgacatgttcaaatgcttgaaatcccacaaatgttagaccaattttaagtttcttaagttatttcctttaaagtatatattaaagtgaaaccgaagtagactgcgctgactaaccagtcactctggacggtggtgggactgaagcatgcttttacttctaagactgtctaacacctgtttcatctgatgtctccacagactggatttaaaacaaaacaaaaaaaatttttttttaatttctttgttttagtttttaacctaaagatgttagacagatggggagtgtgttttttctcaactgcttcactattttaaacaatttctgctttaggtgacaggaaatttgccctccccagcagtcccactgctgccccctgcccactcagtcccagctctatagtgttgggagcagcagcagggcccatattctggggctcccacaaggggagatgggaagaggttccacatgttgggctgagccaggccctccagagacacaaaaggtgttttgtaagcccaggcaccaatgagaacggaccaaagagtttcagggcagctccagtatattccagagtcaaacctgagctccaggcatgcctgaagatgccccactcctctgacatcctgagcgtctgtccacacattgcatgcatggtgcccacacatcagatactgttgttcatgcaacttcccgagtttccaagaccatttaacctagcttgaatgcacaacgattgctctgtttttaatgacacagaaacatttgagcattgtattttctcgcatcccttcttgtgagcactagactttttccaatcttagtcagattttgctttgaaattttgcttttgtatggacactcagcagaaaagtacttcttgccagttatctattaacaaaatcctttgatttgtagttttaaggattaaccctcaaagttctcttcataactgccttgacgtttggggttctgttctgttaattttcttttgcttttttgtgttttttgtttgtttttacttttgcatttaagaccattaaatttgattttgttttgctcgagttttgttttgttttttgttttaccttttctttcttttttggctagggaagggcacagacagcccagcattcagggaggagtctgtcagaccttaaacacttgcctcaagtttaaaaaacatttctggagctatggtataagaaatacagctatggatcaatggttcttaactcaggagctggtaggaaaggtcaaagggaagggaagagcacatgaggcctgacccctacagccctcaggactgttctgatgtttattagtatgtggagagaatgagaacaggctagtgcagttactggcagctcttcactttgatgtaagcctggagtgtataacagcaggctagtatttagttcttgatatcatggtatgatagcattatttacacatatctg

SEQ ID NO: 33288 - DNA, 1128 bp, Mus musculus
gctatttacttggtcatatttatagctgagtgttagatgctgcttaaaggtcctaacccaaaaaagaactgctttcctcggttccattgtctccatattgaaaatgatgtcagttgccagactcggatagagcaaaaacaggatcactaacataggtggccaggaccaggatattactgccttgggggcaatggaaatccaaatttaggtgccgttttccttggtttttgtcaggatggtaagggcttgccttaggtgggtaatgatttcttcagatttcccatctttgttttaagcagcagatactgccatttccacataagctgcctttgagaaggttattttcacaatgtagccttgtagagttctcagcctggctctgcttccaaagctgacctgcctcagcctcctcttctgaagacaggctggggagccatgtggaaagaatctgtcattccagaagtctgaagatgttggaacactcccaactaagtaggcagacagttttatgagggaactgctcaggaacaagaccaggggatgctagagggaaagagcagggtttgtgctgcagtcatgtagaacgggaataaaggaaaccaggagaagaatgacagaggcctgagggaaatagtagtgagggagggaaagaaggttaatttaataagtaaggagttaggggaaggtggcagagataagtaaggaaaggaagacaggctcagatgggcagagaacaggtagtctggttccccgctgctcccagaaagacacctaagtcaggacaagtcttcctccatcagagatgttgaagagtatcttaagaaatgagaatggaaggctggagagctggctcagtgtttacgagcgctggccactcttccagaggaccagagcaaccacatggtggctcacaaccatcagtaatgggatctggtgccctcttctggtgtgtctgaagacagctacagtgtactcacatacataaaataaataactaaataaaaaagaagaagaaatgagaatggggaaggtggtaacctgagtcacagaactcggctctcggtttcaagaagtcctgtccacagtaacagttcctatgaataaagagtctcttgctaggctagagat

SEQ ID NO: 33289 - DNA, 1183 bp, Mus musculus
aggaatatgtcacagcaggcagccagagtaggaaattgcaaaatcatatctctctccacattcaggaagttcagagagcaaactggatgtagcacaaaaactctcaaagcccaccccagtggctttacttcttaaaagtttcacaagctacccaaagagtgctgtcagtaaggctcagaacaagatcagtgtgggatacactggctgtggtgaagtgtatggtggtgtctaccatatatactccagaacttattttttgagacagggtctttcactgaacctgaagcttattcagcgaggctgactcgccaaagagttccatggctccccatatcatgttcccaactccccgtgctatgtattatatgtatgtgctaactcatccaacttttattatgggtgctatggatatgaactcaaatctccatgtttgtgccagcaagctctttacgaactgaatcatctccccggtagttgatcttttagtgcagaaaagaaaatcccttaactgcaaaatgtagtcatttatctctgccttcacatacccagatgaatatctagaatttacctgatcttacttttctttgcagatttttaaataatacaatgtctaatggttatgaagaccacatggcggaagactgcagggatgacattgggagaacgaatttaattgtcaactacctccctcagaacatgacccaagaggaactacgaagtctgttcagcagcattggcgaggttgaatctgcaaagcttattcgggataaagtagcaggtaaagagcctgagaggtttcttgaaggagtcatggttggctatgctgtgactcattggcttccttgctggtaactccttagtacagaataggctgcaggctagaaaccatagctataaatgaagttttgttctttaacctcagactacttttcttcagccccagtataagactggacagagatggggtgggggttgggggatatcctagagagccgtttcagcagttaagagtacttgctactcttgcagaggagcagagtttggtcctcacacccacagcagacagcttactgcatatgtaactgcagcttagggaagctgatgctctggcccacgagcacgtgcacatagcaccaccactacacgcacacaaatccataattaacaataaaatacatcttga

SEQ ID NO: 33290 - DNA, 1138 bp, Mus musculus
ttttgttatctggtgaagcgggttaaaggatgtggtcagcatggtcagcctctgggaatctaaagttaaaatttcttggttttaagatttttcttagtgtgtatgcatgggtgttcagcctgcatgtatgttaaccctgtgcaccatatgcgtgtagtgcagatgggagtcagagagaaggtcggatcctccgggggactattgttaactgcgtttgggagccgactactgaacccatgtcttctgtaaaagcagccagtgatcttaattgctgagccatctttccagccccacttccttcgaaatttaaaatgcctactatgtgccaggcagtcgggcagtgaccagaaaaacaactgcctgtgccttttggaggctgctgttctggactagtgctatcagaaacgtatatgccaccctgtttgattgaaaacttctctattgtctctacctctgtccaccgttttttagcgtgtttgttttcttttagtcgggatcttcctaagtagtcctggcttggaacttataaatcacgctgaccattgcctcatagagatctgcctgcctctgtttcctgattgctggggtttagggtgatgtttcatatgatccaggttggccttaaactttctgtgtaacgaaggatgtcagtgaaatgatccttttgctttcatctcccaagttctaggattacaggcctgcaacacagccgctgcgtgtaggtaaccttttaaaagtagttctacaggatttgaaaaaaagttatattcaaaatttttatattatgtatgtatttgtttgtatgtatgtacgtgtttttaaaggatggtgtttgtgtatatgtgtataatatgtatatattataatatgcatgtgtttgtgtgaccatctatgtgagagtcaaagggttacttggaggcgtcagttcttccgtcataagagatatgggggttgaactcaggtttacactcagcaaccaatgtctgttcagctgagtcatctttatagcctgcgatgtcctttgtaaaaaaaaaaatatttattcacttaacatcccaattgctgcccccactcctggtccccttctccttctcctctgagagggtggagcccctcaccttggcatatcaagtctcta

SEQ ID NO: 33291 - DNA, 1157 bp, Mus musculus
ttatagtttattccagatgtagaaccaagaatagttatcatagcaaccattttctggcctccacaaattgtacatgcatacacagaaacatgcacatacataatttttaaaaataataattaaaataaaaacaatgggaagagccagtccactgtgggtggtaccaatcactaggcagaggtcctgaggaaattgaaccatgctcaagtagtcaagtatgcatgcattttttactttgtgtacttcattgtagatatggcaatcagctgtatgaagtttctgctttcacttcacaatgatcaactatagtacattttctgcttttattttaactgaatactacttcattttgttgttcaaacggttctgattttggccattagaatttctttctgttgattgttatggtccttgattattatcaccaaacatgtcaaggttcctggacacttctaactctagcattgcaagatcctgcaggattgtattatatacttcttacctcagtcctgaaataaaccatttctccaagaagtcttggatgtttgtgtaagagaatgatgatgtcaccaattaagatgaaggttaatgggatggtttagtgtgcggaggacttactgcccaagtctgatgacctgaattaggttcctgggagccacatggagttggaaggagagaattgacctcccaaacttgccttctgacatctacaggtatcccatgttatgtgtgactgcctgccctcgcagaccagatattatatgtgcacatatatatgcacaatatttttccccttttatacagaggctcactatataatcctggccggcctagaaattgttatatagaacaggttggactagaactatcaaaaatctacacgcctctgcctttctgtgtgctgggattaaatgtgtacattaccacgctcaatcacatttttttttttaagtttttctttctttctttctttctttctttctttctttctttctttctttctttctttattatatgtaagtacattgtagctgtcttcagacactccagaagagggagtcagatctcgttacagatggttgtgagccaccatgtggttgctgggatttgaactctggaccttcggaagagcagtcgggtgctcttacccactgagc

SEQ ID NO: 33292 - DNA, 1175 bp, Mus musculus
catacatacatacatacatatatgaaggaaaaaaagggggagggtacgcctattctggaagattattcttcataaggaattcaggtagtgagtaaagagaatggtgaagacactgaagaggtgatggtcacctgttctgaagaatcacagagaagaagctggagaagttacatcatgattctaaggacagggtaagactaagctttacattcatttgtttgttttttaggtgagcagtgggtggtggtatcacatgcttttaatcttagcagttaggagtcagaggcagacagatctctgagtctgaggctagcctggtctacagagctactttcaggataactaggactacgcaaggaaactgtcttaaaagggtgtatatgtgtgtagttgtctgaggccagaagagggtaaataagtactggagctggggttataagtggttgggaggcacctaatgtgggtgctgggcttgtgcaagaacatcacgccctcttaagctatctcatcaaacccaggtcctacgtttttgtaaatcatgtggttgccctagcaacaggaaacatgcccacatgtgttttctgtcaactcctttgaagcaagctgtggacatgtgtttattagttctctgttacggacagagcgcctgagatgagcaccttaggttagggaaggtttaccttggcttctgggcttcagtctgtggtcccttggctcccttgcttctggcctctgatgggagagcggaagatggtggtgggaaacatccagtggaacacagctgcccatctcatggcagctaggagtgggagaggctgaggacaggagagcaggtaccacatatccacccctagtgacctgcttcctccaacaaggtcctccctcctatcagccctgtcagtttgtaatggctcattcagatgtgaacctatcaatggataggttatcaatggataggaacttgaggagccactgatgaagtcagagtctccacagtccatcttgcccagtccatctctcaacattactgcatagggaaactttgaagatagggactttggggggactgtggagatggctcagtttgaaaagtgcatcctatacaagcatgacactgcttggattaccagtatccattaaataaaaaaataaaataaaataaaaagtgaaaaaaa

SEQ ID NO: 33293 - DNA, 1243 bp, Mus musculus
ctcttttcctgaaagttgatcatttgtgggtctctgggataactgccatctactacaaaaggaagcttctctgatgagggtataacctatgagctatacataaaaatggagtggagagtttattactatgtccttttattaggtattagactctagcttagaccttatgactcgtgtgtgtgtgtgtgtgtgtgtgtgtgtgtgtgtgtgttgtagttctcaggtacatgtgtgcacctacatgcatgtgccacatgtgtatagatgtcagaggataatttgtgattcgctcctactatgtggttcctggggattgaatttaggaggcaagcacctttacccactgagtcatctcacttgctctgtaggtgcctttgaagactgctgcctgggttaccagcacaggatcaaatggaatgttctccggcatgctaggaattatcaccagcaggaagtgagtggaagctgcaacctacgtgctgtgaggtgagcaggacctccctttgctgggagggcatcatgcttgccttagatcctcatgtcctaacttggcactcatcttcccaccttctgtagattctacttccgccagaaagtagtgtgtgggaatccagaggacatgaatgtgaagagggcgatgagaatcttgacagctaggaaaaggctagtccactggaagagcgcctcaggtgggtaaggcctcaggccaacatctcagggagaaaaacagcgattatatatttcctatgctttttactttttctcccttttagcattgtgcattgagtccttcagcattctgggtaagtgttctacaactaagatacatctctaggccttccattttgtctttggtgtgtgtgtgctacatgcaaatgagtttgcaacagttgtgtttatgacggttgttttattcagggtttctttttctttctcttctttttcttttttttttttttttttttttttttttttgcgagacagggtttctctgtgtagccctggctgtactggaactcactctgtagaccaggctggcctcaaactcagaaatccgcttgcctctgcctcccaagtgctgggattaaggggtgagccaccactgcctggccccagaattctttagtctaaggctaaggcctcctggggtccaactgctcccatctacattagcatgtctattgttgcaaactccctgggcccctgactcttaacatatttttgctccctcttccacaatgtt

SEQ ID NO: 33294 - DNA, 1168 bp, Mus musculus
aaacacttaaaagtttttgtttttttaaatcttcacacctatatgtatgggtgctctgcttgcatttgtgtctgtgcaccatgtatgtgcagtgccgggggagggcaccggatccactagaactagactgtcagaacaggaggtgccatgtgagtgcggggaattgaacttgggtcctctgcaacagcagtcactggtcttaatgactgaaccttctaaagcacttcactaaaaaaaaaacttgaaactcaatatattgtggtactaaacaaccttttccatttcattttatgttttacattctgttattttgtgtgtacttgtgtgtctgtgtgggtaaacatgtgtcacagagcacatgctgaggtcacagtacaacttgagggggctagtgctccctttccatcatgcgagtctcagcaattgcactcaggtcatcacatctagcagcacaccctttacttgttgagccatcttgcccttctgttttaatttttgttttgaagcaaagtttgatatagcatggactgtcctcaaactccaaaccaatggtgctcttcaacttctgacccatctgcctccacctcccaaatgtagggattgcagttatgcactacaactcctatgaagtgttgggtctgggaaccagagcctcatgcatgctgggtaatcactctaccaatcgagccatagcctggtcctttataggccaagctgctgacctagaacttgcatttttcctcctatgctttccaagggctatgactacagatgtgtgccacacccagctcctagcattgacacttaaaacaatttttacaagcgtatgtgtgcatgtgtacacacatgtgacactgcaactacaacttgcagtaagtagttggctctctcctccacctagaggaaggttggggacaagcgctcccacttaccgaggtcctgggtaaagtactcaacaagctgcctcattgagaattgaattgggagggggtgatcagggttcaagtgtggagggcagaaacatggcaacctctgagggggtggggcaaggcagagtcttagacttagggccttccttgagatctttgtgagatgtattctggaccttcagtctgtctggtcatcagcacttgctggttgccctggggggagccagggtcacttggaa

SEQ ID NO: 33295 - DNA, 1121 bp, Mus musculus
atgatgaggccctgcccttcttgcctgcttggattatgaatctcctcccctcctacctgcctgtgtgatgaagcttggcctttcatagcctgccttggtgctgagggcccagtgtttctagtattcttggtacctgagactctcacagcctttctgaggtgtaaggcctcattcctctttagtgtcccaggcagataagttgagtccttgtaacttcccataactcctttggctatgatgcctagtctctcctggtctcctgggacttgaatgtttacctcaactccctggtccatgaagccccaccttttggggcctccgtgggccatgagaccccattcttctctgactcttgggtgtgaggacactgaactcccaactctatttttgattcttctttggaagaaagaggggtcaaaagggaggaaaataagaccaggagctgccctagacctctgctcttgattacctccaggattggggagttcatgctttgctcacttattcaggtgtccaggttttgggcaacctggagtctccattcaagtccctttcaggtagaaccctccacatttcacagctaatcttcccttaccctgctgtagaccctgaatttgtccctgtactggtggtacctcctggagctgggcttctacctttcactgctgatcactttgccctttgatgtcaaacgcaaggtaagttatgagccaagagtccagctggagatgtggataccatgatggggatactttccaatttctgggccgggcctgaagtgggaagaattggcctcagcactgtaccctgggggtgctcttgattcctcacagaaggtctgggatccagaggccttatggatcttctgaaaaggcttgcttccaggcatgtggccatccagccacagaggcttgtcctggtggtgaccctctgtcttctgcaggacttcaaggagcaggtggtgcaccattttgtggccgtgggactgataggcttctcctacagcgtcaacttgctccgcattggcgctgtggtactgttgttgcatgactgctccgactacctgctggaggtgggttcacctctacacttgccctgccagccctgctattttcttgggc

SEQ ID NO: 33296 - DNA, 1616 bp, Mus musculus
atgtgtactggttctgcctcatcctgcgcatgctctacagtttcctgcataagggtcaggtatggaggcctgggacagggtcagcccccgggacccttccttggcccagagctcctcactgttctgagctctggccccatctgttttcatagatgacagaggacattcgtagcgatgtggaagaaccagactccagtgatgacgagccagtttctgaaggtccacagctgaagaatgggatggctcgagggtctagagtagctgttaccaatggcccgcggagccgggcagcagcatgcctgaccaatgggcacacccgggccacatagacaaccttggactgatgttgaggggttgccgccagcattgtgaatattcagatgctgggctggtgattctgggagacagggaggccctacctcaaggtaggaagaagactgatgatctgtttcccttctgttcctctccctttatccttttgagcagcttgacagaacctgggggagcagtggactctgcatctggcctgagccaaccccaggctgtagcttgggggctgtggggagctttggctccaaggaccaataaaacgtcaacagcgatgaattctctgcgccagagcttaagttcccttcacagcagttcctctccataacgtactctgttgacaggattcctcactgccacatcaagatttatgtcaactcttgcctgtatagcaccacagcatgaagatactccctgctcctcagtcagtgccttcactttgttctacttcatagtagctctccaggacgttggtggtagcagatacaggctgacctgtaggaaagaaattcttaagcttagatgaagcctctctgctgctgtccaagccagagggtagagcagaaacctgtgggtgtccttgtagtcccttgcttaaagcaacctgcagcccaccctggggtctttatattcccttgagacagtggagacctaagatttggtgtgcggtcactacctttaggagtggtataggaaaacatcctcctccaagatggaggctgagtgaccagtattacttaacgcagaaaccaaagccagaggatccatgtatggttagaccttgccatctttgggagtatgcaagaggaactgagtgtcatggaagaatgagaatcagagagtggggaaagaggtcatctcaggcaacatccaaaaataaagacttttggtacaaagagcagagcctggcatggtgactcatgactgtcatttaacactagggaggaagaagccaatagacaggaagaacatataagcctgggatacaaagcagggcccagtttcaaaacaaacaatgggggtgtgtgcatgtgtgtcaaggaacaggtactgcagaagagaaaactatacaaaaatccgagatagaaacagctgagaaaaggaaggaaaaatgctggggcaagaatgagggccaactctgcgtacagaacaaggtagtgagatgagatagatttttgccttctggagaaatatgagaaaaaggaagagaactgtggcttctgttgagagaacaacagtttaggagaaacagagggtgcattggtagagaatgcatagagacttgtgaa

SEQ ID NO: 33297 - DNA, 1099 bp, Mus musculus
ttttctgttgctgtaataaaacataatgcctagggcaacttataaaaaatgtttaatttgacttatggttccatggggctatgggatcaccatgaacgtggcagtgcaacaagtgtcacacatgacagctaaaagaggagacttatacctcacatcctcaatatgcagcaagaattagtcagacctagaaatagtgtgcagatctaaactctcaagccaactgcaagtgatgtatttctttcagcaaggcagcatttcttaattctttccaagaaaatatcaactgagcaatattgatttctctaacttcatgcctatgtgcttccgttctgttaccattcatgatgaagaaaaactgtaggtaaccttctaggttccttaacatccgagttaaaggagtgaatgcttacataagaaaaacatccatgagtaaaaattatttgtttataattttcattttaattatgtggtggggtgtgtgtgtgtgtgtgtgtgtgtgtattccctggggtcttgtagcaagaattatggggatttgtcaaaaacatgacctgatcctcggaatgaacttgtcttaactgcttggccatcactttaaccctgtaaatattttaaagactatataaatcattgtgatgctaggaaataagaaagaactcatacaagagaaataccatacttttcaagtaagggtgtctgtgaaagggtggtgggtggttgttcattttgtttttcatattttcacaaagtcctttgaggtgatatttgtcatcaagcctggcttggatgccagtaattagtcaaggctatatttgaactcttgactctcgtgtaccagcattctgggtacaagtccaagagtagtagatgtacccccccccccaaagtgtcctgttgtgtcaactcttttttaacaatgttaggattgaaatgcttaatagaagcgaatataagaaacagtaaagcctcatgtgtgttaccaaagtggcgttttcatctatgtgttaagagatgtagcatagtgagcaatcaactgtatgtctcacaatgtagttggatgtgctgtggctatgtatgttacttgatgttccatgcttca

SEQ ID NO: 33298 - DNA, 1187 bp, Mus musculus
gccaatcccaaatgttcagccttgaaaccatacacacacaaccaacagaaatggactcaaaaggttttcttgctatatttgtgcatacttattcatacataaagaagaaattggaaaggaagaatttaggaaaagacaagcaagtggtaaatgatgtaatacattttaatatttatgttaaatagaaagcatacagacagcatagcacttaagagaactggatgtagttacaaaggacagtttctagtctcagaaaccacctggtggttaaccttctgtaactctagtccggagggatctaatgccccctcctgcccactgctagtactgcaaacacacatgtagacaaaaacccatagacgtaaaataaaaatgaatcttaaactaaattctctacagtgatgctataaccctgatacagacagcagtcaggactatttaaaatgaactcctttcagtcctgcatagaagcgcctatgaccttcctctgcgtctgccttctcagaggcaaaggcatcctccttactcacacgttagaatacttcatatatcgttcatctaagatgtacaatcacagtactgtgagatcactttgccgtggtgttttctgtccttgtgttctctgtcctttgtatgtgtgagaattttggcagtgacacatcttttatatctctcttttaatcatatattgtgatctagaattcattttctctataaatctccatctttccaagtggctagacatgcagactttttttttttttcaaagatttatttattattatatgtaagtacactgtagctgtcttcagacacaccagaagagggagtcagttcttgttacggatggttgtgagccaccatgtggttgctgggatttgaactctggacctttggaagagcagtcgggtgctcttacccactgagccatctcgccagccccgacatgcagacttttgtctcaatctaaattgtccaaggtatagccttgggcctgaatctaatgagacttaaggatgacagtatatgcgaaattcaaaacctgttctaggctcccttttctttgagcattagccagagctgagctgagtgcatgctatcattaaaaaggtttttttttaattaatctcttatgtggagtaatttctccctgagaagggatattaattctagaatagctatttctc

SEQ ID NO: 33299 - DNA, 1161 bp, Mus musculus
agattattcggcgggaatcgggtcccctcccccttccttcataactagtgtcgcaacaataaaatttgagccttgatcagagtaactgtcttggctacattcttttctctcgccacctagcccctcttctcttccaggtttccaaaatgcctttccaggctagaacccaggtggtggtctgctggccggacacaacaattggcgaaccaacgtgggactgagaaacggcaaaggatttttggaagagacgctgctggttcggagctccataaaataaaggataagggaaattcataccggagaaggtatgggctaagctgagacagcgttaaacccgagcgctggttcacttaggttcagcagtgaggagctgggtatcaggcggtaggccgtagctctccgaagctacatgaggcgtgagaaaagaaagggtttattaaaaggaataggcggattgccccagttaataaaaaatgcatcataagggaggaaagtgtccccaaaagcagagagaaatttctctctgggccttatagcaggagtactctgttcccttttgtgtcttgtctaatgtccggtgcaccagtctgttctcgtgttcaattcatgtatgttcgtgtccagtctgtatgaatgaatgttctatgttttgtgttggataataaagatggtataaaaaactttatctgcaaagccgagagctgccacgtgtttcagccaggaatcagacacgtggcgagagggtccctgctggaaaaactgttcgttttaggaaataagggcgagtgcacagcctctaagtttcggagtaaaaaagctaataaatggttcatgattaatgtgtttgacaatggtaaagtgttttttatttttatggttgtagctacaaaaattattattctctgattggtctaaatgtaactgcttcatttggttcttttttattgataatgtgctctgagtgttttcacaatcagctcataagttgttggttaagattaataattgttacattgctacagatggttagtgttaaatttgataactcaagtttagagtccttccgacacatggcataaggcagcccaagaggctgggtctctaaagatatttctagtttaggtaataattaatgtggttcgtatcctaaatagtaaaatt

SEQ ID NO: 33300 - DNA, 1191 bp, Mus musculus
caaatgctggacaaaagtagtagattatccaggtgagaagaaaggaacacatttaggatgtgttacaaatagacatcagaagagtaaagagggaagttgcctatgatattgaagcatcaactttcgcaacaatttatgtgtaaaaataattaaagaatgagagatcataaagttgagacagagttgggaggctatgggatgcattggagggagaaagtgtgggataaaaatgatgcctttgtagtactcacatataaaaatttccaaaaatatcaataaataaatattaaaaataactattgaaatgaagagctagaaagttagattgtgctttttttctgcgttatctgggaacaagtccttatggctttgttcttgatttccatcgtaacttaaagggaaacttacacaatgtccggagcccttgatgtcgtgcagatgaaggaagaagaggtcctcaaattttttgttgtagcaacccacttaggtggcgccaactttgactttcatatggagcaatacatctactaaaggaaaagtgatggtatctacatcataaatctgaagaggacctgggagaagctgttgctcgcagatcgagctattgttgccattgagaaccctgttgacgtcagcatcatctactctaggaacactggccagtgagctgtgctgaagtttgctgctgccacaggagccactccaattgatggccgcttcacacctggaaccttcactaaccagatccaagcagccttcagggagccacagcttctagtggtgaccgatcccagggctgaccatcagcccctcaaagaggcctcttatgtcaacctgcccaccattgctctgtgtagcacagattctcccctgcgctacgtggacattgccatcccatgcaacaacaagggagctcactcagtgggtctgatgtggtggatgctggccagggaagtactccacatgtgaggtactatctcctgttgagcacccatgggaggtcatgcctgatctttacttttccggagatccagaggagattgagaagagggagcgggctgctgctgagaaggttgtgaccaaagaattccagggtgaattggccacaccagctcctaagttcactgctgcttagcctgaggtggcctgagggtgtacaggtaccctctgtgcccatccagcagttcccca

SEQ ID NO: 33301 - DNA, 2525 bp, Mus musculus
gtctcagtgtcattttgatatgcatgtccctgatgcctaaggaagttgaacatttctttaggtgtttctcaaacatttgtgattcctcagttgagagttatttgtttaactttgaacccagtttttaaattgggttatttggttttctatcagatgtagtgttggcaaagatctttttcccatatgtaggttgccaattttttcctattgacagttatttgccttatagaagcttttcagttttatgaggtcccaggcttgattagagttatgtcaaaatgttttggtgtaactctaaccaagaaaataaaagatctttatgacaagaacatcaagtctctggagaaagaaattcaaggccgcgcgccgccgctcctctttccttcctcttccgagcatgtcctgctccgtgtacctctcgggtccctcaccatggctgcgctcacccggaacccgcagttccagaagctgctggagtggcaccaacctcaagctgcgcgaactttttgaggcggatccggagcgcttcaacaacttcagcttgaacctcaacaccaaccatgggcatattctggtggactactccaagaaccttgtgaacaaggaggtgatgcaaatgctggtggagctggccaagtccagaggtgtggaggctgcacgggacaacatgttcagtggttccaagatcaactacaccgaggatcgggcggtgctgcatgtggcccttcggaaccggtccaacacacccatcaaggtggtcgggaaagatgtgatgccggaggtgaacagggttctggacaagatgaagtctttctgccagaccttgaccacccaggagaccatcaccaatgcagagacagcaaaggagtggtttctcgaagcagccaaggatccatctgcagttgcaaagcactttgtcgccctgtctacgaacacggccaaagtgaaagagtttggaattgaccctcaaaacatgttcgagttctgggattgggtaggtggccgctattcgctgtggtcagccactggaccttccattgctctgcatgtaggttttgaccacttcgagcagctgctgtccggggctcactggatggaccagcacttcctcaagacgcccctagagaagaatgcccccgtcctgctggctctactgggcatctggtacatcaactgctacggttgtgagacccacgccttgctgccctatgaccagtacatgtaccgctttgctgcctatttccagcagggtgacatggagtccaacggaaagtacatcaccaagtccggggcccgcgtggaccaccagacaggccccatcgtgtggggggaaccagggaccaatggtcaacacgcattctaccagctcatccaccaaggcaccaagatgataccctgtgactttctcatccctgtccagacccagcaccccatacggaaaggtctacatcacaagatcctcctggctaacttcttggcccagactgaggccctgatgatggggaagttgcctgaagaggccaggaaggagctccaggctgccggaaagagcccagaagacttggagaaactcttgccacacaaggtctttgaaggaaaccgcccgaccaactctattgtgtttaccaagctaacacccttcattctgggggccttgattgccatgtatgagcacaagatctttgttcagggcatcatgtgggacatcaacagctttgaccagtggggagtggagctggggaagcagctggccaagaaaattgagccggagctggagggcagctctgctgtgacctcccatgattcctccactaacggactgatcagcttcatcaagcaacagtgggacaccaaactagaataactccagccgcggccctactgactggtcctccttgtcccttctcaccatatgcactgcatggtcctgcccctccctgcccagagcgcaccaccggtagttggcctggactacaaggctgttgggagaagctggtctggaactgccatccacccactacgcaccctccctgttgaagcagatggaagggctttgacgtgtcatgttgttctgacctttatttcacaccccagctagaataaagacacctagaggaggcacgggggctcagcctcttcagtttaaaaaaaaaaaaaaaaagaaattcaagaagacctctgaagatagaaagctctcccatactcatggtcttacacatataaccagatatgttgattctaatagaagagaaattgcggaagggcctggaatgcattggcacaagggaaattttcctaaacagaataccaaatgctatggctctaagatcaacaattgacaaatgggacctcatgaaactgaagtttcactttttcatctcatatgtcagaattggtcatatttgtccaaaattaggaacctgaatagtttgtctttaaaccccattagtcaaaaggaaaggactaagataacaagcgcctgagatggtatataggtggtcaactcgtttctttttgagcccagg

SEQ ID NO: 33302 - DNA, 1255 bp, Mus musculus
ggcagcttccattgtcgatgccgctcctcctcatacttttcaaagtcaagaatctgcaagctctactcggggtttaatttctgaacctgcaaaagtgacccaatcctgtcagagtggggaaagctggagaaaaagtgtcatcgaagcaaaggagcctgagattccctcagtggcgccgccgtctgacagacagcaggacagagatatactagaacaaaacttccagttcaaggaacagagtacaaaattggactctgtgggacagtccctgctttggaccctgctacagaatgcctctcctgcgtgtcccacaccaagccctgctgtgtgtccccgtctaagctctcctgcgtgtccccctccaagccccgctgtgtgtccccctccaagccccgccgcgtgtcccactcccagccctgctgctcagaagtttgaacatcttactgccaagctccaggagatggatgagcagctggtagcagtgcagaccatggcagaaaatatagagcaagacttccctgcatctcaagtgctgaatctacactgggaaaaggctggactggggaatcatgttggattgtcttccggccctgacattgaaaagctactagcttcaaaggccatcagcatttctgaagaagtgtctttgcagactcaagaggacgtggaagagcaaaaggatgcagaggaaacttcagagactgaattttcagaagcagaaaatcattctagccagaaaacctatgcatgcccttctgtggggtctgctgcttgctcttctgtgggctggaacatcccttctcctggtactgttctcacttcttagatttatatgttcttgtgttgcattaaagtgttactgaactgcacctgggaggggcacaggtataaagggttgtgagttaattttataatattcacttcagggaagaaaaacattttaaacatgccattcaacataaaaaaaagtcacaaacacttcaaaccatctatagtaattagtattatttaattttataaacattgagatgttaattattagaatgttgacatttaatttataacagtcctattggttatttgctgtgccccaaccatgtactgtttcttgcacagttcctttgtaaggttggcggggagggaggaacgccagccattattctcactgcacagctgagactgaggtgtagacaagggcattccatcatgtagataataggtgtagtatttcttacagaacccatggaacctggat

SEQ ID NO: 33303 - DNA, 1513 bp, Mus musculus
tggtatatcaagacagaatcaagtttgtgatcaagacatgaagtctataaaatatattttttataactgaaatagagaaaataaataggattaattaaataattcttgttcctctactggtctctgtatgttagatagatttgtaggttattacctggtagtcgaaagatactgagagacaggactgatggatcttgttttttactttcaggctgaagaacagttgagaattgttgaagaacaaagaaagattcatgaggaaaggatgaaactagaacaagaacgacagcgtcagcaaaaagaagaacaaaaaattatcctgggcaaggggaagtccaggccaaaactgtccttctcactaaaaacccaggattgaatggcaaactctgaactttttgcaaagaaaaatgaaaaaacttcgtattgtagcttcatgttgaagtggtttttttgtttttgttttcttttttccttttttttttttttttttttaatttggaaaatctggaaagttagcttgttctaataggggctatgctctgcaatccctttattttccctcttttccttcattaagtcaagtccttatcagatcattgctgtcttgtagacgtggtgtattttgcacctgttgggattctgtactggctgggcctgctgaagagcaggtcacttggtgactggctggtctggtaaggtgttcactgaccactgacttcggagttatactctgtttactacgtcataatgctggttttgctgactttttgtttttttatgcatttataaaaaaagaaaaagttggtaattgcattgcaaaattcccagggtttgactggacctgcggtgttgttagagcagtgtccttgggatgctgtggttcttgaggttcctgacaacaggtaaggaaacagttggtcacctgctacagaaataacctgcagtgcagcattgtctctctcggacttttgtttctttcattgacaaaatcaaaccagcattccccattgtaaataaatgattttgctgaataaagtaaagtcttaaattcatatgtttaagcaatttttattaagttctgttaagtctggagggtggtttccttttagaagccttagagctgtactatatttcctctggttcatacttttcacagggtttctatgtacaccatatatacttgtgaattagtacttactggctatttttgcagacactactttatgctgataaaagaattataacatcaagtattatctttggaatatactaaacctgtgcctctgttgtagaaattatacttaataaacactagaaagtatgttttaaaagtacagaatattgttactttcagagagggtagaccatcagctagaacttggctttgtacattcaaaatgactaaaaatagtcttcaccctagcatgttgggcgggatgaaaaaactatttaaatttactagtcttgggggcttgggcttgctttgggtatttttgcacgtggaaacttacat

SEQ ID NO: 33304 - DNA, 1137 bp, Mus musculus
aggacagcatcaagtctcacccagcttgcattcatacaatatttataaatttctcacatttacagatatgtttatgaaacattccagaaactgaaatagttgagtaaattttaatagctttgaatctagctgctcttcagtcagtcagcatatcagtcgcacattgatagcatcgaaaattgtatgtgtgactttaaagggttttcatggaatgacactgctctttccacctcactcacaagatcctaatggttttgtaggttcaactcaggtagcattgagtctgggtgtctaacttgtcgaaggtttcacaagtgcatgcacacacgggaggaaaggcctttactacatacaccttgccacctagcactggcacccagataggtgatttatttgagatggatgaagcatgaaggttttacgtccgaggttaacatgggtgtcttcttagcctgatgaactgggagctcaccagttttcaggtagacaccttgttgcaggtattgctggcacgcctgtttgtcatttatgtgtggcttatgagaatcggaattgtagtcctcatcagtggtttcatccacagatccctctctccagtcccagatgcatcattctttctgcgatgtgatgactggtaaatctagggaagatagcgacttgaatgacttttcttggtagatttttagtggcacttaacagggcatggtaatttcggaagttcagctgtattcttttgtttgtttgtttgtttccaaagagatcactgggaatttgaaggcaaaggggtctctcggtactgtgtacagggcgagcagtctcagcattttaggtgcagagaaaatgtataccctttaactagtgtgctgacagtggaggtgaaaatacactcaaagccaaagagagtaaaggtgcttgtttgcaagcccgatggcctgagtttgatgttcagaaccttgtgatggaaagaaaaaactgtctcctgtaagttgtcttctgacttcatcagccatgtgtggtattcctctatgttctaaataaatacacaaatgtgatcttaaaaattagaaaagggggaaaaaagaacttgatcctcaaaggatccatggagtttgggatctctttggtacatggtttacc

SEQ ID NO: 33305 - DNA, 1359 bp, Mus musculus
tttgctttttgtttcatattaacatttttttttaacacggacacaatcctctacagtctttccaaatactaaaatcatttgagtatgtctgctgtgatctgaacactgcccaaaccatcaagcaatcttcatatagtttgcattataaaacttcattaaattctccaagaaaaaaaaaatgacagaattttatttcctgactgtgcatcccctggattcctgaatttgagtgcagattgtagatgaacaatataagctgcctttagtgattgtcaacatctgatgttaagtccatgccccatggaagcagtccttagtatggattacatttgtatttttcactaacagtaaatgtatttttcttatgaattgtttgccttaggaatgatgaattacattttttgttccttcttaccataaacatctgcatccctcagctcagcctcccttgtatgttgtttctttataaatggttgagctgctgatgcaggtattgccaagctaacagtacaaatcattttaaagaggaagctggcgcgtatggcagccgaggagcacactctgcaggacactggacaagacagtaaatactcaacttttaatgctgattaaaggagtataggtaaagaatacgtaggtatccataattggtgagacaaatattcactttatttatattttatatatatttttaatttggtaaatactatccagttttgtagttgtccttgttgatttgtgtgatattaaagtattagtaataattgcccggagactactagggagggtttagtcggttgctgttttggactgggaggggtgatttaaatctagtgttagaaaccaattttttagtggctgcacagtatatcattgtcagacagaaaggtggctgtagagctgccctgtaagtcagatcaacagagctgagaggaagattagtaaatatttgctgtagaggcaaacactttatttttctaacatcgcaacatgtcctcccctttaggaggaagagagagcaaagcgtgaggaactggagcggatattagaagaaaataaccggaaaatcgcagaagcacaagccaaactggtgagtgctgtgcatttgggaggccatcttccatatcgagtggatttgtgctgagtcattagatgaacttgaagaaccttgaggttgagttttggagagaattataacatttcagtgctttaaaacatttcctggaggagatatactactcagtcctaacactgacatttcttagacctggaaaccaaccatcagggaaaacaaagcaaaacacccaggttctttagatagctgacagatacgcgctccatcactggacagaaggaaga

SEQ ID NO: 33306 - DNA, 1159 bp, Mus musculus
tgcaccatgggctctagcagaggcagatgctgtttcagatctactgtccctaataaatctaatgatttagattcttttatgctaactagcttttctagatttaaaatgtgtggactcccccccaaagatttttatctccatttgaatttctgtattacttatcctggctgcagttttttatccattcatttatttatttattttagtgtggtgtgaaaacaagctatataattattaaggctataagaaatgagactcagtttagtagtaggtttaaagttagttttctaattcttaggttctttaaaatattaagttgtcttttctacttttatttgctagtcggcagcaggaaatagaagaaaaactcattgaggaagaaacagcacgaagagtggaagaattggtagcaaaaagggtagaagaagaattggagaaaaggaaggatgaaattgagcgagaagttctccgaagggttgaagaagccaaacgcatcatggaaaagcagttgctcgaagaactcgagcgacagagacaagctgagcttgcagcacaaaaagccagagaggtaacgctcggtcgtttggaaagtagagacagtccatggcaaaactttcagtgtcaggtgtgcctcctgctcagtccagaacgagatggaatgcgactatcttaattcctttctcatctaaacttacatggctgcgaaagataattttttagccagaagtgctgactggtacttaaaagttactttcttaaaacttattcaaggatatttttgatccgatggaactggcttacatatttgagaagtgtttgaaacttttgccatggctgcaggactacattcttttttgggagggtagggggaaccagggagtggtaaagggaaaaggctaaagatccacccgcggttgcattttcttctctgttatcactctgctacctagactgtgagaggctttgccttcagtcagattacagagagcagggtctgacattgagtgacagcacctgcttttgatacgtaggttttcttactgttcttttttccttctgttatccttcatcctctccctcaatcctttcaacacagtggactaatctagcattctgattataaggccctccattctcctaatgtgtttcaaggaatctt

SEQ ID NO: 33307 - DNA, 1209 bp, Mus musculus
cccttttcctaacacgacttataactatggcttcaagaagtgcttgtatggtatccatactgaagctatccatacttaaagtgtatttgaaaccttttagaaacatcaccactattgactttctagacaaaattttccagacttaaaaattaaagtttttagctaataaaagtattataccaataaaaaaaatcagaattgttaaagttagacttataaaaataagcatttttatttgcgggctcaaataccccctataagcatgacatattaagcataaagagtttttaaggttcatcaaatgttttttgataatgtgggggaagttgagagagaatcatctaaacaccaaacacttaagatattaattttattgaaaaaaatccttgcaacttttaagttagctgagacttaattttggtgaagactttaatgtttcatggagaaatgtttgagtgaatttacactccagcattgacagtgtttacagaacttgtctcctatcgatgatccattgcgtagctgtccatacagtgaacactttcattagagactgggtgctctggcttttagagatggcttttatgactatgttgaagtcacagtcatgtgtggattgtatctgttgagaattgtacttccatggcagtactgaaatggagggatgtgggaccttaagtgatgggtataaactatttaagtaattagacttgttgaagtgattgaagaaacatttgtgattattgtaacttaaataaaattattaaatattgtaacttaaataaaattattgaatatttaatgtaataccaactttatgttccttttgttttaaaacaattcatcataattctacttaccagaattaataatgtcattactctttgtgtgaggcagtgtcctggtggctgggaatttacagtgttgctcctctaacctcccaagtactgagactgtaggagtgagccatcgctcttgtcccagtacacctgcagacaggctttagtcacagtgcttcctgggtcctttgggtttcacattaccaagtgaactttaatgatttaagtgtgtacttctttgtacacaaatatagttttgtactttatacttgtatatactttgtacaagtatagttgaagttttataattttataatttaaatatatatgaattaaaagttttataattttcctacttaaaggtaatact

SEQ ID NO: 33308 - DNA, 1105 bp, Mus musculus
tatggtagttactgtttcagggctctgtttcactgttgtgtttagcacatcttcttgcgtctactatctctggttctcaggatctgtgtgcattcataacaacttgactttgttagcacaagctcttttgctgacccatgactgacctcatggaggagcatagaagtatgttatgtgctgcagtgaatttctcacagcactcgcaatcggatgtgtattcagtctgatatggaagattaaggtttttctggaagtaatacaatattagagtaacttaccttgggttggttttggtaggttaaaacttgttagtcctctctttataagtacagtttgcccaggacaagtatttgtctcttaaccatccatattccatgaatttgtgatcctgtttctttggccctggctgttactttttttttttttttgttggtatcgagtgaatgtagtttgtttgtttgtttgtttttaaagaaaggggtttgaaagaagggagggtaggagggactccaggaagtagcatgctacctcctgacttcttgtagaactaggacagcagccagagagccaagcctccatctcctcatgtgtgaagctgggaatggcatttaaaagctttgtttgttgttgttttgttttgtcaaatcactgagaatacacgaatgaaaacctggaagcaggtaagcatcatttcacagtggatgggtttggtgaacgtggttcggactacaggttgggaagatgtagaatggggctgacaggcagttgtaacgacccagagtgaggtagctcctagagtaccaagtgcttttcgtgatggacctgaccttgaagtagaggtgcttgctgagtcactggttctctctgtgtcttctaggatacctacgtggagctaccatggaaaaatcctggatgctgtggagcttcattgaaagatggctactggccttggcgtcctggtcttgggctctctgccgcatctctctgttacctttgatagtgacttttcatctgtatggaggcattgtcttacttttgttaatattcgtatcaattgcaggtatcttatataaattccaagatgtcttgctctactttccagaac

SEQ ID NO: 33309 - DNA, 3016 bp, Mus musculus
cttgatggatgccttgggtttcaatgtgtggagaatgatgtcttttctgggtgtgtgttcatactggtctgcacagtgactctgagctttgaaaggcctcagcactccattctgatgatcctgtaactttccaaattttcagactgggcttcttaagagtgcttgatattctcatcagaactccagcctagtgaaatacccttaactttagtttaacacgctggtttgatagatgtcatccaaaaggttcttgctggttaagtggtataatctaagttgtactcagatggagatagaaacaagaaaccttcaggtgtctgtctttcctttagtgattattgggacaatcacggttagcaagcaagtgctgctgcgttttcaccttaaacattaagatgaagtgcatggtggtggtttattcttgacttatgcaatgcggtatttttaatgtaaataacactggtcacatgccaatgtatatggtttcctgggttatatctatttttatgtaaactctattttatttcggtgaggaatgagtgtgaggcctgtgggcagattccatgttctgctgctactgagatccagctttttcctaataataaacaggacctttttccaatatagatgtgccgtgtttttgttaggagctgtctggatcgtggctagtgagataggaggttagcatcttactacagctttctttgtatagtgaactttttaacattagtgattttggttgcagatgaaattttagcctgtcagtttgtgaatcttcagctaaacaataacagccacagcaagggatagaactagctgatggttgagtgaggataactcagcacgtgtgcacacggccttatgcaatcctttcatctgaatgaagtcccagtacctagaaggtgcctgacctgacagaggcaagcatcatttattgaactgtttggaagtaaatttcagaatgaaagaaaaacaaaaaagcaaataaccaagtatggcttaatgttgcagttctgtgtaatgggctatataaagtcttaggggaatttgtcaggttttttgtttgtttgtttgtcccagcctattacacatgtagcagttaaggagctgtaggtgggaagttgtgagccctttaagcctggaagcatttagtaaccttccaggcaggaggtggaacctgccaggtcctttcccacagtcctcaccaggtagctgtgcttgagcccttcacactaagtcagctcctacccacgactgcagatggcttggctgtatgattgaccttccacagcagctagagcacagtgataatgaggcagtcgtctcgaccttaatttacaactttccaggaacatagggctagaagtacttttgccaagtagcattcttagccttcattttatgccaatgtttagaaaacaataatgtatagcaagtataatttctaaagaataatgcttttctataaattattaattgtaaagagtcttgttttttaaagagttggtaactcgccgtggagggtgtattttgtatgtgtaaattcaccacaattaaaggctgcttttcatcttgtcaatctttgctatgtagaatgactatcctgaatactaatctgccgaaagggcaatatgtagcaacagccagaatgtagacttgagctgccatggcatacttagttagtttttacatttacggagtactgtattggagtcctgttttcattaatcccttggcctggaggagtttaccaatgtgttgtgtcaaccactaaaatggaacagttgctccttccttgctgtttgctgctttctgttcagcttttgctgactgggacttgtggggtggaagaacagcattcagttgtactaacttgctctcctagagagagttcttcacttcagcagagacaactatgtttaaggatgtagaacatctctcattaccagctatgtgtttgatatgattaccttagatgagtagggatagaaaaccaactcaaacttttgagggccgtgatagaccccggtatcatttctgcaagctctcatttggtctctgaaacatgactactgcaggatcatttcttcacttcagactcttcattggtgggaatggccatggtctgtcaatctctaactcactgagaaatgagagaaatggataaacttagaagtcttaaattccatagtttaaagaataatagagtgagacttaagaaaaaagaattgtacagagaatactgcatactaaaagaagaatgtatttgttgcagactaaaggatactaatagactagaaaccacttgacagcagtttgtgaggtggatggacagaaaacttcagaacacaattttagatcaaagccctaacataagatgacccttgtcagcctcatgtaactatcttaaggttttgactgtgatgacacatccattaaacgttgctgtaaaatgggtcatgcaacatcttaagttggccggatacacttatggaaggactagagacacttaaatgttgagacagatcatggttctggtaacatcactggagtgatagcatgtgtgtccctgaagttaacacctactgaggcttgcccttctgttaggcttggcttggttgtgagtagacctgatagagatgattaaagctatcttagatagctttcacatgggtcacatatcagatagcttgcatatcagatatttacattataattcataacagcaaaattatatttatgaagtcgcaacaaataattttatgattggagagtcacaacagcatgagggaactgtattaaagggtcacaacattggcaaggttgagagccattgctctaggccatcattacatacttgagccctctgatactctctccctcaagcctttttcctattgtgttggacaattatatattttaaagagaactacaaagaaaaattagtcataagtaactcttttggaatgtttacttaaatttaggtattgtcatgtgactcaggtaaagttagaat

SEQ ID NO: 33310 - DNA, 1277 bp, Mus musculus
cttgccggcagaatcgccgtcacctcgctgctccgtcacagggctggaggccctgcctccctgacccccccacttcccagtgcctgtctccatagtcctgtagaggctacactaataactcttggaaatgtgagttgctggtttattttttaatcattgttttgtttttgtttgggatgtatatatatatatatatatatgtgtcactatagaataatgcattggtaaggtaagaatgggcttttagaggatgaccaaaaaaaattccatgtcttaaaaaatatatttaatggcaatgcagctgtcttcctgcttccgttgctgagcttgtagaagaaggctgtattgcaagacaaagttgaatgtaaattgatctccccacaccccgcgccaattctcaaggtttaccttgctgcagttgtgcatcttaagcagtttgggccacatagcactgtgtgtgctatcctttactgagctgttaaaggatctccggaaatcttctccagtgttgatgaggaacctgcgctgcatttgctgtgtagctgaatcccccagggacagtaggactgatctgctgactacagcacgtcgaggcagatgtgacacaccctccatgctgggagtggtcaccacaggacacagatggcatatgtccctgatgcagctgacatgaacaagaagagaaatcgagaatacactaaatccccctcctcctgtacatttcaagaagagcaggcatatgcaatatttacatccttaatttagtttacagaatggaaccaaaatgtgtaagtgttacgttcgccacacttcatgctgtacattgggtctttgtacattttgcttgacttaatcttaaatttaaactattttttgctatataaactttaacagttattaaacagtgttttctttgggtacatgtttcctggataccaagatgttaaatatatttctcgctattgtgtttcaacaagagacttgccctccctgttgtcttccactgtacatgctgtatataggggtcacgtgatgccgctgaagacaagaataaactggagtagattagtttgctgtatttagtctgtattgaccatggatgccctccttaatagccatatgcaataaaataaaatacattatttatgaaatgaatacagattggaggacatttttctgcacagataaccagcttaagcttaaaacaagtctcatcccggatgtctagcattaacaagcactggggacttttggtttggttggttggtttggttttg

SEQ ID NO: 33311 - DNA, 1874 bp, Mus musculus
gttacagtgtgcttgtataaagaaaaataaataaattaataaaaatacatatttcttaaaaaaaaaaaaagaaaagctaattagtcctatggctgagaggtgtgatcttggctgggctccggtgggctcgtgcatgtaggtaatgtctaaaacattcccatgttgtagaaccacagaccccagttgctgtttatcatcaatgtagacggatgtttatctggtcccttagggatcatagggctctggagctggggctacagaatttctgattctgtaagcacctgcatttctgatgctccatgactcgctgttgctgctgctgctgacggtgtaactctgttgtgttgcaggaagcccacgccatccaccttgaaggcaggggagctgcgaacacacgtcagccgctgccaagtgtgcatgagaagaacataactatgatgctcgcctctgccaccgtcacaacatggtgctactccccccccttgtcctcttctccctcccattgtatttgtaacagcaatgaaccctagaattatatcctgtgtacctcactgtccactatgaaaaccataaagtgccttatagggattcgcgtaactaacacaccccgcttcgttggcctctgtttgctgaaggagaaggacaggcagcggagagctttccataatggcacataccaaatggcgctcctgatccaataaaagatgaattgcattttgcaatccagtgcactgatgtctggggcgagaactccataagaaacccaaaggtgctaggggcgtgaggcgctctccacacagcccacagcccgcttcatcctgtcaccccagatgtgagtgctgtccaacccactgtccagtgtttccacatcaggtccctcgaggggctatgcagagaacagtcaagggaactggtttcttccactttctacatggaactccatcgtttcagccccaaacacaaacttatgccctgtgtggtactatgcagctgcttttgtggaagtcatggctttcctgtggaataaagatggtccaaaggttagatggaaaataaataaataagtaaataaatatatatatatattagtaatttatataggtgtcagcaattaggcaggtcaagttctagcgtagagcctgttgttaaataaagcgcacttggttttcgtctctggagaaactgtactatcctttcacagggttaccaacatcaggccactgaatgtgaaacaccagctttcctcaaactcactcctaaaccagaggaggtgtatagatagccaaagccaaacccattcctaaacatggtgtctgataatgagccctgtgcctggcgcttcttgcttctgctctgcgtggagtattttcagggtttgcaacactaaccacagactgaatgactgacttcccgtacgacagccaaggcctttgttagcctccttcatcctgcatcctggcaggcatttcacacctgagcacacacaggcaacttcccagctcctctcgagctgtgacacagcccctgcagggagtggacaggtcgcaggagggcagactcggaccactatgcttgaagtgacatttcactaaaagtacccaccctccaaaaaaaaaaaaaaaagtttttaagactactaaggccttctgtgtaatttctttaaatgtgtatttcttaagaattcaaatttgtaataaaactatttgtataaaaatgaagcttttatggatttgttgctagaaatgaaacgttgaaagagaagttaccacacgtaccactaataaacctgtaagctttgctgcataccttagatcatttttattttgtatgtgttcaaacaagagtcctagactgggggtaacttagggcgacta

SEQ ID NO: 33312 - DNA, 1216 bp, Mus musculus
cactcagccaagctttctgcaagcggggcccagaagatgacagtacccctctaacgtcataaagcttttaaccacagaattaaaactgccttctttacttttatatttttgagcacatgtgtattttgctggtggtgcctatggagaggtcggtgaacagctctgggatctggctctctctctctttggaatcatgtgggttccagggatcgaactcaggtcatcaggttcggtagcaagtcctttccctgatgagcccatctcaccagtcctaatgcagagttttcattctgggttaagcctcaaaaacgaagtggaaggactcggggagacgcacaggagcccgttgtgttcctgtggagatgccaaccgtgttgctatggaccttctcctgttttacatgacttgcagagcccaggatccatccacaagcagccttgggtatgcaggccgccaccgacatctgactcagcaccatctggccgcagttcatcttggggatctgcgagccttcgggctttttttgtacagacatttcctccagcgatctcaccccactgccctgtagttggagccccatgatgattctctacctaatctactgtctgatggattttaaaaaagcccagcattctcagatcttttaagaagcagttctctcagagctctttcttgagttaataaaacagcaggaggcccatggtgtaagagtaaacatatataaaaataccttagtgcctttgaaataggaatctatgcttttatcagaccgtgtgtgtatgtgtgtgtgtgtatgtgtgtgtgtgtatgtgtgtgtatgtgtgtatgtgtgtgtatgtgtgtgtgtatgtgtgtgtgtatgtgtgtgtatgtgtgtgtgtgtatgtgtgtgtatgtgtgtgtgtatgtgtgtgtgtgtgtatgtgtgtgtgtatgtgtgtgtatgtgtgtgtgtatgtgtgtatgtgtgtgtgtgtgtgtgtgtgtgtcttcagcacacattcacactgtggctcatctagtccaggttttgaagataatatttctagaaataaagtacaagttgaaatgtgggttttgtcaaagactctgggcactgaggcacgagcctggatgggtcatataaccataacccagctagacaattatcttggcagttgcctctcattcaccaacaattcactcaggagttattgggaacgtgtcgggaaggctt

SEQ ID NO: 33313 - DNA, 2083 bp, Mus musculus
actgaccaagctgggcacaggagcccacctgtgagcctagcccccgggaagtgaaggtagaaggcaggaggggaagagttcaaggtcaacctaagccacgtatagagtcatgtagagttggagactggcctgggcaacaggaaagactgttaaacccaggagtgctgttgcgtgcatttgatccaagctgctggagaccctaagagaggagcaattatttgagtctaggacttcaacaccaactagggcaacatagtgagtttctgccttgaaagtatgtaattagcacagttggccgtagtgcctgggtgtttcgggcatgtgacctctaacacacttcatctcctgctctctctgcagcacactgcagccggggatgaaggcggtggccagtcactggtgtcgccgggcagctgtctagaggacttccgtgcaacgccatttatcgagtgtaacgggggccgtggtacctgccactacttcgctaacaagtacagcttctggctgaccacgatcccagagcagaacttccagagcacaccatccgctgacacgctcaaggctggcctcatccgcacgcacatcagccgctgccaagtgtgcatgaagaatctgtgaggctcccgccctgcccacggcagctgtgtgggaaggccacgttggtgcttatccttctgtatttgtttcaactttgtttgagacaatgtctcacttttcatccctgcctagcctggaactatgtaaccccgggctggcctccaacttgtggcaaacctcctgcctcagcttcccagatgctgggattatgggcatgcgccaccacacccagcttggtgcttactcttaacttattacctcagatgctgatcccaaagttgatcttagtgttttcaaactaccaaagcaattctgcaccagcactcattccaaccgtctgtcagcaagtgggcactagctcctccgggatctaccagccttggctcacagccctgctaacacccaccttggagagccaacacctaggagcaacccacggacctctccccatgtaggacataaacatcatgctaccaggtgtccccaacaatagctgtctctgtgtccctgtgcttcccctggcaacaggctgctcaccttcctgcagtcttcctaaaatgaggcagagtctaggggacagcaaaggaatctatggccaatgatagctgagctcactgacccatttccacccaaggatgcatgcagtgtgcttctgtctagacctggtttcttggaggaggagatgatagcacttttttctatcaaatccataactgccacctcccaagtccctacgtgttggcccctgcctttttaagaccctgacggcagctggcacacagctcatggctctagccaaacccacagcaaaggagacatctctctagccctcaccagcatctgctggaaggtacacttagcaaatcattgacagtggcgtcctacaacctgtgtcaccctaaacacctccctccacaacctgttccctgcggcaagctgttctatggcttttctgtgtaacaccataaataaaagatattctaaggacttgactatgttttctgtcccccgaatcattgtgtgtgtgttgtgtgtggtatgtgtggtgtgtgtgtgtgtctgtgtatctgtgtgtgatctgtgtgtgtgtgtgtgtgtgtgtggtgggggggggtgtcttatgtgtgtgtggtgtatgtgtgtatggagtggggatgtgtctgtgtgtgtggtgtctgtgatgtgggaggggtgtctgtgtgtgttgtatatgtgtggtatgtgtgtgtggtgtatgtgtgtatggtggggggagggttgtctgtgtgtatggtgtgtgtgatgtgtgtggggggtgtctgtgtgtggtgtgtgtgtgtgtgtgcatgtgtgtgtgtggtatgtgcatgtatcattcctcaggtgccacccaccactctttattaggatctctcatggggctaaaattgccaagtaggctggctggccggcaagccccaaagattcacctatcttagcatcaagatacaagctgctcttttctgtg

SEQ ID NO: 33314 - DNA, 1128 bp, Mus musculus
ttacaatgttgcagaacagagctagattatctctcgactatttcagtccctttgaaagccactcctgtgtctgacctaacatccttgtgactttcaaaacttttcaagtgtattcttagcatgctgctagcttccaccaatcccaaagctaagagtgtcatcagatagcctatagtagacagcaatgttctccatttgctgtaccaccccccataccccgcctacctgggatccctaccatttgcctggatttatgacttcctttgtaactaataaaatctcttctagccattcccaaagcagaatatgtctttcaggcgccctgagtctgtgttcctgggacaccagcactcacatcttgctcaagaataagctgccttacccctttgtggtgagagctgtgtttttgcattcaagggctctgaactagtagtggtaggatccttcatggactcaataccaaggcgttattgcgaggcggggcctagctggagaatttagatctctaggtaactaaaaagatacagctagcggggcggtggtggcgcacgcctttaatcccagcacatgggaggcagaggcaggtggatttctgagttcaaggccagcctggtctacaaagtgagttccaggacagccagggctacgcagagaaaccctgtctcaaaacccactcacccccaccccccacccccacccccaaaaaaaaagatacacctgctctggtcccttaccctcctcaggtgagcagcttcgccatgttatgatctccccactcgatgttctcccgctcgatgttccacactgcacagaccacacccaaaggccgagagacccctggaccaaccacacctctgaggcttagcttcctccttcgtttccccaggcattctgttgcactgatgagaagctggcagtgtccagctttagcattgcacacccattctcattatgagtccctaatacagtattgctaactaaagtccggcttttgggacggctcactgtcatgttttacattcatgggtctggacaaccgtaacgagaggcctcgtgtgtcccctaacatctcatcactgacaaaatccagacagagccaactaaaggaaggacggagccatgttggat

SEQ ID NO: 33315 - DNA, 1181 bp, Mus musculus
ctactctgccacggcaccttatcccaggcccagtgaggatgttgggggtgttgcgtgccagtgtgcagctgtagaaaagtggcctctcagaagcctcagctggcttgaggttgctatttgggagctgaaggtagaaatggggtgaaaacggagagcccagggcccttactgtggcctacaacgagaaagcctttgattgtgctcttatcttacagctccagcccactcctggtggctgcctggggcgcctgcacactcacaagggagtgtaaccggcaggccttccagaagtacgggcgctctacaaccactaccgacatgatcacagaggtaggaactgccttcagcaggctcttcacgacctgaacctgtgcagactggagtgacagactgaatcctccatttgcctagccttgggctcagcagcacttggaacagaggatttacgacctaaccatgtattctcactaatgtagagttgatatgtcaactacgacactaatctggtctttcaaggttttcttggcttctcagaaatagctgaaaagaaaatgagaataaaattcccagcagcccaactggatctgggcttgctctgagacaggaaatttggagtttgtggttgttctctgcttctcgtgccttttcgttactagtcacccctcacacagagggctccatccttccaatactagacagtcacccctcacagggctccatccttctgttactagacagtcacccctcacagggctccacccttctgttactagacagtcacccctcacaagggctccacccttccgttactagaaagtcgcccctcacagggctccaatcttcatgtggctggggagtgcagggtttggtttttaactgaggctcacaggacattcttgggccccatagttttctgttgagtgaccgagtgctagcttagtgaagtagtttagaacagacagtggccatgcagagcagatctgttagaggcctgtggggagggcaggaaacctgggtgccactggcatttgagtgtggcagggagtgcccagattctgcaggtctactactcgtgtgctcactgctgcccactgtggccctcactctgcctgctgagcctccctcccgagagtggcctgccagctgcatgcctagttagtgggggtctgctctctggctcc

SEQ ID NO: 33316 - DNA, 1195 bp, Mus musculus
agattaaagccatttactacttaggcagccctcagttgctggtaacccctcagcaggggtggagcctcacctactcctcccccatccatgctgggatcagttacaagaatgctgcttctgggccagaacgtctgtgtcccctgctctgctcttacagacccaggtcccagcactaaaggcctgtgtgcccagatgtcctcctgtggcagccacctgaaggttcgggagctcaggttagccccatccgaggacatcggtacccttcctgattactgtgtcctgttcccttttctctaaggcttttttaaaaaagtttaattttatttcttaaccatttcttcttgctgtggctaaggtgagataggaactcattttttgtcctttggagtagatgcttgctgccctggtggagggtgggggctggtttatcatgtggtagaaatgaggctgttacttacccgctgtctgcaggggtggcctggactgccaccaggggtctttgggtcttccagatgtgctgatgtccttgtctgacctcttgcagatgaacgtgacgcccgcttctctcgccagtctttttgaggaagaatttaaacaagacatggcagccctgaaggtaagctgtggtttttacactttgtaaaggggcagtggtagctgtcccacatgatctaaagcagtcagttgctagtgcctgcatccgggccctgtggtggcaagactgaagaaaggagcagatctaggtctgcagagtgggccctgtgatgagcttagtgggaggagccccggggcagcaggatgagctgggttcttctccttagggcctgaaagagcttgtgtgaataagttagtctgtactcttgccaggacgccatggtttatcttacattcctatcagagtcgggcacattcctggcaccaaggtctagctgtctggctcctcgttcccctccagtgcctgtgtctgttgagagtcggtagggaaacaacgcaggaaaagccagttggctcactgggggcatcatggcaagcatgacttaggatggccgccgcccccgtcttgctaagtctgtgcgtggaccttgagcacggaaatcacccgtggtgcccacggtctctgcttcctcccaggttctgccgccaactgtgtatttgagagtcactgagaacatccctcagatcattgctttcatcg

SEQ ID NO: 33317 - DNA, 1575 bp, Mus musculus
tttatggtatcgctgccttcgtggaagtccgagggcagtcagatgagtattttagagaatgttagccgtgcctcctctcctcggatggcggagacagcctgcgtcttcatggtgtaccttgttcccagactgggtctgcagagccgcaatttagaaactacaaatacaggttcgaattaaccatgtcagcgagtgtcagactgattttgggggttggggagtgacttggaagtaagctaacagctgtataaagaagagatttcatttggctgttttgacaaaaatgttacggtttacaaaaaaaaaaaaaaattagccaggttgctgaagtacaacaagcgtgcttcttgctaccataatgtatatccacacgacaagttggtggtctaaagtctaaatattattattttttaaagaggtaaatgggtaaattttacatgacatattttatacatggcctattccctaactggccatttttaatgactgggtacatttttaataggtcagacacaagtggtccaggcagtgggtccgagtcttgcctttgctaccctaggtcatggtgtagccacctttaacttatatgaagtgtataaatgtacatcttgcccctgctgtatcataaccggaagtgcagcctggtgctgttatgaagccaaggtgtgcatcctgctgcgtgtgtgagctgtatagatgttgcgtcaagaaataaatgaaacttggccagtttgtttctttagcatttaattttaacatacaaataattttaaatttttgtcttaaaaatttatacaccagcagtttagacaaagccttaagcaaattgtatattattgatctcacgtaataaggaagtaggcattatgtccatgccagcaaatacatgtcaaaggtgtttagatcagaggttaggacgtgactgtgcttgtgaggtccagccccaccatctgtttttgtatggcctgtgagctaagaatggtctctatgtttctgagtggtttttaaaatcacatttcatgatacacgaaagtcctatgaaatgaagatttgcgtgtctataaataaagactcattggaacaccatccatgtttatttccttatgtgctgcctgtggctgcttgtgtaagacctagacatgctctttgcagagatcacctactgacagctgacgtcagcaacctgtcagcggcgtgtgtccttcactgcccgcttactggagcccagcagatcttcatgcctgggtgctgtgtgccttgcttgaaatctgagtatgttgaagtgttttacagagtatgtggggtccaggcctggtcactgtagagtcactgtggctcttgtgttatgtatagtatacattgtagctgtttgctgatgccttggagaacttttctttccttgggcatatattcagttttctggccaggtatagtgatggtacacacctttaatcccagcacttggaaggcagtggcagatggatctcttgaatttgaggccagcctggtctacagagtgagttccaggacagccagggctacacagagaaaccctgtcttggaaaaattttttaa

SEQ ID NO: 33318 - DNA, 1850 bp, Mus musculus
gactgttggttatttcctattgcaggttttcttgcagtcctctatatcagaggaacagaaagcacccgagtgtgtcctctaaaactcaattcatatctctccccccccccataggtcagttttttaaaaatattttattctattgaaaattaatgcaatatattttgatcatattcatctcctgaatccttcccctaatcccagatctactcccacaccaggtgacttcccaatttgtgttgccttcatacacctgggtttgtagttatccactggaatatggtcagcttccaagtagccacatcctttaaaagccagtgtccttatctttattgtgttaaaagattttaagcactttaaccaggacctgacactcatgctcctttctaacctcacaagtggttgtcacttccctttaagtgggtcagtgaatccatgtcaaactaccagcaaaccaagtgcctgatccacttgggaacatattatagtgaggcattgtgcacaagacaggtgttcgttctggtgcgggaagcaggtgcggccgcatgggccaagatgtttgctgcctgccaggctggactgttcctcgtgatccggacctgtccacctatctgtgaccaacctgagttcgtgcctgaagcgtgtgtgaattctgattggatgaggtggggtggagttaggtgaagtcattcggggtgagtataggagagttgctgtttagcccttgccctaagtagaagctagttgttgtagaagttgttgctgcccttgccgcaagaggtattagaagaagctgctggggaagagagctgtaaaggaaaaagcccgaagtaaaagaagttgctgcgtgaacccgccttggtgtccctgtcgttcttgtctctgtgggtcggagactgcggcaagtggtgacccatacacgttggtcggcaacggtaagtaaagatagaaggaaactttagtaaacagcggtaaggtaagtttaggtaagcggccagtttagaacctctttagttagactgtaagagtctgtggaacttttgatatttgaaaatgagagatcagagtgatgccatcttgtaaagggtgaaggaaaatgcagtttccaagtggagggcattcagattttagtagacaagtcaaatagataggatgggtgtatcaaggtcagacaggagaggcagagcagagcagaggcaaatgtccaaagtgatctaaattatagaccaggcagctttacattttaaaaatgggacttgcatagatagtacggacaggtgacctcagagacttgagaaaggactactatagactgagaccgtcactgtgcctggcagacatgtggccagtggaaatggctaaaggatgtaagtagacaagtcaccaatcccagcaaggaattataattaaatcaccagaagaaggtggttgaaaaggtaaacttattctgctagggagagcaacatcttggtggaaggttggtgtatctaagctcagtttctttttggagaggtttgaagtgattgtctctcttcatgaaggagaaaatcagataggttccccggaaaaagggacgaagcattaaggttctcaggtatagagaggaaggtaaggttcccaggagaaaaggggacgaagcattaaggatctcagaaacagagacaaagggaaggtcccctgaaaaaaggggatggagcactaaggttctcaggaatagagacaaagggaatttcagcaacatgggttcaactacgacgaaaatgaaagtaaaaatgttagccatctggaacttggtcagggcatgcttgagggacgctagtggaaagtacaatgctgaaatagaggaagga

SEQ ID NO: 33319 - DNA, 2696 bp, Mus musculus
taatttatctttggaaaaatagtggatacttttccccattgagaatattttgtttctttgctagtcttgaaatactccttttctaatagtggattgtttaaagagaaatgctgtaattttaggtgaaaaatatcctctgaacagattccagttgttaaataaattatgattactaataatttgggggaaagttgattagagagtccctgacaggacacaggcaaactataggacacaggaaactgctggacgtgggtcttcctccatgagccactagagctgagcttgtgtggaatatgtcatgtctctctgagcagccccaagcattgagatcaaatttaatactaccaagcaagagacgtgaattcccagagagcatcaacataacttttcagcataggtggtttctgaaaataacaggctctgagaccttggctctcatggtcactgttgatctggattcagtaggaacttctcagcactgcctttgacccaagactaagaagagcaactggtgtaggcagtcgctgctgaagctccattctgtgctgtgaccgtgcactgagtggcacttgtgggattgtgtgtagaaatgggtgttgctgagacaaaagcagttcgttcctctagtaattatgtttgtgcttcctgcactggaagtggacccgactggcaccattgggcctcctcaacagatccactccatttgtccttccctccttgcctagaaaagttctgtgaggaatattcccatgggttctgatgggccctcccaggagtgacttaaattgtcctctgagggtcaccttagtagttaagtatctactgcagtgtgtctgcttttgatgacagcttttgtttcagagctccctccaaggctactgaaatccgtatgtttatacttctaaatctgcctgagtgaccttgaaaagggaaccagtgtgtttaggagaaaaaagcaacaggatacaaaccaaagtcttttataattgtggcaagagttgaacatatgttagtgtctccttccccattggtctgcgttttggtgacaggtgtatttcttaatgcagatatgaaaaacagtagctccgtgttgaatacattgacaaatggaagtgtcgtcaatggacatttggacttcccctgcgcgaaccagctcaatgggatggagagcaggagtcacccgtgcttaacaggatctaatggcgttagcaatggacagccattgtccagtggccaggcctctgtctctgctaatgggactgaggagccagaaaagaccatgggcattaaccccgagatgtgtgggtctctccatctgaacgggagcccaagtagctgtgtggccagcaggccgtcctgggtgggggacataggggagagcttgcactacggacactaccatggatttggggacactgctgagagcatccctgagctaagcagtgtgctggagcacacgagctgtgttcgggtggaacagcgctacgacagtgctgtcctgggcgctatgcagctgcaccacggctcctgagcccagcgttacctcagttcctctgcagtgccagcttgaggaagctggacagcctgtgctgtaggtgcctcggctttctgagagagagtgagtccttggattccttcacgtagagtgctgctctgtgcatagacccttctcatggcgtggcaggcctcctgcgaggggtgctttggaggcttctcttgtttgacaccagccttttttttccccacatcacgagacattgccacctttttgtgaattgtatttgatcaggacagttgggcatcgctcacctttactgtttgctgtagcactcctgatgacacagctttcccctgtgcaaggacctttacagtgtgcagcaaccccgggaagggggctgactgctgcaggtgcgctcagtggtcggatgtgctagccccttccctccctgtgtagactgctgcctgtgtctccttagaaacagctctgcccaggatggattaggttgttgtttttactccacatttatacttgatctctagacttttttaccacaaacaatggtttcctttatatacagtggatgttgctgtttgtaggaactgtcgggtcagaatattttactatggtgacctatttttttgttactgttttttgaagttttctgcttaaagatatataccactatatatccagttaactgagagaattttgggtttctcttattaaagctgcattaaattcgtgattttatagaaattagcttttgtttaggcaactagtggctatacagcaaatacccaatgacttctgatttttgtaataactatcagtgcaagtgaactgtgaggtgacaaagccaatgttttaagagtgtactagcattttgttttcaagctgttctttacaaattgaataaagaaaatgcactgctgatctgtctctgaaactgctttgtaggtggggttagggtggggtccaggaggtgtatggtgggaaggaggtttggccttgggttatattttgctttccgagtttgtcttcatgccccatgtaatgggtttgctatcacactcagctctgtgtcccttgctttactgagactcacatgaagaatgtagccactctccagggtccgaaaagctgcctacatggttgacttgaagccgagcagtcgttccctgtgagccatgtc

SEQ ID NO: 33320 - DNA, 1099 bp, Mus musculus
gctgttgctcatactctgaagggagtgcagcaggtgaacagctagctcacggaaatgctgggaactaactgtgagggtggtggctgtggcttgtgacctactcaagacaagtttgggataactgccccacgctcttggttgctttggtgtctagcattcccttgaagactgtaaaatactgatcattttctgcagagtttatgtgttacagtgtccagaagactacaacataacccttactttaatgtttcaaagtcaaaggagctgagttttcttagacttaggatttctaaaatgctgtatttatttggcacatgccttttccccaatctttgggtgataacaaaaataccatggctaatttttatataaaagtgttttgttatggtgttcatttcttcactggaaataaaaggtcacctgtgtgtttcctaacccacaggtaatattgtcaagcccagaacttgctctgtcataggtggtgataactttggccaaatcattaatgcactgggtgctcacccatgaacagtttgctcagagcaaatgttcatttaaagcaatggtttctgaaatcagcagaggctgttttgcctaacagaggaaaagtggtaaaagccagagcctctcctttatggagacagcattgttcccttcctggtcaggcaggagaaagaagctcttcgctcttctcatgccagcaggcaggtcgtcctggatgtcagaaggccacgtgggccttctggtgttttccagtactgtctgactcaggaaacgtgttggcactccctagagattcttgccaattcctagtgtgaaatagcacgctgtgcacagaaaggctgtggagacagctaccctgccctgagatctgcacagacagaaataaggagtttcctccttaaatgcatctctgctctttttgaaaagctgtgagatgatcctgtcatctttttaatgtcccttgcttgagacccatcactgggcttgattgatcatctccccaagctcagcctggctgcctgtacccagtgctttgtactgagtggcttctgtccgcagctgagtgagtgggtgtagagtggacttgggtgagctg

SEQ ID NO: 33321 - DNA, 1188 bp, Mus musculus
aagggaaatgcagaaataatccttcccgtgtctgccctagcagaatgccatctgacacgactggctttccaaagaaccaaagtttccacttcagaggtcatggtatataattccagaattccaagccagaatagaacatgcctaattttgatctgtttatatatacccaacttttctatatgcttataaagtttgttttagtcaagtgaaaacagtagcttcaatttttgtctacatattttgtgtctgtgtatgtttaggtatgttatgtgcatgtaaatgcatgtactttaagagggaaagatgtcaggttcccctagagtgggtgaggtagtgctcgcttcccttccaaacccaagcagaataaacgtgggtcactgagacatccataggctgctttctcagatgtagcttagattgcttcttcagcaatgacagactacaagtacaaacaccagtgacaggagagtggggtggtacacatgtcaaatccaaacatggtgtcgttaggattgggagagatcaattttgcggtttgaaaagtagatgatagctatggtgactgtgtgcagcatgctgaacagctgttcataggcaggaggaagagagagcctgtatgaagatgtcagccaagatctgttttcctagcaactcagaaaatgagatgctaagctgtagactatggaagaatttcactcctgctcagcctgctggatcagtgccttcctatggtgataggctcctctgccctgtgctggtatagttccatccatgtcttactgcaccccccagacctgtttgagatcaacaatcattgatggttttaatactggaggaagagttaccttcctatgttttgtttttcttggctgatgtgagcttcattccatgataaggaaactgccctaggtttggggcatggagaatgaaaatcttgtccctgttctcctggggctttgtggctgcaggcagagaaaatgcccttcacatttgttggctgtttttattttggggacagagtttcactatgtgatccagctgccctcagactcatgatccttctgtctcgaccttctgagtgctgagaatatagataacaccccacatctgcatttctagtcagtagctaaagaggtatttaatctaattttcagagatgtgaacttgcacaaaaacaagaacctataa

SEQ ID NO: 33322 - DNA, 1142 bp, Mus musculus
cctgcaaatgtgatcccttatgattgacgtttcctgtgtatgaaccatgcccgtttcagtcacgcagaagatgctgaatctgtaaaaactacacgtgtcaatgttttacagctgcgtaattcgaattgacttggttttttcaagtaatcctagaaagggggagcattcccatagaaactgctgaaactgccacaggtgcttctccgaaaccttacggttgtggcattgaatgttcagtatggcttcccttctgcacacaagcatactgttgaggtatttgttgcggtgattggttttaatgctaatctaggaattcagatatagattctttagatttgcatgctttgcttaccctaatttatgatatctacctttttatttgtaaactaacaatagctaaattcagatcagaactttaacagaaatattatttatataaaaattgttgttaatttttaattgtcacatggcattagcacaaagaaagtgttacagtggtgatgtgacactatctagttctgaaaactagatatttcttgatctgtgattattactctaattaaagggaacactcattggaacggcttctctcttctggtattgtgacactgtaagtggaaaatcaaaggggtctttgtgacaatatgttctaaagttcctggggagtggttcttatgtaagttaaatttaatactctgtttaaagtgtttgagggcagtttggttcatttttgccactttggcaaaatatttaatgtgtagctcccatgtgctagtttcctgattctgaaacattcgcaggagggctcggtggcgtagagcttgcctagcgtgctctaagagatcgaacctaatctctcagtgctgtgaagatagttggctggagaacagttattttcctgtagcggggcagtgagagctgggactggtagccaggaggaacatggtttgccgcagactgggctcagcagcagggaagtctgagcctgctgacttccttctcaaagctgcttgcagagtctcaacaagactagcgtttttaatagactccctgttttcatatttttatatgggtattaggaccagagagagtggataagatctttctttaaaagttttagcgatttctcccaggtaatttat

SEQ ID NO: 33323 - DNA, 1244 bp, Mus musculus
ggtgaattggggcggctctcaacttcttacctgtgctagctgctgcctctgctctgagtagacaagggcggcaaacaccaacatgggagagccgcccacttcctctggtatcagaggaacaatagaaggttgggttttagtgtgatttttttttacagaaagacaaaaatttgctattcttttatcatgtttggtaactttaccttcttgaggaaagggatgcttctaagcccacctgatactaaagtagtatttttttccctctgggtagaatcaaggtacccacacatgcaggcatattgtgctttttctctgattcagtcttaatggggtggaaggcggggctgatagcaatcttcccctctttagaatatgacttcatcagaacttgtatgttttatgataggtgaagtgggcagcctttgaaatatttacggttaacccaagagtgggcgggcaagataaagcagggtctgtggttcattgtcaagaggcttcacctcggatgaagtgagctcagttgtctgacagaagtggctgtaggccacagatgcagctcctgtggagctgttaggcttttgtacttaggaagcaggtgtgtctgcttcacctgagaggcagggctagcaccgggacaaacatatcttgaacatacaaacacatatgaacataagtgtttaatgtgtttggtcagaagctcacttgtaacttttttcaggacaaagccaagatttactgttagccccttccttctgatgctgaaggttccttcgtcttgatgcgtctgtccttcagagcactgatcctgttagatgtctcagcactgtgactgaattggtctgatgctctagcgctccaaggagttctctgtaccctcacacgcagcctcttctcagatgctgctaccacagatcctctgctcttgctgctgcctttcctccatccgggtgggacagctgtgtggctctgcctacaggcagaagcagtcagtatgactgacggcgtcccagaggtgacagacaacttaaataagaagtagatttcactatttaactgttgcttttatattaaattagtgctttaaaaacaaaccagcaacttccaaataccaattttctctctgttaaatcatactgaaacatgctaagtattttaatgtatgcaaacataattgtgattcacttgcaatgctaaacatcttcaataatgttgaacttgaaatgaaaacttggcaccaaatttat

SEQ ID NO: 33324 - DNA, 1151 bp, Mus musculus
gcccggcaagtctcgtccctctaaccacactaacgtgcaggcccaccctcaacccctacaccttcagcgttggcatcagtagcggcctcctcaagcggtgatcgcctcccagcccctaacttcaccaccagacgcctaaggcggcgttcctgcgcagaccctgagaaggccccgccctgcagccaaggccacgccctatcccaggcgccagcctcagcaccacctgcgggaggccccaccctatccaggcgcgggcctcgccccaccacgggcgtcagcagcggtcggaggcagcggactgttaggccccaccctctcaaggcgcaggctccgccccgtggctcaggtcccgccctcagtgctcgctgcgctcggatgcggatgggacgcggcagcagctcgcctgtcctttgtgttcgagtggcggcagcttcgcaggccttcaccggcacattcctctggccgatcagtcgcgtgcttcctagcgacccatcatgtcagcgggagcgggcgcggccgtggaggcaggcttctccagcgaggagctgctgtcgctccgcttcccgctgcaccgcgcctgccgggacggggacctggtcgcgctctgttcgctgctgccacacacgccgcgcgctcacctggccgctgaggactccttctacggctggacgcccgtgcactgggctgcgcacttcggcaaggtgggcgcgggcactttaaggcgccattttccgcgtggtgtgctgttagggtcagagcgcaccccacggtgtctggagagcgcggtcggcagcggcagcgcaacccctgagagttccagggcgcatgtgcggtaccgcgcggtctgcgacccaggacggtggggggtggggggcgcggaagctgctcagacgccgcgggcgcctcgagggcttcaaggcgcatgtgcggcgggcggcgcgcgacccaggacctccgggggcgcggggagtgttgggaggcggggcggaaatggggtccgtctcgccggctcccccgaaggatccagggcgcatgtgcacacttgtggctcttccgagcggggcgggcagactgcagttgaggccgtttgcgcggaggccgccgggcttcgggaatcgtggcgaggaggaaactgggggcctcgcgcttct

SEQ ID NO: 33325 - DNA, 1101 bp, Mus musculus
ggaactatatcaggcacagaggtgggggtggggatgggaggagtggcgggggatagcggtgggcacgtcaggtgctgctatgtaggaaaagagttccttgccctgagaagcagctgaggggtaagatgacggtcaggtggacttcagcatcacagccacgtagtcatttaaaatgtgttcaactggtctgcttatgtctttgctgctactattcaggagtgcttcagcacctgagccagggtgctgggtttccagcctcctgaatggcagactaggaagtctcctcaccacccaggctgtgccagaccaggcagaggatgttgcctggccaccagctgaccagcccttggacctgatgttactgaagtgatgtcactttctgactttaactgaaagtactactaccacatttactatgaaagaacaccaagagaagctggtgtaattccagaacttgggataggacttcaaggctagcctctgctacatgagaccccacatttaaaagaaatatatacaaacatattactagaactgttcattacaaaggagaagatcatcttagccacctcaacaagagtcaaaatgactcttacctgcacagaagtcaccaagccagcgaatgctaatgtcacaatacagtctctacagtgaagacagggtagaacctttcactacccttcctggttattttaaacttgaaagcaatctctttaggggccctagggaggctccttaaatggaacaaaggcaacagaaaacaacacctctagtggcagttcccctggaggctttctactggggcagttaatctctctgttggccttgccctctctgttgggaaggctgggatggtgtgtgtgaaaactatatgctggagagagttcccagcctctctgctttagtttcctgtctcactaaggtaagacggtaattattctgtccagctgtaagggtcattgtcaaggtcaactgagactagctgctgattgacagtgagttctaagctaacataaccttttcctctccaagtggcttttggtcatggtgctttatcacagcaacagaccctaactaagacaaacccagtctccttagttt

SEQ ID NO: 33326 - DNA, 1100 bp, Mus musculus
ataggctgacttcattctcataggctgaagagcagcagttcctggacatggctggggcccttggcttccagcacagtgacatttaggactaaggaaggtggtctccatcaggcgagcagcagcaatgaggctgttgctgaagtagctacatgtgagttatagacactgaggtctgggctgagtgtgcacatatctgccacttctccatgcagtgactgaccagagtcctttggcttctggacttgagttgaatctataaatagcatacctgtgtactccttgtaaatactgggatctgagcacctacctgagatgggactgggctaaccctcctgctaggatttccttctcagcctttctggccacagggatctgaagttgtgtttgtgaagtgttggaagcagaaaggtgaagagatgccgtggcagctgtctgactcgtgtgtagcgcaggctccatggtgccatcgggaacaggcactcgggcacagtgaatttgtgtgtctctgttcttaactgcagtattccagtctcggctatggctgtgcccagggcatcatgggttctagggagggaaactgttacctgcctgtggtgcccgcctctgctgccctgccctgtcctgtctgggccttggtcacagtgtgcagaagtgggttagccctgtacatagatgtgttatttattccatactctctagccggtgctgccggccgggcagggtttggctgcaggctgttttcatccaggagctctgctctgcctctggccgcagtcagcgttgtccaggccactgaaagccctcctaaccctctgagcgagaataaagcaatacaaaccccaagtggagcagcacagcgagagccctcaagtgctgtgcctgcgccctactctgctgcctccccaggccaggcccaggcaggccctggaaggctggtggcctgggcaagcggccctgcttctgttaggccatgcttgcccctggtttggcaacagttaacagtgacctcaggagcttagctgtcccttctttcctccaaagaggttgttttcaagtcagagatactttcccttagaaaggtgttttgtctttaaacactg

SEQ ID NO: 33327 - DNA, 1215 bp, Mus musculus
ggtgagaaaagctgagctgttcctttccttttggtaagccctgttttccaagcactctgctgacccagaagacactgcagcaaaaggcagtgtgtttgctgtcacagcaggtctcaactcaggaacaacactccttgcaactccactgctggcacaggggcctggggttgctgggcagcccctccatcaacaggaagcaaagaccatgttcgccagtgtccttgccaccgccgaggttgccgtccgtgccccaggacaattcctttcagacctgccttaatgattcgcttggagtgttccatgagtattcatgttcccagcatccctaccctggacagggtggttaggctgtcagcacgccgccttgtctctctgaggatccagtgtcttccaggctctccagggagcgagaatctgcacccaagagcagttctttttaaaaccggccctggtgtacacacccacttctctctcctgcgtgtctgcgcggggagctttgataccaacagcacagggcgcctctcaccaactcctaagtcctctgtgttctgtaagggatgcgggggaatcaagccatttcctgtcgtgtagatgtgaagcactttccgttctgaaccatgctgcggtgtagcagcgtccgaaactccactgttctcctccagctgctgcccatgcgccctgtgcacttcatgccaacccccactttcctgggacacgacaggagaccgcaccggggtcgactgctcagtgtgtgtgtgctacacccttgcaattattaaactccttatttttcttatctcacaaaacgtgttgcttcatcttccttgagacggtctccatgtgcatgtcttggcttatcaggtttgaaatcctgatgtgttcaatgcagggaaatactgttgaaatctgggagcatttaaggatggtaagagtgggaaacagaagttctaggagtagtttctctcccgaatttcaccctcctcccactcccattaaattggaataacaactgctggtaagatgtgggccattttctggattaaaacaaaaggcagtgctctgaaggaatctgggatctctacaaaagaaaattactgctgctgttcaatcagctctgcctggtcaggagctggtcccgagtcccgttaggaagttcgtaccagatttcagagacacggcagtagcaggccttcctaggtttgagacagacagaca

SEQ ID NO: 33328 - DNA, 1197 bp, Mus musculus
gaccagctctgatgaaagtctccagtttctcagcttcagattggacttcaacgaacattacaaagccagagaacccaggctccgggtctctctgggcagtagggggcggcgcagttcccacacgtgaggctggcttgggttagtacatgcttactcaagcctggcccctcaagcagctgtgagctgcaggtgccccctgtctacacacaggccccagtgttcagcactgtgtctgctggaagaagtcttgttatccactggacttgcgtgtctgtaacgctgctgagttcaacaggccacttacctaccatgtagtctccgtagtcgaaagacactgtgatgtgctgggacatcttatttccaccgtgtaatttatatttcaacaacaacaaactgtttcttgccacaaaaaaactagaccataaattaagagtaatgtcactgctgttttttagcattctctgtgagacagtttttgttatcatgatgacactaaaattgaaacatgtctaagaaagtccacaggctgttttactctggcttcagtgtttgtaaccctcacctgcgtgaggtcatcactacccacgcgtcatctccacacactgtcctctctccctcccgaagtttacatttttatatttgctttactgtttcagataacatgtcaaacatttcaaagagtgggagccgtggagggaggtgtcctcagcctgcctggccgcaggccgctggctgaaccaggcaaggctgagactgtcttattttcaaagttctgataagtgttaggaagaaatcagcttggattgtgaaggtttcccttctccttgcctattttttcactgtaaatatttatatactactgaccagatgacggaggggactgggttttggttttttttgtaaaaatgtcttatccagtcacataattatgccttttttatgttgcataagtgaaaacttagagaattaaaaaccattatctttcagatgtttcatgtggtttctgaatagtctggagaaactgcttgctgggtttgtgggtgggaagtgagggaatttggtgggctgtgctggggtgtggtagcggtttataatttgtaaagcccatattcggattggagtattgatggagcacaagcgttactgcacgctggtccctcccaccagctgactgcacatgcatccagctctgtttaa

SEQ ID NO: 33329 - DNA, 1208 bp, Mus musculus
tttcatactttcaagaccagtagcacacagacagcgccaccattcagaggggcagccttgccaccgtggaccacagttctgtgagcttgtgtgtgctgaccctggggaaacacgtcctcaagtcccagtgtggacggccaggtcgctctctcagggtgctgatccctgcagctgctgtgttgactgcactttcttgtcaaagacttgaagcttgtccacactcctttctaatgaatagttcattatctttaaattcaacttcattcaaggtctcacagtggtggcaaatggaaccagattcttattaaatatcataggattgtctctggcccatttcctggcacagcccttgttctcggagacctcaggagccaggcctgggttgctggagagagtgggtaaataagctgatagcctaaactattagctaagggctaataagaggtgaacttgcacatgtaaagcaatgggaaagacccagcatggagtgtatggaggtagagtgctgtctgtaaaggagacagacagtctgtagctgctcagcatggctgcagaggatgtgctaaggggaagggagctgctgaaaggacagttggccccgctggaaccctcccatgctgcctggctacagctccaacttagagcagggccacggccactgtagggcacctgaggccagtgagattcagaaagagcagtctcagttctaagtgccagtgggcaactcataaagcgcgcaagcgagagccctagcacagtgcagttcccaagcccagagtctatgccaggagtgccaaggctccgatcagaagagctagtagatggaacttaccgtattcactcatgagaagagaactcagtaactcccattcaggctggctgaacaatggtgttactgaaaaatctattttgaggggagagggaatagttaagatacgatctcactgtgtgtagcccagtctggcctcaaccattctcatgcctcagatgggattatgggtgtgggctacatgtgtgtctggctgaaagtgaccttttagaatgagagtagatgcttctttccaaggcagattgtctggcgttctcactatagtcagcgtgccagctctcagaactgacaagttccttccatgcccattgtctgaatgagggcatgtgggggacgtgaggcctctgcactacagtgcgtgacgcacagtgctgccgtg

SEQ ID NO: 33330 - DNA, 1162 bp, Mus musculus
aagttccatgagtatgtatgaagcagtatgttgtttgctgtctcttgagattcagtatgcctcaagacatcttcatgggagggagatgctgtgttctcatttttcccagctgggatacttgctctgctgatatgagagtggagatagaacttgatacctgagtgtggatgacagtgagatgtgtgtgctggccacatgtcttcacagatagcaagattcttacagatcagcaaagacagatgtgtgactgacctgctaccatcactgtgccagtacaggctcttataatgaacattctgtgtgtgagagagagcatgtgtgaggggcacatgtgttcgggcaaatgagcacatctgtgcttatgcatgtcaacgccataggtcagggatgggtgtccttagtcacttccgtagggtttttttgtttttgcttttggttggtggtggtagaggttttgttggtgcggtggtgttgagtcagagtctttccctgaatgtggaactttctatttgattagattggctggccagtgagctgcaggggtctccccatctacgctttctctgtggggttgttattcagtgctgggatcctgaactctggtcctcacatgcacttggcaagtattttgtttgactaggccatctctccagccccttgttttatctgctgcagtggtgtcacctacttgtggacatttaaattatttgtcttcctgttacattcggtcagcagtaataactattaacaatttgtggaccacagggtgattctcagccacagcagggtaggtcttcttagtagtaggactgcatagcagtcctcagtctctggtacaggtcaggtgattgtcacctgtaaatatttcaacagaggaaatattggatattaagtaggaactttccaccaatgtgactttgttgctaagtaatatttttaaattttttgtttgtttgttttgtttttgttttttgtttgtttgtttgtttgtttgacaaggtctctctatgtagccctgactgtcctagaacttactatgtagaccaggctgttcttgaactcagagagctctgcctgcctctgcctctgcctctgaagtgatgagatcgtgtgtgtgtgtgtgtgtgtgtgtgtgtagaaaaatgtgcatgtgtgagtgcag

SEQ ID NO: 33331 - DNA, 1140 bp, Mus musculus
tatccccactgatatcactgatccaggcaaacctcagaatgggggtgatattcagcccctttaactgggggacttgatgggaaccacgtgtgttccaatgtgattttactgaggtcacagtgagcagagtgaacattttcctacagacgacggagtcctgacaactgtcaggatggtgactggacttatgagagagtagagtctgaggttgtgtcatctctgccccttgtcagagttgtcctgtttgctagttagttaccatgtgtgggatgctagcatgggactagggatgctgtccctgggcctgtctctgctgtgtgacatgtgaaaagaactcttcatcaccaagatgctctgtatgggcttcagcagcagacctgggaaacaggacctctccccaaatctaccttgattcagccccaggcatttccagcctttggcgcttctctgggtatccccttctctcactccagagtgacggtcactaagttctaagttcctttggtgcctgattgtcagcaaagctggctctggctcttcctgtgctggaagcagggagtgcccgtggttcagagagctcggccacttggcagcatgcagcttttcttcccttcctggggctctggtgtcctgagcattggcagtggcagctgcgaatgagctggagtcttgtcttactgggtcagactggacactgcccactagggtattgctgggttccctgtgctgttcgttgtggtgaggaaggaccggagcggcctctgaaggctgggctctctcatccaggtcaatgaacacattcctgatcgtgtacctctgcatcctggtgagcaaggccctgatcaacacggtgctgaagtacgtgtggcagagtgagcccttccgagatgagccatggtacaacgagaagaccgaatccgagcgccagaggaatttggtatggaggcatgtcccttgtgtaaggatgtggcccttaggccattgtcacaaaaagatgatgccagaaaactacagaggtgaacttgcttcaggcaggctggagccttgccagagcttaggacaggggccctcactggcacctggtgtaggcaggtgtgaactgcctgctgtcttgggtactagaatgtacaagtctggaaa

SEQ ID NO: 33332 - DNA, 2440 bp, Mus musculus
agttgtgtgctccaggtgggagagcgaagagtgtcctgtgctccctctccacccaggccttcctcacaaggcaaggtatgggtgctgtaggtccagcctggagatgcccacttgatggacagacagccccagtgccccagccgctgagagctctgttcttgggtacctgtgtgtgcctgcacctgtcccacccttcattctcagggagggcggggtggaatcacaggtcacccactcaggcacagcacactgcaatctggatggtgcgtggccggcgtcattgtcccaggcctggtgaccatacatccagttgggctctggaaaaggacattaagcctggcctcatcttaagcactgtggcttgaagctggccttgcccctgagtatccacccagctgccgttgtcacctctgctgtctcttgagaagaagatcctatccctttgtctgcagcctcgtgcgtagcccatggcgcttggctcatactgtatccggatgttcctgcccgcctgcccgagtgtttcctgtgtgaaccacacacacttaccctgtcagacacggagtggtgtgtgtctcctggacctgtggccgcgctgtgctcatgtttgctgtcccctcacaaagccatcttcctagatcatgtctgagtcaatttgctgagatcctgaccctacacgtcggagtgtccatgtcagcgtccccgtcctgttcccagctgcctgtggaagatgacgtttatgtatgcgaataagtcacactgttaaccaagtctctcaggagtgtagtgatagctgccacactctggaatgatgtcagttaaacatattggaaaacatttgtttcaggggtgcagggaaagggggaggtttggggagcccaggcaggtgttttacctcacccagaggtgagtcccaatacccacgctgtctggggctactgtggattcatccgctctagtctgctgctctggtgcctcctactggtgccacacagatcctatccagggcttcacttggaatggacaggccatcagaaggccactggactgtgactctccgctgctgccacactggcatttctgttttcagcaacactcccgacagcaccgtaatgggcctgactcagaagacggttttttagtatgatgcagcctttcagaaagaaccaggcagagcctgggggaaagccagccccaaccctgtggagttgcgtagtgggcctggagccatggtgagggtctctggcacttgagagcctatatcctgggaagcacaaattttataacatgattacacaagatttccctataaaccgtgtgcttgaactggggaccagccaacagtaggagcaacctggcagttgggggaggttgggtgaacataaacaccacaccaaagatggggagggggtggccttgagcttggaacagacaggggatgtccagctctgctgagggctgtctgtgcctccacacaccctcatgcccattcacccacctgtgtcgccatgtgtcagaggattggagccccaatccacactggcccttaattagtagtgtgtgcatttttacagctcctttttaagaacccagacaggcacaaatataatacctgtggggaggggcagattctctctgtgtttagttaacagattatttgtaatgtatttttttagggatcttaaaattacctttgcactaaagtattttcatagctgtttctatatcttactcatttgttgatgcaccttctgatttttaaatatgtttttaaagctttcactttttaagtttaagaattttggccacttaaatgctggtgagcgtttcggctgaatgtctcagtgtctggcagcgacctctctgattctcctctgtgcctctctctttcttgatgtttccagagactgaccagctgagatgtgctgagggcacaccatctcctctgcttgctttgtcacagtcctctgtcacgtcacggtttctattttgattttgttttttatttccatccttcagccttaaacacctaaacaacatccttcctgcagggcctcgattctgcagccctcgccgggtgtggggacactctcctgcacccccacccctacccagcagctgaagtttacttaggaacttcccagattgaatgcacactccaatgtcctttaaaattgtgcttaggaaattaccaaatgaagttgcctgagaatttgaagtagacaagggcacaggtgaaatgcagagacagagaccaaacacgcgtgcagaaggccgtccgactcacctcacagtggctgcgtttgctttccttaaaacaaggaacttcaactcaaattaagcatcttcttttcttaattcagttgcacaaatgaacatctgtggcttactacattggcccagattcatggctccaccacctacaaatagttcatctcctgta

SEQ ID NO: 33333 - DNA, 1340 bp, Mus musculus
attcttcaagaccatgtaccagcctgctttctgacagccctgtgcagagatgttgccctctggagcatcaggctccttacacacacacaggcacacacacaggcacacacactaggaagggcactgggctatgtgagtgcacgctgtgctggactgagctctcccctcccagggaagcatacctcccagtcaggactttcccttgctccctcagtccagcaggcaggacccaggccaaccaaagctgcatgccatccaggcgcctgccccctgccacatgccagctagggaaacctaatgttcctccatcccagcgatccattcctgagcacaagcagaccaaaggccccacgcaggggaatggcacacccaaagctggaacagggtaacttttcagtgttcctactgagcacatttcccaggatcagcggccgaatgtcccgagtgtggcgtcatggccacccaggtcgctgtgcatcacccaggtgtctggtgttctggaggaagccccagcctgggtctctgaacccccaagttcaaggcatatctgcactgactggtactggactcacccatccatttatttcatcttaatgtagtttattggcaatgccatagaacactagccccttgcattctgcatttcttttggaagttacccattcatgactacaaacaggaaagcgtcacttggtgaatgcaatctttttgttttaaaacctagaagacgggtgaatggaaaggggagaggttctgatactgtgtctgaacaaagctttaatgaagatacgtatgttggaagtattatgaaagtgtgattctaattttgcagaaaaaaatgtctatcaatttatatagctttattttttaccttatcaagagatagagaattttaatatgcatatattgtctgacttagaatcatgtgtgtcagcattaccacttaaaatgtccacctactatgtcatgtatgagtaagagagaatcaaagatgtatctaacatgaatggttatctgtaactgtcattgtcataagaactgggattgatttaagttatcaaatatagtaagtacattaaacatgtcattctccaacactaatgtcggactgagagcccagtaagctgctttgaaacttgtaaattaaaccggatcaaacgtctcccgaggtttattttgcgtgctgctgatctgcctttgatttctgctggcagtcccactacactggatttttccacaggagatctgttttcttcccaacctgtgtggtagtgcataagatgcacacacactttctgccaaaagaagccatgccaggcaatggtggcacacgcctttaa

SEQ ID NO: 33334 - DNA, 1140 bp, Mus musculus
aggaaggcctggtcagccagggggtgtgtcctcctgggcagccagggggcgtgtcctccaccaaaagcagttggaaatcattgagagtcttgcatctgcataggtttcgttttcacaagaaatgtaaagtataatttaaaatattagccttcttttctacaatataaaggagactctctgttttttaaaagaacatcattaaattaggatatttttattatttttaaagaaaatgtataactccatgctgtcagtcatcctcagcaactcaggcactggctgcctctccacgtcagggcaggccccacttcccctctcctagccccgtccactctgccctacagcaggaggggctgcagctgagcttggggtgggggacggggatctgcagcctccattcaagtcacggcagaactgccacaaactgttgttttccgcttttttgtgtgtttcagaaacaaattctgttctttggaaactctctgtgcctagtagggcagatatttttatatgtgtgtatatatgttcacgtgtgtacataggatcttggtgtaaaggatgtatttatggtctcacgctgctgaacatgtgtcactttacggtccctccctgtctcctcaccctgctgccatgggaggccaccgaggctcgttcaccactgtatgtccaggaaaaacaccctcctcccctgccctatggcttgcaaagccattactggctacaccttcagagaatggtaataaaataaaaaacgtgcaaagactcagtagcatttctggttatgtgttatgcgggaagaatcgtgggacataactgcccagcctgttttgaaaaagccaccttcctttgggaacttgtcctcataaggacactttaaaatgtcatgtttttgccgggcatggtggctcatgcttttaatcccaacactcaggaagcagaggcaggcagatcttcttgagtttgaggccagcctgttctacgcagagagctccaagccagcaagagctacacacagtgaggcctcatctaaaaaccaaccaacaacaaatgtcacacctcattcagcattgctcttacttcctactgctctgatataagtaagaagttaaactcagaagtctttattgtgtgaatgaagtt

SEQ ID NO: 33335 - DNA, 1512 bp, Mus musculus
tgactgagactcagaagtgtaagcctctatccttgtctgtttcagggtcacattaaaggctacatctcccatcagcatcagaaactggtcgtcagcaagcagaaccctttccctccgctgtccacagtgtgctgatgcccaggccttgccaacagcgtgctcctgctaccgctgcccgctggagctcacatctcctggtgcagtcgccagcacctgaggcactcactgtggtttccagtgtcctaactcatgccagccttgccaagacctggagttctttttcaagatggaccaacaccctgctgctggcctgtggtgctcctgagcgtccgggaaggagacagctgggcttcggtttgtttatggaggctacctttgtgacatcttgtagggtttcctccctccctcctctctctctctctctctctctctttctctctctctctctctctttcttaaaaaggtaacccaagtttatacaagtggcacgagttctttactgtctgttatgtaacacatctgttttcatatgcaaaatgtcagcattgtgagctcggaatgctgggttaacttgaggcttctttttaaaagtagaatttagggggaggagagacggttcaggcgagaacagctactgctctgccagaggatgtgtgtttgattcctggcacccatatggcagctcacagcctctaactccagttctaggggacccattgccttcgttggcctccacgggctcctgcacacgtgtacaaaagctcactcaggcaaacaggcatgcatacataaataaatacacctttttttaagaaaagcaagagttagtctaatgtaaattccaacagttgtaaaggctgtgcagtactaagacaggacctggctgttgggctctggttatggccccttctgagcctttcctctgcctcgcttccgtttcctatagccactgtcctgtcgggccctcaccctgcagcttcatccagcttagccccttccagagacccttcctctagacagttagcctgggtgggcttcagcagagggttctgggcacagtgcatcccgcagcactgggtacggccagctctccctcttccttcctcctcctcttcctttttttaaataaatagtttatttattttatgtgcatttgtgttttgtccgcatgtatgtctgtttgaggggggtcagatcctggagttacaaatagctgtggatgttgggaattgaacccaagtcctctggaagagcagctagtgttccttaccactgagccagctctccagcccctaatactccaacttcttaagagtgtctgtttcctctgtgtgttgtttattttgttcacttgtctatcatctctgtatttctctgcctgcccgcccacccgcacatctgtccatccatttgtctgtctgaggtagggtctctttatatagcctggctggcctggaactctatgtagaccatgcttccacatgatgctattcttgcctctgtgtccccaga

SEQ ID NO: 33336 - DNA, 1151 bp, Mus musculus
gccttgaggtgttctcacatattagaaataaatcaagtctcagagtgtttcatgtcagtaggtgtgacagccatagcacacccttaatcccagtactcaggaggcagaggcaggaggatctctgagtatgaggctagactggtctatatagcaagttccagacagccacagctgcatagtgagactctgtctcaagaagaacaaagagaaaaatgttcctttcaaatgactattttgtgaaggacagtataccatacacacaaactggatattacaaaaagaagatggggctggagagatagctcagtggttaagagcaccaactgctcatccgaaggtcctgagttcaaatcccagcaaccacgtggtggctcacaaccatccgtaatgagatccgataccctcttctggtgcgtctgaagacaactacagtgtacttagatataataataaataaatcttttttaaaaaaagaaaagaaacaggctgaaaagaaaaagaagaagtgcacagtcatataaatgtaagtgtggactgactcgggatgagctgctggggagaactgacgtagaagacatgaaggtgctttaaggaaaaggagttgaggaaagtttctctgttctctgtcctcggtagagaacatttttgtttacatctcacacttgaatgagattctgacatgtgtacgagatttgaaaggggtttaattatgactggtgagactatattctttcaatgggtagaaatatttgatttttttttctgtaggctgtttaaagttgcttttttcgctggatggtggtggtgctcacctttaatcccggcacttgggaagcagaggtaggcagatctctgagttcgaggctagcctggtctacagagtgagagagttccaggacagccaggaaggactacacggagaaatcctgtctcaaaaagcaaacaaaagttgccttttcttcatcaaaatcaagaaaaaataagtgaattctacaacagtcagtaaataaacagggatcagcatagcctggtctgtgtcactcaggactcacaggtcttccacccacacagctggagtccgctatgcctgagcaagggctctgttccctcctgtcactgcccaggttcacatcagaaaatggccacgtgat

SEQ ID NO: 33337 - DNA, 1198 bp, Mus musculus
ggatccatcccataattagcctccaaacgatgacaccattgcatacactagcaagcgcttgctgaaaggaccctgatataactgtctcttgtgagactaggccggggtctagcaaacacataagtggatgctcacagtcagctattggatggatcacaggacccccaatggaggagctagagaaagtatccaaggagctaaagggatctgcaaccctataggtgcaacaacattatgaactaaccagtaccccaaagctcttgactctagctgcatatgtgtcaaaagatggcctagtcggccatcactggaaagagaggcccattggacttgcaaactttatatgccccagtacaggggaacgccagggccaaaaagggggagtgggtgggtaggggagtggggggggagggtatgggggacttttgggatagcattggaaatgtagttgagaaaaatacgtaataaaaaatatttttttttttaaaaaagggaattagtctggcaagtactgtaggcagggctgggcagaggccatcttgggtttgctgccatgccatctgtgactcatgcccacaaggacatcagtctgacctggcctcaggccagtttaagggcacaaactctgttgtgtataaaaacccatgttgacttctttggatgcatatattcatgtctaaaacaaatcccagagccctcgtatcaagattttctcctgattgaggaaatctctgtttttccctcctgtggaaacttggtccttgcatctgtgcagaccttgttaattcagagtgcctagtaatgttgctggacacagcctctgtggtcgtggtgagagacctgcacagagcctgtgtgcctgcttcccacagcgggttgtcaggccatcctgagttctgctacatggcttcaatcaggatgaactaaagactgcaagattatacaagatgatggtgatgggatccctggaggacctgctggcatgtatcttccctcaggaggtagctgtgaagcatacggagcctctgccccattcagagcacaggaggagcctgagcctgggccggccagggacacgggcacccagcacggttttgctgcaaatggctttctgattacctgctttaatcacccgcctgccagttaatcccactctgggggttgacctatgcgttcccacattcagcaagcctttgtt

SEQ ID NO: 33338 - DNA, 2041 bp, Mus musculus
ggattgctgcaagtttgaatccaacctgggctacttagtgagttcatggacaatagctcagactctgagcaggagcagcacgagggccctgagggtaaggcaggtaaggcacctgatagcaaagcctgatagcccaagctcagtcactgagacccagaggaggaaggagggaaccaagtcctacggttggtctatgccatgtgcccacgctcttacacacaaaaggaagagtatgaatatataatagcagcaaagtaagaatgccccagcaaagcatgatcagattttccttctaaatatgtgagagcatgcaacatagagtctgtttgcatgctcatgtgaggagaagccaggggttgtgtgtgtgtgtgtgtgtgtgtacacgtctgttgtagcattgcatatttttgttacatgttccatacagaatgttgggtctgtgtttctaggttcagtgccctatcctaaaatgtctgatttctcttttctagcctggagatttgaaaaaaaggattgagtcacttatagacagagactatatggaacgagacaaagacagtccaaatcagtaccactacgtggcatgacgcaccagctgactgtcgtctcccagtgagacacacacacgaagcacctgagagtgaagctgctgtgccgtctccaggtccctgcagctgccccgactgtggacgcttggattcggagcagaggatgtggttcttggctcatccttcccagggcgcaagggctttgagatgacacccatcttccctccctgcttcttcccctacttctttattgtttctgttactctctaacttcgcattgagaagttccttcacaagctctcgttcctctggcagaaagccacgggcttggtttgttgtgtgtgtgattgtgggacacagtggaattaccctagctgctgtgttcttcccctcatgaagactcagagagaaagagagagccctgggctggggcactggggagaaactgtccaggctgccactcggatctctgcaccctgagcattggcctctcttctgtgtattttcagaaagttggaaactttggcttctgtaaatcaggtttctaaatgaggtccctgatgtgccaagaggacatcatgtctgtcatgagacacagctcacccagagggctgcttgtcgtttgttgaggggcttgggggtttcatgtttgtttccatgctggttgagtgtggaggtcctggttttggctttggggtgactgctgtttgactgttgaagttgcagtttgtgtgattaccataataaaatcgggcctggttttatagtcttgcacagagaccgtcttggatctctgccctggcactatatggagtttagttatgtttgtcaaaaggcaaaggaattgttggttcctggagacatactgtgtgtacaggtgggttgggcagcgagaacgaggctccatagtggtgttggcatggtgatgatgacagacacttttgcaacatttaaaagtactttatattttacaaagtagcatgtttcattttgattaaaagctaccaaaggaattttgatcatgtataagtgtttaaagcaatattttctggaatataccaagtttatataactcgattttatgctaaattattaaaggattctccctttttgaaacatgcatgtttaagatacaacatctttttgggcccccatattaaaaccctttctctttaagtatcatttctatatttgtacattttcatttatgagttctatgatgtggtctctgaaagaccaaatagatttctatttctacttcttatttttaagttcattgtgtctacaaattgttaatattgtaatttaatgtagacttactttgaataaaactagtttaattggcctttaaattactttactaatacattggctatgtagatgacactctcctcctgacggctcagcagcttttgacaggtagcaaatcagacaaaagaaaggaacccggtcaccctcacaggactgccccttctctttcctccactacaggc

SEQ ID NO: 33339 - DNA, 1193 bp, Mus musculus
tgcctcctgcacattggaattaaggtgtgcacacaatgagtgggaagcacgtttaaccctgactctgccaggtctctcacactggattcacttgtcagcctgtttctgttagtagtgagaatgcagtgagctgtctactggtttgtcaaactgaatactttttagaacactgtacccatatctaccacagccacagttagtatttcagaatagtcagaaagtctgagaagatggaacttctgactaccccgtttgaagtcatgcacattgtttgcatgcattgagttatagtccagtagctttgtacggatgctgcaccaagtaagagtctctgtgaatggctactttaagattgactggaagctcagtttctgtcattgcgtgcaggtaactctttggcagtgtctccttagcataccttctcatggctttgcattggaattgtatttgttctagatcgtgaacatttccctgccagcctctgcagaagtactgaaaaatggcagttcttgtggtaaagaaaatgtttctgaccccagcctcacaattacttttggaagaggatatttactgacactcaacttcacaaaaaatacaacacgttacagtgtccagcatatgtattttacatataacttgtcagatacagaacattttcccaatgccatcagcaaaggtaagacttctgtaaaaaatgcaaatctgaagggaagggtaaagaacttgcctttccgagagccacacgagtgtccactatgtcccctgcctttctgagtcattgctttctttttgtcttttctgtcccttttagatgcttgccagagcctgagtatgctttctctggtactcaggcttttccactggccactgtgtggctggctgcatgctggcatgtgcacatggcatggaattttctcttcctctctcagtcctgagatttacagctcacctgtcatgacatttttctttttaaactcccaataaaactgttgttaagcttcacaacaaacaaaagaatatgagatggtggtattcagtcactcttaacttaggtactgtgaacacattgtgttttgttttcttttgttgattgattgggatacagagatctacaccatggattccacaactgacatcaaggcagacatcaacaaagcataccggtgtgtcagtgatatccgggtctacatgaa

SEQ ID NO: 33340 - DNA, 1181 bp, Mus musculus
aaccaaacaccaagtcttaaaagtcaaatcagtggagccttctcatcctctttagagctctactttggtaacatattaacatttaaccagttagcaaaatatttaacccagttagcaaaattaacaccgtcatttcaatagttattcctttgtgcatagtaaatgttgcaagatgaacttcacatttgataaagcagattttaaaacagtttgccagaaagtgtgcctcccttccacacctatctaagcttggggatgtgagaacaggcccctgtgcatctctggtgcacctgcccaccaggctagatggtctgatagccggcgtgactcctcttcctgccaatgaggtaggcaatgaggacgatgaggaccagccctgccagggcaccgcccacagcaatggggatcaacatgttgttaccatcctgaacacactcttccactgcaagaaagacaagccaggggattcactccagggcaccccctcaaggtccaattgttcctccccagcccaaggggaaaggatgaggccaggctagagactttgggacatctatagactatagacatgagtgttttctatgcagctggggaatcccaggtatgctccgcccaggttagaatgaatggtgctgaccactggaccattggtcagctttcagaaagagccactgactgtcattttctgcaatctctttcctcagccaggacacccttacctcacatacccattcctgcagttccttccttacaaagggaagtctcaagctgggaagaaaccctgtctttgcagaggaaaagggtgtttgctccctgcccatatatccctgtccctcaggaagttctatgatgcctctgctgccgacccccccccccccccattactctggatgctgcctctgctacttaccagacccaaacctgtcactgtccaccttgaaagcctggacctgcacactgaagacattgagggagagcatcttgctgacaaagatgtgttcctcagtgttgcacttgtatgagtttcccacagtggcctgaagagctttcagtgaatggttggagatgctgaatgtgggcactgcaatgggagagagagtctgctcaagcacaggctacagtgggtgaggagcatgggaaccgatgggaggaggaagccagtctcacctagggcatcagga

SEQ ID NO: 33341 - DNA, 1820 bp, Mus musculus
taatgggggggggggggggtcggcagcagaggcatcatagaacttcctgagggacagggatatatgggcagggagcaaacacccttttcctctgcaaagacagggtttcttcccagcttgagacttccctttgtaaggaaggaactgcaggaatgggtatgtgaggtaagggtgtcctggctgaggaaagagattgcagaaaatgacagtcagtggctctttctgaaagctgaccaatggtccagtggtcagcaccattcattctaacctgggcggagcatacctgggattccccagctgcatagaaaacactcatgtctatagtctatagatgtcccaaagtctctagcctggcctcatcctttccccttgggctggggaggaacaattggaccttgagggggtgccctggagtgaatcccctggcttgtctttcttgcagtggaagagtgtgttcaggatggtaacaacatgttgatccccattgctgtgggcggtgccctggcagggctggtcctcatcgtcctcattgcctacctcattggcaggaagaggagtcacgccggctatcagaccatctagcctggtgggcaggtgcaccagagatgcacaggggcctgttctcacatccccaagcttagataggtgtggaagggaggcacactttctggcaaactgttttaaaatctgctttatcaaatgtgaagttcatcttgcaacatttactatgcacaaaggaataactattgaaatgacggtgttaattttgctaactgggttaaatattttgctaactggttaaatgttaatatgttaccaaagtagagctctaaagaggatgagaaggctccactgatttgacttttaagacttggtgtttggttcttcattcttttactcagatttaagccttacaaagggaatctctggtccagacccttgggcctggcaagggtggctgatggttaggctgcacacttaagaagcaaacgggagcagggaaggcttgccacacaggcacgcacagggtcaacctctggacacttggcttgggctacctggcctgggggggctgaactctggcatctggctgggtacacacccccccatatttctgtgctctgccacccgtgagctgccactttcctaaatagaaaatggcattatttttatttacttttttgtaaagtgatttccagtcttgtgttggcgttcagggtggccctgtctctgcactgtgtacaataatagattcacactgctgacgtgtcttgcagcgtaggtgggttgtacactgggcatcagctcacgtaatgcattgcctgtaacgatgctaataaaaagtctccttctttgtctgtctggacgtgtccttctgtgacccatcaagagagccctcatgtgcacaaggtatgggacaatgtcgggataacccggcttctagtcagcctatgaaaagactaaatgttgttttgttaaggaaatgttgcttgtcatggctctaaatgttaggagacttacataatttgttgttttgatgagtcttaggtgatgagaatatggccatgtgactagtctccagaagcactgcacctatgtcacaagaaccttatacacattaaacatgaggtgacttgaagaggccagtgctcactgtttccttgaagctctgatctgtccacctccttatgtccatagcagactgggacaagccaggctcctctgcagtatctcctctgcttgctggtgggatttgtaaagacttgggagcatccaccatcttcaagtgttccatctatcctgtaggccagctccctcct

SEQ ID NO: 33342 - DNA, 1167 bp, Mus musculus
aaattgtttttcttccagaaaatcttttcagaaccaggaagcctgtccatgacgaccatcaccaggcttcggaagagctgccgagcagcgctgcaggcacagagctgagtgcacaggcgcccacagctgcagttctcttcagagcacacacttcaccaattcctaccacaacgttcctgctgtaaatacttgaaatcacgacactcaatgtgaacttttaaaagaatgacttaaaattagtgttctccattttttcctacctttggagtcataaactgaattctctggcccagcttcatgatcttagttgggtcccaggacccataagtggaagcagagaacacttgttcaaatggtcattttgagacacacacacactcgcgcattcaaaaaaatcttattttgacactaggaatatgaggtacttgttgaggagagcaacaagtttcctagtgttagaagttaagtgtctgccacgtgtgaccttggcttctcaggcgaataagatccccagcgccctcccaggacattctcctagcctgtgcctatgcagacctgtgccctatgggggttaagcgggacacagtagcctacttctgagcatggtcacttgtgatgatccccggctttctcagaatggcccttataggtagggccctgtcctctggctgctcacccctaatgtccttacatacccagcacagcctataaggccatcactgatatcccctggtgaaggctattcatgaagctggagggcaggcctcattcactggcagtaagccctgagccccttaccttgcagcttcctttctggtttttcaaagctgtagccttagctgggaggcatgatgtactagctccgcccaggagtggatgggctcagagctgcacccacactactgtccagatgtcccccaaggtcgtttgtaccttaaaggtgtacctggagatggctttcctcaggactacctggtgtcacctgccaaggagaatgctggggccccagggagatggaattcagtcccactgagatctcatggtcagtctgagtgcagagattcaaggaacaaagctcccttcagctcagtcctccctttcagagggctgatgtgagctgctcctgcttccagtcagaccaggaaggtagagcctgcaaccctgcca

SEQ ID NO: 33343 - DNA, 1148 bp, Mus musculus
agacttggaagcatctgccttgttctgggccaggcagggttgctgtggttgagcctggtgtgcggctgtgaccaaaggaatagatagcctggggctcgggccatgcatggctctgacccagtctatgcacactggcctagtgtccaagggtggttctgcagtggtgtggcttccacaggagatgggaaggaacgtggaggtgtggcgggttaatgcagtctttcccctggagaccggctcagctccttggagttcagagcatgggtttaatatctctatttttggaagctgttctaagcttccaagcaaggccaaggtcacgaaatgctcctctgcaaatctctgctgtccctgctcagctcctgtccctcttctgagctgatgatagagctggggacactggctgtctcttcacacacctctcccagataaacaagatgtgcagagttaggaaggagagcgaggcgtgcaatcctagtgtgtaatccccgtgtttaggaggttaccgcaagagagtcgcagcctgtaggtcaacctgggatctcagagagctgccagggcccagaaacacccgaataagcaaacaacgaaacaagaacagcaaactgtgaaaggctcccaagaggcagactcaaagcaagtgtgcaagaggacagcgttttcggttttccctcttttcttttcttcccttccttccttgcttccttgtttgtttgtttttgagataggctgccttgtaaccccatggtggtagaatgatcccgtttcacccagatgtccagtgagtgtagcctgctcctcctgcagcagggtgcctgttttgcattcacttcttgatgtataattagtgtaccatggttttctgttttattacggactgggtgattttttttttgtagtgtaaatcaagcactgacatttataacaacacatcgcactaacaacttaaaaaatttagtcaggccagtaagatggcctggtgggtggagcctcgtctcgtcaccaattcataaccaggacccacccactttgttgagcagaggccatcaagttgccctccgctgtccgcatgtatggctccacagcccacatgctcctccttgcccactgaataaaaagttgtaattaaaaaaaaaaaaaaaaaacaa

SEQ ID NO: 33344 - DNA, 1160 bp, Mus musculus
gaggtgagaatcccagttgtggggttcctgaggatgccatgcaactgtgggaattgagtgggttataatcctggaggttgggacagcagatgggagatggagccctaaagcaccctggcttcactactctctattgtcggatgctcacgtgccttgctgtggtctgcagattgagtgcagtccctggaagatgtagaaactgaaagccaggccttatgattcacatagaaatacagaaggctgtgcatagctctgtctatagtgaaggagaggtacagaggggaggccagcagccatgagggatgaagtgagactacttaccagttgctctagtgttctcagtagatttgggccacatgacatcagcagcgtgtgtgatgacccacatagaacatgacccacatcttacctttcttctgcactccagcttcaccctatgatacccactgagcatgctgacagctcgctagttctgactccctggcctgctgttcccacttgatggtccatccttattaaggcaagctcccatctgacccatttccatattcccccacctcacctggctactgtgtgctcaccctccatatcctgccatctggggtcactgagtgtttgtttgtttgtttgtttgtttgagatgggctctctttatatagtcctggctgtcctggaactcaatatgtaaacagactggcctcaaactcaaagagatcctgcctgcctctgcctcttgagtgctaggattaaaggtatatgctaccacacccagcaaatatctaaattttggagtggcttttgcatattatttttttacgatttaccttgtttttcattatgtgcatgtgtctgtgtgggtgtctgcacatagtgctggtgcccttgagaccagagatgtcatatactcctgcagctggagttggttgtgagccacccagtgtaggtgctggtgaccaaaccaggtcttttgcaagagtagtacatgctcttaattgctgactcatctttccagccctagaataggctgttaaacccagatctctgccagtgtgttattgaacagaaacacctgcttcatgatcctcgaatcaggttactaagtccacgtgtgtttgcttcagttctttgtgctaaattcatcaagggaattcaagttcatt

SEQ ID NO: 33345 - DNA, 1134 bp, Mus musculus
ttccctgagcggttgttttctcttgatggcattctccgttcaagctctttctttcaagtgagtttttagttaaagggtgtgtgcgtgcacacacacatgtgatttcatgcgaacagataggacaactttatggagttgtctctctccttgtgtctttgtgtggattctgggggctgaagtcaggttgctagacctgctttcacctgcccaaccaaccaccttaccatctgggcttagtatttgtgtcagttggacctttctgtaagtgactcttgccctaaaagcatgctggtctttcttttctttctttttttcaggtttttctagacatggtttctctgtttagtcctggctgtcctggaactcactctgtagaccagggtgaccttgaactcagatctgcctgcctctgcctcccaagtgctgggagccctgaaggcctgtggcgcccagccctaaaggtgcttatcttgccttgatgggtgtgaagtttgagatttcccctcagttgtagatgctttgtctgtatcttccttgtgtgcagctttgagctcatgcttgcacctttatctgtatgctttgttttaccatctaagagtgcagtaagcagtagcggtgtcactgcctggatgctgcgctgtcttaatcaccagacaacttagcccgttccttttaaaattagcctcacttccattttaagggcatgggcagaatacggccagattatttcccagatggtaacacaagtggcctctagcccagttcccaataaaacctttgtcccctctggaacttcaggagccgagccttcagtccacgtttccattgacattctggtcttttccgatgcttgtcagaacagcttagaagttttgcttggaaccttccaggattcctttacgccacaggcctgcagatcatggatcacgtttcctgcagcagtacccgtgcctcagtttccctcatcagtcatgttttccatcaccatgacaagagcgagcgaccagcaaaggtttattttggccatcacgatggtgaaggtgtgctggaggcgactgtggtgtccacagccagagcagagatgagtgcggtgtcagccggctgccttctctgttcctttgtatttaacgtgag

SEQ ID NO: 33346 - DNA, 1146 bp, Mus musculus
gcctacctgtttgagacgttgatgttcttttagatgtacgggtgtctgagctgtgtggggtagtgccacagcagagcagcgtgcttctctgttgctctctcactgtggctgacaaggcagaaggaagcggtggtactgtgatggagacacgtctgattgttctgaattctcttttgactgtaggtgattggcacgcctcagagaccggcagcatccaacactattgtggtaggaagcccacacactcccaacacgcattttgtgtcacagaaccagacgtctgactcctcaccttggtctgctgggtgagcacccccaccccagtttggcagctgctgagaatgtcccctttgtcctctggccatgtgtcacatggtctgtagtgggggtccctgagcagagagagcgcagggctcccatctcacctctgactgggccacagagaacaccggtcactaatacgacacaaacgcttagaaagtgtcagaagatctgatctctaccaggtccaacaccagggctctatcccatgcatggtctgtccctccgaggcagtactgccactgagactgtagcagacgtggaagtgactgactctctttaaagatcaccagtgtgtcacattttaaaaactgttgtgaaaccctgtctcccttgcttcaatttaaaatcatctgtgccccaaactctgcagagaaacgtagtgactgttcccagtgtgacttagtgagggcgacacagttgctgtgcctcccgacctgaagcttgcaccatggttcccatttgacacatgtccatcaatctaagcatctgccttatgtcatggtagcttgccaaaattacccctggaaattcctaagtttacactaaaatgtgccgtgctctgatgccagcagacgcctttagaacagtggtgcctagtgtgtggtccggatcagacccatgctgatttctgcccttcggatgtctgtccatcttccctgacatttaaaggcacaggtgtgtgaactggcctcatacatgttcttttctgacctgagaaacattgatacttgccaatgtccttgatatattagggcggagtccctgctgcctatggtggggctgtgggaaaaatgggcctctgcagcctaggccttctctgaa

SEQ ID NO: 33347 - DNA, 1848 bp, Mus musculus
ttcttggtctggacagagcaggcttccccactgactggcctgtctttgcagtgatttgagcaatggtgcagatgggatgctggccacgagctccaatgggtctcagtacagcggctccagggtcgagacccctgtgtcctacgttggggaggatgatgacgacgatgatgactttaatgagaacgacgaggaggattgattactcaacccgtagacccctctccccttcgaatcagcttcaggaaaaacacgtatagaggaaagaaacttaaagtggggctttctgttctttttggcctactcccaagaagatacccgcgagttctggagttagatgtgcagctccaagtgaggaggagtgtgcgcagtttgagcctagctgcggatgtgttgtgaagccagcgtgctaatgcagagcctctatctaccttttaggattttatggtttctctcttttctctcttttttttccttttctttcttttttgagtttgaagcttattttgcccctcaacagttgttgctgggtttgccgaggaaactgtactgcgcccacaccagtgacaatgacaaagtgctgccctgcctccgatgtccagcacccaggtggtggacagccaggctttaggatgaagttttccatttgttaaatcatgcagtgtccaaagaaccaagccagtagcacagctctactgtttaacaagcgccatatgtcttattatgactccttccttaaattatattgactgtcgtaattccatcgtgtctggacaccttttctctattgcagcaacaaattgcgaagtagattttgtttgtttgttttctttttgtttggaagaagtttactgccacgctggtgcagctatggaaattgtttagaaagtttgcttatggtaaatttgcctgatttcttacaggctacgtttggaaactttttattatatagttgtttacatacttataagtctatcatttaaagacgtgtactgaaacaaatgttgtatttgtttcatgagcatcttcctgtaatctattataaagttgaaattaaacatagagaatgttttaacagttttttaactcaaaatttgtcaatcatttttaatagttctttttttataaaaagaaaaaggaatttaaggacaggcaatagtctcttaaaatttattcacaagaacccattaactgcacagttgcccttagctgcctgttctaaaatgatggtctttttattgaaacacaaataaacttttctgtaatattttatggaatataaagagactttaattgtttgacttgtttaactaagcactgttagtttttattaataaaacgcgcatgggcattttaaacaagctctgtgtttctgtaactcaggactgtattccacggttactccggattgccctaaggtaaaaggtggatgctggcccgggagcagagtccccgcatgtctaatagttcttgctctgttggccataactgggcaagacgtgggaaaggagggtgaagcaggcgtgggatcttgagtgccaagtacagaagccggctctttgactttttccctctctcctgaaagttgaggcacactttgtaggtttggctttcaggaaagctgtaacactgagcattctgggaaaatgagtgggtagaccagtagtctgtttgctccttgacatctgtgctggtagaatctgccagacacaattacttaggaactgtttgaggtaggtacctaacactggagctgcattgtggcttcagcatcactagatttccaggaacttaagggttggcatagtctttccctccatttttctctcccattttgggaatccagacact

SEQ ID NO: 33348 - DNA, 1099 bp, Mus musculus
gagatggtgtcagacctaactggcaaatacaacaatacagttctcaggtctgaggaacgggagaaaaagatctgagggatgtgccacaaacacccatatttgcagaggagaaagcgcagggggtgtggtaagacagcagctgaagactcgccatgcttgtgtaaaggccacctgactgcgcatccacaaaacaaattggagtcaacgagggtgtgcacattttcacgaggcttctgaaaggtactgttgaaagccaaagagggagacatcatgtgtgtgcacttagcatccagagttgtcatctgtggggccaggagacagtacgcccaaaccttcagaacaccagaaagggtgagaggggcccatccatgaagaaccctagtggggaagctattgaagaaagtcctttaaaactggtggggatggtcaagcctagctcctcacggtcgatggcttctgctaggatgggcgtgtgtggggagaacagagatttctaagaactagctgctgggagtttgaccatcctccagtgagtatatgggcagcacaaattggacttggtatgttttatggacgcacgtgctcaggatgcattgcatgaaattcccaaataataagaatactgtgttgcgggggaaccctgttaggcaggccagatgcctcagagtataatgtccttgtgtgagcttggtggcctgagttcaatccctgggacccatctagagaactgacagagttgtcctctgaccacgtgtgttctttccctttacaactacatgtataataagttttaaaggcttcaagaactgattttcaatttcatatactaggctaggccacagagttacgaccatgcttcaatttggactccctctcctaaaaaaaaattagccgggcgtggtggcgcacacctttaatcgaagcactcgggaggcagaggcaggcagatttctgagttcgaggccagcctggtctacaaagtgagttccaggacagccagggctataaagagaaaccctgtttcgaaaaaaaaacaaaaaacaaaaaaaattaaaggagagatgaaatcatccccaaatcaaagatgaggggatttgta

SEQ ID NO: 33349 - DNA, 1113 bp, Mus musculus
gtcccccttcacaaaggcacgcctggttcgttcatgccagggcgcaccttcttcagtgtgcactcttgtcccttgcctgctggtctctgtggctccgtacacatgtagcagtctggccctagccttagacgtacacgcaatcctgccgttcgttccacggaatccctgtctgaaacgtgagaagcagtattccctggcagccagcaggcaggcagcctttctcctgagcttatgttggtttgttcctggctaaagggtcatttttgtggctgggatggacaggatggtacagaaactcctttatcttagaggacatgggggtccttttcttagagtccctggagagggagggctgtgagcccagtcttctctgggtgaccatcacccctcagttcaaacacaggtctggatgttggataaggtttcaaactagaatccacaggcttgctgcctcgatgaaagtctgggaaagatttttaaaggctgtgcatttttcaagctgtctttcttaatgtttttaaaggactgtttttaaatagcattttgatataaggcagtgtggaataccagcatctatgtgcattaggggggtgacccagggaaatccaaagggaacagtatttgatttctcacaaagccaaagggtcctcggggacatagctctgagatggagcctgcaccggcagcaataaaggccaaacgtggtattccacatgcctgtgtctctgtgagcccaacaggccacacatgccaatgtctggaaccacttttgattggggtgggagggtcctgaaacagacaagacagactgtaccagcttagcccccacagtactgctggagccttatgccaaactgcatttccagaggctgagagaggggcactctatgggcagatgttgctgaaggacacaaccacacattctggtacccttttctcttcattcttgttgggaggtttaatctgtatctagaacccatagtagcagaggatggaaacaaaagtcagtttggacacagcaggccccttgtactgaacttctttttaacttggatttgtaacttaatgtttctgtttataagatactaacgatttgcaatgtattttaatggg

SEQ ID NO: 33350 - DNA, 1151 bp, Mus musculus
agcatcgcacactaaatggtcaaagcagagccatccccttggccgttactcgtagcccgaattccagatccagccctgattattattgtcattactaattctagataagttctctgtgtaagtcaggctggctttgaactcactgtgtagctgaggagactctgaacttatgatccccctgcctccacctcctggatgctgtggtcacgggcctcagtcatcacgatgtgttaatatggtgctaggaatcgagctttgtgcgtggggcaaacatgagaggtcatcaggcctcctctgcctgttgtgttccaggtgcttgacaatctgaactgtcagctgtaaagggtgttatatttccaacctgtcgcagagtgtaaactccccagaacgtcttgctgaggttggaagacaggttggaccaccacagtgaactgagcactgttgtaggacggtgggggacggggggttgcattgtccatatttttttgagagtataaaggaaactcttaagagcctaggttactgccctgtatatctagcttcctgccgcgtgacattaggacaagaagccttggggcctgcagggtcatgaacagtttagagatggaagaagctacctccactcacaggttcctgccttctcctgagaaaccagcctctgccgcagctcagtatggccttggggcaactttccagtctagaaactctcagctccgattctcaggggtgggcaaggggtacggtccttcccggactgggatgccaggctgtgtgctcccagctgcctggccgaggagtctgacgtcactcgttcccatctgactgcaggtgaccagaccctgcagctacagcaaaaagtcccactttgactttgaggaagaggacgtggacaaacttgaaatccggtgagtgtcttacagaaagtgatagcatccaagcagtgaaggtcagtcacttaaacgggttccaaactatggagattgccccggcacatcacagcaacagccgcctgggggtctcattccagtcctagtttttacaccccctgtacttgctacctgcaaaggtctaggattagttttagaaacagccatgggacaaggcgatcctcctcctccctctcctccttcccttcctcctcctctctcttc

SEQ ID NO: 33351 - DNA, 1164 bp, Mus musculus
tgtgtgtgtgtaggccagagcggatgtcaggatatttccagtcagttttccacagatcctctcgaactttgctgtttgagctgcactggctggccagtgagcctccagcatctacccagcagctccttagtgctaggattccaggccttggccatgtgcagcttttacatgggtgctgggcctggagtgtaggacctcacgattgcacagcaattgcattgcatccagctctaatttaaaaatcaataactgtttattaacagtagcgtgtgccacaatagattatgtaaaaatatgaaaatgcttcctaagttctgtcttctaaacgtgtatgtgacatccttgttactatggaagtctgtgatgaaaacataccgatgagaattattagaaccggatgttaataatgtttccaggggcccctgagcacctggtgtaaagtccccacgtcttaggcacagcacgcaccgcttcctcctttgctttgctagtgctcagttcatgtatgcatttttctgttgcagtataataagcccagtgaaacggtcattcccgagtcagtggacggcttgcaggagaatctggacgtggtagtgtctttagctgagagacactattacaactgtgattttaagatgtgctacaagcttacttctacgtaagtatacttgctggttttgtgtcagaatgtgcacttcggtctgtgctgtctaattcacagacacattctccaacagtcttttattaattggtggtgattgaagttacctttaccgattgtagagtattgagcaggttgctgtattaaaagagcaggttacaggcaccaagttatcgatatgtgtagctcactacggttacttgggaagaagctacatgtctgccttccatccactgatgtgggactgacagttcctggaacagaggggcttacacataaacgagcaatgacaaggcaaaagatagatctgtctccagccaccaagagcctgttggcctctaacacaccacagtccaggtttcagcttcctgaaggtcctcctctttccaaagtgtgactcaagtaaacccaagaggtgatagcttgaaataccaatttggcccatggttttgtaaaatttcccattgagtactgctagatctaaggcagtcctgtgaccaggt

SEQ ID NO: 33352 - DNA, 1099 bp, Mus musculus
tgtggccctgctagttcttgcctccaaactcctacttgaatttcttctctgatttccctcactgagggatgtgaccagagagctagaagaggaactaaatctcttcctcccacaagttgcttttggtcagtgttcagagtgtaatgagttgtggaaacatgaaagataccattgaaagaagagagacattatgaagtatcagagggataccagggatgttcttgtgatatttggattaagaatctacctttattgggacaaataatgatggttagctggggatgaagaatcagttgtgattaataagaccagcatcatcaaagtgcaattttctggatatacttcctaaaggtcagcacacagacactgcagtccagatgcagtcaaggctatctcaagcaggaaacctgacttggtaatgtgtaccccacatagtggaactgattgtgtaggcatgaacgctgcaagatttaagaggtcacagaaatgagctgagattgaaactggaaagagccaggagaggcagtagaaactccagcatgctggagatgctaggactgcaggaccatgtcaggtgaggagtggagcctacttaagcctaccagacaagctgtgagttgtggatggcagagccagcctgagacatggagctgcccaagtcccctggagcccggaagatcatgagtaagtcccagacattagattataaattatttacattactggattttgcttttgttttgatccacttttaactgtgctttggttctttcttccctcttggaataactacttgattctgagactatagttacaagactggatattgttagtgtcactgaactttaacaagtttttaaagatggaaactttgaaggttatactttatattgttgtattaacatcttgatgataaacaaggaaaggttactgtttaatggtgatgtatgtgtcaagttaagaggtcaccccagttggttagtttttgtgaacttgaaacaaactagtcacctggactagtttccatcagactgacccacagggcaggtttctgattaatgactgatgtggaagggttcaaccatctgtgggcagtgcc

SEQ ID NO: 33353 - DNA, 1177 bp, Mus musculus
ggttggatttccaacacccagatggcaacatatagccattgctaactccagtcgcaggggatccagcgccctctcctagcctttgtgtatattacacacgtgatgcacagacaggcatgcaggccgaatattcatacacataacagaacacacagcccttttcccaatgcctgccatcccttacgtgtcctgctcacctgcctagcatctcacatacagttagttggtttgttggtttccacatgaattcccttcccgatttcctcccccacgtccacagtggatctatattttcctcttgtagtggcagaaaagagatgtttaaaattgagtatatggggaataaagagaccagagtctggagctctgtaggaacagaacgtaagctcacgggattggagagatgtaagaagccctgtgctgagacctgacacctgactccgcccgggacacacacacacacacacacacacacacacactcctctcattgctctgaccacagtgctggtgagtgccagggagaagcaagggtctgaccgagagctctggctccgcagggaaggctgttgtaatatactgggcatgttttagaagtcaaatatggacagaaaggaggaggatggactgattagtgtgggggctcaggggcagaaagaactaaagaccaggcttaaggtgagcaagcgtgtgttaactgtggcttccaggagttccaactggaccagcctaggattagctctgagacttggcacttcatggcctcagcaaacatcatcaccttgttgagccttgtaaacttttatgacaggtaattaggaggggaggagggataagtcagtgctactaaactttatcttggggtcctttgttttcctagtctgatagccaaagtgtctctttaaaataaattcatttctgccagactgcttacatccatgagcacagcacctgccacgacgcgtgggcgccctgagcatgcccactctccctaaggctgagtcccgtttggtctctagccaggtgtcaaaggtcctcagtgccaacttgcagcaatatccaggattcttcccagcccgttcactatgaggtcttaaaggtctgtcgggcggcccatccccaccgtctcaccgtgtgctcacattggagggctgtggggctgctccctctggggaaac

SEQ ID NO: 33354 - DNA, 1104 bp, Mus musculus
tgtacgccaatgtgtactatcacatcacggccagacacgcagcctcggacaagtggagtgagcagccgaaagagcagccgagcaaagacaccgagtctgggaaaagcccttcccctcctgagcggcagaacccagcctttgacccagcagaggcgaggcccactccagccctccccatggaagcacagaaaacgagcccgagcttgtgtccagagtcacaggcttctggtcctccagttctggagcctcagggcgctggtcctcttatttcgcccgagccccaagccccttgtcttcctgctgaggcctcaaaagctgctcctgttccttgccctgagcgtgtagacccaccctgtgagcttcctgagctggagaagcctgagcgaggcccttctcctgagtcagtcaagtctgctcttgtcagctccaaacccccaaagcactcttcctttgcagacacaggggctgccccttcagctttgtctccagagtcaccagtactggccacttcccctgaaccttggggaccatccctcagtgcatctccagagtctcggaagccagcgaggactgcctcccctgagccaaggaagccatccccagcagagtctcctgaactttggaagccattccctgccatcgcttcagagcctcggagaccaaccccagcagtgtcgccaggttcctggaagccagggccgcctggttctcctaggccttggaaatccagtccttcagcaacatcaggaccgtggaagtcatctaaacctgttcaacctatgtctcctggaccttggaaaccaataccttctgtatcacctgggccttggaaacctgccccatctatgtccactgcatcctggaagtcttcagtctcatctggttcctggaaaacaccacccacatctccagagtcatggaagtctggcccacctgaactccggaagacagcccttcccttgtctcctgagcactggaaggcagtgcctcccgtgtctcctgagctccgcagaccaggcccaccactttccccagagatccgaagtccagcaggttctccagagctcaagaagccttcaagctcaccagacctttggaaggttt

SEQ ID NO: 33355 - DNA, 2193 bp, Mus musculus
accgaggagaaggaggccttcatctctgaggaggagatcgcaaagtacatgaagcgtgggaaagggaaatactactgcaaaatctgttgctgtcgggccatgaaaaagggcgctgtcttgcaccacttggttaataagcacaatgtccacagtccatataagtgcacaatttgtggaaaagcgtttcttttggagtctcttcttaaaaaccacgtagcagcccacgggcagagtttacttaaatgtccacgctgtaattttgaatcaaatttcccaagaggctttaagaaacacttaactcactgtcagagccggcataatgaagaggtgaataagaagctgatggaagccctggagtcgccattggaggagcagcagatttgatcttcagacagtggcccttgctctacagtgttgcttgccagactcttaggttgttgagtagcctagatggaccagtagccagtatgtgtgtagtggtgtatcctggtctgtaagtagtgttacaaaaaataagtacttggttattttttcatatgatccgttgtttatgtggatggctattttataagtcttaatacatttctgttatagattccagatggatataactcattttccttaagttttatttttgttataatacaaggagtgggggaaaataggcaggccatttaataaacaagtaagtttaaacctaatcagagtctttgtcctccaccatgtgtgtgtgtgtaactgatttcagaacatagaacttattagatgagggctcagtggtagagcctcgactagcatgttttgcatacttatcagttccagggttctatccccaatacctttaaaaaaaaaaagtggaatgtatgagaattgagcatgaaaagtaaatttgagaaaaattttgttaaatgtacttttgaaacatgtcttatatcttattttttcatgtaaaattagtttataagtctttaatactttcatgatgatcattaatgctgttacagagcggcacttctcgccctgggggtagaatgaccctttcacagaaagcagagatattacataatggtgatagcaaagttagttataaagcagcaatgaaaatgtgatggttggaggggccaccattacatgaggaactgtattgaagggtcacagcgttaggaaagtcgagaatgctgttgaagagagttggagtcttagagccgctggttttctgctgctaggacaactgagtgggtttgcaaagcagtgttggtattttctgcaggctgagaagaccacatgattaaggccaccgcttccctctagttgtttgcaatggcgtcttccttgtggggtcttgcccttcacgtccctgcctgatcacatcaacagatggtcttcacttgccaaacgtgttagtgtctgtacctcctaccctgggtcttatgtgctttctgtcgggtggggcttgagacccaagtaatgagcaggagctcaaagtcttccagattgacagtaaaaggttaataaacagcgctggtgcggcagccagcgatccacactggatgccgacttggttggttgggagctgaattgatgagggctcactgtatctcaccgtgggcagcacagtgaagccctgcctcaaaagcattcctgtctgaaagacatgtcgctttggtttcacatggttttgccattgtaaataccttgtatctctctgtggattattctaatagtttgttaaatgtgtatcaaccaaattaaaaaggctttcacgataacatcttcatgtgtacttaatttttataattgtattataatcagacttatgatgcctgaggaagatagtttaaaataagacttattttagttttgtaggtttcaatggcttgtaggcatgtggcaaggattggaagggtgtggcagagaaacactgctgccctcaaggtatccagaagaaagagaagaggaatggaaaacgcccagggccaagatatgtccctcacaggcacaccacgagtgacccaccttgcccaagtgtgccaccacttcccattggtgtattccgtttttactgtagaggctgaagcattgtccagagcagagccttcacaatgtactcccgaaagtgccctctggcacatggatgtgctgcactaatgtctgtccactcaagtcaagatgaattgcagggattttcagtgg

SEQ ID NO: 33356 - DNA, 1385 bp, Mus musculus
ccacaacatgtcaatttgctttaacaagaaaattctcctaaagtgtttgagctgagcggctgcagatggaagtactctgctgtctgtccctttgtattcctttatgggttgtttagagtggcttgtgtgcatttcctcaggaaaggacatgtgtgtgtgtgtgcgtgtgtgggcgcacgcgagtgtgcatgcatgcccaagaatatgtgtgtcttctattaaaatacttgcaggtttatttcctaggcatttttctgtgcagtccagtttgactctccctcttgcatctcttggaaactgtctgcagatgctgatgacatccaggggagcatttcccaagagatcaagccttgggtgtgctgtgcaccacagggagacatgatatacgaccccagttggcaccatccacctccactcataccacactactccaagatggtcttcgaaacaggacagtttgatgatgccgaagactagaagtgtcactttccacagtggagtgggggagtttttgtgtcctccagatcacaagttgtttcctgtgtttcaagtgagatactctgtccgttctcagcgactcctcagtgtgggctatagacaggcattaactggggcatgttgttgtggtggttgttgttaatggactctggagtgtgttggaatttttgtctgtgttagagttgtgttctttataaataaagttagggaaaaatcacctagtatgctctgtctgcgtctcttccctatagttatgacttctggtcagtgccttgctccttctctcaaagcccttgagttacatgttaaggatggaaatagtactctcagagagagaaggcgcatggctttgcttctgtgtatcctgcatgttttagcagggattgtaacccaggggtcactggtgactgtgtggcttgtttctgttgcctctgaaggaaaggctaaacatttactagtttacaaggaaggaaactaaatggcactttaagccagaaattatataatcctttttaaaataaagatttatttattttatgtatatgagtacactgttgctgttttcaaacacaccagaagagggtatcaaatcccattactgatggttgtgggccaccatgtggttgctgggaattgaactcaggacccctgggagagcagtcagtgctcttaaccgctgaaccatcatctctctagcctaggggacagtttaaaaatgcatttcttccccctgccctcatcttcctctgtccacagctctagctgcagctcagagtccctatcatatacttaaccatcatttgacaccaacgacttccattttggtcatctagaacagtgtcatttaatctcagaacacccggaatgcttcatttcactagtgattt

SEQ ID NO: 33357 - DNA, 1171 bp, Mus musculus
ttcctttcctctctctctctctctctctctctctctctctctctctctctctttctttctttctttctttctttttttttccccagagacaggattttgctatgtatctctgactggctttgtagaccaggctggccttgaactcagagatccacctgcctctgcctttggagtgctgggattaaaggtgagccccgtcacacctgacctaaatttatttttatttgacacaaaaattgtatgtacataggagatgcaatgtggtgctttatagatctgtgatgtgtaaagactacatcagggcagttggcagccatcacctcgtgtattcatcagctctctgaggttttcagagcgttgttgttagcggtgatatgccactgtgctaatgagcagtagacgtcatctctcctatcctgggcccattagccatgtattccctacccttttctgtccgtctttccccagattctggctaccactgtttcacactctacttctttgagaccagttttttccttccagcatgtaacttagaacatgcggtattttgttttactattcttgacttctttcatagaacaggataacccatggttccgttcatactgcagaagatgacagtatttcatttcttctgtggctgagtaatatataacatattttctctattaagtcacgtccaaaaaaaaaaaaaaaaaagtcacgtccatgggcactaggctgaccccaggtcttggctaccatgaatcctgctactctaagcacgtgacttcagttcccttggatggatgcatacagcattgcgggtcacatggccgttctgtttctgttgtctcaggagcctccccacagctcttctctttgcttattcacacccatctgccaacagtcctgagacttcccctgcaccagctcagcactgcatttgtcatttgcatctctcatgattagattagtgatgctggctgtctgcatatcctctggaggtgtgtcatccagctaatccacccttccctgagtcctgcacttccctagcatctgtacattaacctatcagaccaacagctggcagctgtcctcaccctccgtgttgggcgtctttctccctctctgtgctacagaagcttgtttgctttgtgttaaccatattgtacgtcataaacacgct

SEQ ID NO: 33358 - DNA, 1142 bp, Mus musculus
ccaagataggggcagacagacaggaagaagatcatgatcccgcgtggttttaaatagccacaggtagttataaatatcatatagggacagaataattgggataacttgtctgatctaggtgggcagcttgtatcatcaattggctctgaaattattgtgtgggcatcttgtgaattgataatttattgatacataaatctgacttgtaaattataagcttctacagtcttgtttctaccaggttgctgggtgttgtggcggctgactgcagggtggatggccatttcatgggcctgccatggcagcgatcctccaagagaactggggagctccggcccagagcgaccaggagttgagatcacccaacacagatataaggcttaccttgaacacctctccccaccccaccccccaaaaaaacccaacacacacacaaggctggggtcaccatcttcctaagacccacagatatttcacagtctatacgcagagctccaacacacactggccacgccctgggttctgcttgcagtcttgatgtgtgttgggaacctctgctggtttccccacgggcatttaagagtctccacagatctggcttggtttcacccttcccagttcatggctgggagccatcaagctggagggatcggcttatgcaattagaaattaatgtcttcgcatgatttttcagagttgcagagatgttcttagtcatagaaacagggtagaattttagcttttaaaacaaatggttgtactggctcttctggaacagtatttaacagttaatttccttacaaagccaaagtcagtattagagttttaggaaatgcttttattttttaaaaatgtagaaatgtagatatttcaactattttcaaagaaaccaaggcagttgtgttagtcagggctctctacaggaacagtatggatatgatggggagggggtggggaaacaaagtaatttgctaaatcagcttacattaaaatagtaaccgctgagtcacacctgggggctgagacccagtcagggcttagttggagcctcagcagtaggaggagctcccatggcagctgtctctcagtggggagcctgacaacccatggttgctcaatccacaaagctgggtgcctcagcg

SEQ ID NO: 33359 - DNA, 1154 bp, Mus musculus
cgtggttctctttgttttggttaataatgaaaagcctccagtcacactgtcctcgagtctccacagtgtaagcagtgtgcttcgtgtacctgcgtgtcccacgcaatgttctgtggcacagctgagtggcccgggtttactagatctacctgtcattcacagctacctgtctgtctaccacccagcttgccagccacccgtacccatccacctgtccacacatcagtctgtccacccataaaccaagctattaatcttctaacaatagaacaataagtttacttagtgagctttgagaggagggttcaaataaaaaattgttaacacctggaagttgtgaaattatggagattttgattcataatgcaaagcatgtaatttttactataacatgtgagtgtgaaaatctctatcctcaggtaaccggttgagtgcatgagctctgacttcgaaacgaggtaactgtaggatcggaaggaagagcaggctcatgctgtcgcccacagcaggaccccactggtgtgtctggctaaccacctgtggcccaggaatacaaacccagccttgagaatgtagggaaggagctcttgaacacaacacagcctctgtctgtgtctactgggcctgtgctgagtgctaagtgcctgtagctcactgcacccgtgtgcctgagatgcagtgttgcacgttgacacagggacttttaccctgtctcctctcaggaggtgaagatgcactgtaaaccagaaagattaattacaaatgatttttttcttctgttgtatcaaattaaaatatcttgtgttcgagattctttagtgtgtatatttattggtgtgctttcagaacatctcttcaaaggcttcctgcgaactcctgttcagaagcagtttgcgatgtcgctgtcgctgtgattctgcggctagcagagggggctgtacccagaactccgttctgtccttttctgggaggagcagagtcccccttaaagctaagaattaaagaaaacaaaaggaggggctggagagatggctcagtggttaagagcactgactgctcttccagaggtcctgagctcaattcccagcaaccacacagtggctcacaaccatctgtagtaggatctgatgccctcttctggtgcatcagtgtac

SEQ ID NO: 33360 - DNA, 2135 bp, Mus musculus
tctgcgtctgcggcgcgtgaagggcacagatgtcttttcccctttcccatactgacactcgggtttgctttgtccacaggctgggtggtcagactccctgttctggaaggccaaccagtggctaatgatccacatgtttcactgtcgaatgatcctcacctaccacatgtggtgggtgtgcttctgtcactgggacgccctcaccagcagcctgcacctgccccactgggcactgttccttttcgggctggccctgctcacggccgtcattaacccttactggacacacaagaagacccagcagctcctccatcccgtggattggaactttgcacaggaggaagccaagggcagcaggcaagaaaggaccaatggccaggtgcctcggaaaaagaggttgtagcggcgcccacccagggactgggtggaccatgatgccgactggggagtgtccagggttggacaaagctccacagtgactctttacgtatggatggggacatagataagtttatatctaggtgaatactaacttgttccttactatgaattctaaagtacccatgaagtattgctggggcctcgacgtgcctggaagaggtctttgccatcatgactttcctctgagtcttctggcgtggccccaaccacagcacatctgccaaggcagtgctagggaaggagcaatggcagccaggtgtgcaggctgctgaggaagccagtctggagccctgcgacgattcatcgggaaggacctcgtgtgggtgtgggtgtgccttatttggaagtcgtgttctttttcattgcaacaaattgaccctaagaaaatgtgatttgctgatcatatttatttactagcctggggaattttaagcccgtggcagtgcactgccctctagtggcaagaggcagaaggacagagttatggtaaggggttctccttggcttactagagtctgcccacccctcctggagtggtggtggtggtgtgaaatcttgtacttcaaaaacaaacaagcaaacaacaaaaaaccccaaggaacctaataacctttttgaaaaacaaaataatgagaatttttagtgatatatttcttatttgacagaataaggtgtctggagggggtcctgtactcatcctcgtgtcgctcatcctgagtcgctagggccccgagcaagcaccttgcctgacatgaccatgggaacatgttctcgccgcgctgtttgcaggttagacctccagacaccggctagcaatgctatcggcagacacaaaaactttcccagagaacagttaaagaacaagggggtttttgtttgtttgtttgtttgtttgtttgggtttttgttgatttgttttgtcaaaactacctgagaaatggtggttgctcttgaaaatcatgtgtgacttaggcttgcctcagcagccctttaactttatgaggatgtatgatgcctattttattataaagtagcccattaactttatgaggaggtatgatgcctatttatttcaatctaagaaagcccttactttgtgttcctaagataatcaactgaactgaaaaccctgtagctcctgtgtctgctttgttgaggcaccagcctggcatttttgttttttttttgtttttttttaagctgggcagaggcttaatatagtgacagctctttccaaaacccaaacatacttcctgtctgataacgtgacccgaagctcacctgagtgcctgagaacactctgcgtcctgaacatgttggcaagtcttcaatgggaccaggatggggttagagagtgtcttagtcgggcatttctattcctgcccaaaacatcatgaccaagaagcaagttggggaggaaagggtttattcagcttacacttttccacatggctgttcatcactaaaggaagtcaggactagaactcaagcaggtcaggaagcaggagctgatgcagaggccatgggttgatgtgacttactggcttgccctggctttctcagcctgctctcttaaagaagccaagactaccagcccaaggttggcaccacccacaatgggccctccccccttgatcactgattgagaaaatgccccacagctggatctcatggaggcgtttcctcaagggagg

SEQ ID NO: 33361 - DNA, 3135 bp, Mus musculus
acacacagaagcggctgggacagggagatcatctgactttcgctggcctctacaaggagtgtgacctcaggttacatcctccgtcttcacgtgtgtcagctgagtgccattccatagctcaggtgacctttggtcactccacacacatctcctttctgaccaggacttctccccggaaccttggagacaagtattcatgagaaggctctgcaatggagcaagcactagtccctgcctagagtagtggctctctcgccatgatttttttaatacagttgctcatgctgtggtgatccccaaccatgaagttattttcgttgctacttcataaccgtaattttgctattatcataattaaatatctgcgtgtcccaacctcttgtgaaagggtcgatcgaccaccaaagaggtcatgacccacaggttgagaacactggcctagagaggggccacccttcccagctatagtacctttgtggtctccagtgtcctgccagacagatctcggagaggggcatggtccagaggacacgaggagccgcagctcactaatgtgagcctaggctggcctgctctgtggcccacactggccaagattccactgcacgtgtgccccactagactcctacatcagctgttaggaattagaatggggtatcgcttggtagtagagaacttacttagcatgtaggaagccttcctggcttctgtcttcagccactggagaagagacgctctcctacttgaccggtatggaaaatcaaaaacgttctccctttctcgccacgtagatgttttacatgttcccatgttttcaacagtagaggatgtgatggtcaggggcagcagcccagcgtcttccccatctcttcccgatggcttgcccttttcccgatggcttgcccttgccccttcaatttagcaacgaggttccaacttctctcagcagcataccataggctcctcaaagtagcactggacttggtgcagcagagctagtgactggctgtgtgctgttgtcttctgtgaagcctatgggtcacaaggctctccttccacagacagctcctcagtaggccctgtggcttccacggcaacattgctagcaagaggccatacccctacctgagcccttaagtctctgttcacacagcctgtggtgaccctcctgatgggaactaagcattgcctcattcctgtgtgccgtaggggcgacacctgagcctgggtcctagagaaagagcagagactagccatttctagttttgtagggtggaggtccaaagtcaggtgctggcagcttcagtcaggaagaggcccagtacttcctacgtggaatgtttctttacctccaggagaaagctatgccatatatctaaggagcagaagggctgaaaagattcaggaagcccaagtgagtttcctggaggcctttataaggatcactgtctggacacatggtgacttaagtgttttctttggctggggctgtctctgattgtggaagctagtggctgggaggaggcccttgcctatccccaaccatggatgtaatgcgtccacataaccttagtggggcacattcaaatgctagtacaaaaaagagtgttgccacaccccgtgtcagtaagatctcattcgttccacaaagggctgatgcctcttgttccctgtagagagaatattgtatgtattgtatggatgcgtcacctgtcaattaaaaagcctatgtgtggcctacggcttaggcaaaaactagaaggtggaacatccagggggcagaaagaattctgggatagagccaggcaggaggtcgcctggtaagacatgaggagactgatgtgtggtacccaaacacaggtaaccagccacatggcaaaatgtagattaaaataaattttaagttatgattctagtcagagaagagcctagctatctggccaaggtattttgtaaatatattttgagcctgagtcttatttctgagagcatggggctgggggatgggagggagaaccggaggtgatttttacagttctctgaccatttccagtgatggctgcccagccactggcaagtgagtgggtgaaccacccaatggaaggtaacctctgtcttccaagtggggtcctggcagaagacatgctaacccagagctagacagtgtttgctgagggcatattcaacaaggtaagccagggtaggaggccaggaagccagctccatctcacacagccagaagggctttggggagagacaggtagccagtacaggaactatggcgctagtctttcctctcacggtgacagaccagtgagttggttacacagattgatacataggagacatttcttttgttaaaactatgaagtgtgttacaaactaaaaggctctgggttgttggtacagtgtgaatgttggcagggcatagcctaaaatggaatttgccccttgggatgttgagtctaactcaggctgaggaccaggctcaggccacgcctaagcttcccttctcttcaatgctggctgttttcggcccccagttccatccgagggcctggagctgcaggaagaagccagagccatctatgatctcagttcaacaggccccataagactcacctagcagaaaaccaacaaaagacacacgtgtcattaatacttgatacatttaagtcaattctgtgtctaaatttttgctgtgtcctaatgtttcaggatattaattcaatgtgcctttttttgaccccccctccatttcagtatactatgcacatttttatttctgttacaaatttttaattgcctagggttagagagagagctcagtggtaaatgtttgtattgtatacactagtcctcaggctccagccacagaaccacaaataaaaaataagttaaaaaaaaaaaagaaccccagcggccgctactggatgaccctgggcaatgtggtgcccaaggggggatttcctcttctctaaagacaaggggggatggtaatggatagaaggaattgtaagggtgaggttgggaggagggacggctagggcctgccatcttcatgtaaagtaaataaacgttggtaaaacccccaaatttatgtgccatatatatgtatatatacacatatacttt

SEQ ID NO: 33362 - DNA, 1190 bp, Mus musculus
tacacctgaggccccctggcgcacccgcaggcctccagccctttcgttgtgttgccctggatggtaccatctactgtgtgagccgcgccgggacctggcgtttcgtgccttctcaggacaccgaggctggcagcgatatgggacctggtggcagctttgagcccgagcccctgggatcccccctggatgtccggggcgtactctttccatttgtactcaacctgcctgagaagccggaccgcggggagcagggtgcagtctaggacaggatcggctgggcagctccactgtccagcatttgaggggacgggggtgctcaaaagagtgggctagcccccaaacccccagtgggggaggaagggcaaagatgtctcaggaatagaggaagcagaaaggccaggctgctggccatagtgcatcatgcaaacgctttgagagtaaaagaagcttcgctggctctgaagacattttcccaatgctgttttaagccccgctttgccgtgctggattctgctcttgcttcgcttgtttagtgaggggttcatagtttaaagtgtgggaagatacagataagcccatccctaagggaagaggtagaagaggccacagataaagtaggatgcaggtgcggactcaggtgtaatgaggagcctgtccagtcccctccttaccagtgaatgcaagactctcaaacctgaatggggtcctaaaagtaggctaggtatccttgcaacagcagagaaaaggccaaaccccgctaggaggtttaaaatgataacttatacgatctgcgtgagacccaaaacgttcacccagtggtttgcaagttttttgtaggctcaacttcaaaaagtaatttgtcaagtactgaaggcgaatcacttgaccagtcgaattgcctttgttaatggtaatgttagcaagcagcatgctgaaccggagaggacaggaagcaagggtggaaagacctcaggtcaggaggctctggtagctctgcgtgctcacctactttcctgtcttagaatgaactagggcatttttcccccctctccctagaacaaggaagttaaaatcatgttttgacagttgcatgctctgaactctctgcttggtgatgttttgaatgtatcttctgtgattccaatgatggagatgaatttacaaccatctcgaaggtggtgtgtgtgggg

SEQ ID NO: 33363 - DNA, 1419 bp, Mus musculus
aaagtcatcacaggtacacaccggtcaatggctagactacccaaggatctgagaaagaacaaggtgtgaaatgaatagttggcatgagagcctacagtgttctctcattgtacttatgaccctgactggtccctgccagcaatggttctctagttagccacagagctcaagttttccactgatatataagaacatgcaatagaaaagaccagaggtgtttacaatgcattttaacttttcccactgtcagcagcacctcactgcagtgggataagtccagaccaacccacaggaaatcccacaggggaagacagagtaaggctgcctctgagcccacgagcatcggggctaaaggtgacctcagtcatgtaagtgaccccacacttcaccagcagattctatccatacactctgactctagcatccagaagagatatgagtatggtttgtcatgtggcaataagtgagccatagaaacatttttaaatgtctactgaacatcagggcgaagccagaggaaactctggtggaggtccgtagcggtcctgacgtgcaaatcggtcgtccgacctgggtataggggcgaaagactaatcgaaccatctagtagctggttccctccgaagtttccctcaggatagctggcgctctcgctctttttttcccgacgtacgcagttttatccggtaaagcgaatgattagaggtcttggggccgaaacgatctcaacctattctcaaactttaaatgggtaagaagcccggctcgctggcgtggagccgggcgtggaatgcgagtgcctagtgggccacttttggtaagcagaactggcgctgcgggatgaaccgaactatgattacttttaaatgcagaatgataatttatcctacaatagctgtcagaatcatattaaaacccaacctctaggaggtgggggaagtttcctcaaagtgagagaaatggtaggtgttacttgagggactgagaacaatgactactgactgcgagacacaacagttgtgagtggatttgaacatgtaagggagaaaaatcagagggtttatttttctttttaaactaaaatgttctaagttatgactaatataagttgtgaagatcttcatgaagttgtaaaagtcattactctgaaagtgaaaaaatcatttaatgagagctgccttttccctgagttgtactttcctggtgtctagacacagagtgaatgctttgttgcatattcctcttggaatctaaagagcttctctgatttataagccaagctcaggaattgtgttatgtcccttaattcctgtctttatatatatatatgtatatatatatatatatatatatatatatatatatatatatatttaaattcacattttttaaaatgtatgaatgttctgtctggatgta

SEQ ID NO: 33364 - DNA, 1120 bp, Mus musculus
aaataaatactggtctctgaaactgttctactcagatgtttgtcattgtaatggaagagctattaaccatgaaataacacagtcagtgagctttctatggccatccagcaggacctgtgctctcatgacctagttgaccccacaaccctacacataaacaattatttagcttaactctaaacatgtctatgacaggacacatgtatattttatgtccatgaaggtagtacagctgtatgtgctcatggagacaaatgcatcacatacagtgtcctctccctataattgtcatcctgttcttttgagcaaggtatatcttaaaatgtgtggcttgtgttttctcaagtaggctggaaaccagcaagcctcacagattctccttcctctattattaatatgtgggtggatgagtacatatatgagtgtgtgtgtgtgggtgcttgagtgtatatgagtgagcatgtatgttcaagtgtgtgtatgtgcagtgtttgtgtagaagggacacacacatactacagcacatgtatagaggtcagagggcaggtttgaggaactggcttccactgtctgtcttactccagtggggtctcacttatgtctgttgcagtgtctgtaccgttccagcttccggctgattctcctctctttctccatctcactctcagagaacttggattgtatattgtgctgcaacatctgacaggtttatgtgggatctagaactgaaatcaggctgtcaggcacctagtgctttaaccctagagaaggtaagggtttcaatgctagaacttaaagatacagaagctttgagtcatacaaggtcctccagagacacaactgtaacaggggtctgctctgttatgagatttatatcaagaaggtgctgtgagctcttagttcctagaaaagctagctacacccatctttctgagtggcatttcccccacacgggcattttcagaggatcatccagttttcaaactggagtcaagcaacatgagaggaacacaggaccttccttaaacattgggttgtgagctttttaattcctaagccatcactccagcccatactggaccattctaagggacacatgcaagaataacagagaagcaaa

SEQ ID NO: 33365 - DNA, 1107 bp, Mus musculus
acttgcacattttaaaggcgattctttgttgatctctgcagatgaatcctttgccagtggctcccactcatctttcggtgattcctgtggagatcaagaaaggaaactgggaagatctgctaatgagatgaccacggtgacatgcccttcctcacctgtgttgagggcaagcagtttttatggctcagcatcacccaaccatctcaggcagccacgtcctcagaaagctccagacagtccttcaaaggagagcatcaactgtcagaaggatgctacaggtgcggtagctgattccgagagaaagcaagctgcaggtgtatctcagggggtgcctgatgagaagctctgtctgtctcctacgatgtccatcatagaagaacaccaagtacggttgggacccaagaattcttctgcaaagagaaaaagggcagcggacttgggttcatctccaaaaggaaaactgaagaagaggtacaagagaaagtctgctctggcaatacagttattcaagtccgaccagagcccgccgtccacaatcagactcattccgggaactcctgacgttgaggcttcttcctatgaggactatttttcccctgataatctcaaggagaggaattcggagagacttcctcctgaggctcagcaactagcaagcccttctctgttccactgcagaggtctctcaaagtgggagcgaagaaacatgctggaaatgtgtgattttacctgcattggtgaaaagcacagatccatcagcagcattagtgacttaatttcaaaaagtgcctctagtcttgagaaacctgtcaaggaggaagtgaatacagcttctacctgcttgcttttggtggagacctctgctaacgacagcccagggctttgcagtcagcctggccctcagctgagggatgacacaggcccagagggaagcagccaccctgacaccctgtctagttctgcccaccacatcacacccttgaaaggaaatagtacagaaaccagagacccaggtgatggaaaaggctcccccaaagaaggtagcacgcctcctgcatcagcctctcctgaagatgaagtacacatctgtaatctcagtttgggaga

SEQ ID NO: 33366 - DNA, 1136 bp, Mus musculus
ctcgcccatgcgcttggaacatgtgagattactgtcagcagccagatggggatgagctgacatccaaggaggtgctgtgactcagatgtgtgttctgcatcttaatttgggactgagcacaactgttagctgtgtttgaccttcaaaacacgggctaacttttaatttaatatcttaggtaagaagacagtatgccccaggtgtctgtctctccttacataccgtatctatcaaacggctatctcattacacacggcctgtcgagaagcctctccactcagaacacacacaggaaagcaacagatgcaaaactgccctcccagttttctgcacattgtctaaccacaggtagaaagctatgatctgcctgtctgtctcagtgatctatctgttcatctttcagtcctagggactggtttagggtcttgaccatgctaggcaagtgctactccagtgagttaacatctctagccaaagctaggattttgaaactagaggaactgagagacggtgatgcccccgagaagcagcagttccgtgtgacccagtcgtggctccatgacaacttgcttacctgtagttggactcttcaccagcgaggtagaagtgatcatacagcgaatgcgcctcgttgccttcccagtccttcagctggatcttaagcacgtagcggtgctgaccggtcagctgggagacaaactcattgcccagccagtactctcccagagggctcccgaagccctgcaaccgagagagtagagtcagtcagctgtttgttcttgtgtttggaatccatcaccttagtaccatcttaggtgagaggatggtactcctagccctgggctgtacaaatgcaaggtcttgcacacagaaaaagattttgttttttttttatttaattttgagagatagaagaggagtcgtaaatacatgccaccatgggcctgcgatgtcaccagcaccgtggatgttagctgtactctctgccttatttggggcaggcttccctttcaccactgtgttattctaagaccagctggcccacaggggtctggggagtcacttgtccttgtctccccttgtcataggattacagatgagagctaatgtgttcagccttatacgggttctgggga

SEQ ID NO: 33367 - DNA, 1099 bp, Mus musculus
ggctgtcattcatgctggaggagagaagctactctccaagtatcaacagcagaaaacagttggccatgaagtgaaggcatactgtgccaaactgaacatatttcttcttttgattttttttttgtgcatgcatatgtggagggggtgggggaaggggggtgtgagtgtgtgtatgcttaggccaaaggagacagctttgtgtatgcttaaataatcacatacatgtacacacacacaggcacacacaaagattacagacaggatatttcacatgttgacctaggtataaattatcggatgaattctcattttaaagataatatcaaactgtgagcttgacgttatcatgccctatgtattccctgcattttctgactcaaccagaagaacgttaaaggacaagatgtttgaaaatgaaacctttaatgtatttagctgtgatcgggagtatttgcttaacatgggtgagtttgtaccttttacctgggactacctgcgtaacgcctggagcatgaacttggggattcaagttcactggccttgaactgtggatgaaactgttctagctgcctgaggacagttaaaggattcagttaggtaaattgtaatttagcattccgaaacatgactctttccggatcaagcataaaaggcatgtgcccttggaagcccaagaaagaattcatacagttcccattagtctaaaaataaataacaaataaagaaatgtctgagtcatgcattgcatttgatggagtccagtggcagagagaacttaagctgtactgtggatggtggctctgcccggtgctcggtggagtgaggccgcagcgctctgaggaagtgatacgagccagctgggtggatttaattctgtcttgggttcctccagtgcactaagtgtgtcatgctttgagtagcaatgtggaagcctggctgtgccaggaccgagtggctagggagggacttgccactgtctttgaagctctcctgcaggcatctccacggagaggcaagttgcagctcagctccataggagctcctgggccagcttgtttaagttttccattcctcgttgggaaaagtaacatagagatac

SEQ ID NO: 33368 - DNA, 1213 bp, Mus musculus
agacgctgggtggaaccaaaacctctcagtcatgtgatctccaatacggaccttgatcagtgtggctctgctctgataaaagtatcacaactgccgtttgctgtctgtacttgcctgagggttcctagcacactcctgctcccgcttgctcagttgctggcaacacacgactgttctgtgagctcaccactgttaccacaaggaagcctgttctattcccaaaggtacagagtcaggttttagccagtgagctcagctgagagaagcaagaagtgactaggctggtactgagtggccgatcctgctcttaaacaaccattgggtaagcagagggagctactctgaaggacagtgtttgtaactaggtacatggcattctgaggcacacacctagagggcaggaagggattggtggttgtgggagactggcagggtggctggggcactggagatttgtagagcactggagacactttgtatgatatgctagaatggcaccaaaatgtcactacacagttgtctaatgccatggaatggactcaagcctgcaccatggctggtgtctgataaatacgacagtgctgatagactgcttttaacccttcctctccaatggggaatattgataatgaggaagtctgtgtaggcagcagctggggcatctctccatcctctaaactgtgaaactggaactgacacaccacacagagagacacagacagacagacagacacatacagatacagacacacatacatacatacacacacacacacacacgaacaaaagaccattgaaaaagtttttgatttttttttttttgcaacttcaggttataccagtaaagttgacctgctcctgccaacgttttcttttctttcttttgtttattatgcaattttcttttttaaaatttatttatttatttttattagatattttctttatatacatttcaaatgctatcccaaagttccctataccctccctctgccctgctcccctacccatccacacccgcttcttggccctggcattcccctgtactggggcatataaagtttgcaataccaaggggcctctcttccctgtgatggccgactaggccatcttctgctacatatgcagctagagatacgagctctgggggcactggttagttcatattgttgttccacctatagggttgcagacccattcagctccttgggtg

SEQ ID NO: 33369 - DNA, 1200 bp, Mus musculus
ctgaacttctcctggggcctgttactgcttcagtcagagccaacaagctgagagctggttccgggaaagacctgggcagagagagccctttggctttcctggtttgttcctctctagcagcatttgcctcagggaagtcttgacacctcagcctctgccaccatcaagccacttctgaatacagttccttccttaaagtgcataccatcaataatgtgaccacccaaagtctctttccggagaagcccctcttaggccccttcttgcacctgtctctctaaactgtaagcccctgggaaacaaaaagcaaactcttgggttttggactctgcactctcctactccggcaacacacatgatgtagagccatctcctaatcagtgtgcattgagttaggtagcctctttccagaatgatctcatccttttaaatcaacattatctcagtatttcagagccccctcaatgaagggaggatcccccacatgcaccataaacacaactatgaggaatggacataagagtgaccaacatgaggcccagtcaagaccctcagtgggacccttcccaagacaaagctttccaaaggtccacttgatgagccggggttgggaaagggtgtctgtagtgtagctcttggaagggacagcagcagagccccagtacagaacaagagtgtcagagctgagggcccaggaagagtgtggaccagctcctgcacccccaccctgtgcctccattcctccccctgactcttgccaggagaatggccgatagctgtaaggtgaatgtccctggagagcgcccttgacagtgtaaagcagagttctcccttgagtgaggaagcctctggaagaccatttcagcttcccatgcaagagaagaagatgaaacctcatctcttgctattcagctgaagacattggggcatgtaggtgaaacatggcttgtcagtgacctcaggacagcagtagtatcagccaccataatccatcatctgagaagcatgtgagagtgtgaccttactgtgggtgcccctctgctctgtagaactaagaggtaaccagcacttggagaatgtggtcagactccttagagacagccccagctgtggcttacccatcaaatgtgatttagcttgtgactttgcaaaatacagtgtgttgtacaaactctgcctggggagatgtgaacagaaaca

SEQ ID NO: 33370 - DNA, 2151 bp, Mus musculus
agtggatttcctgtgttgcaactagctatcttaactgtcaagctgatttttctttctctagattccatcacccaacacaagatctgtgactttaacaactaccaactgctacagtgagacatctacaatgaggctgctatcctcaacactcaagaagaacaactctggagaaaaggaaccagcagacaccttagggcttgaagtcacatgtcactttgtgtgctatggtttttatcttcagagggtatgtggtgtgtgtgtgtgtgtgtgtgtgtgtgtgtgtgtgtgtgtgtgtgtgtgtgtgtctaggtgtctagagattaaatccaaggcttgctaagtaagcactgtactgtggaactacatctccagcttttatccttaaaactctttatgtaacttattcatgactcattgtatttcagagaagtcttgaccagcaccagttgggtactttatacaatactaataatgatcatgatggaaaggtcacagaacctttgtccttgagatacttgttcccaattatagaatggaagttgatttaaattgctgtagtcctaaacaatcaaatagctccctaactcttctgacttagacgctgagatctttattagcatgttgtgtctagataggaaggacaatcatgcattattaagattgcaattatgtcccttgagatgcccctcagaacaactaaggaagacaggtatgaacgttttattcaccgaccttgcgaatgtctaccactctgcctctactgactcccctgaggttccctaaggaaagtcagcttctggggtagagttctgtcaaaggtgtccaacccatgacccatgtatcaaacttgtttaagggtacctagaatgtagctcatataaaattataaacatatttaaaagtattaagagatttgtgtgtacatatatttcccccaaccccagcggggttgtaactcaattgcacaattcttccgggtgaactctagatgaccacgttgtattacactgtgaaaaggctggacgtgccatcatcaggtcaatcactcttcagtgtgtcgacacgggagactggcctggggcttgcagacctcctcttgttggtgtccccagtgttgggctgtagtctagtgccaccacatgtcatgctgctccgtcacctaacagacactgagtcccagtgagcttaaaagcagtgctcagctcactgtagttttctgtgttacgactcatgtcagctgctgtttccatctcaggaagcctcaacaccacttccaaaaccttgtcatctccgagataagcaattaaagcgtacagtttgtgactctggcattggccttgttccctgtacaattaatgctctgatggttcattcatgtcatgtgtgtcagcacgtaatttctttttgttgccaaacactatcctatggcatggatgctctacagacttgctcctcgccccatgagcagagtgcaggtgtaaagcccagtgggaaagcagttgatgatgtcacgttgcgttgggtgatagttgatgatgtcatgttgttctgggtgatggttgatgatgtcatgtgttgctggatgatagttgatgatgtcacgttgtgctgggtgatgatagttgatgatgtcaggttgtgcttggtgatcagtagtccaggctccgtggaagaagaggatcagatgagggtgtgagagaccccactcatcaccctcctcatcttctgtaatctgagtaattctgtttcccctcacaaatccatagcttgaagccatcacttgaagccagaataatggtgtttaaaaagtggggtttgggagaaataaaagagatgcccagcaaagagaagcaataattttaattattagaaatcagtctggtgaaatgtcaagctgcacttataattatggaaaacactacaatggaaaaaatacttacaatatgatttaaaactaccaacttattatacaattctatagtcagccatgccaagtgtatatgcacagtacagtgacgtaagtgatttaagtaaaccacagttgatttttatggttcttgttaatgctacaatgcttgtctggtaatttcaaaatgcaaaattcaggcacctgcagtcaagaccaaagctcctgggctccaggggggtgaa

SEQ ID NO: 33371 - DNA, 1241 bp, Mus musculus
ctcgcacgccagcacaggccaaaacccaccacctcacttcttcccgggctcatccccagccagcattcgcagtcgagcatgcgtcgtgacgaggccaagggaccgagccaatcagaacacgtattacgcccataagtcggccaatcaggaggcgccttattacccgggagccttgcttcaccccgcctccccgctgacaagcacgggtcgcgcggagcaaagcgagcaccccgaggcgagtgcgcccggcaagccgaggcgtgccctttccaaggcggcgagcagaggccgtcactgtccccgccgggtcccgggcccccgcggcccatgctgggggcggagccagggcggagggcggcggcgcggccggccccgcgcagtgattggcgggcggccggcggtggctgaggtcctggtggccgcgcgggcaacgcaggcggagtcgcggctggcgagccgagaggatgctgctgtccctggtgctccacacgtactctatgcgctacctgctccccagcgtcctgttgctgggctcggcgcccacctacctgctggcctggacgctgtggcgggtgctctccgcgctgatgcccgcccgcctgtaccagcgcgtggacgaccggctttactgcgtctaccagaacatggtgctcttcttcttcgagaactacaccggggtccaggtgaggcgcggccgcgcagggctgcgtgcgagccctccccgcggccggggcggcgcttgcaacccgggcgaacactcgcagcccggcgagcacgtgccgcagctcacggcctcccgccgcggggggaagtttctggttctcacttcggggttccttctggaacgtcctgctgaggctgagtgtgttcccgggtccgccccacccccgccccgggccggctgttactgcccatctcagtgcctgccaaagtagggcactgagtccgaggtggtgatgctgggactggcttcatttgcacttccgaggtcttttagattagcaagacctctaggcgctgaccaaagtgacagctgtgaaggacgactcctgccttgggttcctcccgggtgaaagcgagggcctagggaggaaatgaatacattggttacaataggagcctcactgtcgatacagttctcttcagcttggactgggcttcaatgtgggctgatctcttgtcagattgctttcttcctgctactgtttctttctttctttccacccctccctccccccccc

SEQ ID NO: 33372 - DNA, 1651 bp, Mus musculus
tttgatttggggcaaacacatgtggcttttcaggtgctggggttgctggagacatggaagctaagtggagtttatgctgtttttttttttttaatgttttcatgaattaatctccacttgtaaagattattggatactttctgtaattcagaaggttgtattttaacactagtttgcagtatgtttcgctatattggttatcttccatttgactacttggcagctcagactcttaatactaaagtattttacattttgaagctatgtgatactggttttttgttgttgttgttgttagtttctgaaagtcaatgaaagacactgtaatgatgcgttaagatgttccaagaaaaaggtgagaattattcatggcaaaaaagatctgtctagtgtatatttttattatattgctctatttagctaattttctttatatttgcaaaataatgaacatttttaatatttattaaaatgcttgatttgcatacccccgattctacagagaataatgtgtaaagtgtcagaatagacttgaagctctgctgtgactcagtctcctttgtcagagcttctagtagcccagctactgagctgctttgttagtacctccagcacctgagccgttaagtacttataaatgcaagggacccgttatcttcatatcggaatagacatgaacagagctctaaggcgatgaaagtctgccagcatcctctctgtcctcgcacgtgccttctgcctggctccatttgctttggcactgcgttcgatctagagtgtaggtgctcactgcttatttcagccctggctctgtggttttgtgtcctccagtggtgctgttcactgttggggtgcaggtggtgctgccctgactcagaggggcagctccctggctcctgagggtgagccttcttggctactacagaagtattgtgcgtttgtttatggcaagaaccatcaggattggataaatgtgttatttctctttgatttccatggagccacactgttggtacatgtcccctgtgaacagagctacctttcaggagcacatcatactgtcgtgagtcacggcacggtgtgtcctgtgagaagaggctttctaacgtgtgatttgccgtgtttctatgttgtgatttaagcgtgattgcctactagtcattcaaggtaacatttctgcaaatttcatacagatttttgtcacaaaattactataccaatgatctagttgaaatagaccaattgaatcacaataaataattttttttaattgagggaaaatttgcttcttgttttttcaaagccagaaaacgagccatttcaaacatctttgaagagtcatgtgctgtcacttgttttctatgtgttagtgtctatattcatgtatggatacacatgaacatgtatattcatacacacacgccaatagaatataacagcctaaaaacaatccagcttgtgtatcatgttactgtgctgaattgtaatggtttttacttacaaagtgaggctaaaatcgatttcatgtctttgttaaatacgttttttcagcaatcctattagagcttattttgaccagatcaaaataagtacaagttcagagactttaaatatggctgaggtctagagcgatagctcagtagttaggaac

SEQ ID NO: 33373 - DNA, 1175 bp, Mus musculus
ctgctcctaccacctggtacagggtctctatggaggaaggctgagaatgaccaaaatggtcgtcataggagtgttcttgggtctccatcatactgagcctcagcctctgaactaaatgactcatatgctgtgtgtttctccttccacactcctagcatacatccaagtaaaagccaacttctgtgacccacccatcacatgctggttactgtctttccgtggccctgtaggcatggtagtgcaactcgatgcaggcgcctccgttaggatgcaggaaaatcagaatggaattttgtttgtagctttcctgggtgtgtaagattctagggatggaaccttggaccttccactcagttgacaagcatctcgccaccaagctgtatccctgccctgtttgtgctttctgttttgaggcaggtgctcagtgagttgctcgtgctgtgaggatggaattttatatcttctgcagagagaagagtgcttagcaggaaggtgtttgggggaagcctctataagccctcatagcacacacggaaaggcccacccgaagatttggcctgacactagctgtctgtactcctttacagacggacacatcagctctgactgcagcacaggcaacataggctctcagcagtcccagccagcatgatttattactgagggctacgggtcatctctgagctcttctgtagcctgtgtgtctatggcatgtccattcacagtgtccagcatattcaccaggccaggcctggactagagagactgaacgtaaagagattctgggctctaccaggaccaccttccatgggaaggaagccatgcttcattggtggaggtacagacagacccgtgttcagagcaggtctgtgactgctctccagccccgtgtcattcctcctgaccccgcagtcaccatgataaaatgtctaagggagggaagagttaatgcatggtcaccaaaggctcacaatagaaataggcttaccatgccctcaacggacctgcttttataaattctttttaaaaggttcaatacacattttctatcactgctatggagtcagcagacaagccacgatccaatacttgtggtttttacactgtgagattttaaccttcgctggttcgatatgctgcttcttttagccatgttctgcctgccaactaccaaa

SEQ ID NO: 33374 - DNA, 1109 bp, Mus musculus
gaaaatcaacacacccggtgcctctggccatggcagatcccgctgcctaactggtgcccggggtgcacagggtagtgttgggtaacatcctctggcttgctgttctttcctgaccttgctgggatttgtttgccaaagatgagtgactgcatattgctagggctcagtgagaatccaaggcatagaagctagtatgtgagctatgttcaatgcagacaggactgctggtccttgtccccacttctgattttccacaaaccagtgccctgcccagggcctgctcttgtccccagagtcactgagggtctgggggcactgtcctttgggctcttcctacggtctgtcatgctgccatctcctggtgccttcagcccccctcctcacacttagttcccatcttctactcgcctaatgaacacccctgaacacaggcactttctccagtgcgacaggaaactggaaacaacgtgggtggcttactggaatgctctggtaaagagattattgcagcagtcaacacttctgatcgacacaaatgaaactgacaacaatgtgattaagctgtttgtgcacagaggaagtgttgttgttgttgttcatggaaatgccccgacacggctctgaggagcatgactgacctctgcttcgggctcttgtttttgaggccgctttcttacctcctgcctgccctggctttggcatctttccacactgtgctggtggtgggattctgaaagattttgggagatctctaccatgcctctggtgctcactcgcatgcatgcacaaatctgcaagtgacgccaagcggtcaatggaagatgccctccaggaaaatggctgagagactcaaaagaagcgaagccatggtgtacagtttcaaaacattcctagctggtaggtgctgggccctctttaaaatcttgacccattgatagggtcagttctgaaatctcagaaccttgttgttggtcaacattatattgttccattcaaagtagccactgaacctgtcactcgcagcaggatgtggggtgtcccggaacataactctatgttatcccttttgtggtttttgttgtcttctgtttcagggtgtgcatcgctgg

SEQ ID NO: 33375 - DNA, 1453 bp, Mus musculus
tccatactcttactactggccactgactttctgcagggagtaccagggaccagcctgtggactgtggtgggagtcttgtctggatttctgattggtaagacctactgagccttcttagccacacttcctttccaacttgtatttgtattttatgtttattcttttcattttcaagtgtgtgcacatatgttatatacatatgtatggtatatatgcatggatgtgcatatattggtatgtgtagggatgctcatgtgtggtgtgtatgtggaggcctgcagctgatgtcagatgtcttccttagccactttccacttactgagtcaggggttcttactgaacccacagctcactaatccctgattgtcttgcgtataagaagaacaattgttttgttgttgttgttttgttttgttttgttttttcttatttaggaacctagtactggctgttgctaggcaactgttgggcggagcctagaggaaatgctaacaggaaggacagggaacaggttaggggcagtgggcaggggatgggacccatgctgtaggtaagtgccctaagactctgagcttagctttgtagacctgactagactgatgggggcctcaaggaaaggtaggagcagccacgtctgtccaaaatgctgcctatacattgagtggccgatttctaagcagcatgcttgcaagtgaatggccaaacagcgaggtgtccaggcaagagttactccgccacctacaaagtggcctctgtctagtcatcttcctgcggagaggggatccactgggatatgatgtgacagtcctcacagctgagagacctaaccacttcgttcacaggcggtatgacccagtccagtaaacaggataggaggaagtaaaactgccctgtcatcttagaaaggactgggctgtgtcatgctgctccgttgcccaacagcaggtggcgctggacacatctgtgactcctttggcctcctggcaatctccagcaggaaagggagagtatgtcaaaagacagaacaggaacaaccaaactgagtcagtccttaaactcgggcattatagaaaattatatttaatacatgtttaaagtcatatcatcgtatgttattgacagacatgatggtttgtttctataactccagtgcttaggaggcagaggcaagaagagcattgttgtgagttctaagccatcatggcctacatagtaagtttgtggcaagcctgggctaagaagaaaaaccctattaaaatatatatatccagaaacagatcatgggtagagtgcttgtttagcattcaagaagccccaggtttcatgcccaacactattataaatgaaccgtacaagcagtgcgatccaaacacttagctgagacaggaggattgactcaggtttgagaccagcctgggctatgaatcaaggcttcatctcaagaaaacaagta

SEQ ID NO: 33376 - DNA, 1195 bp, Mus musculus
cccagatctgttgctggttgggtttggcagagagttttatggagacagtagaaaagcaggtctctgtgtttccaagagagctcagcaggctggatacacagatgtggcccctctcttcagcacagtaacctggactcacctttgtaatgacagttccaagaaagaggaagtagaaatgtccagtcctcttaaacctagaacagccacagcatggcttctgctatgctctgttagtctaaccgttcttggcagccctgacccatgaacatagaggtccagagtctagttcccacgagtgtgcatccaatgcaaggggttgtagtgaatgctggccctttggatatactaccacagaaatgtcagctaaagctggaaccacagtcctcagaagactattgtagatcacaagcccttcccatagaaagttgatgctcatataggaaagggcgtggatctcactgccctggctgcacagagagaggtccaggttcaaaaactgtgcaaaactgtgaagtatatatgatgctgttcagaacctccataagcaccccatttgctttggttatggaacactgtctttgtttcacacaggaaggctctactgaaccccagccttctcagagccagcggctcagatatgaatgtgatgaccaagagtctgtctagcccttcagactcctgaatggggcctgtgtgtccttgccaaggacagcagtgtcctctggtcatcagtgaatacactctgcaagaaggaacagtgtactcttgttttaaaagaaccaagaacactgagaaatagctggcccatgtaccaagagcaaacatttaatacaattattggcagaagagaacattattttggggggagaaaaaaaaaagcttgtgtttttacagagaaattaactacattttattagtcattttaaaattcaacttgtgatccagaatgaggctattcattttaaaatataagactaaaacttgtaactggtccacacggacttctctttgggtctggagggttggggtttgtagatcaacagtgtgaaaagggtagagagttttataactgcttccttaagtgcttgctggaaacagaagagtacccatccatatgtagggtcttgtgggtgacacagaagccagtctgttttcttagctccaaactaggttaaaagccccctgtgaggctcag

SEQ ID NO: 33377 - DNA, 1219 bp, Mus musculus
aagacagcattttcaacaaatggtgctggcacaactgattgttatcatgtagcagaatgcgaattgatccattcctatctccttgtgccaaggtcaaatttaagtggatcaaggaactccacataaaaccagagacactgaaacttatagaggagaaagtggggaaaagcctcgaagatatgggcacaggggaaaaattcctgactagaacagcaatggcttgtgctgtaaggtcgagaattgacaaatggaacctcatgaaactgcaaagcttctgtaatgcaaaagacaccgtcaataagacaaaaaggccaccaacagatttggaaaggatctttacctatcctaaatcagataggggactaatatccaatatatataaagaactcaagaaggtggactccagaaaatcaaataaccccattaaaaaaatgggactcgttcctttcgctgctgcggccgcagccatgagtatgctcaggctacagaagaggcttgcctctagtgtcctccgctgcgggaaaaagaaggtctggttggatcccaatgagaccaatgaaatcgccaatgccaactcccgtcagcagatcaggaagctgatcaaggatgggctgatcatccgcaagcctgtgactgtccattcccgggctcgttgccagaaaaacaccctggcccgacggaagggcaggcatatgggcatagggaagaggaagggtactgccaatgctcggatgcctgagaaggtgacctggatgagaaggatgaggatcctgcgccggcttctcaggagataccgggaatccaagaagattgaccgccatatgtatcacagcctgtacctgaaggtcaaagggaatgtgttcaaaaacaagcgcatcctcatggagcacatccacaagctgaaggcagacaaggcccgcaagaagctcctggctgaccaggctgaggctcgcaggtctaagaccaaggaagcacgaaagcgccgggaggagcgcctccaggccaagaaggaagagatcatcaagactctgtccaaggaggaggagaccaagaaataaagcttccctcgtgtctgtacatagcggcctggctgtggcctcatgtggatcagtctttaaaataaaacaagcctttgtctgttaaaaaaaaaaaaaatgggactcagagctaaacaaagaattctcacctgaggaataccgaatggctgagaagcacctga

SEQ ID NO: 33378 - DNA, 1150 bp, Mus musculus
cgcggccacccgcagctgcggaagccccagaggggagcgacggcgaggatggcggccggcgtgacttcgtggaggcaccgctgcccaaggtgaacaggtggaagaggcacgcgccgccgccggccggggtgaacagacagccgccgccagaaccttctgctccagccaaggtgggaggggaagcaaggttggtgattttggagatgcaatcaactggcatacacttggagagatagcccacaaaagtgtgcagccacagtcccacaagcctcagcctgctcggaagttgccacccaagaaggacatgaaggaacaggagaaaggagatggaagtgatagtaaggagagccccaaaacaaagtcagatgaatcggggaggaaaagaatggggatgaggactgccagcgaggcagacagaagaagaaacggtgcaaacacaagtgggttctattgcaaataggcgtgaagcctgaagtacccagagaaattggcctcctgtcccactcgcccacaggaaccaagacatacacctgctatccgtggggagatgaaaggatctgaacctgccacctacatgcctgtatctgtggccccacccaccccagcctggcaaccagagaccaaagcggagcctgcctggcacgaccaggatgagacatcgagtgtgaagagtgatagggctggtagggcacgggcttccttccgtgactgtggacaggggaggggggtggtcgtggacggggccgtgaatggggtggcactcgaatccactttgactaccagtttgactaccaaattgatggtacagaggggccccgcacccacaggtatatgaacaacatcacttactactttgacaatgccagcagcaatgagatttacagtatgaaccaggagctgctcaaggattatatcaagctccagattgaatattacttcagcatggacaatttagagcaaaacttcttcctgagacggaaaatggatgctgatggcttccttcccatcacccttattgcttcctttcaccgtaaccctaaccactgacatttcactcatctttgggctctaaaggacagcaaggtggtagagatggttgaggagaaagtccgaaggagggaagaacctgaaaagtggccactgcctggcc

SEQ ID NO: 33379 - DNA, 1160 bp, Mus musculus
gaggaggtcagcaacctggagacccttcctaagggcctgtctgccagcctcccagatctggattctgagagctggattgaagtgaagaaaaggtctcggccctcaccagcatgccccaagaagccagagaagcccaggttctcccacccaactgctctgcctcagcagcttccctcccagcagctcatgtctaaggatcaggatgagcaagaagaactagactttctgtttgacgaggagatggagcagatggatgggtggaagaataccttcactgcctggtctgaagaggactctgactatgaaattgatgaccgggatgtcaataagatcctcatcgtcactcaaacaccaccttacatgcgtcgccaccctggaggggaccatacagtcaaccacacttcgcatgccaagatgagtgctgaactggccaaggtcattaatgatggactcttctactatgaacaagacctatggactgagaagtttgagcctgagtattcacagatgaagcaagaagtggagaacttcaagaaagtgaatatgattagtcgggaacagtttgacactctgacccctgaaccccctgtggatcctaaccaggaggttcctcctgggccacctcggttccaacaagttcctactgatgctctggccaacaagctattgtagatgctcccgagccatctaccattgcccgttctctaccaatcactgtcccagagtctccaaatgccaggacttcccacacaccccggacaccccagctcaaagactctagtcaaacaccatgattttaccccgtggtgaaagaaggacgaaccctagatgccaaagtgccttgaaaaagaaagacaaggcacaactcgaatccccccccccccttggaaagtcatgtgggctgggtgatggatcctcgggagcacaggcccaggactgcttctattagctccagtccttcagagggaacacctgcagtcgtcagctatggctgtacccctcagtcactgcccaagttccagcatccttcccatgagcttctcaaggaaaatggcttcacacaacatgttcaccacaagcggaggcgctgccttaatgagcagaagcactttggcactggccagtctcacgagataaacaccctcttctgcttttggtcc

SEQ ID NO: 33380 - DNA, 1105 bp, Mus musculus
gacagacagacagacagacagacagacagacacatagcgtacactcaaagacagacagacagacagacagacagacacacacacacaatataaaaaataataaacccaaaggaagtcagttaagtataccaattaaggaggcactatggttattcaaagttacccaagataacaatctaccaaatgaagatatcatggtagaggatcatgagacacatattagttcttgaggactccaaaagagatgggtcaaccatgctattccttgtcagatggaaaggtatgcatctttgataatattgaggcacatacaacatagtcaaagctgcctattccatttgcacaatgtacaattgttccatatgccagaaaagtaggcagacagacttattcatggatgtccactaatgcccttttttatatagagtggtatagaaattttatatttcagttttaatatttcacagtcatgggcttgaatgagatttggagaaaattacattgcaacagatcttctgaacattgttatacattgttcatttctacagaaagtcacactccctgtgccttgcctgtgaatacaatacaagattaggtagaaaatgggtacagtataatcacgaaaagaatgcagcactgcagcatataatagctgcagtagaggaaaggaagagtctaggggagtcccctaatgccagtgggctgagcactgcaggagagggttcctccgcccacgcatagtgtgtcttagacaggttgcttttcaaatgtgtcaaatgatggtgctacagctcattcctttactgaaaactgtctagtgctttccctaaatggaactcaacatcttgactattttcagcaatgccgtttacatgcctccgtcctactgttattctcccgtaacagaagtcccactgtacattttcagaatcttcagaatttgcagcctcacctgaggctttctgacattcattgttccttgttctgtgacacttattgcccacatattcatacacttgtcttgctcatttccttcactggagttcagatttcttccaacgaaagttttctgtctctaccttgtccaaaataaatcccgatttcc

SEQ ID NO: 33381 - DNA, 1105 bp, Mus musculus; identical to SEQ ID NO: 33380

SEQ ID NO: 33382 - DNA, 1735 bp, Mus musculus
actcacatacattgtcatagaaaaacatatcataccccactcgtatagagcataaaacatatcacactaactcgtatagagcataatcacatacataactacacactcatttgtgtagcttaaacgcttacacacacacacaccctacttccctttatcccttaccatacaatactacttagcctataacatcatagtgtatctagatatgttttgttttctcttttttttaaatgtcatgttgagaatgataactcttcctttacttagcttcagagctaaaagagtaatatatcatcatttgcattcatgagaaataaatactgtaaacataaatataaataggtgtggcaccattctttatttctgaaaaatataaatataaagggagttgactgtctaaaagcttccagagcattccatgctttacctagtacaaaggatgaagagtaagatgagagaaatatctctttgctcaagaaagattcttgaaagatttgtatttgtctctaaaataaatatgaagtgatgaaacctttttaagcagggggtaaatttactcttctgtggctgcttttctttgagcaattagttcaaggaatctttggcattagtttgtgggacaccctgaaaaggaagcctcaggtgttccagtatgtggactcttgcataggaccttgtcactgttttcctttctctcgtgttgtgggtgacctcatcatcttaccaggaccccaatgttgttttgtcatgctggaaggaacacattgctcctgcatgctggccatctgggatcctcttcccatccatccacttcacttctgtgtctaccaataaaaagttcgattttaaaccctttgagaaatttgctgggattcaatgaaatctgaagtcttacagctcccaaataaaaagtaaaataaaagtagatgtctttttctttcaggcgtgtaccagatgtctgtttcagaagcagctgtccctgggggaggaagtaggaagggtgaaggctgaagacccagacattggagaaaatggcttagtcacatacaatatcattgatggagccggcatagaactgtttgaaatcaaaacagactatgaaacactatgttgctgctgctgctgctgctgccgccgcctagagctcctcatttagccccctgagacaagcctgtggttagttgttgttagccttgctacacagacaggaaaccatagctaggaattagacactgcctgagttttgagagcttgctgttagcacaataccaattccgaaacaggccttcctcactctcagggaagcttcttacccgccaggctttcctgcccttaggccttgtgtcagtggaactcttccgggtcacagtaattctctgttaataaaagtttcccaccgtgtgggcactcaatgttagggcaggaaggggatgcctttggtttcatcagtgttggtgtgaaagacccacaacgtgaggactcccccacgttctgactcaagagaggcgacaccccaaaatcaaccacaagaaacggtcttgctgcaaattgcaagaggatttttttattcaagagcgctctcgggcccatggtcatacaccaagcaggggtagaggaccatggcgccccaagtagctggattagggggtatttaaaggaagaaaccacgacttaaggatgtgggaagggcattgttggaaaataccaaaaataccagttaagagtcacaagg

SEQ ID NO: 33383 - DNA, 1735 bp, Mus musculus; identical to SEQ ID NO: 33382

SEQ ID NO: 33384 - DNA, 1205 bp, Mus musculus
ttttctctttccttttgaactactgataccaaaggctaggagaggctgaccttcttaatggggacactggagggcagcaatgggtactttcaaaatgctcaatcccaagaggtttcccgagtcccctggcagtgctttgcttgtggctgatggccagcagcctcaggggaatgcagaaagctgtgtttgctgagctctgtcctctctttcctgtgctgggcagtggggtggggaggtcatggaagtggcaggttggctgttttacaaacaagttcaagttctcttgtctgttggtccccatagcagttgggctgtcagctgctcaaactgttttgttctctaaccacatttgaaaacgatgtgaggaagaataaacaaccgtgaatgtggagtcaaggagacctgagggtgaagcccagcttggctgcctgcctgctgtggaccttggacaaattgcatggcaattctgggtccctggtctcctcttctgacacaccatgacctggtgtaatgtgggacgcccgacttgtctgcaagtaagactccacaacaggatccttctgcaacacgtttattgggagagcatggactgagtaggcgaaagaccccgagccccagaaatggcgctgcttatataggcctacgagtgacgtgtccatacctgattggttatgctaccagtacctcattaatatgcatcgggccacgcagtgactcggcaaaaaacttttttttttctttttttttttccattttttattaggtatttagctcatttacatttccaatgctataccaaaagtcccccatacccacccacccccactcccctacctacccactccccctttttggccctggcgttcccctgtactggggcatataaagtttgcaagtccaatgggcctctctttccagtgatggccgactaggccatcttttgatacatatgcagctagagtcaagagctccggggtactggttagttcataatgttgttccacctatagggttgcagatccctttagctccttggcaaaaaaactcttatgcacatgcgtacattggttgtttatccataatcatgggtggtggccagtggtagccagcgccatcttataatggtgtttgcggcttcccacagtgtaaggagttgcatctgtatgaaatcatctccatttggttattcactggggagtcaggtt

SEQ ID NO: 33385 - DNA, 1205 bp, Mus musculus; identical to SEQ ID NO: 33384

SEQ ID NO: 33386 - DNA, 1149 bp, Mus musculus
gtaaaaatcacattagtaattctcagcaggattaacctaggattatagaaactaattaaatgagtcctctctctgtgaccctaaaaggacacttgacattaccttgcaaagttccatctgtctagggtggtaggctcatgcttagtaagtactaggaggcatgggtgagtttgctgtatccaattgcttttctttcatcatgacttcaaaaatatcccattctttctgataaatggcattaatttactgaaggaaaaaaaagagtgttttaatggatggatttattgaaacaacagtgagataattatgaagctttctaaaagtaaatgggtaagacatcctttgtaatatacacaggcatataaaagaggcatttaaatatgtcccatggtttatttagactgccctgagccatatggggtggtccagacagaacattaagaaaaagacctctgaaatagcccacccacactctggagaaaaccaggcttctggtaattggaagcagcttgactctgcattcctcattcctctggttgagctaaagtgatgcttgtggatctgggtggctaacaccatggattataaatctctgacagaagatctggtactgggttctggtgacttcaggcactcccttccctggttgtagtgatcagtttgcaagacttcatcaagcctttttttagggatgaagcccaacttcagacaagactttctctcactatctatcagaaaacagactgacagtagctctgtgagaaacctcaggtactagggagaatatacagagcagtatcttttatttcttccacctctgactctttaaagagcactcttagattgcttaagatatatttcccttcatgaatctgaggattttgtttccatagatatgacatgaatggaaaactatatttaatgcaggagacaacaatcctatgaaaattaattttcacttcctgatattttctttctctctccagagagtaggggggtttgaggctcacttgatctagttttaaatgttagccatcagctcctatatttgtttccccttttctaatgaaatgaaaaaacaaaacaaaacaaaacaagtccaaaaaaaaaaaaaaacacccttaatagttgagcatctttaccttgtca

SEQ ID NO: 33387 - DNA, 1131 bp, Mus musculus
gtatattctgtacccaagaaaaagtgaatccaaacttaagtcttgcaccaaatgcagaaatctgagctagagaattacgtttcaaccattcttgtaatacttccttgtcgcagaccctctgggtccctggtctgcgaggaacgggattacttaagcagatgggcaaaagagtcggatgaaatgacaatcagacacacgcaagagaggtgttgaatctgaatgtaatgttctggttgagcttcagacttatattacaatgaattatcagaggatacaaatcacaaaagacaagatacactgaaattcaccagttacagcagaaaggaatttgcagggactaattaaatgtttacattagggataacaagccctgcctaggatcagcctaatgccaggcaagaatttcacactttaaggttaaaagcatcagggggttgttaactcttgacaggccttaagagtaatgtgttatcacagagctctaaattcttaggtctagtaaaacttatcctgtctggtgagttcccccttatcagggtagtatatcaacttatacttgacatggaatgtagcctgtagtaaaagatttctatctcagtgagacttttagtctctttctgcagacagctgagttaatggcaagtgctttatttttttatggtagagcttaattagttactgaataggttaaactccttgctgctatcaggaatctaagaacactgggaaaaggctttagctatgttagaattcaatcttaaaagtcatttactataaggtaatgcttaatagagtgcacgtgaatctatacactagactaatgtggtagaaatttgaatattatgggttagggaaagaaatgccataactctgggaggaaaatttccatggaactcttatcctcgtgaaacagcttccaggcttttcgcctgacaaaccgatccaaactggagagttgactttcgccagacatctaggaggaaagtcctagaaattcatttctcatgagcagctttttggcatttctgcctcacaagctgactccaccagagtgccctgacacttcctctctccctcctctacgattttcacagacaaggcataattcctgtgatttgaattgaaagaggg

SEQ ID NO: 33388 - DNA, 1179 bp, Mus musculus
gagcataatcacatacataactacacactcatttgtgtagcttaaacgcttacacacacacacaccctacttccctttatcccttaccatacaatactacttagcctataacatcatagtgtatctagatatgttttgttttctcttttttttaaatgtcatgttgagaatgataactcttcctttacttagcttcagagctaaaagagtaatatatcatcatttgcattcatgagaaataaatactgtaaacataaatataaataggtgtggcaccattctttatttctgaaaaatataaacataaagggagttgactgtctaaaagcttccagagcattccatgctttacctagtacaaaggatgaagagtaagatgagagaaatatctctttgctcaagaaagattcttgaaagatttgtatttgtctctaaaataaatatgaagtgatgaaacctttttaagcagggggtaaatttactcttctgtggctgcttttctttgagcaattagttcaaggaatctttggcattagtttgtgggacaccctgaaaaggaagcctcaggtgttccagcatgtggactcttgcataggaccttgtcactgttttcctttctctcgtgttgtgggtgacctcatcatcttaccaggaccccaatgttgttttgtcatcctggaaggaacacattgctcctgcatgctggccatctgggatcctcttcccatccatccacttcacttctgcgtctaccaataaaaagttcgattttaaaccctttgagaaatttgctgggattcaatgaaatctgaagtcttacagctgccaaataaaaagtaaaataaaagtagatgtctttttctttcaggcgtgtaccagatgtctgtttcagaagcagctgtccctgggggaggaagtaggaagggtgaaggctgaagacccagacattggagaaaatggcttagtcacatacaatatcattgatggagccggcatagaactgtttgaaatcacaacagactatgaaacactatgttgctgctgctgctgctgctgctgctgctgctgctgctgctgctgctgctgccgccgctgcctagagctcctcatttagccccctgagacaagcctgtggttagttgttgttagccttgctacacagacacgaaaccatagcta

SEQ ID NO: 33389 - DNA, 1164 bp, Mus musculus
gggtgttgtttccctaatttctttctcaaacctggttatcctttgtgtagagaaaggccactgatttgtttgagttaattttatatccagctacttcaccgaagctgtttatcaggtttaggagtcctctggtggaatttttagggtcacttatatatactatcatgtcatctgcaaatagtgatatttttacttcttcctttccaatttgtgaccccttgatctccttttgttgtctaattgctctggctaggacttcaagtactatattaaataggtagggagaaagtgggcagccttgtttagtccctgattttagtgggattgcttccagcttctctccatttactttgatgttggctactggtttgctgtagattgcttttatcatgtttaggtatgggccttgaattcctgatctttccatgacttttatcatgaaggggtgttggattttgtcaaatgctttctcagcatctaacaagatgatcatgtgggttttgtctttgagtttgtttatatagtggattacgttgatgggtttccgtatattaaaccatccctgcatccctgggatgaaacctatttggtcaggacggatcatcgctctgatgtgttcttggattcggtttgcaaggattttattgagtatttttgcattgatatttataagggaaattgatctaaagttctcttcctttgttggatctttgtgtggtttaggtatcagagtaattgtggcttcatagaatgaattgggtagggtaccttctgttgctattttgtgcaatagtttgagaagagttgggattaggtcttctttgaaggtctgatagaactctgcactaaacccatctggtcctgggcttttttttttttttttttttttcggttggagactattaatgactgcttctatttctttaggggaaatgggagtgtttagatcgttaatctgatcctgatttaactttggtatggtatctgtctaggaagttatccatctcatccaggttttccagtttgttgagtatagccttttgtagtaggatctgatgatgttttggatttcctcaggttctgttgttatgtctccttattcatttctgattttgttaattaggatactgtccctgtgccctctagttattctggctaagggtt

SEQ ID NO: 33390 - DNA, 1205 bp, Mus musculus
tgtagtgtataaagcactgttccctgggaggtgtatgcataagggcacacccctgtcactcagtggggtccagtgaagtttgtcacaaatgcttagtgtgtgtgcctggggggagttttcccaccagaagagagtgaagttctcaatagagagctgtctgctgctgaggagacatctaaaggagggacacccacagcgccctcccccctccccagtgaaaatgttcctgttgtcagctatgactatgtgattggagtggcttcagagggcagggatggggccagcttaactgagcgagtggctgagccacccggaacagactagcagaaatgggttactctcatttgtgacattaaaagaaaaaaagccacaaaactcctttataggatgtcacttattggccatggcagtgttagtctttttttttttttttttttttgtaggtttctcacctcttttccccacaaaaatagcaccgtaactacctaccgtctacgactgaaaacaagaaaacagggtccgagggcctcggtgtcttcccaggaactcacagccaatgtgccgttcagagggttccgaaggcctttctgtaattccgctgctgccttacagtatcagtttgctcggtgagagtaaactggacgagggtccttttgttgctgcacgagcaaacgcgacaggagctggatgagttgcatcaggttaggatgcagtggtcacgaggttactacccatcacttgggatggctgctttgggttttgcaccttagcggtgcttgctgagctttatcttctaaaacccgggagtatagggatctattgcgctcttggtatccgcaacccttccactccctctccagcgacctcctcccactgacgtcatctactcggtctatagttctgttcttacagaataagtcttgttttggaataaggtaatcattttctaaagaatctaattgtattgatttttaaaccttctgagaatgtaagcatcatgttcacatgtagacatgaaaatatttatataattgtacaaataaataactttttagatgttcaaagagtcaggttttttttcttttttttaatggccagagaacaattccctcttcaaaactttccatgaagcacgaggataaagttgtatcttttcatccaggagttgcctgtggcttgcttattctgtctgtatggctcatgtt

SEQ ID NO: 33391 - DNA, 1211 bp, Mus musculus
ctcagggaccacatctgtgacatgggatttgaagctgccatcaagaacagaacagctcccttaaggctgggaccaattgatgtcaacaagttagaaagcactaacctaaagaaagagacggtctctcctgtccagatttccaatcattttgagaccctggggcaccaggggagctacctggccaccctcccactaagaatagacggcatgcactgtaaatcatgtgttttgaatattgaaggaaatataggccaactcccgggggttcaaaatattcacgtgtccttggagaacaaaaccgcccaaatacagtatgacccttcttgtgtcacccccatgttcctgcagacagccatcgaggcactaccacctgggcactttaaagtgtctcttcccgatggagtagaggagaatgagccccaaagtggctcctcccagagacaccaggagcagggcccgggcaggactgcggtgctcaccatcagcggcattacctgtgcctcatctgttcagcctatcgaagacatgctgtcccagaggaaaggtgtgcagcaaacatccatctctttggcagaagggactggagcagttctttacgacccctccatagtcagcttggacgaactccgaacggctgtagaagacatgggatttgaggtgtctgtgaattctggtatgtcattgttatatgtttgaaatatgtcggggtcatctcttgatgtctcatgacaggatttgcgtagttggatagctgggctctgcctcccgtgttgaacgtcatagcaaagcttggtaacctctgctcatgtgttagcaggatagagaaaatggaatttcctcttctatggccggcagcactcaaatggtagactcctctgatttgggtttcttttctagagagaattcagggtccgcattctaaaaacgagcattgtaggactactaaaccaaaggaccagttgttactttcctctgaagatttctctactacacaaaacagaatagcattttggtctgatgaggcacaatggcgcatgcccatatccagcacttaagaggctcagcgaccaccaaaacaaacaaacaactcaaacaaacacacagacagttgatgcaggaggatccatggtcaaggccagtctgggctttgtaacatgaccctgtctcaaggacattgtggcacattgcatgcccgtaatttcataccttac

SEQ ID NO: 33392 - DNA, 1140 bp, Mus musculus
aagaaatatcactttaagaaggcacagttcctggtcaccccccattacaagtccctttccttttaatgcccctttactagagactagatttcaacagacaagtttacaggtgacagtcaaaacacagcacagggtctcagaaagattaagaatacagtcgaaacacagcacagggtctcagaaagattaagaatagaaacccagagaagggatggagtcggtttaaattcaataaattaaaaaatggtagaaaacatttttagtataaaaataagtctgcttatgattataaggaaattataacatttggcttaattttaacctaaattaatgacatgtcatttcaggtatcctgaagcagtttatgttgtatatactggtgacattaatgtcagtggtcaacagatactagatggtgctttcagaaggtttaacatcaagttggctcacccagtgcagtttgttttcttaaggaaacgctaccttgtggaagattcccggtatcctcacttcacattgctaggccaaagtcttggatccattcttctcggctgggaagctctgatgcagcgcgttcctgatgtttacatcgactcaatgggatacgccttcacactccctctctttaagtatgtgggaggttgccgagtcggaagctatgttcactatcccacgatcagcactgacatgctgtctgtggtgaagaatcagaatcctggatttaataatgctgctttcattagcagaaatgctcttctcagcaaagcaaagctcatctattactatttatttgcttttgtttatggccttgttggatcttgcagtgacatagtcatggttaattcttcttggacattaaaccatatcctctcactgtggaaggttgggcattgcactaacattgtctatccaccttgtgatgtgcagacatttctggacatccctttacatgagaagaaggtgaccccagggcatttgctggtttccattggccagttcagacctgaaaagaatcatgctttgcagatcaaagcctttgctaaattgttaaatgagaaagcagctgagttaggccattctcttaaacttgtccttattggagggtgtcgcaacaaagatgatgagtttagagtaaaccaa

SEQ ID NO: 33393 - DNA, 3596 bp, Mus musculus
taatctcacgtagcttttttttttttttcttttttttttttttttttctttttgagacagggtttctctgtgtagccctggctgttctagaactcactctgtagaccaggctggccttgaactcatagagatccgcccgcctctgtctcccaagtgctgggactaaaggcgtgccaccacacccagcttcatgtagctcaatgtacagattttactaactgtttgctctcaaaatctgagcagtacagatctcaaagaaaaaaaattaccagtcaaatttccatatactcatacatcttttaatcttttcctttccttgtcttaatccctgagtgttcctgcctccacctcccagaatacaccagtgtgtgcagtgctggtgatgggacccagggcctcctgcagtctagacaagcactagcactctgccaactgagctacatcctaagccccaaaccctgctttccaaatcacttctgcttgcgagaacatgaagtaatatttcctggtttttaatctgttctatgacgctggagtaccatgtagagcctcagactgtgaggaagagcagggatgtgtacactgccaccacaaagtatactgagctgatctcaaagactgccttccaaagggaagggaggtgctgaaagaaacagcaggctatcagctggcactctcaaaatgcattcctaaatttttggattaaattctgtttgaggggtgggtttagagggtttagaggttgaacctagagccatgctcatggtacacgagtgttctaacccctgagctactttacctcaactccaggagtgccgaaataacagcgtgggtgacccttttaagtacacctattaattttcttaaaaggaagaagaaacttcaaacaggcatctctaatcctacacctaaagtatcagtcaggagatggggtggactcatttcttcatgggtgtgtacagatatgttaaagtcaaaacaggcagccatctttcccataactaggtttgtatggaaattggggtttgtatgggtttctcatctcttaacagccccatttaaggctaaagtcagcctcagttcattcaagagaatatcaagctaagttgcttttctgaaactgaccatgtatttataatgtatatacatatatatttctgtgtataaatatatatacataattttaatgaacttttctctttcttctggactgacatatgagccaaagaccgcctaacagaaaacccaaccccagacacaagattcctttttttattgcccagggttgtccaggagactccccaaagcatagagcctattgcttttgcccttggttacccctagcagtggaagataagtcccgaatgctgaagacacaatgtactttagaaagaggccaaagacccctgagctggaactgacctgaaagtgcacacagagagagagagagctgttgctgccccaggactagctttcatggtatgaaggtgccaggcgagcttccaaaggggaagggcaaccaatagtccgacccagctatcccacctataaaccacatggaaaaccagcatggcacgcacacttgacagtaaccaacagctcttaaattggacacacgacctgctcaactaggagaacctagctaactattccgcactagagaacagccactgtttactaaaccagcataattcctaacaacaatctataaacatttgtctagactcttaaactatacagttcttcaggtatagcctacaaactaatgtcaacttacacattttctctctttaaatgaatatgcatttcactgaggactctttcctagacccctggagatctcactgtgagtgaggcagatacagtcttaactcgtgatatagaggtctgttggctgtttaccaagtaacttagcactataaaaacaatttttaaaactttttttttacaatagtaaccactaatagtaaaggttttctgcactcccattattacagatagatgtgattacaagtctgtagtttcttagtagctgaaaatcagtataaatttcacctggtcttattctgcgtaactggcaggtgtgtgggagctgaggctgtgactctaagaagctgtaacgtgagcagatgggactctaaaggcattcaccattctgtacatacatagttccttctagttaaatgaattacccacactgtttgacattggtgttagagcatacaaaagaggcacactgtctcttccagctggttggttggtttgattgttggttgtttttgctttgtttggatctccctagcttcattatctattcccaattacattgttaattcactacagtggaaactcagcaaaccatcagctggggttagagataattcagtctacaaagatttcagagactggaggtggacgggaccttccacgttctctattttgttttcaactttacagaccaaaacaatttaaagaactgagttgacttcttcattgtcacaaaactggttaatgacagaatcaggattctggccttgtattctgactcttggcccactctgttaaggccagtctgcggtaaaatttgtctgtagcccacacagcctacacaaagtaataggactttaaagtaattctagaaattggaatgaacatagattgggagtgtggtaaaagaaacgattctcaatttcttaaaaaagcactttttcattaactttccaacgttattttaatgggttagaagcatatgactgatttacagcattcctgatcatgttttacagatgtttactttttactagatttcaggtaggtactgtgtgaaatggtgagactcgtttttatctgtttctgtgagacttctcagtggttgttaagtccactacaactgtgattttccccctcggtggtccaagcattcagttttgagtccacaacagcagaggttcaaattcctgtttacattgataacacaactgtgaagtatccgttacctagtctttgtataatatatttatatctcattgtgatgtagaactgttgatacaaaatcgtatctaaatgtgtcaggtggtttcgttcattcaattaaaatgtttttacatcatctttccctttcttccttaccttcccatctttctacctctcgagttcatggtttcttttccttgaatgattattgctacatatgtatgcaaataaatgtatgaatgcaacctgctggctccctttggtgttgcttgtatgtatttgcttttagggatggtgatggatgaccagttggagggttcatccctgaggagagctaattctctctcagcactcattcattccctgcagctcttcatctaagacagtggttctcaactactttagggtcacatatcaggtatttacattacaattcataacagcaaattatagttatgaaataattttatgattgggggtcaccagaacatgaggaactaaactttagaaccactgatggagggttggaccatatccaatttcttcaacatatcaactcacagtgtggttattgtttaggtcttatttgggcatattgttgatactttgtgagtttagattcc

SEQ ID NO: 33394 - DNA, 1234 bp, Mus musculus
gtatctttgtaccacatgaatggcatgcccacagaagccagaagagagtgtggaattttcccgagactggagtgaacagtttgagctgctatgtgggggctgagattcaagcctgggtccttccccccaggcattttcaatgttaagacatcttatggttaatagctagaggacttggaattaagaaatcagactctggtactcaagtgtccacataatacagattgtaacaacaaatacacttctagggacttggggtacctctcccttcctaaagacagtctgtctggcacatgggtccctcatagaagtacgttatgagaaactgcaaaagtgtaagacaaatttgaacatgctttggaataactttgtgggtttttttcagtatgaaaaagatgcaacatgataaaaattccacacttaaagagctaaagttcctgacaccagtgagacgctcacggcgcattcaagacaagacttcacgactgccagccatgttaaaagaccacgacccttctgtgtcttccctggagcagttgtctgagttgggaggggatgcctttgtctgccgccctaatgcagcactgtgccctctgttctttgagaccgacgtagcggaagaggaataggagtcccgagtcctgagcagttatggttgtgttactcctgtggccctgcatgtgtacaactttatcgtaggtctgaagttgtccgcatgcctaagtatggtacaggtaaactccactagcttgtttgttgtgtttttaaaatataatgttggctgcttcactttactaattacttacagttaaagaaacaaaatcagaaaatgtagtctatataaatttatatttttacgttgactttgttcctaatacgtttataataaatatatatgtataatgttccaatgacatttcattgattgacttatttgatgatggaattgactttaggaccctactgtggggctatagttagctgcctatggcatttatttcaacaaatatgttctggggtctcaggatgtgcccccagaagagtgcttgcctaatgtgcaaggctctgaattcagtccttagcaccacaagaaaaactgctttgtaaaatgtcatttaaccacagtaaccaaatttaaacttagtttttgaagtatattgctaagtttgtattacttttagttgtgataaaatatacctgacagaaacaaatgagagttatttttacctagttt

SEQ ID NO: 33395 - DNA, 1190 bp, Mus musculus
ggctgtgtctgaagacatgtcctgacttgtcaagcctggtcctgctatatcctgaggattcaacaagcccgctccaacggcgtcatccatccagttgggagagctttgttcgattttgaaatttctcgccggctgccaagtctctggattctgggacggccccgcccctcgcctgggccccgcccctccgcgctcattggtccgttcaatccacgccggcgccgaggcgcgctcattaagcgatggcagagtccaggaaacgcttccttggcagggctgcgaggaatcccttgccggtgacccgggacctgcagctgcccccgaccaggcgagaccagccggccttccgaggtgagcgatggcacggggcctcggccgctaactctctctgagagcccaggccgctgccgagggtagcgcgtggctcggctcctgccggggccagcggtttatcttcggggtctgagggcgggggcggggctgcccggacccccgactgcgcctgcgcgcgcgctcgctagctcccgggttctcctatctctgtgcttggaacgtggaggtgaggctgggactgtttgcatgatgtcctggacgttttggaaaaatggagttgaatggtctgcagcaagaatgtggaaaacttatgtaagttggtcagaatttggcgactggtatcagatctctctacacagttgtttctggaaccctatattgaaatgtgttccctgcaattttcactcgattaggacatttgatgctatttatttatttatttatttatttgggaggatgaacctcagagctttgtatacgctaggcaagtattctatcattgagcacaagctagagtcctgagaggagggaacctaaactgagaagatgtttccacaagatcaggcaggctgtaggccagcctgtagggcatcttcttaattagagattgatgggagagggagggccccgcccattgtgggcggtgccacccctgggctagtggtcttgagtgctatttaaaaacaaaaacaaacaaaccaggcagagcaagccttgtagctacacttcttcatggcaccaagttcctgccctaactgcttttgatgatgagctaactgtactatggagatattagtaaatgaacccattcttccccaagttgcctttggtgagagtgttttcatcacagtaatagt

SEQ ID NO: 33396 - DNA, 2588 bp, Mus musculus
tttgctgcatgtgctgactgtgtgtccctctgtgtactaaggtaatcgtgctcccttgctttgctttcttgtttgttcattttgggtttgctttgttttgttttccactgcgaattgccactaggtttcagaaagggggtccttaacatccgaagagtttgccaagcttgtgggaatgtctgtccttctggctaaagaaaggtaaggaagcccttgcccctcgccgtggtgtgtgatgtagcccctcgccatggtgtgtgatatgtttctgagtgagcagatcactgtgggctttttctttttgttctcaggctgctccttgcagagaagatgggccacctttgccgagacgactccgtggaaggcttgcggttttatccaaatttatttatgacacagaactaagaattttgtacctgaaatgctttatgtcaataagcttgcattttgccaaggtctcacgacactgagctaagagataaacccaaataaaccaagaatgtgttagaacttctcagtataatataaaactcttcatctctcccaaaatatggtctcagaaacttacttagggtatatacaggaaaatacagaaaaatgaatatgaatatgcatgtaaagtcatgctatactgtgtagaactcctgggatataacttgaaacatggtggatattaatttgatcctgagttcaggtccttggaggaagaagatgtgaagttgcatgtttggatagatcaggtaatcattttgccatgactaaacctcatcaaattgtaaatgttttcctccacatctaatgtgcccatccttggaggcacacatgaaggaagcaacagctacactgtagtttaagaatcaacagcactgaaatcaaactgcagaaagccgtaccaggctcttccttgggggcgttggaagcagacttaggcatgcctctaccagatcaaataaaatacccttggaaaaggagagggctaggtccagcttacgtggagagcactcgattgtgatgcagaggccttgggcttcagacctaccacccacacaccggggaaggagggagcaaggacctgttatgcatttacacctcaggtcctgtttagtttctaagtgatagtttcatgagtggcattctttaaagcctgcagcagtatcattttgtttaagaaatgtggattttgaaatggaattaaagagctgtatagacacaccccgagttgtaatcacaggtcgggcagtcggaaaggtctggttctggaagggcatgaagggcgtaggaccttaggaactcttctgcatggaagctaagggtgtgaaataggaaacagaaaggctaacagatctcctttctcgtctcccaagaagtctcagcctcaaccagacgcatattcctatcataggccagcatgtttctttcttctacaccctacatgttaacggtcgtgtagagaaagcacctgacgataagtattgctgacaatagaacctggctagtaccacctccagattgctggagctttcagtaggttgcctgacttcatatgtatagcatggtgacgttacctcaaactcagggagcccataggccagaaggtgcttttcggaggctgagctgaggtggaagggtggtgatagcgtggccttggagccacagggagggatgcgcaggcacactatctgggagtttgaggacactgtctggatgaggtggaggctactgcagatgccctgtggagaagtgccagtgtcctcagctgcaagccagggagccctaccctgacactttcctggacagtgatggcctttgcctctgtcctccagtatctcgagcccgctgtggccaaggccttttgtgtgggttttccagtctgtcactggttgtggtgaccttaggtcttccctaatcacctcattgtttatctcagggttacttgagggttaattcagtgttggctacccaaatcttctaaggattgggtagaccagtgtcagtttattagtgtgtctcggctctctgtgggatacacgtagtctatcacatggccctgctgcacacacacacacacacacacacacacacacacacacgcaagcacgcacattcctcttgtcaaactaaggatcttaaaatccacaggtcactgataatctgttttagcacttggattggttgtaaggtttttgggttgtagagtccaatggatctagcttgtggcttcaccaccacaaacatactgcatctgtttattcagtgtgacagcagattaacaaaaaaagagtctgatgaagtggcataaacatactttggaaaagtcacatggatttaagaaagaaagaaagaaagaaagaacattgtttgggtttgttgctgttgttggtttgcccttctggcgcttcttttcttgcccagtgtgccgctgggtcctttggtactggctgtgcttaaatacaaaccaatcaagccccgggcggacaaatgccctgctcttggtgctcatcactgtaatttttttcctgactttgctctcaggagcgtgagtatgtaaatatctgataatgaatagtttagtcactgtcaagaaaatt

SEQ ID NO: 33397 - DNA, 1131 bp, Mus musculus
gttccactctgggagaaaagtgcctttctgaaggtagaatggcctgtctttcacattgatttaaataggacagccaaggcagcagaaggcacctttcaagtgggtgtttttaccacccaaccgctctgcctgtttcccgtggacaagccagacatgctggtggatgttattttcactgaccgtcttccggaggcaagagcaagtttgggacagccgctggagatcagagccagcaaaaggacaaaactcactcaaggtcagtgggtcgagtttggctgtgcaccggtaggggtggaagcctacgttacagtcatgctgaggctgttgggtcaagactcagtcattgcttctacgggacctattgacctggctcaaaaattcggatacaaattgatgatggcaccggaagtcacgtgtgagtctgtgctggaggtgatggtactgccacctccttgtgtcttcgtccaaggagtcctggctgtttacaaagaagcccccaaacgcccggaggagaggactttccaggtggctgaaaacagactgcccctgggagagaggagaacggtgttcaactgcactttatttgatgtagggaagaacaaatactgttttaactttggaattgtgaagaaaggccatttttctgcaaaggaatgcatgctaattcagagaaatataggttggtattgagatttcctagcctttaaaagatcaaatcagtgccttcatgtaatcaaaagtgataggactaggtgagtcacggtgttcatgattcattcatcctttaggcgataccaactagtgttattgtctttttctgaaaaagtaagagcatattcatatttcagtttgtgtgggagattggtttgggaatccagagataccaacattgcatagtattcatataaaacagacataccccttcctgcaaaccccaagttatttctaggttacttgtaaaccattaccatgtaattctgtgtaagtagttgttataccacaccatttccagaacaataacaagaagagagtctggacatgttcagtacaaatgtgatatttttcctgactgctttctatccatagctagttgagtctatggatataaattgtgggctaggttggaggccg

SEQ ID NO: 33398 - DNA, 1561 bp, Mus musculus
ggtatttttattaaattagggtagtatgtatgtagcaaccaaaaaactggaccccacatttttcttctttggctgtggggtcttctcgccatagagatcaggcacattgtctgtactgctccaagaccagggggatggtagtgggcgctgttcccactctgcctgtaaggctgaaggaggtaggttgaccttaccacagtgtcaggagtacaagggtcaggaaagcaaagtatttccaaaagcggggtggggagggacacccgtcagcattcctggagaaaattcggcattcatgagaaaactgtctttctactccagtgctctcagtgaccaatggctactgagtgctgcttcatctgaactgatctgaattgaggcaaatgtagggttggcttcctgcaggaagactgttcaaagccaagctctttcccttctaggtgcctgggtctagtgcacattagtcttgttggcagcgtgtctcctcagtctggctattgtgatctttcccatagaaagagtcaggaacgaggggaagggaaagatagaggcctaaggtgaaattttaaaaaactcaatctgttggtttgatttgtggtttcatgtttgggtgcaattgttcttgagacaaaagtagaactttgaaatactttatttaaagaaacgagtgctctgtcattattaaataaacctaatgtaagtctatgaagagtttcacttaaatacatttatataaagagccaatgttaaagagttatggataataattcttcaaggtggtggttgtattggaacaagtgttctttctgtcagctagattcctggtataaaataatttgactgcagggaagttgacagaaagcattacttctgtatgctacaaccctttaaaattgtgctctgcctccacccatgtggtggtttgaatgaaaatgtggccatagtctcatatttggatgtttaatcactagggaatggacctgtttgataggattagaaggattggaggcgaggcctattggaggaagtgccatactgtggatggcctttgcctagtctctcaaccccagagttttcatgcctgagtgctccctgctggataatggagtaaccctctgaaactgtaagcaagctcctgattaaatgctttcatttctaagacttgctctggtcgtagtgtctgtacatagcaaaagaatggtgactaagacagcctgtattcatttatttattgtacatgtttggtgaatgtgtgagtgtgtgtgagcgcgcattcacccatgcatgagtgtgtggcagccagaggttgcctgttttcttctaccaattctttaccttatattttcaagtaatttatagaatttgagattattatataattattgttttcccctttcccccttctaaacatttactcccaccttgctctctcattcaaattcatggcctcttttctctttgttgtaacacatacatatacatacatacacacatgcacacatacacatataaatacatataacacacatatacttgcatacacacacacacacactcacaccat

SEQ ID NO: 33399 - DNA, 1218 bp, Mus musculus
aaagtactagttggactttgtgagtttaaaaaaacacacacacatttggaaaggaaaatgtgcagtgacgaaagagtctgggagaagacgggtggaagaacaaaagctataatcagaatacactgtatgcatgcatatggatggatggatggaagtctcaaagtaacaaagaaaaatatatttaaaagtagcaatgtgtagtaagaaagaaaatttaaaattgtgatagcttattcaattatttcttagattttaaagttcagaatgatcctgatagttaaataataattataaatataagatctatataaatagtgttgaaattggaaggtcttagaatataattatcttcctgtggagaaaagcagatgtttaattttaactaatttcttaccaagtatcactatttaatgtgacttaatgacattagctcataattattttatgcttcatctttctccttattattttctcatagcaagaaagtatgagtatcaacagccacaaagccaggccgacagtgtgcagctctcattggaataaaacttcagactgagcaacagaagtgaatgtgacgaagtacgagaaacacgttcctcgcccctctataagctcagcccagttgtgcccctcccccaagcctgcttgtgttgcttcttctgggacttcctgcataagtgcaaaaatgcttagaaagaaaatgcttagtgactggagatggggacttatccttttgaagatcaatgatgactccaggatacagtgaaaaatacaagcacatctttggaagcaagaatcctagagttaatgtctcttcagaatatttctacagcattaaaacatgatatcctagctgttggggtagtttgctcttaggacgtggtctataatgatatttaacaattgtagcagactaatttgtgttgcttccacgattgttcctggctctttgagtcaactttacttcaagacttgtatgacacacaaggaccttctaggctcttcagtgtcatgaaggttatcccatctgctgcctgtgggtactttctgtatcgggtttgtctccctttaattgcatccccaaaagttgttattttgtttcggatcccacatttcccttgcctccatatggttcctgggggccatcctgttagacaaggagacatctctgtcttgctccctgttgctgtggatggttacagcagtgtcttctgctgc

SEQ ID NO: 33400 - DNA, 1110 bp, Mus musculus
gttagacttaatttcaaactcttcgctaaatggttttagtgtaagaagttctgatgcactgagtcatttagtgaaccaaggacatgtaaaacttaagtcattagaacgtccatctaggatttttatttcaagaaattatagttacaatattgttattatagtgaaaacttaaaatttcctattgacattacttttgacttttagctaaactatcattttgtatgagaatctgcactatgttaagagcttggggttttaacctggttgatttttaacttcttttttttaaggaaccttaacttgaaagcagcgtgattggcttccatatcatctttgaatataaattgatattcctagtttcagcgtgtcctcatagagaccaacagaccaggtttattctttcaggaagtttttcaacaccggaagttgtgtgttatctgcacatggactggattgcccactgactcatacaaacatcggaaaaaaggactgaagaaaggcgggtttcaggaaccaactccagcccacttacggcttttgagcagcttgaaagaagataattctagaaatgagtgacgagatcctagtcatttctacatttgtctgtagacattcatcgtctttattaacctgtctgcttggggaatggtatttgagctattgtccatcactgtagcagctagtaatctacttgtggtcagagtttttacctgtgggtacagaaatcacatcagtagtagatggaagagaaaccactcatcaagacagtgatgtcccacacacccgcagaaattgactttcattaaacaatcactaaaagagtgtggtacccaccaacaagtgtcagttgtttctttataatccacactggatcatcgggagttctgtttttctttttctactcaaggcattctcgaacaaattttagcacaggagatctgataatcatatttgggggtgttaaaaacaagaattgagctggtcgtggtggggcacacctttaatcccaacattcaggaggcagagacaggtggatctctgagttcgaggccagcctggtctacagagtgagttccaggacagccgggactacacagagaaaccctgtcg

SEQ ID NO: 33401 - DNA, 1140 bp, Mus musculus
ggtttctctgtgcagtcctggctgtcctggaactcactctgtagaccaggctggccttgaactcagaaatccgcctgcctctgcttcccaagtgctgggattacaggtgtgcgccaccaccgccctctttgtgtctttatatatatcaattagatgtgtagatgtatctgtgcgtatgcgcatgtgagtgcagtactctcagaggccagaagagggcagcagatccccatggagctggagtcatgggctgttaggaagcaaacttctgaaagagcagtatatgctccttaggatctccagccccttttctgttctctctctcttcacctggcggtgccttcctcatagtctgccactagccaactagcttcatctcttgtccatcttgtcagtattttggtccagactccagtgttttggcacttggtctattttttggctacaaacgaatgctgtttctgtgatggtgttctctctgctgcaggcccttgcttcctttgtccttaggagacaggtattactagatgcatttgataccaggcgtcgcctagaacccagctcctttctttgcgttttctgagtatttcagaaaactagttattgacttttcctgggaacattgaggtttctgtgttttccgagtccaagaattaagattggtgctctagacaactgacactattcagaatcagtcaaggtagctgtatggcactgtgactaactagccaagaggtggtggcatgtattactcctttgtcttaaagattttgtcataagcacaccacgtcagaaccagagacaaacatgccccgtcttttccaccatgccagaattaatttccatctcgggcagcagtttcccagatgatcccattttccttggtaatctggctgaggtgaacacgggttccttttttcttatctttttttaaggttgactcatttatgagtaaataaaaataaatttatgtgctctgtgcatagaatcccttacactcttgtacagataagaagatgagtcaaaatccctgaaattcctagtacaggcaggtgtaagcccccagtgcaggtacggggagccaaacccaggtcccctgcgggattagtgttcctaaccctgagccacctctcccatcttagt

SEQ ID NO: 33402 - DNA, 1118 bp, Mus musculus
agaagcaatgctgtgtggaaaaccatcacaatggatacggcattttttaagtccttggacagtagtcttgcagaaacatgttcaggaaaggcaaaaccacaagcagagtaactgtctacttgagtaaggccaaagtcagcctgccaccaggtcactggcaggtcatccccaggaatgatgccatatatggggctcagtgtcattctctgctgttggcagatctggcactcaccaacaactgtagccgagtggcagtccatgttgtccagcccatgtctaatcccctctgccatcatggcccattgggcaatgacaggaatggctggcaaaagagacagacctgtccacagaacagttcatcctgtctacttagttattggactctcctctgctggtcactttgatgagcattttcatgggacacaggtatcttcacatcctttgcccatttgcagaaacctgccaacactccttccccagaagtccttctcaccaatcatacttatttctcgtccctgatcatccagccagtccattggcttcagcccatgaaccagtgaacaactgtattatctccccttgagaatgaaatgcatgtctgtgtgtactgcctgaaattctgcccactgtgtttttttcagggttgcccctgaaacaggttgcagtgctgcaactctccacttctgggtggtgtctgtagaacatgcggaaccattggtgaagcgagccccagtcttctcttccaatcataatgtgtacaccaagaggctataggcacaggcttagcagcagatggcattgtaacaggagtagaaaccataggcatttgagcaacttcttcatgtaacttgattctgccttcaggacctgctctggcctaattatgtatatcccactttcatttgataatggatagctactgtgtacatagtacttgatttggtggatcagagaacacttagctcgtgaagggcagcccaggtcacatgataacttggtggcctgttatcaaacatttagtttccactgaggcccaagagcaggccaagagctgtctgttaaagggagaataattgtctgcagatgatggtagagccttgctgcaaaatcccaaaggt

SEQ ID NO: 33403 - DNA, 1161 bp, Mus musculus
tgaaaatgaagttttggtgtgtgtatgagtactgctcagttcttaggaggaatgaagtttgaaatttgtagtaaaatggacaggcttagacttataacatggaggccaaactcttttagtcgtaggtttccaaaaggccttgggtgttagctgtcccttgccgtattctctccttacccttcccccacccctccctatgtttctactttcccccttatattctagtttccttttcttggtaagacctccacccccaagtgcctttactaggtacctaacctctgtagctatttggattgtagtacaactaaaagcttaaaagctaacatccacatatgagagaaaaagtacatatttgtcttagggggggtctcacctcactcaggattgattgtttctaattccatcagtttgcttgcaaacttaataatctcattgttaacagctgaataatgttccattgtgtagatgcaccacatttttgttatgcattcatcttttgatggacatctaggctgttgccagtttctggctgttatgatgacagtaagaaagtatctctggaggaggatggtcctttgggtatatccctgacttagtcggggttctgttgctatgaaaagactctgtgaccaaggcaactctttaaaaaggaagtatttaatgggctgggttactgtttgagaggcttagtccattgtcatcatggtggcccggaagataggtgttagagcagcaacaggcagaggcagaggcagagaggcagagagacagagagacagagagacagagagacagagagacagagagacagagagacagagagaggggagggggaggagggagagggagggagagtgtgagcctagactagggcttttaaaacttcaaagccgggctggtgagatggctcagtgggtaagagcacccgactgctcttccgaaggtccgaagttcaaatcccagcaaccacatggtggctcacaaccatccgtaacgagatctgacgccctcttctggagtgtctgaagacagctacagtgtacttacatataataaataaataaataaataaatctttaaaaaaaaacaaaaaaaaaaaaacttcaaagccaaccctacatgacacttcctccaacaaagccacacctacttcaacaa

SEQ ID NO: 33404 - DNA, 1243 bp, Mus musculus
catttttggacctgcttaggacacttcacctaatacggcaccctgtcgctctgtggttattaaacaatctggaggccagctttctgtttatttttggatggtttggaggggaaaggctgagtataatgttctttgaattgcttcgtggtcagatctgtcaaatgccagagatgatcccgtaagcaggcttgctttagcagttcactggtgggagaattagctgttacaaatattcatagtgattgatttcttttgtttttcttcttcttgtagaaagaaagatcacagctttcccagcctgggagaaaaactatggaatgcggtgtaccactgactgaccgtaaccaaacgaactgtaccgacagtagtttgaaagccagcagttagcagtttcttcagacttcaacactgtccagcgctttccagagcagactcactgtttacaagaactcttggcctcccgaagttagcaacctcagattttgtttatttaaagaatttctgtgaaagaaaaggaccccagagcccattttccaaaatggccatggacgggtatctgtggatggtcattttgggtttcattattgctttcatcctggcgttttcagtcggtgccaacgatgttgccaattccttcggaaccgcggtgggctctggcgtggtgaccctgagacaggcatgcattctggcttccatatttgaaaccactggctctgtgctgctgggggcgaaggtgggggagaccattcggaaaggcatcattgacgtgaatctctacaacgagaccgtggaaacgctaatggctggggaagtgagcgccatggttggtgagtagcctccctccattggcaccagtgggacgtgtatgcacttgtgtgtacacgcatagcacgtgtgcgcactctctcccttgctcccatggctattcccacaagtgccgtctttacctgttttgaagctggctttgttttttgtgtctaccataccattttcattgactgtactttgtgtatttttttttttttacaagcaaacttctagtctctcaaatttttagccattttaaagtatacttggcacacaggttacccctcgtagaatattgaaatgttgttttagggatatgttaaatttattaaagaatatgcatattctttaatatatcatggtttaaattttttaacctataaccaaccttgcaattttataatttaatctataatttcattataatccattaaaa

SEQ ID NO: 33405 - DNA, 1155 bp, Mus musculus
gatcagtcacttaagtagcaactatgcagtagtacagctttgatgtgtttctagcctacattattcctttaaaaatgttctatagatctgcatttctagaggctagacagatggctcagcgggtaggagctcttgctgttcttgcagatgatgcaagttcagttcccagcatccacatggaactccagtctcagggttctaacgccctcttctggcctacgtgggcactgcatccctgtgaagaaggcactatatcggtttggaagaagtcatggccaaacactgtgcttggggcctcagacatgggcctcccaaacagctttctgtctctgtgtgtgatgtcagctcaggtgaccctagcactctcatgctggccgcacacgtgggcttgctgaacctgcacctgtgtagaaggtgcctgggccggagcagcggctcactgcagcagaacgaacgccacactgcttccccataactgggactcgcatcatgagggttgtgttgctaccagatgctcacctgctgacctccactttactcattgttacacaggaggaccctgttccaaacggtctccaggcactgcctctgttttatgctgctaccatagcaataaatgtcttttccatcatgtacacaggagcgccaggtaagaacccgccatggaatcctaagtgcacaggaaggtattgtaactgaacagcattgactagctgtggagcaagtcctggtattggctaatagtaaaaggcattgttcacagtcattatggtatagtagaataattataataataataataaatgtttttccttgttttaaataccaagaagatacataaattgcaaaaaacaacaggctttcgagttaaattccactcagccattacccactatgttgtcccagcagccagctgacagccttggagtcttagagcttgttctcgagccatgggggtggtcaggaggaatgtccggttgtccaggatgggagaggcgggtcagaagtggtctaccgctgcaagccgcagactcccagggtctggtgatgattgctcctgctttcccatcctggcttaggtgtgggatggggagaaagagatgtgtgtacctgtagtccctgcacttgggcgactgaggccaaaatgttgcttga

SEQ ID NO: 33406 - DNA, 1881 bp, Mus musculus
cttaaacaactaaaagtcggtgtttgtgaaagtctcctctcctctgcgtcgtcctttaaagtagaccttactcctactgccatgtctctgctcctccaggtgggctccgtggtagctgtgggctggatccgctcgcggaaggctgtggactggcgcctcttccggaacatttttgttgcctggttcgtgactgtgcccgtggctggactcttcagtgctgctatcatggctctcctcatgtacatatgtggtctcttttcttccagtcggtagacggctggagggatgttctgacgtggctaagatactcacacctcccacccttgctttccctgacacatgcacacccttccacacgccttccagatggcttcgtgccggccctgcttacccaggccacagctcatcttccagaattaacctacctactgtacatagtagcatacatcgagctgatgctgtgatggcatgatgtggtgcggttacttacagtagatgtgtattgtgtacctagaataggtagcatttatctccagcaaactaagaacgaaagcagaggcattgcctagaccgcaagactctgttaattgtatataatgatttcagtggtggcaagtgtagagtataaaatccttttttaaatacactgtaatataagtgagatacagtatacttaatgcaaacctgggcgagtgcccaggcccttgagtgactgcacaaccctgggacaggtgttcacaagtgctctctctgaagaatgcgctcctgagctgggtctgagttactgtcatgtgtcacaatggcttcaacggtaaactcaaactacttttaaccgtctgcttcctgtacacctttttgattggagaaacttggaaagtaccaaagaaataggggataacgtgccagtgttgcatcttcccattgcttgtcccctccccacgggccacgacagtgaacctggtgacaccagcagcagccaggtggctgccacaccaggtactggtaagcttgttcagcggcctttccctgtcaccagcgtggatggcgtacggcagtgggggtgtagagttgtacactacatacatatcaagtcccactcggtgtccctccccgccgtgccctgcaacctgaaaagcagaatccttgttgccagcatcagagccagtgagcgcttgatgggctcggatgctgcaagttcacggttagtgggaggcactggcgaggacactgggcttggggatcttagaggccttttctctgtaggacatccgaggttctcctgtggagccgctgttctcttctgacggtgggagagagtcaggatgactaaaatgttaagggcccgaaaccatggaaatgctgctaatatttttatattgacatacattttcacggtacttcattgtaatttttttcattaatcaagcatattaaatttataataaaaaaaagtgcccctcaaaaacttacttctgacgtctttttctttcagagttctcacaaaaataaaaactatacaattcatccgcttgtagtttcccctacatcttactacaattccgtgtttgtgcagaaccagtacacaaaactagaaagggaaagagtgagccacacctctgtcagcaggcaggaacatagtcatccgtccaccatgatgaccatggtaaggagactacactcctgtgtggagctcacctgcttggctcttcgtttctgctgactcccactgaggacctggtctgttctcaagctgggacactcagtgaaacctttcaaattcctcactgtgccagcaatgtcgcctaacagctggatgggtaatggatgagaaccaccatccaggtgtgcgggtttcagggccactgccaagtctgaaaccct

SEQ ID NO: 33407 - DNA, 1169 bp, Mus musculus
tatggactctgtgtttatgtgtctactctcctcgtacttcctctttattatttttctttttttaagttctggtttgtttgactatttgtattctaaagagagaaataaagaaggcatggagtcaggtggttgggggaatctgggaggagctgggggtggggaaacatgaccgggatatagtgtatgaaaaattattttcaataaaaagagttagcggtagaaacatcaacaaatatttccaaaaaggccatttgtacataaccaaggcacagtaccctcagattctacgttgctctagtactagtgtactagtgtagtttactcaaatctcctcagttgcttggttgtgttcaatagcccttttgttttatccacagtccaactgagactcacaaaaacactttagcattacatctttttgttcttaaacccttttcttcatctttcatgacattgaagattgagcagttgcttcgcagaacgtcccttaatttggatttgctttctcgcccatagacaaattacatgctttgttaagaatactgactcgtgggctggagagatggctcagccgttaaaggctaggttcacaaccaagaatataagaatatcgacttgtgtccctttctgtgaatgacagggcacctgaagttagctttagtcacttggtgaaggcgattttctggctgtgaaggtcctttcctcttcagtaaataatccgcggagtgagtgagtcctgggaaccatcgggatctccttaaccgtttgctggggaatcggttgtcactaaggtggctctaaagcagtggtgtgttccttgcacaattcctgcgacattgatttctcttctaagaagagctctctctccatcctctctctctcttgaattaacttgcatgctctagaagcccgcagtcgcctaacctctagggcctgggttttctctcatcgttccaactgagaagactcacattttaaaattacagttgacctgggacgaagttcccataaagacctgcaagtcatccaccatagagagggtggcagggtctgggagcgacactctggctggcagctcgcgtccgcagagcccgccctgggtctctgctggcgccctgcccgcccgcgccccttcaggggacagtagctacggctttggcacattctcg

SEQ ID NO: 33408 - DNA, 1197 bp, Mus musculus
tgtatgttttcagggctgaccatttggctgttggacagctgattggtatgctcttccctgaggaaggccacctctctgattcctaattttcttcatttgcctatagttctttgtgtaggctagaggccttgtggacttttctctgtctagttggcatatacattggtgctatccttgttcagttttgtaaatgtattcattgggactagagtccacaactctgcattttgattggctatggctttatgtagtgatctccggttgttgcaaagatgaggggtgaagattatacttaacctgtggtataaggacaaatgttaatagactgttgttagggatttagtaaattagtagttacagtttcttctccagtaaccatgacttcactagcactgagtagttaggtttctagtaccagacatgggatggatccctcttgatgagcagatgtcaagtccaaaggagctgttggttaccatcaaggcatgtgtgctactgctgccccctgaagcttatgtcgtggcagtccttgatggggttcctcggcatcagagaaagaagactgttgggtgcccccctcctttggaagcttacacatttccttctgataccatgaaagccagtcctcagggaaggggcattcagggcaggtccagctcggggtcctctgggttctgtttctgaagtccatggtctctttaggagtaggcacttaccttctgcctctgggaagcaacaagggaaacagcagtgtgctgtgtgttttgggagtcaaaagagagagggtctcttttctggaattgaggttttcattgggtggtctgataggttattagaggggatactatcagtccatgtgagatgtgtgtttatacacagaattgtatgtattataaggtggtttttgtgtgtgtgtgtgtgtgtgtgtgtgtgtgtgtgtgtgtgtgtgtgtatagttaatagtatgattctctgtggcttctgcagatatccttagccaccttattttacccaccttgctcttcctcctgtgtacacttttctccctcatccctaaagagcacagctcctttccattttccctgtcagatcacttgtatcctgctatccctctgctcctcacatcttgtgcatttacctccttgctctccataaggagttccctgtattttacactctctctctctctctctctct

SEQ ID NO: 33409 - DNA, 1200 bp, Mus musculus
acgtcttgaatgtcttgtcctattctttcagctggagtgtatggcctagcagcagtgagttggatttgttatagctttgtttcttagcacctaactcagtatccttataaactacaatggccaaatggtgtgtggaggtagttctaaagatgagactcgtgtgacatgattcactgattttttatcagtctgctaagactgccatcaccaagcaccatgggttaggcagctcaggtgccctcttaaaaaggcatcagtcctgatggattagggttctatcctttgacctcatctaacattaattgctttcttttttttttttttaaagatttacttatttatttattatatgtaagtacactgtagctgtcttcagacactccagaagagggagtcagatctcatgatcggatggttgtgagccaccatgtggttgctggaatttgaactcctgaccttcggaagagcagtcgggtgctcttacccactgagccatctcaccagcccccctttaactgctttcttaaagatcttatttccaaatgcagagatcctgggaatgaggtcttcaacatatacattttgaagagaaggcaccatcttgttgactgcctgctgcctgcgaatgccctgctctggttacctttgcattgctgtgtcagaatgcccgacacaagcatctggaaggacaggcttggctgggctcacagtgcagcatggaaggcagtgcatcaccaacaggaaggagcctggggcagctggttacactggcaatgagtaacatagccaggaagcaccaggcaatgaatgctgttgcccagctcacctttcctttgtattcagttcagaccctagactatagggatggtgctgctctcattcattcatatgtatgtgtgtgtgtgtgtgtatatatattcattcactcattcattcctgggtctgcccatgcccaggtgaacctctgtgtatgcaccttcatcgacatgcccaggtatgctttctgtggtgattctgagtccagtaaagttgatgataaaaactaagccaagttattaagatactgacagtatggcagtttgagtttttcaatggctgcagaagcagctacacagggctgtctcagctctgcttagacaatcccactgcccggttgcttctaaagatttggacaaaggaccacacaaagctgggactcag

SEQ ID NO: 33410 - DNA, 1105 bp, Mus musculus
aattccttatgagtaaaagaagtatttttacatttctaagcataaagtctaaagagaaaaaagtctggaaacaagcagcttacataagagcaaattagtttctgagtatatgaaaagagcttcacttgtagaataacaggaatgcatgctaaacagtaggaacatgcaagtttttagagtttaaacactatagattgaaaattgtgcacactcagagtgaaatacaagggagtgtttatactttcttagtggcattggatatgacaccatgacttttagaaaactttgcctatacatttcagccaatcaaactgaaactgtcattacactacttaccagtttactttcaggagtttctcccctccccccatgatgctcatccaaaataagaaaactataaccaggatgtctcggttaaggtttctcttgttgggataaagtattatgcaaaaacaagttgggggaagaaaaggtttatttagcttacaattatacatcacagtccatcattgaagcaggtcagggcaggaactcaagcagaagccatggaggagtagaggagtactgcctgctggcttgctcagcctgctttccctgcagcacctaggaatcagctgctcagggtggtactacacgcttcaatcgttaatcaagacaatgtggttcatacttgcctataaaccagtcttaggaaagcattttctcaattagactcgctcccaagatatgtctagttttgtgtcaaattgagaaaaaaccaaccattgagtatttaacaatagggaaatggtcatggagatgaccattcatcaattcagtagcctataatcagttagaaaaataagaatatgaagtttactagaattaaacagtgaaaaacaaaatggagactacatggtctatagctgtgacttccatctagttgtggaagggtagaccatgacagtagctattactagagatgatatttgtaggtcactttctctcctgcttttcctcagtatccatgttttgatgatgaacttactacctcgtaagagaggtaatttcttagaaacaaaaaggggtgtgtgagagattgaactagcccttctatcacaagaga

SEQ ID NO: 33411 - DNA, 1166 bp, Mus musculus
acagccagaggcgcgtgtctgatgattccagatccgttgaggttgttactcagtgctaagcatcacacccagcactgcactctctccttcatgcagcgtatagcacagtaagcagatgtgaggacggattctgaaggctggtggagactccccaagtaaagggataccccacaataatttagtaagcttatatcttgcatgaaggacataaaccgctagatattgtatgtttaagtcattagcatattaagtggaaatgaacagaaattctggtttaatgatctttctctatgagattgatttatttagaatgcatgtgcctggctttgtattaaccatacaggtaaatgtatgtgcctggcttggtattgaacatagactcaggagctttcagtctcattagcgatgagaatggcaaacaatcctaaccacaaaatacacatgggtactagagagaagggaagaatgcagtgggagattgtaacagggcttccttgtctgtctgcattgcgtggctgtgttcagaagatacatagaaaggaagatgttttcaaagtactgatctacaagactgaagagagagtcggtaagactgtaagaagagtgacacggggacttgcctaggaactgtcagggtgagaggaataaaattgaggagctaagttcactctgtctaggggatgactaaggatcatacaggtgaaactgcagacccagaccacaggttgggaagccctcaaatgaaatagcaaggttatactctgattgaggttggttttccttaggtcggatgtttgcctcagttggtaagagtgcttgcctagaatgcacaaagcccttgggtttggtcccacataagatcagatggtgacggcacacacctataactccagaacacaggaggtgtgggccaaggatcagagaactttaagatgaccttgtggaaattcagtagttgataaggcaagatgccagtgaatgagtgtgtgtgtagttgcttcctcaggtagagcctgttgactttaagcctgagcgagtggaaaatccttcctctaaaggctacacaggggaattggggtggggtggggtgggggtggagtacaaactcgcatgagcgcatgcgccagagcactgcacgggcgccacaggtaaaggtgtgtgtgggc

SEQ ID NO: 33412 - DNA, 2482 bp, Mus musculus
ccaggccctgtcctccagacccaaccttcatttcccacttcattccaacaggaggcacttaggggaactgggatggggacgtggagaacaacccaagctccttaaacttaatgttgttgttgttattattcataaagtgaagcaggtaatgtttctccttgtaaaattccctcccctcctccctgtgtgtgcgcgcacacacacacacacacacacacacaccccctctggaaacttttccccaagagtgtttctaggtagacttcattgaaattgtttttccttaatcaagtataatataattcttttttttttaaaatattcccactcagcactcagagacacaaaaatactgtaagtctcacttaacagcagaatctcagaggaaagctgtttgcaatcctactccagcctttggaggactcagagggtcagctaacaatcagaaaggggaggtgtacctcttggtctgtaccacctggtggaccagccataacatgcacactccactcgcctctgtagtatgtacttggaaatgtggactaagggtcttgtgcttgcacctttgactctggtaaccctcagagcaagcccctgtgatttgcctgtcatatcttatccagtctccacgaacgactgtagtgtcagtgacttagaaaacccctggtgcagacggagtcccaagggagatgatggtgtgactcttgtagctgcagaagtgatgcatacctctcgttttcattttgtcttgagatcctgaattcacccccaagaaccagtgtgcactagcccctctcctgtgaggatgagcaaggagagacccaccaccagcatagtagggcacagctggcagtagggcttcaggaggctcacatgttgtctcactagtttgcccgttctcttcctactcgctccagggataggtaaaaaactatatatataattataattatatatatatattatatattccatcattagaagatggaaactattataccagttggtatgtgcagtcaaatatccaaaaggaggacataatgcttaaaaaattacctgtaagcataaattctctcctttatttgtacattttatatagataaatttttaaagtactaattaggcattacatttttttcaaatgcacaggtttgttgggcttttttatagaccttaattggctttctcaattaagtgtgttagctagaaaagcagaattccacactgtcccgctatcaactctgagcatgcgcaaggctgcgtaggacccagtttctctgtatatactgttccggttcccagtcatctctgtagaatgtgcaccgtgctgccctctcccacatcttcagctatgtcattgcttcctggatgggatggggcagggatgggagggagggaagggaggtctatttgggaggagggtgggtcaaggcagaaggagacgctgttgaaatgagggccgtgaattcactttctgttggtttgcagttgtgtttgggtttctttgttttgttttgtttttaaattcaatcaggcagctcccttttctgcaagcctctttgtgactgtagaactattgtagaaaaaaaaatatgttcttttctatattataaaagaaaattatccaacacggtaatattggtacctgtcattttttcacttctgttttaaaaaaatgtatttttagcaagataacttgggtaatcttctaaaaaagaaatttaaaaactcacttgttagtgactttgatgccttttaaaatgagagctttttcatttcattccatctttaaaattttttatctttgttgtagaatattaaaaactattttaagaaagataaaaattctctttaaagagatgtctagagtgtgtgaatagagccccagatgcctctaaaagccgcatgtacaaaccgagtctactcccgtctgtttatatttgctttcctgttttgtaacctctttgtactctgttcctggtgacttgtaagccgaggggaggggcacctagacgccttggtgtttctccatgtcatacgctcctggccaggcagcccccctccctctccttgtatgtaatatcttttccccctttctagcaagtactttcaaaagaactctgtacattttaacataaaaaaaataaattatgttgagccattttggatgtctgtcttgcctgtggaatttttctcccaaatgtttcagactttccaggattcttgatccacgcggagactgcagattcacccttttcatactcaccatagtgtccatttatgccagtgattaaataccaacacatactggggtggtggtcgtctcactgtgtaggcctagctggcctagaacttgctacagaccggggtggcctagaacagatcctcctgccttgagagttccaggtgttggatttttcatttcccccttttctaaagaaaatatagtaacttgaattttctagagaaatctatttgaaaa

SEQ ID NO: 33413 - DNA, 1504 bp, Mus musculus
attgtagagtgaaatcgggcaaagagaataaagacgtgaacaagcagtcatggctgtgcccagtgaaacttctttccaagagcagatgtgaggcaggatgttgagctctggctccatggtctgagtgtcccacccccacccctcagcatctgcagtgttacagaggagggaacaggagcctgcctgtgtgtcttgccagattccctgggggttgagccacacagtgcatgtgtcatgtggcagagctgaccagtgagcttccctgctgctatgttagcttctgtcttttcagggacggtggattgaagagagaaaaggtgaaggacacattcaaggaggagcagcagaagctatatagcaagatgatagtcggaaaccatgaggaccgcagccggtcctgagcctccgtcttgtgctggctgaagccgccacctctaaatcctgaagtgtgagccagctgcagttgttgctgccacagcctctaccgtcatccccgccacccactgctgcatccttccggactctggccctcaggctgttctggactccaggactggagctgcgtcagagctccgtgggctgcctgctgtcctctaaccagaatgcttctggctggggctccctgggacaaaatgcctcttgttcttatagtaagcctctaagaggaatgccattaaagcagttctagctggtgaaaaggtgggccctgttcttgccctgagaggatgttaggtgtttctgtagaaacagccatatgctggtaaagtcggaaaagacactgcagaggccggtgcctaaacagcctccagcttagcgcttgagatgtggcagaaaggactgtctgcaggagtgctcacgtcctccagcgagtggagtcctaagtccctgtgttcctgcttatgaagatcaccagaggagataggaagagccagtgggctcctgggcagttagctagccccaggctgagcctgaatcccccacatgacttgtttaatatgtctcagtttccctgtctgttccatggaattgcggagagagatggtggtgtgcctacctcacagggttgttgtggggattccagtgctagtgcgtgtgaaggaaatgtgtgctgctctcccagggacagcttcagagagcgtggcaggacaaggtcagagctacagctgctgcccaggattttaaaattgtttgtgagtaaataaaactggatggtaaatgaatttagggactttgccttcattcctgagaaatgtatttcttgccggttaacaacctttgtactggaaaatgactggatggctgggtctctgccccactctgaagtgagaagaggctcaggacagggtaggctcatgttgggtgtttttacatctctgttattcctagcatagacacagatttctcctagataagagccatgggaaccaagctgaggttgatgagattgggggaaagggtcctgtcagaggcattctgggttcaagcgtggtggagaacagcgagt

SEQ ID NO: 33414 - DNA, 1609 bp, Mus musculus
aagttagggcattgacatttcatattgtacccttacctttcaaaatgttcatcatcagaaagttggcatgcacggccagcttcactcattgtggaatactggaatgtccgttttcccccacgctgtatctgcttgcctgctgcctttttaccttgatgatagagaagcaacctgtgggctcccagctgtcccttgtcacacatatggaaggaagcacattaatgcttctcttgctttgtgtgactaatggtgtttctgtttccacccccagctctggcagcatgtaaacagccttttgccaagaacccaggtcaccgctgagaaggctgccttaagggagaagaatatcggaggacaccaatgccaggcgtgtttggaacagtgctcagtacaggcagcatgagacgttctgtgccagcctctgtgtgctactggcaaaggctggggctctctgggtaggagggtcctgggtcagccagcatcaggagccccctcaagggagcatgggaccagctatgaactctttacagtgaactcagttttagcttatgaaggaattttaagtaaacgttacttaatttctacatactgacgtttggcagccttgggtgtgaagtgccagcagctacccttgtctactggagtttcaggattcttctggcaccaaggcgaactcttcttggtacttctgacaatacagatctttaggacaaatttacccgctgaatgctttggggcaggaggaaagtaaaaccttggaagcagccacatagctgaacagaaagctgccccttgccgctcgcttgcccggacactcaggactcaggtgctgttccagcctactcaccacagattgtcatctgtgcccgggagacctggcatttctggggtgctcctgtgacccttctgcagttctgcgccagagctctattcaggcagttggatgacatgaactttgagatggagtttgtcacccgtgagggactggctgcctttccaaggcttgtgctatctgaagggaccatctgaaggacgtgtttgtgtgtggaaaagagggcaccagcctgacgtgcgtcctccaccatgttcctgttgctaccttttgatagcttgattgtcaacctcctgggtatctccctgaccgtcctcttcaccctgctgcttgttttcatcatcgtccctgccatctttggagtgtcctttggtatccgaaagctctacatgaaaacactgctaaagatctttgcggtaagttgtacttctgtgatatgtttcctcactgggaagagaaggacattagcagaaagaatggttcttttaccttctgtgtcacagagtggggcttagacactggacattgccacatgcagaacaggtagtaggacataaggctgcttatgggctcatttttcctctctcactgtaatctgaggtagagtcttacattcatgcaaaaagaatgcacagagcccgggcagtggtggcacacgcctttaatcccagcacttgggaggcagaggcaggaggatttgagttcaaggccagcctgttctacaaagtgagttccaggacagccagggctacacagagaaaccctgtctcaaggaaa

SEQ ID NO: 33415 - DNA, 1230 bp, Mus musculus
gtcttgggttctataagagcaggctgagcaagccagagcaagcaagccagtaaagaacatccctccatggcctctgcatcagctcctgctccctgacctgcttgagttccagtcccaacttttttttagtgataaacagcaatgtggaagtgtaagccgaataaaccctttcctccccaactgcttcttggtcacgatgtttgtgcaggaatagaaaccctgactaagacagtcagttgcgccatttctttgaggaagactggttgaaatttatcatctctaaataagggggaatttaaaatacaaaggcatggctgtcaagagatttttccactttgtttcacaatacttctttctttagggttaaaaacgtaccactaaaatgatgactggcgttttcatcaaacagtggtgccatgcctgggtttcatccccgaaccaccttttcttctctttcctcaaggaaatacaatgaggcttacctgaacacttggactataagcataaaaacatgagactgtgctaataggaaaggattctgacccacaacttaagacggctgaaaggacgtttcttgggttgggaacttggatatgagaggaagtttgaagcctctcgggggtaaaacttggtgtccaagtgatcccagtccaaatgatgttttaatcgttccttgttttctctggacctataattgtcttcaaacataatttttaacaatctcactgcttctcagaaatcttggctgggtatcagttgcttccagaagaggaaggagttcgtgctttcagcaggtgtcctctgtcatatgaaacagaaggttagagacatagctggctaagaggaatttacaagggacgtagctgagctcttaaaacactccaagagaggaagtgggcgtcctcttgcaatggccaagggaagctacttatcttgaggaccatccgtggaaggttatatttgaattaggtaggcatttcactattcggttgagtagcagtaagctttacataacaagttgtgtaaaatgccttggcattgggctggagagatggctcagcagttaagagcatcaactgctcttccagaggtcctgagttcaattcccagcaaccacatggtggctcacaaccatctgtaatgggatctgatgcctcttctggtgtgtctgaagagagcaacggtatactcatatacataaaataaataaatctttttttaaaaaatgct

SEQ ID NO: 33416 - DNA, 1190 bp, Mus musculus
gcccaggcgcatgccctaggcatggtaaggctgtggcatttgttggatgagcagttcctgtacatcaggagcctccagagcattgatgctagtggctttagtcaagtcgaacatgccagctgcttttggttacgcttttgttttcctggcagttcccaaaccagacctagattcatacgtgtttctgcgagtgaaagaacgacaagaaaacatactagtagaaccagaagccgatgagcagaggtgagtagcgtgtggcccttccccatggagaatcagctaaacgccatacatacaactgttcatcctttttcagagactacgtgattgacttggaggtgggctcacagcacttgatccgatacaaaaccatcgcacctcttgttgcttctggagcagttcagctaatataaaacaaagcaagcctgaggacatggagtggtcacagacaatattagaaacgccatcttttgtgtctaatagtgaagtcatgttccatacagttcgtcagcaatgtgtggaccacttggacgtagaaaggcgccgatgcagaattcccttcgttgtcacagccttctcctaaattcctgtttaaccagcaccaacagatgggcccgtgctctgaatactcagcaaataaatcaaccgtcaggtgtgtgccttttatttttctactacttactgagctcaggaggggtctcgaagaggcttccctgccctgcccacgacggccagatggactgggcataacttgatgattacagaactcctttagctttcctggtggaagatcataagcagttgtggtctgcttctatacagcgttaatatgtggcctaatgatttggaacctcaaatactaagcttaaaaacaaatgtctcaaatgtcttttttttttttttttttttttttttcctttcttttgagacaggtttctctgtgtagccctggctgttctggaactcactttgtagaccaggctgaccttgaactcagaaatctgcctgcctctgcctcctgagtgctgggattaaaggcgtgtaccacacccagctaaccaatgtctttcattcataaccgaagaaagtcacaactaacaaagccgctcttaaatgtcacgcgtgtggtaggagagtctggggacagttcttagctaggtgtctaatgaagtagattgacccccagcaag

SEQ ID NO: 33417 - DNA, 2119 bp, Mus musculus
aaaactatgtgcccttttctaatattgtgcatccatattagacacatatgtgttctctctaagattgtctatgataaagatgaagtaggggctggagagatgaccggctgcccctccagaggggacttggcgtgtccccatggctggagccctctcctggcctccacgggcattgcatgcaggtgttacacagatagaggcaggggaaacactggtacgtgtacagtaaaggttaaagaaagaggtgaatacacttgccgtcacagtaagtcagtggtgacagaagtagctgcatttgtcagcattgcgtgcggcacgttctgagtgactaatcatcacagacctactaaagtcagtatcagcacagctcatttgtaacacgtcttagagggttggggtaggtcgggtttgttttggtttttggcctctctaaagtgtgctgttcccttcttacaggtcctgcctccagctgggaccttcgtctatccactggccgatggcagagtgtccctacctcctctccagagcgttattctcttgtctctgctgccagagccacggtgccacacctggagtgaccgctcgtcactcagcatccactttgtctcccagttgtgtaggactctgtgatcttttgatttgtttccaagaaaataaaggaagcaattctctttataaattcaaagccatttaaaacacaggcagttggccagcccaagacagagtcgttttcttaccagataccagtgtcactggttctccttgtcccttgggtcagtttcctaggtggctttatgatcccacaagtcatgtcttagctcagtccctcccccagattagtagcaggctttgagggtgtgtgtgcctgtggtccggctgacccgccgcccgagtccccaagctaccagccttgacgtgcttcagatcttcagattggtttctgctgttcaatttcagaggctccttgagagaataatatatgttacttgttttagtgttgcagttattattaaggcagtatttatgcaattccggttgtttctttgaaagcagttctgttaatgtgcattacctcgagatgttggggagatgttgtgtgtgttgcttgttcattccacagataagtaagcacaatgagcagaccctcagccatcagctccacctgccccagctctgcccggtgtggaagaagcaagtgtcctaagcacctaactctagttttgttacaagtataacttaggagaaaaaattggtagaaataatacagtatgttgctaatttgtaacctactttaaactctgatttatagcctcacatacagtattcagggcacagaaatcttttgattgactcaagtaagttttggcttccgtgtaacttcaagttaaagttaatttttttcagctcttctttatctctatactctcttagtatcggaatttcttatgttcttttaggaatttgagagcactgtgtttgggagaagttaggaaacataaggaatgaatgaagcagttgaacttggagatactgtaggtgctaatactggatctaatctttcagatttaatttgttttctgggccttgtagttactcagtaaaccccttagatctgtgtaataatttaattgtataacgctcatttgttcctttaaagcctattctagtctgtctgccttttaaacttgttgcaataatgtcgccaagatataaacacattagtaaaacttttcttaaataaaccctctcttgtcttagtctatgtgatttgataaagggaatgctatggcatcttatttggatgacaatattggaataactgataaagcatatctaagcatttttaatttttttatttagcctgtgcgtgcatgtgcgtgctctgtgtgagtgtgcacatgccatgcatgcacatggaggtcagaatcatatctttccttccaccatgaggacaccagggatcaaacacaaatcaagtttggtggcaggagactttacctggtagcatcttacccacccttacttaatatgaatagatagttttcattagaaaagagttatcagaattactactgtatcttggatcatctgatgacttttaaaaaataaggtagatatt

SEQ ID NO: 33418 - DNA, 3402 bp, Mus musculus
acagcgaaccctctcccttccctccatagccacatccagctaaggccacggccctttagattaggaaggcttttttttttttaagggctgcagcagggccagcaggcacggtgcaaaaggagaggcagaatcctttcactgagcctcgggcacaaaaaacagaaaatgttggccggtttggaaaaacaaaacaaaacggattgtaaagaactgcagacggacagctgctcagctcaacgttgttcgggacatcattaccaattgcttgtggagtctaagcctctacaggtagaagagtctgatcattgccaagccaggctgctttcagtttattattaatccccctctttctgccttagatagaccatcgccaccttcaaaacacacacacacacacacacacacacacacacacacacacacacacacacacacacttctgaaagtagccagggtatcccagtatagaacgggatagctaagggtttgggtgggaggccactgcctactctaccttcagcttttgaactggccacctttgataggaaactgtaggtctcagatggacacttctaccagtccatcgggatacaaggatgccaggcaagggtctgcttttgtatgaaggaggtacgtgggcatgaagagacatgaggcatttcaggctgagaagccaacagctactagttttcaacaatagagtggaagaaatgagcaaaggtagaaatgtcaagcaggtcacaagtcagggtgattgggggaatcctgtgccaacagcctcactttgtaattccatctgtcacatttcaaaagaacagcagcataagacagggataaaagcccacataccctccaaggcttgagtaaaagtccacactcagcatttcaaagactaacgtcgttgactgcccaaggctgccctcttaatacaccgcctatgcatgtgctgtggaaggcaactctgtgcatgtgctgtggaggagatgggcctcatggctgtgcctggctgcccaggaatcagtatagctgtggaaggagacagtatccatagactctgcttttctgcaaggaaagcccttttccttatacatgattgcctataattcagacaaatttaaaatcgctgcctgcctgagccctccacctttacttttgcattcctccggtcatattcttttgaggctaaagtgccctatccgaggagatggtttcaaaggctaactaatctgcagctttcccaagtgcccagaggtatttctcaaagttggtatgcttaataagtgatgtaaatattccagttctcttaggcagccttactcctgttgtccctgtagttctgaaaaaaaaaaaaagttaatttcttccaccaaagtctgataattccccaccgcatccatggggctacagtgactgtccctttggcatactcaatccagaggtaggaatgattttgaagaatcatctagtggccttggattgacccagaaacaggaaaactctggttacttctgaaagactccagcctgaaaactcaccatgccaacttagttactgacctgagtggggtagtgacctaattaacttcatgtttagtagtcctattatcttaacccttttaagaatacttccaaccttaatcacaatgttatgaggaaccttaggtgatttgcctatcattgtggatgatttaaaaatatgtatgtgcattagtaattagaaatagtctaacctcattgtccataactgaaatgcaaagtctcctgagtgtgtagatctgggccttgagccactactagttcagtgcttggtgaggggtctgctcattttgggaaagtgtatcatgtggcagggccctctccgagtggcgggagactgcctacatgatttttttttttccctggggatgttagcagtttcacagcataaaagggaggacatgttctggggggctccagattgggaaccctcaggaagtaacttcctcaggaaggattcataaccaattgatcgatcaattgatcatgtgaactgcagcagctgtctgtccccttacttcagagtccccagcttcagagttttgttgcggacctgtgaggatttcagacacacacacacacacacacagaccagttttgtctatactacatcagcagttccagacaaaaagggaggctatctaggggcccgaaagctgcatgatcagcagcctttgtccttttcaacaaaaggtgtaacaaaccaatgtgcagactcattagctttgtccctggcttccaatggaggtggtccatgtgcgctctgaccagcgttgccaatgaaaaggtcagatttggaaagctttaaaatagtcattccggagagtcagggaaagctaaacccaccaaacttttgggaactatcaatagctatcttagaaaatagacttgagaggcaagaattgtaagaatatgtttgctttttaaaacattctgtatcctcagagctcatggttggtgggttagcactaggtcctccctggggctgagtctaagcccagttccaggcttcctaagaatgtgtaaattacagaaatcacatttcccaaagctagaacctgttttatcttgttagcctccctgtaaccagatgctctgttggaccttcatagccggacgtggttcaagatgtgctccagaagcagacccggggtcacatctccaggatggcatgttggctgctctgacctggcgctgtgggtcctaagcgcagagacggaattcctgttggccctggttcccccctcctcgcaccccctgaggactccactttatagcctaagccttttatacaaaagctttgaatactgtgaagatgttttacattccttctcattcctgttgtttcttaactacatttgaccagatgttttgatgttatcacgtatgttaatagtgattcccaggtgtgttttgttttcatgctttccctgccaatgtattcacttcactaaaatcactcgatcaataacagcgtgagttgtgattgacccaacccctgtcatccactccccactccccgatgccctcccactcggcatgctcccttgagttgcttcagtggtgttttctggtcctagctgggtgggatggggtggaagagacctgagaaggagcacgggcattccctgccctccttccccactaaccatctccgtataagcctggtgtctgtctgtctgtctgtgtgggtttcagttctgccaaacatttctgctccatgtttcagatgcccccacccgacaggtccattttagagttcacgttcaaattaccagcgagaacttaagaaatggcttatgtttggtgctgtggtcccatttgggactttgaagaataaaatatgacatggcagggactgccaaga

SEQ ID NO: 33419 - DNA, 1295 bp, Mus musculus
tgtattagtgtaagctttgtcactatgcgctaaacgtaatcctgactttttgaccccagttaccattaatagtttctggttgaccatttgaacatgtattaacttaggaagactaattgccaataacgtctgcattttcatcttgcatggattaacagccatttatatggacttatgtctcttaatgcacaaagaagcagatatctcgaaggagcttacacaagaaccacaattactagatcatgatatacttggaaagtgtgaaatatggtgtgtactcagttattggcttccattttttatgatctttcaactataacaattatgatagaaatcgatttaacacaatcagttatgggcttccattttcaaatatcttttcaactgtaatgactatgacaggaactgattcaactctcaattttctttatgcatcatggtaaagcattgcagcagtgttgttttgtttgaagtgcacactctatggtacgaggtgtttagtatacccaagcagataggtgtcgatcgaacaggagcagggagaatacttccaacagttgaggtgttaccaaaccacttgagaattcatgagcactttaactctaaactctgaatttcaaagcttgatgtgaagtcctctagaatgtttacatttactaaggtgtgctgggtcctgtctcttttgactaatattttcgtaaacattaggctggagaaaggaaggaagcagtggtttccttagataactacagaattatactggtctctgggattactctctcagctgtattaaaatgaatttgtactttgaaaggaatgatattgacactaaaattttaaacatttaaattttttcataatctttcataaagaagtttaataataggtatattaactgaatttcattagttttttaaaataatattgtttgtgtatatatacatattaaaataaaaacatttacaacaaataaaatacttgaaattcttgttttgtcgtcctctttataaatacataactatttgggttcttcttaatttcagtgttagggcttttggcaaatgtgactgcacttaaggaaaacacattaaaagatagactgttcatttttttttttttttcaggatactcaagtactttagcagttgggtgtgtactaacactggtgaaccagccctagtgagaaatatggcggtgttgaaggccacaagccctcagaaatactaaggagaaagtagtttactgacaggactcttgacttaagaagcatgtgactagggcgctgccattccagc

SEQ ID NO: 33420 - DNA, 1149 bp, Mus musculus
gtttccagcccagtgtgatgaaggttaaaagcatttcctttacagtaatatgagagaaatgatgttttggctcccacaggaagcatgaattagagaaagatccatgcagggtgtgaataggagataagaaagaaaccagagataagacaggagttctgaaaaaaaaataggaatgaggattcctgtgtagttagtgtgtgttacttttgaatgactctcagtctttgtgcgtggcttttgtgcatggtttgatgcagaggcggatcccctcggtctttgagagaagctggtgtcagagtagtgtgtcctatactgagtttccctcagggtgctttaattttgaaaccttaaaaatacccaaaactacagctgattgtgacatttgttttacaaaactataaaacaagaacaacaaaaaaatcttttaaaatggaaaccagtgaacatcataccttaaaagaaaaacaggcgaacaaacaaaacaacaacaacaacaacatcaaaaaacccaaacaaaaaccaaaaccagggtctcactctggagccctggctgtcctagaactctctgtgtagaccaggctggccttgaactgacagaactctacctgcctctgcctcccagttctgggactagaggtgtgcactatgccgggcctaccctctgttcttgtatccagcttttatcatccctgtagccatcccggtaaaaggctgcctagagtccctagaagacagaacacttgggaggccaggctgtatgcagtcacgtgacctgctttagccagacagctcttgaactatctgactgcccattagaaccttacattttgtccttttgaagtgttccatttttttccccctctgagttcactagcaatgaaaatattttcattttcttgcctgtggcttagcccctctctcctgtgacagagatcctgtcagcatatttgttcttgtctctggtgaattacttaaacttctttgaaataatgagtcacatcaggaagttggagaaaagtgtgctcccctccccctttaagctcgggcattagctcaggcagccttcaaactgccttttggctgaggctggtattgaacttgtgctcttactgtatatccccccccccccccccccgctaggattacagg

SEQ ID NO: 33421 - DNA, 1756 bp, Mus musculus
aggacctcttgtgagtcatgagggctaattaaactgctataaccacttgtaggaatcatgtcgtcctcttgatgctccatgaccccaaatgacatagaactgagtgacagagccaccagtctattttccgtgtcatgtcccgaggatatgcggttatcagggtcaaatgttatgattgcagagaccagaacagagacttcccttgaaactgaggtgtgtgtgtgtgtgtgtgtgtgtgtgtgtgaaagagagagaaagagagagagagagagagagagagagagagagagagagagagagaaaaccactcatgttaggacaatctctctctcagaggcttacattaatataaagcagctactgagaagagatggatggttgtttattgcaataagcatctttgatccatgttttccagacaggagaatgactctttcttggcacagtgaatcttgaattcctgtctcacagctcttttatagccagtcgacttttgtgtaatgctaagtgcttgtatactgtgcagcctgctggcccacttgctctttgctttattgcactgcctgttaaatgaagtcatgcacacaccaggtggaactctagcgtctgataagagcctatacactcactagtgaagagacttaaatgtgatttttccccccagtacttacatttttcatggaatagaaactgggaataaagaaattgaatcagaggatgaattgttggctaggaatttcctaggttctagaagagtttagaagattagatttccacccaaaatttagggtatggcttttccactgggcaagatactatttccagtgcctttggggtcatttctatcagccttcaatgaactgtgctaccagaaaattatggccatttcctacagggagagaggtcatggctcattcctatctgtgtaacttttatctgctaggtaaattaaccctgtttttaattagaaatttgtagctctaagagactaggaggcattttttatttaagctagttagcactctgtgtccatagttaatgcaaaagcaaaaacaggcataaagctctccgggtgagaggaagcatgctctttcaaatgtgactgtgaccctgaatctggtgccacactgaagacttctgggctccgtgtgtgggagctgtcccccgactttgtctggccttgtgatcctgatgaaaagaaaaccaaacaaaaatcagtgggcttctttctctttctgttcatgatcttgtgtgtctcccatcccctaaaaaaaaaaaaaaaaaaaaaacttttgtgtgttttggtttttcagggttcggggattatttatttaggagcgaataaggttacaacctacttcaaaagtcagtgccctttgtctctggtttcagcttaaaatcttcccctagaaaattctttggctgctcaacagaattgctcaatgtgaagatgaggaacgaatgaaaaataaatcaggaactcctgaagggcctcgaacatgccctggctcaaggaaatgaggtcatcttttggcgtttaaattgcaaaatctgtctgtccctctcttagaaactgttggcttggttattagtgctgcatcaacgggtccttacagaaagttgagaggtttcggtacacactctgagatcatgttaaacacaatgcggtgtatattatgcaaacaaaggaaaagtacagtttcagtgatcctaaccagcccatacatgagacttgcaagttagaacattgttaata

SEQ ID NO: 33422 - DNA, 1130 bp, Mus musculus
ggaagataattactatcttgtaccttccccagttggatggtggacttgcaatacaggactcacttcctgtgtatcaactaaggtttttaattcatctcatgatttttgtgtcatgatccagctgttaccccgagtatattatcaccctgcatccagtttagaagaaagttatgctggccggcggtcaaaaagagaaccaattactttaaccctggctgcattcatgggaataggtatggcagtaggagtggagatggagtgtcagctttaatagaaggaagacagggaattcagtctttgagggatgctgtcaatgaagacctagcggcaatagagaagtccattgacgctttagaaaaatctttgacctccctgtctgaggtagttttgcagaacaagagaggtcttgatttgttgttcctaaaggaaggaggactgtgtgctgcccttaaagaagagtgctgcttctatgcagatcatacaggaatagttagagactctatgcagaaactgagagaaagattagagcgaaggaaacgggaatgggatgctcaacggggtggtttgagtcatggtttgaatcacgaccatcttggataacttctttgatttcctctgtagccggaccaatccttatgatatgcttacctttagttttcggcccttgtataataaatagaggaatgacttttatctagagtagaattgatacagtaaaactcatggttcttcaaaggcaatatcaacctatagttcaggtagatgaagagttaggggacaccaatctctaaaattctatgattagaattagtctaaacagaagaagaggggaataaaagaaaataaaacttgagacctgtgattcatgtaatgtatgtcaaatagcccaaagagttgttgtgagctttgaaacctggggctgagaacatagcagaacagaccaggacatgcccaggcaggcccattgcttccctagctcccacccctctgacctaagttaaatgttaacaggctgctgatgtttaaatggaccaattatgtgaaaccgcaccaattcctcccccagtccctctccttttctataaaaacctctagcttccaagcctcgtggtcgattctactgtctcctg

SEQ ID NO: 33423 - DNA, 1729 bp, Mus musculus
caagatataaaacacaggagaaaggctcacagtggcttgtgggatattagacgatctcattgagaaccgtttcttcagttctgctttgccaaagtacaggcaattcttaacctgtccgtcagcattacagactgacccagcttacggtgggtcggaaagcagtgctcgctctgtttggagaccgggaattcccctacacttcatattctctgaagctctaatgtggattcaggcatcttgagaaacagaccaaattaggaagtcctgaagcacagggctgggaggcccagagtggatgggatgaaatccctgatttcagggttatagcttaacgctaaacttcctttccagccagtggccctgttccccctgcagacatgcctgtgtacaaaagcttgctcaatcgctcgctcactgggcagccctgggctgagcatggcaggccaaagacttccctttcagcaaagatggcgcaggctagaaagggcactctgcggctcacagtctctttaggatctgtggcctaagttcagggcatgctgaattgaaagtggcgtggcccttctgaagcccccttcccaattccccggggctccatttcagatgatctctctgctcagctgttcctgctgtgtctctgtaggactgtggccctctaagctccctctcaggttttgtttgtttgttttttttttaaagtcttcttgggaagagagaatatagatgttgaaagagtaaatgatttaggcaaggaatttaaagatgtatctattatagagaattttaaaggtaacagattactatttacttactaatgaacagatagggtctgggagtcccagaacaccaagccaaaggttgaagaaatcacctttcaaaaagttttaataatgaatttatttcctgatgtccaggaaaggtttgactggcctccaggttacgatttttttttaagcaatttaacagggctggggatgtagctcagttggtgacacacttgctcagcatgcacacgtccctggatgtcatcctccacccccccaccccccagttctgggggaaaaaaaaagaaaaatttactactaagtccttcctgtgtggagagaaaagggaactgcatatagagccagtgcctctccataggccttctgctagaacagagtaaggcaagcacttggcactgcatagactgcacttctcgtagtttccatctgaatgcagcccccctgtccgtgcctctccgcatgcagttagatttggacaaataagattcctgaggaatgactctcttaattgcgccgcggttccagctttatgtaaacacacacacaccccagttatagttctagtttggagatgctgctgccatgttggcctcaggtaggctgtgtgatgttttcaccactcagaggccgccaagtgtggggctgaggtctggcctgaaccttccctgtatggtgtcttcaataccaactgtcaggatgcctctcttaggcccctgccttctcgtagtttctgagaaggcccagcaaaaatgcttcccaccctcagttaatagtaactgattctactatttgtaatctttcaaatggacacatagaaatctgaactctgaaaccacatccagaccagatacagggcagtgtgacggtcacacccgcagccttggctttgacccttgcagtccttgggacaggattcaggcaccctgttaagtctccaaggcatc

SEQ ID NO: 33424 - DNA, 3245 bp, Mus musculus
aacactcaccctgggtgaaggatgagcagctgctccgaggtcctctcactgaccccacactgtcacggaggttctgtgacaccagttgtgtttccctctgatcagcagttttcagggtgtgacctgctgtgctgcctgtgtgcattcatccagtgatgccctgagttacagcttgtgtctggtagccctgactcagactctggaatcccagtccctgaagctgctggcagattaagtgaaacccgcacacttgtgttctagcaagtgaccctcacacaaccagagaacctgggacctaaggtttacgggcaaggttcaagagaattggtggctcttgcaccctcagctaagttttagcatagtactgtgtgaacacaggcacactttgatgggtgggtggcatttggctttcttttctataaagactgtgatacagagaagtggagagccagtaggatgctccggagggtctagccactggcttcttctctcagaacacaaagcaaatcaccatcttctgtctttcagaatcaagagattgaggagctgacaaaaatctgtgacgagttgatcgcaaagctgggaaagaccgactgagagccgtcccgtgagctgtgcagatccgagtctggctgcttctgtcgtgaccacattatcttgccttatccagaaataatgccccccacccccctttgcagagagaagtaattgtttcaaagcacatgcctgctgctgccatcgtccccgcttcgccgctgcgctgccgctgctgctgctgctgctgctgctgcggcctggctggtggagagggagtcacaagacagctctgccctgcgacctggctgccagctcccgttagagctgctgctgggtctggcttgtgcttctacagcctgagttcatctagctgtcgtcgtcgtctttgcttttcccaagtttgtgacatttctaattttgtggcaactgtgtgggtttatcttcccagctcctgtttgatgtttttatgacctagttaatgttttaagttttcagtatcagcagttttactgaagggggcagtctgagtcatcgtcactaacacttggggctccgaactcccttttagttacagacggactcatgcatgtgttctctacattctgccgcttttcccctgaggcatatccagataagaccctctggggaggagcgtagttacagaaagaaatgtaggctcttattttgaaacagagccctaggtctaaaagccagcttcagactcggtaggggctgggaacctagctctactggggagtgcttccggtacacagagccctgggttcggcccccagaactacaaacactggatattggagtgcatgcctgtgatctcaactctccagaggtggaggcaggatgaccataagtccaaggtcaccctcaactacatagcctcttggaggccagcctggactatgtgagttcttgcttcaaacaaggagtgagtggaagcatggggtatcccagctagtgggaggcaggacaggaagatcacttgagcccagagtttaaggacagcagtgcactaggcaaacagtccttttcttagaaatcaaacacccaaaccaaaccttgagtcagggtggaaaggctgaggatacgagggccaggggtcatagctttcatggctaaggaagatttgccgtgctgtctgctgccccggtgtttggataccccaggacctcagcatggtcccttatgctcataccaaaagcagcagcgtggcctccctcagagctggccttggatgcatgcgtccaccccggggccgatgagtctctaaagcaaagtcaacttctgttatttatttgaaccgcacaccagtgggatgtgggaaaggtttagttgatcttgttaaaagatgacagaagcccacattaccagccagagagtgaagagcctaggttttccctgtttaaaggcacggcacccttttagagacttaaaaataacagcaacagcaactgctttcatactggagatgggcttttaaacagaacgggccggccgtaaagagtcctctggctcgttctccaaaccagcccctgggaatattctaaacaaagactgcttgaatgctgggaaggggagcagggggggaggtccacaagacaaagcaaaattctatgaactcagactggacttaccctgagggcgttaatccccaaatagacatttccctctttgatgctagtgacttctttccatctatctaacaggcaaagtcaagtccactcaagttttgatgccttttttttttttttttttttttttttgccttaatcttataccctgtgtcttcatggtaaatgtgcactatttagcacacaggcatatccctccttgtaaaaccattgcatgagccgacttcagcaatgaattgtgcctcatggagaacctccatagatcttaaaaacagtgttcctttagcagtgtgttgccatgtgctgtaacttttagccccagggaagtgagtaatgtcttttcaagctagaaatcacatttttgtcaatatgcatttattataaccggtgcttaggttaggctatattctgaggcctactgtcttttaacattttgtacaaaaaagaagaaaaaaaaccccaacaacccacaagcagacagaagttatctgtggttggagaaatggcttgacaatcatttgggctctgaattttgtcacagtggcttaatgcaaagcccatagcagtagacatagtgtcatgttcaagtgtcttcaagggtcataaccaatgtcagcttagccgtcttccgcaagggaagttaattttgcattttaagaagcaacgcaggaattcttgctagtgttacggcggcatcagtgtgcgctcattttatattgacttattttcagtatggaaagcttaagagggtctccatcggaaatctcttgttccctgattttttttttcttttaatagtactgagattgtacccagggtcttgaacatgctaagcaagtgctttatcatggaactgtatcttcccctgtcatctttctaagcatgcatatttttaaagtgtcctgtgctgtgctgtatgttaggcataggagaggagcagtggctgtccctccctgcacactggcagacgggccttgaataacaggccctgctaaatgaagctgccgtacaggggacatgaactagccctctaagcagtgtttgccagtggcctcttagtca

SEQ ID NO: 33425 - DNA, 1184 bp, Mus musculus
ctgtggctccctttgtgccttatgtatatatgtgtttctctctctctctcctcacccttttttcttctatgtgtgtgcgtttctgtgtataagtacttgtgcctgtctgcggacttgtgagatgttaggaatgatgtttctgactgaagtttttgatagtgacaaaaagaaggggccagatattctctctcagaccagtatctgcacgttgtgcgtgcatgtgtgcgttttcgggatgctctgggggctgcttttctttccttgctgtcccgtctgtacccactgattctctttacctaaaaccaaacagccccctacctgccaggcctcatttctccatgctgcccaccgcccgcatgcttggctgggccagtggctgccagcgtctggtgaagggtcgtaaccaagccgtcgtctcctcaggtctgccggagagcctcccctccagagcctcgctgttttcctctaacaggtctcgctggctggtggtgtggtttttttgccttgttgcaaaggagatgctggggagcgtttcttcttctggttttggtcccctcctctgtcccctccgtttctccgcctctcggaggtctcatgtcccgggcttgtccattttgcttccgtcgtctcttctagactgctggagttaataccaccgacaaggaaatggaggtgcttcatctacggaatgtctcctttgaggatgcgggggagtatacgtgcttggcgggtaactctatcggactctcccatcactctgcatggttgaccgttctggaaggtatacagtgcactggtcctttccgggtcctgccttttgccatgggagcagcgcatccgttacagggctggggagaggcagaaagggacggctcccgtctgctgcgtacccttttctgctctggctttgagggccatgcagggggagttcctgggttttcaggaagtgacgcgtcagcctccccttgcacatgtacatctggctttctccctggtcaatgtaatgcatgcgtgagccctgggtttaccttgcagcagggctttctagcacaggctccttccatccttgggtacagcatcttccctcatccatttggtacagaggctttgaatgatggggtcttctttagccagtcccacggaaagccatgggcctctcctccatgaatacatgccaataggag

SEQ ID NO: 33426 - DNA, 1118 bp, Mus musculus
ctaggcagtgaaagtacatgagatgtctttagaaatagcttcgctatttcctgctcttggctgagtggtgtaccaggagaaacagggttgagctgtcctataaaagcttgctctggggggctggagagatggctcagcaggttaagagcactgactgctcttcccaagaggtcctgagttcaattcccagcaaccacatggtggctcacaaccgatgccctcccctggtgcatctgaagacagctatagtgtacttatatacataaaaaaaaatattaaaaaaaaaaaatcttccgggtgatggtaccacacacctttgatcccagcactcaggaggcagaagcaggcatgtctgtctaccctgcattcaggagcagaggcagaggtaggcagatcagatctcttaagttcaaggccagtctgatctacagagcaagttccgggacagccagggctacccagagtaaccctgtcttaataaatggagtttggggatgttgatctttaccagccctgactgtcatcgcacgtttgtcctgtcctaactgtcactcactgtttatcccccactcaagactggtcttaggcaaaccacttggcgagggctgcttcgggcaggtggtgttggctgaggccatcgggctggataaggacaaacccaaccgtgtgaccaaagtggccgtgaagatgttgaagtgtgagtggaactcctgtgtcctgtagagtcgtctctttcctttctaagcaaagtggggtctgggcctagtcgaaaacatcctatgatgcagtcacggctcacactgtcactaccggagccgaggaggatgtagcaatatacgtgtttaaatctcaccttgcttcttaatgttgtcctgggcccaggtggtcctcttagtcccacaaacgggctgatttttcttgcagtgtctccagctaccctcagtactacatggtagtagtggctcctgggagggaagtgggaggaaagaagggagtcctggagaaaagggggctcctccgggatccgcttcccccaccccacctcacctcaccccgctctctggtttgcatgggaagccgacgcaacggagaaggacctgtcggatctgatctcggag

SEQ ID NO: 33427 - DNA, 1154 bp, Mus musculus
cttcttaattccaatactaatttgctttgctgaccaaatacctgcctggtaccagaagacagggaggcagagactgggagccgtgatgtgcccttgggctgagccctagacttggggctctgtacatagctatgaagaaaaacacaaagtgtataaatcttgagtatatatttacatgtctttttaaaaagggtcgttactagagatttacccatgggggagacgcccagggtagcatccgttgctatatattaaaaacaaacgaacagaaagaaaaaaaaaaggaaaatgttttttaaaaggtcatatatttttttgctacttttgctgttttatttttttaaattatgttttaaacctattttcagtttaggtttccctcaataaaaaattgctgctgcttcatttttatcctgggcgtgtgaaaagagagcaggtgtccagcgcagaggagggagacagggggtaaagggccatgagctggtcttccccctgccccccatgacctctgtctcctggattgtgccccagacctcccagccaagccttctatctcccgatgcattgggaacagcaggagaagactgaggtcctgagggcagagagccaagctcgcacacttgattgtttcctcggaggagagagtgagaggatgaggttagccagagggtagaactggacagaaacccaaaccctagaccctgtacattcagatgtcttgtctatcttccccaacctactcctcatattcctctcctgtaaatatcctccccttccctgttggtctctgttacccagttgggtctgtccctgagcttggcttcctatagtttttccttcacaaactccacccatccctcaggaaacagaaaacgatctctttggttggggtcaacttggcaactcaattctgccacctgctggttgctttggtaccttggtctcttattcaaacccacaccactcaagccttagagggtttgtttttgttttttgtttgtttgtttggttggttggttggtcttttttttctgggtctgctgaatacaaacctgttcagtatgatttcatctgtaggggttagggctgcttctttaaatgcagttttggcagctgtggtttgggtcattgtcataagagttcttatcgttgtt

SEQ ID NO: 33428 - DNA, 1193 bp, Mus musculus
tttcctcctgtcctgacggggttgcggtggcgacttctcaaaccgctgtcttgtgatggtgcttcaagcattttcacagagaacaggtttgggagatgggaagccagcggggtgagaccctgacattcattttgaagtttctgttataagcacaatgagttcacatttccatgagttttccttggaactatcattgagttccctttttaaaaactttgatttttagtttaagctgctggtatatattgtttttatttttcaaacaaatcaaattaatttaatttatattcttatatttaagaatcaggtaatcataaatggtctggtttttctgttggtatcacagatcttttgaaatgttatttttttttccagtagaatggcactcatctggaatcaaactgtcagataaacaatattgaagtataaagtgtgtggggaggggctacattttgattgaatgtgttcaactggtgtaatcgatgtagtaataatatacatgtgaaattaccttttcaaagaattctgagaagtgattctatcaattataaactcgcagatttttttttttgatttttataaaatgaatgaatacccatttttaggtaagcactttgccgctgagctgtccccactctttccttcccctttctttacttttggagacaggctctcactatgtagccctggctgacatggaacgaaatctatagaccaggctggccaggcattcacagagatccacctgcctcagcctccccattgctgggattaaaggtgtctgacaccataaccagctttagaatatttattttttatagcccactcatctagtattaaaatttcagaattagttacagcaagtctaatattttaaagcaatttaccatggaggagtatgtccttttttatttaaaatcttcataatttaaaacttccaaatttaaaagctaactttgtgggtgctctatagtatcacaagcatataaaaattttttgagaatatttagctaaaatttcagtaatatttgttatttatcatataatttccatatataggaaattaaagaaaaaattcaagtctgacaaatctatagtatttgttaccaaaatgaaattgtgactttgccacctggttctcaaattcagtctgtgaccagtcagtttaaaataaacaaacagaatgagtaaaa

SEQ ID NO: 33429 - DNA, 1183 bp, Mus musculus
acgtttccaggagctgaaagcccagcgtgaaagcaaggaggctttggagatggagaggacctccaggaaaccccctccctacaagcacatcaaggtgagtgcgtctccccgctgcttaaagccccttgacttacagggatgctccgatggtcaccctctccttgttaagccaccacctgggaaccgtggcttacatggaattctgttgtttctgccagagtatcctgcaattagacaaggatatagacctttagccttccttttccagacattgtcccttgatttcaggtattaaatttcatcagcctgtggcaagcgggggtggggtggggtggatgagacttgacatcaagcttcagcctttttgtgtagcaaatagacatagttattgttcctcgtctattctggagaaatcacgataaagagctttccgtattgtgtctcagtgctttgatgttcagttcatgttgctcacagatcctcatcttctcccgcccctctcttgctctgtcgtctcccaggccaacaaagtcatagggaaggtgcaggtccaggtggctgacctgtcggagatcccccgctgtaactgcaagcctggtgatgagaacccgtgtggcctggagtcgcagtgtctgaacaggatgtcacagtatgagtgtcacccgcaggtgtgtcctgctggggaccgctgtcagaaccagtgctttacaaagaggctgtaccccgatgcagaggtcatcaagaccgagcggcgaggatggggcctcagaaccaaaagaagcatcaaaaaggtaatgtggtggccacatggctgccctcgtcagtcgtggcaggactgtaagaagcatagctacttaaagttggacttctcacttctcacagggtttgcacttgctgagcgagaagaaagtgggaaaggataacagaacagcctggcactgtcattgatgagccttgctcagaaggggcattgtgctttttgatttctttctttttttaaaaattattaagtggaatgattcaaacatattttcttgttgttgcttttcatggtggataaacatgtcagagaagcaacataataaagttgattactcaccagggcagaaactagcaaacccagaactttgctgcaacatcaagtcatagccataagtgtgaccgaatcaccaaatcactaagg

SEQ ID NO: 33430 - DNA, 1636 bp, Mus musculus
tttcctttttgacctcgtgctttttagtatctgataacttttatagagtaagccccagggttcatcatgtatttataaataccctaccctgacctatctctctcctgcttctctgctatggctcgcttgtttttatatctataaaaggactttgcacttttcagatcttttcctactagatgactaacaggcttgctctcagaagcctgcctgctccaagccaagtgcaagggcgactgcctgtgccatcatcgcagcctgggtcttagaactgagggttaggaagcagaacgttggctgactggtgtaagtatacgtacaccgtcggtcgtttcatgtcctgtgtcagtgacattgcaaggcactgtgcttactcggagcctgaagctgcttggtggtagcttttcaatatggtttaggtatacagcatttgtggttgattttattcagcccagaaataaaggactcaaagcagcatgggatactagtggtatttcctaacctcaggaggaagatgagagttctggttatcagtggaaagctttagaaattgggctggaaagagctagagatgatagcacgagaccatcacaagcactgtgccttgtaggtgtcgctgggccgccagggtagctgcctgtgtctggccaagcaggatgggaccagtgctcgtcactgccagtgtgctgcagtaacctctgatttcagtctccagtcagggtggggatcagagtggagtaggttttatcttcacttttgctttgcaagccctacctactcttattttaattctcaaaaattacctttcctaagctgtagaatagacttgagttttctgtgcgttatataaataacatatatatatatataaatataaaatgttttatatatataagtggtgtgtgtgtgtgtgtgtgtgtgtgtgtgtgtgtgtgtgtgtgtacacatacatactgagttaggaagtatttgaaactaaagagataataagggcctgcagcccactgcttctgtcagtgtctcccactgcagtgtttgcggaagtgtgtgtaactaatatggatctgagatactgagggtctgtctgctcatgtgaaatactcggctggactggtaggcagcttttatgcagtggcttcttttttgagtactttcttactgtttcgggtcaaagccagactacagtttgaagtcctcccattatctgttcagaacatagacccggctctccaagacctgccgctaatcttgtcaaaacaacactcctcttgcagcacttccccacggagctaaaatgctgccaaccacatgccatgccctaatgggagagggagacaaattgcctcagtctccctgagcgtgagcagcgtatggtctttatgtttctcaaggcactgcttcatttctagacttgaattgcttttcacgtggctgttgcatctgaccatcccggactctgccaggctgctaagggcagcgtggaagtgatcggatggcaaggtcctcaggaaggaccgcccacacttggtctttgcttatttgtaacagaatggttggttacggaaaggtctggtccctccttggatggacgaagggatccgtgtaggcagctttgcagtggattgttgtatggact

SEQ ID NO: 33431 - DNA, 2721 bp, Mus musculus
tcaatgcagtgaagtgtttacacgttataaggaacattggaacctcaagaaaaactcacttcgaggacactggttaaaattcacaggaagtgtccagtagcccactcagaaaaggattggtgtacatcttaccttgtgctggggatcccaagttaccacacccagcctccagacaggaacctggaaagtctgtattagacagtggcattctctggtggctggttcccctgggtgaccttttccccccctctcccatagatggacactgagggagactgtcctgaaaacccacacgcttgctgctgcagcttccttctcagctaccttgtgtcctgcatgctgcctgccttactccatgggatcttcccaagagaaccctctttggagactactggaaagcggaggggcactcactgttctgtatggacgctcagcaggttttgtggctagggcgtttacatatcccaatgctttaacagcagcacttccttgtttcttacatgggaatgaatatctgtttagggggcttggggggggttactccttatccttaccaacactacgggtgggagtataagatgtagaggtacttaggggtcccgtccctctgtgtgttctctgtgctggagggctgagcatcactgcatttgggagagctgctggcttttgagccagcttttctttcctggattatatgaagatcagacagaagcttactaatagcacagtttgctctgaacactgttacgtgagtggattgtagaaccactggtgctggtcctggtcctggtccttacaactgcttcagcttctgcaaccctgaaggttgtattaactgtgtgcctgctcttttacaccgtattccaagccagcggtgaagttgaggacattactaggtaatacttattttgaaggtcaacctgaaattacatggcccttccctgctgttcatgttgtaaatgcagtcttttagtagcaccgatttaagtcacctgctccttccacttgagtaaaggaagtatgtgacataaatgtcacatttttttttttttttttttttgacacagggtttctctgtgtagccctggttgtcctggaactcactctgtagaccaggctggcctcagaaatccgcctgcctctgcctctgcctcccgagtgctgggatcaaaggcgtgcgccaccacgcccggctgcgtcactgctttctgaggtaccatcaaattgtttattacagttggcagtcatggatttgagcatgcaagctaggctaccttctgaaggaaaaccctgtctacagggtctgaggagctgaatctggataactcaaggcacattgatcgtgaggaagggtgactgtacactaagtgttcccttccttagcatgtgccgtcatctttgtcctcctcacgattgccctttagctcctctgatttccacaggtctctatagagtggcaggagaggtgagctgtgttttggtttttttccttgttttgtaaacctatcatggtatccagaggcactgcacataacatgccctgaaaccctcagatggcagtgccctctacagacaggcaaagggagggaagcactgtgccctggacgttagagaggcaagcatggtacgtcaggcccagcctgccttcctgctcatgggtaatactggatgagcaagctactaaggagttccaggtatatggaatactttattttttctacaatatgtcttgagtaagaatacctgagaattaagtagtatattcattaaatactaaaaagtaagttttgtcaattgctgtcttgaggtttgtttactcttgttagcagagtcattactacttaagagtaaaccaaagtacaaccaagagtgcgttcttgtgaccaaagatgggcagcttggccctggagagctagataaacccctgcactgagaaaggcttcttcccgcagtccggtacttacacgtgaccacgctgagtgttatacaaggcagtgtggtggcaagggacctgggtgtggacctgcactgcgtcgtctgttatcatgcacaatctcctgaccaaggctgtttctaaactccagggtgacagcattctgtctgtgattctgtctgtgattctggcagcacagttggtgggagactgtctgcaagggacgatgagtagctctgataaccttgctgatattttgcacttttgaaatgtttgttttatatgtgattatatttaagacgttagtaaatgccgaaataaaactattgaccatttgcctacattcatgtggccttatctatcatcaagaaaatcaatatagtaggcattttctcttacatgttactaaattcaaaacaaaaagttttaggcaactaactgatggtaagctcttttcccttgatggatgtttacattctcatggacactatagctcagaattgaaacagagcctgtccttcagcatctgcaatattagctaatacaactgataccagcagttagttacatacaccagatgggaagccagtcttaatctagacctgaacggttcttatgaagtacaaaccctcaggcacactcttgtgtttcactgccagactttctgagaaaacgaagtacactgagaacacgtttaagactatgtcagagctgggcaatgctggagcgtgcttttagtcctagcactctggaggcagaggcaggtgggtcgcttgagttcactcaca

SEQ ID NO: 33432 - DNA, 2462 bp, Mus musculus
tagatctgtgggacagatctgagctcggtttatgctgatagaaggaaaagaaggagattcacactcagggaatgagtcagccgtagctgaagtggaaaattctttttttttttttaatttaaatttggtctatatttcgtagggcaaattgcatagaattgcctgtttcataagaaagatgttatttaatattagtaatagtcaatttagagccaagtttaagaaaggggcctttcttggttatccgtgtatgttgttattcagagacaggtaaataatttaccttttaagcctaaagtgagatctagcattcagtatccgcttttgcaacagaggcagtttcttagtagaatatcaaggtgatacttttttctagactagcaggcctttatattagtgatactaagcctgtagccttcccttctgctcacaggaatcaaacaaatgctaacctaggatgagaaaaagtgtagtaaaaagattgtctacgggctagagatgtgtgtggctctgcctaacatacatgaagtcctgggctaaatccccagtagtggataaaccagccatagtggtacatacccatctcagcatttgggaggtagacacaggaagactacaagtctaaggtcatcctcagctacctaataaattcaaggccagtctgagccaaataagatcctgccccaaaaaataaacaggataagtgactcaagaagtgatcattgtatcctaggagtctgtagtttttaaaaaatatcatttggctgagtttggtggtgtacacttttaattcagtcagaggaggcaggtagatctcttgagttcaaggccaacctggtcagccaaggctatataaggagacactatcaaatccatttcatctcatttaatctcttatctatctaatcaatcatctgtctatggggtgtgtgtattcttgtgtgcacacgtgtatgtgtgttttatatctataatttttatttttgagacagaatttcatgccgggttggccttaaacttggcatatagcctaggacaacctagaagttctggtcctcctgcctcactttgtattacacaggtaggtgtgtgcctggtttatgcggtgtcaggcaagcactgtactgaggcatagcttatgtagaatatataaaagagaatatagaaatgtctttaaaaggttttcgaagctggatttgtggcacacgcctgtcactccagcattatgaggcagaggcagggtacgtggatctctgaatttgaggctatcttggtctacacagttccaggctagccaggagtgagctctaagtaaccctccaagcgttttctataaaagttttgacaattatgctctaagaggagaaaccttaaagcttagctgtgttgtcagtgagacagtgagagattcggaaggaaacgtcttacttcacttacgctgcccacgatgccaattaatgcacatccttcattggtgtgtgtgtacatgttacgcacaaatgaacatatatgtgtatataccttaagttattttttgaactactaacatgattttaaacttacagaagagttgtaaaaatagcattcccgtgtatcctccatctgccttccccttgttttgacatcttctctaacagaaacatttgttaaaattaaagagttaatagtgctattaatattagctgaagtagcaagctaaaagtagacacttcatttatctttttagtagcatcctctcaactgttccagatccagttttgcatttggttgtctgtctcagtagtcttttgctctgtgatgttacatcctacggatggctggtgttgtcatgtgatcctggcgtggttcacaactgagcgctcagctaacttggtgtctgctaggatcctctgctgtaagctttaccctgctttcctttgtaattactaagtatttgctagagacactttgagactatgcaaatgtcctgtttctgcttagagtttgcctcttactatctcctggcagatcttgcttgtggcatttactactgtggtgtttaaacggtgatttttttattctcatttcttctatatttaataattggaattcttctggaaggaactgtggtttctggatttatatttttaattatatcaagatattcaggataggtataaactcagaatttaaagatagaaattatgttaattggttccagtggccagtatcaaagaaaaaaaaaagcaacatttgtgacctgtctttgaaaatgtaatgaataagaaggaaactagtatttatgattcgtaaaatttgtttgacttttgacttgaatttgatttaaaactgaagcaattttcttttgaaattcacaactagactttttaaaggtgtctaaatttatattactttgggggtcatttttgtcaaaatcttgaataaagttacctacacctggcatgataaacagctgttttctc

SEQ ID NO: 33433 - DNA, 1126 bp, Mus musculus
atatacttgacagcttcgagcctgtgacttttttctagatgagtgatttccttgggaagctggaatacagaccaaagagtcacgtgatgttttatcaaatcttgacctttgtattctattaaggagttcttttttcgggactgaaaacctcaagggcttatggggaatatatcacttggctctttcttcttgttcctgaccacacatgcagttctttaggcacttgtattttctttctcttgttttgtttttaaatcggggcctattaatgtaggccaaggctttctacctagtagtcttcctgcctcgccttccctagtgctgggactacaggtgtgcacacacaattcggattcctccttttctcacataggctctcactgtgtagactactagctgcaaacttaattcttcctggtacatcctgctggcttacaagaaaacatgatcctgtgtgtttactattttaaaaagctaaagggaaactagggagatagttaggtggacaaagtgccctccatgcaaacgtgatctgagtttggattcccagaaccacataaaggctgtgttcccatgtgtctgtgttccctagcctggaatttaaaacagtgaataagagaccctgtgtcatacaagctcaacagcaagtgaaagacaaggacccactatctagattgtcctctgacctccacaagcatgcagtctccatgatacacatactcacatcattcacacacacacacacagagcaaataatagaaaacattataaagtaagagttgaagtttagggcttagctttaatcttatttggagcattaagcaggattctgggtatgaggaatgtcgtagtctaggtaggtgatttaaaaccacaggaaaaaggatcagcaatgtatcttggaggtagtacacttgtctgacacacacaaggtcctgggtttaattcgcagcactgcttaaaacaataaccaaactataataacccacagtagtaagcagtatagtgaagagtttctctgttatctgttattgctatcaggaaagcagggtggttgcttaattcaatatggactgggtcatttctggaactcaccataatacttacaatattgtagtcaccatct

SEQ ID NO: 33434 - DNA, 1145 bp, Mus musculus
cataagcttgtctgttcttggtcttcgtgggaagtcgttcaaacctgcctgttttgcaggacctggagaaggagagtgacacgccccttcagcaagtgtctattgaagagatcctagaggaacagagggtgcaacagcagaccagactggaggcagagaagctgaaggtccagacccttaaagatcggggcctttccattcctcgcgcagacactctggacgagtactgagtccttgctcagagactgctctagagagcaggtgctgtcacctggtcacctcacacattgaccagagtatcacgctgaaaagtgatctcattctttcatggatgccaacatgaagaaatcatgggattttggtttttttaaacaaaatcattgtatattagttttgcttttcttcttcagtctcagcacatagtcctggctgacctagagctcactgtgtaaaccagggtgacctttagcttgtgggactgcaggtggcctccacctccaccagcccagctttactgtctaaagaaacagtggcgtgacctccctcacacaagtcactgtggagccaagaactatgtctttatattgcttatctcagagtttacatttcttttttaaaaatatttcatttacttgtaaataaaaaatgattctcagaactgtcacaaaatggagtttctggtggagagtcaaaattccctactgcaacataaggctgtatacatcctaatgtatacactaggatgcctactgtggatatagctggctcctcaggaggacatttcatactctgctgcttcctagttcccattttcatgtttgtacttggcagaagttttaagcttgagaagggagttttcaaggaactggttacaacagaatcctcaggtttagaaaacttgagccctgatttacccacagtttttccaaactataagaatatgctttgctctcaatcttacattaacttatccagattttcaactccttttgatcatcttttgcttagattatcatctatacaagaacaacaaccctccctacacacacacacacacaaaagccctcaaatggtgcttagtaacaattgattcatgatgacagcacgttttgttggcttgattgttggagagtaataattgcgta

SEQ ID NO: 33435 - DNA, 1155 bp, Mus musculus
gaatgtgttaaggatgaacaattctaacaaccgaaagcttttcattctaagcatgaaaaaaaaaaaaagtaatgtctgtgtgagtgtgcatgggccccagcagacacgtggaggtcagaggacaacttcaggagtgtgccttcgacccccacccgggtcttgggtcctggattgttagggtaggcagcaagcactttcatccgcagtgccattttgctggcccacttttctgtcccttatcgtgtgggtaacccccatcatttgcaaagaactgagcttatttatgaatagaacaatgtggaacatgtacttatttattgaagtcttaagccttcactgatatttattgctcacctcggtgctttaaggtgagcgagggcagctgtagagtgtttctgatagaaccatcccgggaatcagttaagagagcagccacttgggtgctgaaagacccatgtgtgccggcctcgagacaacaggctgccagtggagaagcgccttcagcaaacactgtggctttgattggattagtgtttgctcctatacacaccgtcactctatctctgccgtctgggatgtttgacccatttgtttaatcttatattttaataaaagcagttgtcactggcattctgatacctatagatgggtagtagttcttttttaatctttcaaacgaaccttattaacacattcaagtttacaactgtacacacattttttttttcttgtttcacttcaattgttcttttgagacaggatcttctcactcattctgtagcccaagatggcctggaacttatatcaacccttctgcctctgcctctcaagtgctgggattaatggtggggcctgcaggcatctgggcatttttttcagacactgctaagtactgtcaagcaccttgataacttctaatgcaggaaagccaggtacacaaacacgtaggtagacaggagacctgggcatggttatgtgccaacacccactcatacttcttccaagaccatcacttcactttcttcagagtccttcgaacaccgatgagctcattctacaagctggcttgttctttcttggactagtccttgcattagtggttatctagcagctggtaggctgtgaccccagctttaaataatgcagacaccccaa

SEQ ID NO: 33436 - DNA, 1618 bp, Mus musculus
gggaaagattagctcatggagatttctatgtattcgctcattaccttctattgaacaaaaggaagatgaggttccaagcagaaatcagtgaaaagtgtgtctgtgcctgatgcttgatagacaccaggatgtttgcctcctttgtcccggttagaccctgagatgctgtcacagagatgctgttcttcttttgaaacagtgtctgctatgtagtcaggtgacctcaatctcaggatcctcctgcctcagcctctccagggcatacgctacaattcctacttttccttttaatatcccctgccaagtcaactttgttctttttcaattttttttctgtgtctgcttgtattgaacttgtcccaggtttccattaactttggaccatccttcaaataccctccaaaggatctcacgtaccaccctgtgagtactgtaaggacgcctgcattcatccttcatctttctgtttcttgctcaggcttctgtaatcacccattctgtttttattgctcctgcagatgagtgacatgggctggggcgctgtggtagaacacacactggctgatgttttgtatcacgtggagacagaagtggacggaagacgtagtccaccctgggaaccctaaccagtccttgcttctggtgacactgtaaaataatcctgggggttttgtttttgtttttataaagtgtcaaatgttttccaagagatgctgcagtacactttgatcaaggtaaaagggtgggtgggactgcagcagtgcctgctcttcagcatccctgccccacacaactacttactctgagtgccataaatcagccgctccctgtaaggctgctgctgtgcccagacctgccagggaggacctgttactttcctgtgtctgtgtgttccaaagagcgagtaatcatgctcagacagcttgcttgaggatgttggatcccctggtttctggggaggcaagcttgtttgagtggctgaaatcaatggcattccattccagagcagtctaaaggcagtctttttggtgtggagtttggggatcatctgggaagctagtgggttctataaactataattgtgaaaggaatatgcctacagggtttaaaagatagatctttcctccaataaaacttgttttcaagcttgtatggtacttggcttcactggaagtgaagttcctgttgaccctgttagcagtgtgagcagtgtgacggggacaacactggcagggtgggacaggcgcttttattgctgtcctccccgggtcaccaggcgctttcactgccctgtgtacagtggactctcagggagagcaagactgtagcaggcctccagtccgtgtcttggaacttggtgctgatatgtgcggcttgtcctcttgcctgcctttctagtagccagccaggggttaggatcaaagaatgatgaggagcctgccttacgaggatgccttaatgacctccgattttaaatacataagtctgtggcaaatgcaaaatcctacactgacctaaagacttcccttttttgtgtagccttttttgtttgtttgctttgttttgttttaacttaagtactagtgatataaagtgactaaccaggagctaggtagga

SEQ ID NO: 33437 - DNA, 1199 bp, Mus musculus
ctcatacagccagacactgagtcttcaacactgcctgttacttaagcagggcatggtggcacggacatagcattccagctctctgaaccagtctatagtcaggaaatgggatctcccggctgccaggccccagctcctccttggtgctccggttggatcctgtacacagcctccttaaggagcagccttctggttttgactgtgtcgtagtgatagacagcagcattcacagaaacttgtggaagggactcttaaccacgcggctataaacacttgactttatgattgttgccttttgtgttttctttgttataatccgttttttgttttttttaatttgtctcactatatcactctggctgtccaggacctcccagagatcagcttgcctctgcctccagaatgttgagatcaaagctgtgccccctatgccagctcttttggcggccctttgtgtatgcagtacaagggactctggtctctaagtccctcaaataacaaccattgacctttgactctctccccctccagctccccagttaaagatctctgatgaccggctgaccgtggttggagagaagggctactccatggtccgggcctctcatggggtacgcaaaggggcctggtactttgaaatcactgtggatgagatgcccccagacactgctgccaggctgggctggtcccagcccttaggtaagctgggagagctgtgtgggcctcagcaggggtaatgggcttgaggtttaccagcgcatggtcttaaaaattaaattcctgaagttgaagccagtttggtattcttaagaatactgtgagagagagtttgtaagtagcttgcaaaattgaccaaaaatatgtacaaagaaaagtagaactttttttctttaacaaagcagttaaacttgcggtcctctgattttcacatctcctttcattgggacaggtaacctccaagctcccttaggctatgataagtttagctattcttggcggagcaagaaaggcaccaagttccaccagtccattggcaagcactattcgtctggctacggacaaggggacgtcctagggttctatatcaaccttcccgaagacacagagacagccaagtcactgccggacacctacaaagataaggtaagattggccacccgcaggcactgtagctgcagtcagtgcccctagatgttgct

SEQ ID NO: 33438 - DNA, 1144 bp, Mus musculus
gctcctcggctcctcggctcccatcagcaccagtgtgagccaagagcgtttccccctctagcgccccggaagacctcgctgatccctcttgcaatgcttggtcctgaaagcactgaggacggcagcctcccgtcgttagcccagtgcactaggaatccctgggccgcgaacacatttgtcttgcttgacaacctccctcctaatactcaggattgttctctcgtgggcatcccgttcaggacatgaaaaagatataccctccgtatttggaccattgtgtttttctgtttaggaaaggccattttgatgtttgtcttttcattatagggatgcaaacttggttgatgtaagtggtctggagacagaatcttctaatggaaaagatactttggtaagtatttcctctgaggcctttggaaggcgaactagatttggttttaaaatgtttaatctatttttttttttttaaaaagtagtcaggccatttgattctcttattgccctgtggctccaggaaggtaccggagacacttcagaagtgatggatacccaggcgggctctgtggatgaggagaatgggcggcagttgggagaagtggagttgcagtgtgggatatgtacaaaatggttcaccgctgacacctttggaatagacacgtcgtgagtacatttcatggccttctagacagcatgatcctggagagatggcttagcattttagatcactagttaccctttcaggggtttgggcttgattcccagtattcacatggcagctcaaggaaccccagttctggggtggaaggggaaattatgtaatcatatttctttttttttaattaatttatttattttatgtatatgagtacactgtagctatacaaatggttgtgagccatcatgtggtttctggaaattgaactcaggacctctgcccgctctagccctgcttgctccaactctgctcacaacagcccaaagatttattatatgtgtacactgtagctgtcttcagacacaccagaagagggtgtcagatttttgttaggagtggttgtgagccaccatgtggttgggatttgaactcaggacctttggaagagcagtcagtgctcttaactgctgagccatctcaccagccctg

SEQ ID NO: 33439 - DNA, 1099 bp, Mus musculus
gatctcctcttcggggttctcactgacacccatctcctagcattaatcgcttctgcctcgtgagatgattattttctctgttatcgtgatgtcaatggcaagaattacatattctgtattttttgtggtaccaaatgcactgccttgtacttagcaagtgctaaataaacatttattaaagcaaaatgatgtgattttttaaaattgactttagtttttaatgatatgtctatggaggcaggatcatgcataggaatgtggtgcctgaagaggcaagaagcagcttagggttcccctggagctagggttatgggcagttgtgtgacacccaatgtgggtgctgggaaccaaataccagcctctaatctgagccatctctccaacccatcttcatttttgaatagtatgacttcgaagtaagtttgacattccccattgagagtcccttgagaatgctgatggagttgttaaagggaacaggcggctttagggactcctggtactgcccagttcttcagtgcaccgataaggagagccacggctgtgctgtctccccatctataatgggagccttcattaaaggctgacttcagagttaccgagtagctcagaactgggtgctgtgtcaaagttaggatgccctgagccaaaagaagcactgtgtcctgatagagtagaactctcaggaaactcaccccgctaagcagttcctggggaggcaggcatgctactaccattgcagccagcagacatggcccctgggatgccagctatgacacatagtactgtatagaggcagagtctctgtgcatcttagagtttattagccaacaaaacaaaacccaaaaaccctggtccttaaggatcattggctagcaatgccttcaaaatcagaaatggtgagaccttgtattaatccagtccaggtttttccctagaaggtgacagcctgagtgagtggacaggtaccttctgagagagggaagacaagttgtgtcaccccggtgactaacagaactgggaagtgagtgtggatagcatgactgttggtggctacagcagttacagatgacattagaccttttcaggagcaaagttt

SEQ ID NO: 33440 - DNA, 1233 bp, Mus musculus
cctacgaatttacaactgtacttcacagccaagctacgcctcatgcatgtggggcagtggggaataatgcaagtgcatgtttcatgctatttattggattcatttcaagaattctatgaatagtctggaacaccctcattctgatctctctaagggatgaactccatcctggtgtatgttggccacgaggtgttggagaactacttccccttccagtggaagctggcggatgagcagtcacacaaagagcatctcattcagaacatagtcgccacggctctctgggtgctcatcgcctacgtgctctataaaaagaagctgttttggaaaatctgacagcacccgctgaaatacatagctagaggagtccagggggtctgggagaagagcggcggcagcctccctcacagaggggattgcttccagatgctgcgtccaaaccgatttgcttagacatcagaaagttgcctgtgtctttctgactcacatatctatgcatctgaaatgccatgctctccgctttctccattttgtatgaaattgctatatttggaacatgtgtggaaatcttgtttaacttctcagagatttactctggacattttgcctctgtgaaagaggccaaggttggtagactgtgcttgattcagagagaacccattccaagcttggacagcacctggggtttggtccctggcatcacaaacaagcaaacaacaaaaagaaccaagtcttatttcctgaaaactgactttccacgtgtatgcgcatgccgaccgtaccgccgtggtttcatggtcacagactataaagctttttgaatggactgtgtcatgttgtctgattttatttatttttttttttatagtatgaactttattgtctctagaaagccaaagtgattttccttgtccactttcacggctttgatggccccaccaaatgcatcatttaaagctactcgcttctttcctcacttggaagaaagctgaaatatagatttgttattgcaaaccactctcgttacagctctgtctgtccatctaccttattattgtctgtctgtctgtctgtgctggcatgtctctggatgatacctaggcatctctaggtacccagagatggagccctgggaagaagaacgttcctccggagctgtctcctgggtaaggtgtggggccatcccctggcctgtcagagctttggttccctcatctgtggaaggaaaggaac

SEQ ID NO: 33441 - DNA, 1148 bp, Mus musculus
cctgccctcctatatcaattagcaatcaaaacagtccccggcagacatgctgacagaccagtgtgatctaagcagtttgtcgagattgaggttcccttttctcaggtgactttaggttgtatctgggggctggtgagatggctcagcggttaagaaccctgtctgctcttctgaaggtcctgagttcaaatcccagcaaccacatggtggctcacaaccatccataatgagatctgatgccctcttctagtgtatctgacaacagctacagtgtacttagatataataaataaatcttaaaaaaaaaaaagaaagaaaaaaaggttgtgactaggataaggggtaactttcctggactccccaaaacctctgggagaaagcccctgatctgagtgagacctgctgagccccctaccagccccattatttcatttctcatcctactgtggcactcttgtgctttaacaagtttctgtgtgtgctttctccttcacccggaacatcctgcctgctctaatgctctgtctccaccagggcacaggggtcaatttgcattcctccttatatccccagagtctagaacgtgtacttagcaaataactctgtgtgctagatggttaactcgatgaagatagaaacaagaattcaccttaggtgactctcttggtcatattgttttcttccccaggcaggaaaaatactggtgtattacaaggatcagacgaaagccatcctgacccgatttgccgcctggtgctgtatccttgtaagtagccagccttctttactctgattgctattctttttttttttttttttttggtttttggtttttcgagacagagtttctctgtatagccctggctgtcctggaactcactttgtagaccaggctggcctcgaactcagaaatctgcctgcctctgcctcccaagtgctgggttttttttttttaaagatttatttatttattatatgtaagtatactgtaactgtccccagatactccagaagagggcattagatttcattacggatgattgtgagccaccatgtggttgctgggatttgaacttgggaccttcgaaagagcagtctgtgctcttaaccactgagccatctcgccagccccacccccacccccgatt

SEQ ID NO: 33442 - DNA, 1146 bp, Mus musculus
actgactgagctccctcccccccccctccagtcatgacagttcctttctgcgagtcagcactaaggtttagagcactgaagacagttgcttttcacacttcgttgtccttcgaggctctctttccattgagaggagggtcaagttgtctcagcatcactctgagtagaaagtagaactgtgtcccagtgagaacactaagttcaggggctggggctgctgggggcctgtttgtgaggctgtttgaaccctgcttcgtggatagccactgctctgtggttctgtcgtttaagtatgtttttttactcccctagtggctaccttggccctggcggtataggggacttggggaagtatcctcattgtactggaggagcagctggctacatcgaccgcctgctcctgggagacaatcacctgtaccagcacccatcctccaccgtgcgtgagcctttccgttactgagaactgggaagcagggaagtaggaagctagctttgtattctttaaggaaaaggtggtgtgaaatcactctattagggaaactggctgcattcatgcctcagatgttcacttcccgttggcaggtaaaggcatttctgattgcggagtgaagtgtaccatataaaacaagcagagttttatttagcccttcaggtttccaggcccagactccgagacagggactccagtgcaggattcgcggggtatcctcactggatccgtgtgaggagtgcagctggggcgtggggggtgttgaactgcaccatgcttaatctctgtgtctctgaggaggcattcagtactgatctgtactgggtgagggctgggtcccttatgctgcttgttggaggaggaggtgatttagggaagcagaccaagcccccacactgtcgtttcttttgttttatgttgtgggatccagctcagggcccagggagctgtacgctcatagtgtgtacctggctttactcaaggaccctgcaggaagtatgtgacagaagccttttggcagcatttctagtagccggctgggtatgactgtttcaggccttggaaaggttgagggtctgggtggtgcactgtatactcccaaagttctggtctcgtttttatattaaaaaaaaatacaaatgttttattgtaac

SEQ ID NO: 33443 - DNA, 1241 bp, Mus musculus
catggatggatgttgaccctggctgttcagccacgtaggcctcctctacgtctgcctgcatgtttgagtgttctgctctcctggcagcccggatggaagctgccaagcgagaaagcctggcttcaggatgctccctggtgaagatgcagaggattctggatctgcatagtttcaagggagtgatcaaacggtgaccttgaagacatgctgcctgccttggtaactttttatagactagtaggaaacagaaatcttttgggggagggggggacaacccactagttcctcagagacaatttcttctcattcagaaagccctgttggaagctggggatgttttaactccgtggcagggcacttgcctagttgtgtgcaaagccttggatctgacccatggcatgtgcacacacacaaatgctcaaagaaaatcccagacgccagaagtgtgcccctttcttgtcaataaggtcattgtcagtaccggagatgattttttttatgaagcgtttatgctgactcgtgtcactgagccaagtgtgcatggtcgttagctactttgtgggttcttctttcttctaccctacttcttccctttccaccccctaacactagataggagagaggagagagaaaggaaagtgggcactgttatattgttggacgacttcttgctgattaaggggtgtcgagttccttggagcaatgatctttgctgccaagatatctcatttcttcttgtttcttcttcgcccacgaccacttcacaaacaccgaccaacagcaaacaacaacccaccccgcttctcgggggccctagcacttatgtacttctgaaaagtccccagaaattccaatcatcacacactcagagaaactgtctgctgctggcaaaactacacccctgctagagcatgaggcaaatcatagtcagctgctgtggacagtctgaagcagcctggcatcccacacctgagattaaaacaaaaacattcttacctgtgttttgtttttgttttaagaaaccaaagtgcaccaagatagcatgctcttgagattgtggctgtctagagatttttggaacagcaagttgaaggaactttcttacctgccttgaatggtgctttgaacttcctgctgacctggagtttctgtgtgaatatttctatccagtgtccccctgtaccggaaagtacaaagtctgctctgggcttgcatgcctgaacactttaaaacactgtgga

SEQ ID NO: 33444 - DNA, 2033 bp, Mus musculus
cctaagtagttgaaggcctggagaaccacctcaagaagtagggatgtctgtctcttgctcttcttcttacctttaagaagagttcttttctgcttcaatagtaatgtcatatagcttgagttataaatgattggtttgcaactttgttaggtggatcccgtctatatcaggttgctctcacactctgattctgacggtgacttgaacttcttatctctccctccactttccagatgctgggatcacagatgtgcactgctaggcattgaacccatggccttgtgcacgccaggcaagcactctgccaactgagccacatccccagtccaacttcattgtattttaagttatttttactgaactttaacctccatcaataaggcccacacagtttaaaataagttcttctttcttttcccgcctctcttgttcataaccagtcttccctagctcgtgcctcaggctttctttctcctgatctttctccgatcgtgtgtgcgctctcagaatggagtcttgttttgttttgttttaggattctgcaggaccgtggtctttctagataccctaatctattaaatcagttgcttgatttacaaccaagccacagttctccgtacctgattgcctttcttgtggatgtctatgaagacatgctagaaaaccagtgtgacaacaaggaggacattcttaataaagcactagaggtgagttcctctccttgtctctcccactgccactgctcttgcatcatacctcatggagtttctcagggctctttctagtttgggggcgtactgtcagttgtaactgctgtgcggtatctctcatttgtgcaggacccatgttaaattgacatatgcccttgagagtgaattaaacattaatacatttttatttttcattttcagttatgtgagatcctagctaaagaaaaggacactataagaaaggaatattggaggtatattggacggtcccttcagagtaaacactgcagagaaagtgacataccggcgagtgtatagcagcgagggcatccggaagaagtggacgatgctttctaaggcctcttatgcaggagcgtagagtggttagagcggtcatctcttgcctgtgcgctaaagctgtccaggtgctgcttttaacaagaactaagtatgactcctgtgtgctgacgctgttcagacgagctctaagaatccattttctaaagcaaagtcattggaggggagggtgaggaaagtttcccataaaggaactactgcttttgtagtcttcccaacatttagtccagtcctgtagaatccgctcctcctgaaagatgtgtatgcaaggctgtgcgctgggagtgacgattgatttgcagtaacctgaatctcggtgcattatgcggcaactgcgcctgttggttagagctgctgtgcgcactcacaggatcttgctatcactgtaaccaactaatgccaaaagaaaggttttataataaagtcacattatctataaacaattccatagtgtttgatgtttaacagtatataagggacaaacaagaagcccagtgcttgggaggctgagacaggaggattgctgcaagtttgagccagtctggactacatagagaggtttgggccagttcagaatatagagggtagccttctttgaaaaaaaaaaaaaaaagtcaaaaacttaaaaagaaaatattactatacattttgtgattatgggagggaaatgtgaatttattaaaaatggaaattggtcctgtttttcttgtcagcaacaaaatggactcaagataatttaaactgaatttaatcagcatagatagctcacagtcattgcctcatcttctgaagtctatcccacatccacgctatgccatagcaacaagttgctgctgcctgtaccagagctgggaaactgcggcgtgaggagttggaacgcacggttccctatgccagctctaggttgccaccttctatggaagcacacttgcgatgtactggccgaccagaggctctgaaatgtag

SEQ ID NO: 33445 - DNA, 1191 bp, Mus musculus
cgtgctgagccatgcactcagggacgcgcataggattccatctgaccacagcacatctcaggagtccttgagatacagacagggtacgatcacaaacctggctgtggccttatgaacactgatacagatgtgggctgaccatagtgcaatgattctcagcctgtgggttgtgaccctttgggagtcgaacaacgcttttacaggggtcacctaaaacaatcagaaatgtcaggcattggccttgtgctttattacagtagctaaattagtttttaagtagcaacaaaaataactttatggttaagggccaccacaacatgaggaactctaaaagagtcccagtgttaggaaggttgagaaccactgctgtagaccccttccttaacacctgtccctgccgtggcagctgctgggcagagcactcagcggggtttccttgggaatcgcctgagtgcctggcttggattctaatagaacacgagccgtgcaaaccctggaccctcactagctgagctctattcattctccctgtgaaactatgctgtaaaccattcctctctgaaaagtcggaaatcacagagtaccaggagacaattgtattattgtgttataagaagtcagcttcgtaaaacttacctagaaacctgagaaaagaaaatgttaggattcagtgacgtggaaagttttaacagtaaatttagaagtccttctttgtaggattttctcactgatagcatcttgccttctccatattatgtgagatgaatctttaaaatctccatccctgtgctgttggtgcttcctgagcatctgaggcgcctgtcctccctgggtggcgcccctgctcccgaacacttcacacagcgtgcagcactcagagcacgcagcgtgcagctcacggagcagaggtctcaccggcctagtcccattgttaacactgtgctctcccacccagcgagtgtgtttgtcccctggccatgtgggcatggaacccagagtctcacacatagtaggcaaatgctccatcatcggctgactaccaagcctcatggtttatttttttaattttcagtctgtgtaaggaaaattgtaaaaatgcaacacagtataaaaaagtatttttctaacacagaaactgtcttgtgacagaattgtaacttgtcctagttacatattttttagggcagaagt

SEQ ID NO: 33446 - DNA, 1217 bp, Mus musculus
gaaaggagttctgcacagatccaaatttaattccaaagacaccccccggattaataaaatgctgctattttattataggattatataaacgcctagcactgaaaaacatgtaaagtgtgaaagaatgtaaagacccttttaaggttaaagtggaagcctgaggggggaaagaggtggctggctgtgcaccgtttgcaattcttcacactcctaagatggtccaaaagaagggggccgctggggactggagatgtaactcagtggtagagcacatgcctagcatgtgcaagtcttccggttccatcctaagcgttgaaaaagaaacaaaagcaaggaaacagaaaagttacccaacaaaggaaacaacaactaataacactgcttgccaattagcacctaaaggcctctgaaaacctgcattcgggaagggggccctggaaacacagcagcgaggacagtaggtattcaggccaggcctccgggccgggccctctaccccacgcctctatggtaggacccgaggaaccggaagtgggcctcgccgggggcggggcgggccgcggagggggcggggcctccaccaccacctctgctgcggacggaggcgagatggcggccaccgagggggtcggggaatctgcggcaggcggcgagccgggacagccggagcagccgccgcccccgcctccgccgccgccagcacagcagccgcaggaagaagagatggcggctgaggccggggaagcggcggcgtcccctatggacgacgggtttctgagcctggactcgcccacctatgtcttgtacaggtaacgccctcctgcgggccgcggcgccagaggcccggggctgagtgcgagcgacgacgacgcagctcggcggacgggggcgccctccgagtccgcgccgcgcagccccgggtggccgcaggctgcggcggcgctcttctgaagctagggtgcggtgacacttccgtggtcccgcagtgctgccctgctgagagccgtgcatcatccgaaaggcgcccttttgacagctcgctatgggataatgtcacttaagcggccagatctgctctttacaaacactgtcgggcctttgcgtgccttctgctgcctggagagaactttcctgcctttccttcatcttggccactgtgcacatcccttctgtcttcctttccatgtcccctagttccttgtcaaaaagtacttact

SEQ ID NO: 33447 - DNA, 1650 bp, Mus musculus
ttctgccctataagctgtacattcatgattggctgtcttctacttcaaaagtacagtcagggccaagtcgttaggttactcggcccccagctcgtacctgcttcagtggtgaatcagccaaccttttctgaatgaagcagacatttgctgttacagaatatgattaactatgaaagtattagaaatgtgaactgagtttccttcactatactaaagtacttcatttaatttaaaggattatgctgaacgttttcaaatcaaactaagggacgtcttttaaaagtgtctgactctgttagttttgttttgttttttgcttttctggagttttgcagtattggagatccaacctaaggccttgcatactagaatactttagtgatcatattttttttttatttggaggcatctctctttttagcctcggctggcccagaacttcctcagctcctcctgcctccgcctcctgagtaccagggttagaggtgtagaggtgtgctctaccactctcggctaagactgagcttagtgaagcctttcctgcccaggcgtgatcgcactttctctttctcgtctgcgttgatgatcaggcagcagaatcagaacattattgtcaatttccaaacaagtcacggggtcgttactgtaactcagtacagaagagcaaatggtaggagttcattcttttgttttctcgggagcctaattgaatatgtattctacaaagactcattagtcacggataatttcagtatgttctaagtgacatcttattataaatgtagaaaatggctgtacacagatgccaatcagagacctggcacttaactttcataacaatttacttgttttcttttttcccatagatttagttatttgcaattaagatgtactaaaatatcattgtcattcctaattttggcatttatggattctataattcataataatttgtactgtgaagaataacttccaggtttgttgcagttctctcattgttaggttgccagccgtttataacgtccctcctttgttctgtaagagattccccctctggctgacaattcagtcgagagttctgaggatatattcctcatcatcgtaatctagaaacgatgtccactttgggctctgcattcctcgcctcaactcagatttaacaaaactgtgttcaagtatttccctcctgcttacaaaagtttgcccgtcttgagtctggtgagtttccccactgttttgctgaggaaaatgacttgttagagacttcagttaaaaatgtaagtaaagtcacaaaaacgaacttgtgagaaaccatcagaaggtagggttttttgcttgtttgtttgtttgttttaatcctacatttccttttggtttattttgattttatgactgccaacttgttatatatgagtgtttatatatgcatataatatatgtatatgaaaaagtgaagatttggtcaaactatattttcccattcaagtacaaaaaatgttttcaaggctgcaaaaagtgtacagttgttaaacaagttgtaaataaagacttgtataaaaatccagtatagagctcgttttttctgctcttttctatgactgacatttaaacgttgtctgatttttacacttgattttgcacttgctgctg

SEQ ID NO: 33448 - DNA, 1135 bp, Mus musculus
caccaacttaccaacagatatctatatcatactttttatagtttgcaaactgttgttttaatattattcccccctaataatatgttatacctccataaaatatctgtaaatgaagacaaaagtggactttaaaaagtaagcctttacgtgtttgattcagtccactgctacaggctcacaagcaggtgtttatgtctgaaattggaggtacccattatctgaaaattcctctcccataaggtaggaattattcaaacccaaattatatctatttcaaatgtgaaagaattaaatgccgtgagaagaacaagcgagtgagtaaaagacaatccccaggcatgcagagggcactgcccatacccgcagatgtctggtcagactcactgcgagagctctgagctgacggcaaactggaaagagcccatgttcttcctgtgcttgcaagcctcctcggggaccactgtgagtccttgtgtagtctgtttcattaggatggcatcttactgttatctcccaccctctcctgcataggttgtttatccctctctacaaaggctctagcacgttactgggactggatagtgctccatttctgctgtacgtgctgtttcctgttggcacctcagtctcaggattcagagtctggaaacacgcttataactgggaagtctattttataacaatgctgtgaagccagcttttggggtttgtgctaggaattgaagctagggcctcgtgcactccagggcaagtgctctactcactaaacacttttctgttgaatgagatttttcttaccctttaaggtgctgtctcctaaaataaaaacctcgagactgtccctacttgttgctcacacacacacacactattgcaaatcccaaagagagaaggaaacaagatattccagtaattaagcaatcagatcggctaaaaacggaggaaaggtgatttcaaaaggaaatcggtagaggtgccaggtattgcagaaatagttgctatactgagatttgttttcggtttttaccttggcttttttcttaactttaacttgcaaaggtttcatcttgtactggtagtgagttttttagacccagaatttttccatttgcaacatgaaagtagcagtcatgtt

SEQ ID NO: 33449 - DNA, 1098 bp, Mus musculus
tgttgttttgattgttgtaaattcacaaaattaagtcttaatttttccaaaggaagatttgtacttaatttctggaatgaaaaggatttcataaattttaagccataataagtggaattaattttcctaataaattatgcttcgctattcattgtagtaaaaattatttatgcatggtgatagttatttttgtagaatattccatgttttcaccaatcgctatttttcttctaatatttcagggaatgactctacataaaaaggcggctgaagacagactagctagcacaggttcagggcagtcatttctggctaggcaaagacaagcaaccagcacaagaagatcctacccaggccatgtccagccagccacagcaaggtagaaaggtcttgccactaggaatttttaaaaagcatacttctgttacatataacaacatttcaggaaattcagccagcttgttttctttctctcctgtgttaatatttagtgtttctcatgaggattcctctctctcctatctttggttactttgtcctttactttgtggtcttttcagttccttttaatgtgccaaaaatttgtaaatgtacaattaaaagtgttgtataatagtgtaatactttttctttgtatgaaaatgtcttcttccccatttgtgtgggctttgtaaagaatcgggttttctgccaataattgatacacaatttatattctttatcgtgcctactgtgttaccatactttataagaatgtctttgtttaaagggaattaatctttttatggtgtattaatctgtgttttcgattgttttccaaatgcacttcagataacttaaatatttactgtactatacaaagtggtgtcaaatgcactttttgcaaagacgactacattggcagaggtgctagtcagacctgtggcacctggcaggatcactcagaggggagaaattaaacgtattctaaggtttgaagttcttatatgaaatttcattctttcctgctgtattgtttgctggcagaagtgaaattggtgaagatatttgggtggaaattacagagaagaagaacttggcaggattttttttccttcc

SEQ ID NO: 33450 - DNA, 1345 bp, Mus musculus
tgtggcagctttacacttgtactttctgcattcaagaagctgaggtagaagattgctgcaagttcagggtctgcctagactatgtaatgagttcccagaagcttgagctaaagagtgagatcctacccaaaccaaaagcagggcagtggggaaaggtgcttgctcccaagcctgacaacctgggtctcacatcatggaagtacagaacggattctgtgagctgtcctctgaccttcacatgagtgtacacacacacacacacacacaccccacaatcacacaccacaaacacaaagtaaataaaatgcaatggaaaggaaaatagagtagcttgtaaagggaaatgattttgtcccaggaacataagtaaccttgggaacaagtagtaatgggtacgattttgaggaaacaggctgttcatttctattggcatgggtcagggcctttaggaaggtactaaggacagtatttagattttacaaataatgagttaacccttgcagcaaaatgaagatatttgattagttgtctattgtcctgaaaatgtaaaactattatcttgtagatggcattatttggctcagattcatcgtgccttgggcagaatgaggaaatgtgtattagacgcctaactactgaggttcatactgatttggttgtctttgatggctgtgacatggggatgtgaggtctgtagttctgtttgaatggactgagtactgtaactgagccgctaactggagagcagctggatggggtgtgaggtgatgcccaggccctgccttctcattgctagtaccattgacttcttagcctcagtgtgtgtgtttagggacagaaagctaaaatctgtcacattccaaaaaaaaaaagaaacaatcagattagctgccaagtaatgagattctgaacgaaacgtcaatttctttcctaatctaggcttaaaatgaaggtgttgtctgccattaaaaacaacataaaacccagtccttatatagagaacacgatcaatgcaatctctcataatttttcttttatccttagaaaatgttgtaaggaaggaagagcagcatcagcttcctgttgcagaggtgaaaccttcatcctatggatgaaagacttttgttttcctaacataatggaactagtgatatttaggtaggcatgaaagctagtctgaggagaagcgggaggagtggaattctctggagtcaggttttcataacacagttttccttccctggaacagtttcggtgcttctaagctaaagctccaggaagaacactcgtcacagcctttatcaatctcgagggtatacttgcaaatgaagttaagagtggcatg

SEQ ID NO: 33451 - DNA, 4313 bp, Mus musculus
gtcccctccctaagctctcttcacttccatcacagctcaagctgactccagaatacctgcagctgatgaagtacaaggccattgcttccaacagcaagatttacttcggcaaagacatccccaacatgtttatggattccgcaggggggctgggcaagcagtttgaggggctgagcgacgacaagctgggctttggcctagaagatgagcccctcgaggcacccacaaaggagaactgaggaaacactgtctgcaagctctgctcgggcagcttagagagagctgtattctttaagatgagacagagcaaagcgctcctcctttccacactaccttccttgactcttcttactgtggttaaaaaggaagaaatggacacaaacttacccccttctgggaagggagagcagatggagagttgttttttgggtttatttttaattcaggtaagtaagttgtatgacttctgagaaggtgtatgcaccgtagatttgacctctgacctgcagacaccaacattgtcactttgaagctggtttaagtggagctactgtcagtatgaagagggagagtgtgtgctgcctcctcgtgcttgaattccttcagggaaaagtgtactccacagttctctcccttgcctctagtgtaggcagtgtctgcgtgtggggctcgtgacagaaggccgtctgctgcggaacatgagctgcagagagcgttggccggctgggctttttgactgagtggattacttgagagttaagctgtcttgagccctttttaggaagaacttggtgctaggttttgcaaggttttctacacactgtactctgctctagtgtttgttggctacatctcaccgcagcagggcttggtcacaccacacactccttttccgtactttgacctgatctgtgatttcatttcttcttgaataatctattcatgagttgcactcagcgttaagatgggaacaaacaagtgctgttagctgatgacgtagctccttataccccttagcactgtggtgctgtgtggctaattatgcgtatgcttttgagaccaaacatctttatcattatggagattcttcattgaagagcccttaacactgtggagaagggcccagccagatgacacccaagtagtagtgcctgtggcctgtgctggggctttgtctgacactgatgaagagagcaggcagccacttgagagtcggctccagtgagtcaccctaggaaactgagaatgcgaagaatagatatgagagaaagggatttcttatcctgaaattgcactgggggtggggctctaccatggcctgtgagtgcacacagaatgcctctgtggagggcagctctgcaggtaatctgcagacatggcagtaccctgtgcaaccatgactggctctagcttaggacttggccttgttagctggtcccctacctcatcctccccccacacaaagcacctactgttctctcttaggtgactactataaatggtattttctggcatcaattcccacctcagttttggttttgtaagtcgggccagtttgctcctaagtggcaccagacttgtcaggtatttgggaagcattcagccgacccaaaaagaggcagggttcactgtgcttacttcagatgttcccttctctgtcctgactcctcaggccactgaccctggccacactgtacaaactacaaaatgttcctgaaaaggacattttaatgtgctcaaaagctcttgcaaaagtgggtttttttccccaagaccaactcatcttcttctcatttgttgctgctaaccacttgttgagagcaacgtgctatacccagcatcctctcttgtacgtgcacctgagaaaacactacttcagtggagtcggtgcaggagggagggtaccccgccatccagcgccctcctagcccgagaggctctgtaactagcattctgagagctcatccctccattacaaagagccacagtaaagtcctgctgcagctgctccttccctgcccctttaatgtcacttctttaacagaacagaaatgtccccatgtcatagcataaattcagtagctattggtatctgtcccagcagtaaaatcatggaactcagatgtctttttagcatgggatgcctagcccatctgtctttatgaccttgttttttgtaatactataaaatctgacttaggcatttgaattctaaacatgtaaaatgtgataagcctgcagttttgtaggcagtgaattcatagctgctatttttaagtagaacttctatcaaaatacgttaaccgtttgtaaaattcagtttttgtaggactttcccaaggcccagccaccttggtagaatgcttctcactcactaaatgttgcagaagcaatttatattccatataggtttttaatcacttttcaatatatggttagaatgtttgtaaggaagcctaagtttaataatttttatataactaaaaataggtgtggaggactcagtgtgggtactgaggaggaatgaagtgctctgaaaagggaggtgtataaacggcctgtggggccgtgtgtcttgtgaaagtgagatagccgtgcttactgacctgggctgtcgtcagctggccgtcggtaaactacctggacaatagcccctctgtctgggaactttacctacttccttgtcctcagtgggcttctagccactgtttgtttccttataaaagctgtaatgggcaatcatgtgtttgtacttccattcctttttatctctacttctgtgtaaactggtgattgaatagttaaagcaattttttcagtgtgccccaagggcattaatgagcctttataactgagaaatgattcttgttatagtaattattccataaatgataccactagataaattaccttgggttaatagctccaggatttgtttcagacaacaaaaaaaggtctcaatgtgaatatacttacattttggatttaatttcagtcttgctaaataaaatgtttttgtctttttttgattaaggtaaaatttaccagtagattggaggacaggtgatagaaatcaaacttccttcttaggctttccctaaaaatatatccaggtaatatagattcttaccagcatgctggtacatgcctttagctccagcacccgaggagaaggatctgtttgagcccagcctggtctgcatagtgagactatggcaaaaacaaacagaattaacacattgctgcatttctccagaagataaaggcattcccagttgaccctaacctcatgtaatatcagtttaagtaggtaactcccagactggctgtggcaagctgcctcgcctagtgtcactagataaatgttaatgtcagtgaactttacaaaaactatataccatccaaatgttttacaacacctacttttatagaagaatttgcacttgatctgaaatttgcatttaactggatattttcttttaaataacaagtttgggatatcttggtttgggttttggtttagtgtatgtagtatagggtattttgctgatgtatgtctgtattccacatgcatacctggtgcctatggaggccagctgagggcattggatttcccggacggggcagttttgagttgttccttgtttgctggaatcaagcagggtcctcctcaagagcagccagtgctcttaacctctgagccatctccctctcccccaccctgccacaacatagttttcttggtttttttttgggggggggttggttggttggttttgggggtttttttgggggggggggtgtcgagacagggtttctgtgtatagccctggctgtcctggaactcactctgtagaccaggctggttttgaactcagaaatcctcctgcctctgcctcccgagtgctgggattaaaggcgtgcgcttcccaccatgtttttcattgttgttttcttatgtttttcttacactgtgcttcctttctttttgaaaatggttctttcacaatttgcactttgaccataacccccacacacacattagcatcttaatcccttaccctcccatcaaacttttcttcccatcaagcccccttcttacttaaaaaaaaaaattcactaaaactgagtttacttaatgaattatgttatttttctttactatttatctattcactttatattccaatatcagccccttctctcttcccaggccccccacacacacacacacacagctcctccctccattcttccttcccccttcctatgaaaagggggcagccttccctagatatcacccctctggcaca

SEQ ID NO: 33452 - DNA, 1177 bp, Mus musculus
tccagccccagatcacagcacatgtttgcactggggtccctgttagttttgttgctgtactaaagacaatgaacaaaagcaacttaacttgggaagaaagggcttattcggcttatacttccacagcagtgaaagaagccacggcaggaatctggaggcaggaactgaagcagataccatggaaaaatgtcgcttactggtgtgttccccagggctactgtcttatacaccaagagtgcctactccgggactgcacaactcacagtgagctgtgccttcctatatcacacattaatcaaatggcacagacttttctataggccagtctttgtttgtttgtttgtttgtttgtttgtttgtttttcaacacagggtttctctgtgtagccctggctgtcctggaactcactctgtagaccaggctggcctcgaactcagagatccgcctgcctctgcctcccgagtgctgggattaaaggcgtgcaccaccactgcccggccagtctaggtaatttaacttctcgttatacatcatcctgtgctttttacattgccgttttggtttgtcattgtttttctgagacccagtctgactaacccgggctggcctagaacttgtggtaatcctcctgtctcaccctcctgaattctggaatcgcaggcacgaccaccagcacacccagcaacatgccagaaagttttgtttggttttcacacataaacttgtctgactcagttctagctgctttcctatcctcatacatatccttccgctgctttgttgtggaacacagtttacattttattagaacaatttgatctttttagggttttgggtttttggttggtgggtttgtcgtgccaggatttctctaaggtccctggaactctccgtaaaccaggctgaccttgaactctgagatctacctctgcctcccagtgctgggattaaaggtgtgccaccactttaggtcttgtcctaactatcagtttgtataaccaggccagagctgagattagaatgaattatttaagctaccaaggcatagccttcctgtacactctagtgtctctatcccaacaaggttgtgggttcagtcttcaccatggaggaggaaaaaagcaaggcaggagggatgggaggcaggggagtagttagctgactgcctggaagatt

SEQ ID NO: 33453 - DNA, 1203 bp, Mus musculus
agattgaagtaggatctacaaatgtccggatagggagcactatttttggagagcgggactactcaaagaagcctgccctagacaagacagcagacgcgaaggcctcagtaccactggtgcaaggacactgaggccaagccgctcagggtcaaccatgcaccagcctagttcatttggtgtccgcatgtccccagtcacactcttccgtggcctttgtagagcgctgaagattatacatgttgacgggaatcacccgtgcttagcttcggctataggaagctcgggtcaagcagtgacttaggctgtgagacttcagaaccgacaccaatttagccaggacctgagttcggttgagcactgctcaggaatacccagcccctcacaaatgcgtgtccccaagtgacttttgggttgctggtgtctataattgagaaaatcagaggggttccattttccatctaatagaacaccctgctgtccccgctactctggagtgaggtgattctgctcccagtttccatcctggccttagatgtctccaatcacagctcctctgtggcactgactgaaattccagggtaacttgtaaactgctcttgggcctttcttgctgtaaaagagggacttggagcttattcctcgaggaccacggtgatggaaagtggatgacaggatttcttcaccatcataatccctttctggtttttagtaaagacttggagatgaaagcctccagtcctggcgcatggtttcagcaagcctcacttgcttttcctcctctggggatcagctatccccaggacacactgtattcacaagccagaatggtgcagctcctgactgttcacagtgccgtaagagctccaaaaatgaggaaacagctgggcctagtagcacctgcccgtaaccccaacatttgtgggatgcagccaggaagatcaggagttcaaggataaacaaagactaagtcagactcttctttatctaaaaacaacaataaaccagaaagcacagttctgcagtgatcacaacggcttgcgtgtgggctgcttagcttatttcctgatagcttttccgcttgtttcctccagccctcacatccttcatttaacaaataacttcagaacccgttgctgctgaatgtaatttccagacttaaaccactatgattcttgttctgtttcaatcaaagctagcgcggtc

SEQ ID NO: 33454 - DNA, 1463 bp, Mus musculus
tggcaaattcaaaaccagccagggctacatagccagttttatgccacctggcttgtacattgagaccctgtctcaaaaaaagagtaaatgaagtgttagctggcttgtttggcagttattggaaaagtgcctgcttcctgttgtatgaaattcttttgattgcctctaggtggcgacattggttggcctgaggaacaggccaacttgtgaaaagcacacatatttggcacacacatatttggtcagcagtttgccctagtagggcctattcagtcttactctctttatgaatagaagcggagggcatggaagacatgttccccccggtgacacatggacttgcaggctcaggtggttttgtcaatgctacgtcttgattaagggatctgaggacaactctggaagctttggggaaaccgcaatggttaagccgtgaaaggtctccctggcttgtgcctggggagtaagagcacagtagaggagaagccaggagagaactttagtccagatgaaggaaagaagcccgactatatccacaacgggacggctctcttgagaacattcagccaggctatgagactattgtttcatgtgagacagctgcttgggttactcccaggttttaatagcagcagtgacagcatcagggcaagtttaaagtcagacccacccagccagtaactgcctctccccaacagcccatgccctggtgtgtgtgtgtgtgcatgccctgtattaaagttctctaaggaacgacagacagataaaatgaacacacacacacacacacacacgggatttattagagtggcttacaggctgaagtccagacagtccaacagtagacagataggtaagggatccagtaattgctcattccttaagactggacatctcttcagcgcaggtgctggaatcccagggagaccctaaagagctgccagttttcattccacattggaatcccaaaaggaagtaggcttacttccagcagaggaatggctcagaatagatgatctgccccaagagagtcgggcaagcagacagagagcacaagcttccttcttccaagtccttttatgtgggtcaccgccaggaggtgcggcccagagttcgggtgggtcttctgaccgcaaaacatccagacttaaatgggtcttcccacttcagaatttcaaccaaggaaagtccctcgcaggtgtgcccagctgcttgggttttagttggttccaaacgttgtcgaggtgacaaccaagataagccatcgagtatcccaaatccagcatcaggtttgagaggctcaggaggccttgtattcttttctctttcaaataaagcatttaagccttttatattatgcgtgtgggtgtttttctcaaatctgtgtttgtgcatcccatgtgtgtctagtgatcatggaggtcagaagagggtcaaattgctggagttatggatggttgtga

SEQ ID NO: 33455 - DNA, 1283 bp, Mus musculus
gagcgccccagccacacgtcagcggtaaggaacagttgtgaagagctacaggatggcatctgcttctttgctgctacctcctgatttggggagttttgttgctgctattttgagacagatctcactggctttaagcttttcacacatacacacacccccacccccacccccgcctcagtttttcaaatttccaaatactggaattacaggtatgtgccaccattcctggtagatcaatgtatttttttttttataaaatgtacacacacacacatatatatatatacacatatatgcacaccttaatatatatatatatatacatatatacacacatcttaaaacacacacatatgtatatatacatacacatatagatgcacaccttaatatacacacacacacacacacacacacacacacacacacacggccgctttttcactagtagagggaattccattgctggtcacctcattctggaattaaaatgtttcatgatttttttttttcttcctggtagtaataaaaaatctcactaaatcttaacacctctgctcagcgagtcataggccaatgccgtggatagggttgccgtggatagggtggggtagcggtggttctcaatgaagaatctgtgtgttcttatcacccggaaggtgaggaacgctggttatactgcagcactttaatctgaagggcaagactgtaacttgatttacctaacaagctgttgatgatccacacgtatttttatttaatctctcttacagtactagggaccactgtaaatttcttgagatgatttgtatttttttttttttttagtgtcatgaaattcattaatatgcctataaagaaactgtatccacttgatctctgaaaatgtacatgtatatttctgttctgcatcctggggttttggtttgattttttgttttgttttttttgtttttaacttgatataagtgcatttttactgtgataacctaagtgcactggagcactgctcagaagaggcagcctggggagctgccttgtgtatgaagagtctggaggtctctactgctactcagacctttggtatgtaaccgagtcagctctagcgaggaccgtctaggtgaagtgaattcctgtgctctgaaatgccacttggggactctggagaatgaaggacagtttacttcgggggctttgctggtttctgcagtgctgggaaacactgcctttctgacgttgctgtacctcacaaggtaatagaggccctgcctacttataataac

SEQ ID NO: 33456 - DNA, 1166 bp, Mus musculus
tcatggaggagacccccaacatcctccgagtgccggcgcagatgggcaagaaggccggaaagatgtaaactgcgggaaggaggcgtggtctgaaggaggcgtggtctccctagtaactagcacaccggttccgaaggcctgctgtgtgcatcatctctcaagagttaattctcctagctgaaaaccagattaatgattacaacgaatcttttactatacatctcccagcgttttgtttttcaatgccactgtgcctttgactacattgtaaatatcagatttgatccgatgtgttttaacgccagggttgttgccctttgatgctgagatcttccggtatggatcctccgtgaaggcaggctcagggtgagatgagaaagggactttgggatgtgtgctgtttcacccgctctcttggcctttgagcacctcggttgaggcacaagctcaatttttaattcgggtaaacccgaggactcaagggttgttttggtgagggttggtttgggaggcgttgttctgttttcagggtggggtgttatgtagccccgggctggggctgctcttgaactcactgtgtactgagattggccttagatttctgacctttctgccccccactgccaagtgctaggattacagccgtgtttgatgccttctggtcggagcacggttgtttacataaaacctctgagcatgcttcttagatttttgaatatgccttttacaattggcagtaccctctggccttaaaaatatgttctccatggattgggggatatagctcagtgggtaaggtgcttgcactacaaacctgatggtctccgtttggattcttagcatctatgctaaagccaggaagagtggcatgtgcctgggtgggggctgggctgggggagggcagagccaggcagatctcaggggctcactggaaactccaggttcagtgagggacagtcttaaacaataaaatgaaaagctaccatagacctctgcccttcatgtggtcacacacacacacacacactgctctttagatctatagggccatttcctggagacatgaaagaactaaagagtcacttttcaggctggagtgatagtctagtggttaagagcactcactggctgaacagtggaccaggtccagaggacttgggttcaat

SEQ ID NO: 33457 - DNA, 1229 bp, Mus musculus
cctgagaaagatgctctacctgttgcctcccagtggggcagctccttgaacccctttgaggacgtgcagatctcagacccgggagccaccacggagtccaggtcggaaccgaaaccaccagttcctgcggccagggttccccagaccaaggctgtgaagccgaggtgagtcttcgtctttacatatggggcctttctccaccactgcctggtattcagcaaagcccccgctaggacaaacccggccggtctcaggatgtgcgtgcaaaggtttgctagcctcacgtcatttgaaccaggcccctctgctggcctggcctgctcagcacaaagggcagggcttttcccagcctaaagctacagcatgcctgagtgaaggttgtcctcagggagctaggcagactccggtgagaggagaccaccgtctgtggccgcttccgagcgtgtgagcggagcgtgcgtgcttgtggtgggtacaggcagggcctgtgttttaaaggttttcagtgctgtcctgtggagatggctgcctttcctcctggtgcttggggtcagtttgctggtgtgagagacctgggtcggctctttagaccgttctctgtctcctctgtgcctgatcgttagagcctgcctaagccggaaggagcgtctgcttttctgagtgactctcaccttgaccttgaccttgctctggaatgggggtggcgagacaagctttttggggattctgcaatggatgcactttctctccagaatccatacttgttgccttccattatttcgatgcttttcgttctgtcatagtcaactcttgggactgagtgtatctcagaaagaaactgtaggctgtcggctgctctagctgaatctttccatttctgttagaacagacccgtgtgtgacggctgtgcttggcgctaaacagtgtctctttctgtggggagactacgcctcagtcgtggaggattcacatagcaggcacggggccctggcttcgactccccagcacgaatgatcaatttgtatgtcaagaagtgctgtttccttcaccttgatcattaaaaacctgtccctccctaatgactactttaatatgtgtcttgaaatgcatctgccactgacctgcagattttattttgtcctttttgcagactggaagtttctccagaggctcagcccaaagccaggcttccctcccccgactctgctctctttgccccctttccctct

SEQ ID NO: 33458 - DNA, 1159 bp, Mus musculus
tctttccctaacttctatgctgttccccgttgagctttggagtggatgatacaaatggtccatttaaatccgaatattaaaacggtcacctggtcctaatacattgaccaatcccgtctctgcagtccctgctgcctgccctcccttcacacccaccttaaatgtatattaaaaactgtttcttgataaactcggcgtttgctccctaaaaaaaaaaaaaaaaaatgaaaacaaaatggaagaaaaaaaaaagagaacacttgcatcagagtgtgacttgagctcttgattgacgctgctgtgtgccgtagggtgtttgcttctgttggggcagccctgtctagctcactggctgacagctttgtcctgctttctagagactgacttgttatttcaggtgaattgctcgggagctatagccagcaatgagttgggaggaagtgcctgggaatcccatgtgtttgtttactcttccctgttgcttgctctccctgggcacttttcctccagggccatggaatgttcctgtacgtcctgaacattgctaccctggagactgggagtcctgaggttctgttgctctgacaactcactgccccatagcctcgtgcatcagcgctgccaaggttctggaagaaagaggcctgaaattattggcaccgcacgtgctcaactatgaccagtctttctgtgttcagggatgtacccacagcccagaagctagaaggcagcttactaaagatctacaggcaagatggctatcccagcaagttgttcctggcctacaaaggtaggaggcagtcatttcagggtttaagattttctacgtttcaactggctgtacgtgggcagtgtccctagtggagggttgaagaatagctcacgtctctgctgctggaaaggctttcgtttattaagggaactgcccagagcagagaagatcagtgaacaacccgagtcacctcatacctgtcggggacttttgagaggaatcaagttttcttccttctcacccaatcctttttttttttttttttttttttttttttttttttaatctgcttcttcatcccctctagttcctcccagttctctccggtgttcttttgttttgtttacagtcccatgtaaattagactagccttgaactcacaaaata

SEQ ID NO: 33459 - DNA, 1242 bp, Mus musculus
tggaaactgttatagaggaagtagcagaggaagtctggaaactgctgctgacccactgtccttgcctcaggccagggggcagggcagcttctgagggttggacttgcctggacttgcccagttcttggaaacacagacttaggtctaatctcctaactgaaaatttgaagcctgccatggaatcagcccagccttctcatgaagagttgccttgctcatggtgtctcttcacagcaatggaaactctaagacatccccagtcaccaaccagccaacccagcctaagaaagtaaacgcatgtgaggggaaagtagggctgtctagaatcccccttctttgaaggccctagttctgtagtccaccaagctattctggaactcatcggcttcccgtcctagccaccttagtccagggcctagatgtgtgcaccaccatggcctgtgttaggatgacattccaagccttttattaaaccttagtcttcttgccaggacattagaagtgttaggcgcctcctggtggctatatgagatacaacaggagtggaatgttgaactgtctagttaatagcttgcacagctgaaagactccatataaatagcaatccaactagatgtaatggcctgtaatctcagcaccccaaagggatcacgttccagcccagcgtttgttgcagcaataaatcatctgaaaaatggaggagaaataatttagttcaattctttgattaaaaatacgtcaagtacctgaattctgttttagcacaggggatgtcgctgtgttgctcgatgctttcctagcttgcatgaaaccccaggtttgattcactgcaccacaaaaactgtaaatggtgatgcatgcctgtaagcactgaggaggtagaggcaggaagatcaggagttcaaagtcatcttctgatacataatgacataatgagttggagaccagcctaggatacataaaacccttcctcaaaacatatatatatgtgtgtgtgtgtgtatgtatatgtgtatatatctctgtgtgtatatatagttatatatatgcatattatattataatttattatgtattatatacttcatagcacatgtatatagtatatactgtatactattatataataaatataatatatagtggggtatagtatgtaatatactagcataatgtatatatactattatataatataatctatataattatatattatatagtatacagattacattctat

SEQ ID NO: 33460 - DNA, 1202 bp, Mus musculus
ttccagtgcttgatccccatcttcttgactggttgccccaagaaatattgtttccgtttttgcaggacttctggggattttttttttcctccagaaagacaagcaacggctatggatgcaacatttttataatgcctttgatttctactcagagtgagtcccctggaacctcaactctccaacgctccagaaccgatgactagaccacgaggtgtaagggaaatcttaccaaatgggtttcaccgtcctctctctctttccgagagaagttgtctaagacccaccttgaacttcactactacctcagcagctgggacggcaggccacctgtgcttgacggccctgggaggagccctatggccttggaggcctgccagtccctgcctatgtttgtgctgtatgcttagggaaaagagagcacccctccctccctttcttcctactgctttcctaaccctgatgatcgacatgttcctccacaaatcactctgtctccaggctctgtgtctctggttagtttgagagcaggaatccaggaaaaaaaaaaagtttgaggtttcatccctgtctcctcactatggctctctaagcaccatcttggaccatctctcacaataggcacaaaacagctctaatctacctcacagttaggacttcaaggtttgggggggaaattccagggttcataggaagaagtcaaactattggaatgggtcctttttccacttaaaatcaaattaataaatattattgaatgtggtttgtcccctgctcgccttttctctgggtttgttttcttttcgtggcctgcttgctggcttccttgctccgagctgcgttttgacaggggcagtaaattaggagtaatccttgcctctttcttcctaatcctcatcagacacaaccagaaagtctgtctgtgtaagtgaggcagtcgagtctttgcctcgccttcctccccaccttttctgaaacttttgagatctggttgcaagaaggagcgtggtcctgcattacatatctgtcttcatgggtggaggatggggcctgctgtgtccaggctcaagaatgtctaataccacaaactagagtggcttaataaggtctcattgacatcagcaaacactttgcttcagttttgtgtgcctgtgtatctaaaggttcagggcactggtttgagaagggacaatatgtcttgtgtt

SEQ ID NO: 33461 - DNA, 1189 bp, Mus musculus
aatctcaaaagcccagactccaccgtcctagccaacgcaaaagctttctggccctgtgagagaccctgtctcaaggtaataaactggaaaatagtagagggagacacctgatgcacccacacgttcacatgcagacacatgactccctcgactctagtttcttatgaagaaatctccagcaagtggatgagaactctttaccatggggaaggtgacaaacattagctttggataactgagtgtggcgatagacctgtggtcctcacccttcctcaggctgcgaccctttaatacagtgcctcatgttgcagtgaccccaatcataacattattttagttgctactccataattgtaattttactattattctgactcgtgatgtaaatatctgatatgcaggatatctatctgatatgtgaacacggtggggactgcaagccacgggttgagaaccactgtgctagacagcctcaaatgcatcctttctctctctgtctctctctgtctctgtctctctctctctctttctgtgctggacctcaagcatgttaagtatgcactctaccaccgagatacacccctccctctccaaaactccatcctctcattttaatgtgtctatcacttcagaatttgaagggacttttctagaaattttctaggagaaaggtgtgtggactgggcagtgcaggaggaagatggaaaccagaagccctcagcatcccaagctacacgatgccatgtcaaactagagtgactcctgaaacaagcgggtgtctccagtaactgaaaagaagaagaactgaaacagcagacagggacagagggtgagcgaaattgaggaaagggaaggggacggatctcatcagctgggagagaaaaggatgccagccacctctggttggtggcttcacaaaaagagtcttagagttgggaatagtggcgcacagatctgtaatcccagcactggggaggttgaggcagaaggatctggaggtccagaccaatctgggcaacatatagaaagactatctcaaacaataagataccttagggagagcatccaagcagaagaggggctatcttggatggtttgggttgttcggttttgttttggtttgtttctggatggttgccttccttgttgggtaaaggatagggtgcgggggtttctcttctttgcaggg

SEQ ID NO: 33462 - DNA, 1181 bp, Mus musculus
ttggcgcgggtgggggccggcctccgggaaccaggcattcccagcttgccctggagccccagtatagacgctgatgaaacctacccgcctgtttgcatgatgaaatcctcgtggctcactacttccctcccaatcctcgcgccgctcccacccacttttgcgcttctcccctccccggtctcctcccccaactactcctcttacaactcaaaaacaagaggaatcctggcgcggtgatgaaccttgggctactgctggcgcagccgggccacatgcctattttctcgggcagctgtccctgcaccagggagcacagccagatcccagaaccaaggcaccgatgaagggatcttggagctcagtcagtgtccactgggttctgtgatcttcaggacacagcaccaaggcctcgctgcttgagcacgtgtctgttgtgcatcgtcatgctgagttcctacactcagcaagaagtagcaagcagggcagggggagaaagccggctccctcttattagaaacggcccaaaggaaaagttttctgcaggcttctggcctcccgttactggagttcttcaaccccgctggccactttttagttcacgctgttgcccctttgtcttttcgcagaactttgtgttgagcacaaagtttcacagagagttgagtccttttaggcgaggtgtgaatcagggtgtattttttatttttattttttataggcaccgatacagacctaaaggctctgggaaacgtttattttctctcttgcccgtccctttctggatgaacaggttagctgggtagcaatagccagtactgtttgtaatgcactctgatccacttctcactgtggtctgcgaagtgtccgttggcagaccaggtagttcccgttgtctttgaagaggaaggggtttccttagagtgtagcatttgcttcttaactgaaagaaagcagtgtcaggtccccaaagccagctggcccttgtcagatttttgttgctgttgttgttgtttgtgtgtcacacagtccatagctcgaggaaagacttgcttgtttctgccaaagccagttaatttaaggagtgggatcttttcccaaaggccattcattccaggtcgcctctgctaaagggcagaagcttgacccatttgctccagaatgtttctcatcacttagcaccc

SEQ ID NO: 33463 - DNA, 1197 bp, Mus musculus
agaaaggctcagcctaagtcctttttggattggatagaacgtttcctgtttcggcgaagacccggcaggaagaaagtctcctctgcagagagggacccactgtctttctgttgtgtagatggtcgacctaccggagttctgtaggatgggatgatgcggtgacagggtgaccaccttttctgtgtgccgtgcttgtccctgtgtaattgacaaggagaactgagggatgagaggttgagggactatagcatagggtgttcagagctccgagaaaacaaagatgcatcttagtgggcaacaaacacctccatgggggagggggctccccacgtggtgttgggggttaggcagtggagcagggatgtggtcaggttggccaggtccctcggtcagcctaatccccctttggtctagattctataaaggaccctgctgcatcggttgtggccactccttcacaggaagtgggaaacacaacaggcttggggttccaggaagtcttaccggctcccttattacaccttccccaccaggaaccaggattatctatgaccggaaatttctgatggagtgtcggaactcacctgtggccaaaacacccccaaaggacctgccagccattcctggggtcactagccctaccagcgatgagcctcccatgcaagccagccagagccaactgcccagcagcccggaagataagcgggcaggcggtgagtcctgtccaggtcctgaactggaaggaggattgtctgttctcaggaattccacatttcagggagagggtgatggtggctgtccaccttttgaggagcagctgtagagagacaagagggtggggggcgggtgggaagtgggactctctttggtggagggtctacaagctccaaggaactcaaagatctcatgcatcaggtaattaggaggagatctaaaatgacagtggctttctccagcaccttccatcggcccctctccctgtatcatcgctcacaaagtaccactcttagaacccagcagctatccctgagttcttgatgcaaggagacaatttatcagatatcatgcggtgtacttccttcccctctaggaaattacatgtctgcaagataaaaacaataaacctgggtacctcctggcacgtttactggtcattaaatggattgtggatggagacaggcagacaatggctcctat

SEQ ID NO: 33464 - DNA, 1540 bp, Mus musculus
tgcagagagcgatgtgacaagcggttgccaagctacacgtgtgggtccctgcagtgtcttcaagggtggagggattccccagtctttgcacagaactctcacctttaccttcccacctcaaaccaaagatgatagaggatggagttgtgaccgctaactgaaggctgtcatttacccttgctggcacactgacgacagctcctagattctgatggtattttagctctcaaccctcaagagtggcttggttgccccatagagttaggtggtggtagtggtgttggtgtgggtgtacttttaaatttccttaactggacacaggacacaaagctccaccccttggaccacgtattaaaaatcggattcatgggaaattgagcagtgtcactgccctcctgaggaagctgattcctaagcccagtcaacttctcttgtttctcttcctcagcatgctctttccagttgacctgtgagaataacaaaagatgacacctctctctggactcctaagactggagcggttccatttgccacttgtttattggctgtctgtctcctctctccacaggtgaagagtcacaatttgagatggacatttaagggaccagccgtaggacgcaatgatgcttctatgtcccccaaggcccttgggaggagagctgcacagcattcaggcctcataccaggcagacactgggtgtgggtcggccacccagtcctgctcctcactcagggtgccagctctgccttgaattttgtgaacaccagcacatacctccttgtgcctctgtctataccgagctgctactgcaggggaatgactctcactcacaccctccctgcatggagctccagcgagtggactcagaggagtctatcagaatgatctggcaatcctagccccagcctccggagcacacccatctttccttaggctgggttacctgggaaagccacacttttacttctttccctgacaggaaataaaagccacatttaccctaggcccgcccacagctgggccctgtctgaactgttttccactcgaaatgacgacatgattactattctctgtccagtgtttatggtgtgatttccctgtacaatattttttaaaaagatttattttatgtatatgagtaatctatctatctgtctgcctgtctgtctgtctatcatctttctatcatctatttatctatctatctatctatctatctatctgtctttctatcatctgtctgtctgtctatctatctatctatctatctatctatctatctatctatctatctatcatctgtctctatctatctatctatctatctatctatctatctatctatctatctatctatctatctatctatctatctatcaatcatctgtcttgtctgtctgtctgtctatctatctatctatctatctatctatctatctatctatctatctatctatctatcatctgtcttgtctgtctgtctgtctgtctatctatctatctatctatctatctatctatctatctatctatctatct

SEQ ID NO: 33465 - DNA, 1206 bp, Mus musculus
agtgcgtcttgaactgctcattccacagtgggcctcactgcgggtgccaggtggaagctcacttacctctcttcccggccactgaggactcattaccaacacactacaaatggcatcttgggtctttgtgtaggtctttgtgttggaaaatccttcatcattgaaccatccccccgggatagggttaattgtgtggaacttcctatttcttaaggtaggggactcagagatgagcaccagagagagagagcataatttgcatttttctgaaaacttctaggcttcttggaaagtcttaacagaggcatgactgttactaattcagccataatcactaatacttattaaattatctattattgtggtttgaataggtttggcacccccacagattcatctgttcaaatgcttggcccatagggaatggcactattaggagtgtggccttgttggaatagatgtggccttgttggaggaagtgtatctctgtgtgtgggtgggctttgaaatcctatgctcaagttccacccagctcccagcttcctcctagctgccttcaggaagatagtcttttcttggctgcctttggatcaagatgtagaactcttgattcctccagcactatgtctgcctgcatatgctgctgtgcttcctgtcatgatgataatggactgaaccactaaaccgtaagccagtcccaattaaacattttcctttgtaagagttgctttggtcgtggggtgtgttcatagcaatggaaaccctaagacatctatcatgctttatctaccaaccatccatctatccccccaggctctaggctcttatatacattgatttaattaatcttcacaacacatggtatgtgcgaccattatctccatcttacagacagcagaactgagatgttgcgtggagaagctttccaagaagaacaggagcaaactgtttgaactaagatttgaacctaagccaggtagttccagaaaattcatatgtagctgttgaactacttactttttagcagctgacatactgtgaggcttctacagtaacctcgaggaagctttgctaagaatggaaacgtggcttttgttttcaccctcaggtgaattaacttgtttagagtttgtcaccctctaccaccctgcctcattgctcagttataaagcaggaacatgtccctttagagagaatacaaaagtt

SEQ ID NO: 33466 - DNA, 1070 bp, Mus musculus
cgggtagaagaggctcagtgtgcctgtgccttacatgtgagggctgggattcaatcccagcacagaggaaaactttcagtagtcttcactgtttccccgtcctaacaaagtgctttctgcccctcataaacacatctcccgcaactctcactgctccctaaagccacctccaacctcactagttgactgctgctgctggtcacacactacagcccttgtaatacagctttggtgtgttgtacatacacagagagatgtgtgcacactttctgagtcactcattcttgggacctaccatagacacatacttgatatttacatacaacggatttcaaatacatgtgttcatatggagcaacccagaggatgaacatttaatataaacccccaagtggcatgtagcttacatgcatgcagacaaaacctgggttgctctggctgctcagggaggtggatgtctgcctgacattcagatccttcagtcaggcggcagctctcaggcgccctaactttccaaggggaaacagctctaaactgttcctgcttatataatagcacccgtactcagaccagagcccagacagtcaggagcaaatcttcccatacctgaatgaggtggtgctcaggcatgtacaggtgattgaagagggcgtggtacaggacctgggctctgttatactgcagcaagtccgcagctggctgcaaacacacaagttagacagttacaagtttcccaaaggggcgaaatctccattgttgttaattagatacgagtacacagagactcagtaaagccactctcgacttctgcaaggattttaaaagttccatatttaagaagagtctccttcagtaacattttctacattttgctataaactcttgagttctgattattttttttacttgaaagttactggctaatttctataggtgattttgcttttttatcttttcacatttttcataattaagcatgatctttttacttctatgattacccttttatttatattaccagcacaatattatttctactagattcagagagaaaaaatatatttggagaa

SEQ ID NO: 33467 - DNA, 1650 bp, Mus musculus
gtgcagactgactcactttatggaacgaggtaaacctagatgttaagactcaatcttcagtaccattattcctaacccagtgactgtttccttctaggatgtggggaaaagagagtttgtagaagatgaggaggtggaggagagtgacctgagtgactttgaggtgagctctgtgggataaagaatggcttgtggccacagcaaggaaggggggataggggagtgggtctgaacacaggagcaaaggaacaaacgcatggtttgttttgaaccagctgcgcaatgaggggcgtaggagaaggcttgcactttccctggtctgactctctgtttctacatattaggatatggataaactgaatactgacagtgaggaagaccaggatgatgaatcctccaatgatgaagaggctcataaggctaagcacaaaggcaaagcacccttgaaaggacctttacggaaaaaacgggcctatgtggaaatagagtatgaacaggagacagagcccatggccaaagtcaaagccacatgagttcccttcacactggcagctgtgctcttgtgtgttctgtttcctaaagtatttatattgttaatatttatgtcacttcagtggagccgaaatctggagtgagtatgaagagccttgagttgagaggcgtatttttataacacatgctgtaacagcttgagcccaaggaatctaacagatgaattcctggagctggaatggcactggctgtaaatatttctaaattacttagaaatgtcaggatttcaatttttttctcactcaacttttcttatgtggacaaatagaagagataaaaatttcaacttataatattttaatacaaaaatagatttttacccccataactacatccatgtgatctgggataaggagagcggcctttcctgctggttagtcaccttcagtgtcatcgccaggagaatctgcagagccctgctgcaccttcctgatgcagctcaccactgtgctgtcttcacaggatactgcaattttagccagaagaccctgaaacatgagagcaaacgggcattgatttctgtaaaacctgtttccccacagcctttattcttttgtcacatactcaaaagatgagagactgcatggccctaggggagggtgcctccatcagaacaggtgttaactgagaactgtcccatgcttgtaagtagtgggctggctcggaagaacctccttcattctagccaaaacaactccaggtggacctttggctggaaaacagaccaacacaagggctgccgtgcgatggccaaataaactgaaaaacagcaagccatgctctagctctacatattttggggtatggatttcttttcatgttcctttaaactggagacttctaattgtggtaaaaatgagaaattagtctttttgattttcatataaatacacatagacaccacaaactatggtcttgagaattctgtggaatataaaaccaaaggaagaatttcctactagttaagtatatggaaaatgggagctcgctcagtgggatggacatgaggagccgagttcaacccatggttaaaactggagtcatcagtgagaagcgtgcactgctaatctcagcgggagggagggagggagggaggac

SEQ ID NO: 33468 - DNA, 1136 bp, Mus musculus
catacaatacatcccaaccacactttctcctcccttcactcctcctaactcccccccccccgatgatcctactccccctccatttcctcttcagaaaagagcagccctccaagagacagcagctcaacaggacaaaataagatgtggtaagacaaggcaacagccctaatattgaggctggtcattaaacatagattagaatatactaaatccattttgtgctgtttatcagtgcatttgtgaggggccatgcactggtgccaggaacactgtcagctggacattctcagtggtgaatagctcctttgcaaggcttggagcctggtgataatctgtccccacccctccagggattgtgactgacttggtcatgtgcaggtctagtaccggtaaccccggctgtggtgaattcatctgggtgacagcagtgccatatctagaaggcagcgtctcacaaaaatggttgagatagatctcacatttatgcctgagcacccggccttttatctcagtacttttgatcatttatatctccctagtgattgttacccactgcaaaaagaagtttctctggctaaggttctgctctaggtataaacaaaatttatttcattttttttttataaattacattttctggaattttatacatgagtacattgtattgacatcatttccactcatctttctctgccctaccccaacttcttccccttcctcactttcaaattcatgacttacatgtttataattaatgttgcacatatgtatatataacctatgaagtccatttagtgttgcttctatgttcatgtgtttagggttgaccactcgatattggatcacctgtcaggaatcttgtacctaaagaaaactggttctttttctcttagcagctaccattatagatggttatgagcctccatgtggttgctgggatttgaggactcaggatctctagaagagcaggtggcgctcttaaccacggagccatatctctagcctctgttttctttttaaaattgaaatggtttttcatataatacattctgattttccctccccaccccttccaaatccttctcacctccccacccacgtagttcatgaccttccttgctctaaaacacataaaa

SEQ ID NO: 33469 - DNA, 1211 bp, Mus musculus
tatcctcagaaacggtttgtggccggaggaggagcaaacagtcgagttagcgcactgcagggctccaagggaaaggactgtgaagtgcctgctcctgtgggtatctcagtaactgatgaaaacggccaagtgctaggagaactcaataaagaagaagacagagttctggttgctaaaggtggccttggtggcaaattacatacaaatttcttacctttgaaaggtcagaagcgcatagttcaccttgacctaaaagtcatagctgatgtaggcctagtaggattcccaaatgctggaaaatcctccttactaagtcgggtttcccatgcaacacctgtgattgcagattatgcgtttacaacactaaggcctgaactcggaaagattatgtacaatgatttcaaacagatttcagtagctgatctcccaggtttgatagaaggagcgcatatgaacaaaggcatgggccacaagttcctcaagcatttagagagaaccagacaactgctttttgttgttgatatttctggatttcagctttcttctgtaactccatataggactgcctttgaaactataatacttctcacaaaagagttggagttgtacaaagaagaactacagacaaaacccgcactcttagcaattaataagatggacttgccggatgcccaagttaaacttcaggaactgatgaagcagctcctgagccctgaagattttctgcatttatttgaaacaaagatgattccagagaaggctctagagttccagcatatcgttcccatctcaacagtcactggggaaggcattgcagagttgaagagctgtataagaaaagcactggatgaacaggatggcaaagaaagtgatgcgcatcggagcaaacagttgctcaatttgcagagttccagttgagcatcttagactgagccacatcaaagtgtgcggctactgtctccagaaaaggcagcattcaaacctagtacagcgtattgacggaatacggtttccttctaaggatcagaaaatcatgtttaaaacgtggatgagcctgaaaagcatgatgttcaaagaagccaggcacgacagcaagacaaatatcaatgatctcacatgcggaatcttagaaagacaaatctgaactgatagaaatcctgaaaaatgtgtgtaattatgtgtagtataaataggagctagaagattaagag

SEQ ID NO: 33470 - DNA, 1162 bp, Mus musculus
caaacttgtgtttcccttcaacagctatttcttttatctgccatgttccaggcagtgtgttcatacctatgagaagagtgacgctatcataattggctgtattgtacatttagcaattgatcttttaaatatgtttttttttacattttgtcagtgcactaaatgtatttcactcatgcaaacagagaaatacaacagtactattttagacagtaattttgtcttcatcattccaaagctttcttgctgtccaggaatgaaattagcaatctgtcccatctcacgcctagagtgctcaagtggcactgagctcctaagcagcaggcatgggtgataactgtgcatccccgtgaagacatcatctaattctaccatggtttctgtagctggatggcatggcatgggggcatttgtagtctgtctgacttgagccttagctcactcattgtctagtccccaatcgctttccacataaaagaatttacaaacagctcccagcgctctttactgtagtgactgtcactgatgagtccagtagaataggcctgattctcttcaggtcatttgagacaccctagttctcacataggaacattgcagtgcacgccactcaggcatacattgaattatctgtggtaaaagaaactggtgtatcctgaacattttcctgtgactgttcattaattattattttctaattgagttaaagactgaaactttacattttaagttatgtagaacttgaaatcattttccaagttctttcacatgctcaacctcattttgtcctgatttaagttagtgctagcccctcttagagatacaacactgaggccctggcgggtgccatgatttgccataatcatcagagcctacctaataatggaatagcaaggcattaatgagcccactgatgagcaaagccttcattctgacagacaaattttaagtggcagccttgaaaattaaaattggtcagtttaaacgtttttatagttaaaggacttgtaagactgcattctgggcagatgtggtgggacgtgccaataaccccagcatttctgagttggaggcaggggaacacaagttcatggccagcctagactacatgaaattctattaaaaaaaaaaaaaaaggaagaaggaaagaaaggaaaggaaa

SEQ ID NO: 33471 - DNA, 1126 bp, Mus musculus
taagcatccattagatatctgactcagaaagtaacctctttaaaaccgatgaacacggcaaagaataatggtgaggcaatcataaatgaggacccacactggcatccctaggcttttaacatggaatgctatgtgcatatttcactgtaccaagcagcataagataaaatcccatctccctcccacctgcttgggctgagtctgtctcttttccgagctggctgtagtagtccctttagagtatcagtcctgggttccattccagagtatgttagtcctgtgggagagtttgaaagggaacattttgtgaagagaataaagctgctactttctgatgcttctgaaggaagatttagatgtctgtcacagttctgcttttcaatttatgattaaaacaccatttccgtggtgtcagtttcagtgaccatggagacaaggaacatcgccattacccaaagagtccctgtattcccataaattacaacatccccacaccttctctcccaattcccagaagcagcgtggttctgtttgccacgtggccgtgtgctctaggattttatctcactgaacatgtatctattttcattttggcttctttggtctgtctgtccgttaaatcgtccatgatgttgagctgcgcagcaggttttctttttatggctgataaaacagtcttcttaaaacagatctgaactgtgcatccaaggtgatgaacaacttcacagcaaacctggtgagaaaatgctgtccagcattgagacggtacccgtgactcttagacacatctcccattgtaactggggctgtgtggatcaggcagggctgtttgggacacttgagtttttccacagtaaacagaggactcgggtgagaagccatcagccaccacagtggccttcaaactggttcttcctctcacagtaatgctgtgatttcacaaagtgagcgttcacaataattccaggtgagggaatactcattgtaaagcctggtttatctaaacaccctggaaagatggacctggtgcagcatacctagcacttgagaggcagaggaaggagaaccacgggttcaaggctgtcctgggcctaactttgtcttttaaagaaaaacggtagatcta

SEQ ID NO: 33472 - DNA, 1155 bp, Mus musculus
tttagctccttgggtaatttctctagctcctccattaggggccgtgtgacccatccaatagctgactgtgatcatccacttctgtgtttgctaggccccggcatagtctcacaagagagagctatatctgggtcctttcagcgaaatcttgctagtgtatgcaatggtgtcagcatttggaagctgattatgggatggatccctgcatatggcaatcactagatggtccatcctttcgtcacagctccaaattttgtctctgtaactccttctatgggtgttttgttctgaaagtataacaacgtaaaaacagaattctaggcctttaggcccaggcttgggaaagtggcctttgtaaaggtatgctaatcataaaagagatagcgacattcctctacccacctgcttcctgggttcaaagagtgctcattcaaagaaagtcaccctggccattaccagaacctgcaatgcaaatgtgctattgttaggggctcttagaagctgtcttgagagttaacaattaccaggtattccttgtgactcttgtaactttacacttccttgtgactcttaactggtatctttggcatcttccaacaacgccctccccacttccttgagtttctggtttcttcctttaaatacccccttacccagctactcggggcgccacggtcctctacccctgcgtggtgtatgaccatgggcccgagagctctcttgaataaaaatcctcttgcaatttgcagcaagacccgtttcttgtgggtgattttggggtgtcacctctcctgagtcagaatgagggggagccctcacattgtgggtctttcagttcccatttctaagaaagggtaaagtgtccacactttggtctttgttcttcttgaatttcatgcgtttggcaagttgtatcttatatcttgggtatcctaagtttctgggctattatccacttatcagtgagtacatattgtgcgagttcctttgtgattgggttacttcactcaggatgataccctccaggtccatccatttgcctaggaatttcataaattcatttttttaaatagctgagtagtattccattgtgtaaatgtaccacattttctgtatccattcctctgttgaggggcatctgggttctttccagct

SEQ ID NO: 33473 - DNA, 1112 bp, Mus musculus
cactgtgcagacaccacagtgcggctcagactagagcgtgtggaaggccctcccatccccaggaccgcagccggggaagagaagaaccctgagcacgggaactgctgtggaggttattgctggtgattggactctgctttgcattgtagttcacagatctttcagctaatgataccatttggaaaaagaaaaagctgtcatgactaacctttgcaaccgctacttaactgttcattaatttagcaattataaaaacaaaaccattttcttctcaattgaaaaacagatattctgcctccacggtggcctgtctccatccatagatacactggaccacataagagccctggatcgcttgcaagaagttccacatgaggtgattttcgaagttacttcatttattttgattttaagggagaaaaaagtgtaatcacatatgggaagggtaactcaattaagtatcctaactcacagtgcacacatattctttctccttatccagggcccaatgtgtgatctcttatggtcagatccggatgaccgtggcggctggggcatttctccacgtggtgctggctacacatttggacaagacatttctgaaacatttaaccatgccaacggtctcacactggtgtctcgtgctcaccagcttgtaatggaagtatgtacttttcctgctctcgtggtgtacgcatgcacccgtcataaggcttcataataccttcagtaggggctggagagatggctcagcagttaagagcacattgctcttccagaaggcgctcagtagagacttgagctcagtgagatgatgactccatgctgcttagaggagcacactgaggagtgtgcttgctgtgtgtgtccttgctacatttcaccaaggaggtttgaaagctgtttgtccactgctggttctattccgtgaccactcagttgaggtagcaattgctggatttctcctgttgtgttagtgttgtcactacgaaaggaataaacgagaacggagtccctctaaccagcaagtagtggctttaagaaggtagaacaaacttcaccagcctagagcaggcgaggagtggggtaggggcaggatgcaaagcacatac

SEQ ID NO: 33474 - DNA, 1691 bp, Mus musculus
catcctgactcctgtgagtgtttgcgtattactatggttagttgcatcctttcaggactgttggagaaggaaaacacaaatagcatttatttatcccaagaccacagtgttgataaaaaaaaataggaaaaagtcagtgtactaacattaatattaaaacacacacacaacagacaaatagctattttgacagaaaaggcacttggtaaaattcagtgttctcttctgctgggcacaaacagacgtgtacattttcaccatagctgtgaagtgctaactgtgtggttgctagtgacgaatgagttcagggtcatcccagccacgtgggatgcagcgttgctgaaagctacaggaaggaggctcagtctgttccgtcttactggctggcttacttgctgaccattttctttgtcatttttagtcttcagtttgacccagcacctcgtcgtggagagcctcatgtgacccggcgcaccccagactacttcctgtaaattcctccccaggacctgtctttgtatgtggaagtatacctggctttttaaaatatatatatatacatatatatttaaaaacaacagttatttgtgtttctgtaacaaattgtgatatgtcttgacattaaaacacatcatggaccaaaacgtgccatactaatgatgagcggttagcacaatgtgaactctagcacactgttgtagatgagtcagcccacagcctgcctgctgggcggtagtgaccatttttcttgactggttaagcaaaaagggtcactgactgcttcgtctcctttgcgcttacttggaaatttagttaacaagtttaactggcatggattatagagttggagttttattttttaagaattcacaagctgacttccacttcaattcataatcctttattttattgaaatgtatgactaactgaagaagagattcttgggagtatgttgtcataacattaaagagatttcctttaaagtttcctaaactaaattactgttggatgttgagctgcatatttctgtatatttgtcatgacagtgcttgcatcctatttggtgtactgaacaaataaaatttccgatttagagaaaaacattttttaactgtgatgtacattaaatggaagcatcgccattttgaaactttatacaaatacttagaactgtggctggttgttttttagactttgaatctccttgatactcctggctctccttccgagggatagaattgccagtatggggctccttgctaggccacagatatctgctgagtaataacagtaggcagctgtactgacatattcgcctggtggggtgttcaccccaggccttatattcaattccaagttatgtgcacaggtactgcagaagtaatgtttgtttatagtttacactcaaaagcagaacaaagtcaaaatactgataactgttagaccactgaaaaggcgattgttgcatatctaagcatttcattaggtggttcatattaatttattcataattttaagtgcaaaatgtagattgctttaataactatattctaaatctaacagaagggactttaaaagctgagctaggttgtctcctttaacctaaaaacaggaattggcctgtttatttagtagcagtggtaatgatagtattccaaggtcataaacaccagctctagggtttacttaat

SEQ ID NO: 33475 - DNA, 1203 bp, Mus musculus
cttacttgactggatgatgaaagttgggtaccacaaatccctatatagactttccaattcctttcccagaagggccctggaagtggagggaggctcgtcactggaggacataggaataactgtggacactgtacttaacgtggaagagaaagagcagagcagccagtagagaggctggaagcacctgctgcccttccacagggcggtgttcattcaagccccatgcacctggagctcctctcgtccacaggtgtaccccgcccacaccccgcccacaccccatggatgaggaccgctttgcactgatggtctgtggcctgtcattataatgtgaaaggaggtaaaaagagtaagacagacctggatgcaagcctcagccgggcatggtgggacacgcctcaactcccacaatttttgagttaattagaccatcttcaaaccaaaccaaaccctagctcatataagaactggttcctgcttgcgtctaccttaccataaagtatttcacaattcagtcagaatctaaggaggatgaagggacattctattgtatttctaaaaacttaaagaactcccagagccaactgatcctgtatagttttgacttagatctggggatggaggtctggtccatgaaccttggggaacatagtgaaaccacagtaaacaaggccattgttgttaagtgcatttggaatgtgaactgtcgtttgtctacaaattgatgcccttagagcatctctcaacctgtggggtcctgtggggctcaaataacctgttcataggggtgcacctaagaccatctgcatgagatttacattgatgattcataacagcagcaaaattgcttataaagtagcaataaaataattttatggttggggggtcaccacaatatgaggcaatgtattaaagggttgcagtattacagaggttgaaaacttaagtctgtcttaaggtatctttttttttttttcgttttccgaaacgaaactggggggcagaagctcagctggtaatcctaggtcttgggaagggggcaggaggatcaggagggttcaaggctacctgggctacatgaaaccctctctaaaaattaaagattaagaaagataacttccgctgggcatggatgcacacgcctttaatcccagcactcgggaggcagaggcaggcggatttctgagttcgaagtcagcctgg

SEQ ID NO: 33476 - DNA, 1128 bp, Mus musculus
tctctccagcaatttttccctttataaggtcttagaatatagatagccctggctggccttgaactcacaaaaatctacctacttctgtctcttgagagctgagattaaaggcctgtaccaccatgtccagctcctattgaaatttttttagtggggctgactaaattttaagaaaaagatggacccaagagatggctcacagttaagagcactggctgcttttctggaggacgcaggttcaattcccggcacctgcacagtgactgacaatggtggttcttgtcccgggttcctctgctctctccgacctctgcaggcactgcacatgtgtgatacacatgtgtgatgcacatgcatgcatgcaacaacacacacacacacacacataaaaaataagtaaatcttaagaaagaaaggacaggaaagttgttggaggttaggagatgatcgagaaatgagcattttgcaaaacttagtctcactgtatgtggagcatgcactgaccctgtggggataatgttatggctggtagggttctacagcaaaacaaactttggtgctctgtccccaggtggtgcagatctttctctgaacggttggttacctgtgttcacagcacttggccctttttctcccagggcaaactcactgccccctaagaagggttagaacagggtgcttgtgggtttggcattaagtgaaattcagttaattaagccaggtgcctgcaggaacaggcctggaagggagattgggagggaggaaagaattcagccccagacaggctgaaaaatgttgactcattcctttgtgtgaacaaacttacgtggctcctttagctttccacagtccacctttccgtgccaggacataggtcacagctggctgacgcttgctggctgcactcacggtgacccctggtacggggttccactgagagcaagtcaagcattactgttcatttccgcagtagagcatcactgtagttttctgttttgctttttgttttgttttttgttttgtaaacttcccaccaaagatttattgttttgtgtatgaatacaccgtcattaccttcagacacaccagaagagggcatcggatcccattaagatggttgtgagccac

SEQ ID NO: 33477 - DNA, 1152 bp, Mus musculus
agtttctggggcagaaaaattgttaatggacttaaggacagcctgggatatagattgagattctgtctcaaagcagaacagaaaacacaaagatctggtttttctatgtacctggtggcttaggtctgaactcccagctactctgtaggagtatcatgagttagttcaaggcacgtctgaactatggagtaagtttaaggccagcctatgccattagtgagatcccatcccaaaataagtaaaaaagagtgtgtgtgtgtgtgtgtgtgtgtgtgtgtgtgtgtgtgtgtgtgtgtgtgtgtctagctcagtggttggatgcttgcctagcgtgaatagagtcctaggttcagtctccagtacgggggtagggggagtccagtgtccccttgctttgctttaatctgccttctcccctctcctcccacacatacttagcacttttttttttaataggttaaggaagtaaaaaagacatcatcaggcctggagctccaagtggtgacttccgtgcctggtaggaagcccaccacgaccatgattccagatgttgactgcctgctctgggccattggacgggacccaaattctaagggcctgaatctgaataaagtggtacgtttgtgggtttattgattcataattaataatgattgataactggcccgccggcctcctgatggcgctgtggcgatcgcatccccatccctgtgctttgttgtgaagctcttgctttggatgcccctcctttctagagtgctcacgccaggctgggtatctggtcagattggagaggtctggtccagatggtgcagccgtttccggactgacttccttctagaagacttctaaacgttggggttagtggatatgcgctaccacaacttcccgcccacttccccgtcctcttctccatctcccttctttttggcagtgagaaagaattgaattcggagcatcccatatgctaaccaggttctctgccatgaagtgtggtcttagccctccgtttcttctttctttttttagagacatgttctcactaagttacctaggctagccttgaactcagtctatagcccaggctggcttggcaggtttcctgcttcactcccgagtggcctgggttacagatttgcatcaccagtgcct

SEQ ID NO: 33478 - DNA, 1959 bp, Mus musculus
atttggttactgaatgggcttagttcttagagaaggaaggtatggtggtgttgctcctgatctcagcaccgaggaggcttaggcaggaagatcaggagtttgagaccggcctaggcttctacagcaagagaagtgcatgggataggaagaaaaaagcaggagtaagaagtgcctgggggctggagagatggctcagtggttaagagcagggactgctcttccggaggtcctgagttcaaatcccatcaaccacatggtggctcacaaccatctataatgggatccgatgccctcttctggtgtgtctgaagatagctacagtgtagtcatatacataaagtaaataaatgaaaggaagaaaggaaagaaggcaggccaagtgtgcactggaaggagccaccgaagtggggctgcagaggacctgcctcctaggcgtacttacacttactttggatatggagacctgacgtccctaatctctgttttctcgcaggtggttggcattcacatgcaggggattggctgtgatgagatgctgcagggcttcgctgtagcggtgaaaatgggggccaccaaggccgacttcgacaacacagttgccattcatcctacctcttcagaggagctggtcaccctgcgctgagagcctggggacccaggtggctagcggtgcgaccagcaggcctccgggaggaaccgatcgagtttacgcccagcttctacagatctctgtattttaatcaggaatttctggtggtgtaaatttccagctatacacacgcacagaagaacttatgtatctaatcagaaggttgttttgttaatccggggttggttttcatttgataatatttataattaatattttgatttttttgttgttgtttaattaacagccttgtgtttgttgtgtttttcttgctttggccccattccaagtttaaatgtacatgacatacactcaagttagtgtacctgatggatgaatattgctggctaatttcttttattttttatttttttcctttttttatgcagcccaaggtggcctcaaacaactcagaatcctccagctatagcctcatgggtgctggaattctaggcctgcatggcctctcctggcctagcttgctagttttatatgatgggaagtctgcagaatatacgtggtatttttgttctgtattggaaagctgccccaatgttacctctctattcttgttttattctttgctctgtgttaaatgatttaaaatggtttgtgttattttcatggaacaaagtgcattaaagttagacttgaggctggttaggtaaaggagaaatgacagtacatgcaagacggaaggctgaggcactcgggagccctttcttcttctgagtattcctggttcattcagtcatttctgtatctctgcgtttgtttttttttttttgttttgttttttatgaaaactgttccaaatttttgaaattcactgcattgtcttataaaatttattacgaactatgctgctgtcagtgtattttctaagactttccacactgggagaacagacaccagcatctgttagcgaagaagtctctttaaaacaggtgccagaggggctggagggatgggactgttcagggcttctcattcttgtgaaggattcagtttggttcctggctcccccttctggcctttgtaggcactacacatatggtgtacaaatacacacatggtgtacaaacacatgcaggcaaaacactaacacataaagttttaaaaaaaaaagagtgctagagggctggagagatagctcagtggttaagaacactgactgctcttcctaaggtcctgagttcaaatcccagcaaccacatggtggctcacaaccatctgtagtgagatctgatgccctcttccggagtgtctgaagacagctacagtgtacttacatataacaaataaatctt

SEQ ID NO: 33479 - DNA, 1174 bp, Mus musculus
ctatttacaatgacctgtggtttggcagaagtgactgggcactgtcccttttaagagctggttcttgtattgctaattcgtctcacagttgataagctgtgctccctgaaggagctgatctacttcatttgttacatgatgtgcagatagaagccagattccaggttataccttgtaggcaaatctcatgaatgtcacagtgtggcaacaaaggatgaaagccatctatccactgatgatctctggagacttctaaatgtcattgatggctgcaatggggagaccctagttggcagctggttccccgaagtgctcgctcatgaggtagccctggaagtccttgtgcacactgctgcagccctgctcatgccacttaatgtgcagctgctgcacagaacagtgacactctatgttgtgggaactaacttgccaagggctgtagacatggcatgtgggtttgagtgatctgaatatatattaaaggttcgtgtttgtcttgtagcattatggatccaagcctattgagagatcgagagctgttcaaaaaacgagctctttccactcctgtggtagaaaaacgtgctgtgccttctgagtcaccctcctcctcctcatccaagaagaagaaggcaaaagtcgaacatggaggatcctcaggctctaaacaaaattcaggtgaggagaactgttttgggacgtctgttactatttttcgggaagctagtaatggcacgttcagtttctcttttgagatatggactctatgcagttcctggctggcctggaacttcctatgtagacaagatggtcccacagagttggctgccctgcctcctagagctttaatagacctgtgctgtcacaccaagcaagcttaatattcttaatgagtttcttggttaaatataaaagatgaatttaaatccatagtatgttttcagaacccatacgacagcttgcaactacctttaactctggtctccatgggcacacatgctggcaaaacatccatacaataaaattaaagggcgaaaaagtgtatataccactcttactgggggaaaagttttaaaaaacaaaagcaaaaacctacactttactgagggttgggttctagaacacgctatttacattttaaaattatagggcaaatcttttttagtaaatatagtgc

SEQ ID NO: 33480 - DNA, 1163 bp, Mus musculus
gaccagatactatttgtaagtcgtcctgataagaagaaaatactattcttcaatgataaaagctgtcagttttctgtggatgaaggtgagccattttgtgcagatcttacagttggaaacatatttcagttttgaggtgataaagcttgcagtacttacagttgtaatttaatattgtgatggtgatttttagcatcgccatctcttagcctatagctaaaagacacatatctattatatcatatcttagaatgcatttgaaatgctgacttgaaaggttttaagtaatttgtacatgaaattacaatgtagcagtttgtgctttaactttttttttttttaatgaatgtttgctggcatgtattttttttttgcaccacttgcatgcctgatgcccacagaggccagaagagtgtattagagcctttgaaactagagttacagatcattgtgacccacctgggtacttggaatcaaacccaggtcctctggaatagcagccagtgctcttaaccaatgagccaactctctagccctagttcctgttttcttatgctgatatctcacttgtacaaagtagaatttagttttaaatcctgtggctgtttccttagtttttatttttaaaaagttttactactggccctgggcatggtgacccagcgctcaggaggcagaggctggtcactctcagtgaatttaaagccagcctggtctataaacctactcaaagtcagggctacacagcaagacggtttcactgtatgtggggctgtatgggaaagcatttcatagtgtgtatattgtggtaagtgtatttccctcatgactttctttatgttctcatcttccatggatttctttattgtcatcataagctgctaaagacttgatgcatgatatgaaaatataaatatttgttggtgactgatattctcttaggaatctttcaattaccaaagtttgtaagaaagaaattcatgtttttcctttgtggcaattatatagttgtgggctatgctatggtcttcagaatttgtgaggggtgtgtgtgtgtgtgtgtgtgtgtgtgtagttgaatccaatacctcagctttgctgggcaggcactcccactgagttctgtgtccaagcctctagcgtattcttctcatctctgtttc

SEQ ID NO: 33481 - DNA, 1112 bp, Mus musculus
tccaagagtgagggagggattccctctgatggagacagcacagaaattcatcgcctctcattttactgacttaatgcccaggagagttgtgttttgcttttgtgcctgcctgctcttttccaatggaggtttataaagccttgtggtatcagaaggcacagctctagatggaggctgggtgtactgtgaatggggtgtttgaggtcggacctccaagcaagaaccaggaaaggctcagaaccctgtgctttgagcttgttgagtaaatcttaaccttctgtcccctagggtcacttgtgtttaactgtctttaccttgtcctgcaggcctctattcagagaaggaaaaagcctgcttcacagaaaaagcgacggtttaagactcacaatgaacacttggctggagtgctgaaggattactcggacattaccccgggcaaatagggaacacttttattcctaaacacagttacagacacgcagtcgagatctttcttgatgcttgggatctcaagactgtctgccttcctgcctgctcctcaggcctgagagaggagctgctcagtttacagaacaggagcgggttaccagactcattcttttcatccagcaggctagtgggaaggaatgggtgttcctgtttaactttctgggtttgtttgttttattttattagaaagacacttatatgacactcaggtgtctgctatttatcttgatttctaaatggttctggattccatgttttctctattcgtttagaagaagttggaggatggtgctgaatgcagttttgtttattccaagaaaaaatatttataataaaatcatttgtaggaagatgtttaagaagttaggaaattcagtttgtctcttacttcttgaaaatggcagggagcagctgcagcccctgacttgtctggggggatgtttaggatatgacagaggttagagtcagtactgttggcgtaaggatttcatctttggaacacagggtatgcctctggttaataagctaagcaataaaattacacgaaatataaatgttaatgctttgttttaaaaagctaagccagcatttactaagttggattcatgatttgctaccaccct

SEQ ID NO: 33482 - DNA, 2374 bp, Mus musculus
gtctttattttagtgtgtggagatgggaaggagaggacgtctcgcaggaatctgttctctaccacatgagtccccaggattgaactcaggtcactgacagctaatgtttacccactgagccatctgtctagctgggcctcttgcttttttttcctttagatagggtctctctctagccctggctggcatggaactccagctgatcctcctgcctcaggtctccagtgctggactgcacccagcttgaagtcttcatccactactcacaagtctgagactaccagtcttattggggcacagtgacagtgctgtatgggattttcaaagatgctctcccaacacattttctttctgtttcaggcttgaaaacaccctgccccgttttgaccccttcaagacttcacaacagcctctatcacacatctgttttcctcaaagaaaaaaatatatataataaaatgtgttttgctcttttacactgtataattttaagaaatgtgttatttgtgaatgcatggtctgacatttctgtacagtttgaagacatagaacaaagacagcaacagtaaagccaagatcgttagtatttttataaagacattttaagaatggacagatggattcttacactaggttatatcacgacttttcgcttgagttttgaatgcttttaatggtgtttatcttatttttcttctgaaataagatgcatgtttgaagcatatctctagcatcaaaattttccacaattgtgttgtaaatgtgtggactccctctgcctggcccagtgtcaggccctgttattagtaacgcggtgtagaaatgagcttctgcagtactagctctgtaatcctggctcccagggatctctctgcaagacaatcagtgcccccaagagcatttgccattgtagtatattcaccactgggcaaagactacttaggtaatgtctctgaaacccatggccactccagctgagactataccaactgtgcccagggacatagtgacattctatacttagcatttatgatagcaccctcagagtgtgtaacctaatatatatcacccaccttccataaactgtctccatttccccagtggaaccttatatttaaggggagggaccttagtttggaggtaaccattgcctcaagaggagcaggccctgcccactcagcctgcagtggacatcacatctctctcaagtgattcagcaaagcattggcctacctgagtagctagctggtctggcagccatgtcagatagaccgcccatcatgttctctggacgtgctcatcttgagactacctactacattgcacagggcagggaatgaaacagtggccctctgcaatgaatacccttgcttcaagacttcaaggcccaaagttagtcttgtgttatgtgcaacacatttccagaggctgtgacagcacagcctctcctgctcctcaaaaaagagctatgtattattatgttgacctcagaattcccagctgctgttactagacataatcacaatctttgtatctttgtttttgatctgcttgtgttgtgttgaaaagggtcatattttaatgatttttgtcagtggtttgggagggttatttcattatttttcatgagaagtaatgtcaagtttttaaaggtttaaaaaaagaaacaccaaggcctggaatatgggccttttcactgtaaactagaggacgggggcaggcagcactgggaacttagacatccaagctggtgttcagggactgctcatggccccagcccccgtgccacttgactgtgagactcctacttgctttatcatcaattatgcttttataaattgtgtaaaggtacttttgtattgtcattttttaaaaaaaataataaaagtttattccagccattacatgatttgtctgacaacttacatcaagcaggcatgtcctaggatgcacagatttccaaagattctgccagtgatgggagtcaaggtaattacgacacacccagctgccaccaagggacccacggacctcagtaaaaggtaccagccaccctaacctacaaagttttgagacaggcagactccatgacaggcttcagattggcagttcaggagaccaggcaagtcagttcccgaaaaaagcaccaggcctcctcaggcacccagtcagaaagtgccctgccacctggcctgaggcaaaggcaatggatcagcaacagtttctagcccagacacctcagaaatggttctggaacgtccctagcgatagagccaacagattaagatagaggtcacctccttcccaccccaccccccgacagacacacactcaccccgaattcccctaatatactttaaatcaggcctgcaag

SEQ ID NO: 33483 - DNA, 1157 bp, Mus musculus
agctacccaggccttggtgcagggatagagtgatgttgagagttgactatggagcagtaagtaggcccagtgcacaaaggctgtcgtagactgttgtccccactccaccaggcacagcccatagcagcaggttcctgccaatcctgtcctttttcttggggtctctgtaagcagcatcacactaagtcacagttgctgtctcgcttgctgcgttcctaaggtggctctctaagccaggagaattgcagatccgttctgttcttggaacccttgcagcacagtttgatggattgtgctcagggttaggaggaggtaggacttgtggcatgtgtggaccagttgtctatggggagcaaggcaggggtgtggagaccactgcttctgcagaagcccctttggcaggtcagtgatgtgaggaagtcaaactaggaggctaaggctcaccaaggaactactgttgctgtcaccataaaggtgatgccaccttctgcccgagtcccactcccagggagagtgtggttctttgatgtctattagatttgaaaataataaatggaactctgactatcccaggcccatgcctatggattaaaggcaccccccatctagagatggagtctcctcacttgagcatcacagggcactaaatgggagaatgccaagaagcagagagaattccctaaagaggtttagttgtttatccctgctagataaatgcttccaactcagaatgctgctgccagaggacagggaaaaggaagtggtcactctgtacaaggctaaagcattcctacggttctctacaggaagtagctgttgatgtgccaagattccatatttgcaacaactgggagagacagaaaagcatagagtaatagcacagtacactgatgcatgtcagtttctgctctggaaagctgtgcacaacttgctttgtctttccaaactccacaggtgattgtatttggcccttaaagcatgtaggcattattgttacaacgtaaacatttctctgtacagagatatgtatatctcttctgtgttgcgtctaacctgtcagtaaaatggaagttggggattataaaatgaatgacagaataaaatgggcttacagagtatcccaggcagcactacagagcttgggtgccagaaccaag

SEQ ID NO: 33484 - DNA, 1144 bp, Mus musculus
ccactgaacaactgcagtgtgctaaggcagaacgggaatgaacataataggtcaaataggggcaagtgtagtggggaacatggagtctcttgctggggtgtgacagcttacagtgctccgtgtaggaagctggtctacctagagggccagatctttcccagcagatccctctggactagaaacatgatgactcaaatccttttgcctctcccatggctaaataaaagtagatggagccaggcaatggtggtacatggcctttaatctcagcacttgggaggcagaggcagacagatctctgagtttgaggccagcttggtttacagagcgagttccaggacagccagagatctacagagaaaccctgtcttgaaaaacaaataaacaaaagtagataggcttgggcagtggccaatggcctcagggaagcctacgaagaagcaactacaggctttagagcccttctttttggactccttctgtcacctcaacaggaagagaggggtctcgctcttactgctctgagcctaggtctgttgtggttacacgcatgttacaaggctgcaaacctcttccctgccagatactacatgcaccttccagccattcccagatcccccaaacctgctaagctaaagcccagcacatctgctccccgccatgacccccaggctcatccctacacccaggctcagatagccatgtgcacaaaagctgtagcctgctcatgatctctaaggatggccgtgtgtgtgaagactgtatactgagagcaggatacctggccagcctctgtcccaccctccggttcctgcacatcttctgaattttggagggttgctgtgctcagcaagatgtgggaaatgcacacattcaggggcgctgcttgcctggtggttggtcatcactgtccgtgtggctggctcttgcccactaccacctgtgagcccccgtgtgcacagcttgttggtcaagccccatgttctggtgaacgcaagagggttagtcctcctgattagcataatacggaagtcaatagggagccagccaccagtgcgacttcagcagcagtgggcacccacacaactcagtgcagtttggaaacctcaggaggtttcctgggcctgctgttgccagcaaggct

SEQ ID NO: 33485 - DNA, 1163 bp, Mus musculus
gcaccaggccactaggacatcccagagaccagcatggtgcttttgattccacacagaaccaggacccttttgtggccttctgtcacataagctgcagaagaggaggccctgtgggccctggcgccgccttccacgcgctccttctgtttcctggctcaggtcatgtctgccaccttagaaggattgagtagagctgtgatccgagcccaggaactctgctcctggctaaggaagccctctctctgtccttgtgaccttgtcactgtcacagcgctgggatgtcgcctgtgatcccaaccttcaggacctaaaagtaggaaggtcactcactagtcaagatcacgagtctcccaaacaggaaagcaaccgtaattttgttgtttggttttggagacagggtctcactctgtggtccaggccattctcatttatgatccttttgttgttgtagaggcctcctgaatgtgggggtcacaggcaggccaccacccaaagctcacaaaagggattttttttattaattattactttttgtgtgtctgtgattgtgtgtttgggcgcctgtactgtgctgcacaccgagaggtcagagggcagctttgtgagctccagggcttgaacttgggttttctggccttccccccccctcccccccaagctctctgtttgctgaaccacttagctagccccatctgtagacaggattctttttttaatgacagctgctacccgaactgttaaacctggtatcgtaggcacgtgtcctccatcctcctgcccctgcgtttctttctgtataagcagaagaacgaacatctgtcacgtaacgttaatttgaggggaagagtaccactgtgtgtggcattcgggactcactaaagagcctctccgcaccttgcctttgccagagcggggcctctagttactagaggctcccagttaccacggtgaatgggaggaatgtgtagaacgggaacattggagcagcacctggtgagtgggtcctttgggctgcacctgttggggccaggggtgacagaaagagcagaaggagtgggcgcatcgccccgagctttgccgtgagggcagagaggcaccagatggtccatggtaggttctagttgcctcttgaggctcaggctcccaggtacccactatgtgac

SEQ ID NO: 33486 - DNA, 1253 bp, Mus musculus
aggcaggcaggaagccctcagtcagtgcctgtgccacaggccaaaatatcctccctggggaagctacacagcagtgtgaggaatgaggaaaaacgtgctgaaggtggcagggagtggccggcagtggccgtggtccaggaaacaagctgaagtcaacgaccagacgtgccttttgcttttctgtgctctgcccagtatccctgcctcagtattcagtagccgtcatagccgacagatagcgggcaagtggggggctaaattgtgactgtctgtcacttagtcctttatatttttgatctttgttgacagcaaagagcaactaaaagccccttttgtgtgtgtcccatacctcatgtgcgggtgctgtgccccctctcaaaaggagcaaccaacagttgaggccactaggggcaggcatgcatcatagaatgatagaaggttacacatagtctatagaatctgtggctttgggtagtccgcaaccaggccattcaccactgccctggagaatcaggacctggcagtgtccagaaagaacggggatcgctggctctggtcctgatgtaacagatggactcaggagtgactggggaatatggagggtgaaggttctaacaaggatctcgtgggagagttaggaagtctacgccactgagaaaggatggagagacagtgcaagattcgctggatcttggccgtgtgcctcactggctcgcatcacctagatggcccccttctcttgagacttacccagcccggcatcctcttgactcagccatcagcctagactgggtggaactctgacctgcggtggtgagaggcctgtgtcttggaatcccacttcttctctggagtcacttaagagaacattcttgtcgaatgtattggtccaggctgggacttggagtgacccagtagaggctttatagacagcaggcccagcccattgtacaatgaggaaacgggtctgagaagatggaaggttgtccccaaagcgcagcgcttccacaggtgacccgagcaagtgtcacctgttctccttgctggctaacacagcaaggcgctggctcaccagagacttgctcttactggaatttcggagaggcctcgctctaatgactccttggaactttcccctctaagtagatgagaaatctgtcagaagagactctgaggcaaagatggcttccgagatgctaactggagggagcagagtgggcggccccttactagccgagtggtgttttgttctg

SEQ ID NO: 33487 - DNA, 1222 bp, Mus musculus
atgtgttgaattgtttaaaatgttctgttttagattaatagtggccatgataataggcatgatttgtgtgtgcacatgtatacgtacatacacatatatgtgcatgccatggcatgagtatggggatcagaagacaacttgaggagaatttgttctgccatgcagggtccaggggttgatctttggacatcaagctgccttattagctgagccacctcacagtctgaaaaccctgaagatagcagcgtcgcccctaaatggtatcttcacagcgtgtacactctgatcggccccaccagtgagcctcataccggggctcgctctctgccagactagcaggagtattcaaaggtcaaagagagtctgccatgttctcttgcttctgaacttttcctcagactcatcactgtctggccatgatctagttcctttatgactagcggcttgtccttcagacgtccccttacccaccactccctctgtagaccctgtgggactctccacatgtgggttaactgccctgcgacatgacatgggcttgctgctacagaactgttccttttgctgcgtctgtcatattttattccttgtagcagcggtggtggtgatagaacagggtcttgtgtagtgcaggctatcccagactcacacccctcatctccccttcatgtgcatggattacaaatgatacgtccttctaggccttgcttttccatcctttattctagcctctgggttccctttgtggtaagagtagagtagactttgtatagtgtctgacacatagttggtgtgtaataaatacgtgttattaattaattgtagcctcatctctgttactgtttgaccaagacctgtgtgctctgaacttgtgctcataggcgcttccttgagaactctagatttctgaggaccgattttcccccaaagagagcagaatgttgagaaaagtgctttcttgtaccaaggtatgtttgtaggtgagcttactacagaggaagagaggatcacctcctaaggaaaggcaggcagagcctctctggaaggtggcaacagctcactgcctgaacaaaggaactctaggtgcagggtgtggcttcaactgtagtgactttgaaggcctggaaaccttaaagtggccttaagctcccatgatgccttggggaagcctgtgagtttaggacgctgctgacctaggcaaggggacgaaggtaagaagagc

SEQ ID NO: 33488 - DNA, 1192 bp, Mus musculus
tgaacaagaatgcatcctaggtccacatggtcacttctcctgacaactgtgaacaggagtccttgttgggatctaggcgggactgtggattcaggcagtgaatccatccggctgtccatccatcattcatcttatgttccttatcaatttgattggctgttgttttgagacagtgtctgtgtacatccatgataagcgtggaactcctttgtagactagtttgaccttgaacttgcctctctctgagcctcctacctctccttcttgagtgccagaattatagatctgtaccacaccaacttcatcttaaaaccttgtccgttgaccttttccccattccttcattgggcataagatgtctggcttccctaaaattctggtggtttacaggcagctctgccccacttggattagtgtttgcgcttttatggtgagttttgggtttttcctccactcatttaaattttttttctttcttttgctgtttgagacaggttctcattgtctagccctggctatcctggaactcactgtatagaccagtctggcctcagatgcatagacctctgccttcctttgcctcccgggtgctgagatcaaaggtgtacaccatcagggctggcttgaatttctttttttccccctgcctttcagggtcacggactcacattctcagggtgcttttgtgtgtaatagccattctttctaatgtctgagggcagggcaagggcgacattttttgatggaggaagactcacagcattgcctcagtgaagttaagttttagtgtgcacatcacgcaaaaaggagagggtttatgtggctctgaaggatggtttcaggtgcccatgaaccggggtcgctgatgtagtcctgactaatgcaactcctgtaactacagaggaagacacctctatagcttccccttgaagaactttagaaaggacgtgttttaattaagaatttaaattaagaactgcctctgaaccctgggaatgcaagtgggttgtatatggcttgctttttctcttctcatttttcgggtgttctcagtaataaacagcgtggtgaaactcctgcaattctagtagtttcctctggtaaaattgaaatgaaacaccacctgcagggatcaattttaaaaaacaaacaaaaaccttagggccagggatgcatgcagctcactcatgtg

SEQ ID NO: 33489 - DNA, 1153 bp, Mus musculus
aaagggaaggcctgccagcagctgtgtggaggtggcaggggtcctcagaaaaaggagaggacacagggtgtctaagccacttgcttagggttttggctggtttccaaaggaaatcaaaagttggaaagggaaaattgaattattttttaagtgagacctcagagaagctgtgaggcttagcattgagagtcttggagccaccacggccaggggaggggcttctggaatgtgtgggcatgtatctccttaaacagataatcagactcagcatccctcaataaaaagataatcagtcaggtgcctaaatttcccaccaggtggtttcctgtcacgtgatttacaggccgcccgtttgaatcaactcctgagggaaagaaaactctagtatgcttttgtcactcacccagagtcagagatgggacttcatcatgatgtcttgagaactggggcttcctgtattgttcaggaataatgaaaggaaaggaacttagtagggcagcattctgattgttttccctgaggtatttctgcctgtttgccttctaaaacggtatctctggtctcgattacaggtcctcttgcttggcttccaggacctggcatacagggtgtgcatcagcctgtgctctctttgccttccttgctgtgataagtcacatagacatgacataactctgagagggaagggtttgtgctatcacagaaggggttcacattaggaactcagaaactacctgggaaccctgcctgcggctgctcactgccttgctagataggaagctctcgctcatttgctttattattttaaatgtatttctttttatgtctaaagatagggactctagctctggttcatctgcctccatatgtaaacttggctagacttaaaatacagagattctcctggttctgcctccctaccactgaaacaaaggtgtgtgctccagtgctcggacaggttgatttatttatgtatgttagtcttgtttgcttttgtgtgtgtgtgtgtgcgctcgtgtgcctgcgaacagtactcacagaagctagcagaggatatcgtgattggagtaacagtttagagtcgccgtggagatgctggaactgaaccctgctcctaagctaactttcttacatccagttgccctccacagtg

SEQ ID NO: 33490 - DNA, 1202 bp, Mus musculus
aggtgtgtgctgttctgggtggatctgactcattcttacctctcccacttaacaccaggtaggtggtcagcagcccacaagcacctcccagctccagttgtcctcaattggttgggaagcaagcagtctataaaattgtgtgaacttcctgtttctatagatgaccctccctctactgagcaccacacggctcatcctgggcatcctcagtcctccactgagcaccacagaaccccgcctgtcctcctccagcttttgttaggttttttttttgttttttcgagacagggtttctctgcgtagccctggctgtcctggaactcactgtgtagaccaggctggcctcgaactcagaaatttgcctgcctctgcctcccgagtgctaggattaaaggagtgcactaccatgccctgcctcctccagctttttaatgcaatttcactgggacacaatggtgtttgttaagtggtagaaattttctaattccttttcagaaataatggtgatacgaggaagatttccaggtatggattttttttttttgcaagtctctttcatttcctgcatttgtcaagtcttgcttttttctttgtgtttgcgatgggtcacactctctgtaactgccagctgttgtctctgaatgaatcctatccaggtaaccgatggtctggagtggtttgtcttagccccgtcatcattcagtgtgtgaggctcagctgaatgaaaaggttcttttcccagacctcgagggagagctttgtgtaaaagcctggccagaatctgttttcaatctgttttatgattcctgcagaagtgaaagctgataacactccagaaaactataaatccgttccacctttcagcccccgccagcccttggagcatctttcacgtgtgtgcttacctgttgtgctggaagtggcacgcccttcagagcccccccccccctgaaaacagcttttatttcaaacttttgcttttaatttctaaagtaaaagcaaggcctttcaacttaatttccttctgttgaaagccctgtccccggggtactgcctcgctctgtgaccaaagtgccctttgaaaacagaagacctactttctctatacgctctttgaaatacagcagtccgaggagtataaatcaaagccataagaggtaccgcttcatacccaaggggtggccagcacgaagattggcagc

SEQ ID NO: 33491 - DNA, 1165 bp, Mus musculus
cccacagtgacacaccattccaacaaagtcacacctccaaatagtgccactccccaagccaagcatattcaaaccctgacagcctgttacaagtaccttcaactccctggtgatttaaaatatatcgttggctatgttagaatggtttatgccgttgtacataaaaatgttagtactccatatcctatagaaaactcctatagaaaaccccatatcccaatctgaatgggaggttgggaaagtcaggacattgttttagacagaagccaggagcctcctgggagggaagcacagactgacctgtacccctgacccacactctctgacccagttatgctttctccgtgaccaccagtggacctgtctcaggcggcctttggttaattctggttacatagctttatttacatcctcagactctttgattttccctttccctccctcacaatatataggtgataatttatagctcgaagcatgaacagatcaaattaaaattttaaagattcattttatgcacatgtgtgcgaatgaatgcgtagcccatgtagaggtctggcagggccatcgtctcttaactgctctctgcacccttcactgctgagccctccgccagcccctggaagtaactgttttaggtccttgcattcagcatggtggaaacccagatgaccgatggctatggtggccttcgaagagctctggtatttatgcctaaagccttctttcctgcggaatggtttaaaaatagcttctttggaattccaagttccactgaggtcagaatgtttgcgaacactgacttataattaatcactactccattcattgtccttccttgggtctttttgagatggggcagagagcttcgagcagtgttgtccttagtagtcccaggcctgagctatcggaaggccaacagtcatattgcagtctccatttcccctctgtaacccccccccccccccccccccgtctggcctgcctcctgtagggtttctagtttagaaccttcccttattcagctgctggggagatttctgacttgtagttatcatatgtatgcactgtaactgcgcctcagctctcttctgtcacggcaagtgatcttgcagctcttctgtggtgagggagagccttgatccaaactcctcaggggctgatg

SEQ ID NO: 33492 - DNA, 1135 bp, Mus musculus
ccaaacaaaacaaaacaaaacaaaacaaaaaaacagggtatgtcagtgtagccctggctgttctggaacttgctctcaaactcagagacccacctgcctctgccccctctgagtcctggggctaaagctgtgcactaccaccacccagcttgtttgagtgttttgtggtaaacactggcaatgtaggtgtccgtctgtcttcctgtctgtctgtctgtcatgtactgtcatgcctagtgggcatacaggtctcccttgtctgttctctgtttttgtttgtttgtttgttttgtacacatctggtgtggaatttttagagctccagctgcttgttgccaaactgtcccctgtgatggtttcacggctttgcccttggccctctctgcgcacttgtgttagattttctgtttctctgtatcctgtcagtgcctgtgactgttgttttaaattctcccaggccctgaggtttacacataccacgaggcttcgttgattaatgttttactgtgtaggtgttcatttggagatgagaagacagtttgtagtaacaggttttatccttccccagttaggacccgggacttattaggcttggtggccagtgccctttaccatctatagacggccctggtgtttggcgggttgcattattagcatgtttgaattgttcttggatcctgtttatctggcattagtaccacccctacagtggcaggtctgattgatggagccgtatttaccctagagcagcgtgttttatattttagtaagtaaccgaagggaagaccaactcttgaatgatttgtatgaatgagtaaaacggagctatggatacgcagtgtaattatgttgtgatttttgttgttgaaatttgatttatacattataataagatttttttataaaaagctttaattttgtgataaattattttagcctattatttggtggtcgatctgttgtttgagacagggttctccacactgccttggctgtcttggagctctctatgtgggccaggctggccttgaagttagatattcttgcttctgttttctgagtgctgggattaaagacaccacactctgctaaaacacattttaaaagcgctgaatagtgctatatactgcccccc

SEQ ID NO: 33493 - DNA, 1321 bp, Mus musculus
gttgttcccgccctgttagccacatggctggaaacccgttctgtccttgaacatggcagaagaatgcctagcactctgccctttgcatacagattggcacagttagtttttcccatggaagatggatgagaaagctgactgggaccacatcacttgttgggtttgtttgtgcttttggaaggtaaatatagtgataatctgaagctagcccgatttagtcaaaattccagtttgtggaaatttctagcagaagcacacaagccctcgagcagggtggaatgctatttctgggtgtctcttagctgagcccctcaatgcatactaggattctcattttagtacataagaatgatggtagctagtgcctcagagcaaccagtgtcagtggatcctggccaaggttctatgaggaggcatctttatatatgccattaactgagtgtcttccctttccttgtcttaagcgactcccacgtaggttgtagcttagactttgttctgagttatagcagagcagagagggctgaaagaatcaagtcaatatgtttctccaacttgcccttgtgaccctcattgttaattaagcttgtgtagcagcgtgtgtacttatagaatgtgttcactggtccacgtgatcccagacagtttttttttttaaagatttatttatttaatgtatctgagtgcactgtagctgtcttcagacacaacagaagagtgcgttagatcccattacagatggttgtaagccaccatgtggttgcttggatttgaactcaggacctcttggaagagcagtcagtgctcttaaccgctgagccatctctccagcctgattgacagtattctttttttcttttttttctttttttttaaagatttatttatttaaagtacactgtagctgtcctcagacactccagaagagggagtcagatcttgttacggatggttgtgagccaccatgtggttgctgggatttgaactcctgaccttcggaagagcagtcgggtgctcttacccactgagccatctcaccagcccgacagtattcttgttgttttgttttctttcttttttttttccgagacagggtttctctgtgtcgccttggctctcttggaactcactctgtagataggctggcagtagaattcagaaatatgcctgcctctgcctctgcctccccaagtgctgggattaaaggcgtgcactaccactgcccagcatgttggtttttttcctttgttttgtttgtttcctgccttgcatattctcagaagaatgtactcattgatctgcgcaatctctaattgacagt

SEQ ID NO: 33494 - DNA, 2656 bp, Mus musculus
ttctgtttttctgaagtgacaccataactctgacaaccctgaaaacatttatttgggggcttgcttacaggttcagagcttcagtccattatcattatgacgggaagcatggtgctagaagtacctgagagttctacatcctgattcgcaggcagccatcagagagagcctgggccccgcatgggattttgaaacctcaatgccacacctcctaatccttttaaacagtgcccctgcctaagcatttaaatatatgaacctgtggaaatcatttgtgttcaaaccaccacacaaaatgcttttatttttcagcttgtttgttttgttttgttttgttttcttgtagtataaccatactaggaaatggataaggagacccagcaatcccccaccaaactccacctttggagtactgcaatgatttagattcagggcacagcctgggagtacacaccgctcagaagtcctgatgaagttggggctcacctgcctttcactgccaccattgtcttggttcctggtttctgttacaagttgtcaacgttctgcagtttgtttctggggaatagtctccattagctgagagccttttctttcccagaatgagacttatgagggaaattgcacttccttgggtcctttgtttcaatagtctgatagctaagggacgaggtgcaagtatctgtctctctttcgaatttcttggctgctggactgtagctcacttgcttgtctgggatgcgggaagccctgcattgatctccagcatgccatcaaacttcagtgtggtgacataatttcagtatgacatcatcctagcttttagggacagagacaagaggattagaagttcaaagtgactttgaggatagcctggactgtataggacaccctgtctctaatcccacctacccaaaacttaatggctatagcttaatggtggaacacttgcttgcaagtgaaagctctggctccattccttagtaccatgaagaaagaaagaaagaaagaaagaaagaaagaaagaaagaaagaaagaaagaaagaaagaaagaaagaaagaaaaaaaagaatacttttattcctgccaggatggttatagaagaaatatgagcgagtgcccaatgccaatagcgagggactcattagtttaattcgccctcttgagctttcttcctaaatcaaaaccagacaaattattaagtaacacttggcttttctccttcagtcttactgaaatgctcaggatagctggtgtaagccatagtgtatccgtgatggcatgcatctgtgtctgtctgctgcatagaggccgaaacagaacatagcctgatcaccattgtgccctaaacacctgagccaagaacagagcaaaaccttgccttatgtcatcttgctcaccttttagataaaagtttgcacctaaagctttctcagaaggctctgcgctgttacgctgtgttgccgtgtaggcacttgtaaggacatttgttcaccatacttgttatcatcttgtaccagcattttcctattgagaatttccctccttttgtatgttgaaacaaagcatccctaagggagtgaaggcagctgagttcagttcctgccggctgctgatgctggtggcccttgagtttcagtgaagtatggccgtgccgtgcctcaggcagttagcagcaaggagtgacgcgttgattatggcagctcaggtgaaccaggttttcctaagaggcaggtggttgcagggccccaagcgctgcagtccatgcgcttccggcactcgtccagatgcaccatagtagaacttatgaaaagttgttgttggctgtgtgtggtggaccacacctctaatcctagcactcaggtgacagaggctggagcgtcttcgagttctgagacagccaagactatgtcaaggggaccatgtgtttgaaacaaacaaacaaaaagtcaagttgtgagtcgtgggagacccgaaactgactcggaggtcccaaggaaccttctgaatatttaccctgtataatggcgacacaggattttagggtttgaaacaaacaaacaaaaaaaatgcgtatatccttgtataccatctacgggtgacgtagaactccaggatgtcctaaacagtgtagaatttgtcctgtgttgagttagacctctggtcagaagtactgtcttctccagagcaatatgtaaaccgttatttactgagtacctgcttcgcccagcgaagcacagcatgttataggatattgtaatgttaccataactttatggggctcagaaacggagggtgtgtccagcagggacaagggcctcactcatttgtcagccccacgattttttctttttataatttttcattatatgttgatataaacaaaatattctcaataccaccaagctttagacaaagactaccagttgtgtgtaggctgcacgctctcttctgttccacccatgcagtcatcctgtaaatgtagaaccatgccggccctttaaagctaatttctttgttcttgtgaaggcaggtgtggcctgcacagctctaggtcgcctctccctccctcttcctgctttgtgtaaggatgccacagatcccacacagtaggctttgacggtgacattgtcagtaagcatataggtgaagttc

SEQ ID NO: 33495 - DNA, 1155 bp, Mus musculus
agtcccttgcaaaataggaagagacagtgcttcgagttatgaccatcttagatgaccattcaaggctttggatgtaaatgtttacagtagctagttggcaactcaagttttcctctgggaaagacagaaggatcaatcagtcccagcactgtcctgagaaacctcaacgctgaaggcaggaccttggagcatccctcgaagccctcttttaattacagcccagggccgctggccctgctcagcaagcctgtcgctacactgataatcggtttgctcactgtgtcatctgccagtgcattctaccagccattgatatttctagaaaaaagtactgacttctctcctgaggagccagaaaagcctgaaagagagagctagagaaagacaggaatgacccccagcatctgaggacgtccagaagcatgggacagtatttcatgtgcccatcagatgccactatggaaatcggtcatttcatgaagcagtgggaaatccgtcaaatgctgtctctcctgttgagcccttcctgggagttttcatatgcttatctctttggtttggttttgtgtgggaggactggggactaaaccaaaggctttgtgtaacactgtcaaacactctgcactaagctacacacgataccctgtgtgtctggtgtctgtaatgtgcttttccaagtaacatttgtgagacatgcgaccatctgaggcttaacaactcattgtacttgtggaggatgcaattgtaatgctctttcttcttctaaacccggtctttgcttttcagggctatgaaggttctctcataaagctcacatctaaacaggtaaggatttagaacttctaaaaacagtccccatttgctaatcaatcccaataaatgttcttttgtttcaattaggattttctacctatgtgttatcagaattaaaggtgaagttgattgggaattagtataggaaaattatatatctctgaaatagccaaatgcacatatatatatatatgtatacatggatgttttcccgacttgtgtgtactctctcttcaataattgtccacagaagccagaagagggcatacatccccaggaattggagttacatgttggtgttgggaatcaacacctctcagtgatcccagtcgctgagccatc

SEQ ID NO: 33496 - DNA, 1178 bp, Mus musculus
agaaaaacccagaaacgattacgttgtgaccctgttgtcttgcttctggatatacaaatcttctcaagaaaatggaagcaagatcaagaattgaagatgtttatgtggaggtcagaagtctgttcttttatcatgcgggtctcaaggtttacactcaggtggtggaacttggtagcaagcacccttatctactgaagccatattacaagtcctctattttattaaggtttaatacaagttgattagttttcatttgtcacacactatggactaagtgttgagatgacagttatagtattctaaagcggtgtgcatatgtatatatggttgaccttgggcacggcagcagaaaactgaaataatgtggattataagtcattccgcagcactaggcttacaggtgctgttaccctgccgggcttttatgggaatgcttagggaccaaactcagggttacagatcagatatattgccaattgagccatcgcccagtcctctggaggtacagtccccttcctgtagtttaggctacattacatttgccgtatggcagtagatgcttgaactcctggatcctggtcctctgtctccacctccctcgtgctgggattataggttgagctacccagtgagttaccagattgagcgtggtagagtatcatgctcacaagagagcacttcttcacaccgctgtggacagaaagcagagacagaggacagcatactgaggttctgatttgcttgaaaggcattgtctctcgtgaccaacttcctctgagcttgttgatggcatgttggaattcctattgcgatgccctgctgtcttcaacagatagttgtcctcttaggcccctcagttgccatggccattttgtacacaatgggaaagaggaaaggaacattttgctttaaaaagcatagcctaaaagttagataatcacttgtgtgtgtccacagcataggccaggacaaagcaatgtagtttcggtcgtcattagcgtgggagtttggaatattatgtgcctagctgaaattcctttgtacatgaaattagaagaataaatattgccgggaatgggcagttgagactgaagtgtataatgtttttgaattgtggttactcatgaagggggaaaactgactattatgtagccattggtactataagccaccaaaat

SEQ ID NO: 33497 - DNA, 1184 bp, Mus musculus
tgggctgatcagcactggacaggcaagtctgcagtaatccatcttcctgcaagtctcacaaagacaatgggggaagtgtttgatacttttgtgaatcttctacagtgtttggttggagtgtatttctcattaacatttcctcaaagcacaggtttgaaatgtatgtatgtgaatgatatcgtgtgtattggttttcttaaacttgaaaacacatctttttaggtatttacagtagtcttcagacatgggatgggctagctaggtgttagccacacactgggatgggccagtggctgtaacaacaaccaaccgtcattgcattaaggatggaggttgagggaagttgtcccaagagtgaggtgtgtaggattagctgctatacttcattgcacacaaacctgggctttgtttaggcacgagaagctgtccccggcacttcctcttaaagagccacacagggtttcagagaaactcaacattatttttctgagcaaatttaaataatctgaggatggattttttagaaaacctatttggacacagtctctttgctccctttttcttcctttcttctttccttccttgtggggtgtgtgtgtctgtgtgtctgtgtagacccagctgtcctggaactcagctacacagaccaggggctgggcttgaactcagcgtcttgcctgcctctgcctcctgagtactgggattaaaggcgatgtcactactgcccagggtcgtcccccccccaattatttaaattagaacacaaaaagccacaggggaaaacatttaacaaatattccttcttgaacaaacttggagggggggggtcgtagttccccaggaaagctcttctctggcaaggccctaggctcagtcttcctggggtgcacacccctagagtttcatcttcagtggtgattaaggttgtgttttcagtaggtatttgtttagatctgccgtttgcgctccagaagtgagcaaagcacggggttctatccattgagcagatgccttctagttacaggacgttacggagtcctgttcctctcagccatccaagcaggaggaccgggatccggctccaggggatccggctccagggcgtcgagcagtaaagtgtatcctacagaatccatgctggggtcgcccctgccttgaagcgtcccagcttctccagctggttc

SEQ ID NO: 33498 - DNA, 1196 bp, Mus musculus
ggtagggcacgttgtaagcgaggacgcagcaaaaccgtcaaaccagaccactccggggtagaaagaaaagtttattgcaaataaacctgcaaactggcaagactggagggaggggcaacggaagaggaatatggtggaaaagctagcagattttatatggcggtcacagggccagcatctttgagctgttcagattgacccagaactagatgcctttgcccagggtacttgacctttggggtggatgaagggcagagtttcctggtgaacaaaaactcacctttagggtcgtttgcctggtaacagtttttcagtttattgggcctaaagcagcgtgaccatcactgccattttggagtgctccattggacctaacagaagtgtgtctgttgacatttgatcctcgtcctgcatccacccagctgattgtgagtcttaaaaagaagacagattttcagaggaggaagaattgaagtggttacaacttggggctatgcagtgagcctctaatttctgcagagaagtcagcgtttgttcttgttttgttttggcgcgcttgaccactgggctctccgtccataatgttttaaccattaactgtcctcccaactgtttgttcctgaaaatcctggcttgtagtcaaaaactggattagctgggaagaagagccccaacaggacaggactggctgtggccatttcttgattaatggttgacctgggagggcctggaccactggggaccttccagcaggtagtcctggctggtattagaaattgaggctgaaaaagcaggggttgggggtggggtggggtagggatgggggatgggaggcaagtcaataatcagcctgcctccagggttctacctgaatttcagccccccaccgaccagccttcctttctgactaaagctatgctctaaccctttgctcctcaggttgttttaggtctggtgttctattacagccggagaaatctggctaacaaaggttgcctgtgccttttgtaataccatgggtcactgttggacagagctgagtcatctgttgactttgatgtgaaaaaaagagcactttctgcatagactggggaaggctgggaggagcactctctgcatagacaggggaaggctgggaggagcactttctgcatagactggggaaggctgggaggagcactctctgcatagacagg

SEQ ID NO: 33499 - DNA, 1169 bp, Mus musculus
gagagtaagagcactgaaggtcttgagttcaaatcccagaaaccacatggtggcttaacaactacctataatgagatctgacgacctcttctggtgtgtctgaagacagctacagcgtacttacagataataaataaatacatctttaagatttatttttttactatatgtaaggagtcagatcttgttaaggatggttgttaactgccatgtggttgctgggatttgaactcaggaccttcagaagagcagtcagtactcttaaccgctgagccatctctccagcctgactcacaaagtcttaacaacttttcagtctttgtaatcacagtgccttcaatgtacaatgagaggaatgtaccctgtttgcaagtcaaatgagtcttattttacccacaaaggggtcacatttagcttcagccatcagcttgacactaacacagagccctttgggaggagggaaccttaactagggattgtctctttcgggttggcctgggggtgtatccgtaggtagggtattttcttgatgactaatgagggcagtgccagtcctgggcaggtgtcctggattgcatcagaatgctgactgagcacatttggggaggaaaaccagaaaacagtgctccctatggtctgtgcttccctttgggtcccaggttcctgccctgagttcctgttctggttttcctagatgccagactgtacgctaagtaaatcttttcctttcaaattggttttagttgtggtgggtttgtttgtttgtttatttgtttgtttaagatttatttattttatgtatatgagtataccgtagctgtacagacagttgtaagccaacatgaggttgctgggatttgaactcaggacctctgctcacaccagccctgcttgctctgactcctgctcactccggcccaaagatttatttattgttatatgtaagtacactgtagctgtcttcagacaccagaagagggcgtcagatctcattagagatggttgttacccaccatgtggttgctgggatttgaactcaggaccttcggaagagcattcagtgctcttaactgatgagccatctctccaacccagtcgtggtgttttatcaccacaacagaaagcaaattaggacagaaattagtatcagacagtgggccttgctatga

SEQ ID NO: 33500 - DNA, 1188 bp, Mus musculus
cctaactcctgagccatctcttcagattacccccaccctcttaatccagtcaagatgacaaccgaaaagaaccaggttcctcaccaggtcacaacaaatggagaatacgtgtgttgaaagatgtcccatcccatctaccccgtcaacagaaaatgacaaatgaaagcaatgtacagtaataccacaggcctggcagagcagacaacagtagatgctggccacaataccgattaaggcgttctcgtttattgttagatggaatgaaaaaatggcgtaagtacctcggaagacggtgtatcagtctctttcactattaactgaccccttaccgtataatctagcaattgcagttgtagttgtttggaatgagaatgtcactatgggctcctgtatttgaacatttggcccctagttagcactgttcagagaagttctggggaggtgtggtcttgctggaggaagtacaacactgagggcgtgtccggggcggggccagagttgggggaggagccgggggcggggcaggatttcagagttttcacctcaaccgtttcactctctgcttagtgttggtgcttgaacctgctcctgccctacgcctgctgccttccctccttgtcgttaaggactttccctctgaatccataacccaacagaacctagaagctctttcttccttaatttgcttttggtcatggtgttagtcacagcaccagagatgtaccgattacagtacgctttggtagtcacccaaatgagaggcaaacttctgtttattcagaaacttgcacatggataattcaaagcagctctgctcctaactcaaaaaacctggaagtgaccctggtgtccttcaagttgacaagttgtgaatggggcagtcatgttgagtttttactaacaatagggtattaataagtaattaataagaaataaatcgttgggcctatgactatagcattttggaagtggaggcattaggataatgaggagtgtgaagccaacctatttagtgaaatcttatttcaaagaagttaaacatgcctgtggtggtggcctacaacttaatcccagcactagggaggcagaggcaggtgaatctctgtgagtttaaggccagcctggtctacagaatgagttccaggatagccaggcctacaccattaaatcttgttttgaaaaacaaaa

SEQ ID NO: 33501 - DNA, 1921 bp, Mus musculus
ctgtgtagttctgactgtgtagttcttgctctgaaaaccatgctagcctcgaactcagagatccaactgcctttgcctccgcatgctgagatgctgggattaaaggagtgtgatacccggcctgggataattagtggttttgccctggaataatgcacggttctgaaagattctaagagtgtttgtggagcgtgatttgctatgagatctgtgggcaggttggaggcgagagaacaagtgtgagacaataaatatggcgtggcttcacatacatgtttatttaaatgtctttcaggttctacatcactctttcttccctcatgctcttgacgcagagagtcacatccctctcactggacatttgtgaagggaaggtggaggccccgaggcggggcatcaggagcaagagttctttctctgagcacctgtgggatgctctacctcatttcagctacttgctctttttccctgctctcctgggaggctccctgtgttccttccggaggtttcaggcttgcgttcaaagatcaagctctttgtatccgagtatctcttttcgggctctgacctggaggggtctgcagattctcgggctggagtgcctcaaggtggcgctgaggagcgcggtgagtgctggagctggactggatgactgccagcggctggagtgcatctacctcatgtggtccacagcctggctctttaaactcacctattactcccattggatcctggacgactctctcctccacgcggcgggctttggcgctgaggctggccaggggcctggagaggagggatacgtccccgacgtggacatttggaccctggaaactacccacaggatctccctgttcgccaggcagtggaaccgaagcacagctctgtggctcaggaggctcgtcttccggaagagccggcgctggcccctgctgcagacatttgccttctctgcctggtggcacgggctccacccaggtcaggtgttcggcttcctgtgctggtctgtaatggtgaaagccgattatctgattcacacttttgccaacgtatgtatcagatcctggcccctgcggctgctttatagagccctcacttgggctcatacccaactcatcattgcctacatcatgctggcggtggagggccggagcctttcctctctctgccaactgtgctgttcttacaacagtctcttccctgtgatgtacggtcttttgctttttctgttagcggagagaaaagacaaacgtaactgaaatctttccctgcccttcatctcacctagccattaaatactgcttaggaaatgccagaagatgccttgatgaataatgtatttaaaactattcatagtgaaagtttttaagtattggatggataaacctgatggctggccacagagatgtgtttctcttctgtggtggtttgaatagtaatggctcccatatgtttatatatttaaatgcttagagggtgacactacttgaaaggactaggaggtgtggcttcatcggaggaagtgtgtcactaggctttgaagtttcaaaagcccagtcctagtttagcgtctttccctgtagcttgccgatctggatatagaactcttagctcctccagcaccatgtctgcctgcatgccgccatgcttcctgccatgatgataatggactaaacccctggaattataagtcagccccaattaaatgatttcctttataaaagtttctgtggccgtggtgtctcattacagcaggggaacagtaattaagacttgtgcattaacaagctattctattgttactgaggtacaaattggagaagcacagggacttctctagatgtggaagtgaggttgaaatgagcctggatataaaaacatcaggtgtgagtagagggcgtgattcagtgagtgtctgccc

SEQ ID NO: 33502 - DNA, 1171 bp, Mus musculus
ccttacccaagagctgattttgaaaatgttctcattgatccagcagtattttttgtgaggacacttgtatgtctctccagtgtgcttatataaaaagaagtgttctgcctttagctgaaaaaatgagtaaccatgacaactgtcttttgttgttgttttttttcctacagtttatttctcaaaaaaacaaaacaaaacaaaaaaaaaacctggaacatgcaccaagtttgttcagcttttactaaagatgtctacagccgcggtttttattttgtttctgtttgccctgacccatgttttattactatggtggtgaggtgggaagcgttatgaaatgtccaaatgcggccatgccatttgtgggttagaccagcagtggcttgttgagtaatgatgacagagactcgccggcggtgtgcgcatggtcagaaccctctctgggatcaagaatggagcaggaggttttgtctctggtcctccctgccctctgctccttcacaagcgaagtgctgagcgcttggccatagactcctttctaacagctgcatattctttctgggtactaactaatcttagcagcagcattgcgtgtctgacatgacactggcttgccaatcccatctctggtttctaggctagctacttaagagtattttcatgagtatgcgccaacacattgtcgtcctaccgtggagagagagaaaacttttgatgacaaaacaataaagattttaaatatccattttagcttgtgggtgttttcataataaaagttaagccgctgaagtgcactaagaaggggacactgagctatgtggtgacaaacgccctcgcctcagaacatgagaagccgaggcaagaggatcaagagtctaagcctacttggggctgcatgagaccctgtctaaagaatcaaatctaggaagatgctagaaagcaagcacactagcaagtcaagtctgcaggaggaaagagaaaccatggcaacagtacagctctgaggctctgatcctgagtggtgatgcacaggcctgaaccaggccgcatttacagtgagttccaagagtctcggaaatgtcagctgaccagtgcctcatcttgcgaagttcaggttactgttgctagcctgtgctgtagaccccaggatttgtggagacaactattggtgaga

SEQ ID NO: 33503 - DNA, 1532 bp, Mus musculus
tggcttagactttgcatattcgtggttcttatttgcatagtggcatatggcttgcttgttagctagctcacatgggagcacctccttgccttcctgagagcaattgtggacttgctgactgagggtctgccttgttgggtctcacactgtcgtgttccacgtcgtgctgcgtggtagccttccctcatagcttgctttcttctgtgctgacaagaagcacatacaacttctgaaacattatgaacaattttcatatattttgaaaagctaatgcagactttgtttttctcatcctaggatatggtggcaccagaagacggtaaaataggaaattgaaggcaaacactggatgcaaagtttctgatttgtcatcaccatctctttaacacctggctaatgggaataaccaaaagttgtgtggtgtttggtccttgtgtagcttttcgtgtcccgttgtttgtggccaagagttgatatgtgacaaaatgctatggtttgtatgataatgtaacatgcagttcaaagcgatggccactgtggaatgctgacattgtgcttgtgtctcaagcctttcataccagagggggcattaggaatggagcaccctcctgctgagactgagcacagaccgcttgagctaggtggctttggaccatgagtcattccctcgtagaaacaacgatcctctattggatattaaaacacttggtgtttgctgttcttcaaacatttaagcccagtgccgactactaattatgctgatttgtgggttgcaatcgcttgatcagtagagcttggacccttctgtggtggtcagcgcctggggattctgacctttcacaggaagggtagaaagcaaacgacatgcacagaaggcttggaaccgctagacgtcagttttcaggtggtagcattcagacgcaaaagcatggagttctctgtggagtcttaaactgtcagatgttgttgtgacattttgttttagccttacattaatatgacaataaattaaaaagacaggaagtattcttgttctttgtactgctgaagcgtgtttcgtgtgtggtttcctcatctcacacaggcacccacttctggggctcaagggatgcatggcgcactggttaagagcttgtactgctccatgggtgacctgggtttggttcctggcacccatatcaggcagctcacactggcctagacgctggttctaggggacatggttgtcgctggtctccaagggagcttgcactcatatgcacatacacacacacacacacacacacacacacacacacttaattgaaaaatgacaaaacaggctaagagtagcagtgcatacctttaagaggcagaaggaaacctctgagttggaagccagccaaggttatacagtgagagaccccgtctctaacaaaacagaaacttaggggactagagaatcggtaagagtttgcttctcagtaactgggttgggcagcttctgactccggctctaggagatccgacctgtgagggtaccaactacccaa

SEQ ID NO: 33504 - DNA, 1136 bp, Mus musculus
tataccctcccccatctctactcccctactcacccactcccacttcttgaccctggcgttcccctgtactggggcatataaagttgcaagtccaatgggcctctcttcccaatgatggccgactaggccatcttctgctacatacgcagctagagacacaagctcctggggtactggttagttcatattgttgttccacctatagggttgcagacccctttagctccttgggtacattctctagctcctccattggaggccctgtgttccatccaatagctgactgtgagcatccacttctgtgtttgccaggcactggcacagccttacaagcgacagctatatcagggtcctttcagcaaaatcttgctggtgtatgcaatagtgtctgcatttggtggctgattatgggatggatccccaggtggggcagtctctggatggtccatcctttcgtctcagctccaaactttgtctctgtaactccttccgggttctaagaagggtcgaagtctccacactttgatcttcgttcttcttgagtttcatgtgttttgcaaatcgccagtaggatttgctgaaggaggcagaggcagggggatcatgagttcgaggccaacctgggctacacattttttcttctccattctaaggtatgacaaacacatggctttctaccacaggcagagagagatagctttgatgccatcttagctaagggcagtcacatggctggctgtagcttcaataccatcttgattgaaagcagtctcaccatctttgttatgggaagtccccactttacacaaaatctttaggagaacagcctggcttaaagtctccaaagacacttttcaactaagataaaattttcatgtggtttctatcctaccttgataaataataatttaatttaatactactgtaaagatttacaacagcagaaaagttaaagaccactgccttaaagaaatgttcagccttgtttttgctactaagttataatgttataatctttgtttgctagatacaatctagagcaaataattaaaaacagacacagactgtctaattcagatatgcttaatagatactagcactcaatcttgtcagaaatctgctaaatgtaacattaa

SEQ ID NO: 33505 - DNA, 2435 bp, Mus musculus
acgcggcccccagtaacctgccgtacctgcacagccccatcaccacctcccccagctgttaggactcgtctctggaccccaaatccagagtcggcccccagccagttgccagccacctgtgaacagcaaatagggactgaccagtgggggatcaggtgaccaggctccgtctccatttctccttggccaaccacagggccagctaggatggcaataacgactttgaatacacattaaaaacaaacacaactaaacactctaacataagcaataacggcggtttccgctgccagagaagacttggtttctgtgtcagtttttactttgcaggtagaaatttacctcattattattattattaaaaaagcaatcaagcttgaaagttatgaaaccccacagatcctggcaaatgtgcgcaaccaatttttattgagtggagagggaaaggaaagaggagaaaaaatgagtttgccaggaaagtgcctggttctgtgtgtgtctgttctcctgttgttgaactcacaggaattttgttctagatccttctaggccacagtattatacttagtcgtcaactggataatcacttactgtttaatgcatattgagaacctcagcatgtgtgtgcaggagtctagtgactctgggagatatttctgttgaggtcacacagtcgagcagagaaacacacaggtgtgtgagcagtgagaggagcgtcgggtaggtggtcaccatggttaccatcagacgcagggtgacatgcaaggaaaaaggtttatggttggtcacttttgcagctggcccctgggcccactgacccagccacgtgagatttttctctccagcggtctgtttggctggggatagagtggtttcttcccacttggcctaggatctggctattggtctgtggtaaacgccatctttaccaaggtgctcctggaaaactgggtgccgttcagattttcctgccgtgaatcatttggtaaggccagatcagaaccagatcactgaagatgaactaaaaatgaatctccctctcgcggatacattgggtgtttcagatttagcagtttacttgaagtatacataccaagaaattcttgttacaaaatctggtgaatactctgaaacgccctccctcttttgaataaaaagatacgcatatgcctgacttgggcctcctaaaagtctggaaaggtgagagaaaagagggtgtggggccggatgccagctcctgttttactgatatagggtgacttaggagccatgctgggttccaactgggccaacaccattttaaaggagcctttccaagtggaggaatggctttggaggaataagtgtgttttctagggggaatgtgaggggtaggggagggaacctgttttatctgtagtattgggggacaagttttgtgatggtgtgtcagattagaggtcactgcagacttggcagaaattagcatggtccccgtgccctcctcccccacaccttgagcagacatgtaaccaagcctccatgtcacgtggtgacatccagaacccccagacaagcctgggttcatggcttttccttccatgaaatgtgaacctgtgttggtagaacttggattgagtggcctgtgccaaattctgcctttaggtgagaagtgaggggtgccctgctcgcttcccctactgtccgaaggcttggctgaaggcatagcgggtccgagcttccccgatggcggactgcctttgcttagttggatggtcccatatttttacccccactgccttcctggcagctgtttcatgtttggtgaagaattagattaaatgagctctgtagctagtcgagtcctgggctctgagaatgttgagggcatctggagagcagatagcttgtagactacattcactttctagatgagtgtttgccaaatgtgtcctagttcccagactggatcccaacgacacaggcattgggagctccaaatgtccctcccctgcttcctaattcaaacctcctatgacagtgtcaaggggctatttataaagtcattttctttgtacttgataacagcatgagatccaaaacgcttagaaagtaggacattggtttgattggaaaaaaaggggggggggcggggggtacaccttaaagctctccagaagtttctgcaatagcgttagttgaagatcctgccattcctcatggttagttagtttcaaaagacagtatcccatccgtgagctgatttctggtgatgggaagttttggaatgtcagaaggctgttgagtatctgcccgagagtgagggacactcagttctccctggggatcttggctccatcatccatatagtgtttgtgagactgagggctgaagcacaggcgagcaggtagctagcagcagctctccgctccattcgcccctgagaccttgtgccc

SEQ ID NO: 33506 - DNA, 3276 bp, Mus musculus
aagctatgtgacacacttaatcatttcaattggaaggctgaaaacagttcttttgactttttttttaatgcaagcatattaaaactgtgactgtctttgtttctctggttcttgaaatacacatttctctctttatttattaaatttttgttagcttgagcccagtgctaggactaggcatccagtctagtgtgaatgaatattatagttatatcttgaatgagttcctcaaaatgaagtcaagaattagcctcagttttcacttttgttgaagtttcaatggcctgagctgggtgcttgtggatttggctgcgtgtttaatagcaactcgactaccatacagagcttcagaatgggatgttggctcgagagctcttccccttccctctcttttcctttctgttaacaaagggttgaagaaatgggcatctgtatagttttagtagctataatatttggcccaactgaaattagtttaacatgctaaacacggctgtgattttaatttagtaacgagctactgtggtatagtaaaacaaactgaaccgtgaacctccatcccacagctggattaacctggcccttaccttgaggagtctaccttggttccctcaaccaccagggctgtggctcatgttctgagctgagtagagacaatgtgtaaggaagcctgctgtagtgctagtggtctcgtggtgacccacctatgacaaaatgcacatgaacgagctgtttaaaaagaacaagtcctggaaaaaaaattaaaaataaatggtccatagagctaatagatattttcagaacttgaaaaccaaaggtatcaggagtgtattcaagttggcaaaaaggtggttgcttaggatttccttgtacagcagcatagactgtagaagagccctctggactagacaagcctggcattcggctgacagctgtttaccttcttgtatgtgcattatgtagaactcctggcaggtgtggaaccaactcctgcttcccaacagagctgcagagagaaggcaggtggctccaagctcttcttcaaggcctttcccagagaccccacagtgccactttactggtttggccagcttggatacttaactcaggcataaactataattactctgggcacgtctgcctgtacctttgcttctccccagattgcaaagctagtcttggaagtgctcctgtgcttgccccattcacctttttccttttcttcatcacgagtcttatataggaatccaggtgtcccttattttcctatcagaatggatcagggtttagtcctcatgtagtttctgctcagaagtctgccagtttgctaacagatggcagcatggaacccagtgtttctatgcaaaaacacaatggcagtacagtctgggttctaaccctgctttccctccctcacagagctctgagcagcctaagtagagtaacagcactaacatcgcctcctgaaggcagcaggctcctctgagctccacacttctgactgcactcatttctcttggctgttggaatagtgaagggcatttggaatgtatagagaaatacttgaatatggcaagcaaataagcatacattaacatcttattatcctagatattattacaaacagatattaacatttgtctagtgcagaaaacagcattagaatgtagtaaatgtcccaattttcttctactgcaatatattcccagttgcatgaagggtgcttaggcattgttccctctccccttttaaacagtcgtcatctgaattcctgtaaatggccttgtaaatcaatgtccgtatttgtaagcatatctggctgtctgtcccttcacccatgcacccagacctcacatgtgtgccagccttcatcctgtgtttctgttgggcagatcatcttgcacagagttacagactatagaatcactcagcaaatattcagaaatgatgtaagaattttcatggatcagaaagttgaaggctggcctctgatgttaaggcagtgacacagaaatgagggtgattgtgacagtaatattcaaacaaccgctgactacatccagtgcatgaaaaagatcacttaaaaaataccgccctaaaaaactgaagctgtttcagccaactcaagcaatctgcagttaatagacaactatggttttcctgtttgaaaaagccttatctatggcagaaactttttaaccttttctaatctagcagtgaaatatgaatccacttcttaatatttgaaatgtgtcagtgagtgggcgtgtctgttcatttcatacctggtaagtgtgttttatggggtatattttataagtaatattgtcacatttagtggagttgatgtagccagtcagttccaatttctctcatgcaaagttcttcagcctcctggtcacctggtttggagtaacactggtgggattgccgaacttgtgtgggggattcatagtatgtaatactgtgtagcatttgagtggtgtggaagttgtttttaaatcattttaaagtatatactatgacagatgaaacttaaaacttgtcggaagctgaagattttatttctgtgagattcagtgtggtcaggttgtgtggccaattttatacttctaccagaattctgcaaaattgaggtgacgctcaccccataaagacactcaccctatagaggtagttgtcacacacacacacacacacacacacacactgttcacttcctagctcctttcccctccacctttctttcagagtttgttctcatttttcagaattcttctgctatccttctcaagtggccctgaatgccctttgttagctcaatttggtgatgagttatccctgaacctctcccagtgtgcaggaagaaaaactagaaaacgccacagtaaaaggaaggaaggaactgaggtttttaaagcttgtagcatagaccgagaaggtgaccatgcggtatagtaaatgtattcactacacagaacactgagactcgtcatgtgtgtgtaatgcctgcttctgctccctcccagtgttttaaactcatcttatctttgtggtagtaatatttgtccttaataacctacaaaactaaaaaggtactttgattgacaaggtccctcaagaacttacacagccagctttgaggaaatctagactgttctgacaacagcatctggagttgtaattgttgtaattttcttcctgtactgtctcagtctgtgtaaataaccagtgtagtggccctttgatttgttgttggtgttctttttgtttccg

SEQ ID NO: 33507 - DNA, 1167 bp, Mus musculus
ctcatctactttggtacctaggatttgcctatcaagtcctgctatattatttctaaaattaactttgttctaaacccattttagatttatacatatgcagaactctataattgctatcataataaatcagcatgtttaacttttacactttgacatttcctgtatgtagttcttagtagcactctgctatgtacactagatattttgcttgactagaaaatgactaaagagtcttcctgagttttctctgttgctggactctctcatggagacatggtagagtgtgttgcagaacagcctcacctataggtgcagtaggacacatgcaccattagactggagaccagtgaccagaaagtcagcgagtgcaggcgtcagagagttagggctcagcacattgactctgatgtgaagcagcccaaagccaactcggcaaatacttggattattgttttgtgaaaaggaaatgtaaacaggagcaaggattccagcacccagccactccactaacaagtgcagtagaatactttctttaaagagaaagaattttaaaatggacttcatgttcgagacaatcttttttcctttttagttttggtattttatctgatttaatcttagtgttttatctgctaagaattattaatatgatcaaacagtttgccttctacagaagagttcttaaacctgtctataaaagtcaacccttccgaacaaagcactgtagaaaaataaagtatttcttttaaaatctaaagccttttatggcatcacttgatccttcccacttggactgtgaactcagtgtctctgatcatagtgtaatgtaatgtaatcttaaacctgaaagagactttgaggaaaaccaggtctcactcttggaaggcctcaggctggtaagatggctcagtggttaaaggtgcttttgccaagcaagcctgacaacctgcggtcagcccccagggccatggtgcctggctccatctgcacgccatggcacgtgtgataataaatacaaacagcaaaaatctgaggtattctccaaagtccacatggggcccaagcctgtggtcctgatagtctgccacactctcttgtactgctataagtcccttctgaaagccacatttaatgtgagcatattgaatctcttttctttaaaagatc

SEQ ID NO: 33508 - DNA, 1181 bp, Mus musculus
cccataaattcttaaaatgcgtttaaaaaacagaacttaacagaatttttttaaaaagcaattcacagccagatggctgtgtttgaaatttcagtgttttaattttctctttttgttcagtggacttgtacctcttcataatgcatgctcatacggacactatgaggtcacagaactgctgctaaaggtaagagaaatccaagtgttgaatagtaacattcaacttaaactgcttcctttctttttcccttttcccttttccctttcccctttccccttttcctttttccgttctcttttcgagacagggtttctctgtatagccctggctgtcccagaactcactctgtaaaccaggctggcctcgaactcagaaatccacctgcctctgcctcccaagtgctgggattaagagcgtgcgccaccaccgccgggctttaaactgctttctaaaagctgaatttaaaacaattccaaaagttatggctgaaattttcagtgaactccattttcagagtttgctttccctcctggacagacacacttactcatgtcagccattttctctaatccagcatggagcttgtgtcaacgctatggatctgtggcagttcacaccgctgcatgaagctgcttcaaagaaccgggtagaagtctgttctctgttacttagtcacggtgccgatccaaccttggtcaattgccatggcaaaagtgctgtcgacatggctccaactcctgagctccgggaaagactgacatgtaagcatttgtattctgagcccagtgtggctagctgttagggaaaacatttcgggctgcttcattacccaggctgtttcctaactagaccatggccttcattcttaatgtgtgctaatttatcatactcatgtctaatcatgcttgcttcatgtgttccacaagagcctttaccacatacgtgtgccatacatacatacatttgtacaaatgtcacatacatcatacatactacttacatatatacatgcatacacacacatactttttaagtgcaattctaattcatttgtcaagactactggtgttttgttttgttttctggttttgtttctgtgtggtttggtttcttttcctatgttgtcgttcgtttcgtgacagctaagggcaaggcccatcaacaaccatttactgagtat

SEQ ID NO: 33509 - DNA, 1163 bp, Mus musculus
cttgcacactaatggattcaaatgtactataagtatgccaaggtgctcttgacataggcaagcattattcttctcctttcagacctaaacaatttcatgtagcatcagcttcaagttgaggcatttgggggaaaaattatcaaagactaaaacaagaaaacaagataacaacattgctgacacagaggcaagcagagtgtgtttagttcactctaacatccctctcccttcctcggccagtttgtgtatgacagctgcctttgacctactcatgggcgtgtccctgttttgtaattgcagccaacttagaacagacctcttcctctttagactctttcctcagatcctcagccagtgcccaagtgctcaagctgctgtctctcacaccctctacttggatatgggactgcttactcacaggcaccgcgcgcgcgcactctcactgcagtagtcagcctggtttgttcaacttctgatacagcctcagtgctatttgctggtgggacactaagaggtgtttctcaggatgcacattcttcctttagtgttgaatattttgttgattttgtttgtggggtttggtagataggtacaaaacaccagtttttcttcaattcagcatgctagcactggagtgagtattagattggtgcaggtacaaggatggagagacctgtcggtgctgtcctcttaaggcgtgttttcatgtactaacaaaagcaagtctgctctattcatcagcctcctcccttagtaccagattatagcaaaagacatgtgagttctggacagtttattttacatggcgtgtggacttctacttacctcaaaagaaagctacattcttggaatatattcacaagaactgtagtgcctggtgtgtgcccaacacaataggtgtggctttaagataccccgccccctaccccccagaatgcttttctttctttctttttctgctagtttcttaaaagagagaaacagataaacttggttttgtaactcaattgtaatgattgtagcacacgcactatccctctcttcccttctggttgggacggtaggttgtgtgcccgtcccaaaggaactgagttctgttagttccatcatctgccctcggatagacctgtctccagacctgatggcttctcactttagtctcc

SEQ ID NO: 33510 - DNA, 1184 bp, Mus musculus
atgaactcaagcatacttaaatcctgaaatattcttgtgacgcatagctggacaaaataggaaacctgtcctttttcttttttcttttttttcttttcttttttttttttttttttgtctgaggctggtagctttgaggctggtgtataaagttaatttaaaaatgcactcacctagttgatagactgctaccctgatttactatgtctctgattgtaaatagctaatacaattgacaaatcataagggtagagccaaatcacatgactactacctaggaaagcattggggcaaaagctagggcacaggttctcatttatatcctcgactctccagtttccacaatcaccatgttttaatgatgtgcagagaggaatagtctacaaaattctccctgttcttcaccaccttaccaatacatgatacttggaagggtaatagctatagtacataatcaacaataataatgcctattattaatgactagttccaccattattaaaatataaaatttaacttctatactttggttcctctgcccttccccctgccccccacccggccaccccccccacctctgcccttttttgataaagaagtcatgtgaacagccttcaatctgtttctttcattgctactttttagctatcataaaaggagaaaatagagataatttttgtaaaattcaactttaaatgcttgtaaaaataaatgaactgtttgcaacagtaatggggtttgcttgaatttttatgccattcttttatggtgtataacaacccaagtgtactttagaagtcagtttattttctctttaaagcttgttcatttcttcctgtcctcagaatataatccccagaaaatgaaaataagtatttattgaacacatgccacgtgaatacagaagctgtttggggtcaggtctgctttgttccattcctggcttggagtgacttttctgtcagccaggtgctttgttctccggtggtagaattctgaccatatagctgtgcggatattaaagaatcatttgtagcaatcgattttttaattctgtgttagtagtagcctggctatgatgttcctactaaagaacagttaaagattttgcttaaaggacccagatagagctgtctcttgtgagactatgttggggcctagcaaacacagaagtggatgctcac

SEQ ID NO: 33511 - DNA, 1196 bp, Mus musculus
ctctcaagactcttccaagtgtctagtctctcccagatgtgtgaccttttgttaaccttcaaggctcatgacctctctggcccccccccctggaaagaatgttccaattcggagtcagctgccttcaagatatccatacttcgtaatactactcagctatacaaagaaacaacctcccagtacatgggacaagccacagcaatctaaaatggattgtactccgcgggataaggagttgaactcatgaggttacattgtatatttccatttctaaatagtagtctccaaatgacaaagttataaagcaggaccacaaactagtgattgccaggggatgccataaagagaagagagcattgaggggagagtaaggggacccctttgtgaatcaagacttactctgtatcttgctgtgtccagtttagatgaatctacagatggggtaaagagcatagtattgcatacatatacatgaatatatataaaaatgtgaaactccctaagcttctagtatatttaacaatattggtccaatgtcagtttctgatggatgttggatgctacacaagtgtctcatgagaggactcaggagaaggatatcttttactacctgcactcttttgcaaccctctgtgaagctgtaattatttcaatatagagatttaaagattatttaaagattattgagcttatccaagaaagggattaatcataggagcttgtgttcttagagaagtaaataagattgatgttctaaagaaaacgcaagtcaaggaaactggccctaaccagccaccatcaatcctgatcctgccatcccaggccagccgtaccaggcttttccttcccccgttcccaggttctccccagtcttgtttctatttacagctgggtaaacacccccatggagttggtttggtcaagcgtttcctagaaaggtctcgtcttggtttatttctgtccctttgctttggcttaaagtgtcctatcatgtttctgctccacgtgtggcaggtgccttgactcagccacagaatctaatgggatacgacacagatggcacactaggacagtgacagccaagagtcggaaggaagagattcaccactgagattggtccttactcatagaaagcattacaacccaagtagcagctctggatagatctagaaggacacgagggcaaggtggggggg

SEQ ID NO: 33512 - DNA, 1756 bp, Mus musculus
tttatttatggtgtgtattataaaaagataggggagaaaaacctcacgtttttctatgttattttaaatgtttgtcaactctgaggtatcagatgaagttttcttaaccatattggagtgcaatgcgctttcatacgctagcgtgagactcctggagttcttacccttgggtgaacccccaaaccctgtgatttttctctagggcaaattagaattataggggagatttttttaaatgcgagtttgtagaattaggggtgttgttttgttttggaagtttgataaaagatgcctgtttcatttccttactgaagtgatgtttccctgagacaagacagaaaggagcagagtctcatggtttcggaggtgggggccactggacgtagccctgtgccctctggctttataagttagcatcaggcagacatcaaatgtttttaatcctagcatgtgtggtttattttttatcttaactttttcacttttgaagattcaaatgttttgactttttaaatgttattttctatgatttcttattcctaaaactggtactagtctgtaatctgtgctttgtatattgtgcctctcccagatgggtggcgatctgggattgcatgctgattatctgtgaggaaatcatctttgtgccatgaggctgaagctggggccaggagtttgtgttttatctaagcaggccatgtatctcctagatgggtgtactttaaatgttccggatttgttgaccagagcagctaggttgaaattggatagaaagcaaaactgctctctatgggtcatgcattgtgtgttaagaaggaaggcagccaagggcactgtttcttacatagatgcagactaaagatcataaaatggctgggggcgggggcgaggtacggaatggaatctgttcagtggtatggatgatcttcagacattccgagtcaaaatataaaatatggtaattccatgttatatgtccctcctaaagcagacataccctcacccccttttgcccagatttgccccagctttcttgctcacgagcactgcttgaaagccccccagccagcacacctggggtgcacacccactgctcagctccaggggcatgttgtgcctttgcctgctcaccaggacccttcccttgaagcagtccgtgggctgtgcttgacttccttatcaaggctgtcactcagagacagaagagtcttccttctgctttctgcctccaatacagccctccttcttttgacccagtctgtcccatgactctgagatagcctcgggagctgcatttagaaactctatgcattgttcagagttcaccactgtagacaaatttacgcagctcagaagacgacaggccccttgcttgaagatcccacggcaagtttgacctggaggtctgtcttcatgcagttcttggctaggatgatggatggatcctaatccccagacattgtgatccaggaagggaaggcaaccccattctttgttccatatttatttccccaaattccctggggtgctttggcaaaatgggtacaataaataagctagaccataagacatgtttcttgtaagaagccgtttgagtgttgtaagaatattttctctagaaagctaggaaggcataatggaagtctgtagttctgcagaaactaaagcaacttgagtcaatggtgggagttattttatccctgagatgtaagcttggtggctcctgattctgggaaatctgcactcagccgcatct

SEQ ID NO: 33513 - DNA, 2572 bp, Mus musculus
tagctcatgagctaaaaaaaaaccaagatctgagatggtggaggcaacttcagctgtcccctgcgtcactctctggccagcagctgtccccccctgcgtcactcactctggtccactcagcaaagtgcttgctgagcagcaaattcaggtgtttcttcttggaacattttcggcatatctgtgtatagcctatattcaagccaggaagttgtttctaaaggtgtctactttgacagccctgaacacacatgacccccagaacacacgtgatagactaagagaatcaactcagctcaaggatgataaagtactgggaccagtttcatattataactggaaaccttgtaataggtcatagaatttagttaaaaatctagttactggaggctagcaagatggctcagtggttaaaagtacttgcttctcttgtagaagatccaagttcaattcccagaacccacatggtggctcacaaccatctgtaagtttcaaagaatccaacaggcaaaacattcataaacataaaataactaaatttagaatactgggctggagagatgcctcagaagttaagagtgctggctgctctttgagaggccctgaagttcaattcccagcacccacatagtggctcccaaccccctacaatgagactgctgtcctcttctggcatgcaggcagaatgttgtatatataatatatacatcctttttaaaagtctaattactggtgagactaatggaaagttagaaaaggcagcctggtagcacagatgtgtaatttcagtcctcaagagttaaggcataggtgaatctgaagccactctgagccatataatgagctcctgattccaaaatgtgtcagtagaaaatacaagtgaacttgtgagagctataacttacaaatcaatgggaaaatctgaagatttgctccttgccttccctcaccattgtgaatgtatattcgccctgcttttgagctcatggtaaacatttgtattcagtactgtgaggtgaaatgttttgttccatagtaaaaagtacctggcttgtcttggtgagtgaccagtatatattggaaagtaattcctgcttctaaagtcaagatgtgctctggagatgatgatgtcatactgtctggaggctaacagtgggagcttttggaattaaacccctctaatgctttcctggacccatctcattggcattgcctgttgttttgttttttcaactttccttaatgattgtgatcatattatgtccatcaccactataatcaagtagattgatcatgtttcctaactcggacataggaggaacgacagcgatgcgcttgggaccatgagaatttgctacccaggcttgcggtttcattccccagtgagctctgtcttgaagcaaagggacaggaaatggtcattgtgagggacagaagccagcaggctctctggactgacttactcttcattttctcacataagccatggtgacacaggcaggttcatgccctagaaaaataattgcttgtcacctgattgcatagttgctactgaatagggaaactaccattgggaagttagagaatagcaggacatactaatgccttcctctttgttttgtttttaaatcaggctgtttaaattttttcctaatcaagtgcttaacattttttttttaaagaacttaacactgcaagcttttaaaatgcttttggctctactaagtatttcgccatcttcactcactctgagtctctgtcaaaccatttgatttggctttctgctgatataacctgtctgtaagttatagagtgagtcataattcttgaaaggaaactactgcagcctgcctgcctacgttgtgtgtaaagatactggttcttgttactgctgggatggcttacactggtgctagtgtttgctgatacttacttaaagctttattttctcagtcgccatggtcatctccttgttttccttttacttgcttggacattgagactgatttttccccctgtattattttcaaatccacacaaactggtatatattctcagctacattttgtctgattttgtattaaatactgacattgactctggaaatttttctttctctccacttctccctctgactgggtcaagcaaaagcaggaagaagaggttttcttttttttcagcatgtgtttctgcgtgtatgtgtgcctgggagagtttatgtgcaccatgtacccttagattcctgtggacgcctcagaactggagttgcaggtggccatgagcacctaatgtgggtgctgggatcctgagtcaatgcctctgcaagagccgtcgcactcaactctggggccatctctccagcctcaaggccctttcttgtagcctttagagacctgcttgtcctgctgtagggataggttttctcagctgggttaacaggaaagaccatgggagtcatgctaaactggtcctattgctgacgagtcatttattaaatggtgatttgattacttgaaaggtgaaagaacttttagttcatcgtcccagatattaaagcactattgcgaaggataag

SEQ ID NO: 33514 - DNA, 1152 bp, Mus musculus
gcccatggagacagagtcccctcccaccttttcatcacacctccctgcttgctagtcactggacatggtggtagaatgatagctgttctgtctccacccatgaccactgaggctgaggggtgcgttcctagaggccagacgaggtgacgaatctctgaaaacccgaatcttggaacaacttgagataatctgagttcagttctaaatcttgcagctgttctcctgctatgcacccccccgccccccccccctgtctccctgaccccgggaacagcgtgcatgattttgcagagccctctgtgaacctctccatctgattggtagccttcctgaaaggagcatcctctttcagggctccatccctcattggctgtttattcatgcagagccacttggaggaagtctgcagccaaggtcctagtagaaccattgttttgaaacctctaggaggttaaacacttaaaaacaaactctacaaattgctctccagtgtcctcctggttagggccaaacagcacgtgttgcagtagagacacattctctgaagactgtaaaggactgtgtttacatccgcctcctccgtgtgttgacaggaaacatgtcaaactgactgttccccacaagaaaagtgtgtcagctcttcttactctgtcacctgtattctaaaatattgactcctagaatgtcacagcacaggcagttgccacgaatctttaagaggaaggaatacaagcaggcgactgcacttcttgaggcgttacaaataagattcgtgttgaatctgttcagttgacttccctgccccccggagcccgttatgtggaggcaatttctcagaaatcagaatctagtagggattgtctctctctctctctctatgttttgaatacttgaacatgacaagtccagtttaaaatgtctttttccttttaggacacagttgcaggatgggtaagaatctggttgatctcttctgtcataggtctcatgtgtatgtgtgcaagtgtaaaccagagggttagcattccccttcctttgtagaccactgaattattgggcaatagtttattttgttgttattggctttttgtttttgtttttgtttttttttaaattggcaccaaacagttctgaaactgtcaagtcagcaaa

SEQ ID NO: 33515 - DNA, 1213 bp, Mus musculus
cacctgaaggaacacgggatcatccaccgggacctgtgtctggagaacctgctgctggcgcactgtaaccctcagagctcccccgggccctctgccactcctaccgtgcccaccaccacatccaggtgcccttctgccgcgcccgcagccaccactgcctgccagggagggcctggtgagaagcagctgcccaggctcatcatcagcaacttcctgaaggccaagcaaaagccaggaggcaccaccaacctgcaacagaagaagagccaggcccggctggctcccgagatcgtgtctgcctcccagtaccgcaagtttgatgagttccagacgggcatcctcatctatgagctgctccaccagcccaacccattcgaggtgcgagcccagctccgggagcgcgactaccggcgggaggacttacccccgctgcccacactgtccctctactctcccggcctgcagcaactcgcccatctactgcttgaggctgatcccatcaagcgcatccgcataggtgaagctaagcgggtgctgcagtgcttgctgtgggggccacggcgggagctggtggagcagccgtgcacgtcagaggaggtactgtgtaacactctgcacaactggatcgacatgaagcgagcactgatgatgatgaagtttgctgagaaggcggtggaccgaaggcggggtgtggaactggaggactggctttgctgccagtacttggcctcggcagagccaggggccctcttgcagtccctgaagctcctacaacttctctgagccattccatcgccaccgccttccacgcctgccccatgcccttgccttgcctgcatccggattaccctgggaaatggtacaaatgactgttgtccttggatgtaatattttatatatatacatatataatatgaaagactggggatgtcatttcacacacgccagcctcctctcagagtccacattcctccaccaccgccacccctgtgattatgtacaggtctagcttcacacaaggttctgagggcagttccatcccgacagaaccaagttcggactcctgcctcactagcccattttggagtctcctcgcccttttgtcaaactgttatttaaaaaaacaacttccaataaagaaaaaagtcttatattaatttgtttttattgcgtcgcaagcaacgccctttaacctccaagtgcttgagtgcac

SEQ ID NO: 33516 - DNA, 1562 bp, Mus musculus
tcttttctttaaacctcctgaatctcgtggatctgcaaatgaataccttcaactaggtcccagaccactaagaacttgcacagaaaacacgcactgaatgtgtgttaaacctcgacattgtgatgaagttgcactatgtaccatattctgaatgaactaagaactccgtggatgtgtgacgtgtgtgtgtgtgtgtgtgtgtgtgtgtgtgtgtatatgtgtgtgtggtgtgtgtatgtgtgtgtgtgtgtgtgtgtgtgtgtgtgtgtgtgtggtgtggtgtgtgtggagtgtatgtgtgtgtgtgtgtgttgtgtgtgtgtgtgtgtgtgtgtgtatgtgtgggggggtgtggggggtgtgtgtatatgtgtgtgtgtgtgtgcttttttctctggctttaaattttaaaagacaaaaaaaaaaaaaagccatagggagcggacttgctgaaggccctctgctgcccatgtttacagcggtagtcataggagttttcgcaggttgactttgcctcagatttattcccccatgcttctctttgcacaagtatgtaaactacggtctagagtatcattttttctgttggaaatcctgctcttgctgaactgtcttggccgttgactttgacacagttaattatttatgtaaatacatgcatcccagtagccggcaggcagggatgctgaatctcgagccagtctccaggaacaactgcaaacctgacacatggtactgtgcatccattcataaaacacttaaaactgtgaaaatatggtttacattaaaaatgtacataaaggtagacggagaactcgattcagccagttagcttgtacattttagggggcttttcacattaactgcccgtctatgtcatttagagtttgacacgataacttgtatttaaggaattatgtagtgtataaatcggtcgaggatctgggggaggtggagaagcttactgtaggactcagcttgtaaggttcgttttgttttgactctggtcttggtgcaaatgttagttatgccttattcataccagttagagcaccgtgctgtgacatgggtatatccgtgctgcccggcccttttataattatttgttgcagatttgtgactgtctctattaactttcttttatgtaagtaatttgtacaagtttcttaagatttttgcttttgcttatttaattttgaataaaagctaaattcataatactccccccccctttaaatcgtaaagcaatgtcagaaaaatgtcaatacagggaccgagctatagatagtgtagaacatgtgtttatttgtctgtttgtgacatgagacttaaattgtagatttttgggaggcagtggggtgggggtggggcgtgaagtctgagacaggctctctctacatagctctggctgtcctggagctcactatgtagaccatactggccttgaactcacagatatcctactgcctctgcctcctgagtgctgggattaaaggtgtcctataccatgacactcagcaagttgtggttttaaaacattttataaacaacgaatgtggtat

SEQ ID NO: 33517 - DNA, 3187 bp, Mus musculus
ctgagcatgatcctcatatgccttcgttgtttctaatttaaataactcaccagcttttctttctgtgtgacaggggccacatgccggagtggtactcaaaatcttttggacatttgtgtgcagccgaagtggtaaagatccgagactccttcagtaatcagaacactgaaagcaaggacacgagatctaggtgatgaccgacgcgaatgaagcacccgtgactgcaacccgggcggttgttgctagagccttgccagtccttggaagaagagttcatctgggtctgattgactgtagagatttgacacgttcataaagctgcttcctgtctgtcttaggtctatatcatagaccttgactggaatatataacacttgggggcaggggtgggtggggggtacctgtattgttcagattgcttctgagaagcaagaactttttcggcgcgtaatggaagataacgaagaggtgtcgttcttttgtgacgtcagcgtatgtgtacctattcctttgtttgcggtgtactgagggaccgatgtatccactggaatagttggtactctcggacaggttttctcactgagatgagcagagaagggtttgcacaggggagtgtgaatgtgtgtgttgctggctgagtggcacggatgaagggatgcgatgcagtgtctggcacactgagatgttccgcaaaggatgctgatctaccaggtttagctcaacctggaatagctgactacccagggagccacccagatggggaatccagcttccttcttcacccgccccctccagggttattaagcattttttttttcttttctgcaaacctttgctttcccataaactgtagcttccccgtgactaggaatttagccataagactagttcaaggctaaccaccaagcttccctttgactggctccaaaggcttttatttaagtgagatggaaaagctgaatgctgacacaccccacccataagcaaagtatcaacgctttctgatttccagtactgggtgttgaacccagagccttttatatgctgggcaagtgctctacagttttcactctttattctgagacagggtctccccatgttgcccaggctggtcttgaacaactgcctcactctatagcccaagttatctaggtctgatagttgggataaagggctcagctcagtttacctgttacaattcatagtatattgttgtttgtgacatgaactccaagatacacaaaggagcccagggaactatgtccccagtaggtttaacccaaccaaacaccagaggctgttaattgtgggtggtgctgtcagtgttcctgacggctatgtgtgtattttaatggggtttgtcctcatccacaaataattatttttttgttattttcctgtgtttcttctctctctctctctctctctctctctctctctctctctctctctccctctctctctctctctcattatgcccttgaactgtattttagtggtaatgtgggatagtaatctcagtgaaaagcaaacagcgcagggtcttggaagggtggtctttatacaggttttactgtaatggtaaggatcgactcgagacagtattagtaaatatattttgtatggatcaaaacagtgagcaccgtatgaatgagagctgaagaaggacttttattttgttataacattgttaccttgtcagtattatttcaaaggttctttgaagaatagggggggtggggaggggtcagagtagagttttaaagtctgagtatttcaaattatcagtgttgctttgtgaagatatgtgtgtgtgtatattcaactttgatggcttccggatctgtaagattgtatgctgtatataccgttctattgagaaacatgtacacatgtctgtctactgtgctttcagacatagataaagcatgataaagattattatttaagatatacttgtatttatacctcagatattctttcgggttttgtacctcaaggttcccctccccacattgtaaatacactttaagtgaatacagttttagagaacaaaagaaaaaaaaagaataaataaaggaagaggtttataatttgccctatatctgtacagagtatattcggtaagtgcactattaaatgtctaagggaagagtctggcctgctctctgacttgcaccttcctcgcccttagaagcagggattgcaaagcttagggcccccgtgccaagcaaagaccaaagatgcatcagcttaaagagaagtcagacgacaatgacgaatcattccaaggccaagctgcaactgagccactcacccaccaacaggaaggcctggtgaaggttcaggaagtctggagagtctccccagaccaaggtcagaaaggatgcccagaggttccaagaacagagcaacagcaacggaacgatgcttagaagcaaaggaaaggtcactgatgagtccgcaagaggtctctttcccacttttgactttcctgttgaagagattacctacgtctggccagaggagagaattcagagcacggaactttccaagaactggtgttaacatcttgtactgtggccacgatttgtccccgtgatgattcttgggtctagattgtgagttcttcaagggcaggctcatctcctgcacatctttctacttctctacagcagctgtcagtgttttgtacttgtagacacctaataaattgatcatttgctaaagaacactgattgaatttgcttctcttattttttaagagacaaaaaggtagcttagcatgacccttaagccctcacttcagttcatcgtttccatccttgctttggtttgggttttattgtcaatattttggttgagatgggaatcttcctatattagccgaggctaacctctgactcactatttagctcgggctgcccttgaacttatgacacttctgggtcagtctcttgactcctagaattataagcctgtactactatgcctagatgctgcccacttggaaattgcagtgactagaaattggtaaacataggagatgttaagttttaaactaaaaaagacagcatggcgacttctctgtatgttgattctaaatcaaagagttctttgtcgagcctggtgtgatggcacatgcccttaatacccatgccagggaggcagaggcaggaaggtctgt

SEQ ID NO: 33518 - DNA, 1246 bp, Mus musculus
acattgtccagtaatttggagcagggcgttttacactcatataatgtattgtggcagctactgacccagtaaaaggtctttaatgtggctactacagctacagaacggaagaggtcactttattttcatttaaatagtccctgtattgacagggatcaaattcgtggtggggggaggggttgaaaagaagggggggtaagcaaattcagacaagtgaatgctttatcccctccaccccatcttccttaaacagggctgtgcccaagttcatgaaaaggatcaaggttccagactacaaggaccggagtgtgtttggggtcccactgactgtgaacgtgcagcgctcaggacagcccctgccccagagcatccagcaggccatgcgctacctccgtaaccactgtctggaccaggtgagtacagctgcctgtggatcccactcgtgggagcggagctttgggctgcatggttttttttctagtttcgtggggaagggtcctgcttccacacccatccctgctgttctccttccaaaaggtcgggctcttcaggaagtcaggtgtcaaatcccggatccaggctctacgccagatgaatgaaagcgctgaagataatgtcaactatgaaggccagtctgcttatgatgtggcagacatgttaaagcaatattttcgagatcttcctgagcccctcatgacgaacaaactctccgaaaccttcctgcagatctaccagtgtaagcgttcttggttcttcttaaggcaactgatgtcgggttccatgggaccaactgaagcacacagcctctttgtatgccatccttttgtagagaaaaacctgcatgctgatcttctcgaaagttacagtgtgtgtgtgtgtgtgtgtgtgtgtgtgtgtgtgtgtgtgtgtgtctgtgtgtgtgtctgtgtgtgtgtgtgtgtgtgtgtgtaataggtttactgtatccttactaaatagcttgagaagtacttttatgacccactgtatgttgttggcagagggattgtgtgtagcacacataaagtactgagttttctctccagcatcacataaaccaggtgtcacggtgcagacctgcaaccttagcactttggaaatggaggtgggaggatcagttcaaggtcacccttggctgcatactgaatttgagggctacctgggtctcatgagacattgtcttcaaaagaaagagaaaatcagtgttgctattgagtcaggaagtaca

SEQ ID NO: 33519 - DNA, 1099 bp, Mus musculus
ctccggacactttgtaggcaatgatgactctttttccagcctgccgtctcccaaggaactgtccagcttcagttttagcatgaaaggccaccacgagaagaacaccaagtcgaagacgcggagcctgctcaaacgcatggagagcctgaagctcaagggctcccaccacagcaagcacaaggcgccttccaagctggggttgatcatcagtgctcccattctgcaggagggtatggatgaggcaaagctgaagcagctgaactgtgtggagatctcagccctcaatggcaaccacatcaacgtgcccatggtacggaaaaggagcgtgtctaactccacccagaccagcagcagcagcagccaatcagagaccagcagcgcggtcagcacacccagcccggtcaccaggacccggagcctcagcacctgtaacaagcgggtgggcatgtatctagagggcttcgacccattcagtcagtccaccttgaacaacgtgacggagcagaactataaaaaccgtgagagctacccagaggacacggtgttctacattcccgaagatcacaagcccggcaccttccctaaggccctctcccatggcagtttctgtccctcgggaaacagttctgtgaactggaggaccggaagcttccatggccctggccatctcagcctacggagagaaaacagccatgacagtcctaaggagctgaagagacgcaattcttccagctctctgagcagccgcctgagcatctatgataacgtaccgggttctatcctgtactccagctcgggagaactggccgacctggagaatgaggacatcttccctgagctggatgacattctctaccacgtgaaggggatgcagcggatagtcaaccagtggtccgagaagttttccgacgagggagactcggactcagccctggactctgtctctccttgcccgtcatctccaaaacagatacacctggatgtggaccatgaccgaaggacacccagtgacctggacagcacaggcaactccctcaatgagcccgaagagcccactgatatcccggaaagaagagactcaggggtgggggcttccctg

SEQ ID NO: 33520 - DNA, 1160 bp, Mus musculus
gactaatgcgaaatcaaaacttctgaagttgtttcctgaaagagtgatttaattgagaagctgaaggagaatacccgcaggggctagtcatggtgaaagagataggtgctgtcaaatacctggagtgctcagctctcacacagtgaggactcaagacagtgtttgacaaagctatctgagcagttctctgtccccctcctgtcaagaagaggaagagaaaatgcctgttgttgtaaatgtcggagcccctcgttctcggtcctgccctgggacctttgtacactttgctcaaaaatcagcggagccttcgcatttgatgctacgtttttgttacagattaatttttctataaaaaccattttgaaccaatgaaccagtcaataattttaaggttctgttttaaatgtaagaattccaacttacagtctattaaaattcagccctaaaatgacaaagccttcttaaagccttatttttaaaatcccctattcttgctcagattaagaattgccaaaataccttctgaactaagttgcgttgtgctgagaacacctaagcactaaactctcttgagagacttctgttgctaagaagactgcagcttctggagtcaggggtgcagacccttccatagttcccagacagtgtgacacagcacagcctccttaatgacacgttgccatgtaacgcacctgtaacttatcagcccatgttcattacgtaactttatactgtacgtcacagtgatgagtgtgacagctcagctctttgatttcatagtgagttttctaaaagaccagccgactagcttttgcagactttgaacagaactctggttcgtgtgttgcctctcatgaagtattctgttcctagttgtgggtgtgctgggtggagtgtgaaacacgacacgatcaaaggagacagacagacagtattttgactaatatgaagtagagattactttacactacattgtacatggagtaattcaactgaataaaagtgtcatgggggaaaaatactactaatacgaggtgtctcatataaacaaataaagaacagaattcagaaattcatatcagaaaccaagtagatattagaggtccttaaactttagaatattatttcctttatttggatttattgaatttgtgcctatg

SEQ ID NO: 33521 - DNA, 1125 bp, Mus musculus
ttcaaaatcagaccctaatagcagtttcaattagctgaatataattgtggtatttttgttacatttatgtgagctaatttagaatgaaacaaatagcttgttgtgtttttcttttgctcagtatgtaatattttcctttctttttcagctttttaattaaatgaagccaaatgggatttgcgtaaagtgagtgtttactgtgaagagaagcagttcctgacattatattatttggaattcttgaggttcattctttgttgattgtgatatactagcttattcttgtataatttttttaaactgtggattttcctaaaacatttaatttatagaaatggatgtgtaacattccataatccgcaatggactatcaaagtgtttttaaatattctcaatgtatgccacaggagtgaaataaatgacattgtaactatgaattcatgttttagaattgtgtgtgctcccatgtaaggaaaccacttgttagtaaagaaatccatggattatatgtaaaagaattgctagtactgtacaaggatagagcatatgcatgaaatatgtcgtgtggacaataattcttacttcagtttcacttataaaggatgaacactgttacaaaagtgttttgttattcttcttcacaactagatcataaatacataggacaaagaggtggataagtgttaatgccagttcagatccttaacctaaagaacgaagctagaaggaaccttagacttcaccatacctccaatggagtcaggcaatagaaccatgtgtcattattcaatgtttttgtgaagctctttacaaattctgactcatgaaatccaatctactacggtcactttccttttgtttaatggaccgggcagggacctggatccctatgaattgttagttttcccagaatgactcagatgaagcttcttgataaccaaatacagaaggaatgtaactattgttattgtttgttgttaacgaacgtaactgtgtatagcatacccatgtacatcccagtattcctcacatcttttcaatagacaggcaatgcaagaacttttctgtgagttatagagatagtagaaaccagctgaaaaccaaaatataagttgtacttataat

SEQ ID NO: 33522 - DNA, 1155 bp, Mus musculus
ggtagtaagtgttacttgttccatgacatgtagaaaatctacacagtgagaagcaagcacctgtaatgctgcatactttttctagctccatggtatttgtatcctaaacactgtcaatatttgtagtacaatgtagaagagttcattttgttccaagtatttaaatatccacatatgtagattttaaaactcacaagtcatcagaggaatgaaatcattatttgaaactaaatttatattataaaattatagttatatggaatttatcttaaaattaactcaagaacaatcatataaaattatgacatagagggatcttttagaatcattactgggtgtgcctcagcatgagcctgcagatagaagagaagaatcagtgccttggaaatttagccaagtgatttggtgggataggcttgtaccttacacattttatagaggcattggatggcagaagtgactgagaggatcccaagagtttctggagcctgtgaaaggtagaaactcaactgtgatttctttctcaacccgacagcattcccttccttgaagtcttcatttttacttcagcctcaggcagctatgcttaagcatgaacatggacaacaaactggaagaatcgtttcttaaatggggtggcatagacgaaacacagtcttccagggcaatggttgtaatgggtagagtgtctggccagtccactgtgtctggagaactgcaggagtcagcatttcaagattgccgtttgcctcaccaggagatcctcgctgcagatgaagtgttacaggagagtgaaatgggacaaagggataagatatcccatgatgaactcatggtcctcgaggagacagtgaaaaatgatgaagagcagatggacacccacaagtggctttctcaaggactgcagtagtcacttaatgtccccataagtataaagcaggaaattacttttactggtgtatctgagcaactgatgagagacaaaaacaaaaaacaaaaacaaaacaacaaacaaacaaacaaacaaacaaaaagccagagagccaatagacttatagaaaaagaagaagtggaaacatctctctcctgcacaaatcctcacaataaatgaggatggatcacttgttttgaaaacccctaaatctctcctttgtg

SEQ ID NO: 33523 - DNA, 1175 bp, Mus musculus
atatatatatatatagagagagagagagagaacataacaaaagtaatgtgacacttgaaaattcattgccttatgctgtgtttgcaattggataattctttatatcttttttttttaaatatgcattgatatgagcaagtcagatcccctgaaactggagttacagacaattgtgtgctgccatgtgggtgctgggaattgaagcctggtcctctggaagagcagccagtgctcctaactgatgagccatctctccagccccagcacaatagtatttctttaaaatctttattatgtctaacattgtagagaatttttgagtcattccctcatatgttgaacaccgccttactttagatagtcttataagagattaacattctacctattattttgtgtatcgaaaataatatagtaattcagaagaccagcactgctgttagccttgctcaagaattggacatttttgtcatctgcatttacatagctcctgaagtataaagatgggctaattcttccccactttttctcatgttaaaggagtggttttaaaacatttggacagctgcacatttcttggaaatgctttatacctgacttaataaaaagcagtgagattcttgtgtatggtttttatccaacccattttaatatgtgcttttcagtaaaatgtataaagaaaatgcacctcacagacccgggtgcttaagaaagggaagaggctttcgttgtgtcttgtgaacttgggtattctctttggctctgccacagcttgtttgtgatattcaggctttcaaactctccaagatggtagtgaaagagtctctcgtatgaaagggtttggcttaggttaactggatggatggcttataagaataaggttgaggaggaaaaacaacactcaatttttgactgatgtttttgaggtacattgaatatgtaaaagttgaatttgtctcgtttcagctcattgaaagataattcattaaaaattaatgtatcaaataaattgtttgactatcatttcataaaatttctcagaaatttatagccattttcctccatagcaaaaccaaactttgaacaatttggcaaaagtggacatactaccttttcatgctttctttccccctcagtgctgggcattggatccagggctctgtatatgctgagcc

SEQ ID NO: 33524 - DNA, 1113 bp, Mus musculus
ggctgttctgaacagggcccttcatcctcagcgccctctgcgcagggcctctcagggccttttcctggagtccctgcgcaccccctgctgtcatggctgcatcttcatggctgaacaagatcaactcaatgacagttaatgcggacaattagatttttgtattgtcattgtaaacatgttgatggcctgatgctgaatcatgtgaaggaataaatatgcagagcaaatgtgtttttatgggcccttatgggtttaataagagaattatcataatcagaactttcccagtcatttttattaaagcatgtagcagtgctacccaatagaaataagtgtgcctgagtcctaagtttttccaaagacacctgaagtgcttgcttatgaaatatattgtagttcttaatgtttcctcttaccaaatgtgttagacttattctaatgtctgtcaatactaacttttcacaaatttattttcccaaaatagggcatcacatttgatgagttcaggtcattcttccagtttctgaacaacttagaagactttgcaatagctctcaacatgtataactttgcaagccgctctataggacaaggtaagaggtcgtctttccaaaggtcaaaaggtcagcatcagagcagccccgccttgttcccagaggctctggtaacaagctagtgagagatgtttgactgtacctcggcttgcctgaaagcctgcttttatcgtttctgtgggaaaccgagtctaaggaatttcttgctgggtttatatttggcctttcatgttatgaggaaaaactaataatatttattgtaaaaggtgtaagaagaaacctcatgactactagggaccatgagggaaccaatgtgtcctcgtagaagctgcagctggccattcaccagttccagaaattctcatgatctttcccaatcagaaatacatgagccattagcttacactaaccagtttttgaaattgattatatattttttaaatttacaaaaaaacacgtgtcatataacttcaaacattgttgttcttgggactgcctcagtctttgtttgtgggttggctaagaagccaaatccttccaggttctctcccttaccacc

SEQ ID NO: 33525 - DNA, 2232 bp, Mus musculus
taaaagggaaccattttctgccaaaacccgagattaagtttatgggcccatgttcattcgaataattgggttgtacaacttatctcataatcccattattcatttgatattctgttttagaaaatttaggttaatcttaagatttaataaatttcaaatcatgttattatgcaaaactgtatttgagagcaggtaagaaatcatccttgattttttttttctgatgtgagattagcttccgatgagagagctgcattgactatgaactcattacggaggccatgtagcctatagctggaggtcatttatccccttgtgccaggtttcaattcccattctagactttgtctcccattggaagattcaaatacaaatactgaagctcgagttcaaagcaattggataaaaacttttgtttgacttaatatgatgtcttgacaaggaacttacatcagaaatgtactttcatgtcttctcatttgaaatcagagggaacacatgctaattctcttgaagattgcctggcaacactcttttgctggtttggatgttaaccaatctgttttttttttttaactacttgctcagtgttattgtgaaaagactgagtttctaagcatttctgatagatcaatggattattcctccatgtgcacctgtgtatcatctctgtcttttcatcaaaactacaattgtcaatagatatttttcctcaaatgcctatccagattaaattatgcaaatcatttaaaaatgaggaagtttagtttaccatgaactaaacatcgtgctgtttagaaatgtagtttagggtaaattacgataatgtgtttgttgatgccaaaatgtttggcctcagtaagtatactcacagaagttcttgtgccttgtatgcactatttacaaaaaggaaaaaaaaatctcatttttcaaaaaatctgggaagtaagttttataaattaatcttagaatgttaagctgtgccattggttcctttggtactaattttgaaaatttcaagtagattagctttttttaaaaaaaaaatggctaaataattgatgtaagcaagaattcactacaaactgaaagacctggagagaatagaataatgaaagatccttgcaatcactcattcttgctaaagcgtttttgagttttgtttgtttgtttgtttttttcgagacagggtttctctgtgtagtcctggctgtcctggaactcactctgtagaccatgctggcctcgaacttttgagagtgtttagggagagcagacatccgcacaattcattgtgggatccaggcgggtgcggttctgtggatgagggcaatgattgcttcctcgtctctcacgcttgagcgttggatctgacaatctacttcacaagactcagaagatgaaggatgctctcccctttgtctttaagcatgttttgatcatttgtcattaccggaagtgccagactggagctcatagctcctgctagaagtcttttgggcagcagcatgtggtgtatttgaagatctatgcagcagattttctgatagcacattgctcccttatctgttttccagggcaggagtctattaggcatgtccttttatcaaagtggtagctggtggggctgggggaggatttacggtttaccctggtaggatgctgttatttctgctctctttaggtcgtttatttacttattttaaatacctaagtccatacaccttagagacaaaatggaaaaaagattaagaaataaaattttttcagtatgttgtaatggttacttccgtctccatccagttatttaacctttgaagtttgttggtcattttgttctaactcgtggaatgaatgattgggatgagtgcatatctcatcagaagtacactgccaccttgcctgagtggacgagcatcatcaaataaatatgtctgcattctgtacagcatcttaactatttcccttgaaacgatgtgatagcgtcagtaagatttgtgcagacacacatgcatgacgaatgtcctgacttatgtttaaaatggtcatttccattttcctcgttttaagaactctttccatataggcaaccggatttagaaatccttcatttaggaatactgaacaaaggtttcatttatttacattacgtctactgccatatcgtagaagagaactggcttgttcaatggtagcgcttgcatctgaacacagtgatgctgcctgccagca

SEQ ID NO: 33526 - DNA, 1943 bp, Mus musculus
gaacggcacagggaatgcatatgaagaggaagccagcaagcagtcatgacaggaaatagtcttcttatttttattttatacgagttacacacatgcttgtatataggttttatcatcccttaaataataggcaatacccccccccttttgtagaccttctctgctttcagtaataagtatggcctttcttagctatgatcttaataaattaaagtacattcaggttaaatctggccttaatttaatacacttcttatcaagcttgtgtgacaaagctacattactgaataatttgataaactttgcctacttgagcttggttttgtttttcccttttcctaaattaactagcattgagtgtaatttatttccctcttccatgcctctccttctattctgcagtacttataggtatttaagattgtggaccatcaagtttgcactttagagagtgatttcaatcctctattttatcagaaattgtgatttttcttgctcttagctagaaaaataaccatctaccacctttttacagtatttgcttgtttttgacattcagagtacagcacgtgcattgtgcaaattgttcaacaggaataacagaaaaagacaaggaactactgaagagcctagtaactactgtttctgtgtgtagtgtttagccttccaagcacatctcatgtctgttggtttctaattggcatgcataggctgctatgtgactgaagaatttcaaaccagctttacacccttcaggaagaagccctgtgattggctatctcctctctgccagaaggctggccattaagatgttggagctccagttttatgacagcaccgcctcccttgatcggcttccttttactccatcacttttacccttactgttttattttataaacatatttatgatgttcttgatttgttaactacacaaatcaatttcattaaagtccaaagataacaagtcttaaggtacattttatatcaataaaaatacaaaataaatgtgatttcataaatgctacaaaaataaataatggagagatttggtgcaaaacaacaaaatgcaaaaaatatatataaatacacacatatatagctaataaaattacctgaggagtgtaatgcttgtttatttttttgtgtatatctttgcaatctattttatatatattgacaagagactgtgaaatatttagccatgcagaatatgtgaccagaccagagcatgtgttggaagattttggtgaacattaactctaccctgaagtgatggactacaagttgtaatgtgtgttatctacacttcaatcgatattagcaagtctccaactgttagcaacatagttcgtttcccttgtacattctgtaaacatgatatgaaaatgctgtacctgggcggtcctttttaaactaaacattatttgcaaaacagagggtattatttgtttttaaagcttttgtaaataaaggcttcaaaaatgttttcctatatggttgtgactgatggctttggttttggggctcttatttagaagtgttgaatacttgagccattttctttgggtaacaggacttcactaggtggtgtgtgtgttctcaaaagattggtttagtttttattagtgttcaaagttgcagtaaggccagctgatccataaatcagttctccagcccagagcctgggccataaagcctggcactctgacccctttgtatcaactgtattcctttccttgccctttgttaattacctgactgaaagaaattagaagtctctgggtgtagaagctcacatccgtaatcctgctgttgtgagtgactgtcctgagtcaatttccactgtcttggtgtgttcagctgcactcccttgcaaaaggatttttccatgctggtctttatctgattacatcccgtttaggcaggatggagaaggccaa

SEQ ID NO: 33527 - DNA, 1181 bp, Mus musculus
aaagtattatctttcttttttcctttttaaaagtttacctgctataaaagttatgaaaacatcaaaactacaggaggagaactaaacagcgtgaacagcctccatacttagccatgcacatggttccctctgtctccggggcctgtctgttcccctctgctgggtaactgcaagtgactcaggcttgctctctgcagcctgcttgctgaggtttcctttttgttttcctagcacctacagggtgcgcagccctcccacatcaatcactaagtaagacagtgccttaggcttacctgcggcctactctacaaaggctgtttttctctgtggaggtttccttctctcccatgactccagcttatgtcacataaaactacccatcacacaagtcaagccagaaaattgtggacatttgtcattgtggagaaaaaccacatgactaacatttattaacaattggctttttcttttgtgtctttagtgtgtcacagctcacagatatgaatgaacaggaggaggtattactagaacagtttctgatgttgcctcaactaaaacaaattattactgacaaggaagacttagtaaaaaatatcgaggaattagcaagtatgtctccctttgctttgattcataattcctgagaaaaatgtgatctgtgctgagaaataagcagagatttatcttccaggaaaaaatctccttttggaacatagcttggaaggcaaaaggcaaaccgttttagataaggtgagttcctgatcatttccaaggcatttttactcttcagaaatcaaaataaacagcaattttatgttttcttttagtatgaattacttctacaaatgaaatctacctttgaaaagaagatgcaaaggcaacatgaactcagtgaggtagggctgatgagttctttctgtccctcaggagctgctcagccacaggagctggccccgccctgtgcatctgactttataaagctgactgacagctggaaacagagttcttgttctttcagggtttgtctatttccaaatcctataaggaatgaaaccccagcaaagcaggaaagtagtgtaactgctataataaaacctagtaacaaaaagatactttacattaagtataatttaaaagattagactgctacttaggaaaaataatctttaaaaataaaatag

SEQ ID NO: 33528 - DNA, 1712 bp, Mus musculus
tgcttgcctttagcaagttgacaaactagttcagacatgtttattacttgtagtgaatatctgaatatgccagtgtgaatttgcattctttatttgcaggagacagagtacatggttgtaattttatggccatattttttctttgtaaaaattggctatagatctgaataccaaacacatactcggattttactttagtataaaggaaagcttaggaattactagactacctaggtagaatttgtcaaggatatttaaaggtaagctgtaacaagtcgggaaagtcaaagttgggtgaaaacttcagattaaatgaacagagtatagaacaaaggttgtttgaccacagtttatatatttaaattgcaggacagctaagattctgttgtaggagaaagaagtaaattgaagttgtgctttctgttcttttaaggcagggtttctagcccagactgcgctctaactttgatgtaactgaggatgacctggctgtcgggtcttccacctcttgagtactaggagcctaagcatgtatcaccaaccccagtcctgtggagcttggggactgagctcagggcttcatgcctggaaggaaggcactcttatctattggccgacctgcatcctcttaaggaatgaaaacttgggctggggaggtggctaagtgctaacttgtgtgtcatgcaagcatgagggacccgattcaaattcttaggacctatataaaaacctggtacatggtagaacaggcctgaaattccatcactcctatacaggagaggaatgagagacttgtcccaggaagctttgcaggccaatttatatagtaggcagaatggcagccagtgaggcccttgttacaaacaaggtcggggcacggcctgacacctgttgttcagtgttcctctcacttcagcactgaaggttgctgggaggttttgttttgtttaaattgccaaatgacttgttcaaacatgatcaaaattactaatcaattgagctgtaactattaaaggttgggaagtaatgtcctgaataagttatatattttgaagtattctctgaacactgcactaaataataaaacacctcacaactgaagcttcatttagagtgaacatgtagtactagaggtttctagttgaatcgaccatgacttatccagggactctgaaaggcaggctgcagtgagcatgtgtagcttcagtattgacttgtaaaaaaaataaaaatgactccatgaacatacctaaattatgtcttgtaaagggatggagggaacaaaaagcgtgtggctctgatgctaataaaggtgtcacattaaaaagtaaaaaatttaaatacatacatactgcttgtttttccaaatatgtagtacagatgatgttttatctttgttgttgacctattgtctaaagagcaggtactatacaaatggcgaaacagccaggcgtcatgacacacaccttcaatgccagcacttaggtggcaaaagcaggcaggtccctgagtttgaggtcagccagggctacagagtcagatgttgtcttaaaaaaagaaagaaagaaagaaaataagtgatttatgttataaagctgtaaaagccattcccactatattccatatgtttattagctattctataggaaatgagtaaatattccttaggcttacttgggaaactttccaacagaaaatgctcaatttaacat

SEQ ID NO: 33529 - DNA, 1864 bp, Mus musculus
ctgcctaagttcccctttggagttccaaagtaaaagacacagaaacactttcaaattaaggggaaagtgcaattcgtagtaaaaatgttgagaaatggcaagttctatccagaaccataaaattacagctgtgaaaatggggaaaaaaaagctctttatcaataaccagttgttttatcaaatcatactgaagactgatcatcattcctgaggctcatgctagactatgaaaattatatcactacaaggagagagagtatcttcacccaaggttgtccagacagtctttcctggcatagcatgtgtctgcttaaaagccctcctggtttctcccatacctgataatgttgggactttgatttcacttccagttgcaggttgcattcaggaactttgacatttccttctgcctttaccaatatttaaaagaaataaatatggagagtacccttttctgttataaatgtaatcattttatttttcccctgtggagcatcttctgcttctcaaaaaaatgtctgtctttctttaccatgaatgtagaacctattaagctgaagctggattcattttctccatctcgaatctgagtccagacattagctcttagtagccttttactactctttcagagattacacataacaaaactgtgagccagccaacctgattgcaaactacaacactctaaatgcagtaggtagtgatacatcaacaagggaaaaggtcaagaacgagggaatttgcttatcatgtagttatcgcatgctttctgtgataagacaccacaaccaaggcaactagaataaaggatttattaggacttacagtttcagagggttagaatctacaaccatcatggtggaaggcatggtatcagccaagcaggtatggcattggagcagcagctgacagctcacatttcaagacataaccaagaggcagtgagagctaactagaaaaggcatgggctttttgaaaatttaaaggcagctcccaggaacaaaccccctcccacaaggccacatctcctaatccctcctaaacagttccaccaaccaggaacagagcattcaaatagatgagcctttgggagccattcttcaaacccccaacccatctgctaaacacagggaataaaggttacagcacttttcattttacaaattctatagaaagctaatgttttctgtaacattagcaatatctcatgaccatggactactggatggcaattctgaagtttctgttaaaatgcatttaaaacaggatttgaattgagcttttgatctgaaaactcttaatggagaaatgttgctgtgtttgaacatactgaaatgttcttattatatgattttacagtgtaagtacattctaataaagagatacatttaatcttagttttttataacagtactttaaagtgtgaaaatttttatcagataatgtattcaatttttttggaaatagaaatacagtaatatgaaaggataagagacttaaaacatagtgtgagttatacacacacatcacataatgtcatacaatataataatgctcacatttgaagacagaatgaatttaatatactaaaggcctgtaatataaaaatattattaatacaaaaataaagcaagtgtaattcctttagatgttaaattgagcattttctgttggaaagtttcccaagtaagcctaaggaatatttactcatttcctatagaatagctaataaacatatggaatatagtgggaatggcttttacagctttataacataaatcacttattttctttctttctttctttttttaagacaacatctgactctgtagccctggctgacctcaaactcagggacctg

SEQ ID NO: 33530 - DNA, 1145 bp, Mus musculus
cactttaaagtactgttataaaaaactaagattaaatgtatctctttattagaatgtacttacactgtaaaatcatataataagaacatttcagtatgttcaaacacagcaacatttctccattaagagttttcagatcaaaagctcaattcaaatcctgttttaaatgcattttaacagaaacttcagaattgccatccagtagtccatggtcatgagatattgctaatgttacagaaaacattagctttctatagaatttgtaaaatgaaaagtgctgtaacctttattccctgtgtttagcagatgggttgggggtttgaagaatggctcccaaaggctcatctatttgaatgctctgttcctggttggtggaactgtttaggagggattaggagatgtggccttgtgggagggggtttgttcctgggagctgcctttaaattttcaaaaagcccatgccttttctagttagctctcactgcctcttggttatgtcttgaaatgtgagctgtcagctgctgctccaatgccatacctgcttggctgataccatgccttccaccatgatggttgtagattctaaccctctgaaactgtaagtcctaataaatcctttattctagttgccttggttgtggtgtcttatcacagaaagcatgcgataactacatgataagcaaattccctcgttcttgaccttttcccttgttgatgtatcactacctactgcatttagagtgttgtagtttgcaatcaggttggctggctcacagttttgttatgtgtaatctctgaaagagtagtaaaaggctactaagagctaatgtctggactcagattcgagatggagaaaatgaatccagcttcagcttaataggttctacattcatggtaaagaaagacagacatttttttgagaagcagaagatgctccacaggggaaaaataaaatgattacatttataacagaaaagggtactctccatatttatttcttttaaatattggtaaaggcagaaggaaatgtcaaagttcctgaatgcaacctgcaactggaagtgaaatcaaagtcccaacattatcaggtatgggagaaaccaggagggcttttaagcagacacatgctatgccaggaaagactg

SEQ ID NO: 33531 - DNA, 1122 bp, Mus musculus
ttaatggctgtgggtctagcttagtactataaggcgttggggtaacttctcagccctggggtagataaatatgcatttaaattattagaagaagccaattcctgtatctaagacaacaccaacaacaaaaaagtagtcccagctctatgttcatcctcctttgaaacagttttcttgtctcttaggtcaaagttctaacaatctaggtgcattcatcctagtttcttaagcatctagagcctttcattttgtccttgttataaatagtgcattgccggtaggagaaaagtaggctagcccagctctgtcattgagaagactctttatcgtaagaagagtgcaccgttgttagtcactggggaaacttcacattggcacactttgcaatttgtattcagcagtttcataagacagttttccagatcattacttttcttctgtacagaaagttgttcctaggaatatttataacacaggcctctgcctttggtgtctaaattaccctgtgtttggtgtttcaaccattgtcctctggacaagcaagctgactgatgtcaggagggcagctttgtttcactcggatcatggcggagctgcatcaccctctggtcatgtgtagtcgtaagcagggatagctttctggatgcctctcaggggtcctgaccagtgtttggttacctgtaaacagtctgagtaaattgtaaaccactggtggaggctcagctgatgaagtgatgcatgcagtaagacccgccttccagggctttctacttaaaacagggagggtccttggcatcagagtctgggaggtggggctaatggcgtgcccccatgactcttactttcttcaaacttgctaaagcattgtttgggatattaccagaggagattatggaatggaaagaagaattatttgtgttctgctaccagtgtgtaggaagttctgtctgtgagtacccccaggatatttcattaaaaacagaaatttaggagtgagctcataccctctgtagatccatttcttgaggtcaatatacatcaacttaaactctaacttacaggttgtaagtcaccaagaagaaaggtatgtttctggtccacagagcaatttttgtaacttaa

SEQ ID NO: 33532 - DNA, 1169 bp, Mus musculus
atattaaaaaaaaaaaagacaataagcaccaaataagcactaaaattgtttccctagtctttccactaatagtgccttgtaagtttcaggaaagtgattattctgctttcagcagtgaaaaacattattactaaaaaggaaagtaggttgcttaaaaagttttaaattcatggtatggatcctacttaaacatttccacacattcctaataccttacacagaaagcttacccaggtagcaagctcttcagcttgggttaaaagtaaacctatcttgatttccataaaatccaataccattttcccatgttggtgtggagtgcaggctaaccacaggcgcctcttcctggggatgctcccacagtgtctctgacagttctgtgttgctgtggcctctccccgcaggcctccatctgcaggagcagccagcccctttccggcttcagcgctcggtgcctggaggatgagcagatgctccaagccatcaggaaagccaatcctggaagtgacttcatttatgtcgtggacacaaggcctaaagtaagtgtcaccattttcatacgtgtctctgcagccctgagtcctgaggccggaaggaaccaaagcttgactggtagcaaccctttgccttatctgtagagggttgttcctggtctgatcagaccatggggccaccaaagggctgctctctgctgcatctcagctcctgaaggggctgagtgtgctgagtacatttctgtttccggtttttaccattgtgccggtcacacagtaaatggcttactgtttaggtttgcaagtagtttggctgtggattaaatgtcagcggtgctattcaaaacaggttacaagggaataaaaatatgacagaggaaaaatagcttagttggtcaagtcagtttaaaatgaaagccattaagagtaagagcttcgtggcatagtcagttgtagatgtttatagacatagtcttcacatcatacataatgggccctgactttctagtaagctttcattgcacaacatagatcaaatctctgatccaggggtgaaggactggaagaaggtctgcccttgaaagatgtgacagattaacttctgttgcctgtcagtttctgcctctgtctgaatcaggtgcaaacccctttctccaaccctgactgccctcctcc

SEQ ID NO: 33533 - DNA, 1208 bp, Mus musculus
ctctgtactgtgatctgcctgttaaaaacaacagacagttggaaagtgaaacattttcctttgcagactgcctgaccaccaacagcttagagaacaaggggttattgaacttgaacatcccacgtggaattaaggaacatggtggcacttcccagtggagccatctctaactcttactgattgccaaagtttattttactgacttcccatgaccttatttaaatttagctattaaacgcatccagcatttgactgcccaaatgttcccctacctggagctgtgtaaatttaaatgcagaatagtctttcaaaataataattgtggatatcaaagcttggtactgaaaactaagttacagattttttatagtggagttttaggtggaaccctccagctcttgtaagcagagtgtgggggttgagcgaggcctacttttgaggactgtttcttgtctgtgtggctcagagacctgtctgccctttgtcagttttgcttcttattcgtgcttacggtactcctcgtgttaactttctgtcccagattctgcacagtcagatctccaccattgaaaagcaggcgacaacagctacgggctgccctctgcttattcgctgcaagaacttccagatcgtacaacttgtcattccacaggagagagactgccacgacgtgtacatctctctgatacgccttgcacggccaggtaggcaaagagactcggcatctgacgtgtgacttctggagagaggcacaagtcacgtggcagggttcctgttatgcttaggaatagcagtgttttaggacttggttgtcattcttgcccaactaatcacctgacccattaaccttgttcgttttgcgggctcctctgagctgtttaccacacaggcctcttttgataacctttgtattcttaaatttcctagatagtggttataatgtgtttgtctttccgtctgaaatcactttaaaaaaattatacaactttgttaattgagtcacttagtatgaggcctaagatagaacgcacaggttgtttagtgtggaaaacatttgtatccaaaactttagtgtgttcctccccacccagagtgtcctactttcttaggttgtttgtctgtcggtctgtttgtttgtttgtttgagacaggatcttactatgctgctttgagtggcccaatgtcacaggttcctcagggctggaatt

SEQ ID NO: 33534 - DNA, 1198 bp, Mus musculus
aatcctacagttgagggtggttgatctgcagtttcagtttattgcttctgcaattcaataagccatggactatctataggaagtgtgtgcctagcatagttcgtggtgctgcaggatcaaacacaagataactagtactttccttgagcttaggttctaagcagcactcttaagtatagcctgcattaaggcagcccatggtaagtataaagtaagtgttaattatcagaggtatcatagcaacttaaagggcagagagtggtcgctgcactgggtagatgggcaaggagctgttaatgggtggacctggctatgaggatgtgcagagcttgctaccacgctgtggcgggcaggggtgcagtgtctcctttcagaactcaggagaggcctcctatttacactcatttcatagaagggggacagtgggtctcttagggctctactgtgtgaggaggaagaatgtggtagaccgtgcagtctgtctttcagggcttcggcacctaggagtacagcatgaggatgcgtagacgggatgctatgaagcctagcttttccctgaatggatgatctctctactcctcccttcccaggccctggacttggccagagttggtgggaggagctacggcttgcctctctctgtgcccaggctgctgcttctccctggaccacaagttctatttggcacaatttggccttggaaaaatattttcccatactttccaaagagctttgcaagtaaaaagggtttatttcatcttttattagctaattaatacttttggtagaaatacaccaaattcagaaggcttttagaaatttagaattttttttatatatagaaatccatcattatcacaaaacagtctttagctttctgtattgattcagaaatggtggtctgtagagagaatctcttacaagcagtacctgtcaataaaaaagccatcagccaatgaaccatggcaggaaataggaagtgcaaggtctttttcttctaaaactacttaattttttttctttaaatcactttattctttttaatccatttgtccttaacagattgctccaaacacttagtttttgaattatatcacacccagcatcaggttttaatttaatttctttttaacattttaaacctctttctcttatttatgcttgcagaaaatggtatttttggttgaggttattttaa

SEQ ID NO: 33535 - DNA, 1204 bp, Mus musculus
acattaacatatgtctgtgtgtgtgtgtgtttgtgcagggattggctatcagtgtgtaagtaagttgagtttatgatgagctttggataagatgttgttacatagattttttttaaaaacccaattgatgtggagagagcttaatgttttatactaatagataatttagattttaagctattttaagatatacaattttatatgtatatgttttctatagatagattctttaagacatatttatcatatttctaatatgaagtcactaaactctagtgacaggcgctttggaatctgaatggagtagaacctgaggccttgagactttcgttttgtttctgtcgcactgtttctgacccacagggaatgctagcactacctgctctttgccaaccttgtccttgtacacatgagttcagcacacttggtacaaaacgtcctagtctctgccttagggtcacctaaatattgtgtgtagatttgactagcgagcaaacacccagaatctcagatgcttacacatcctattcattatgacaagcaaaggcaacttggatttcttccttcgctgctttctttcttcttatcctaagaactgtgctgttgggatttgcagtgagattgtcttgtaacagctctttaagggtgcttttgggaattcaagtttagaaactcctgagaaaaacttactagaacctttgaggtggtctcaaatatcttaattttgttttccttagtgattaaaaaaaatgtcaataaaactaaataaccgaaagattataaacatatatatcaacattaatatggaaaatcaacattgaaactattgttgatgttaactttagtattaactgtaattgatttaaaaacaaccccagcttctgaagagtaaacaaatcatctccctaaagaataaaaggttatctagttttaatttttatcaagtatttctaagtcctgcctgtttgcaggtagttgttttaaaatgttttcttccagtgcctttaatcccagcactcgagagacagaagcaggccgatctctgagttcgaagccagcctggtctacagagtgagttccaggacagcctgggctacacagagaaaccctatcttgaaaaaacaaaaacaaaaacatgttttctcataaagcactgtgagtcagcagaattgtcactaaattgctttgtaagcttgaacattta

SEQ ID NO: 33536 - DNA, 1168 bp, Mus musculus
attttctcaggctatgagcaaatgtagttccctaatttttctaaatacaaatctgtataaagagtaagggggcagtaccaatggatgtttctggtttatttttttcccttgaacccaagctagcttcatagcgctaatcctccgtctaccctcctgttgttctaacctccgccttgccttctcctccatgtagagccacggaagcaaagcgccctccttcctacccacagagtgtgcttttccagggccagtttatcttggaggtgctgaacctgtttcccaaataagctaagctctggttctgacactacacaattttagaaaccccgggggggaaaccagtaaaggcattttagcatgtactaatccacatgagcacagagttaagccaacagttctgtgttgagtagatccaagagcgggaatgctgacttgggcccctctgagcattcttccagccactggaatggaacagagtggccaaagagtgagaggtatggcttctgcagctccttcacactgcattcaaaattcagatcttcgcttaccatctccctaggctccaaggctctgtgaaagttagaaggatagctgtggctccccaccacccaacccacaaacttccctgtgcatgccggcattgcgatgtcagtatttactaattcatggtcaatgctgctcagataacccctatagcgaggacagattcaggatactagaggtgagtcatcctagacttctgcactacagagctaactgatagtcatgatgcatgctttttattaggggttgtgtttgaagtctcttatctccaatagtttatgatgtatgtaacctaccatgtttgctcccgataaataggaatgattgcagcttcactgccacctcctggaatagctctgctcctggtcccaagttgttctcaatgatgttagccaaagtcaggtttgtcatttatgccctagttatggtaaagctcaagtgttgacctgccatccctcataccacgtagatgtctgggaagtcaaatcttacagcaattaaaatgcctagagagcatttaagggtttttttgttttgttttttaaaccaaacattttatgtacaatacaaaattgttgacacatcgtttaaaaaaaatgtgggtgtgtgaacaactgtagtttat

SEQ ID NO: 33537 - DNA, 1097 bp, Mus musculus
tttgaaaacctccaagccacaccatccaagaccctaaacacaacctttacagtgatctctgatgtgctgatgcaaactgacagtccagacgttggagttcagggtcagaattctttaggaaatgtcaccaaagagtacacagatgggacaaggcgaggactcattggagaaaaagagatacaagctgtgacactggtttcggatggcatggaggtccccaacggatctgcatcacaggagttctattgtgtatctgaagatgacccaaacagtgagacacattcacacggcccgtatgctcaacaggaaatgggccaaaatttaagaggaacactgcccaactgtcatgtcgatggtgaatgcccagtactggtgccagcttttgagaagagtaaaaccagagtcctgggctctgagtgtaaagtcactgtgactgaagacccacacatcgattcccacgacaatgactcagacatccaaagtagtactgaagagctgaccctgagaagtgtttcagggcagaggggttcaccttatgaaatgggttggggcgagaacggcggagccatttgcacagataaagcaggttgcatgtcaacaccagttgagcaaccccccaatctgagcttcagacttgaacctgctgaagtgaagaagtacaataatgtggagaatggaccaagagatgctaaacgtgcaccaaacttgaaaggggaaccaacaaatatgccaaaacctaatttgggaaaatcagctaccaaaacaaataccactgtaggcagtaaagtcaggaagacagaaattataagttatcctacaccaaacttcaaaaacattaaagccaaagttatatccagatcagtgttgcaacccaaagacacttccataatgaaggacacacccagccctcaggtaacagggggctcttcaccatcaccagggccttctaaacacttgacaatgatgaacaaagcaccaagatctgactttaaagccagcaaaaaagcagaaatcccaattaacaagacacacaagcaacagtttaataaactcattaccagccaggctgcgcaagttacaactcattctaaaaatgc

SEQ ID NO: 33538 - DNA, 1190 bp, Mus musculus
gactgaaataggagaatcatgagttcaagaataacctggattgtatggtgaattcaaggcagtcagaaccaacaagaccttatttcaaaaaagaaactattgaaaatatttaaattgatttgcatattgagatttgtgatttggagcttaatatttattatcagtaataggaaggtaataggctttttaaagatcaagctgaaatattaggatagatgtaataatgaaaaacaaacaaacaaacaaaacagatttcacagaaataaatctctaaggtagagtatttgtgtgtgaaaatgtcttggaattttaatatccacatcaaagttctgtttttgttttttgaacatactaaattatttttctggtttgaattggtcagattaacttttgcttttacttttttaaaggagtggggtggccaacagaagaaggccaatagatcatcagaaaagaataagaaaaagtttggtgtagcaagtgataagagggtaactaacgctatttctccggagtcatcgccaggagttggaaggcgaagaacaaagattccacatacgtttccacacagcagatatatgactcagatgtctgttccagagcaggcagaactagagaaacttaaacagcggataaacttcagtgatttagatcaggttcgtgaattgctttcaaaataagatataaggtgggaaatacttgaaatggattaagtagtgtatcttaagaataaaagattgggaagagtaaaagtttctctatctgtgggaagaattttaaattctgaagatgagaagcaaagttgagaagcaaagttacatttttacatttgccaaagctacttctctctgggttattttctaatagctagcttaaattatgaaagtagatttagctaagtagataagtttagcatatttattggataagtgtgaatgtgattagttatataaagtttagaatataactaacttataataaagttcactaaaatgaaatttagatctaatggcaaatagaaatgataataatctcttcactggtatttttaccagtattttattgtcacatctctgtcttgcagaggtagaggttttcaaacatatagaataataggttcaagtctaatatgacagtgatcatgtaaatgattatgtaaatgtactatatacacatatgccaggcactga

SEQ ID NO: 33539 - DNA, 1166 bp, Mus musculus
tctctgtgtctctgtcttctctcctgccctcacttactttgcttttgttgtgtatgtggaaagttatcttctggaatgggtagaaagttttgctacctgatagtttgtagagaaaatctttgagaacattaactcagtataatttgtaattccctattattttgtctgcagtatgtatagctccatttgccttcctatactttgaaaccttctgctttctaagagttttattctcttccttttaactcctcatagtttttcactgtaaaattactcaatttttagtatgggacataccagttttctaagtctattaaaactgtatctagacttgtgtatttaattgaaactagtatctgctgtactttgccattggcaaatgaaacagggccatggatttcaactgtcaggtattagtattgttggtcttatttttcaggccagagatcctcagcaggagcctatggaagagacagaaaatttgaagaaacaacatgatttattaaaaagaatgttacaacagcaggagcagctgcgagctctgcagggccgacaggctgctcttctagctttgcagcataaagcagagcaagctatagctgtgatggatgactctggtatgtgatagtcacagaataattgctttagaagaaaggctcattattacaaaatgaattgctattactgtattatcagatctcggttgttgactagtgtagcaacctgcaagccaggtttactctgttctgtgcttttctctggttatacagaagaggttgcaggaacaactcctggctatcataccgtacagacagagtatctttgagaggtaaaacagacaggcctgtatatagtactgttttgtaacctcagggtgatagggatcttgtttttttttgtttccactttgcaggaattactgctgttttgttttgtttttgttttaaatctcactcagctaagattgttgtttatttgtcttgcaaagaaggtttaaaaaataataagcaagccaggcctggtatcataacacctgtaatcccagcacactgaagtctgaggcaaggaggctcaaagaattcttagggtacagggagatggctcagttggtaaagtgcttgttccccaagcatgaggaccttagtttggatcctcaacaagcacat

SEQ ID NO: 33540 - DNA, 1143 bp, Mus musculus
actttgtaaaataattatatgcatgtaaattttgagtgtagaatctggagaagaatgggtgaacattgcctctcactgggaaaggtagtgatgcttgttttgcccaccaagaaaataaggtgagccattcattttagacagttatctagcaaaggttagtaaagttttctaatgatccctgtcagaccttatgtaaagacgctctccggtaatcgaagaacataggtataagattgttagtggaaggatggtattaataacaaaataggaaacaaaataaatgtcaacgtacagtaaaatgcaacttaatttatttgttttaaatattttccttcttcttttttttttaaacttaagcctccagctgttccagacaacagaagacaggcagaaagtctttcattaactagagagatttctcagagcagaaatccctcagtttctgaacatttacctgatgagaaagtacagctttttagcaaaatgagagtactacaggaaaagaaacagaaaatggacaaattacttggagaacttcataaccttcgagatcagcatctgaacaactcatcatgtgagtaaatctgatacagcaatattatgtaaagggcatataagtacacatgctggcacatggtagttacttagtatgtatttgataggttaataactagtttgaaaaaataatctttgaaaaagaaaatcttgaatctgaaaagccttttaataagccagtatgtgataagaatcaaatagatgttaaatttattcataaaagaaaaaatgaagttggagggataatttagaactagtctctcgttaaattatcaaccctagttctctccccacagtaataggagctcttaagtgctggaacttggaatcagcttgggtaaccccagctggccattattactataacattcccatttttgtctgaatgaaaaaattaaaatggataggaacaccatttttagaatccccattcttgacctggaaagatggttcagcagccaaaagcacttactgctcttgcagagaatccaggtttggttctcagatctgacattaagcagctccgaactgcctatcattccagttccaggggatctgatggtctctgggttttatgggcacctacat

SEQ ID NO: 33541 - DNA, 1102 bp, Mus musculus
aggaagaaataaatggctgtagttttgaagtagttagaggtagaaaattacagtcttaacaattacctgctaggattggccttttgtgttctatacatcagacatagtgactcactctctttaatctcagataaatttatcctgtgtttttttttattgtttttctagcatatacaattgtaattcttatcagtttctgtcttgttttaaccttgtattttaatctagtagctgtaatgcaaaagttctagacagtctggaaggaggaagtaaaaatacttttccttgtgtattttgatgtgtttagttgttgaggtatgttaacatgtggcctatgtatgtatataagctttcaaaatttaaatctgcagattttaagatgctaactaattttattttctttgtgagaatccagactgtaaatatatgctggttcataccatgcttagtctgctgattgcttatttttcttctctcttttatagttgtgccttcaacttctctccaaagaagtggggataagagaagttcaactgtagctctctctgctcctgtgggctttgcatcagctgtcaatggagaggccaatagtcttatctcatctgttccctgtcctgccacctctctagtttctcagaatgagagtgaaaatgaaggtcatctaaatccagctgaaaaactacagtaaaatactttttgcaatcattcttcacatctattaaatagctaaataatgaggataatattttaaacttgaaaatttataagaaactgaagtttaataagatacacattcttaagatatatggtagaaggagatgtaatatctgtgaatcttatcagttggctaaaagaaataggcattgatcaggtagtttctgaaacctgctgttaatcatttttcagggaaagggttacaaatagcaagaactataggtaaaatattttaatattcaaacaagccctacgctctagagccatacccctgaaactatattatacaagactgtgtcagtgtgagcaaaacacttagaaaacacaggggtgatatatgacattcagttcatgctgttggagttttcttttgctttttgtttttgtg

SEQ ID NO: 33542 - DNA, 1197 bp, Mus musculus
acaagtttcttcttcccaatgtattcatctgctgtgtacatgtgtgtggagttggggcagggaggtgctcagtgaagagttcagcattagcttcatatcctagctttgaccatggaagctatctgttagggtcataatcattcttggcccatgaagaaaagaaggaaatactgaaggcaataatttaggaaacttgctggttgttacttactggaagaaagtttttgaagtatcagagttagcgtgttttccctacctgtgtattttagggagggtttgagtttgcagatgctttcacttgtaaacttctaagtttatggaaaagcaaataataaagcaggagtctgttattatttcagcttaaatgatttagttaatgctattcttagattgcagctacattactaaaggctatggtagattttaaatttttatttatttttgttggtttaaataacttggctttaatttctttcagaaatccacaggtagcttctacctggaatgaagtgaatactaacagtaatacacagtgtggttctaacaatagagatgggagaccagttaattctaactgtgaaattaataacagatctgctgccaacatcagagctctaaacatgcctccattaggtatgattccctatattcacagaaaaatttccatattactgttatgaagtagattatcttttatttatactctcaatgttttaaaatcacgtacttgaacgatactcattttcaacagactgtcgatacaatagagaaggagagcagaggttgcatgtagcacatggagaagatgaggaagaagaagtagaagaggaaggagtcagtggggcttcattatctagtcgtaggagcagtctggtcgatgaagcaccagaagatgaagaatttgaacagaagattagtagactcatggctgcaaaagagaaacttaaacagctccaagatcttgttgctatggtgcaggtcagtttgttgaaatagtacagttatgtaaggtgaaagttttgtgtatggttgataattatgttgctataacttcttttcttttcatttgattacattgaaccttgttatattgagggccctgcagataggctaagcatgtcaccgcagagttacattccccagccctatatgtgaatcctagcagctcccattaaagggtcagtcgtttacatgctg

SEQ ID NO: 33543 - DNA, 1154 bp, Mus musculus
ccatacctttcattacattttttattatattggtatactataccttgtttatatattggattttggctttttctacattttctctatgagaagaagagctatgaagaaaagaaagtacataaacatgtagaaacctatacatgtaaaatgtgcataaacatcttttgaggtttatgtgcctattatttttgctcatatatgtgaactgtgttgggaaaagcatgcacgctaaagaaatcgatagaagggctatctttctgaatttccacctttttgaacttaggtcacatgactattacagtttggaatgcatgaaatagcttcagaaacaagtagtaataacaagttaggctgtccagaatattcttatatttgtaagaactcatcttgctaattgttattatctcttagttttccattccttttagacctgtgagtggaaacccttttggggggttgaatgaccctttcacagggcttgcatatcagatatttacattgctattcataactagcaaaatgacagttgggaagtagtaatggaataatggttggggtccccacaacatgagaaagtgtgttaaagggttgtagcattaggcaggctgagatccactgtgacctaagataacaaaataggacattgaaaaactaaaggatgagaaataactttcaggcagctttgttttacattatttctcattctttaggttttctagtcctattttgtgaaaatatttcatatacagcttcttcatttcttgttataacacagttcttgccagtcctgttcatatgaacattgaaaatttcagatgtaatcttcagaaaaagcatggaatataaataaatattttcaagaaaatgcaggagctcattttcatcccctactaattattacattagtttaacaacagaagcaaatgtactgacagcaagataaacattgtttctctacttaatcaggacaggcttttgatgggcccgccctccctccctccctccctctctccctccctccctccctttctgtttttaaatacaagccaactcctaacccttcagaaagaaagtctgatcctgtatctcctactgactaggaagtcactgtctgtaatcccagcgggtctttaactaatagagattctcttgct

SEQ ID NO: 33544 - DNA, 1085 bp, Mus musculus
tcagaaacagtgggagcccagagtatatgaaatgtcttcagagactcatctaactctcttacatagtcagcacatttaaaaaaaagacactaaataaacatttgctttgatctgtataaaatgtaaattagtttgacactgcatttttgatgggtgtgctaatttctgcccatggcagtttaaaacattagaatctgaatcctggacagattcaaaccttgacacactgtgggatttttcttttgctttttgtcctgttttttctttcttatgatcttgacccccccctcccccacccttcattgtgacatttggtgtgttaactttaaaatgtagttttaaataaagtttgaacttatctgtaaagtatgcttttgggaaatgttgttgaattctatgcagcaaattgctgtttttgtaacaacactattcagaaacagcagtggtcaaaaatttgagaaattcttatttcctctaattcttatttattctaaagctctgccttagaccagtctttcaaataatgttagtgttgctgctgttaggtctgatgttcttgtagttcctgctcttgtgtgcgaataaagcagatgaatctcagtggtcttagaacatgttaataactcagactgtatacacagttcagacattgttagtaactagaatttaacaggattatctattagattaatatttttcagaatttaaaatgttgcctcattctaaaaattaaaaaaaaagctttatatgtatttctgtacagacaagtagcattctaattaattaaaaaaaaaaaacaaactctttcaagttaggataaatagaactaaatttatgtaacagaacactaagatttttaatgcctatggacaaaacatgccttttgagatgataatttaaaaccaaagcctaatagttgtttttgtgtgttttgagagagaagcaagttcaagtgttaagaacgtctctgtgagtttttcatcactaagtaaaccaactcttaaaaagtgctttgccttctgagtctgtctacacttaccacttcctataatattgcagagccagttaaccatgaataatctgtc

SEQ ID NO: 33545 - DNA, 1273 bp, Mus musculus
caaattctttcgggggggcacaaatgctaatatgtacaagaaaatcttagacttgaaaatatctttaaaatgaaaataactttttttttcagctgactgtattcacaaccttgatggatgttaccaaaggtcaatttgaaagtcaccttcgagattgcccagacccttgtataggctggtgagcacacgttggccagccttgaggacgtactgagacccgaagatgtgttgtgcagagagcgtgcctggtctccttccataggctaaggctcaaggcctcttgtctttagtcaggactgtcctcatcatgttacattgtttacaggctgttttgttgtttgtttgttctgatgatcatcatcacttcgactcacaggtaaattctttaagggacaccacatagaaattgccagttcatttcactttgccactgcggaaagggtaactgtgacctccatggaacccatcaaagttctctgatggtgtttgagtcagcgccctgtgtgattaatgtaaaagttacattttcttttttaatctacatacttatgtttttctgtacaccagtagttttccttttcctggttctctcttagaaccaacctgccattcacctttgctggtggtgacagcagtgcaatgtcgctatgcttggctggagtacctcagatagacatttgatacttattttaatgggcaatcaatagacctctgactctagaaacagtgttttggaggattataaaataactattatacaaacactatttttttaaaaaagaataagtgttctctttttcctagttattctgcctgccagtaaccccaggaagagtctagcttcaaaaacccacaaactcattatttttaattcttttatgtataatcaatgtaatgttttttccttctaatcatatttttttagattttcatacaatatagtattaatatttttcagaaatcaatgtatttatgaaaactgcaaacagaacttgttcatctttctaaccttcacagttgacagtgaagcattctgtacagtgtggcagactgtatccatttagttttggacagtctgcggtgtcgtgatgcgcaataaacagtcactgtcagatatgtcagcagtcatgcatgctgactgggtgtgtgcctgtgttggtttgagggtggggggttattatcaagagatacaagctgaacataatacctagattaaacaacaagggttatgcaagcaggttactaaacatatgacttaaatggtcacaatctg

SEQ ID NO: 33546 - DNA, 1177 bp, Mus musculus
ctcatcaacaactcaaaatagttttaaacctagaggctggagtgatggctcagtggttaagagaactggttcgtgtagaggtcccagctttggttcccaccacccatatggcagttcacagtcacctgcaactccagttccttgggccttaggccttcttccatggctgctacacacacacatgtgcacatacacacatgcaggcacacacacatacacatgataatacttttaaaatctcgaatgaaattcaactcaaggataaactagttttatacttccaattgaagaatcatagtagaaaattattgaaagggttggttttcataattaagccattgcttacatatgagcagaaagcctgggaggtatagtaattctcaacagcacgttttattccagctgctgtcctgagtgtgggccgaggtccagagcagatcaagtgcacattcagaaccagggctgtaggggagttgcaactcatgagagcaccccagaaatgcttcagatttcgttcatattcatgtgatttacaactaatttttggtcactgcacattcagaaaacttttaactgttgctctgtgtgtgtgtgtgtccccgtctgtccacattcagctaaataactcgattaaaggactgctgatacctgtttccctttagtttctacacctaaaacacagcactcaatcaaataaaactgcttactttgaaaatgtttctatatagttatgaagaagccaagaacacactgaccaagaccaagataatggcgccagtatattttatcctgggaggcaagaagtctggagagggttgtgtgatcacacgggaaagaaaagagtctttggatgtctatgagtaagtatccttgataaaggaaataagaaaaaacaagaacccaggccaatgtgaagcctaagagggaatctctctctttatatctagacttgatcctaagcatggcagatggtatgtggtacaaaccaattatgacaggtggaaaaacaccttgtttattgatgaccgcagaacaccggccaagaagtgtctaaatcacaccacacagaaggtatgcggcatcgtcatacatagaaaaaggctacccattaaggactgtcttattctgctgctttcatttgaccttgagaaatctgcaaacctatttctctctcttg

SEQ ID NO: 33547 - DNA, 1162 bp, Mus musculus
ccccttgagagtatatatagctcaatgatgggacaccatcataaactatgttggaagccccagatttgatcttagcatgagaaagaaaaacttagaccttaaattaactcaagttacaagtaaatcaagaaactcatagatttctctaaataaagataaaatgacatgttcaggctaactgtgtattctgtggagtccattggtatctgtgacccttgacactcaattatgctgaatgtttcttgtagctaggcaatcactaagtcatttccttccctgaccccgagtcctacaggaagactgcatttcacaatacctgttaaatataggtggtaccgatgaacatcaaaggactggccccaaacctcccaaggtgtcctcatcatctttcagattctgctgcaagggcaggtcatagagaggccggaaggctctggagcagattcagagaactgatggcttcaggaattaatactcttagctgcaagtctgggctctacccactgctttcttctttggttgtaaccaccaagacaatcatgagacattgccatctcctccaggacagaactggaaaaccctagttgaaagccctactcctagagactggatgagcaaagcaggcgcccctccctatgacctgctgggccaggcttatgttctcacctctccattaaagttatcaaatgcgttaaagggacagattcacccagaataaacattggtaggaactaaaaggaggtgagtgagttctcacgtgcccagtacctaaaccctcctctactccgaatgtcagtagggaggcagcagggcggtttgtaatgccatggtttaaaatctgtggtgcaggttttgatgccttgaaattactgcattctaaggatgcagcagtcatgtccctatgaaatgttactttcctggttcaaaggataatatttaggaataatacttacttcatatggtggctgtgaggactatggcatatcactctgtaaatgtcctgctgaacctttgtcaataagccgtagttgttaaattggctgggacatttacctcccactgatgtgaggtcaccttatgccgatggtgaaaacaggatatcggagcagcgagatagctcagtgccaagccagatgacccgaggtccatcaccagaaccttc

SEQ ID NO: 33548 - DNA, 1161 bp, Mus musculus
atatatatcaggtatacatgggtaaagaaaatggggtcatgtgggcaggctcctagtccattccttctccagtcccctccccgagatctgccacctgcagttgtttctgctcttacctgatggatgattacatgctcaggaatcgtcaccagtatctcctggcacacgagttgtttacagctgaccttctttgattgtggtggaatcaatcaaagactacaggtatcattgtagtgatacatggggcacttaaaattaatgttatctctctatgtattgatattggtgatgtagtatactatatgtatctgaattaattaggttcaggtgttgcctatctcgtgcgcaaggatggataaagagcttactttaaacacccttcccactgttactgtcttcctaattgctctgtggagatagccctcatgaaatacagctcaccattaaaagtacacaactgggaggactgagataatggctcagtggttaaacacttgccacgaaactgtgaggaccagagttcaggactcagaaatccatgtaaatgctaagtgggtgaggtaaccatcatgtagaagtcctggtctcgggctggagagatggctcagaggttaagagcactgactgctcttccgaaggtcttaagttcaaatcccagcaaccacatggtggctcacaaccattaaagagatcggacgccctcttctggtgtgtctgaagacagctacagtgtacttagatataataattaataaatctttaaaaaaaaaggaattctcagtctctgaaagtggagacagggctggggaagtccttggtgggtaggaacactcactgtaacaatatcaggactagaactcagatgcccagaacccatgtgaaaagataggtgtggccgtgtgcacacagaatcccaccactcaggtagagataggaggattactggggccaaaacacagctttccaggtttgcagaagaccttttctcaaaggagtgtgatagaacaggacattcatacggtgtcctcgtctggtcttcacagtggatgtctgtgtgtgcctgtgtgtgtgtacatgtgtatattacacacacacaaacaataaaacagattcagcatagtcacagaactgtacagtcaacactgctatctagcttagaac

SEQ ID NO: 33549 - DNA, 1136 bp, Mus musculus
cctgcttgagttccagtcctgacttccttggtgatgaacagcagtatggaagtgtaagccgaataaaccctttcctccccaacttgcttcttggtcattatgtttctgcaagaatagaaaccctgactaagacaaacatgtaccccacttgccaactgttgtgacatacagaaaacacataactgacaactgcagaatacattttttaaccatacgtagaaatgcaccaagaaaatactgccatattgtaaatgagactgcacaacaaaacctttcgaaggtctaaaaataaacaacttcatgatcctttatttgtttggggtggctctcagattcagccttcgtgcctgcagcactagactgctttaagctgttttttaagtgagatggtgggttgggggtcccaccaccaccaaaacaagacaaaactgactgacttagtgatgggcagcttcagtgagtcctgcttatagtctgctgctttttgacagcttagcccatggagtgatcctgcaaccaagaactatgtaagcatgtgtctggcctttgaatggaggctacttgaattcccaagaagaaaacactttttcttcttgggctaactttttaggcagtgaagaattctaaaactgatgtattgttttctctactttggcagagactgaaaattagacattgctactagaaagcatgtggggatgaggtctacagtcagaggagcttactgttttgtaattctgcatgtgttaagagtgatcttgactgtgataagcaaacaagttcatgcagagctggtaaactctgagtaactggggctgtatcagtgtcgaggactgtacaggacacatgcaagggtacagttaggggaaggcagtgcagggtaaaccagctatctctgcattcagacttttaaaaggttagctataggaaaagcaacagagcttttgagtaaccctaaaataaaaagaataaactttgatttttattttgtaggaatctggtggactgtatccaactttggggagatttcaggaactattgccattgaaatggataaaggagcctatatccatgcactggacaatggactgtttacactgggagctccacacagagaaggtttgtatgggggacaa

SEQ ID NO: 33550 - DNA, 1133 bp, Mus musculus
ctacatgtctctcaggttatcagcacaggataaagaacagcttctgggttactatctacaaacgtagtaaatgttagtgttgcctattttgaacttctctgtttacagggtttggcagtactctgtgatatcagacatacaagggtacaaaaacatcatcttcctggcaacattagcactcaggaatagcagcaatagggttgtaacttataaaatacatttatatctttgaaatttgccaaggtatttcatgaaaaaaatgttataggttttacagcttttataacaatcagtgccggaacaacacattagaacagttgtacatgatatcatgtttatgtagcaaaatacatcgaaatgtactagtattgaaacatacatgtaaaaatagttgtggaaattgtcttacttttcttatgtctcatttgtttaaagcataaattttctttttaaaaaaattctaaggataaatgaatactgtaattgaagatatattttaaatcattgtcattttttttaaagctattacaaattgtatccttcctgattatatagaactttgtgggtggtataaaataaattttatacttctaaaaaaaactaatcagagggattctactagagctctaagtattttcaatgtgaagaaactcaacatcaccttcctgtgtggatcccaaccacccaactttcttccatttgcttgctgaaaggagcctgatacagctgtctcttgagaggttctgccagaacattacaaatacagatgcagatgcctgcagccaaccattggactgagtgcggggtctccaatggaggaggttagagaaaggactgaaggagctgaaggggtttgcaattccataggaagaacagcaatttcaaccaactagatacccccccccccccgatagtccctaactaagccaccaaccaaggagtactcatggctccagctgcatatgtagcaggagatggccttgtcaggcatcaatgggaggggaggcccttggtcctatgaaagcttgataaatgccccagtgtaagtgaattgagggcagggaggcaggaatgggtggatgagtgggtgatagaaacactctcatagaagcaggaggaggggggatgggata

SEQ ID NO: 33551 - DNA, 1150 bp, Mus musculus
aaggtcatcagtgtgtcaacttctgcatgttttcttaggtcacttaatcctttcttaaacttgttttaggtctcaacattcctaatgctgctatcctttaatataattcctcatgttgtggtgattccctctccctcatcaaaaaaaattgtttctccttcagaactgtagttttgctgttgttatgaatcataatataaatatgtaatacgcaggatatctgtgatatgtgacccttctgaaagagtcctttgaccaccaaagaggttagagatccacaggttgaaaaccactgttttaggcagagcagagttgaccatcaggaaggtgggtgtttagtagtgtgtggttactcagatttttttgtctttggtttttttttaaagacagggtttctctgtgtagctctgactgtcccggaactctctctgtagatcatgctggcccagaattcagagatccacttgtctctgccttttgagttgaattaaaggcatactctaccacagcctggcttgactcataattgcaaccctagttgctatgaacatgactgttccctggataccattactaggctctgtctcaaaagaccccaaggtgaaaacaaaatgaatgtttatttggaaatagaagatttgaaacaaaacaaacatgaagccattagctaagagttgtttctatacctaaaatctatacacaagtaaattgaaatttgattcaaaagcattccttacaaattattgagttaaagggggggcggggggggggaggagaggtgtcaggaaacaccaaactaaaccaatcatggacaactgcatcagggggctccagccaatcacaataaaccaaactagtctttagttgtataagcaggcacccaaagaaagccaaaagaggtaaatgcctgtcagtattcaatcaagtacttttctgttttctttgtcatcttcaacaccagaaagccctcttcagatgatgctaaagctcaggtttctgatcatttgcaactgactgctggctgccagtgccacagtcctttaatgtgcaaataaactgtcaaatttaccttatcttattctattttttttttctgtgagatagggtctcactctgcagttcaggatggcctgaaactcatttcaattcc

SEQ ID NO: 33552 - DNA, 1381 bp, Mus musculus
cattgcacactttgaattcttgttttatttgttttgtgagacagagtcttgctctatggtcctggctatctgggaactgatcatggagatgaacaatctgacctcaaatttacatctaatcctcctacctctgcttttgccttctgagttctagttttacatgcatgtgccaccaggctggcttatatctcgaatttagtgcaacattttgtgatgtatttctagtatgtaatttgatgccaagtttgtttttaaaaccaacatttgtctaataacgcacacattcatgtttcataattttttccttttaaattttatttcatttttctactttcctactattaactttaattttgttttcattgttttcctcttagatttcagcttatttctaattagtgctgattactatgtgtcacgctttttgacttctttcgtttcgttcagtaggaatgacagttcttagattagaaaatctgattttgttgactgttgggtacatatgcacctttcaaaactttttactcttcacccatcatatcaagataatttatgcattataggactgtttttgttgctaacatgtgtgtttgtgtgtgtgtatgtgtgtgtgtgcgtgcttgtgaatgtttctgcacatgtgatagcaggaggagacaaagacttgtaagcaggtcgttgtgtctgaatacatgaagatgcaccagttcctcaaggaagaggaacagctccagctccagctcctggagagggaggagaaggcgaacatgaagaagctgagggaaaatgagatccagctgacccagcaaatccgccgcctcggcaaaatgattgggcggattgagtctacctgtcagaacttgacgttagaatcttttgaggtgagacaaaattcacgaggacactgggggaaaatttttttttttataaaattttttttattacgtattttcctcaattacatttccaatgctatcccaaaagtcctccataccctcaccccactcccctaccttcccactcccactttttggccctggcgttcccctgtactggggcatataaagtttgcctgtccaatgggcctctctttccagtgatggccgactaggccatcttttgatacacatgcagctagagtcaagagctccggggtactggttagttcataatgtagttgcacctacagggttgcagatcccattagctccttggatactttttctagctcctccattgggggccctgtgatccatccattagctgactgtgagcacacagtggcttttagtatttcaagctataggaactacatttttctataatcatctgaaaaattaaattctgcctaaatgtcatttccttaaggtatctatctggg

SEQ ID NO: 33553 - DNA, 1145 bp, Mus musculus
gatactagcatttagcatgtggcatgcatagaaaaacattcaataaaaggttggggctggtgatgagtcagtgcccaggagttccacattaagtcacaattggctttgtgctggagagctggagcgtatgtatcatttggtgtaatcaggtacagaggagaacaagagcttcttgtaataacaacacagcacctgatcatcacccagctgtgactgaagaggacttctgtaatcccagaccagaagtgtagccttgtcctgatgtccaaccatgagaaaatgtccacaacagatttgatggagaacctcagggaagagctgacctgtttcatctgcttggattatttcagcagtccagtgaccaccgagtgtgggcacagcttttgtctgatgtgcctcctcaagagttgggaggagcacaacacacctttatcttgtcctgaatgctggaggactttgggagccccacattttcaagccaacgagcggctggggagactggctaatattggcagacagctgagatcgcaggtgctgcagagcgaggatgagcagagcatctgtgggagaatgccagggcctagttgggtgttctctgacgatgagcagagtgtcattaatgtctcacctccaagtcaagggacgaacaaggcgtgtttctcaagtgaggctgaggagcagcacaaagtaagttgggatgcacagtggcaatctcagaacccagaactgctcctagccactaactctcatccaggtctctgtcggtaacagccatgggcacgtatcttcatgtagcatggttcttgctttcactctctctttgagagcctcagtcattttccaatggctagttttcctgatctttctaccactggataccctgcttatttgccaaggggtttgtttctattgcaggaaaaactccaagatatcataaatattttacggaaaaagaagaaggaagttcaggccatcctgaaccatgagaaggaacgagtgatgttgtgtaaggtcagtgtctgtctagtgtttcatcttgtgtgtgagatacctggtgacatgtcagggggaaaggactttttttttttaattacatatatatatatatatatgagtgcattgttactgcctttagacccaccaga

SEQ ID NO: 33554 - DNA, 1135 bp, Mus musculus
ttgtgtacttaccaacagtggctttgttactttcctttctccaaaccctattaggttggaaaaagtgatgcttgagcagagtcgttaaatatttcttagaatctatgcttgggggcttggggagctggtgagatggctcagtggttaagagcactgactgatcttccaaaggccctgagttcaaatcctagcaaccacatagtggctcaccaccacccgtaatgagatctgacaccctcttctgctgtgtctgaagacagctacaacgtacttagatataataataaataaatcttaaaattaaagaaaccatactgggttttgtttctgggtaggcccactatgcgcattctgctgtaagctctcaattgtgactgtccagccactatactagttcctttaataggctagcctcttcctatatagcaggaacttattacactttctgacttttagtaccacttgggtcttcccatttgagcaggatggtttaattacacttccagccttgagacctttttccttgggaaaaaccccaagtggagttagttattgctcatttttctgagtctaccgtgacattattggtctggagatatgggtcaaccagtaaaagataaagctgtttgctgctaagtctgtggacttgaatttgatcatggagacaaagatgaaggaaaaaactacttccaaaagtcatcctctctgcacatgtatcatggcatgtgtgtgtgtctttgagcacacgtgtacatacacatacagtaaataaataacaatctttaaaaaggagtacattttgttgctgatggggtttttttggttctttttctcttagtctgcttgttttgatttttttttttgagagagagagagagagagagagcatgaagtttggtgggtaaggaggtagggaggacttgggaggtggtggggaaagggaagaatatgatcaatgtatttcatgaaaacaatatagataaaagaatgtattaatgaataaataaaaggtgatgttctattgtgagagtcttctgccatacatcctctgcctcagtttccctgagtgcaaagattagcacatgcctagcctcaacctgactttcaacaccagacatttgtcccctcttgagac

SEQ ID NO: 33555 - DNA, 1493 bp, Mus musculus
ctggtcaggggctgactcagttaggggatgttggaagtttgaagactgggtctctacttcttcctgttcagagtcattgccactattcaggccaaagctgttatcccttacgacagacagatggggaggtagggctgacaaagatggaggttgatatttagctgtcatctgccaagagactaaaggcattagcattactgagagaagaacaatggagggttatcctccagagacagcttgtctcctgcacgcatcagctctgtgtcatctataccataaagtcctccactcactggctctgctgccagagagtcaaagggctggagggaatcttcactggcaattggagagttgtccaggtgatcaggaagatgtgaaggatcatctagatagctcactgtgtgatcagggaccaggatagagacctcttagtctctacagaggagacaggtacacacctttacttctggatgctcttccccagctccagactgcctaccaagcccatgccatttcctgtcagctccttttctgttgccttatcaggatggatgtcactgcttacatcctgggaaggtgcaaaggtctggatactcgaccccaatattggagaagtctgtggggaggtgaaaaatcttgggggtccattgggaatcatctcaaaatcctggtcaggaaaagaatcacacacttcctgtgatttgaagttaaatcccatgggactctgggtaccactggcccagaactcttggcttgaagattagtgatgtgacttggggatgaaggtttgtcccccaaggataccattgagtgggtattgtcccccagggaactgagaaagatggggtgagtccttgaggatgttgccagggttggtggatgggtaccgtgagtagttctgaagacagtcgtaggctacgatagggtgatggaggttatgaggggcaggaggagttgagagcagagttcacaataggtgaagtggtagtgtgagatacagtagataagccattaacagtctcatccctacccagactttgcccttgcccttgctgggggaagttcatgggagactttttagtgtgttagtatagaggccctttcccctagaaaggagaggatttcagtcccgaggcacctggtgcaggaggagagccagtaaagcaaaaatggtcttttgcctccagtttgccaggaagatgctcgaatctctcttggctgcacctgactccagtactcaaggctaacgagaggctgaggtgagcccatctgactctacttagactgtattttaaacaaaaatagcagcaactataaaatataacctggacttttccattttacatgatgattttcagggataactatttgtactgtggttttcaattgccttctttctcagcatctatctacctacctatctatctttctatctatctatctgtagtgtgtgtatgtgtgtgtgtgtgtgtgtgtgtgtgtgtgtgtgtgtg

SEQ ID NO: 33556 - DNA, 1845 bp, Mus musculus
gccaagaagaagaagaagaagaagaagaagaagaaaagaagaagaagaagaagaggaagaggaagaggaagaggaagaggaagaagaagaagaagaagaagaagaagaagaagaagaagaagaagaagaagaagaagaagaagaagaagaagaagaagaagaagagctgatgcttactgagtttttctatctggcactcccgctctggaatgatagatgttgcaacatcaacctctccatctctttgacccctgtggccattgacagctgttgtatttacctcctcttcctcctcttctctgtcactagtttcctccatgatcggagaactgcacctctgtcccaggtcgtcttctgccccttccatcataacctcaggccacctggtttgcttggccagaacagtttttggtccctggagtcggccttcaacaatccatttgtttttcctgtagctagacatactctacagagtcgtgtcaatctcattgatgataatggcggaactgttgagctcaggcacaaggaaggctggaagagcagccttctgttgagatgactgggcctgaaaaggttgggtccgcagactgtcatagaaggatggctctgctctctatgccacgaggaagcagcgcagtatctcagacacattgcctctggtcaatgagctctctgacacctttcccccccaagatctttagggactgacaggaggagggcagaccaggatcgtggagtgcagccttcaggagctataccagcaggtcttgcactttgtccaagctgtcaccttgacataaaagtccctcctgcaggactctcagactaggaacatctttggtaaggtcaaagcctagcactttgccaaaactatgcaggaactccacaaatggtcaaacaatctgagaaagccctgctggacagcgtcaaaccagcaatgggtgtgaagtcaggcagaggctggtggtcagtcagccagacacatatccccagtgggcttcttcatctcctccaagataacccactgcctctgccgccccaccagccgcctctgtgtggcaaggtcttgtctgctctacaggatggcctggctctgggctcttcctttccctctttaccttttccttcagcttctcctgctttgtcttcatctttgctttctcagccttgaatttcttctcctcgtccttcagctttaagtttttcgtgtcttgcttcctcttgcttctggcctgtaaaccataagggaagtcatttcttttcaaactctgcaagcacctctgcttgggctgcccttgggcaggagtcgactctctccccgctgtgccttctgcctcgtctttttgcttttagtcatctttgtgttattctcttcactcagtgtttcttgagtttccagtttctttggaagtctattgtctgttttattcagccactcgggcattttgatcttaggaggccaagcatggtcccgcttcactttgggaacctccttgttcttagccttctcattgtttcgaggtcagcttcatttgctagtaattgcttgaattctgaaagaaatcccctctgctgataactggacccactgcaagctctctggtgtatctctttcttcaaatctccagcaggcatgcagagactgaagctgaagtgctcatggcagacactgtgtaccacattttggctcaggtatttgataacttttggaaattgcttcattttcttcccacaggggccacaataccaagtctccccctgccaccaatggctgtccttttttttttttctttcttggtttgctttctttctttttttcttttatcgaatattttctttatttac

SEQ ID NO: 33557 - DNA, 1180 bp, Mus musculus
tcccaggcaataagatgcagtgtcttcatgtcaaacttggcaagtgagctagtgagctgtctctgatacggttgtatagcaacatagttcctgaatagtaagtagcatacctcgttgtagcaagtgttgtttgccaaatgcttgagcaaattctgagtctcagccagagaaaactattctgactacttgaaggcaccttacagattcctgtttctaacccatgcttctctcccacaactgcccccctcccaataatacagtccagaggttaatttctaagttcccatagggacagaatcatcgtatgtgtcattgtggggttaaggatgtggctcagttagtacagtgcatgcctatcattaaagaatctccgcaccagaacaaaataatctgtcagtatgggtttttctcatgtccatatatccttagtttcgaggctgcctctaaacaggctgtgtagacaagaataaacttaaattcttgattcttctgttcccacctcccaagttggaggatgaaaggtattcatccactcacttcttccctgtcccacttggctctgttacctctacactccaaatcaattgacacagtgagataagactggttccccacacagggatctatccatcgtgaagaaaaagattgcttagctttaccaagaaagcgcttgtcctttctaatcatccttagactgtaaaccaccccagggaagttaacaatcctggaatagtgtctactattagacagagttagtctcagtttagtcagtcttttttttttttttctgatttatttatttatttatttatttatttatttatttatttatttatttatttatttatttatttatttattgtgacagggtttccttgtgtagccctagctgttagtcttagtttagtaagtctttttttttctgtttgtttgtttgtttgtttgattgattgattgattgattgatttattgtgacagggcttctttatgtagccctagctgttctggactcactgtctaaaccacactggccttgctctcaaagatttgcctgcctttgcctcataagtgctgggactacaccacatgcagcaagtttagagaattcttaacagaaaatagttcctcttctccattcctccttttggataccattagcacatatgtcctttcgttgtc

SEQ ID NO: 33558 - DNA, 1185 bp, Mus musculus
ctgactttcagggtttggtccacgtactccaacaatggctgcctatgaatggaaggtctaagaatccggtagttgttcagtcctggaggctgaacattccacctggtcttgagtgtatgctggaattctaaagaagtaggcactaatgccagtaaaggaatggacttgttagcaaggtcagagcagacaaagggcaaaagctgccttcctccaggcccttatgtaggcttccagcagaaggtatggatcagttaatttgagatgtagtcaagttgacaaccaagaacagccatgacagttgcctttgaagtcagtgggtgctcatttatacttgccacatttattttgcttatactttgtttgtttgcttatttgttttgaggcaggtttcctgtggtcttgaatttgaaggaggtctcatatatcccaggctggccttgagtttgcaatgctgctgaggctggtctggaactcctgatccttctgattggatcttccaagtgctgcagttaatgcctagggccagctggttactgcagcaggcctcaggaccccgaagcacacacgtggaaagacaactgaccgcattgtcagaagggattgtcaaaactcctggatttggagaaaacaaagtttcccgaaactgcttaactaactggtattatatcagcaacagtcagtttgagtagatggtttttcttgaaaaaaaaaataaggtttttctcattttgttgaacaaaatctgggtgctagtctcagagaattgaatgtagctggggtgatttatgaaggtcagggttactgaaaatggaaaattcagtattgttctttaaactgtcctcattgcatgaaaaaaaataagcaaaggtggtcaggagacaaacgacaacaaaatcagagttaggtactgtcttctctccaatcacaacaaggtaaatctaacatgatattagcctgcgtattattctgaagtagcgtgaacaaaggcttttctttaacatccttaattccttgtctgaatttcacactgctcagcttaggggggagggggctctctctgcccaagtgaccatgaaactctcactcgagtgagaaaggatttttttttttgtattcttgttaaaatggtaaggtgagtgttagaaagggggacacggcaataatgattttatcagtgctagttag

SEQ ID NO: 33559 - DNA, 1154 bp, Mus musculus
ttttgagtcagggtttctctgtgcatccctgactgtcttcaaccctcgctgtagatcaggctgacctcaaactctaagagatatgcctggctctgcctctctgctgcctccttaatgctaggactaaaggcacacacaatctggcctgaatttcttggttttgttttttattaaaaactaatatttgacctgtccttttgatttgctttaaccttttgctgactgatagaagtcttcccctccaaaacaaaaacaaacaaacaaacaaaaacccaagaaaaagacaaacaaatgacaacaaaaatactgtttttaaggatggctggagagatggctcagcggttaagagcactgactactcttctggaggtcctgaattcaaatcccagcaaccacatggtggctcacaaccatctgtaatgaaatcgaatgccctcttctggtgtgtctgaaaacagctacagtgtacttacatatagtaaataaataaatcttaaaaaaaaaaaaagatggatatgggggcacacttaatccaagtactggggagacaggctggaagatctctgagttctaagccagcttggtctacatagcaagttcaaggacctagggaaaccctctctcacaaaaaaagatataaagatggtatatatatatatgatggggtcagaaatccgtctgccttgggtgcttttcaaaacaccaataaaaacataaaatcttccactttaagatttgtgtagctgaatgtggcagtaagcacattttaatcctagcactcaggatgcagagttgcatagtgagatcctatctaaaaacaaaataagatatctaagtataatattttttaaaagaaatctatgtatattttttagttgttcgaaacagggttgccctcaaactcatagatatctgcctacctctgcttccagggcgctgggataccaagtatgtaccatgtcactttgcaatatttattttgctctttgcaggtatgtggcttagggagggggtagccatgatgcaggtatgtggcttaggggaagggtagccatgatgcaggaatgtggcttagggggagagggtagccatgatgcaggaatgtggcttgggggagggtagccatgatgcagatatatgtacctaagtgtagg

SEQ ID NO: 33560 - DNA, 1201 bp, Mus musculus
cctgaactcatgatcttcctgcatcttttctccacatctcaaattcgggcgttacagttttgtgctggaccacctggcctcaggtttctattgaaaggcattctgctccacggagaagcggggcgttacctgattatgtcctctcctaagacattcagcaattcaggtttcctggccaaggttcaatcagtaaataaaagggcatagtgatgtctttaatcccagcacttgggaggcagaggcaggtggatttctgagttcgaggccagcctggtctactgagtgagttccaggacagccagggctacacagagaaaccctgtctcgaaaaaccaaaaaccaaaaaccaaaacaaaacaaaaacctatcagttgttaagagtactatctactcttccagaggacctgggttcaattcctagcacccacaacatagctgacaagtgtctgactccaactccagggtatttgacaccctcacagacatacatgtaggcaaaacaccagttcacataaaaaaaaggtacagagttcatgaggagatgcatctgcagagacttagtcacctggggagagagaacatggaaaaactgaaggcgagtgaagtccggcttggtgagcacctgcgcagcctccagacgatgatcacggacctcgagaagaactgtggggaatctgccgttgcactgctccaggtaagcctgaggaaagccattcctcaacagcatttgaggactgcagagtgaagagactcattaagggtcccttcctgaatgccgggtccagtgatcttcaagccagtgtgaaagctaagcagccattgtcgccctgctaaaagcactatgaatactgtcgatggtctgtaaatcagtacagacgtaggggaagcattgagcttcctcaatgcccactttgggcatatgtctgaagaaaactaatgtgccaaagaaacttttacagtagtaggaacaggtaaagatatgtgattcatataactcatatataagatgttgcttattcgtgaaaaagacaaagttataattataattaaattttatgtaatatatattaaataatatgtaattatatatggcatataatatattataatttagatgaaatttgggatccttatgttaattgttggcataataagccaagcatagaaagaaaagtagaagatttgaattcctacgtagaac

SEQ ID NO: 33561 - DNA, 1131 bp, Mus musculus
ccctccctagtcttatccgaagacctgagaagtgtgggattccgagagacaccaaagactgggcctggcactacaaggagattggatttcagcgcttctgtgttgggtgcagagagcttcaccacggggaggcattattgggaggtggctgtgggacaggcaacccaatggcaggtgggcatatgtgactgtacagagagaaaggacaacattcccggggcttctggagataaagtcttgctcatggggtccatgatggggaccgattgtaccctctgggtctttccccctttaagaaaggtctgtctgagaaaccaaatgtacaaagttggagtcttcctagactgtgaatgtgggcaagtatccttctacaatgtgacagagcagtccctcatttacagtttctctgaccttaccttccgaggagcgattaaaccaatattttctctttgtattccaaatggagacatgagttcagactctctcactgtctgtcttcctcagactcatccctgaaatgctgctgatagctcttcatcttcctgtgtgtggaacccaagatcaaaagagacacaaaaataagatccagactttgtgaacaccacttatgtaattaatctaatataatccaataaagccattagacttaatgtggctctctgcatgtgttcagtagaaggagctctgtttaagttcagtgatgatgggactcaggggatcaaggcacttacagacaatgcagatagcctgagttcaattcctggacctcacaggagagagaaagaacagacttctgaaagttttcctctgacattcacatgcataatgtggcaagtggctattgttccactaaaacaataaagtacaatagaaaacaaggcaataatgaagggttgtaacattgaatataatacacacacacattcacatatatacatgagatgtatcatatatttgctcaatatatatttgtgtgtgtgtgtgtgtgtgtgtgtgtgtgtgtcatacctatacatcacatacatggtcagtatacataatacgtgtgtgtatatatatgtgatgtatatgatcggaaagttagaatatatgaatacattcttgtttcgaaagacctagaatttgggctgc

SEQ ID NO: 33562 - DNA, 1109 bp, Mus musculus
tgtgtgcttagggctgagccgcaccacaagtagaaactgtttttttagtataatccaattttgggatttacaatgtgatcagaacaggtgctgagaataaatctctggtcctctggaagtagaacacccttaatcacttggaccctctctctagccattgaattcatttattatttctcttctgtccttcttttctttcttaagtctattatttatgtgtgctcactggtatgcctaggctgtgacactctaatgtggaagtcagaaaacaattgtgggagtcagtttctccctccacgatgtcagtcctagaagaaatcaaactgtcaggattactggcaagctcttttatccattaaaccatcttgttggtccctcaaatgaaatttctatttttttaaattatgttatttatgcaggtaaagttttgcgtgcatgtatgtctgtgtaccatttgtgtctttggtgactatggaagccagaagaggggctcagatcccctgaaattgtagttacagatggttgtgaaccaccatgtgggtggcagaagtcagaccttagtcctctggaagagcaaccaatatgctcttttaactgctgagacatccctccagccctacaaacccacccaaactaaagttacttcttctcctccttttcctccttctcttcttcttttggtttttcaagatggaatttctctgtataggcctggcattcctggaactcattctgtagaccaaggctagcctcaaactcagagatccacctgtctctgcctcccaaatcccggggataacagcctcaccaccgcctggatgaaatttaatttctaaacctaggagctagagaaggcagattgagcagagtactctgcaggtctgagggccatcagccgtagcatttacagcagtgctcatctggaactctagcactggaattgaggacacaggcaaatcctgagaactggttaacctgccagtctgactgagagagcaaggggccctagttcaaatagcttagagcaccgtagcagaagactgaagccaacttctgccctatgcacccctacacacacccctattaagagacctgaaatgctcagggct

SEQ ID NO: 33563 - DNA, 1192 bp, Mus musculus
tgccccgggcattaataaactattcttagcactcctaagatcatagttgcatgccataaaaagatagtacatgctccctccaactcaaaatgatggtcataaaatacacatacaaatcaaagaagcagtaaaactgggaagaattttgataatcatcaccattaaacgccaaaatgctgcacactatgtgtaattacatcctattttctaagaaaattggtgcctgtccaaactgctgatcactaagcatgggaacatttgtgtgtgtagaaatgctttgggtcttgtcaaaactgcattctagaactttccatccttgatttggtaaagacggcagcaaaaatctttgccattcctcctattaaagcctaaggtttcaggtcacagcccatgcctgctctccctaattcttctgaaaggtgaggtagaaggaccaaaaattcatggctaagctgggcaactcagaccttttctcaaaattttataaaggagttagagatacttgtcagtaccaaagcccttgtttgtgggtgccacacaaggccaaactggaagctgcagccgtggtcctggggatggagggagcagagaccactggaaggacttggataggaaggatggcaaaaaagatcaagactccagatctgcacctgagccaaagaaacctgaggagattccggcctccgagttcagctctgcaagcaagcacgctgctctgtctctggatggcgaggatgaggaggagggtgacgactgcactgagtaggctctgggctcaaaaaagagtaaggtcttggtctaaggatggctcagtagtagagagattgcttaacatcctcatggctctgggtactacccttagcactttatacccctaaattaaatataggtagataacttttcacataagagtttagctaaagggatctgcaaccctataagtgggacgacaatatgaactacccagtagcccccagagctcgtgtctctagctgcatatgtggcagaagatggcctagtcggccatcagtggaaagaggcccattggttgtgcaaactttatctgcctcagtacaggggaacgccagggccaagaagtgggagtgggtgggagggtgtgggggacttttgggatagcattggaaatgtaaatgaaatttaaaaaaaaagagtttagcctttggatatatat

SEQ ID NO: 33564 - DNA, 1160 bp, Mus musculus
acctatcagaagcatgcaagtattttctgcaagtttgccgagtacattttaattttgttgatagttttttttagctgtgtacaagttcttaagtttcatgaaattccactaattttgctttgtttttgtgtgttgtggtcgtggtggtagtttttggtttggcttggttgggttttgttttttttgagacagggtttcaatgtataaccctggctctcttggaactcactctataaagcagactggccttaaactcagagccaccacgtgctacctccaaagtgcctctgtgacgcagttgttgctgtttttaacctacgagcaagggatgtcttttcatttcacatacttttcagttccagtaatagttataattttctgtgtatggttctttccttgcttaaatttcttccaaagtattttcatgtaaccataagaaaaatatcagttttttcttagattagtgccagggtagagaaatgtaactgaacaagctaaaaatcagtgttaatgtagatcctttctctaacacttaacagataaactgggtaccgctctgcagaggactcgggtctttgtccaacacccacaccaggtagcttccagctaactgcctataactcatttccaggtgacccaacactccttgaccccagtgagcaagcacctgtgcaagtgtggtggtacacatgatgtatatacataaccattttttaaaagaatgacttcacatagcatgtgaaacatctacactgttccactcagcagagacttttgacattggatcctggctgccctggatctcactgtgaaccaccatgcccagcttgtccggctcctatatgattctcctaccgggtgtatgtatgtgcagacatccgtgtgcactcgtgtagtaattaccccatgcaatggctctgactgaataaactgcatgattacatcctgcattggacacagaacagtgcaagttacattaaaaacccattatatttgcaactccaagcaagaactataattaaaaggcaattggatgaaattagctttaagagtacaagagcttaagcaagctttggtaaatgaatgttaatggttagcatgtgggttttattagggtttttgttccttttctctgtgacccaagagttgaatttcttaga

SEQ ID NO: 33565 - DNA, 1099 bp, Mus musculus
taaaaatgccacagttcagctttagttagatgctacttttttgaagattcaccatatccctggaagttaaagcacatattttaggaaaagaaaaagggatgaatgacgactatcaattaatcttgatttctttataaatgccaaagtttaaaagcaacctgtctttgaaaaatcagagcctatagtttgacttcaatgtgaagtttttgctaatatggactattacagaatgttaactagtatatatttggtaggacaattctatcatttttataggaatgtggatcctgaaactctagattaatatcagtaaagtagtgcacaaaagccattcataaatttcaattttcttctaaatctaacacctgcatacagaacttaaggcaagtttaatcaaggtgatggatcatgtgcctagctggtgtttgcttctgccagccttgtgtctgactccatcctttatggattctagtttcagagtaaagattaaagaccaaccagaagatgcagagattagggagcaggctcttcagactggagcctcagagcactcagaagggtaaggttggctctccttgtaaaggtgggtctgctctgagctcctttcacgagaaaaagtctctagaagttacaagatgttcctatctggattttgaggcctagaaaatgggattttatgtgtctagcgtggcccttctgtctcttctccccgaagatgtaggtggaatagcaaaggtagaggacatggaaaagaggctaggtattgaggggtcacacttggaatactttctagtgttttagtttttattttatgtgcattggttttgtctgcatgtgagggtattggatcccctggaactggtgtttagagctgccatgtgggtaccagggtcctctggaggagtagccactgagctatgtcttcattttttttttttaagtatatgacattttgccttcatgtatgtctgagcaccatgtgagtccaatgcctctagatggcagaatggaacattggttccctgggaactggacatagaaaagattatgtgggtgctggcaattgaacccaggtcttctagaagagcaggcaatgctg

SEQ ID NO: 33566 - DNA, 1873 bp, Mus musculus
catccccctgcctagagacagaccatttactgaagtcactttctcaccatgggctctcgtattggagtatattttaattttgggttattatctaaggcaggtgtttgcggatcagtgccccctggaagtgagtcataggcattgttcaagaaggaagcagctaagacaacatgaatgaacaaaaaatgaatgaacaaatgaagaaaacggcaaagacaagtggccagaaagggccgggcggaagagccctcgacagactgaccctaaagcaagacgaggcaaggccagtccagaataccagagtggaagctccccgtgtaacatacaccatccgggatgaaagtgagattagccccgagactgaggaagatggcttccctgacggatacctagagtgcatcatacgaggtgagttttccgaacccattctggaagaggatttcctttttaaatccttcgaaagcttggaggaagtggagcaaaacctttctcgccaggttctggaagcgagttcccttctcgagtcttctttggagtacatgacaaaggggacgaagcaagagaagagagaggtcacgcaagagacgcctccgctgagggttggggcgagctcattacttgcaggcggccctgcagagaagccagagggcggtgtgtactgtggtgtcttatcgatgctggagtgtcctcaagccgggtgcaagaagaagctgagggataaaaccgccctgaggaagcacatgcttgtccacgggccccggcggcacgtgtgtgcagagtgtggcaaagccttcacggagagctcgaaactaaagcgacattttctggtgcacaccggagagaagccgtatcagtgcacgttcgaaggctgtgggaagcgcttctccctggatttcaacttgcgcacccatatccgcatccacaccggggagaggcgctttgtgtgtccttttgatggctgcgagaagagctttattcagtcaaataaccagaagattcacatcctaacccacgcaaaggccgggaagaaatgctgaaggtggagacagattgtcctcaggctgggtagtcttaatgacagaggcactggggatacacgcattatgtacagattgttatttgtagggatagattctatggctaaaataattttgcaactcttcattatacagttttaaggcctcttttggtattccatggtatagttccaacaggaaagtcaatggtgaaagcagtttcaaaagcataacccttactatatgtgctattgaaggggatggggacttttgcatacgtcggaaaatcagttatttttaactatgcagttcctaattgcctagcttttacctttagaaatatgcttcatggtaaatttgataatcctaaagaatggccaactttggcagtagtcaacaaatgaatacatatttctaaattttatgttttgatttttgtttttctcattgtaccaaactatattaatcatagttaaatgtgaatagttacaaaaaagttgatccatctgaagattttagatgtttcaaaataaaaggaaataaaacactagaaatgagttcaatttctggggaaaaaaaagtgcattaagaagacaatagccagtcatagtgagtggttcatagcactcaggaggccgaggcaggcagatctttgaaattgaagccagcctggtcagccctgcctctgggctcagctaaagctctatagaggtaccctgtctcaaaaaaagagagacagacacagagcacttcagaaagggtggggtgtggtggtatacatctttgatcccagcatccagaaagtataggcagacagatctcagtgagtctgagaccaacctcgttcatacacaaca

SEQ ID NO: 33567 - DNA, 1151 bp, Mus musculus
cataggagaactaggagaaaaagaaatgtaaagaaataagctgcagttatattgtagatgaatgtattgagagaggctgcttttgtatagcagcctagacttgatcatggcctaagattttgctggttaaatactcttagatatggccttgataaatcaggtcagtttaaagaataggtaggtgtgtgtgtgtgtgtgtgtgtgtgtgtgtgtgtaatttcttttctccccaggggattcagcctaagccctgggcatcctagataggcatgtcactgtcccacgctaagctatatcccaagcctgtgtgtgtatgttgaaaatttaaactcttgccctagcaactgaaatgtgctttgttttctctttgatatatttatctttttgccagatttccatgttatgtctctgagatgcttttttaaaaatgtggccatttcaaagtactttcaagctgttaattctcaccccacagctttcccatgtgcctttatttaaagagcatttaatttctgttcccacagttaagacatgagaacaatgaagagatcttttatccagcgtggaatttgaacattaagcaaaggcagctagaaacacaatgataacatgtttatgttgcaggtttaaatagtttctagttttggttttgttgttgggttttttttttttttgtgggttttgttctgttttgttttttaaatgaagggaaaatagagagcaagtttaccctgtgtctatattttgcctggaattcataagccattgggattccgtaggtttcatttttttattttttggaccccagagaaactttagaataatgggcaaggaaactacagtccaggatcgcattttgcctctcccttccccgtctggttgtctcagcatcctcggccctcttcctcactggagttgcattgcacttcagaaagagatgggtttagacagagatgggagcctgtcaatcatatcttgctctgtacaaaaaaattaataatgatgataaaagagctactgttcctgcctcagtaaaagaagcaggatccagtttagagtgagttaagaaatgaagtagctgactgtgagcctccacttctgtgtttgctaggccccagcatagcctcacaagagacagctatatctgggtc

SEQ ID NO: 33568 - DNA, 1057 bp, Mus musculus
ggaggcagaggcaggcggatttctgagttccagagcagcctggtctacagagtgagttccaggacagctagggctacacagagaaaccctgtctcgaaaaacaaaacaaaaaacaacaaagaaaagttattgggccatgcttgggtagcgcacgtctgtagttccagaatttggaggagttcaagccagttttgaccacatagagtaacaggctaacaagtcacttgaccttttatttgctattctcatgaggttgtatattgggtagaagacagcatattgctcaaacatctgataacctaatgaagaaaagtaaatgctatttctatggctttgattggttaggaaataccattctacctacatagcatttgcaagcaactcttttttttttttttttttttttttttttaaccaagtgtctaaagttctgtataaatgcctggtaagttattgttatttgagatttctgaatcaggtctcaaccaaaactataactaatgcatattcatgacctcatttcactagagaaatggactaagagctgggacacgtggcaaaagaagatagtcttcttctctcaatagagtgagtgtgcagtgcagccagcaggtaagagtaaacggtttcataggcaataaataccaagaattgtgctcttctgtgtaacgcaggctggggaatatttagcatgggatcctaagtatggagggaaactctgaggaagtgatgtccaagcacagatctgaagtatatatgtttgtgcgtactaacagtgacagaaaactgtcggtggtgtattagtgatagagaagaacatgcaaggactagtagggtgccttactctatctaggaggggttgcaaatgctgggagcgtgcctgctgtctatgctcgggttataagtggggaataaccactccaggacccccacaagctagctacaaagtaacattttcttttcttttctttttttttttaatatatgtcccaagacatatgatttatttattatcgtatctaagcacactgtagctgtcttcagacacacaagaaga

SEQ ID NO: 33569 - DNA, 1812 bp, Mus musculus
actgtggctctgggtacgagtggcagtttcttcttgggatttcagaaaggaaaccaaggaggaaataggtagagcgcatcgcatcgctgtgggcattaggtaagtcctgtttcatgaaatggctgggatttgtcttttttctcgttatgaggaaagggaggagggaagggtttgaaaaccagcaatttagagttttgactcttccaaattggtgaagatcttggcaaataaatgctggctttcagactgcatcgatcaccagctaccttggtccattggccatcacgttttcaaacatattaaggagcacagtagatgcacattgaggaaagtgggaattcaggttggaatctccttgaaattctgtttcaaattttgttccaagtgttcgtgtgcttttatcttatctcaattccctagatctattttatatgaaaatgtttaaattagcgaggtaacagggcacctaccttttctctccacttacctctataaaattcaatagattattctagaaaaagaaaatcgaagagcatttttttggctttgttttgtttttgtttttgtttgtttgtttgtttgtttgtttttcgagaaagggtatctttgtatacccctggctgtcctggaactcactctgtagaccaggctggctttgaactcagaaatccgcctgcctctgcttcccaagtgctgggattaaaggtgtgcgccaccaccgcccggctagaacagcttttttttaaattactgattttctttacttaattttccagtttcctcactccattttccaatcaagcatccagccggaaagaacttcctcttgcttcctacagtctgcattccaaccttcagattgcttggttctcaaattgcctgaggagttccctgttcactgttgtcctttagtagtagatccagaatagtggtttaacttaacaccctataatggtttcctttggtgttgaactgcaacgcaaatggctttccgtagaattcccaggctcctttgcacttggaccctggccgccatactaccgaccaacttttctaagaattacgacttaacaccgagtggtggcgccggcggcctcacttggcctgtaatctcagcactccgggaggcagaggcaggaggatccctttgagttggaggacagccaagtccagaaagcaacttccaggacggccaggctgcctagagaaaggatccctgtctcgaaaaaccaaagcggggaaagatcgactgcttctgtggtgactatggcttcctcctgtagtaaatatgacggccttctgtagtaacttcggcttctttccctacttaaaacttttatcctaggttccctacagccatgattcagtttcttttttacagtgtctgcatactgcttgctaaagccggggatttgggggatctaatctcacctctccggggacggtatttttggggcgagcacttttgtctgcggagacaggtcctggatggttcttagagtgatggtgtccctctgtacgtcatcgcatactcggaagtttttcgtgagcccttttctctgtctgaaaccattttgttaattcacagtttactagctatgtgccccacatgataaaagcttgactctgtgtgtgataactgggttttttttgggtttttggtttttttcactattgagtgaacaattgtcatgtgattgaagtatttctattcctgtttgagaaatgaaacattagttttatcccaagccattagattttatctttatctgggttgaccagtaagcattttggattattttgactaattag

SEQ ID NO: 33570 - DNA, 2067 bp, Mus musculus
ccagtctaccaaactcttctccaacatctcagacagagaaacctttgagggggaatccataacaaatgagatagctttctatgccagaacccctccttttattttgcattttttattactttttcattttaaatttctgaaaccatctactttaaaactaaattcatacatggcatctcctcccaagaatgacagcttgatgacagaaattgctgtttatacaattagctggggatgcatttttccaaaagaaaaaaaatacctattcaataaatatagagatttatatgatgcattttttccctgaggctttcagacaagatgtaaaaagaaacagtgaggtaatgagactaaggagaggctgcaatgatggtatgattatctcaccaaggtgtgcctagctctggcaagcttagccccccccccaggttattactcttccaggactcagtgtcagtttggtaaggaaggaaggactcacccctgacagtttgcgatcactttagaagccttcttgctcccactgtctgaaagccttttactccctaatcctaagaatttacacagagagctgacaacatccttttctgtgttaagcaaggctttcttctgcggcaaaaactcatcttaagaaaatatttctatttcagagttaaaacagcatttggatcttggtggtggcacagcctttaacatccacacttgggaggcagaggcacgtgaatatccatgagctgcgaggccatcctggtctactgagtgagttccaggacagctggggcacagcctttggttcaagttattatttctgtgttaattcatgcgctcttctcagaattctttttgtcaatcaaataaagatcagagttttttcaaggctggtcaagaagactgtacacatgctgtgttcacagactgccacatgcccatccccatccccaggatctctttgaatttttctctttcccttattcagccaaacctaaatatttaatgtgtgagattctgttttgatgcaagtggctccgtgccaactctgggttagtaccccgcctgaggacatgaaccaactcttatagactatggagagagatgtctgcaaggatgtcagtctcacttgtaataatcaataggctttttgttttttgttctggtctttaaaccagcatctgctagatcctcataataaaaatggaatgggcttctccaactgtatttttttcacctcttcagatttgtgcttgaagatcaatattgttgctcacttgattgtatctcatcatcactagtcagttttccccataggctccttttaatttgctgaaattagctgcaatcagagcttcttatgcttgcctgtaaagtccacattcaaagtaaaaatgtgttcctctctcaaaatagtttaatgcttttggatacagcctactcactaccaaaccctgcacatatgcacacacagacacacaaaggaaaaacccaacaactctggtctcccttcccatcagagcacaacactgttcacagttgttagtaaaggaagaagagtgatgctcaagatggtctatcagggttgttgtttggtcagtgcatgtgagctagatttaaacagggatagattctcattgtaaagtgagttaatattaggattaaagggatatgaatgtgatgctctgggtagttgggtgtagccatggtaataactcatattttggagaactctcttgtttttggagagtgtgtttaaaaaagtaaagaaaaccagaacaaaatagtatactccacaagtataaaagggccatatgcttattgtcatgatttgctttctgttgttggggtttccttccaaaagaaacttggggagggaagggtttatttttgcagtccatcatagagggaacccaaagagaagttcaagcagaaattgggagcaagaatagtagcagaggccatggagaaacatacctctatggcttgcttttttaaaaatgtatgccaggaacacctgcttaagagtggtacctctcacaaggcttgggattctccaacattaattatttagcaaga

SEQ ID NO: 33571 - DNA, 1205 bp, Mus musculus
ttaaaaatttaaaacatcacatctccagaagttggaggacgacaaagtccgagtcgtccagtaagcttgcagagactgatcgcggttctgccctgcaaaaacccgggcgggcgacacagactcgttgcgaggagtttcagctgcagaagaggaagagcatcacctgcagtccgaggcgtgggaaacgctgccggacccggtatttccgaagcccgggaggcgagcgccacggggggccctggctggctgattccgtggtgagtgcgaagaagccagcactcggcggagccccaagactccgcggggaggaaagggacggacatttcttcctgggacggctgcggccacggagatcactgcaacggggaagctggaggcagcctgggcgtccttagctgcaactggctgggaggccgaatgaagtcggagaacccggtcagctccggggagtcgggggcgaggcggggctctgacgtcacctcccctccccccagccgctcctagagggaggagtagggaaaagaagcagagagatccgccgcagttgccagccgtaactcctcaactcggcagctggctgcctggacatgtcctgacaaacttggcttcccctcggcgctctccccagacctcgtgcgctctctctccacctcttttggtgctcaaactttccccgggtcgagagccacagagaaggcgcccacctgagtcccgccagcactggaggaggatcgcgctctgcttggggatatgctgaagatccaagggaggcaaagttggtacttcgagcccggatcctaacaaatatccaaacggcgtgggaattacccaactgccggggactagaagggagagcaccgaggaccgggctactgtggtgagttctttgttcattgcatgcctggtagaattgaagttttaattgtaaatgaaataacgtgggggtgtttcacagtaagcgagtggggaaatcatgtgtatcctacaaggtctgcgctcaaggaactggactgcccgcggccttcacggggcgcgggaatgaaaggcaagcatgcgcagcttttggaattcacaaaatacacacagagcgctgttcaaaagaacttgagaagtgaagccgtttgtgcattattttcagtgtaacttgttatagaaatggtgccctgggagggcgcgttggggactgagtgatctgcagtggcgca

SEQ ID NO: 33572 - DNA, 3135 bp, Mus musculus
gtttggagacagtgatggcagccaaagacttgaacccacccctcctatccagtttacacacttccagtacaatgtcactgtgcacgagaactcggcagcgaagacctatgttggccaccccagaaagatgggcatctacatcttagacccctcgtgggagataaggtacaaaatcgtctcaggagacagcgaaaacctgttcaaagcggaagagtatgttctcggagacttctgctttctaaggataagaaccaaaggagggaataccgccatcctgaacagagaagtgagagaccattacacgctgatcgtcaaggcagtggagaaagccaccgatgctgaggcccgagcgaaggttcgggtacaagtgctggatacaaacgacttaaggcccttattctcccccacctcctacagcgtctctttgccggaaaacacagccataaggaccagcatcgcaagagtcagtgccacggatgcggacattgggaccaatggcgaattttactacagttttaaagacagaactgacgtgtttgctatccacccgaccagcggcgtcgttgttttgactggcaggcttgatttcctagagacccagctctatgagctggagattctggctgcggaccgggggatgaagctgtacggtagcagtggggtcagcagcctggccaagctgacagttcacgtggagcaggccaacgagtgcgcgcccatcataaccgcggtgacgttgtcgccctctgagctggacaaggacccaacctacgccatcatcaccgtggaggactgtgatcagggtgccaacggggagatagcgtctttgagcatcgtggctggcgacctccttcagcagtttaaaacagtgaggtctttcccagggagtaaagcattcaaagtgaaagccgtcggggccgtcgactgggacagccatccttacggctacaacctgacattgcaggctaaagacaaagggactcctccccagttttcccccgtgaaagttgttcacatcatttctccacagttcagagctggccctgtcaagtttgaaatggatgtttacagagccgagatcagtgagtttgcccctccacatacacccgtggtcctggtcaaagccattcctagttattcccatttgaggtatgtttttaaaagcgctcctggaaaacctaaattcggtttgaatcacaacacgggtctcatttccattttagaacccattagaaggcagcacacatcccattttgaactcgaggtgacaacaagtgacaaaagagcctccgcccgagtggtggtcaaagttttaggtacaaacagcaacccccctgagtttacacagacctcgtacaaagcatccatcgatgagaacgcgcctatcggtgccgcagtcacgagggtgagtgcgatggaccccgacgagggggagaatggctacgtgacttacagtattgcaaacttaaatcacgtgccgtttgtcattgaccacttcacgggaaccgtgagtacctctgagaatctggactatgaactgatgcctcgcgtgtacacgctgaggatccgtgcgtctgactggggcttgccataccgccgggaagtcgaagtcctcgccacgattactctcaataacctgaatgacaacacacccctgtttgagaggataaactgtgaggggaccattccccgagacctaggtgtgggggagcagataaccaccgtgtctgccattgacgccgacgagctgcagctggtccggtaccagattgaagccggaaatgagttggatttgtttggcttaaaccccagctccggtgtgctgtccttaaagcactccctcacggatggcttgggcgcaaaggtttcctttcacagtttgagaatcacagcgacagacggagaaaattttgccacgccgttatacatcaacctaacggtggctgccagtcgcaagccggtcaacttgcagtgcgaggagaccggtgttgccaaaatgttggcagagaaactcctgcaggcgaataagttacacagtcagggggacgtggaggatattttctttgattcttactccgtcaatacccatactccacagttcggggttactcttccaactggaattgaggtaaaggagaacctcccggtgggtgccaatatactcttcatgaatgctactgaccttgactctggcttcaatggaaagctcgtctatgctatttctggagggaatgatgatagttgctttaccatcgacatggaaacgggagtgctgaaagtcctgtctccacttgaccgtgaagtaatggacaaatacaccctgaatattaccgtgtacgacctcggtataccccagagggctgcctggcgccttctggacgtcacggttctggatgccaatgacaatgcgcccgagtttttacaggagagctattttgtggaagtgagtgaagacaaggaggtgaacagtgaaatcatccaggtcgaagccactgataaagatctgggccccagcgggcatgtgacctacgctattctcacagatacggagaagttttccatcgacagcatgaccggtgtggtgaaaattatccagcctttggatcgtgaagtgcaacctgtgcattacctaaagatcgaggccagggaccaagccacagaggaaccccggttgttctccaccgtgctcctgaaggtgtcactagatgacgttaatgacaacccacctaggttcatcccacccaattactcagtgaaagttcgagaagatctaccagaaggaaccatcatcatgtggttagaagcctatgatcccgatgtgggtcagtcaagtcaggtgagatacagcctcctggatcacggagaaggccactttgatgtggataaactcagcggcgcagttagaattgtccagcagctggactttgagaagaagcaactgtataatctcaccgtgagggccaaagacaaagggaagcccgtgtccctgtcttccacttgctatgtggaagtggaggtcgttgacgtgaatgagaacctacacactccggtgttctccagctttgtggagaagggtgtagtgaaagaagacgtccctactggctcatcagtcatgaccgtgtcagctcacgacga

SEQ ID NO: 33573 - DNA, 1101 bp, Mus musculus
tctcaacgtaaatttccaagcctataaggagctgttagaagttaaagttgagtcacaaaatataatttgagccttaatttgcattctcttcgtgacttaaattatgagcactgccttttggctctgtctttttttttttttttttttgtgaaaatagtttgctttttaaaaaggatcacatagaaactggtatttttcacctataaatgtaagggatggggttgttcccgctgccaaatggggagaaggagacaggatggatagcatcctgaaataggtccagagcagtgtgcagtggccacggactttttccagtggtaatttagtgggaggggaggtgagggaggcaccgggattctagggactgagattggttaccatatgaaagactcttacacacgtctataattatagttaaaggtgagagtggagctagaatgtttctaagtcattattctggggttcttgttttacagagggatagtctccctgggcggtggtatgtgtatatggtttctgagatcctttaaatgatgtactagctagactttgaactgttgtattgaaacaatgtatgttgggcggtaaatctgtctgacctagttattttgtagatttctagccaggagattgggtattaagtgttaaatttcttcaggaaaaccatgtctaatggagtagaaatgctaagattaaggggttagtggtaaaggaaaagcgttggctgtacaagcatgaggagttgaatcctgtcctcaggagacagacacggttggagctctgtccctgggcagcctagccagccacgttgggttcaggaagagaccttgtttaagaatataagatgaagggcctgcaagatggcttggaagtaagggctctctgcacaaggccttgacaaccagagttcagtccctgaaactcagggttcctcgtctccctacaaggaagatgtgggggtgggggaggtagagggagggagggagagagagagagagagagatagatagattgaggaacacactcagtggcctctacacatctgcatatacatgtgattcaagtggaaccacatagatattaacataaatacacacagag

SEQ ID NO: 33574 - DNA, 4118 bp, Mus musculus
tgtgtctctacaacacatttttcacttgagcagagagaggattttggcgttagtcacaaaacaatatatttttttctgttctttgcttttcatatttgacagccaaaattctgaacggtttaaatgggttaaaaaaaaatgaaataaattgaatgtctcattcaactgttgatatccccttcgtttctatttaaattcagggtgtaagttttaaatatctgtttctctgctatttctgttgtccttggctcttttctaataggtttctttctctgactcttttttttcttgcccttccaggaaacattggaaattcttttacaattgaccccatcttgggctctataaaaactgccagagaattggaccgaagtcaccaagtagattatgatttaatggtaaaagctacagacaaaggcgatccacctatgagcgagatgacctccgtgcgtatcgctgtcactgttgctgacaatgcctctcccaagttcacatccaaagagtactctgcggagattagtgaagccatcaggattggaagttttgttgggatggtctctgcacacagccagtcatcagtgatgtatgaaataagagacggaaacatgggcgacgcatttaacattaacccgcattccggaagcatcatcactcagagagccttggattttgaaacactgcccatgtattcattgacagtgcaagggaccaacatggccggtttgtccaccaacacaacggtggtggtgcacgtgcgggatgagaacgacaacccgcccgttttcacgcaggcagaatattcaggattcatcagcgagtcagcctccgtcaacagtgtggtgctgacagacaggaacgttccgctggtgattcgagcgacggatgctgacagggaatccaatgctctgctcgtctatcaaatcgttgagccgtccgtgcacaactattttgctattgaccccaccaccggcgccatccgtacagtgctgagtctggactatgaagaaacacatgcttttcacttcaccgtccaagtgcacgacatggggactcctcgtctgttcgccgagtacgcagcgaatgtgactgtgcacgtgatcgacatcaacgactgcccccctgtcttctctaagtcactgtacgaagtgtctcttctcctgccgacatacagaggcgtgaacgtcatcacggtgaacgccacagacgctgactccaaggcattctcccaggtcatgtactccatcactgaaggcaacattggggagaagttctcaatggaccacaagactggcaccatcgcaatacagaacacgactcagctacgaagccgctatgagctgaccgtccgcgcctccgacggcaggttcacaagcatggcctccgtgaaaatcaacgtaaaggagagcagagagagtcccctcaagtttacccaagacgcctactccgcagttgtgaaagagaactccacggaagccagaacgttagctgtcatcactgcgatagggaacccactcaatgagcctttgttttaccgcatcctcaacccagaccgcagatttaaaatcagccacacgtcgggcgtgttgtccaccaccgggataccgtttgaccgtgagcaacaggagacgtttgacgtggtggtagaggtgactaaggaacacgagccgtcagcggtggcccacgtcgtggtgaaagtcaccgtcgaagaccagaatgataatgctccagtgtttgttaaccttccctactacgctgtggtgaaggtggatgctgaggtgggccacgtcattcgctatgttactgccattgacagagacagtggcagaaatggtgacatacactactaccttaaggagcatcatgaccacttccagattggaccttctggcgacatttctctgaagaagcagtttgagcatgacactttaaataaagaataccttgtcacagtggtcgccaaggacggagggagtccagctttctctgcagaagttctggttcccatcactgtcatgaacaaagccatgcccgtgtttgaaaaggctttctatagcgctgagatcccagagaacatccagatgcacagcccagtggtccatatccaagccaacagcccagaagggctgaaagtgttctacagtatcacggacggagacccttttagtcagtttactattaacttcaacactggggtggtaaacgtcatagcaccactggattttgagtcccacccagcctataagctaagcgtgcgggcaactgactccctgacgggcgctcacgctgaagtgtttgttgacatcatagtggaagacatcaatgataaccctcctgtgtttgtgcagccatcttactccacaaccctgtctgaagcatctgtaattggaacacctgtccttcaagttcgagccacagattccgactcggaaccaaacagaggaatttcctaccagctgattggaaatcacagcaaaagtcacgatcattttcacatagatagtaacacggggctcatttcactagtgagagctttggattacgaacagtcccagcagcacaggatcttcgtaagggctgttgatggagggatgcccgccctgagcagtgacgtggtcgtcactgtggctgtcaccgacctcaatgataacccacctctgtttgaacaacaggtttatgaagccagaatcagcgagcacgccgcacacgggcatttcgtgatgtgtgtgagagcctgcgatgcagacagctcagacctagacaagttagagtactctattctgtctggcaatgatcataaaagcttcatcatcgacagggaaacgggaattatcacgctctccaacctccgccgccacaccctgaagccgttctacagcctcaacgtttcggtgtctgatggggttttccggagctcggctcgggttaacgtaactgtgatgggagggaatttgcacagtcctgtttttcaccagaacgaatacgaagtggagctagctgaaaacgctcccttgcacaccctggtggtccaagtgaaggcatctgacagagattctggcatttacagccacgtaacttaccacattgtaaatgactttgccaaagacaggttttatgtgaatgacagagggcagattttcactttggagaaacttgaccgagagacaccggcggagaaagtgatctcgatccgcttgatggctaaggatgctggggggaaggttgctttctgcaccgtcaatgtcatcctcacagacgacaatgacaacgcacctcagtttcgctcaaccaagtacgaggtgaacatcgggtccagcgctgccaaagggacgtcggtcgtcaaggtctttgcgagtgacgctgatgagggatcgaatgctgacgtcacctacgccattgaggcggattctgaaagtgtcaaggagaacttggaaatcaacaagctgactggcctgattactacaaaggaaagtttaataggtttagagaatgagttcttcactttcttcgttagagccgtggatagcgggtctccgcccagagagtctgtcgttcctgtctatattaaaatacttccaccagaagtgcagcttcctaggttctcagagcccttttatacctataccatctcagaagacacgcccattggaacagaaattgacctcatccgggtagaacatggcggggctgttctttacatccttgtcaaaggcaatactcctgagagtaatcgagatgagttctttgtgatcgacaggcagaatgggagactgaaactggagaagagccttgaccatgagaccactaagtggtatcagttttccatcctggccagatgcactcttgatgactacgaggtggtggcttctatagatgtcagtatccaggtgaaagatgctaatgataacagcccagttttggagtccagtccctatgaggcatttattgttgaaaacctgccagggggaagcagggtcatccagatcagagcatctgacctagactcaggagccaacggccaagtcatgtacagcctagaccaatcccaagacgcagacatcatcgaatcttttgccattaacatggaaacaggctggattacaactctcaaggagcttgac

SEQ ID NO: 33575 - DNA, 1454 bp, Mus musculus
tgtcttggtggcacttgggctactccttcccaagcaggagtgtgactcagtgtccatatgagtaagggacaaaacagttgtccttttcctcactgggcttcatgacaagaaatgaatgcctagcagttgatatatgggcagaccagaagtgtactgcgtcatgcatttttattaggagattgcagtaacgccagaggcgacttctgtctttgcaggtggctgacagcggaaagcctcagctgtcatccatgacacacattgacatcagggtgatcgaggaaagcatccaccctcctgccatcttgccgctggagattttcatcaccgcctttggagaggaatactcaggtggggtcataggaaagatccacgccaccgaccaggacgtgtatgacaccttgatgtacagtctggatccccacatggatggcctgttctctgtctccagcacggggggcaagctgattgcacacagaaagctggacataggccagtaccttctcaatgtcagcgtgacagatgggaaattcaccacggtggccgacatcaccgtgcacatccaacaagtgacccaggagatgctgaaccacaccgtcgccattcgcttcgcgaatctcaccccggaggagtttgttggtgactactggcgcaacttccagcgagccctacgcaacatcctgggcgtccggaagaatgacatacagatcgtcagcctgcagccctccgaaccccattcgcatctggacgtcttactctttgtcgagaggtcaggcggcacccacgtttcaacaaagcaacttctgcataagattaattcttccgtgacggacgttgaggaaatcattggcgtgaggatcctggaagtgttccagaagctctgtgcggggctggattgcccgtggaagttctgtgatgagaaggtgtctgtggatgaaaacgtcatgtccactcacagcacggccagactgagtttcgtgactccccgacaccacagaacagcagtgtgtctctgcaaaggtaatagcgcctatgtatgtggagaagagcgtgaaagactgtggtggggggcttagcagttaagaacccactgggctactcttccatgagccttaggtttgatttccggcacccacatagtggctcatgaccatctgtaacttcagatccagggatgccctcttgtgacttcaagggtgtcaggtacccaggtagtacatagacatacatgcaggtaaaacacacatacatattaaactttaaaatggtaggaggaggaggaggagatgatgatgatggtgatggtgatgatgatgatgatgatggtgtcaggtatccaggtagtacatagacatacatgcaggtaaaacacacatacacattaaactttaaaatgttaggaggaggaggaggaggaggaggaggagatgatgatgatggtgatggtgatgatgatg

SEQ ID NO: 33576 - DNA, 1767 bp, Mus musculus
cctgcacccgatgaactgccaccattgcctccagagttcagcgaccagttcgagtccatacacccacccagggacatgcctgcagcaggtagcttgggatcttcctcccggagtcggcagaggttcaacctgaatcagtacctgcccaatttctaccccgccgatatgtccgaacctcagaaacaaggcgctggcgagaacagtccatgtagagaaccctacaccccctaccccccagggtatcaaagaaacttcgaagcgcccaccatagaaaacatgcccatgtccgtgtacgcctcgacggcttcctgctccgacgtgtcagcgtgctgtgaagtggagtctgaggtcatgatgagcgactacgagagcggggacgacggccacttcgaagaggtgacgatccctccgctagattcccagcagcatacggaagtgtgacgctcaaactcctccccaaagtgcctggactttcatgaacctagagatgctatcggtgacatccgccgttgtgttgttcttttgcagccgtctgggccgcttctcggtgagccgcggtaggcgtggctgcacggagtcacaagcctcttgacatgttagccatttccagcgtcctaactgactgtaatcgaccgggttttcatcccctgtcccatcccctgagcatcttttcgtatttagatttgtctctgttaaaatgatgaaacggaaatcggtcctgtcgtcttgttagcatgattcatgtatttatatagatccgattattttaatttttgctttctttgtgtaaattttatgtacagatttgattttttgtttttttttgtttgtttgtttgttttcccccctctcctagtttttacctaggttttcaggacgcctcgtgtttttgttttctgctggatctgtgtggtggtgttagcgtcgtttgcctagcatctgattttctgatgtaaccagggtttcacgctgttcttttcctctgaagtatgacatttcattgacacatttcggtccagtgtagctgtacatatggggtgtggacgacctgttactggacatgtcttattaaatgggttgctgtattaggattataaacatttttcattattggaaagtgtgaaggggaccttctgcatacctgtttagaaccaaaaccaccacgacacggtttttatagtgtctgtatatttgtgatgcaatggtcttgtaaaggtttttactgaaaactatcattagccagcctttcttactgacaataaattattaataaaatactttagctttaatgcctggttttcttctgcatttatattgctgtttatgatctacctggtaaattgaaataagggagatcaatatgatataaagtctctttacagttggaaagccaggccaggccaggccaggccatacttatatattagccactaggtggcagtatatggccaataaatgttctaatggccatctgggtgttcagtaagctctatactctaccagcttccctagcgctgggattgtagttgcctgccaacatgcccatttgtaaaacacatgaattataattgtgtgtgtgtttgcacacacacacatgtaaagtcatgcagtttttttttctttttttggttttcaagacaggttttctctgtagcctggctgtcctgcaactcactttgtagaccaggctgacctggaactcagaaatccgcctgcctccgcctcccgagtgctgggattaaaggcgtgcgccaccacccctggcac

SEQ ID NO: 33577 - DNA, 1343 bp, Mus musculus
gcagtgctcggcagacagttgctgtctgttggcgtctgagttcacagctctgcacgactgcatgctttctgttatttcaccaaaagaacctgttttctgttcatttttctgattagaattaacatcagctaggtgtgggggtgcatgccaagcggcccatgtgggctacctgacatgttgtctcaaaaaataaagaaaaaaaaagcaaacccaaataataagtaccaatatataacgtggcaggcgattggctgtttctcctagcatgggataaatcaggtttgtgtagtctggtttctctcggtagccacctgtctactgaggatgatctccgaactctcagtagatggttctctcagacagacagacattttgagcacatccttacagcctcttgtttgcctttctctctgggcaggtgctgatggagctgctgctgacagagctctgccctgagctgagggctcacctggatcagttcaaagctggccaagtctgagagcgcacagagcagccgccagagaaatgtctgtgtaaaaatagacattaaatattttcctcttttgcacagagggcctgacaagaaccatatgatttttatttccgagcctccctctagctgtacgtgaagtgagcagagtcagagggaggaggacagatgctgtggtaggcaatagaaatcagactttaaaagctcaacatgttgattgaaatacaaatgttaatatgtgataagaacataggaaatattttaaatatttatgaaaacagttttgttgttaaatgacaaactcagaatattgtacagttaatctcctcactgaggattctgaacattcctgtgtctcacatgtattgaagaccactgttgtgcaatgcttgatgtaaagttattgtgaaacttttattgtttttatttttaccaaagatttcccatagtttgaagcatttgaagcaataaaatataaaaatgaatcacagtgctcaaaggtattatatggcttgagctaccaaaggagcttgggccctgtgtacctcagatttgctgagagccttttcagagaaagcgttgaacactgagaacttcggcaagaagggtaacatttgctacctgagttttagtacatggaaggccagtctggtgaggccctggggagataggatgtgagctgagcctcgaagcattaggctcaaagcagaagggggaagttgcttcctggagttgaaacttctgttagatccctaagtctttgcactctgaagtgttaggtgaggtccagggtctgtactatcccagtgatagtgggaccatagactgaatatcactgagtcaatattcttgg

SEQ ID NO: 33578 - DNA, 1237 bp, Mus musculus
tcagctgcttggtttttggggagctcttcatcctgccctgtgaaagctgccatgtctgtatgtcagtctccatagaccactgtcagccactgagagtctggcctcattgcactcaagtgtgccagcctggtgcctggcatataggaaggtttgaattgaaatatgtagatcaggaagtgagactagctcaagtgtatgggaaatgcttgaaggagaactttaaaaatatctcaattactttaaaatgtgcatatttttaagagcagtgaattaaaaaacattttggttaaaagtcaatatgcaaaaaaaaaaatctcatcatctctgggaaactgtattacaattccctgattatttaaagagtgttccccagccccaccccacccccaaccccagttagcttatttcaagctttgaatctggctgtagagtcaggctgtcccctgaggttggacactgatagaataagggtagggtggaagtgggagtttggggtctgtacgtgaaccgactacactttcctgggttcgtgacctgctgtctgcgatgttgcctgtccctcaggaggagatagaagaggacagcgacctgtccgattacggggatgatgtggacgggaagaaggattccttggctgaaccgtgtttcatgctgatcggggagattttcgaacttcgaggaagtaagtctctttgatggcagtgggatttattgatcattgctctgcttccagcatgtattaaatgtatctgtactcatgtgttcatgcatccaagatgcactttaaagatgcttcaggtgttacacttcatccttggtgctgaaggtacagccttaggacagagagaacttctatattcctgagacttgggttcctgctgtactcagcattgtgctcctctgtgttaaaacagagacaatgctttgaactcttttcgtgtggctcagtatagtttcattgtctcatcaccagaacttactcaaaaaatgatttgcatagcctgtgattaaagatgcagttttgatgccagggtagtgttttggatatatatcatatattataaatgtataagatgtataatatatgaaggctgagtgtagaatagtttcagtaactaaagttatagagtaaataaactttagaaatggaggctagttaaactgcttaagaaattagtcaaatattaaactctttcagatgaaagattttttagccttgttgtaatttagattcttc

SEQ ID NO: 33579 - DNA, 1184 bp, Mus musculus
aacctgggctctttgcaagggtagcctgtactgttaagcactgagccagctgtccagctcctgctccaactgttgatttttcttcactgccttaagatgccctccccctccagaattcttagttgcttcacataggaagattagtctgatgacatgtatcatcatctctgcagctgctggagaggtggctcagtgcttaagagcatttgctgctcttgcacaggacttgggtttggtttcaagcacctacagggtggatcccagccatctgtgtaactagtgtcagaggatcttatactctcttctggctccatgggcaccacacatgcacatggtgcacagacagacttgcagtcaaacacccacacttataaaataaaaataaagctttaaaaatgttttttttaaaggttgcttctacagaccatgctttaactgtgtgtctgaaaactgaccactgtttcactgtctcaggtgccacatcctacttgctcatcctactcggacattcaagttgtttccactcggggccattgtaaatgccaaaactctggtgccttctaaattttgtaagacctaaaatgtctttgcagttttttgagcgtgaccctttttttctcttgggtgggccagtttgtttgagcagcctttgtgtgggcaggcttaggagaaactgaggcctacctgacagaaacaggtgccccattgctctcagcagtggcttctgtgaaagggaagtgccatcatagcctttgcatagaagttttgcttaattattatttggtgtttttaaagcactttgatggtttgctttcttttttaaacttgtttttattaatgtttcacttatatgtatcatggagattctatgtagtatttcatcttattgtacagttggcactaactaaatccagcccttcccctcctggtaatattctctgtgccacactgaggttgacctttttttgtgtttttctctttggagctcagcttctgttatctgttagacagcattgttaagcagcttcttaagaatcagaagtcctttgttttatataagatgcttttcgggaaattgaacatcacatcctctaccaaaataagagctgctggcggctgtaacaatagattctggagtgcagtttacgagtttggcagcagctgataacaacagtaacaaacaa

SEQ ID NO: 33580 - DNA, 1194 bp, Mus musculus
atatggcttcttcatttctttggatttgaaaacattattattattttttctttctttttttctttcagattttttattagatttttattagattttttattagattttctttatttacacttcaaatgttatatcccctttcctagtttcccctccaaaaatcccctatcatttcccccgtccccctgctccccaacccacccattcctgcttcctggcccctgtactggggcatagaaccttcacaggaccaaggacctctcctcctattgatggccaactaggccatcctctgctacatatgcagctagagacacgagtcccaccatgtattttctttgactggtggtttagtcccagggagctctggggttacaggttagttcatactgttgttcctcctatggggttgcagctccttcatctctttaggtactttctctagctccttcactggggaccctgtgctccatctaatggatggctgtgagcatccactttttgtattagtcaggcactggcagagcctctcaggagacagctatattgggctcctctgtcagcaagctcttgttggcatctgcaatagtgtctgggtttggtggttgtttatgggatggtccccaggtagggccgtttctggatggtcaatccttaagtctctactccaaactttgtctctgtaactccttccacgggtagaatacattattgttgaggccaaggcagatatgattgttttgaaagaggcagagttttgagaaaagtgagaaaattgtgggatcatagaagatggtcagacactcagactctgtgacccttgtgtggctaacaaggcgggtgcaggattgtatttgcttttgtaagataggctaccattgcagtagcctcacaggaaatacacccatcacccctgaactttgtgcaacctttccttcctttctttccatttttcacccttcttttttctcacctactgtctgtctgtttgtgcttagtttgtctgtggcttaagtagcccaggctaacttcaaactagcattgtagccaaggatagccatctaataaccctccttttgcatccacacactaggattatagtcatgtgtctctatgtctggtagtttttctttttaacttaaactaaactggagtacattggagaacacttaaaaatctttgtaccctggttag

SEQ ID NO: 33581 - DNA, 2888 bp, Mus musculus
gtgacaatctgtgttgaagccaagacactcactatatagctcttaatctatgtgattttcagttatcataagcgctaaacacggagcttgccttgtaaacgtgcacctgtgcttctgtctgctctacgttgtctgtaactcgagtcctcacgtgcttatgtgagtgttagactccttatgaaaacgctttgacgtctgcttccatggagaagctgacttagatttgatgaggaggtgaggagcttgtactgtgcaatccctgattcaccaaagacacttctgaagagtctgactctccacccacaccatctcacactgtgagtaacagggttcacttcagaagctgctctctatgccgtctggtaaaatactcttaaggattctgaggcaagaggtaggcttgaacagcctcatgtcttgtgagttgtgactggtttgtatccagatcacttgcataataaacaaaagcaagtatttgttggatcagtgagcaacactctgagcttgaagaaccagaagcgcatgcctagagtatgttagagcagtgttggaaatgacactgttagtcactgtgtgtgctgctgttgtgtatttattgtagtaatagaaggcttagagcaaggaagaaatgctctagagaaaccaaatagaaacaagaaagaaagtaatcacacattgcctaaagctattgccttgatgctagagaattcccttgctttggtttggctgaatcctagaagcaccattcttaccattctcacatttgaaggtctgttaatcctcatggaattgctagtgacacataggtgtgaaacagttgactatgaaaagtagaatagtttcctgtcaacctagaggctgttcttttatagagcaaagtgtgtgacatttcatagtcataaccttttcattgctggtcttgtcagcatgtctttagtagatatatgtaagtttcatattcaatgacacgttttgcttaaaatatgagttttccctagccacagagagatccgtctggtgccagtgctccagcactgtggcatgtgtaccacacctgctccatcttccttagcagggaggcggactgcacttagcaaacaaacaccagggcatacattgctggtctccctttaatagacggtgtttcagatagagcagcgaagggagaaaatgctgaggccaaaacaatgctgagcacatatagcacacacacagaccgcacacgcacgaacacacacacacatacacacaaacacacacaaaaatgggtcggaacacacatgactaccggtttcccactgcttttggagggctgcaacattcttcagcagtttgtctctttgttctagtgaacaagattttatccatgctttatatgcctcttagctgtacaaacaaagggtttattttgtcttagtttttaacactgcacttttaatgtttttgtaacaacttaaatttaaaatgcagcattttggcattttcccagtagtgaattaatcacttgaaagcagatttttgtggcggaaataaatgtgtatatataaaaccttttatgttcacagcggcattagcctaggaatacattttatttggtttctccaagtttcatagctaaagctagaatttgattttaaatgctaacttatgtcttagtttgtactgtttggaagaagcttatctaagtattactgataacaaaggattcaacttcaagtaaaggacaagcatcttttaaaatccacttagcatgttatgtttaggtgcgtatctggcgactgtagagatgggtagggattacaaacttagcactcactgatggaaggtaggatttaggaggcatttgcagtggagcagtcatgagtacgttcatctcttcagcctcacctccacaaatctgtagggttagcactgttgcatggctggctggcccttagcacacgtgctcggaagatctgcatctgcagctagacagcgggcaggtctgctgactcgtagacagatctgaggacagttttcatctcgattgaatgttacctccttctctagtaagtttttgtgaaagatttcagactattaaaatgacttcttaaggagtagctactaccttaccccctcctctcagtctccatccaaacccactctcacggctactccactaacgctgtgctttgcttgtaaagtaacaccatgcagttgtgcgcaacccaagtatcaaaagcagctacgcggctctgaaaggtgattgtgataggttctgcttctcatctgcagatacaatgcagcaactccaaagtattaagattacagtaaagctgaagacgcacctttgccctggttagcaacgcaaaacctgtgtcgtcgtaaatgccaaagtcttagtgtgtaaatgtctgtacaccgtcacagcgaatgagctcactgctaatggccgagttgcttattttcatgaataaagattagcaagaaacttttaaaccatctttttaaaaaatgtcctagtttgttatattttaggcatgaagaactagcttggcctactgaagaaataaaagatttaagaagaaccaagttttgattctgttttgttcatatttttagaattagaataaaacattctatgtaccctacaaaactattagttagaatgaagttagcagttagctgtagttttgaaaatgtggtacttctctgggaaagtgtgtttaagatggtgctcctggtcagctttctttgaatcacgtgacttgattcatcttgtgaaactgtcaccatgctatagtacagtggacattgctttcgagcttggatgagtgctggttttgctgggctgttttatctttagagagggtttgatgatgctattgggctggaggtagtaactgacc

SEQ ID NO: 33582 - DNA, 1448 bp, Mus musculus
gggggacattcgagtaaagcagggacattgtcatctgctcaccatgttaagagcccttgagggagggatctttattgccattccccataagcctgcagggaatttcgctcaaatgtccttataatgtcgagaaattggactgctttttagcttagtcaagtaactaacatttattggtatgttcttggtaactgatttcctgatacattaaaaaacaattggaattctcccttgtcacttgaaagtgaaagatgggcgaggaaccctgggcatagcagtgcacatttataatcccagcatttgggaggcaacacaggatgattttttagttccaggctagcctgggctatataggatgaccctatcctttcaaaacaaaaataagaaaaactgaggaaatacaaatcctttttccccctctgtcttcccttctctctgcctgtcctctgccaccccttcctccctcccaccccaaactaggtccagcatgccagcaaacagatcagtgcagagaagcagtacaaaggcatcattgattgtgtcgtgagaatccccaaggagcagggctttctctctttctggaggggtaacctggccaacgtgatccggtacttccccactcaagccctgaacttcgccttcaaagacaagtacaagcagatcttcctgggaggcgtggatcgccataagcagttctggcgctactttgctggtaacctggcctctggtggggcagctggggccacctccctctgcttcgtctacccgctggactttgctaggaccaggctggctgccgacgtgggcaagggatcttcccagcgagaattcaatgggctgggcgactgtctcaccaagatcttcaagtcggacggcctgaagggtctctaccagggtttcagtgtctctgtccagggcatcatcatctacagagctgcctacttcggagtctatgacactgccaagggtgagaggggggctttggggtggaaggtgtggggagggggttatggagagaggattctgtgtgatctacccttccatgatgacctttgtgtgttagttgcctttcctacctctgagctaacctgagttctgaggaggtaatgtgatgtggtttggataagttagtaggtaaaggagcctctgtctcccgtactggtaaatactgtggctttgagctactcaggaggcaaagcctccctctaacccaacacagctgctagtctctcagctgaactagaagcaagctctgtgtcaatagagctgtagcttctttggattaagggaaagcggcagccaactttgcctggttgcatgtaagggggcctcgggggaggagctggttcttgtggaagggcagggtatggcgttgggtccgtagccttgtcttccgttgacctgcttttgaagcacctgatagccatttgcttcttggctctgctcac

SEQ ID NO: 33583 - DNA, 1215 bp, Mus musculus
ctcacatggtggcacacacttgtaatcctactacttgggaggtagaaatgagaggatcaggagtgtaaggcctgtctcagccatgtagctagttcaaggctagcctgggctgcaagagaccctggtctcaaagcaaaaatcaaaaccaagtttaaaaaaaatatggattgaagtaaatggaaattagatttcttgttagcttttgattttcagtgactgactgtatctgaccttcagggaagatagctcctcaactgggctcaggcagccctggaaaggaataacgttctgggagacaacctatagtattaccagataatcccacaggcctgcggtgcagggaaagtaatgagccacttgtctgcattgtaggcctttctcatagcagttgtggtacccgacgttgagagcctaccgtcctgggcacagaagagaggcttacaagggtccttcgaagaactgtgcaggaacaaggtgagcctcagaagggccgcagccaccttccggctctccactcggtcctcagaacctgtagatgggagagaaaataatctgatttttttcctattaggatatcaataaagctatcctggacgacttgttgaaacttgggaaggaagccggtctgaagccatttgaacaggtatggctttgatcatgtgcacgaattcagtataggacagagtctgacttgaagattttttaagatatttgcttatgtattttatgcatttgcatgggtgcgtgcatgacagaagagggcatcagatcccattatagatggttatgagccaccgtgtgattgctggaaattgaactcagaactcaggaagaccagccagtgttcttaacccctgagctatctctacagccctgacttgaagatttttaacgagtagattttagaggttgaagagtggacctaaagaaatactaggaatagtttgatgtaaagggatttcttttaaagatttatttgtgtgtgtgtgtgtgtgtgtgtgtgtgtgtgtgtgtacatatgtgtacaagaatacaggtgccaaagggaacctcgtgttctggaggagcaggaagtgctcctgaccgctgaccatctctccagggcccgggttcttactcaataagccacttctctcttccctggggttaccacaccgtcctgaagtctgtcccaataggacccacatccactgcttgagaaaacatggtgaagtg

SEQ ID NO: 33584 - DNA, 2110 bp, Mus musculus
tttagacttcttagacaacgtctgtgtgtctgaccttgtgtgtcccttccacgttaacagccatgtttattcgcaggtcaaaggcattgctgtgcacccggaattattttctattgacaacggccttctgactccaacactgaaggcgaagaggccagagctacggaactatttcaggtcgcagatagatgaactgtacgccaccatcaagatctaacgtgaggaaggatacttagaagaaatggcgcatctccacaatcctcctcgtaccaatggccttcgagttggtaactttgcctgcagcgagtgtgggaaaggaaatgccctgccgccggacttgtccacggggtcttaccatagggatagtcgagggcacggaacactgccttacttacagtcacctgtgttgcagcccatgatcccggggacacacaatttccaaaacgagccttaaacattgtaaaggggaacccataaaagtgctaagttatttaagacttcttcaaccaataaggtggatgctacaagttctgtctcctgtttttctaactgaggggttaggacttattctttctgatatgtctgctgcttgctgcgcgttttgcagctgtctgctgctctgaagagcaccgtacactggaggaaagctgtccctttaagaacaactgtccaggctgaagaaagtcacagtggaccagaggttttccttttgaacccctcctcccccttgcccctttccctcaccacctcacatacagtacactcacatgacctttctggtttgtaagggttccacacggtccctgtttgcgcctgctggaacatgaggttttcagtaaactaaagagcagaccctcttcagaacatgtgggtgtccagtctcagaaagaaaaaaaaaatggcggctcactcaaacgttctcagactcctctccaaatctggtctcctgcctccctccccctcgtcccaggggttataagaaatcctgccttagactctgcaatgaagatggtatttcaaagaacgccctggagcggccatgctcaactgtgacatctccaccgctctccacctgctccctcgtggaagcagcccatgttggtaatggccactgggctccctcgtggaagcagcccatgttggtaacggccactgggctccctcgtggttttcctggcaaatgataatgcggtgattaccttgctttttttcccctcccagttaaactcaggcaaagcatgtcttcaaaactatgtagggagctgatatacatgggtacttattaaaatggacagtaacaagtaaatatccttattatacaactacctgatttatgtgaaatgcatttgacaagccaaaaatctgggatgaagaaatctgaggggaataaaatcataccctgggattcacttcccaaggtatatatattttttaagttaatttgggaaattaacagcatttcactttactgcaagtctttgccacatccgacctatccaagctgttgtttatacatttgaagccactgttgttggctgtgtgacagtgcgtgtgttattgaagcacaactgggtttgcactaaagaatcatcattgtaataacactatttggtagcctaacttcatactcgtattcttaattgcacaggaagtcgctaatttgtcacaacggggttttgaatgtttgctttcagtgttggctatttctatgttttataaaccaaaacagaatttccaaaaacaatgaaggaaaccaaaataaatatttctgcatttggagtgagtggagaatgtctttcaagtgccttgtgatgtttgggacagccaaagtgtgcgccctgaggaacagcagcctcctggggactctgcatggcttctttcctgttcctgatctctctgcagcccagtctttctatgacccttcagacactgtacattaccacttcaccagctcatctagtcacagcctcccaggcctctatgaagagcatcatggtagagactgtgtcttagagatgataaaggctctcttctctctcccttatcacagagctgatttgcttgaaatcgctgtttgtagtaattctctttcttgtttacagcagccttg

SEQ ID NO: 33585 - DNA, 1107 bp, Mus musculus
atcctgggaaggtgtcttgaccacatctccagcctctttatgagctgctcccaccccctgaacagttttatgtacaattttatcaaggtgtttttatttttcatagaggagtagagagtcaagtcattgagtcataaaatataaatctcccaatttcccaagtattgtaaacccctactgtatgctattttgtttaaaaaatggtactgaaaacagaaatagcaatgtcatggggacctgtgtaataaagtttaatgtggctgtaaagaggccccattgcagcacatgacaggtgcacccctgtcccaggaagcaagggggtgacacaggcagggccggcagactgccctggcgcaggaagaggcggttgtggctctagctgtgtttacactctggtggggctgcttttgttcagggtttcagagcctgggcctcgagccaggttacagatatcgagtgtataaactgacaatgtgcttgatattctagatggttctgaaagtatgcatatctggtgtctggaaggaaagagacagagtgacataacggagttggatgttattctgtctgtatttgagaaaaccttcctggagtataagtaagtcccttgatgttggcactggtgggcctggtcagctgtgctcggagtggcactgggtgggtccatccctgttcccgatgttgtcacgcgtcagatgattctgtgcgttcattagagtccctttgcgtacattaattatgctagtgcgagttgttggctcatctattctcgacttcctcgtagactttgatctagaagtgtgtttctccagtgctgttggtttttctcagtcaggtggtgtatggcaagtatggcccactccagtccctgttagctcccatgagagcagcgatggggaagagcccacggctgcatagcctgcgtcactcatggcagagagcagccgccacatcagggcttcactcttgtgctaggtacacacaccccttcagttgtctggtccagcctcgggtggggaaagttgaaaaaacagcccagtcagtcaggtttggcctatcttccaccagcacaaatctggctttgttctctccttttttttttttttt

SEQ ID NO: 33586 - DNA, 2040 bp, Mus musculus
caggttttggcccatctcctctcctctcagaacataactgctaataccacaccatgaggaactgctcgacaaagctctcacagatctctgtaccccaggtaagaccaattggctcaaagaactggcacctacctgactaaacatagcaagtcacgcctcaaacttggactagacaagtgtgttggtggagtgctgtgttaactcaatctcatctattttaaaacaaatttctaaagcaagtttccttttacttcaagaacgaatggaatgagaacaactggcctgttaaagtctataacaaaatcatctcaaagatctcaaaggtatcacgtaggaagtgaagttacctatggggccagttatgccttaaagcttgccaatctaaaggtctacacataaaattaaaatacaaagccaacctaaattacaacacagaacccaactcatgacttaacaaccaaaccaaacttcctgttgcaaactatctgaagaaaattaaattcctcctaagtaagttaccacacggttgacagcttgctgataaatgtgcttccacggtattttcctgtgatgagaactgagcagaaaagctgtttggcggtgggactgtttgctgccacacacataccatgttttcagagaagtcaacccaacacctgtaggatagcctacttgcaagacacccaagcacttgctctagatctaagagaagtgggaagagttcacttggagctgcaggtttcgttaggaagaggtgtgatatatcaagatgctacccacaggagaagtagggtccgtgctacaacagtagcagtgctataggcactgaaggtaagctgcctcgcctgtgaggccagtgtattctaaagtagattcgacagcttggtttctgggcctggggtagatcaggatctgcctagcatgtgcgaggagaaacaagatcttggcttaaccaaggattatgttcagactggctcaatgctacccttaactttcacagatctaataatcggatccctaaaataaacttgaggcacattttgaacatgtatattttagtagctctaatatatgaacagatcttcagtttaggaaaacttaaatcaatggcagaccataaaattgaatttagcggtgaagtagacaaaccttctcatagatacacgaagacatggtgtataactgtgtatcacattctacacacaattctattcataaaactcgatgtacaattctattagtacttttctaattctattaggtatacaaatttataattttttagctaacatttctatgttatattatggcaacagcaaggtctcagagtattaaacttcaaagtattaaaataatagctaactacattttcccaactgtcttactgtttctcagcccctcaggaccctcctgccatttcaatgaaacagcttctaaagtatgaacatgggctggacaaaggtggttggcctttacagcacgtctgagtgggctgaggactgatggaaactgataaagcagagcgcagttgttcaactcagacttgtgcacagtacacaccgcctagaagatctgaggagtaaccgagtcttccttcccttcagcaggaagctagaaggtgatgctgttgtctcactgacttacaataatgctgtccgttacctttctgcaaactgctgccactctacaagcaaatgcctggatcccttctgatgtgcagtaaccaggactcacctttcccgttccctttggtcctttctcttgaacgtttgaataatcttgacacagctgttttaaattagataagaaatgcttggacttcttaagtgatgactttctctccttaaggtcatcatattttgtttgtagttgtttcagttgtggttctaatctagataacaaaatttttttttaatctcaaaaacaaattttacaaaatacaaattaatagaaatatatgtggtgtttgtggactgaaaatattaaggtgcccacattataaaaaacaaaaacgcaaaccaaaaataacaaaacatttct

SEQ ID NO: 33587 - DNA, 1168 bp, Mus musculus
cggtttctagactgtagtggaaggagcacttgttcggcctgtaacaggtcaggtaccccatcatggcagtttgaaagactgtgctgatggttttacagtgaaaatgaaaataaaaaattaactctaaataacacatgacaaaaagtattaaaaattatcagaaaaattgatccagaaattcataaaataacctaaaaagaacataacctcattaataaatgcaaattgacggtggattgccacttgtctgcaggctggcgcctgcgctggcaaacctagtggcaggcgctcatcaacatctgtaccatctcaattctaggatttggtgaaacaatctgataatagctagtaatgaaaatgttactgatacgtcatggaaaaaactacttccatacattatgactttgaaagcaaaatgagcacattcaagtataataatggaagacttacgctaaaaccttcgcatcagtttgcccaaatatgtgtgacaatttttacctttagaaaaaaaaaatctcttattatatgtgtatgtactacaggcacacaggagctggtgaaagtcagaagagagcattagatcccctgggactggaatgggagccaccatgcgggtgccggggactggactcgattgttgtacaagtgccctaagtgccctgaagtttccatccagacaacccagttctgctttttatgtattttctactttttatttttatcactaaatgtgaatcatttggattaaatgttggcttagcaatctagtaatatccaaaactaaaattgtgtattccctctgactctgttgtacagacaggacagcaccttggtttactgtttatagcaaactgtaagaaaggtctttttacctaggactaaatttactccctagtggctcatgttatctgaggcactgaggtgggaagatcactaattaacatattcccaagtgaccacggagtgcctcacagtgtgctaaaggctatctagaggcaggagacagttcgtgattcatttatgctgtgtcccaaaacccaagaccaagagctatactcacatctttcagaagaaatagcagacttacttcagtgggtaatggggaacctgaatcaaaaacataaataaaaatatttttaggtggatatccgattttcactttgtggta

SEQ ID NO: 33588 - DNA, 1163 bp, Mus musculus
cagctgagcttgatgcccaggcttgagggcgggagttcagatcccgggaagccacataaacactgggtgcggctgtaacctcagtgtgggaagggagacacagggatgtcctaggaacttaacagccagccagcctaaagggctatagaggaagacactcaatgttagcctgcacatacatgcatggaagagggctcctgcacacacaaacacagtaaatacaatatacaggcacacatttttggaaaggcccaagtggtggcacacatggaatcccagtgctggatgtatggacaggtagacctttgggactcagcaaccagccagctctctagtttagtggcctctaggcccctgacaaaccctctgaaaaatctttgttctctgaccgccacacgtgtgcacctgcctacacgcgatacatcaatacatacactatacagatggacctctgagcaggaaaacaacaaaacaagacagggacagacagttctctaggaagatccagaagtgaaaagtaatatccactaaagtgatgtaggttcaaagtatgtaaggcagagtggactgcactgtagggaggacggatctacccacagaggtgagcagagagtaaggggagtgcgcagctacaaccaggatgtctgtacccgtttcctacccaaggggactggcgtggaaggaggcggggacggtggtaagattttaagagtctgaggtcaggaaagactgctcaaagtatggtcttctgggggccatcagactcgtgaactcagcagttgtggttgctggcacaaatttgtacaaggccaagctagtcagtgttcaatgatggagtgggaagaggtgcacgagcccccttccctagatgagaggtatggacaggctgcagcttctggaggagagaagagccagttagttgtctttaaggatatagctcttggtaggtcaactgcagtccagcagatgaaccaaaactcaatggaaacgtaggaaggtggagattgacctggtaggattggggcaggaattggcatggcttgtggttgattagaacatgccatgtgaggattaacatgggtaggaactcacagagcctgaggtagaatgtacgtagcctgcaaggacggcactagatgcaatcctggagctgaaaggagctg

SEQ ID NO: 33589 - DNA, 1759 bp, Mus musculus
ggtactatcatcctagatgaaattacaaagttgcccttttataattagcaagatttggcgatactatgaattttgaagtcattttgaagcagtacagcttttccactgatgattttatactccccactcatgttaagaatgttgttctagttttcgttaaacgtagaaacaataatgtcaaatgataatgtcttagaacttgaatccatgagcagagtcaaaggctggaacccttgttttggacctgatttatggaagtgaagagttggaccaccatagcatgcattatagctactggttttgtgacagttgtccacaacacgtatttgttattttaaaaaaaaaaatcatgttttattactggaacaaaaataacttgagtatttatgtgagaggaaaaccgtgtgcgaacttggttgactcattgaaggcaaggtgctaaaatccatcagcatttgtttcttacttatccttatacaaatcagctcggtcttacagaccagcaaaatatctcaagagctgttatgtaacagcctcaaatggttgattattagaatgaagtacaggaattctataggaatatactataataccagttgtcaaacagagcttaagaaaaggagagatgaaatctactgtagttggagagaatgtggtttgagccagagcagagacttggcagagccatgggcacatcttcagaaaaggcctgccagctggactccccacccctcaccccaccccccttgtgagttctggtttgtgtggatgatgtccaagttaccacgtgggaaagtgaaccagatcacaaacttctgcaaaaaggctttcccagagggctgagagtctgaagaaagttcactggactccatgtccagagtctgtagcatgctgacttttctgttgacgtttacaaagaaaggaaaaataatggtgatatttatactgtgctagaaacgaaagggccagggcacacaggacttggaaagcatccagcaatagccctgcagcccatgtggagaagctgcgggctgcagtccatcctcagggagactgtgctctgctcctggcctccttatgggggtgctgagtcactgctggctctcgcagcatttctcctaagcttccttgttgcacaaagaaaggaaggaactcacattgtaacggatagattcttgtttagactggctttgttgttaacgctttctaagtgaatgcagcatgtgatggtattttaaagtgtgttcccatgtgacaattttataaaagtttgttaccttgcaattttatttcaaaacataaattcagatttaaaattatcagtgtatttgagggtttgttgttgttgttgttgttgttgtcgtcgtcaatacttttgctgttgtaataactaagtgaaagttaaaataattttaacccacagtctaatttgagagagtcagaggatgcaacaaggccttaatctaatatgttaaggtgttggcaagtggaagaacctctgatatgataggatttaaacccaaagaaataggtagaatatactcaaagaatacaggaaggggtggggactcagctcctccaaagtttacataataaccacagcttctctaaagtgaaggtcaaaagtggatcaaggaactcctgtacacaaggaggagcgtgtcacgaatgtttttgtctagctgctttctaacaggggatagggtggtggagaaatgactcagcagttaagagcgtcggctgttcttcagaagaactg

SEQ ID NO: 33590 - DNA, 1630 bp, Mus musculus
ccttggcccgtgtttaaggcttggggaaattagaaacaagaaaaatgaatgcaaaagccatgggaggcattgtttttctttgggctagttaaacatggcggaaagggattgctattgtccgagctttgccaagaaatacaaaaagaatcagctgtcacctcatccttctggaagaaggttttatagtattaatgatacaagtgatattttcccatggagttttccttaggatacatttcatgaattatacacaggagacattttattattagatctcatgtgtttgcaaaaggtactggcttctccctgattgatgcccgtccccttggcttgcgtcagcaatgcagaggggctccgtggtgacggcttctatgatccatatgcctgtgtcgttattattgttgttcacaggcttaatggttgcaaaatttagaattcggcaaagctccaggggaaacgagcggtcttgtgattgtatacaggcagtcagaggcctttaacggctcattgctggcttcacttgtgaacacacacacccgtccgactaggaaaagggtatttccgagtgaggtaccaatggctctggaaaggcagaaatggaaggttagagccaggctggtccttgtgcacctgcctacctccctgtccaaaggctgaccttggtaccccccattcccctactcttgccccaaaagaggtaccacatctgagacctgagctcccctccaatcccagtcctctccagctccgggaccttcatcctatagaacattctagacagccctgacttcctttcctctgagagttaccctctctgcctccttgtctcctcctcccacctagatacctattccaccaccactgtttccacattggaagagcagaatactgtgtagtattgtgcacgcatgccagttaggagtagagctgccctagagtcacttcatgtaagtgtcaacaggtacaaatgtaaagtccttagagcagtgacacctgtactctctggaagagaattcaatttgaccctccaagttccaagggatcatggctctgcaggtgtctttctctgcgtggctgactgtgacgattacattagggtcaatgagctaagaagtacatgtgggattcactatgttaggaaggagttttgcagccaagactgccttgaataaaaaatgtttttgcactgaaaaaaaaaaaactttaaatgacttggtctctggttgctgtaaaggtcatccaagatggatgttctgtttatattgtatagtatttcataagaaataactgcagttcatgaaacgtcttccctactgttactgatttctaacagcacatttgtaacatggtttttatcgtgtccgtgtaccatattgtaaatgatgattccttgtcatccttagtacaataagttaaaaggaaaaaaaaaaggacagggatttttgtaagtctatatttgaaagtccctccatatggtaatattgtgttcatgttgtatatgtagtgttgtgtgaaatatccattttggattgtgttactttttaagatattaaataacatttggttatatgtgtaagtggattttttttcttttttgatactcgagagataaattatttagaggaggcca

SEQ ID NO: 33591 - DNA, 4775 bp, Mus musculus
gagctgcagttgatatctcacatgagtctcagagcccgggctggatgaacacaggcagataatcacggaaatgcacattgatatgacatcacgaaccaacagaggaagtccattagccccatcacttggtcttccttcaggggctcaacatataattgtttatattcaaagccaaaccaaaaccaaccctttttactcttttagcactcgggagagcctggcttccaacacatcaagcattgttgaaagcaaccgccgtcagaatcctgctttgagtccagcccatggcggagctggtccaaccttcaacttccgcgccagtacggatcccccgaccagcgaagctgagaaattacagaaaccttccaactgcttgcaagcttctgttactagtgtatgattgtccttctgcctcagatcttctgtctcatccgatacagcaacgtttacgacgattgggcctgatgtttacatctctgcaaagacaaacatctcaagcacaggttgggggttacttgagctgtgctgctaagtaggctagggcaaaaaaaaaaaatcttcattttggagtattgcttttcacatgtatggctctgtagcaaccgaatagcagtaggggagatgtgcacacttctgctcccgcgtcactaactgtatctgagcacacataggaaagtctacacactgtaagtggaacatgtgtttttcaatgtcatacagttgccaatttccattctgaaatgccacagagttgtgttgctcccagccggcctatagggaatggggccacggaactaatccttgatagccccacctccctcaaaaaaaaaaaaaaaaagctgccacaaaatgtaaatgtaggggtgtccattgtgaaaaaaaatcaatgccaaactgggcagaagggaccccagccctttgtgtgtgagtcctttaaaataccagtcatttttcactgtgagttttcacaacactcttgcgggaggagcccatgagagtgggtcagaggtcccaatggatggacgtagttagagtgtttgttttcgctcttttccagctcacttgatgcttgtcttgagtattttttttttaaccttccctaatcacagtccggaatataggcctttgaagtggacaaaggaagggaaatgcagtctcacagaggggggcaggggcacagcactgagtgctggaggagggtgcgtggatgacccggagggatgaatcagatactggagcaggatacctgcctccttgagacacttaggatgagcgagcttactatactagatgcagtgattagtttgttgggaaacaaaatgttctttatgatacaaatgaagaatgtggcctgagggtgttattctttctaatggaagggacataaatctattttatgtagttttaaatagaatgcctaaattaggctgtgggagatgatttttagtggttgtaagaaagagcaaatttagggagcgttgaacttcaggccttttattcctgggaagatatctatagagacaaacatttaaagtaatttttgattagaaatatacatgggcccttataatggacagtagaatgtcctcattctgctggtgtggtatattcttaatttgtactcccctaaaatgtatcagaatgacaattatgcattcatgaactatgccagagtaatgtttacagatactttgtaatgacttcaggaggcacgttcgggggggattgtgtggcagttccctcatcttttacagtggtttctccacactctggtttatgacgccatgctcagtatcaaaaggcttggcaggagggggcccactaaccattgctcttcagtcctacaggaaaggcgcttctgccaaagtccctgttttctgagaagcactgcatacatctgtaggtactggaaatccatctgcaccagggttagatctaatcccaggaaaatgaccagagataaagttatattcagtttagtgtcagatgagttttggagccatataccataatgaattcataaaaatcaatataaaatattttcactcaagattctggtaacgagcatatgtttgtgagctacttctttttctgtgtcagacttagtcacgagcaatgtgtttaaggggacacagttatatgaagtaggtggaaacacatatactcatatttggtctgctatttggaagttgtgttgggtcaaactgggctccttaagtttggtatacatttctttttttgtgcttattgtaatgaagcttaagcaagattctcaatataccgcttcattgttgaaatgctttaaggcaattggctttgaatctcatactttacttcctcccaggcatgcctcagttgtccagaaacacactgtttatcttatcgcttaagtcatgtccagaaagagcaaccatgtatcttatatactatgtagtctgtttgcttaaggagccatataccatatgattcctagatctggtctaaattaatcccccatgcccccgaaaaaaaccaacctgctctgaaacttttggcatactcaagtcataaataataggaccattaaaacaatacattagtctctgaccctctgaacgtagccattggaagaaccgagtgccctgtgaacaggagaggacgtaactacgtttaagtgaagctttaaaatacgaatttttgatagttcacaagaaacaggtttacagaaggcgttattcaaacaaaatgtgtacactatttgcctaatcattatggagtacatgatttaaaaataaataaacaaaagaacctcccttagaccagcagccattagcatagcaagatgggctttaaagatgatataccacacaaacagacatgccgtggagaaacactcctgtcagaatctaacctggattcttgaatagaggaagcattggtggtgggaagcacatggcagataggatatgcgcatgtgtctaagatggtctcatcaagatggtgagactcttgactctcacggcctcgggctgaggccctctctgggctttgccaagattattctccactggaaccacagctttgtgttccatgacgacatgtctagtttttagagtttatcaacagaaaagtttacaaaactgagtctggttgaatctctgtgaggcattcaactttaaagggtcaacacatctgtcggcattttgcacacttatatattattatgatacaacatattactttatggtaatttttattttttacatataactacctccatgaatctgatgaaatggcagcggtgtgttaaagtgtgttcttaagacaaaaaaagcaatgtttcaaacgcttttcagcagtaggccatggtgttgcatgtgtgtcggtgacttacccattggactcatgacttttttgttgccatggttttctttcacaacatcctttggcttccaactgtaagcctgttgttccccttcctttctcccttctcccccatgaaagcacatctgatttgttacaaatgaatgaacattttaaaattactgtcttccccgcttctctacttctgttattagagagagagagaaaaaagttctctttggcaaagagccacttggtaaacatttaggaagttattaattcctatagcaattgaattggattgctagtgccccccccctccagtaagaaaagacatgagaactttgaagcactttgggcctctctgcttttatcatatgctaccctatggagcccaaacttccttcttattaaaagaactgtgccgtgcattctgggatgtctgttaagcaatttatctaccgtttgatatatcttacacatctcaggagaccttaatgagtgcaaaaataggatgtgtgcacacccaatagggaaaaccaataggaaagaagaaatgagagcagccaggtagaaataagaaatgcctgtgttttatatgttggagaattcacattcaggaaacacaagtggaaagggaatgtggaggagcagtgatttaaacaccagctgttcctaaatgtctctttctgaaaacgttacaatgtacaatgaaattctattgtggctgccaccaagacaggaagggggtggggggtggggggtgtacctagaggaacacccttcctcttttaggttaagatagctttgtccagtcctacctaggattaatcccttgtcaccacaaagtgtacttgaaggcaaagcttgtgatgtcagtgatgggcacagttctcaccaggccatttgggagaggtagcattctgagcttgtgctaacaaccagtgactggtaaagttccgcagctcaactgggcagctcaaaatgcttctgaagcgttagctgcacaatggcagagcaggtcctgtgggtcacacgcatgcttgacaggagcagacaaacggagtgactcaagatcccccagaaacacagtggcagctctctctctctctctctcctctctctctctctcaatgacctattttctatctgtttgataggccatggtgagacatcactaaaatgctatttttatgatgtgtgctaataaagaaaacaaatgcagcttgacaccttgtccatttcattcaaagaggtatgggtgtttggaatctcaacacctcagcacccctttactggtattgagttaggaagtgcgagatgaacaagtccacaccaataccactgtcgtcaaaggccagtccagacatccacctttgtttacagtttctcgttgggttcctgtcatttctgtgataaccccatcttcagga

SEQ ID NO: 33592 - DNA, 1173 bp, Mus musculus
cgtcccctttagggaagaataaggaggaccatgacactttgaccttggtggagggggtaaaaaagctgtctccatctgagaggcagaccccccattcttccagggaacctgttgggcacaaggaggagtcaccgaaagggccaggagggggccctgcagcctctggtggtgtggcagaggggttagccaatggccgccttgtccaacatcatagcgcagaacccagcagcctggacaaaaggaaagaaatattcagcaaagacacactgttcaaacctctacacagcaccctgtctgtaaacagctatcacaaatctagcttgtccctcctcaagtctcacccaaagtcacccgttgacacactgccaggccgttgtgagaaactggaaccttcccttgggacatccgcggcccaagccatgcctccatcccaacgtcagcaggagcctggagggaaccaggaggcttcttttgactattacaacgtctctgatgacgacgactccgaggagggggccaacaaaaacgcggaggaggagaaaaacagagatgatgtgggcaccatgcagtggctcctggagagggagaaggaaagagacttgcagaggaagtttgagaaaaacctcaccctcctcaccccaaaagaaactgatagcagcagcaaccagagagccacccactcagcccggctggacagcatggatagcagcagcatcacggtggacagtggattcaactccccacggtagggagagctggcctcctgtatacacatacacccgccagggcccggggctttatgccagagagctggcttcacagtctgggactgtgaacgagggctgtgagttgtgtgacctgtgttgttaacagcctgttttctaacttctttttcaggaattgaaaccaaaaaaatgtttctgcagctgtagagatcactaatctggactggtgggttggttccttccctaaagattgcatcagagtctgatctgagaccaacacatcccaatggttttcttctatttgtattgacaaccaggagaagggatttttttaagtccttcaaaaaaaaaaaaaaaagtaatgttctgagtatgatgaatatagtcagtgcgaggaaagtggtagagagcagtttggtgccaggataatggctgccccctttactgt

SEQ ID NO: 33593 - DNA, 1167 bp, Mus musculus
ttgaaaacatggaaataataatggtacctgctcatcgggtattgggtgaattatgtgaattcatatgcatgaagcccttagaaaccaagtctgattccttaaaggtatggatctgctattgtttattattgtttcttaaagagccattgctgacctgtgttgctcgtaactaagaatcccatccagttagagttaggcagtagcgtcagtagttgtcacttcactttaaactctaagaattgttctaaagaaagaattacatggaaactatacaacaaatacaattttggtttttactttgcaacaatgttgctcttatttttggaaccgttccaggcttttgttccgtgtctggtgatagcccctcctgcttctcatgtgacttcttggtgctttggatttttctagagcagtggctctcaacctgtgggtcaagacccctctgggggttgaacaaccctgtcacgggggttgcatatcagacatcctgcatatcagatatgtacatttcatagcagtagcaaattacaattatgaagtgacaaaaaaataatctttatggttgggagtcacctcaacaaatggaacttgattaaagggccacgtcatttggaaagtcgagaaccactgtcctagaggaagcctgattgtttttgaagtgctagtttgtgttcccatagtatccttgtacatctatgtgagcattatatattgggtcatcgttttcctgtgtgacccctctattttaggtttagaaccttagaagctaatagtttacatgtataagtaggaagacacacagtctctttcagattcctggcagtcacagtatggacttgggagtccaaatctctctttaacctgaggcacagttagcaaccaggagtggtgtgaagaccttgctgtgtaattgtaggtatttgtcaccccgctgcagtctctgagcctaacgggcaaacagggaagatggagccgtgtctatggtccctaggctgtactggtggagcctctgtttgtggaaaaagcaagcaagcaagcaaacacacaaaaaaccaatccaatatagatcttttggcaacgttgtaaaccaaactcatcttcttgactccaccaactgcctaaaagaaaacatcctttcagattagatgctcatatctgtgactgtaa

SEQ ID NO: 33594 - DNA, 1200 bp, Mus musculus
ttggagagactttttagaaatccctccagaaaatatgaaaattaagggaaataatttaaaaaaatatttgggaaatgaggaaaaccccaggacattttaaaagaaatacacgctgatagctatcctgggtttagtgcagctatctagcacacagtaggagcttcaagtagagatataggcctttataagttttagcgaggcagccccatttctaacatgtagtagtaagtagtcaccagtgtcgaatgtgatttatagcagtgggcttgacctttggccttgttcttttctgctcccttcaggagaaaaaaatgtaggcttccaaggtcagagcagacacatagagtgctgatcaggtcctgcaaggagacagctgcatagaaaactgaacctttcggtcatgaagacgatgccttctttcagtgtctcttttcagttatcaaacctaaagtaatcctgagagtccccagcctcctagcaaccagggagttctcggggccgcagaagagttcactgttcctcttccatattcattaccccacagtgccttctgggcaggagtgggggaatcttgccttttgttcaaaccaagttgaatataaaaaacgtgcacagcatcccaagaggagagaaggttggggcaaatggcggtgggaccattctgcctcatttttctatcactggatagaaatggtggcattaattagagagcggagtcaaactccccaagagaaaggaactctgtaatatccagagaacactggcagccgcgatcctgggccactgcgaaatgattggagggctttaagcggttcgtgggcaaagtctttagagcctgccctgttcttgtgtgtgagcatcctttgaaacatcattcataggatgccaagcctccgagggtagctggtgcttcatattccctgtataatgctgccgggattttggtgggggagtctcccatcgatcaagatggcaagttaacttttctagtcttcagcctctactgagcatgcccgtaaaagacttggcacgtgcatgagaaagcaggatggtgaccacaaattttaggtcaattcttgcgtttttttttaaagtaatgcctttaaggaagaaagtcaatatgtttcattctatggctctaaggaatttgaaaagaaagacaaaataaaagcctaaaacgacatccgcaaacatgaagat

SEQ ID NO: 33595 - DNA, 1203 bp, Mus musculus
ttgctctgcggaaccggcctttgcggttgttttcatacctggtggaaatgatttcacctggggttggaagtggttacataggttagttatcatctaagctccctgacttgaactctatttccgttatttgttgaattttgattctcattagaaacaatgacttaaatactgcagatgtctccacttaatacttgtgtcttttttttttttttatcagttaagcaaaactggctctaaagatgatgagtagcaagcacctgccgcccaagcaagagcagcctttgaaaagcggcctggttcagcatctctccttacttttttctctgttactgagtggctttttacaggacatgttcttttgtgagtgtcttgaaaaacacacaagtggaaagtcaatgacgaggtttggctgtagtaaattattttcacaaacttgccttaataaaaggtcaaagtgtaacttgttcagagtactttctgaagctcctgagcatcatggccggtggatggctccacagagggaagtcagtggtaacttaaccatctgggccaagcgatgtgatcatttttaaaggccaacaaagccgtgtttgaactctcagttcagaagagcccagtgctgagtctctggcattcctcgaacgacccgtaatgatgagcgtcacctccttttacttagataacaaagcgtaagttgcttcagagtatctgagtactggagttgggctttatatgattctctgtgtagttcctcttcattttcagcaggaaactgcttctccttaataaattgataactgtttatgcttttctctcggactggatgccggtgtgtgatcatgaatgctttcagttatgtgaataataaaagaatataagaagaaaagtgaggggccggagaagtggctcagtcagtaaaggtttgctgtgcaagcctgaggtcctgagttcagatccccaacagccacataaaaagcggggcatgacctgagacgcagagctggggaggcagagacaggaggattccccagcttgctgccctgacagtctggctgagtcactgagcacctggttcaggtagagagcaatagaggaagatgtagaacataaatctctggcctcaacaggcaagcacatgtgcatacacccgtttgcacacacatacaaataccaggtacacttgcatgcatgaccgtacaccga

SEQ ID NO: 33596 - DNA, 1206 bp, Mus musculus
accacatgtcatgctaactactattcgtgtgtatgtgtgtgcgtgtgtatgtgtgtgtgttccttaaatctgaggtagctcaagagatattcagggggttaagagcagcctttgatggtcttccagaggctctgggtttattcccagtaccaacatggctgctcacagctgtctgtaattccagttccagggcatctgatgccaacactcacacagccttaaatgcatatatatatatatatatatatatatatatatgcaaacaaaacccttttttttgagttttgttttcctctctccctctctcgagtgactttggtgtgccacatgaagcgattcccacggtcagctttgactggcctgccatgatctttccctgctggcacttgcctttagaggagtcccctcttccaaagatgctttctccgtctccagagttggaatacccgtgttcgtcacatggctctgtcctcctgctctgccaagtcttccttctgtcccaaggactgaggtgtactaggctaagccttcagaacagtctaggatcctaggaaatgacacactttctgatggctctgatgactgccagaggcctagcagcagcctagctctcacatctaggttcacacggtcagctgccttcccgccttggtccttccttatggcaacgggacatttcacacctaacacaggtttttataccctccttagtcagacccctgcgcttttcctgtcttctcctttatggagaatgacaattccaccttttgtttctcaggctaaaatttatgacgtcatcttcgactcttcccttttagggtcccaaaccatcttgctctgtgagctcatcaaaatatatccagcagcctgccattctctcctcccctcatcaaggccaccaccagccacctctgggacgactgtcaaaagagcctgctgaccaatcttttctacgttcacttaattttgtatgattattgcctccaaactggctaaacagattcagccaaatcagtctttcctctttttaatttcctgcagtggcttcttatgtaaaacctacaggtcttgtgatggcctaaacaggactctcttagttaggcctcaagcctcaacttcgagtactctcctttccccactcgattccagccacactggccaacctgtgccccaccctgtgcatttccagggttctccagccaccgg

SEQ ID NO: 33597 - DNA, 1194 bp, Mus musculus
ttcaaggttgaacaatttaaaggtgtgtcttaatattttctatgtgacccactgctgggatgtttagccacagacccgtcagtgggaaaagggcatagattagtctttaaataatgccttttctgtcaaacagttattttaaatagttcttttctgggggctagagtttatttttaccccccaatgagtaattatacattattttaaataatagtatatttaccttaacctcctggtattggtgctgtttgatgttttcatgtttattgaactaatttcattataataatacgattaataatgtatttgtaaattgaattttccaagattttgatattttaaggttaagcatcttggtggagctgtgaccatgtgtgggagcagtttttggttatggagagcagcagacggactagtcctttaacctctcatgcagcttctgtcttagttgtcatcttttcttcctaatctgataatcttggttcttgttgattaacatgtgaaaaatcctatctgcttgtttggaaaaaaaaaaaaagaaagatgtttttttcctcttcaagctctctgtgtgacttaggccctgtcatttcaccttacctgaatgttgggtgatggatcaacctagaaaatgagttggcttaaccatctgcaagggccttttgaaatttcagtgttgtgccgtggtgaacgattttaacaatgaaatggcttgcttttctctttcattaatgtcctccatcctgaggtatgatgacagttttaagggcgagcttagaggcgggtaaatgaacattgttttatttccattccagggtattgtgcttggtgactatcatctttcttcttagtaagaaatattaggtagtatggtatttatttttactataactttgttgtgttgtaaagaaacccatttccctcttgaatgtagctcttttactgatgccatttataatgtagtcagtagcatcaaagctctccaaagctttgaggtctgactatggagaacttaattcatactgtgtgacagagatccccaaacttacctcataatggaattaccttagtttgaaagcattggtacgtgggccccaacccagcaattgagatacagaattcatttggaatatgacttaagcattagacttttttaaaaggtccccattctaatatatagaaaagttttgaaac

SEQ ID NO: 33598 - DNA, 1760 bp, Mus musculus
actgaaagaactggcagatctgcctcaaaataagagctctcaagaaagtattgtctgtgaattgaggtgtaagtcggtatatttgggcactggctgtggaaaaagcaaagaaaacgcaaaagccgtcgcatcgagagaagcactgaagttatttctcaagaagaaggtggtggtgaagatctgtaagaggaagtaccgaggcagcgagatcgaggatctagtactcctggatgaagaagcaagacccgtaaacttacctccagcactgaaacatcctcaagaattactgtaacttctccaagtaggcactgaatccagtatctggtgtttgaagagaaaaactggcttttatataagacactggctttcacagattttatattgcttttttccagttttgcagaaaatttaaattctcgttctcttcactaaagtagagctgtaaataatttatgacagtgcatattaaagggtgtacattgacagcataccagcgtgctgttttatttgctgaagaaaatactatcttctatttttaatgatatattaggtacgatgtgtagttctgtagaatcttaaaatttttgtactactactaccaatttggtagaaatgtattaagttgtctaccatgccttttttttttttttttcctaacttgattgaatcacataaaagaagggggaccacagtatttgaatgtgtgaaactatacaacctaaggtttaaaaatgttgctcatgatgctgaacagctcttaaagaacaagaagagttgtctcaaactattttcatgaaaagctgtaaacttttttttagatataaagcagtataaagtacttattgttattttattctaaagttgtttaaaattcaccatgattttgacggctgcagattcttaagcaggttaatttatgttttgaggtaaatttcaatttacactttattaagacataatgttggtttctataggaagcatattttgtgactactatgaacagactgatttgtttagatattaaatgctttaagctattttaccttttcaagaagttgtgtttttttttctcctaccctggtcataactaaggctcctcactactattcaaactacaaccaagtagttttcatagtataaaacatattcttataaatagggaagtttatatctagaaccgggtggtttttgtatttgtagatttcagaagaatatggagaagactagagagctatggtcagttctttaatgactgtgtattcatgtggattgcatctgttagtaatatagtagaatcttgtttctgtgtcttaggtaattctattaatctgacatggtttattttaaaagtcttgtctaaggtatatgacttttggccttctggctttctaggaactgcacactggacaataatggagataatatatgtagaaaaagacctttcatatttactagttatattggtattggaaggttgaacataagcacaatttaagtgtgtaaaaattagtttgtagtttaggaataataaagacacttaatgtactgagtttaaactgaaataatcagggatgtttgtattttgccagataacatttttaaattatttgtttttttttttgttttttttttttttttgagaatagctcattggataccagagcaaaatctatattctgtaaatggtctgactgcccttatatagtgtggaaaacactaacataagtgagttgtaaaaaacactgtcaagtttcttctgt

SEQ ID NO: 33599 - DNA, 2586 bp, Mus musculus
tgtgaccctgcctgtggcttagcaccgcctctcagctgctcacttgccaagggaggggcaaagactgaatatttactttttttgttgttttcatttttgtttcattttgggggcggggcttgtgtttcctgtaatataactcaactcttgaagagcttccgtttcataccagtttcatcaggtttatttgtaaagtactttgaatgtaactcttacatgctttgagaagaaaaaaaaaatcacataacaaaactggggtaatctggtccaaatctggtccacaagtgttgtacagtatgcatgtgttaccgctgggcttcgctgcaggctggactcaggtaacatgtgcccggtgtctgcccgctgagccgactgcagcaggcagctgtctagctgcccgggagactggtgccacagcatacctttgaactagagagccacactctccatccaagtgagcatctctgagcccacctggaacacctgcccggttccttccatcacccacgtctgaccaccttttctctgcaaaaccctttctttctgccctcttaaacttgtctggagaaaacaagagtgtgaaagccgagggcagaaatagagaagcagaggtgtactcctgctgtagaaagctgcggtcgggggcagaaagaaaactgtggggaggggaggcagctttcaaaacccctgagaagactgcagatgcttgcctggccactgcttctatcacagtctgcatctgcagggcaaggtggccccggcctctgatgacgctgcaggcagtgcagagggggcacgcctctatccattagaggagagctgaggtcggggcgcatcataatgagatcaaacttgccaaacagaagagagtttgttaccaggtttctacactcactaggaagtattttgtagctgtcatcttcctagagattctgtccgggagattctgtcagggatgcataaaaggtagttgaatgcagaagcaaagggtgtggactggatcattttatatctatcttctggatgaacaagcaagcttgacctagaaattggtcaaagagccgtgttcttcaagctgggttttaacttaccagaccccgggcacttccttaaaaaaaaaaaaaaaaagactcggtttagcctagccagcataaacatgttaaaataaatactttttcaggtaatttaaaccacactcacgtactctgtcatactggaagaagccgtgttttggtgagccatcttatatagcaagctaaattatttttatttttttaatgcaaaataattttataggaattaatagaagaaaggcgaaggggaaaatctgttttaaaaaagttacattctgctggaatccccattagtaaggatttttattttcttgaatctatgtatattttagaaagttcatttttatcagaatcaaagttcgtactcagccagaattttaattatcaagtgactgcacctaaaatgtaatcatttccccctaaacattccacaacgtgtaccccgcttctcacaaggtgtaactggataggacactacttggaactacaagaagcctggtggtgggctgagcacagacctcccacgctgcccagcgccctgtaggtaactggaggaaggccatgctgtccacccttcctggccaggatccagttgagcagcagaggttgactaaatgaaggtgccgtcttcagcatcatagtttgaccagtgaaaatgttcatagaattttgtgtagttgtaccgtacgattttatcttcttcatttatttatttacggtcttatttatgttctgtttaatatatagtttggttctggccatcttaaatgttgggcttacaagaggctatattgaagtatttacagctatatgatcttcatcagatttatcgctaactttttgtaatacaaaaagtgtcagactacgagtattaaagaataaagtgtgtctcaggctggtagctcagagctgtgactgagggacttcggttttattttataaaacatgctcatttctaacatgagagaaactattctggtagaatcctttctccactctgaaagtcagcagtcatgttgtgcttatacaggccgctttctgtaggtctgtctgtcacatttgtattgacccaaatgatttttaaaaaaagttttttttttactaacttgatcacaaaaccatatggatgaataaaaaatttaatattattaaaaatatttttaaacttagaatttattctgcatagggtaaaaagagtttaatctttagctctcaagtttggattatcagtatattacatttttgtctatcagactcaagtgttacaggtacaaggaggatattaacttgccaaataacaaagtttagctgagtctctgtagcatacaaattacatacatttaaaatctttttgctatgtatttatattgtattaaatatgagaagctcaggactcaaacatttaatcaggttacattctggaaatgtttctgttttcatttgtcctgtttgtaatggtgtgtaaatacatcgcccatattaactcctgttgctgcacttgccccgtgtctgt

SEQ ID NO: 33600 - DNA, 1099 bp, Mus musculus
taaggggagggtggatacagagaaagttcctgtgtgagggtcttgaggtctacatgcgtgttattgcttagtaggttggttgtacaccaatgaaggtctttaattggctatgttacataggaactcggggccaggaaggtagaaagagttgacagtgtatttgccaaaacgttacccattcactttcttggaaagaacgctagttttcaggtttatgtttcgttcattgtttaggttttgttattgctattttggtttggtttttttggttttgagagttcttaggctttccagatgtaaaaatcttaaacgtgattaaaatgaactcaccctggatcaggcgtgcctcctccctttggcatgagctgagtgcgtgggctctgtcccctactgcccagcagaggacacccttgactgcccagcttggccctgtggtgtgccttcaggtttcaatctgtttttcctttaccaggctgaacagacgaaagaggagcagaagcaagacttgaacgcagagaggttgatgaggcaggtctccaaggatgtgtgccgactgcgggagcagagccagaaggagcctcggcaggtgcagtccttcaggtaaacacccactgggaggctccaggcattacagcgtctgtcagtcagtctgtctcctcaggattcagagccaccaccaccctccacccttaccgtccaccaggagcacatctcattgagaaaccttgtccctggatttagaaatgtacacaagcatcacagatctttggggactttattcactcatttcctagacattccttgaatatccttctctctctctctctcgtctcccaccttgcactgtgctgatccctacagtacagcaagagaacgcacacttcctgctcccacagagggcctccaatctgagagttccacagccactggagctccatatggagcctttatgggcaaggcaggaattccaagagcatataatataggaagaatctagtctgtgtgggcctctgtgcaggctccaggtcagctcaaaggaaggcatcattggaggtctccaggctgaggtgggtgtgagccacccagccgggctgtgtgt

SEQ ID NO: 33601 - DNA, 1175 bp, Mus musculus
gtgctcttaaccaccgagtgagccggctctctggccatgtggtcacgtcctcatcacgtgtcacattcaagccacgagcatgtgaggccgtcagtcacctgatagttcacacagctctgtgcctgcctgacagtgaacagttagtaacaggcaatcctcatgtcttagctaagaatagtcaactgttttatgactaattctacagtgaactgaataatatcaagttactttatagtgactatcatgtttttacatgctgaagttaaaacttgtctgtggtccttggacatttctgttgaatatcaggagacttggctaagtttcataaacttaatatttttgtagtggtgattttgctctggattcctgaaacaatcttttttcttgatctacttagttaaagagcttcctgctgtcacagcgtgtctttagtcacatgtgtgactcagtttcccctcaggtaaatgggtcaccagcttactcacacagcatggagcaggcctgccacactgacagtgactgttttcttctgtttcaccatagcctaacgatgctaagagaggcctctgacgaacctgcggctttgagagagtctggggttcccttggcagagggcagccgctgcacagaggacccgaagccatgccctagggggcctgagacaagccagtgtaggaaggagcctgctgaagaccctggtcagctgccatctggacttcccaccctggtaaacgttcgcttcagcctgctaaaacaaagcccctgtagacgccacccaaggggttacttgtttcctctcctacatcaggattggggctccaaagctgactgaaggctttcgtggaaatatcactactcagcgtcaaaagtactttacagtttcaaatgccaggaaattaatctttcctttatacttggcaaaaacagcactcgctccttgatatctctaaatgttctgtgaatgcttgttaaaagtattgtctgggactagagatgtagctgaactggtgcaatactcacagcactaggttcagtccccagcaccatacagatagccacagtgggcacgccgatgtatttctggcacttagaagatacagtgagaggacctcagtttataggctgtctgacatacaaggccctatctccaaaacaaccaatcaaccaataaccaa

SEQ ID NO: 33602 - DNA, 1200 bp, Mus musculus
gtgctgccacctctgagcatcagtcatcacattgagagtgcagggaatacatatggaccatatgcaaactatagagatccctagtgaataagggtcacttaaggaagtgttgaaaaataagaatcgaacatactgcattacattcaaggccaaagactagagagagttgggcggttgagttctggctgctcttgcagaggtccgtccactttcagatcagacatcttcttgtggcctccataggcacttgcatatatgtggctcgtgcacacgtgcacaaaaatgcacatacagtaaataaaaacaaagctagagtctagcatccacaggagaagggaggccatctcctgaatcagctctcatatactgccaaaatcatgtgcttgtgcaaaacttataaagtcactgctgtcatcaggacggctgctgccattcagtgacactggaaacgggctgcccgctgcctttatacttagaaggtgctgtgtgctttttgacagagtcttgctaagctgcaggagcgatttcatttggatcaaaacatgggcagttccgagccagatctgagatctagtcctgtgaattctcatctctctctgtccagacagacccttgacgctgggtcacagacaagcatttctggagatgtaagtagtcagagggcatcggctgccccagtgctgtccctgatgccccaagggaggacggggtggagggggtggaagggtgggagtgggggatgggttaggcggtgtgggcaggtgggtcgggcgttggtagtgatggggtggggggtgaggtggtgtagggtaggtggtgggggttgatagtgacgggggtggggctcatggctggagcaggagctagagcatgctccactctgcagatgcatgttaaaagtcacagcttcgtcttttcctgtgaaagttccaagggcatgtagttggagctttctctggctgcatttacaggtagatgctactgaaaagctagaactaaaaccacatttaactggagtcacttcacatgaacactagggaaataagaagcagaaaaggttaaagctagccaggaggggctggagagcggtgcagcctgtaagaggtgtttgttctgcctgcaggtcccagcacccatgtcagacagctcaccaccaccacctccgactccagccccaggaatctaatacacacacacaca

SEQ ID NO: 33603 - DNA, 1180 bp, Mus musculus
cattcttaaggttttttgctgtttgtttattgctgtgaatttgtggaccagagatggtctgtggcctaggctaggagtagtgctcaggtagagggtacaaggatgagtgagactcctgtgttagatcagtgcgagtgtggccttcagagggccacttggctcagagtatccccggccctggatgctgatgataatttggatcttgtttttgggagtactggggagtcagagaattcgaaaaagggtgacgcctgtgtgacgggcttagagttgccgtacactgttgtcaaggactgtagacgaaggggcaagggatggcttcggagtgaataaagaaaagagccacacccaagttttagaccagtcacttcttaggcgtttccagcaggtgctttagaggacacaaggatcccagctggccagtccctcgctgagtgaccccacggacataatgaaaccccaacacaaatccactgctgtcttttcagaaaccacacagattgaggatccgaggaaacagtggcggggcgagcaggagaagatgctcaaggactatctctccgtggcccaggacgcactcaggacgcagaaggagctgtaccacgtgaaggaacagaggctggcgctggccctcgatgaatatgtgcggttaaatgatgcctacaaagaaaaatcaagctctcataccagccgtgagtacggttcatactccacagctgaagctgggatggagaggtgacagtcactcacactcctgtggttagattttgagccctttccctcctaggcaagagctcctccatgctatggagatgaggggcggggcacctgggaagtgccccaccccactcgaggtgcaagctccccatttgggcttggacaaaccttcttttttcctgatacttctgcctggctgccttttgtttatgagtaaatgtctgtcagaacaagcaaaggaggccagaggtatctgatcccctagagcccgagtctcgatggttctgaactgcccagtttgggtgctcagaactgaactcagaaacctttgtgagcacaaacaccctttgcagcccaaatttgagtcatttaaaggggacgctcaatcactgttgttacagggagggtctgggactgttggaacttacccttcagtctcttcattcatgtgtcagtcatctgg

SEQ ID NO: 33604 - DNA, 1228 bp, Mus musculus
ctgtctcagcagcacttttaaaagcccaatcccacattacttaatgtgacagactggagacatttgcctaacttgtcaagttcctataaagccaacgctttctcctggacactaacgtgcacttcagagcagggtaattaaaggatggttgttttctttggaaaacagtctccaatgatttagagaatagtagggttgttgggccaattgaacataaagctgaagctgaaataatgccaagaggacgaacgttccaaatgctcattagcctaaaactgcaaaggcattcgatgaatggttgctgtgccctggtcaggttccttctagaaaacacccccaatctgtctgtcatctggctgtaaaacagctcgaggatgaagatctgtacctaccgactccacgactcaacgggggaccaccttccaggccagcccagcctccaggaggctcagagtgcagagagcactcagcagcctacatcctgtggtgggcagggctggagaggagaccagccttgggcatctgtggactgttgtcagggctgatggagggagggtgctaagggtgaggcctgtggctgcactagacagggacgttcttgctatttcatggctgcttctgctgtgtactgacagcccagtgggtaacgagacagagacctgttcatcacagactactgtagaatggcattctgaaggagtcatctgctaaaataagggaaagtgcctgctgagagtttactgggtcagccatttcaaatgcagtgacatggacattttccccaccagccaccaatcgtttcttctctgctgccttcaaggttcttagtaccaacaactgcctgtgtcagaagcagtttggacatgtttctgcttcatcttcatgggctgtacctgagtgtggaggtcatggctctcttaataggatgctgaatgcagaaagcatctagaaaaaggctgaacaggggcagtggtgcttgcctgttggaggctgggcacgcagtgagaccctgttgtaaaaccaagccaagccaaaccaaaccagaccaagccaggcccgggggatggcccagtggatctgagtgctttgggatctctgtttcagccccagcacttgtgtaaagatggctgtggccacgcacacctgtcatcccagagaggcgggtcactggccacacacagtggggaaaccccaagctccaggctcagtgagagactctgtgtcaaga

SEQ ID NO: 33605 - DNA, 1098 bp, Mus musculus
ctttgtatttgaatatagtatagtgaaatacacttggccccaaaataaatatttgatttttaaaaattgcttttgtttagcttacaacttctagtcaaagccatattgattggccccactccagccaatagcatgccttgtctacagtgcctccagaactccttgattgcagtgtagcagcactttcatgggtgcttatgaggcggagtcacagggaccagacagcttttagaatcagcatttagtctagtaagttggattttgtgttagaaatgggaacttaagaactaaagctttctgcttctaacttcctggtgtgccacgttctccctccccagcgagtgccttcctctctgacttcctcagctttcccgtccagagcctggaaaaggaccctttgaaagctttatctcaaacctccctcatttgcaacaaagtaatggaatttggaacatttgttgtaaatattttctttgttttattttgtttgagacagggtttcacagagattcccctgcctctgcctccgcctcccaagtagtgggatcaaatggtgtgctctgccactacccagtgtaaatattttctttgtataaatgccgctctgttcagttcacagctatcttcctgggtggctaaagactgtggggaactgtgggcagaatgtctgggttccagcaccatctgccccttagacgctcactctggacagtctcttcctttctgtggactgtagtgttttataaactcattatctctacctcatagacttttgcacactggggagttgaaatcaatgactgaaacagggctgagcaaggctctgtctgtggcatgcctcaggatgaccagaggaattctcggttcagtcaaggtccaagctcacatcgtttacgtacagcttccaaaattaattctgtgactgtttatcaaacatttctggtatgtgttactctgtgtgctctggaggatacaaagatcaaatgcggtcgaatctgaatccccaagggttgtctcgaggacctaacacaaggtggtcagtagcttataaagaacacagtttaagaaccttgggatccaggggggtcaaaactgtgg

SEQ ID NO: 33606 - DNA, 1146 bp, Mus musculus
tggagtgaggatgaagacggttggtgatgaggctggagaagctggaggaggttgctggtgagggtttccctgggaatgtcgggcatcttgtaagtagatgatcatgtattttactgtctggactaagactctccaaggatgggaaaaagacatgttaaggtgataggtacagaccaggattagcctagaaaaatgggagcacatggtcacctatttaaatattcctcaaatatttggaagtctgtcacgggaacagaatactaactagacttcatctgtgggagagccaggagcagaggactcagaagagcaggcttcgcttgttggaaagtggggctgggggtgtcttccttactgctgaggtgctctttattgctgtgggtgcaaggctttgcatgacttcttcctagggcctggtgccgtgcaggtcaggtgagcttgtgccccagtccattcttcttgtgcacttatgctctcccaagtgttaacatggacgcctgtgtttttgttaagcgtagctcagctttttgtgtcttccaagtcttgtactacggaaggctaggattcacttctctgatggcttttatgaaaggcctatctctgcagtcatctgatctcttgtaccagctgcagcatctgcccagtctgtattatgcataagcccttcctcctcagtcagtagagtgcactgtttgtctttttttttttaaccctttcaccacctccgtgccctgttcttgtctggagacttaagtacaggtcctgtgccttcctctgcaatagtatggcttggtaacagctgccctcagtcttctatatcattctgtggtaccttttcttaccacttttcctgctaaacaaaaagatgctttgcttaatgacagaacaagcttttaaactgaaagggatgtaaactttgggtgtgtctgttccttgctgtggcatggcctttccttggcttctaccagtgatctgttttattctttgctactttgtttaattcttgggagcactccaagacgcaggtgtgactatttctacttaatgaggaggtgtaaaaaggttaagtgatgtgtctgaggtgacccagtcagtaggtgtctaagctggctcccagcccaaggctctgtatgcactcagtcagcc

SEQ ID NO: 33607 - DNA, 1190 bp, Mus musculus
attacattgttagtattggtgtgaactctttttgtttgtttggttttttttgtttgtttttgttttgtttttttttcgagacagggtttctctgtgtagccctggctgtcctggaactcactctgtagaccaggctggtcttgaactcagaaatccacctgcctctgcctcccgagtgctgggattaaaggcgtgcaccgccacgcccggctggtgtgaactcttgtccgtctggttcacactgctccctccctgcctttacacagcgtcaaacccgtgaagtgttcggcgctcaactaagtgtgccattgtagcaactgtttgaatttcaaaacagaaagccatgcagtctttgtgggagtttatttatctccacgtccagaagaactcactcttgctttatgctctcctatccagatcagaaaggagtagggacatccatccgctcttcctaagtgcacagcacacatgggctgactctgctgtgagtgttcgctgctccccagtgagacagagttgttggccttccccgcttgtcccaagtgagaccactgccgcagcgctgagcactgcctcactcttagaatcggggttctgacctgggaacctcagaagttgttcctcagaagccacacaccttgttttttgagaagaggtctccttctgggacctggggtttccaaattaagctatggtggctggccagtgacctctagatgcctacctgttcctgtcttcccagagcacatgcctctcgctgcccagtctttaagaggtttacagagactgaactcaggggcttcggtactttattatctgagctgtctcctcagcccgcattggcattctgtgataggtacacgattgcatggacatgggtatgtggagcgtctgtttacgttgtggcgtctctaggttctcattggcagcatccctgccacgttggtctttcttgagaatgaatatcccaggcttgtgtagtgagtgtggcatctacagtgactggggaaacaagaaccctccttgctttcaggccttctgttctgaatctgttccccttctgtgcctttaagacaaagtgttatcttcaccacctttctcttactcaagtcagctttgtctcccttgagatggcacgcctctgtctgtctctcgtgatgcctgctcacagttctgacctgtatgcatta

SEQ ID NO: 33608 - DNA, 1230 bp, Mus musculus
ctcctctgccctaactgttgagagcaaaccctagcagattgtcaggcatagcttgtgagggactctgaggaccagctcagtgtcctctctcacacctgctgctctgtggatgtcagctctgcccgtgtgtattccaaatggcaatataaaacagtcatttttacatgtcaactacttaaattacattttgcatatcttaataagattatatatatatatgtatatatatatatatacacacacacacacacacacacacatacaaggataatcttgggtatcagttctaataagcttcattgacagttaagcagttcatccattgacgctgctggttggtgtatttttaaggaagaagaccaccatggaaatggaaacctgatttcaccccagtgccagaaatggccctgcagctgtggagaagcagcgtctatgctgtgtagaagggagtttgctgctccacgacagaatcactgcaagttaaccagtcatttggagattaaaaaacccaggaaattggttttcctttcccggctttaggacaatgaggaatcagttggaaaattggttatcttaagagttctaggctcagctacctggaagggtgtttatttgtacattttactgaaaaaaaatgtccagtacttgtgttcaagaaatgatggcatacagaatggcttattatgaattgataactaaaaaaagatatttacttctgagatacaaagctctcctggacattggtttcatttaagttaaaagtaatgcataaagccatccactctgacatctgtaaactagtcattttgaacaaggaatttttattaatggctcttctgggaggaaacagaatgccaattgggggaagttgaagtttgtgtaatagttctggaggccccgtgaaatgattctgtacataactgtattgtctaaaaagtcataaattaatagaactctgccttgacaagaataaaatgttcacactcagtgtgtaactgagtgcaaacatatttaatattatttaactttaccatgcctttatctgcataggaattgtcttgatgtgttctggtgtaaagtagacttgaatatataaaatacactaacattcgtttttcacagcattggacattgagcctgggccacatgcggcgagcaagccgtgccttgagctgcccacagttccacggtgtaggagaatatgatgcagttgttggtgggtgaatccct

SEQ ID NO: 33609 - DNA, 1230 bp, Mus musculus
taagggctggcgccagctacttaacagagatgcacattttatctctgtgcctctctccgatgatagatgccatagtaaatttaaaatattgagtatgataacggagtatgaatttttaaattccgcaattaaaacgcattgttggaacgccattaattttgagtttaggtgagccgtgggaagcagaactctctgccgagtctccctctgcggatgagtaccactttttaggaattaaagtaaatacaaaggagtcatctgttcttcagccagcttgagtttgtcagctaatgatgaggttgtcccctcttgcgtcatgctgattcccttttagaaatataatgtatcttatcagtcgctggcttccttccggcagagtacgtttccctgtgtgttcatttacgcgtgtgttccaggaaccctgtccagatactatgtctggatttcccagcgaacagatctgtcatatgtatctgttatttaggatttagcagtttgttagagcagcccagatagaccccagatagacgggaccgtgaggcagttacaggaggagggagctcggaggtgccggtgttggagcaagaggagcaggtgagagacagcgtcagtcaagatgtaccccatctgggtcggtacagagctggagagggagactcactccacccaaaccagtccaagctgtagcatactggagtggagctgacaaaggaggaacaaggtctgggggagagaaggaaaggctggggctcacagcgaaactgcatgcacgaaactgcatgcacgctggggatgggtgcaagagatccagttggtgatgccctcgctactgggttgggcttttgcatgtctgcatgggtgtggtaagaaataagtgcctgtacagagataggaggcagttctgaccaggagaactctagcacccggaggtagagtacatgaggcacaggctgtgtaagagtgtgacttcagggagggccacagagctgtgtttaagaaagaaaacaggtgtcttccacactgccaggtctgccaggaaccctgtaggttaagtgtctgtgggcttatcaaggtgtcggtgtcgcccacagcactttgaacaggggtgggcttcagagtggagcaagtggaaggaaagatggaaggtgaggaaggaggggtgttacgtagacggggttctgacgtgagcacagccttataggacagtggggcggaggcagggctgtgtag

SEQ ID NO: 33610 - DNA, 1169 bp, Mus musculus
ttgggggttacctgctcgtgatgtgtgcagacagctaagcagtaagcctcaagcagtccactcgggcgcacactaagcaggttagatacgtggttatctggttggtctgttgtccctctttaaggacagtgccttagttagggttttattgctgtgaagagacaccatgaccctggcagttcttttaaaaggaaatacctaattggggctggcttactggtcagaggtttaatccattcacccaggcaggcatggtgctgccgaggtagctgagaattctacacgcaggtcatgaggcagcaggaagaggctgagacatattgggtctggcttgagcttctgaaacctcaaagctcacccctggtgacctatttcctcccacaaaaccacacctactccaacaacaaagccacacctcttaatagtgcagtccctgtgagtttgcggccacattcattcaaactgtcattgacagtgtggggcttcaggcccgaggcccaagtgagtggttctccacagatgtacgaagcttgaaggagtgtcagtgatacagaggctgtggagagctcccctctccccccaacctgagagtcagacattaggctggaaaggcaaaagggcagattagagaccctggacagaggaagtgtgggagcttcaaggtgagactgagatggggagtcccagggtgagggatccccccaggttggggagtgcctgaacctgcaagtgtctgtccaggaggctcctagtattcagacaggccttgttagggaggggttctgggggaatagtgtgttgtggtttctcaagttaaaggggcgcaggactgggcaggagcacctggagtcaggtctttgtcccctcttcagatcacatggtctcatctgttgtcatgtcactgagtgtgtaggcttctgggtggtaaactgtcctgtctgacagccactcctgtcaccctgcagacttcattctctccatccacaggattgcattgcttgtccggtgacttgatgagattgagaacgtctgtttagaactcctgtgtcttagttctataaacccctcgttgcctgccatgtcagatgttacccaagatgatgatattgcttagggtggtttccactaacgagcctcatcttcgaatgataacttttgtcccaaactag

SEQ ID NO: 33611 - DNA, 1381 bp, Mus musculus
acaccgaagtacagcaagattgtcattgactttgattcgatcaatagccgaccgagtcagaagcctcagtgagtttcgtctcgttaaagccccagaagaagatgacaccccaccacgtgcgtgcacacacacacacacacacacacatacacacacacacaaggggctccccaagcctttcatcttgaagtcccacggaactttttaataacacaacactaaacatctaaagaatataaaacttggaatcttctcacccgtcacgtggagctccatctgtttcagctgttgatgtagtttggtttggaaactaagggacctgcccacaggagctggagtgaaggtctctccccttccgccgagcccgtctgccagagagtgtcagctctgtcatccaccatatttcgacagccgctccttgctgctacacggggtaggaggacatacaaataattgcttctcgttcttagcagggatgaacaggcacactgaggtgaacatctggcccaaatgaagcataccctgtcacgcccttgggaaaacaaataggaccgaacaaagctacatgaacacacctgctgtagagttgaggggacctctcacctggtcacatgaggttgaggagggcccagtgtcctggcagatgatcagtacagtgtccccctcaagtcacactttcctgccttacacagagcagtagcataccatccctctggagggtaggggacccctgcggttccagcctcttagccttggtttgttggtcacatagcactgttaaatttatccgaggcataagtagttcctagaggagacagtctatcactccccctagaccaggcgctttgcggtgacagctggagctatatggatgggtgatgagagacgttcccccatcctgtgtctcctgctgtgtggacacatgtcactcctgctccacatgccaacatggttcatttccaagggcaccctataaccagagagcacattaattcctgtcctataagagggctgtgggaaactgtgtacctggaggtggtccatgccagatcctcatttgtgccttcagcttcataggcagcatacgcctgctgccccattgtgggtgggggtgccccactgcgtactgtgtttttaatttcatttaacttctagcagacacgctcagtgtctttgataaaatagtgtctttttttcatgtgtttttatttcatttctaagattttttttttaacactccgtattctggagcatttttttacaatttggatctctgccagtattgttaaaattttattaaaatcatccagcaccaagacgtgtttgcttttatatttattctatatgcccagctctgcttgtgtagtttctgtgttgtctg

SEQ ID NO: 33612 - DNA, 1485 bp, Mus musculus
gtattgaaaataattttctaactgctttgtatgtatcacatactctaaattgcacagtaggcgtgtttattaaacagattggctgggaaagttttgaaatagtactgaatttacagtctcagtgctattcctgttgctgtgtatgtggtaggttataccgaagtaactaatcttctaatgaatgctgatattttattagaatgaaagcacagattagcattaatattttttatcctggaaatcctttggcaagtactgggcagcccaaatttagaaaactatgagatttcaaaccacgtaaacatggttctgttggacattttattttttaactgttaacttaggtgttcgcagttctgttgaatgggacttctgcaggactgtatttagcatgctgtaagtactttggggtgaaataggctccgagtctaaattctcagaaatgtctgtgatgtattgaccatgaatagcgtgtaccacatgacagaagtgaaattacactcttaaccccttctcaacgtggactggtctttacaggggcaccaataaatgacagatctggagagtctcctggtgcttattttagaagtcaaatcaacccaattagtatcttgttagtagatataatgagcctatttctttctaaaaaggcttgtggtctggacgtgcttttacaagaaatagtgaccttggggaatatgtaaacaagagatctttttctaagagtttggggggaggttgggggacctgtataatgacaaaaaaaaattagcttacaacaatgacaacaacaaaaaacaaaaacaaaagaaattgatattcaaagtattttaggcaaagccagtcaaaatgctttcatgatattttgagatgtaaatttttgtctgatttgtattgttcttttcgtttgccttcttaactttatatgtgacctgaattttccataacttgatgactatagattgcatctaggcattccaataaaagccaacccaatgtgtgtgcgtttatatgtttctttcaagtcttgactagccagaattgcttttgtgtttcacgtggatacagaaggaggcggatctggggctgtaattcatctacacccaaacccatgatagctctcattcctactgagtttggatccttgttttgtttttgtatttagtttcaaaatgacagctcggaggagcacacttcacagaggtctctaccctggcctactttagaaaaatgttaactccccctccacaaagccaaaccctaactgtaaaggaagaattgaaaaaaaaaaaaaaatcacccattactcctggaaatcgggtctcattcctgtgatgttggcattgagtgtgcttaattaaaacacttgattagaataatcagtttgggcccgataggttctcagcctcctggagatgtctaaatctacatatagacctactgattagggtttgctttgttcagcaattccaggctgacagacca

SEQ ID NO: 33613 - DNA, 1117 bp, Mus musculus
ctggctgacagtgccaacaacatccagttcttgcgacaaagtgagatcggcaagaggtaacccccgggccacccctgtgcagattctcctgtagcacaatccaaaccggactctccaaagagccttccaaaatgacactgctctgcagacagacacatcgcagatacacacgcaacacaaaccagaaacaaagacaactttttttttttttctgaatgaccttaaaggtgatcggctttaaagaatatgtttacatacgcatatcgctgcactcaattggactggaagtatgagaaaggaaaaaaaagcattaaaaaaggcaacgttttgccatgacccctctgtaccttcgaggcactgtatttaacaaaggttttaaaaaggaaaaaaaaatgcgtacaatgtttccagatattactgaattgtcgacctttgcttacaggaagtaatctctacttaggatgtgatatatatagatctgttcattttaaaatgtggggcaaagttactgtttatagaacccaactgctttcccgtgctgctttgtaaaaggacactggcacaagggacgtctgcttcggcggggatttaataatggattttactaacatggcttgccctgggagggaaaaactgacgaatagaatccttgtcactgataagcaaaggaaaccctgatttttttgtaaattatgtgagacaagttgtttatggatttttatatgaattacaatttactgtacatcaaatattagtctcagaggagttaatttatgtaaagtgtttaaaaagtttatacttaaaaataaaatgataaaaacatgtgaactgtgtgatttttttaaaaaggattgcaccttttgttatctgttataactgtacagtataacttattatattgtagaggtataacaacttatgcctatcatgtccagaagtgttaatatttttgtattaggttgaaaaaaataaaacaatgcgctactttctatcacttagatagataggacctgtgcagtcctcagcgggtggctaatcagagaacttcttttcgtccttctctttcttaccaagccactggcctcaaccattaccaaccaagaggcccagttgacat

SEQ ID NO: 33614 - DNA, 1227 bp, Mus musculus
cggcattgaggcttcatgtacacattatccatttcaggctaattttatgtttcttcttcataaataacattctggctttgttcctcccccaaatacacaggaaactaaaacctgatttgaagtggctcttcagtcaaatgagggggaaaaccaccttactgaataatggctaattatacataggattgtgtttcccctctgctgttttccccttgaaatactgtcttcagaccagcttggttcatgcctgtgttatggcttctccaagtccattgacaatctgccgtttggccgggaaggcctggaaacaaagagcagcccagtcatgacaaatagcacattatgaatcttaagccactaattgcagaaccctccccaattaagcatccaagcaaattaggcaggggatcattaacaccatgtaaggtcaaggataactcaattaaaacgaaaaccattttctcaggcggaatgttttctgcatgttcgtggccaccaaatctgttttctgtgtgctcccacccaccccacttcccaaaccctgataacagcctgtgttctcttcccagtccatggttcttctgctccatagccagcggcagtacatcttcgaatacgacatgtgggaccgcctgtccgccatcaccatgcccagtgtggctcgccacaccatgcagaccatccggtccattggctactaccgcaacatctacaatcccccagaaagcaatgcctctatcatcaccgactacaacgaggaagggctgcttctgcaaacagctttcctgggaacgagtcggagggtcttattcaagtatagaaggcagaccaggctatcagaaattttatacgacagcacaagagtcagttttacctacgacgaaacagcgggagtcctgaaaacagtaaaccttcagagtgatggttttatttgcaccattagatacaggcaaattggtcccctgattgacagacagattttccgcttcagcgaggatggaatggtaaatgcgagatttgactatagctacgacaacagctttcgagtgaccagcatgcagggtgtcatcaatgaaacaccactgcccattgatctataccagtttgatgacatctctggcaaagtcgagcagtttggaaaattcggagtgatatactacgacatcaaccaaatcatttccacggccgtgatgacttatacaaagcactttgatgctcatgggcgca

SEQ ID NO: 33615 - DNA, 1196 bp, Mus musculus
caggcagttctctgctgtctgtgtcaggggcctcggaccagctcgtataggctgcctggttggtggctcagtctctgggagctcccaggggttcatgttagttgagactgctggtcttcctatgggatcaccctcctccttggctccttcagtccttcccctaattcctccacaggggtccctgacttcagtccaacagttgggtataactatctacatctgtcttcttttaaccaaaatgagcgtcccagaaatcagtgagaactgtgggtggctgacgaaagcagccacaggccacttcaagcattcacctataaacacgatgtaggcaatattttcatcaatattcgatttattccaactcctttcagcagtctagattttacaaaaaaaaaaaagaaaaaaaaatgagcaaaaccagtaaccagtttttttcagaatctggtgcatcagccctagcgtgtccactgcagcagagctatgttatcccctccagtacgatccacttagcaaatgaatgctctcaaggtgctaaattgctccataatggctcaaaatgggtaattcaacctcctctatatatggactccttctctctactttggataggtgctctgatagctttaccgtacggcacctcatcagcttcccttgcaaagcaaccatcagataatttgcccaaagaccaagacaccgactcactactcgaaaggttatctgagaagaggagattctcatgcggacagaccaggatggctttcccttcccagtgttgcagagccaaaggttgacagttgggaatttcctggaatggtgcatccttctccaactcagtcctgagatgctataacgaaagcctgtgtagaagcctcattcctccctgctcacccttcagtttcccccagcgaagaagtgttgcaggtagagaaagcctcttgtttatgtctgggcccacgggtcatttccagatgcctagaacatatagatgttgacccagtgaggcatcacacttgtcttctggactctgacctacgatcaagaaaggaccaccctaagcaagagatcagaggtctggggcgtcacccacatgctcttgttcctcacagcgtccctccatcacagcatccctgcatccgtccttactactgcatcttgcaaacccacctgctcaatctcaagcagatttcttagactta

SEQ ID NO: 33616 - DNA, 1129 bp, Mus musculus
ctcactgcatagaagtgcatttgctgtctcaaaaccagcaaatctttccatgcaccgactgcatctttaaataagatgttatgtccgatattcatctctactccagatttttaggtttgtttgaccatggatattgaaatgaaaactattttaaaacagtttataaaattaaggctaacttctctaaatggtctaatttgttcttctagcaaattaactgcagcttagtagctgacactaaccaagatatttcttcttaaggtgcgtctggaatggcccactgacctcgcgatcaaccccatggataactccatctacgtcctggataataacgtagttttacagatcactgaaaaccgtcaggtccgcatcgctgccgggcggcccatgcactgtcaggtccctggagtggaatacccggtggggaagcacgcggttcagaccaccctggagtcagccacggccattgctgtgtcctacagcggggtcctttacatcacggaaactgatgagaagaagatcaaccgaataaggcaggtcacgacagacggggagatctccttagtggctgggataccttcggaatgtgactgcaagaacgacgccaactgtgactgctaccaaagcggagacggctacgccaaagatgccaaactcaatgcgccgtcctccctggccgcctcgccagatggcactctgtacattgcagatctgggaaatatcaggatccgggccgtttcgaagaataaacctttactgaactcaatgaacttttacgaagttgcctctccaactgatcaagagctctacatctttgacatcaacggtactcaccagtacaccgtgagcctggtcacgggtgactacctatataattttagttacagcaatgacaatgacgtcaccgctgtaactgacagcaatggcaacaccctccgaatccgaagggatccgaatcggatgccggtgcgggtggtgtctcctgataaccaggtgatatggttgaccataggcaccaacgggtgtctgaaaagcatgaccgctcagggcctggaactggttttgtttacttaccatggcaacagtgggcttttagccaccaaaagtgacgaaactggatggacaacat

SEQ ID NO: 33617 - DNA, 1134 bp, Mus musculus
atcatgcaccgagccccaggagcagcttagaagctgctgcacacgtgtttctcattgcccacttaaatcttgtactttgtggtcccagcagatttacagattgccctggaattcattggaaaggatacttttcttctagaagtcatatatatgttatatggggggaaaaagggcatcaattataatttttaaaattactagtcttggtaatgctccaaaataaatagattgcagcaaattaaaactcggggtgaacaccaggcatttagagaaataaattacactgaatttaaaggaagatggtcttggggctatttcagatctgctttttttttctttttttctttttcttttttcttttcttttttttgtgaatagcccttgattgtttatgatatttttacctttggcttgacttatctattaatcatgataatgttggccagggaaaacagagattcattcagtcttttgtacttttcccacagtcttgcgtccgtcatcagaggccaagtactaacagctgatggaaccccacttattggcgtcaacgtgtcgtttttacactactcggaatatggatataccattacccgccaggatggaatgtgagtctgctgcatcctgctgtctccgtgggaaggattctcagcatgaggctgggcgtccacccatcacccgtcatgttgtattgtcttttttaatagaaaggcaacaactctcagactcttaaaaacccaggacagtgcaggaagcagaggctgagagccatgtactcatttgccataaaagttcatcccgttttctgaggcgtgatagaatactgtggtcctgtcagagaatattttttgtctttgaagaattgtgttgaagtatttattggagatgtttcttactgtctgcaactgagttcagatggttccaaagaatagataggaagttagggaaatgcaaatagatagctcggtgactagagaaaggatggttaaatgcttgctatgtaattccatttgagcagaggttggaaactgtttcatatcacaattaggaggaaagattaattgtgaatcattttaacttgaggagagcattggtcattgtaaggtggcggctcactaacttagtcatactaag

SEQ ID NO: 33618 - DNA, 1139 bp, Mus musculus
tagaggaccccagaagcaagtcaaaaaaaaaaccagaaaaaactcatgtggactggaattaaatatcttctaaacaacaattgccgtaatttgagtatcacgtgtctatcacgatatttaagaggattagacgattgtgctctgtgagggttgatgtgagtcaggtttaaaactagtatctgataagttcaaatctgtaaactgcgagatactggtgagttttgagcagaccgagtgagttcctatccctgtgtttaactggaatagacttagaacccttagatatgtgaaggcaactcggttggtcggtttggttcaaccacttgtctcaggtaaaagaaaggagagttgtctgccgtcggcctgtgactctactttagtggccacagaaacaaagcaaatcctgtctccacgtctgcatgttgcttattagcggagtgcaaagctaactgaatgccctgggcagggagaagtcctaactgcctcgtttttgagcattcatcaatctataactcccacaaggccttttctctttagcatccattgaaaagatttttcccttcgttatccatttatgcctatctgagtgcattggagaccagagatgagattgagtcgtgaacaggccgtaggggtgttgaataacacttgactgttctctcccatgaataggtgtcacggacaagaaggctcagctctgccagctctgaggatggctgagggtcttctcaaacccactggtgcttttcatttctccagagaaccgaaagggaggaaatgggcttatattagtaacagggaagatgacgggctagagaacatacctaaatctcgggaaaagccccctttgaaatagttgaatctccattccagtaagccttaacagtctgtcagaattcggtaggtgtgtgagattggccattccgttttccctttcgtgttaattttagaagtggggtgctttttaatttccttccattccgtccgttatcccaaaggattaagtagtctcttggatccgaaagattctccaggtcatttgcagttttgggatgtcttagctgttgatggtttctgttgacaatgcggaggtagtagacctaagcacggggttccctcgtcacctcagtttccttttg

SEQ ID NO: 33619 - DNA, 1159 bp, Mus musculus
ctgagaatgctccatctgggacttgtccatgcattgccttctaccctggttacacttgtggtcttcccagccccagtcagtgcacactcccatgcatgtgtgcatactcacacttctccatcttggcacagtgattttgctacggtgatcttattcctgttactcatatgatcgactggaaacttgttaattgttcataataccataatggttatttgttgacaaacacatcaggatgctcagggagccataaacctaaatcaataccatcagtatcaactaaagccttctacagttcctcccgtggaattaccttcagagctggcttacgggctgcatttgaaagtcttatggacgagccagctctcacttctaattagacaatgttagtgcaataatgtcagaatacaccaccactctcttccttacaaataatgtgtgggtatttaaatatccattctgcaaatatggaaatctgtatcacacccgaagctatgtgttaaagatctgacaactgccagatagcattgcaaaggaatggaagcatcattcgaagggagggtggctatatagatatataaattaatctcttttaaggaactcactctacctttttgccagacctcttatggcttttttactctaacattcacaccctgaactaactttccttgtgacactatcactgacgatataaatcattgcctctgccacgaagtgctctctgaaacacgccttctatagcaggatggaaggagacaggcttcgggcttcttattaaaccaaagcatttattttctctaaggaaaagcagatgtggtatatgaaataaactttcaagatagcgaaattccatactagttatagatagtggggacctatagtgatagccaatgcagcgagatacagtagctctgatccagaaagggaaagcgattaggaaggccctgcgaagattgtaaaagattgcagttgcataaggcatcagacaacctgaagtttaatctttacgttaggctaaatattcttatctgaaagtggatggactaacactgtacactggagttcagctctactaaatagaaattaggctggtgaagattcaaaagagtcaacggttggcctggcgtatgatgagcattttacacgccaccaccgc

SEQ ID NO: 33620 - DNA, 1103 bp, Mus musculus
cacacacacacacggggacttagggatggttgaccagtgggtatgtgcacgtaggtgcagctgcctgtagaagccagggatgccagatactcaggctgttatagagagaggcttagatgggctctgggaatgcaactcaggtctgttgcaagagcagtccactctgagctgagccccagattgtaatatttttggaagcaaagctacagcatgttacaaacctttacccatcacacgagtaaggaccaaccaggatggagctcttagtggaccaaaaaaaaccaaaaaattaaattcagaatttcagaaaccaaaacagtgtagctgtttttaacgtaagccatggaagaggagcacgcgctgtggccttttgaaatgacaaaggtccatgaacgtgtgataatgcatttgagtcctgtaaagtgttgtttaaccgccacacctactgcattccacacaagaggtagagctcactgatcacgtgaagcccctgcttggggacagaacatttaagatatgagcttatccatcagctaaaaacctcccatcctccaccctggctctccccacgctgggactgagccgagggctgtattgcatgacttgcatccaccgctttcttaagggaagtcagtccctaagtttaaaaagtgcctttacacggcatctattgaaactcagcaagtttgagtccatttaagctaacataatcccagtgtatataagcaatcagttattaagaatcttacaaaccttttttgagagggggagctcatatctttcccagtctcaccctcgattttatctttagttcagaaataaccagtgtctgataccactttgatctcatctatcccccccccccccaaaaaaaaaagcctgcttaaacaagggataggatattggctagggccaaagcagggcggaagatggctcgtgagcaaactttcaaagtgggaatgtgtgaagtagatttgatcagccagtcagtaaccgacattgagcaggaagttcatgaaagggacttctggaggatgaggtcagaaaagtgaatttaaaccagtgttcggaagacccggcgtctgaaatgtcagtgcgtagat

SEQ ID NO: 33621 - DNA, 1949 bp, Mus musculus
atgcaggggacacttcttatataaatcactacagaaagactcagtgaagaattataatgggtgagaggatatccaaaatattcaaaaaatttccatagcagtaagactacgctatcatttctccacttttaagttttggcataatttttgaacacttaaatttgtctttcattcatcatgtcattaaatatgttgttcattgtcctagtgccctgactttgctgctatggaaaatgtctgcattattaagaaggtgatactgtccaagccatcaaaataaccttaattcaaaatggcctctgtcacaggaagtgttttggaatcaagttagagattcaattagtttatctacaatactgacttcttgcttatgaattctatctacttgcctagtgtttcagttaaatatatcttctaatagtataagaatattttcgccctttcgctgatgcaagagcctagtgcggtgctgtgagaagtatcggtgggagctacgctgactccgggccgtgaagccgaccggtttgacttttcatccctgccgaacccgctcgactacagccatgtccggggacgagatgatttttgatcctactatgagcaaaaagaaaaagaagaagaagaagccctttatgttagatgaagaaggtgatgcccagacagaagaaacccagccctcagagacaaaagaagtggagccagaaccaactgaagaaaaagacgtggacgctgatgaggaagacagtaggaagaaagatgcttctgatgacttagatgatttgaacttctttaatcaaaagaaaaagaagaaaaagacgaaaaagatatttgacattgatgaagctgaagaagctataaaggatgttaagattgagagtgatgctcaagagccagccgagccagaggattaccttgacattatgcttggcaacaaaaaaaagaaaaagaagaatgttaaattcccagaagaagatgaaatactagaaaaagacgaagctttagaagatgaagacagcaaaaaagatgatggcatttcattcagtagccaaactgcttgggcaggctcagaaagagactacacatatgaggagttgctgaaccgagtgttaaacatcatgagagaaaagaatccagatatggttgctggagagaagaggaaatttgttatgaaacctccacaggtcatccgagtaggaaccaagaaaacttcttttgtcaattttacagatatctgtaaactattacatcgtcaacccaaacatctccttgcatttttattggcagaattgggtacaagtggttctatagatggtaataaccaacttgtaatcaaaggaagattccaacagaaacaaatagaaaatgtcttgagaagatatatcaaggaatatgtcacttgtcacacatgccggtcaccggacacaatcctacagaaggacacccgactctatttcttacaatgtgaaacttgtcattctcgatgctctgttgccagtatcaaaactggcttccaggctgtcacaggcaagcgagcacagctccgtgccaaagctaactaatttgctaatcaccattgatttttccaaaatgtgttggagatttggctggacaggttaccatcagagtggatgtaccattgagttaaaaacaagatagaaaaactgccaagttgtttggcaagtgattgttctgaaataccttgcacgataccgatattcaagctgttgacatactcgttgcctactttaacaactgtcagagaaacgtgatgggggtaaggaggtactttttaaaatcgttcatagacttctgtaaaatgcaagattaaagttattataacagtaaaaaaaaagaatattttctatttaaaaatttgattataagccaagatgaatcaaaactgttcacctataatgttggtttatacaatgccttgtccatgtttccta

SEQ ID NO: 33622 - DNA, 1244 bp, Mus musculus
aactcactctgtagaccaagctggctttgaactcagaaatatgcctgcttctgcctcccaagtgctgggattacaggcatgtgccaccactgcccggcctcattttgtttgtttgtttgtttgtttttgttttgttttatttttcgtcttttatttttcaatttcatgtatttgagtgtttgcctgtctggatgaccttaacgtgctatatgtatgtctgtgccatcagaagcagaaggagtcatcagattatcaggtactctgaaactagagtggcaggtggttactaaataacacttgggttctaggggtgcaactctgtcctgcaaaaaggcaacaagtgctcttaactccatccctgaaagtatacatttcaaatatgattttcaatattatatcacccattattttcaattttcaaaaataatgagaataccatacttggcattctgaataggaaaaaataattcctataatatgattgacaaaaatttctggatttgctcaagtttatataaatattaatgatttaagatttttttcatcgcttctcggccttttggctaagatcaagtgtagtatctgttcttatcagtttaatatctgatacgtcctctatctgaggacaatatattaaatggatttttggaagtaggagttggaataggagcttcctccgtccactccacgcatcgacctggtattgcagtacctccaggaacggtgcaccccctctggggaataagaatagtcagaaaagggctggtgagatggctcagcaggtaagagctcccgactgctcttccaaaggtcctgagttcaaatcccagcaaccacatggtggctcacaaccatccataacaagatctgactccctcttctggtgtgtctgaagacagctacagtgtacttacacataatcaataaataaatctttaaaaaaaaaaaaagatttttttcgcctagcaaacctctaaaatccatatatatattctatggcttatttcaatgcaacaatacaatgcaaacgttgttaatataaaatgagataagtggatagatgcataaaatccatgtttttataggaaagtgactatgctgtaatttccctttcatgctaaatcaaactgcagattatgataataaacatttcacaaactgaaatgtatatggtaaatctggaagatattggaatgtaaacaataatccaaagagcatataccttgaaatctctatgcacagag

SEQ ID NO: 33623 - DNA, 1176 bp, Mus musculus
tctgggtgaagggagggactgtatgtctttagataaagtggtttgaaatttggtcagtttattgcatgatttcaataataaatgaatgtaaataaattttttttcatttttttaaactgtggcaactaatagtttccatctgttgtgcaatgccaaattactagtgtgagaggtggctgtcatatcaactaagactagtctcctctgctcagcactgttctctttatagcctttcttcttcctccctcagtgggcagacctgtccttcccgttctgcagacatggcaagcgctccattatgaaaactgtgctgaagattggacctaataatgggaagaatttttttgtatgtcctttggagaaaaaaaagcagtgtaattttttccagtgggccgaaaatggaccaggaatggaaattgttccaggatgctaatagttttctctttttaaagaatgcccgtctcataaactcatcaaactcatagcattcagtcccctttgtttaatagaaaacttatagaacacctgttgtacatacacattaagaacctgtagtatttgagacatattttttttcacttaactatgtgatcttcacagtttttgttgtaataatgaacacactatttcaccagaggcacagtccattctctttgaaatgcatattcaatatagttaataatgatgtcaataaagtactcttagaatgtttttggtcttttgtaagtttgttggtgagcagtaacttgtttgattttcaggagattatgtttacatcgcattataatatcctcattctgttatgaatacatttctcagggtaccaccactgtatacagcatctcattaaacgtattcctcattttcttaaactcaatttaagatataagagctcctttatgaaagataatacagtattctgtttagcgaatattaagttcttgttagagctacactgaaaccctcagagactttcagtgtttttatagaaaatttgggggattcaaactaacataatacctaggatagaagtcacacgcataaagagacattttgatgtttttctaatcgtctttctaatgtctgttgctaacttaaataagtcagttattttccaaatcttaatatatcactaatatctaatgataagctgaagtgttatcattaatggtgtgt

SEQ ID NO: 33624 - DNA, 2088 bp, Mus musculus
acctcagtttacacattggtcacattcatataattttattgtagttcattactctcattttccttctgggaatgagagtttgaaactaattttctagcagccaacaacttacacagtgatatctttgtgtatattcatttttacccatattaaaataactatatagatttgtaaaataatttagagattaaatatgttgtatatgattgaatatgtaattgtatttgacatgaaatttattttcctcattgataaatactctcagaattagcatctgcatcttggctactcttaaatgcaagagtagacactacgcacattctaaagtaacctaaaagggctgtttactagcaatagcataaattagcatttgttctgtttacctcatgtgcttagtgacattcatcaaacagctcttgtatgtggtggtacagttcttacaaatgcatgtgtttgaggttttcttaccagcagaaaggtcagaggcgcaccttgagattggcaccagcacgttccttaaacatttcggggtctctgtttctttgtctataaaaggatcctttactaggatagaaagttgtgatatgttttctgttcagcagatttcgaacaggaaaccaccttagtgatctgaagtcagaaaagtgatggaaagattaacagagttcataaggatctgagcttctgctacattttacacctacaaaagtgagctttatacatcgatgagatagtagatgtgtaaagtctgcaagcgtcagagttagagggtctgggtgtgtcctagctaaggaagccctcccaagcctagggcattaaagccacacctcagttcagttaacagttcactgtacctttgtgatgagtggctatgttggttgagcacagactatctaacactgacatttatgtatctgaaaagcccagttcaggtgtttggtaaggaaagcccaatatggcaaatggcctttgtttttagcagctgagggagcagctgctccggcatgccactagccctgtctctcaggaactccattgcgtgcgtgcacggctttatcagtctgtgatgatgctgtaacttgctaagttcgtatgtgtgataagcatctctggtctcagtgttttagagaagactcagtgcttcagtggctgagcccagaggtgattctatgaaaagaagatgattgcaagagtgttagtaaagaggttgcagttagaaatgaacttgaacatgtagcacccagcgtatccctctcagtcttaactagacaactgtgtgcttttgtgtctggccctattgcatttactgtgctcatgctgaaaggaaagtaacagctttagaaactgttgaaaataaaataggaaaacaggctgggttgaattcctttgctgggaattgttttacagctcttcagtggtctttctagccagttattcctgtgaagaattggactttgaggagctaaagctttgaatgggggctggtgcaggggcctgggagtggagagtctgctttcagatactttaacctcggagctgtgacctttgattgtagcaaacatcgatttcaaaagcttcttttgctttcagtcacaagcctgcgtaccttactgcgagactgccaatgcttcaaagatgtatgtttgaaaaagttctttcatagtttttatgaaatttgggaagttgtttacttaaacaaatgcacaagaaaataattcataaaaatactgaatatatatgtgcaaaatttttcttagctacaataaatgttcaacatttttctaataaagattttttttctgagtaaaaatatgcattttaaagacttccaggtttatgtgtttttgtgaagctgctaaatcaaaaagaaaaacagtagtgcacttgagggatggtaaaacttttatcttctagaaaaaaatgtagaagactgcacttgaggtttgaggaaggagtgtgcagtggggctttaggggttcattcactctgctacccagatgttcccagagtttgtgtcctcaaagggcaggctgtcagttgtgcttgtatcttgtccagtactcagcacaccgtcttgcagttgatagg

SEQ ID NO: 33625 - DNA, 1235 bp, Mus musculus
ttctgaacaataactggtagtgggtatactttaaaattagagtgtgataagcctatcaatatgtacatacatatacaattaataatttatagataatatttaatagaaattctcatgttagctcttctcagtgtggcttagtattgtaatctcttctagtagtacctctccaagatgaatgggaccctgttggtgtttctttactgccaccgcagtaccccacacactgagacactgtgatcaggactgatgtgtagccacatcaacttgtatagagtgctgtgcttggttaactgcttgagctcagtgcgcatatgcgtgttagctactttgaatagtgagggttggttctgctttggagctcttccgaaactgtttttctccgaaagactaagtcctcattcttttgaactcattggacagaattaaagtttcagttgcttatgtttacttttttcaataagtaagtcagctagttatgcttacaggaagaccgggatggtaacctacacacacacacacacacacccctttggaatgggctagattttacaatatatgtatccagtatttctgtttttaattaatgttggtacattcgtggtctgcctgttctgttttgtttcagtgttcatggagcgatagatgttttaagaataaggtttgttagaaagttgtgtgctgctgtccagtctttagagtccttaactgttggcttacatctagagaatatatttgattggaatgttaagcagttatttctttatttatctgcagagtattcaacaaaaaataatgtaagtacttatctaaatatattacaatagtttccttttaaacattatttcttaggaaagaatgtaatttcaagaaattacttgttggacaattagtcctctcctcaagggttccacggattgtaccccacccgctgaggttgtcactgacccaagaagatacatttttatgtattcagaacatctgaccttcatagcttagtttaaaaacaaaaaacaaaaaactcaagctaccagagagaaggctgtagtgaggaagctttctgtcctgcagtagcctgtttaagctctgtgtgccttgtagctctctagcattaagggcccagaaaggtgtgcacgctgtgacagcaggctatttcttgactcccttagcttctcttatagtgctgataatgaaaagtatggagtggcttacttaatatatcaagttgagataca

SEQ ID NO: 33626 - DNA, 1126 bp, Mus musculus
tactcgtaaaagctccattaacctcctaagcgtcagccataactgaaacccagcacaagtgactcactcagactgcatctttactagtgtagctttttcaatgaaatgccatacgatgaaacctaccttcctgtatctgatgttaatatttttctaaatgattagttgaatgtgtggttaaacctttttgataagctaacaaaaatgcagtgcaaaccaaaactaggttataacctataaaatcttaaagacaaaacaaaggatattccagaaatattctgcctctcagaaaacatatttataacagtgcctcataaatattaatggttttcaggaagtcatcttaaaggagatacttgaattgttatttaagtcaaagcagattttaaatgattcacttcgtgtgtttgcacttcaaaagcgggaagctcctttacaatggaaatatttagtaataaaagcttgtccgggacctgcaagcgaaccattccactctttgaagcagtgctgtatttgcgggccagtgttagggaatgagttccagtgtggctgtgtcccagtgacacgtctgatgggtgggaatgtgaaactgttaccaacactgaaaactcacagttcaggtccaaatcaaggaagatgattttcttttccttcctaatttaaaatttgtaatggattccaaaaccctcaggaatgaaacttttaacagtcatagcaaaatggaggtgggtgtaaattttatatatatatatatattgtatatgcttattatgaaatgatgcaaatgtattttccagattatttctctgttggtttgtaccattttcaaaagtgcctatctttcaataaaactctgtattctaactcacataaattgcctattcctttctttaaccttttttttattcctttttttttttaaatgtgcattggtggttgtttgggcgtatgtctgtgtgaggatgttggatgcccaggaactaaagttatagacagttttgagctgccatgtgggttctgggaattgttcaattccagcatcctctggatgagctagaaccatccctcctgtcctgcctagtcgtgaatataaacctagtgacatgacagaaacaattctgccaaa

SEQ ID NO: 33627 - DNA, 1191 bp, Mus musculus
gtgtgtgctgagtcattttgttggctcccaacaagtagtgtaacacactgtccacagagttaatcatagttacagagggcagagatgttgctaattaattcacatctttctacttgtgctgattggtttcccaaacccttgtgagcatgtagctggatagttggggacattttcagttgttagtcctgctggctttgggatgctgttgataaaggagcacagtgctgatgctttcattgggacaggggggcagtgcatctagttttggcaaagagcagtgtaaagaaaatatatgatgaaatggtatcacaatattatgtactctactacattaaaaaagtacaaagctctttaacattagcaaacttctaaaataacttaggctatgagggttgacttatttatttttttctctcttctatgtgcatgtattaatgtaattatatgtaaaaagaggaacactcagtttatctcagggtcagaaacaaacaaagtcctgtcttccattatgagccctgcccttagctaacacagcatttgttctgttccaggtttgaagagacagcagagttactgaaatgctcaagtcgctaactgtagaatgttctgcataatcgctcctaggactttggctacttatatatattctatatttaagaattctgtatataattttaatatacgatagtttttattaagaatttggattctatttgatatgtgagctttttcattcttaaataaatacttttaatattttaagctgtatatgtgccgattttctcttccagttttcttggcaaaactttctgtctcagtatattgctcttacagtgtgaagtcattacagcacgctctgtagttttgtgttgacattcactggcagtgagctaggtaatatgtttttgaaagtatgggttggaagacatggtctgcatcttgctggagatagtccaactgggacttgcatattgtactcaggaggctctcatatgtacaatcttagcgtatgtgttggtgaaccagttgtaacgctcactgaaaactaaacaaatctagttcttcatgggtagtcagtgctgctttatcactgcagtggtgacagcgggcgtcttctgtgtgtttgctgagggaactgtgtcgggtgtgtgaatactctgctctataaccctagaccgtcagccccgaccc

SEQ ID NO: 33628 - DNA, 1166 bp, Mus musculus
attgcttttgtggtggttacagcgtcgttcgatgccaaggcacgcttcatttcttacggcgtccccttaatacgaattcaaacatatccagtttaagacctccgctgattgctagttgctacagtctccaaacagactgtaaaattggttcaacactttccttttcgttttgtttttctgtggctacgctccactttccacatcgtattactcagtacacattgtctagacaaaaaccatagaagtttgcaattcttactcgatatatttctggtttatttttcgttctgtatttactaattaataattgtgactacttaatttataaatgagacatttatttgtaaagacccccaccccgcgcgcgcgccatattctcttcattaccctcaatactgcaattgaatacaaactgttgttcatgtcagtgtttgcactccgtttttgtttgtattttgagacaaggtctcctgtgtactccaggctggctcagaattcactgtgtagccccgactgtccctagctagcaatcctttttcttggccttccaaaggcttggaagtatggttttgcaacaggtcactaagtactcttctctttgctttggttctttggactttggcactttcactccgacgagaagagcttccggctacctttgtgaaaggtttttgttgttgttgttgttgtttttgtttttgttttgtttttacaatgtagagcaggtctcagaatgaacaataaataaatttattattttcaggttaattcagaaacttcttgcttatacagtttttctaaattaacaattacctaagtatcgtcattagtttcatattgctggtttatgattatccccaaatttaatgcagcttaaaacaacaaacatgtactatcttggtttctttgagtcaagtatcagggcaacgttcaacagagtagttcagcttgtttcttgaggtcgtagttaggctgtgtttgggacttgtgatactattgagagactgcactgagatggactaagggtgcacttccaagtgcatgcacatagttgccagctgccctagattctccgctaagtgggttttcttcagaaaacccccttagagtatagtatggctgttgatttcccctacaacagacaagctgggagaaagcatccaact

SEQ ID NO: 33629 - DNA, 1311 bp, Mus musculus
ttaacccctgtggatacttgagctagctaatggtgtgtttccttttccttccagatgctgtctatgtactgtgctactctttgattctactttccattgacctcactagtcctcatgtgaagaataaaatgtcaaaaagagagtttattcgaaatacgcgccgtgctgctcagaacattagtgaagattttgtaggacacctttatgacaacatctaccttattggccatgtggctgcataaaagcacaagtgttcgaacttcaactttttactccagactgaggctacccagggacagacttagtggcagcagggttgcatcagcactggtcactccagtccagcctgtgtgtaaaatccagcttgactgcacccccccttttttgtttcactgttttctagtttagaaatctcagaactaactaattttacagaacttttcttaatttgctcatcatgtttgcacaaaacagccactgtctaacacaactgttagagaatgttaaactgacatatgctctataaatggagtgtttgtgcattagattggtctgggaactatccatttccatccttttacaaataccatgtaatgtatgcatatttaactgaagagatttataatcataattattttattgtaaagattttaactaaaggttttccttttctcttgaactgagtttggaaatttatttgactttgaactaagaatattgttggctttgtcaaagttggatctgaccctagaaaccaataccagcttcccatttctctgaactttgaaaagaatgttgatttgttactatattaatatactatgcaaaactggccttatttgtataacatatcatttgattcatttttaaaacttctgggttaataaagtttcagtatatcacttaaacattgagaatataaaaatgtgtcagaatttagaagtcacatttataaacagaataaaatgtgattagaactcaaggaggtatttacttccttgtttctgaaatactcagtgttaactattttcctaatcttgatctcttgattagttaactaataatgggatactatgctgtgaatcacattcttcaaatatttatcaagggctttctctgtgctgtatcctatgctccactacagtactggtacctggacatgagttctgcattcagagatggcacatgcttgtgtaataagggggaaactgctgaattttttttctcttgttattttttggagtgtgattcactgatctctccctctgtctactcccgacctcttttctgtagctatctgtgttaccacct

SEQ ID NO: 33630 - DNA, 1112 bp, Mus musculus
ctgaacctctgaacctgtaagccagccccaattaaatgttgtttttgataagacttgccttggtcatggtgtctcttcacagcaatggaaaccctaactaagacagagtggcctgtgggttcccagggactgcctgccagagttgggggctgggataaagcaagcagtggagggaaggaagttaaggggaagatctctgtggtaattagggctcattagactctgaaactgaatccaaaatcttccgtgtagtactgtagcacgtcaggggctctgatgaaggaagggcttgataaatacggattgtgcgtgccacttaaagcttgtatggaacgctactactagcaaccataaagttatctcgttgcttcttcataactgtaattttgctactgttatgcactgcaatgtaaatatctaatatacaggatatttgctatgctacttctgtgggggtcaagacccacaggttgaggaccacagatctagagccttttgtatacaaagcaagcatggcactactgagctgaatcctcagctctagacttggctttggcttgaacatattcatcatttgtttgattgattgtttgtttgtttgtttgctctaggactggttgttctatttctgagatctctgagacccagcccaccaggaacacacaaatgtggaaccgagataggctgaggacttattaaacagaattctgctgttcctatcccagggttggaccaatgtgtagaaaattgcttatgggattctttgaatgactttttcattgcgggaaatattaaaaatgaacctgccaaccttccacactcctgcttctttcaagccaccaactcaagagatctgtctctgcctcctacgtgctggaatcaaaggtatgtgacaccatgccttgcttgtctttttatggacactgatttttatctacttttgatagctgctgaggtaggtttaaatctgagaatctgcctagcttttccatggtgacgatccattttaagttcttacaaataacaacagagctctactttctctgtgtgttttccaacattcctattacctacttttaaaaatcatagtcatcttaggagaagggttattt

SEQ ID NO: 33631 - DNA, 1146 bp, Mus musculus
ttaagcaaagtgttgccaaatgacttctgcagcttctgtttgtcacacttttattctttgtttggttttgtttttgttttttgagactgtgtactggctggttttgtgtgtcaacttgactcaagctggagttatcacagagaaaggagcttcccttgaggaaatgcctctataaaatcccgattaatgatcaagggggagagtccagcccatggagggtggtgccatccctgggctggtagtcctgggttctataagaaagcaagctggcaagccagaggaagcaatccagtaagcagcacccctccatggcctctgcatcagctcctgcctccaggttcctgccttgtgtgacttcctgtcctgacttcctttggtgatgaacagcaatgtggaaacgtaagctggataaatgcaacttgcttcttggccatggtgtttgtacaagaatacaaaccctgactaagacagactgggtctgtacatacctctggctatcctggaactcactttgtaaaccaagctagctcagactctacttcccgagtgctggggtttaagctgtgtggtactatgctggctgtgggcctgtgtactgggggcttttcacggagatctctggcccagctgggcgcaaggcttcaggcaaaggggagagagtgggagcagggagagggagttgtctccactgcctccacagcagcagctggctccacctcagtcacctcagttgctccaagacactgctgtaccagtcaccctgcactgagtcaggccggactaagccaatgagaggctgactagccagagaggagtgtgtgagtgtgagtgtgtgtgtgtgtgtgtgtgtgtgtgtgtgtgtgtgtgtgtggcttctggtggtgtttcaggagaacagacctcttcccaagtggcagctcttatgacagaagctctcagacaatggagtagttctcacacacctttattcctcctggatgagacccttagatacagttttggggtgggtcatggtctgaaggcaggtacttcccattgggttggtctgagagtttgggaataccttatctgcatgtgggagggcttggggtgctgcccctatgtgactgatggccacagacctctctatggggggactgtggggga

SEQ ID NO: 33632 - DNA, 2194 bp, Mus musculus
tgcagtgactgtttacaaaactgctcttaccttaaactctagatgtttacatcgttttttgttttgttttatgatgatgttggtaatttgtgcctttaactcggtttcctgaaccgccgagttaaagcatgtgttgtcttctttgggaatacactcaggggtctggaaggcagtttggttttttttgttgttgatgatgttgttcttgttttttaacacacttgaaaaaaaaaaaaggttggagtaagcagactttcacatccgacttggtgatgatcaacctgctgtgtatttaattttacatctttcggaagcactgccacgggtcgttggccagggtggccttccttcagttacgctgctgtttgaaaggtgaatttcaacacatttagtgcctctttcatttctcagtatattgtttgagagcttctagtgacacttctatgatggtgacaatgaatgtcacctggggaacccgtctgttactcacaggagaatttcttggctatgaagtggaatgttgtatggctgggtcgaggacaacagtgggcccaactcaaggctgttccgtggggcttgaagattctgtggcattacctccctggcctctgttcacaccagcttctaggctagcaaaggagtccttcttctaaaaggaggggttggtttttgcccatctacattttgcatctgctttccccagtaccagtcatagaaaactaaacataattctcagtttgaaacttgaaggggggttgaggggcagggaaacaacacaataaagccctagtgtggacgccttaggttggtcctgaggtaaaaatccccaagcccttgtgagatggaagccttagagaaccacctcgaagcacaagctgtgcacagagataaactgacactttgtctacattcaaaggaaattccatgagcattctttttaatttaggaaaattagtatctaattttctattcttagatcttattatctaagaatacaaatcatcaacaaatgtggacgacattctgcgaagttagatgctagctctgtagggttccttaatttcttttttaagaagtataaattttttttatattccccagggaaaagaagatttaatttgaacatttattaatacaatacctactttaagagaaccaaatgttgaaaactttaatttctaggaagtctcttattacaccccccttcccccaagataaaatgtctacattgagtgccaaaaaaagaaaaagaaaagcaatgtggtgagctggggccagttaaacatttttgatcatgtaatcatggtatcgatgacagaaattcacaaactactgccagaaggaaatatttttaaatacagcttagggaaaagaagaaaaaaaaagcctgaatttttttttggaagaaaagcatacaattatttttcttccaaccttagttcatcaaatttgggcagtaaaaattcaacatcctgaacagttttatttataatcttgaattgtcaatttgtattttgctactgacctgtgatcaactatttaaactttcatctctagggatatttaaagaagaaatgcatttatatgcttatataattgcaaataaatccactgtagagaggaaactcggagaattggtaattatttgtgtgttagaaatggacaccatttttcatgttaaatagattttaacctcgtatctatgcataggctaaggtggcacatgaactgtgcatgtcatgttatgggtaaagtaaattgtttttacaattcgttaggatactatatgaacatgattctatatattgaaatcagaaacctttccacacatgaaagtatcagaagctgccaccataatgactattttgtacttcaggctgctttggaaataatccccatcgccttgctttgtaagttgataatatcactatgcatttctacacattttataaatttgatttatgcagattttgatacactgtatgtttctgtagaaattgtacaaatattcaaaattttattagggtaaactcaagaagcttatgtataacttaattctgggttgcttgttttttaggtgaggaaaaataaaatattgtattttaatccatagcttttcagtgcttgtaattatttctatatataattgcacacttactcgggtttttaagaagagcaagagccaaaaataaat

SEQ ID NO: 33633 - DNA, 1202 bp, Mus musculus
tgctcatctccatggactcaagagctcgtatcctcctcagaacccacagaatcagcactagatccgaatggtacagtgacctataattgagatgaagacaaaattcctctaaatgtgattattttagcacaaaattctatcccaaatgagcggaatggctatttgcttttgcctccatttaaccactccgtggtagttagaggagagccacactgtgtgccgttatccttgttctgagacaccttgagtcccctccccaagaagtgctgcccagccagtgagaggactgagaaagcagggtctgttccgtgtccagagcggctgtctgcccccagtgtacttacagagctcgcctctctgtgcctctcagtcacatggatgctaaaacagacctacaggttggtgatactagttacagcccggcaccacaacagccctgaactccgtgacagtacattgaacttggaagtctcacactcgggtgctggcttgttacaaaccatactgtttcctgtgtgttggttctcttcatcctttagatccgaggcctcgaaactgcatactgtattgatagcatggggaagacgaatggaggcttcgtggagctaggaccctgccacaggatgggtgggaaccaggtgagtccccttccttcagggctggtcagcactgagatccaccagactcactggtcacagacagacgagtttagtttgggtttgggttttggtttgcttgtttgttttgtttttaagatccatctacccatccatttgttatgcctgcatatatgcctgcatgccagaaaagggtgccaagacttccttatagatggttgtgcgccaccatgtggttgctgggaattgaactcaggacctaaagaagagcagtcagtgctcttagcctctgagccatcatctctctagccctttgtttggtttttaatttattaattttgacttaataaaaaatgttcagtaaagctaaaatatttcacttaaatagggaaatgtagaaatgtctgcacacaagtgataaaagtatgttcttgtgggaacatgggaacgtatactaatgatgactgagtaagcctaacccctaaaggtttgcaaatggggtttactaagtgaaattggtttacttccggtaccggtaggtattttacacaaatattattttacacatattctcttgcttcctaa

SEQ ID NO: 33634 - DNA, 1107 bp, Mus musculus
tgagccaagatttgttagcatggtagcacattattagcatatgctaccttctttaagagagagttcttgatccactaaggtttaacaatgctgcatctcatactacccgtcagatttacagtgcacattgacaagtaagtgtgttagcagataaagagagtcgtatgaaaaaggaccttcaggcctggagctcagctcacccagcctatccactctttgcagaatactttgttttcatttgaatagttaatgtctcctggaaaggtattttcctggttacccaaacttgttgggtacaaatggactctctagtggaagaatctatcctcactggctgatgaattacctgtttttcaagctctcttatgtatgccattttaccatctaactggaatcttaccatctttctcagtctattcagggtcttcgtcttttctaaagcttttcccgattacttactccacagtgatgtatctgattcagaaaggttccccatgtgtcccacgacgatatctaactgtaatactgctagcattgcctgtttccagacatgctcctatgctactggtgggcagacaggcactgttgtaagctgccctcctggtcctctgctgactagtccctagtggagggcacttcaacgcttggtagtagcttttgtcactgtctccttggtcataagtcctcagagactttcttactttttacttattttatctatttattcattcattgtgtgtatatgtacactgcgcgtctattggtttgtcttgtctgcctgtctgcctgcctgcctgcctgtctgtctgtctgtctgtcttttggcttcatgggaggtggaagctccaaggactcatagactcatgttccagtgctgtcagcagttatgtcgcctatgttgggtttcatgtggatggcgctcacactcactgatttcactcttattatttgtttaataataaacaaattattagctgtatgtccccatttatagaaactttctcacggtcatggagaaattctactgaatgatttcagatgggtttcttgggataatcctgttttgtgggtcacctctgtcttgccctgttgccacacaaatcatga

SEQ ID NO: 33635 - DNA, 1202 bp, Mus musculus
atacatacacatacacgcatacacaatggcacctgcttgaactagcataggtattacttgtggccgtgggtactgcactgagtctgactgattcctcttccccaaaggtccagttcctctgcaaggaaggtagacacacagccaccatggggccagatgctcacacagccaccatggggccagatgctcacacagccaccatggggccagatgctcacacagccaccatggggacagatgctcacacagccaccatggggacagatgctcacacagccaccatggggacagatgctcacacagccaccatggggacagatgctcacacagccaccatggggacagatgttcacacagccaccatggggacagatgcaaagccaaccttctctctcattagcagaggaagctacttgactctctccaggcttcatttggggcatgcttatgggatgacagtaggcagcttaaacttctagaaaccattccatttcctgcttgttggctattgtgactcatctcagtttctatagttctgtgttattctaaatgcaggcactggaatatcctgacctgccataggccagggtggctcttgctgtcattctgcctgtctcctgccacttctgttagtagcccaatttggaaaaagggctttgctgtccttgtttcctctctcgttcattctccctccccctctccctctcctcctccctctccccctccccctccccctcctcctctccctctccctctctccctcccctctccctctccttctccccctccccctcctcctctccctctccctctctccctcccctctccctctccttctccccctccccctcccctctccctctccccctccccctctccctctcctcctccctctccccctccccctccccctctccctgtccctgtccctctccctctccctctccctctctctctctctctctctctctctctctctctccctccctccctcttctcctccctccgcctctgtgtgtgtgttatttattttttatttttaacttcaagcttttgaaactaggtgacctcatctctgggttggactacagttagatgtctcaaaagtaacggacttttctccattccagtatactatccagaagccggagattcacttccagaaagcactggcctaacgcccatcctttgccttgaggggg

SEQ ID NO: 33636 - DNA, 1201 bp, Mus musculus
gcctcttttcatgatatgaagttttaaagagttttgctttcatctctggagaccccacttttaatgctgtattactaactcaaatgagaaggatcacagcatttttcaacaaaatcgagagtcattcccctccgaaaataatgaggccctcttctccgatttaaatttaatctcggtaagaataacgagtactgttattttatttttaaatacaaacaagggagactgaaactttaaaacagagatcagaagccacatagtgtgtgatgggcatgatggagttataacttcagaggctgcatgggctatcaaaacagacccagatgtttaatgaccatgtgattgccatcagaggaagtgaccatggacaactgctttcttactgaggtactggtctttttcatatgagttggagtagactatgctgctaatggtcgctagtgtaggtcaccccttgaagctccccttagaatatcatggaaagtctttaaactgtaataatcaatccttttaagtcaatgggaacaaaagtgggtacattaggcgaggttcgtgtgtgatctgcactctacagcaggggtatatgtaagtgaggatagtaggattgtctgtggaaatgaccaggacaaggctacagacaattcctgtggaaatcaatctgaccaggcttggagtttgatcagatttaccctttatgagaaattcctaattgaaatatcttatgggtcacctaaagaaacctatagcctgcagctataagaagccatgacttctttttgggctctctggagggcaatttcatacagaaaaattttattcccagatcttagaatatacagagtccatgattttcatgaagattgaaaaatacttttgatatatctgcccacagtaccaacagggactaactattgaatgttttgtgatgatatgtgaactctattctattccgttctcattctatccaaacccatgtgtagaattcctcatggaaactgcagggcaaggtacccattccatacagatactgatttaggattataagctaaaggaggccaatttactatgaaataagatgtatggccaaagaatgtttccagtttgatttggattctttagcctgcagtgggatagagagtaaggggataattttcaaaccttcctctttaaggcaccagctgttcttgggataagaatctcc

SEQ ID NO: 33637 - DNA, 2729 bp, Mus musculus
atctcatgttgctctgcacctcactggctgcactccctgaggagtgcagtgggagtgcaggcttgagcctccgcggagccgtccgtctgtccctgggatcctcgagcgtctggcggttccctcagcaccacagagacgcattacagtccctacttctggagggactactttgaattgagccatctattaagactgcaaggtcttgcccttttataccagaactgttgtgttaaactcatgaattgtatagttacgcatcacctttctacattccaaaagagcttctctgtcctccctcccccttcctctggagctgtaacgaaacctctctggtgtgtccttttgaagcagtcctttctcatattgagatgtactgtgattttactgacgtttcatcacaagaagggaatgtttcttgtgccattaaccatgtagtctgtaccatcactaaaggcttgggaatgtgtgcacacaccactgctggccaagcagggaaaatctggaggtgtgaatgcaatctcccagcttgtgtgctgtgtggttcagaatctaaaacaaacttgactctaatcagttttattttttcctctcagactttatggataatgtgacctagtcttatgcaaattttctatttctgagatgactactatgacagagaagtgctgttcagcataacgaaagcaagcgctgctgccgtgactgtaaagaggaggaaggagtctgtttagctgtacctggtattaattgcatgttaaacactggaattttgttcttcaaattagatcattcttttatttcaggatgtttcactgctgacactggagatgaactgtaattcataacttgcactaaatgtatatttcttttcttaaaaatttaccatttttatttatatttttatggattaaaatttataaaatgcagatcagttaatattgcacataaataattttacctttttaatgtgactttttttaatagactaattctgacttacaaatatggaggtatgagtaaagattaccatgggcacaagggtttaagaagaggtagtcatgtccgtgacccagagtacacatgataccttctgatttctcactgccatctcctggcctatgccctttgacctgtccatcttgaccacaaactagaaagttgaaaataccataaattactagtactagattaaagccaaacttttttttttttttaagaaaaatcaatcaaaaatgaaaacaagaaaatcacagtgtggttataacctttgaatcactgggtaggtcacagccatccctgaagtgttctgtgatgatttcagtagatatggtgcacgttttacagattagttataatgtacctcagagtataaggagttgttattggcagtgttttaatcatggtcttaatttccaactggcaaagggtgtttactcactagactgcccagctagtcttcaagtatgcatttttcaaaggccaaatgcatttgtgcagacagatattttctgaaacaactggcatgagccatttttaataaatatgaaatcacattaggtctgtatgatcttgaagacttagaaaatcaggaagccatattcgagtgatccaaagttccccaaaattgctgtctgccagtgatattttgtctttttactcctgatggcagatttcaatattcctcgttgctctttggctaaatagagtggactcatttttaatggtagttctgtagctctgaaagtattcttgcagtatggaagacactgctggggtaggaactcttcagcactgctgattggtggctcagccccttctgagttccaggtcttcaaaggagacgccagtttctttgtagtttaacgcgatgaaactgaacatgattttttttcccccacatttccttttctttcatattctggtttcatgacccatcttcagagactgacatttcaggatccatattaaagcattcattttctttgttacatttctctatctgatgtgtcttactgctgaaacacatgaaaagtgacgtgtttttaatgcgttcagaggtttggagtttgttttttctttcttttgggtattactatctgttctgtttttctcttttcataaaggtttggttgatttccaaccaaataagatagtggataccatgaactacatgtgcctagctaattggcaaacttattgaccaatatactaagtgcagcgcctcatttgagtaccctttttaggaaggtatgatgaaaatgggcgagcgtgtcagcatctattaataatcgtttttggttttggttcatgaagaatgcttagtttgttaacctgtgatgttgcctagagctgtatttatctgtttttatttatactagtgtagtaaaagctgcatatcattacagtaaaaatgattactgtgatgagttaagatctattaaaatctctacttaaaagtgtggtttggcttttaattgcacctgtaccaacagctcttcctttgcgcagccgcactgtgtggtcagtgtaagccagcatgattgagaatgcgtgtacactgcactgcaacaggctagggctcagtgtacctcagtggccagttacctcctgccaacatgtgggagccagagatcaaactcaggcttaaggcctgctggaaagttcctctgcccactgaacaatcttgtcagcccaatactaaggggttgtttgtttgtttttgttgctgt

SEQ ID NO: 33638 - DNA, 1176 bp, Mus musculus
atttctgcagtctcctttccccattctgtgggatgcttaggagtttctgtattttccttcttttcatttatttttccttttcatgtaaatgtttcatctaactagagtaaatattttggtgcattatagctgaatcttatggtcaaggtagatttaacattataggaaatggccaaactgttcttccaaagtgtccgtcattttgattgagagttccaggtgcctgcttcctcatcagcatttatttggtagtgtcagtgttttggagtttatccactatgtaaaccacaagagtattgcagtaagtaactttgttattctaccctgagatccagtttgtttaagtatatttcagtgttttgaaaaagtctccatattattatatgtgccttttgaacatattgatcacatttttgacatctgtgcctgagaatttcagtacctggaccatccttggttccatttgtctccttattttcttccttctctttttggatctttcttggctttagttcctggcagggtttgtgattgttaactggatactggatactgtatgcagatagttgtggactttctgggtggcaatatcttcaccagagaactttcaaatttctccccaggaaacagacattctagaatcttggaagagaatttacaacatggttttaagactttctgttatttgtttctcttagaatcattttattcttagggcattgctcttgaggctttttgcagaaagctgcttatctgtgtactggaagtcttcagtggtaggcactgatgcctgctttttgcctcttagcattttaagatagctattggctctgctttttgtaataatgactgcctatttaccttttgcttctttcgagaatcaaacattttcggaataaagtggggtacagtgaaccacttcatctcttttctgcaggttatcagtccatttaaattcacattgctgtggtgcttttgtacttcagagtgtgagttctgagcccttcaaattgttaagcatcagcagtcaccttctggttttccagttactctgtttatgagtgtgtaaatggcacaagcacaaatgattgggactgttaggctctcctctttgttccgttgcttttcacaacagggccacctctagtctgccttctcggatgatgttctttgatg

SEQ ID NO: 33639 - DNA, 1177 bp, Mus musculus
aagttcacggtggttcgtgcaacaagttacactcgtgggtgggtgggtgggaatctccaggtatttattccaccttttggaaaagaaggaaataaattaaatgggtaaaattattctcattctggaaaagttcaaatggggaaacacagcatgagaaagcaaggcttgttgcaacccactgcaaaaggctgttgagggccagtttaaatctcaggcatcctctgattttagtatagatgaggtaactggggaatatagataacaaaattaatagtcaggggagtgtttaaatattatttaaagatggtaatgatagaattagcctagaatgagcaggataccagccagccagttctcctagtctggtgtgccttaccttttggtacagttttgtgtgtttgtttttgtttttgtttttgctttttgtttgttttggtttgagttttttggtagttgtcctgggaataatgtctttgaaacacagtgatctaatgaggcatagtctggaaactgtgaagtgaaaagaaggaagccgagagtgggggaggggcttgagaactgacgtcatcatcatcatcttagacggggttccagggctactctgaggtctgcttgtctcagagacactagatcagcacttcacagccttcctaatgctgccaccccttaattcagctcctcaggtgccatgaccccccaaccataaaatgattttccttgctacgtcatacctgtcattttgctactcttgtgaattgtaatgtgaatgtttgtgttttctgatgggtcttatcaaacccatgtggaagggcccttcgactcccttaaggggttatgacccacaggttgagaaccattgggagaggggagaggatgggggttttcggaggggaaaccaggaaaggggataacatttgaaatgtaaataaagaaagtgcctaatgaaaaataaaattaaaaaaaaaagaaccagtgcattggatgttgataaaatgtgcacccctgagtctccgcccaacctgctggatctgacttcctggggctgcctgagacccagaaatctttgatttacagaggccgtttccatgctgaaggttctccactcccaggatgttcatttggctcatagttgtgccaggatatagggctctaaggttgctaatcttttcccactgat

SEQ ID NO: 33640 - DNA, 1144 bp, Mus musculus
gtcatagacaattatgtattttatttgaaaagaagatactttatgtgatgtcaacatagttcgacttcatatttttattttttcgctttaaaagagacttcaactctcttataaataatagtctttgtaatggttcactttaattcggaaaactgggtttgttccaaggtcagcagcatcttagaggtagtcatgggttacaaaattctagagccatcctctaaactgttcctcttgctatgactcgagagatagggttttgcttcagcggtaaacgctcccgctccttcgcggcaagaaaatgaaaataaataaagggaacaaagggaagctggagggaaagaggagagataaggtacgaggctacagagagccagagggcagaaggcagcctggcacctgtcattgatggagagagtggagagcgggaacgtagcttagagtcaccgtgcacagcggctccagctctagcacacagcacggttagggttgtcactgtccccctttataggcaagggcgcatgcaggtcttcacattgtagtggaacaagggtctgagctgaattttatcgtagtatttggtgacttaccatggacccaactccacctaaaggatacaacgtggctcttcccaccgtgtttagggaggagggtggataggaactggaactcttcagttatgaggctagcttatccctgctgcagactgagagtgcagtgcaggggaggatcggggatgttgacctcggaggagacagggagcctgctgagggaaagcatcccgaatgaaggtccttgtcccagagtggacaatgcttattcactaagacaaagaccacactctggccttacaacgccctgccttaccttgttatgttgttaaagcttttcttatctttcccttgttccttttgagtttccgctcccatcttgttttcttttttcctaccatatgatgtcttaagaacaatgtgcagatctgctaggcaggtccttgggcttcttcagtcagcttagcttattctgtaaaccccaaaaccccagtgagtgagagagggaggaaaatgtggagggcgcctgagcgagatcacccaagcttgtcctctgtcctccacgtgccatgtgccacacaagcacacacagg

SEQ ID NO: 33641 - DNA, 1121 bp, Mus musculus
ccatgacacccctgcttgtgacatcctgaggcatgattcatactgtcgtatgcctctgaggcatttttatattgccctcatcctcaggggaagcaagatggcctgtccgattgcccggttcggtgggaaacaaggtgctgagggaaagacatcccgtgtgttgggatatcttctctcctcatgtctgcagcatcaagtaccactcccatattcctcagctgtatctgccctgcaacctgagggaaattgatcgagtgatcggaggcagtgaaatgacctaaataattcaatttctttctcgtcaattaatctcgagtagtatcatggatgacacctttgaacacaatttggattgacattatttcttaaaggtgctataatgaatttttcgccataggcacacctaggctgctccattttgattgctggtcctggctgaaagctataagtaagaaagagtgaacttgaaaatacagaagtgctttaataactttacatagacttggtgtatcagtagagagatgagtgtagagtcacagcttgcctgtgcagggtcttcgtgagaatgtgaggctgatttagccccaggccaactctaggaacagtttgattcatggtcgaatataaaatgaggtatcatgttatgtgatagccaacagcactctgtgtatagcacattgtactgactggcatatctggtacaccttgagtctttagacaattggggatagaatataaagaaaaggattctgccttccctggataacttcatatacagatcctcttgtctgtgtgacttcgtccaggataatttgttgtattaaatatggtgaacttgggttggagagatgggttcagtacagggcttgccatgtaagcatattgacctgagtcaaattcacagaatttagataaagccaagacactagataatcccagcatgctcccacagctgggtgggtggcagactggagagcccctagaaacccccaggtcaacttgtctggcataagtaactatggatgaacaaaaggccccatcttaaataaagtagatgatgaggaccaacatcagagattgtcctctgacttccacatggcaccaagctcatgtgcgtacac

SEQ ID NO: 33642 - DNA, 1201 bp, Mus musculus
taaggaaataaacttcagagcctgctgacaagttagtatttgattaactattaacattaactttaaaaacgaatggtatctgcttcagtgtttatcattaactatgttaaacttgtactcagatggacaagtgtgactttgtgttttcaaagaataatcttaatagtttgaaatgttcgggcttgggcagtgtcctcggtcacttagaacagtgctcttcagttcgctaaggggatgcactgacaggtactggtggtgagctgaataagggcccttaaagatgtcctcctcctgaccccagccccacacttcctgcttccttgctagcatcaaggactgtgaagatgaggacttacccttttgggtggacccagtgttgaatctgggaatcttcctgaaaggggacaagatggagatcggtagctcacaggtggaatcacagccatgggacgcagaaggccaagaaagagaggccagaggcaggctctcccctctccacgttcacatggaaggtctccctacaacactttgattttaggatctgggttcttcttctcacaaagtttgaggtaacttcttttggtggccacttgtatatgacattgtcatccccttgactgtccattggtgaaaaagggcctctgtctgcttttaggacatggcagtgattccaagtgccatatctccaggtgatggtcttccctctgcagtcagttcttagtgtattggaagtccgtagagctgtacatagagcagaagtacaaagagctgtatctatctccctgtgccctcccttcatcctacgaaccacctagaacatccagaggtattttcagacctgaaaactgtgctttcttaggtcttcacttattccttttgtcacagatttcaaatttcccccctcttaaacctgctccagattcagtgtagacccttctggatgatattaatttggtaattccgtgatcaccgtcgcttgcacagacgtacctccttagggctgaagtgtagctgggcctgcttcatcatatcaagggagacgttgccaggtgccacacattgtcatggcacttctgctgttatttattggtagtaaagtcttcttgaagcttctcctccttacagtgtcatttccgccctaagtgcttgtaaaccttcctttaatgtcatccaagaatttcctagatggtctgcaaattgc

SEQ ID NO: 33643 - DNA, 1160 bp, Mus musculus
aatgaccttgttctacggttctcttctgggtaagagagtaaggaagtcttacaaccaacttttccttttgtttttttttttttttgtttttttttaactttaagataaaagtagctgggaaatattgacatgaactgaagagtcacagaatggcaagagatcccattgtcttaaagagatacgtaatgtggctagaagtggaatcattcctgttaattgatttttttttatatatatataaaaacactgtatattatgttcctttgtgttgaattttttttttaaagaaatactttacttggatattcatgtaatatataaaggtttggtgaaatgaactttagttagaaaaaagctgacatcagctttcatctgtgtgagtcgacaccaatgtgtcataatattctttattttgggatattagtgtattttatagaaattttaaaaaagcaaaaagactactacaagttaagatgatttctttttttacctgtcttttctccatattttcagctatgtgattgaagtatccgtggtaatagcttcctggtataacgctggttaaactctcatctgttggtagatcactaggtgatataatgtgtgggttttgtattgggctttttggagacagtagatggatgttgtaacaagggcttgtcacaccgtggtggggatgagaagtcgacaatttctcatgccttttatggtaattttgaggactggatgaaaggtttcattattaaaaattgatgttcaacccttctaggcccttttttttttaatcaatctttgaagaatttgcgccttaaaatgaataagaacctcttggaggtggagaggcggctcagctgtttaagagcctgcaccattcttgtggagaacctgaattcaggccagaccacagctgcctgtacctccagcgccagggaacccaggactcctgccctcttcagcacggacacgttggacttgatttctagttggtaacactccagatgaatctccgtctgagggtgccttctatgaggcttggcttgatggtgatgatttctttttctctcaaactaactttattccccaagaaacttaaactcttcaatgagttctggatctcctaagacagtgtgtaacacttgctgagcttgatccctccgggt

SEQ ID NO: 33644 - DNA, 1131 bp, Mus musculus
tcatctaaaaaggatttttctttcctttgcccctcacccaccctgtttcacaccactccccctcccatcacctctctacctgactacctccacttgtttatcttttttctgagccaggatgtcactctgtagccctggatggatgccctgaatttactatgtatcccatgcttgccttgaactcacagcagtccttctgccttattgtaccaaatgctgaggttgtaggtatgagccattgtgtgtgtgtgtgtgtgtgtgtgtgagagagagagagggggggggggtatatgcatatatatgggggggttgtgtgtgtgtgtgtgtggtgtatgtatgtgtgtgtgtgtggcacatacatgtgagtgtgcgggcatgcatgcatatgcctttagtggccagaggagggtgagggtattggtaattttcctatttattgacttgaggcgggctgtcagtgtaccagaggtttgctattttggctaggatggctagccagtgacctcttgaaatcttcctgtctctgcccctgtctggggttgcaggcatgcatggacatgcccagcttttaacaggggtgctggagagactcagtaagtgctcccatctggtcagccatctctacagtcacaccctgttttcttagagtgatgctacttttctctgagctgctcagcaaaataacctggttatttaagtgcggtgcagttgactttgtatatagcagttcttggggattgtagctgtacttttgctactttgtgggttcttctttcttccatccttatccaccttttcaaccccctaacactaggtaggggagaaagagatccctgactctaattcttttctttttctttttgttttttttgttttgttttgttttttgtttttctttcactacagctactattaaacagtagccaaccttcccaaacgaccaacaacaaccaacagcattcaaccaccaaccagcaaactacctcttctcagggccatagcatttattatatacccccataagtccccagaattacaaatgtctcacagtagcagaacctatctggagctggcaaaatcatgcccctgctagggtgtgaggcaaatcatagtcagctgctgtggaccgtc

SEQ ID NO: 33645 - DNA, 1755 bp, Mus musculus
gcagccacagaccaccaagccaaaaaaagtacggccctcggccagtcgctacgcagcactttcggaccagggactagacatcaaagccgctttccaacctgaagccagcccatctcacctgactctgaacagcggcttggtagaaagtgaagacctgtgatgggcgcccttgttgaagctgaaaactgaacgccagcgcttccaccagcctactcctctgtcgcattatgggaaaggcagaagtatacttttgacttaggaaattgaaaaaaaaaaaaaacaaaacaccaaaatcatatttttcttacttaatagagagtctaagtaggtgatgcttatagaaatgtacacattgcacagaaaattcacatttattgtccaagttaagacttttggaactgctgtgattaaaatggtctgaaatgccaaaatgccaaaagaaaccaaccgttcaaaggtaaccacaattgatgttatttaagtgcctttaaatacaagctataggtgctatagcatggcagtgtgaatgttggaaagatacgatgactttgaagcacagcgtctacagatggcccagtgaacctcatgcgctatgggggggatgagaaagagaagggtggagacagccgagggaatgccttgtctttgcaaactgcttatgttacatcagaaagagggaagtccttgccttaaattctgttcatatcaggagttttccttgtctgttatcttatcaggaagcttgcttacaatctgtggtgaataaaagattaccttaaagttaataaagggttctggagaaagcagacatttattacagtccattccacaagaggcatccaaaccatgaccaaggcatgtggcatttgggggaggcaggtttggaaggcacagaaagaaggaaggaaggagctgctgcccacatggggatctcagatccatttaggtgaaacatcagggccaggccaggctctgctctggttttccccgaatccttgaaaacacaggtgtagaaaacactgcagttaacctgtcaaggactctagggggacaccaggaggtgtggagcgcatgcgtggtagaaacttccatgtagctgacgtgtgtagtagttgaagatattagtgtgtagagcaagttggacatgatagaggtggcaggggggccatctgagaagtggccggaagggtctagtctgcctgagggaaaaggagacttgatagagaacaagcttgtgcaagacagtgaacttcttttccattggcactagaggtaggtgccgagtggaagttactagttccttgtctccatggaacccagccttaggagggtcccaggctctgagcatctgtgaggccagctgcaaagactgctttttgaatgcacgagtctgcatcggctagcctgagttgattctgaccagacttgatgactttaagtcggaaccaattttttttttttaagtgagagaaaataatttggcctgatagtctaaaccatgaggctttaaaggtactctgctatgaaaagaaaacactgtgtttgttcctcatgcaaaacatatctattgttcattatttataaaggtgttgaacttcttagctcagttactcaagtcatacatagtacttcttaaaacgattttatatctgtaagcaccccgtatattttgtattactgcctcacttgtacagctttctacttttgtaagaacaccaaccaagcaagttttagcaggcttgaacactgggtggc

SEQ ID NO: 33646 - DNA, 1173 bp, Mus musculus
acatccctagattctgacccccagatatacctggcaaatgatgctactcctgtattgcttataatgaggcttatagccttgtcattggatacattgaattatgaaggaccagaaaatttttaaaatcataagagaaatttgtcctttttaagtcctctcaacattcacacgttgcattcatctttatatatttttatgtgtatttttaagcaactttaagaagcttgcccaagatcaaggctgagtctgtttaagcctcataggaagacacatcagattttcatttcatgttgctactccctaggattgaaacacaggtagtttctgtctgtggcatttacctagccactgaatatgctcccctatgggtgtccgaaccttcctcaagaccaggttccagttagtgtttcctgaactcctgaaagcaccttctcttcatatgagtagttgtagatgctttaaaaggatacactatgaaggccatctatctatgcttcgttgaacttgaaggctgacttggacttgtgtgtatgcccagcagttaactatacttatgcctttgttgtgcagggggttcccaaagaagtccagtagaactgctagaattgcctctgatgaggagattcaaggcacaaaggatgctgtcatccaagacctggaacggaagcttcgcttcaaggaggaccttctgaacaatggccaaccggtactgatggatcaggggcttaactggtactgatggaacaggggctagccaaacggtactaatggaacaggagtttaaccagtactgatggaataggggcttaaccagtactaatagaacagggccttagacttggaaccccagccccgccagccagatctcctctggttcactcaggctcacgttcataagacttgtccatgaggctctgtcattatctctgaattccagtatccctcttagtgagtaggagagacacggaagtactgatggcagcaactagggctgacaccacaacatgatatacagtgctataaaggacccacagagagtccatcttagctaggtggctccctgggaggaaataggaaggtactctgggatagctggtacccagaagcagtgaaatggaatgaaaggcttccacccaggataacctgggctagaaaacccactgctacggctga

SEQ ID NO: 33647 - DNA, 1208 bp, Mus musculus
cccttattttaaagatgaggaaagagattcagaaaggttaagtgatggaggaagtaatagtttaactttaaacatatgtaagtctcagtccagtaccgacacacccaaaaagtacatcattacttttcattactaagtcagcaagaggtatgtggataaaactctccagctagaaatcagaagttccttgggtccttgaatggattccctgtctcaatttcctagtgtagaagcccttgacagaaaacagtgggaactctccactacccaaacttgtaaatgcagaagacttagagattgtgtgtgtgtgtgtgtgtgtgtgtgtgtgtgtgtgtgtgtgtgtgtgtgtaataatttaaaaataatatataatatacattataacatataatttgaaaattatatgttagaaaagttcagtgattgatttagaagtgtaaacccagaactgttggaatgattttccaggccagacttccttctctccagagctcttagctgactgtcattcctcacccgcaacacgttcatgaacagtgaggttagcctgcctttgtcaccagtaagcacagagcttgagacgtcagtgaggtttgtgacttgtcgtacgccccaagtaatatgatatgttgcgggatgtcttttctgtattagggggctcagctcacaacccattgcatctcagtttgttcattgacagattgctttgaatgtggcattacctgtcaacatctctgtgcccttgtgacctccagatgtaggacttttttcaacttgttcttgtgtcataaagcaagcaagttgacatccagcaagagtcagcaacaccgtgacaacttatatcatgggaaggaaatgttcaaagattaccatgactggttttattatatatatacacacacattaagattaaaccatcactactcatagcaagaagcctgcatcagttagcatattcatattttatggcctcagagcaaaagatgctagcccagagttaaccaacatcaaaacctcatggcttcttcatagcttatttatataccagtcagattaaaaaagtagtttctaatacatgcatatgtggacgggtacccttggagaccagaggagttggaccccctggagttgaagttccagctgggtttgagcgctaggtgtgcatgtgctagaaaataagtgccagtctggttaagagcagcacatgc

SEQ ID NO: 33648 - DNA, 1103 bp, Mus musculus
catacaccaagaccacttgagcttgcctgggattaacctttgcttttctctttaacgtctgttccttggcttcagtgccatctcccaagccccgatcctgcctccgctgcccacctccctggctgctctcccactctgtctgaaaggtcacaggtacacacccaacttgagatagtatttagtccacttcccttctcacatttaggaagtgttccttaaatgctccggacatttcaggactctatttattaaacttcattttcaatttaactgcatatcatttcaatttccctttccttggcattgtatagctctgagaataagagttggaaacgtgcctatcacaagctgagtcacatttttttaaatgtgccccccccctcaagccattgttttcttttctttctttttttaattaaaaaaaatcctttattttaatagtaaaccttaaaccacatgaaacaagccagaaaactatataatgaattcatacatattcacatctaatgagggaatataacacaatgaccctagagcaccacccagctcaagaaagagaactttgacccatgccccagaagccctttgaacccagtcttgtgacactcagagttaccattgttcgcattaatcttacttccagccttctcaggcttgttgaggtttctcctcatgctgtggattcacctcatggccttgcagggcttcctgctatggaaggtgcttggcctctgggccaaatcttcagacccctgtgcagtgtttcaactgcaggtagtttttgtagtttcaaagggcctagtgacgtgcaacccacagcacgtatttgatctgtacagcctgataacgtctgcagtaaggagacacccttgacaaacctcatcagtcagagcagcaagtgtatgcatcatcttcaacatttgatcctctctctgcaatcctcccccctctcccaaaagccttccatgtcctactgctgtgtgttctcgcatgttctagagacacgtagaaagggaagcacaaaagtgcgtgctctcctccctgctccgctcatttggcatcactaccttaagacttgatcttgaggtgtgtgtgcatgctca

SEQ ID NO: 33649 - DNA, 1446 bp, Mus musculus
aaaatataaaagctagaagagctgggtagaggtcttacagaccctacaaaaccacagatatcaatcagtccaggaaactctattcagcaaaactttcaatcaccataggtggagaaatcaagatagtcaaaaaagctctaattcttcttcttcttcttcttcttcttcttcttcttcttcttcttcttcttcttcttcttcttcttcttcttcttcttcttcgggaaaacaccaaatgatggacgatgtcggtgcagcaggagggcccggaggactggagggggggcaggattaggaggccgaggcggcttcctcggaggattcggcagtgttcttaggggccccagttgtggctgagatcatggccatggctgtggctgaggctgtggggctcttggaggtaaagctgaagacaaggagtggatccctgtcaccaagttggaccgcctggttaaggacatgaagatcaagtccttggaggagatctacctgttctccctgcctattaaggagtctgagatcattgacttcttcctgggtgcatccctaaaggatgaggttctgaaaatcatgccagtgcagtagcagactcaggctggccagcggaccaggttcaaggctttcgtcgctattggggactataatggtcacgttggtcttggtgttaagtgctccaaggaggttgccactgccatccgagaggccatcattttggccaagctttccatcgtccctgtgcagagaggctatcgggggaacaagattgttaagccccacactgttccatgcaaggtgacaggccactgtggctctgtgctggtgcatctcatccctgcccccagaggcactggcattgtctctgctcctgtgcccaagaagctcctgatgatggccggtatagatgactgctacacttcagccagaggctgcactgccaccctgggcaactttgcaaaggccacctttgatgccatctccaagacttacagctacctgacccccaacctctggaaagagactgtcttcaccaagtctctttatcaggaattcacggcttatcttgtgaaaacccacaccagagtctctgttcagaggacccaggtcttacttcaaaagcctacaatcaacaaaattagaaaatctaagtgaaatggatgattttctagacagataccaattaccaaagctaaatcaagatcaggtaaactaaatagtcctatagcccctcagggaatatatccaaccgttacatctccaaacaacaacaaaaaatcaccatgggcaaattgttttaggtcagaattctaccagatttttaaagaagacttaatatcacaaactactccaaaatataaacagaagaaacactgccaaactcattctataaggacacagtcacactgataacgaaaccacataaatactcaaaatagaaagagaacttca

SEQ ID NO: 33650 - DNA, 1728 bp, Mus musculus
tgttgctggctttccagctggggcctcaaagcccttgctgacctggaattcatttgtaactcagactggccacatactgacagtccttctcttcagcctcccaaaaactgggggtagagtgtctgccaccacaccctgccctgtttttatcttttgtaagcatatgaggaattaaatgatttgggtaaagaagaatacttcttgttagcaagcatgtgattgttagtaagaataccatttgttcagcatgtgtctggtgaataacctgtgtccttttcatttcagcggttatgatattcctctcaacccgctgaacttggttcctttttatacgggcgctcggcaccatgatttccaccacatgaacttcattgggaattatgcctccaccttcacgtggtgggataaactctttgggacagatgcccagtatcatgcctacattgaaaaatcgaagaagcttgggaaaaagtctgattgagcacccccactcgacgccttcctcaactgcagctggccactaacactgcttctggggacttggctgccaagtgataaaaacgttaacgacctttaagtactcttccagatgagagctcttctaccttacgtccaagatctgtatatgtgggaacaaataagtaaatatatatacatatatatatatttaagtacagttttcatcaggaggttttaaaggccatattgctaacctcaccaaaaggtttcgggaactggaggaagtattaatgtacaactcaccacttcatgccataggaggctgaagttgacgttgccttttaagccttttacatacactggtcagttcggaaaattctcaacaataatgtttgccttctagtttaagacatggtgtattttagaaattacctgaagtgaagctatcacgaagtgagtgtatcacctggtgagcgagtgactgaaacctgctctggtctgggtttgaccaggttaggactattctttctgtgaaggattgtttgattgtagtaactctattggcatcttgtaaattggctcatttcctacgtgatgtacatagaatattatagcctaaagattttccagttacttgcggtctttttaaattgaggagccccacttccactgtccaccccttgtctttgtgtgtcaggtgatcattgaaatcgtatcttgagcttgaattcacttctctgtctgtttccggagctggtgaaataaatgtgatttttgtccgatccttctggttttcatgaagattagctgccatgttttattcttataaggaaaagcacagagatcattaaagtaagttttacaataaaggaatggttctgttttttcctggctgagctttgctggtggtcgcactgtgaccttacgtggctgatctgtagggggcgctccattgacctagggaacagcttgctggccttatgtggttttccacacgggcataaagatatacgttctaggccactcactgcatcccagtccttagggtttattgggttttgtctttttcatacaggctctgcctatcttaggctgaccttgactctgtaatcctgtaacttcagctttccagtgctggagtcacaggctaactgaccatgaatggctcggcaaggttttggagaggttcttataatgtggacaaggatggccttgctagtaatcctcttgtctcagcctcccaagatgctgaagttgtaaacactatgc

SEQ ID NO: 33651 - DNA, 1104 bp, Mus musculus
gtgttgcctgtgacatgtcttatcttttcattccttcatgcaggggtcacagttattgataaaccgttatgagcctgaaggacattttcagcgtatcattccatgagaaccaggcgtccacaagtatttctgaagggactgagcgcctggcctctccacttgtagccgcactttacgtctcagcagaagatgagaccatctgccttcagaggcctcggatactgaagattatttttggtagaagcactgtgtaggctttctctgcaccgagcagcagctgactgactttacaagagacctagactgcagtccctccactgtggtctttaggcaacagtcgctttcataaaaactagttcttatcagcctcgaatgactatggattattttgtgaaagagaataaagttaacgtgtgttcttgtaaaattaagttttatctttattctttctcctgaaaaatctcctgggaacagagaatctttggagcagattaaaatctatgtaagtatatgacactgttgaggggtgaaactgctggcttttataagtatctttgattacatgactataataaattgtgtgcatataaatgtgtgtctatatgctttcctttaaatatgtttgaaaagatgtttgattatctatttataattggcacagtactttgaattatgccagtactacattgtaaaacagagttgtattttttgatatttaacaatgctgaacactttaaaaaacgccacttctgaggaatgaatgaacatggcgtaacacactttaatatgtgtgatgccaaacttttttaaataaaatataaattatgcttatttattatttttttctttagtttaatcttgatcatgttttggtgtgtgtttttaattttttttcttaaagtaacacttttggcatgaacatacctgcaggttttttgatgaatataatgaatgtgtggaattcaactgaatttgcatggtcttaagaattttttctgtgtgtataaatttagctgctattaatggaagagaaagctttctgtgactaatcatgtgtattgagcagatagtttttctgagatcttcgattaatctctttaaaga

SEQ ID NO: 33652 - DNA, 1196 bp, Mus musculus
gttttttaaatgtatttgggtgttttgccttcatgtttgttttctgttccttgtgcatatatgtgcccatggatgccagaagagggcatcatatcccctagaactgacgtcggatatcgttgtgagctgccctgtgggtgctaggaattaaacatgggtcctgtagaagagcaggcagtgctctaactgttgagccatctgtctagcctcacagctattgacccttggtttaactcccttccccaactggtatttctgccttctgagatgttattcatgaatcagctagtgttatctaaggtcacaagtatactgttcctgctgtcggtcagatcattgatgggagtataagaaatgcgaaaggcatatcctctcttccatgcactccttgtaataggatgtgatcatcccacctgctggcacttgtcaagacgaacacacatcatgaagattagaaatacattaaggggaagcaccgttaccacagagcagcatatactaactagtatcttatgacggggggaaataggttgtttatttggctttcttttgtggtttcatgtccaggtttgctctatgccgtggggggttacgatggagcatcgcgccagtgtcttagcacagtagaatgctataatgctactgcaaacgagtggacttacatagcagaaatgagcaccagacggagcggagcaggtactagaagccccagccagcatctgaggtgggctgactgatggacatctgcagatggggtttgagaatgtgtgctgcttctcctggttctattaagtgacctgagtggcaggaagaagtagcgctttcgtatgttttcacagagtaaaagcccctctgcttcccttgtataatgttgtcttagcattccttcagtgagaccgatttctcgtgggccttcctctcccatcacatgccttcacagactgaatgcttcagagaatgttgtttgtgaaaggagtttattaaaggcttggtgttggttgcttctccttgactctcttctcctgttaggatagcttctgacccaggcccagccaggccattcccttccatttcgcagtgctgagcctccctgtcagtgccactgagtgagagttaggactcgaggtttgcatcccaagacatctgcatcagctgcactgcaccgaaagtttcttgcctaccttgctctactataa

SEQ ID NO: 33653 - DNA, 1135 bp, Mus musculus
tgcaaccctcatgtttctcagcgtcttctgcgctcgccctgctcccatgcctcccgtgcatccttcctgcttgtacacgtttccatcccgctttgtcttcttggagaagaagatgggtatgttaccctgtcctctgtagtgacatgctttctcctctgttctcatttcagtgtggaaataatgattttcagtttgagaattaagaaatcggtcaatcggcatgccagctgaggattttaaaccttctggggctggatagatggctcagtggtcaagactgcaccctgcacttgcagaggacctgagttgggttcctagtcctcctatcctttggcttctgcaggcactgaactcagtgtgcacaaacccacacttaagcacacacgtatgcacataattaaagttaaaaacacagtctttatggtaactaccttctgttctgaggtttgatgtttgaattgatcttcattagatacatcattgaggatccttttcacacggtaattgtcattgtcagccgagctctgaggtgtgagcccagatctctatgtatggggctgagcttggtgtgctgtgcaagactggttttgcagtctttctcctactgttcttactgtttgtttgaccttttcgtaatagggtgcaatgacttttctgtaattcttcatatttatttgaagtcagaggtagaggaatagcctgaaatattcacaccattggtctatgctaagccttaacgtgtctaagggttttggttttccccggtaactaacatgtgttatgtttttttgagacttgaggtttgctgagaatcacactctatgtgcacacctccctgtagttttaggtacaggtaggtgatcatgctgccagaatcacagaccacatgtgtgtgagtgtctccacattgggtgtggtttgagttttttttttttttttttaaagatttatttatttatttatttattatatgtaagtacactgtagctgtcctcagacactccagaagagagagtcagatctcgttacggatggttgtgagccaccatgtggttgctgagatttgaactcctgaccttcagaagagcagtcgggtgctcttacccactgagccatctcaccagccccgtggttt

SEQ ID NO: 33654 - DNA, 1236 bp, Mus musculus
atctgtctgcttctgcctcctgagtgctgcgataaaagacatgcaccaacatctcctgattcatgtattgactttaaattgtgcaaatttaaataccttttctggggtccaaaaaataaaaataaaggaaatatgtactaataagcagattgatttccttagcagaagtcactaagttcatttgtgaaagactggttttggaatatccctggggtataaaacccgagggaaacttctgggcaaagtgtgccttggggaatgcctctgaggactcatgtgaaatgagaccaaagatgctggtgcatccgtgtaacccgcgtatgtcttgaattctgcaggactgtttcaagcctagaagaaattgttgaaaagcaagaggacataattgtgtacctgaagcgacacaatgctctgctgagtaagcggttgttggagctggcaactcagccagccaggacttgagaggctcgtgggcatgagagccgctgagtccacagtgactgcagactgcccggctgccacaggaaaccccagcctttgccgacgtcgcgtccacagtgcatgctgggaacctgaatccagttctacctatgtagagctatgtatgtcccagatatgggggcgagcctctgagtggattataaaggtctggaaaacttgcgaatgttttgtatgttgtgaataatttaatttctggacgtttctggaatccagagtatagtttaagtaccctggaataatgcggttctttatcaaggacgtgcgacatgaccatctgctggaaacagggttttaaaccagtaagttcttgccacggttaagctgctgagagagggcattattttctgtggtcagttttctcctcaagagtgttgcaggcattttctttgtgtgtgggcatattggatgggagatgaggcctcctaagctgttttttgcttgtttgcttgcttgttttccagagctggggaccaaacccaagcaccttctcacacatgatataggcaaataccctactcttgagtcagttcctataaagatttccttcagccagccatgatgacttacagtgtcctccccgtctttgaaaatcgggggtaggagaatcaccaccggcttgaggccagcccagcccagaatgagaatttgctccaaaagcataaagcactttcctcattatagcaccaagagctcagcaggatgtgtgctgtgcaagttctacagtgtgtccttgaa

SEQ ID NO: 33655 - DNA, 1321 bp, Mus musculus
ccacagggtgaaggagagaccagattcctttgagctgtgccctggcctctgctctcaggagcatcctcacctgctatatttgctttctcccttgttgagagatacttggattacttgcttgttagattagacacctgtagcagggtagggagatgggtcaggagttaagggaactggctgttcttaaaagtatacccaagcaggctcatagccatctgtaacttcacccctaagggagttaacgcccccttctggcctccacgggcaaagcacccacatgcatgaaacacacataaaaattaaaagtagttgaagataataaataaaaatgaagcctaggtaaatcgatgtatccaacagcagctcgtactataccatgtttgtttctcccttgccttccgaatagaaaacctctaatttccttggctctaccagaagaagggtgaaagcaaagatacccaatcaccggaaaaacaacctcaggatggcaacaggatggcagctcaggagttactacgcaacagaggctgtttcagagtaccgtggatggcttttcagactgctcttcctggattctctttgacaagaaaatgatagaaagggaaaacagacgaggttaaagcacatgcgtttgtctgaataacaatctctcctgctgttctgcacgttctttgcgtataatgtatgaattacacatagtggtgggtttcacaaaggcatttacataccagtacatcacgtcctatggccgtctttccacacatgtgcatcatatacaccgattctttacaggcatgcatgccatatacactgactacatttgcacacacataccttcccctttctctcccctcaccctcctgcaggtctcttttattcacctgggcagttttgtttctattttaatggtttgtacacatgaatgattttattgcacattattattcttacatggattaaaaagaaaactactttaatatatttatgagtttattgtgtgtgaatgggtgcctctgtgtcatggtattgggtgcagctcagaggacaattttcaaaaggcagtttccttctaccatgtggagcctgtggatcaaagtaacattgtcaggcttggcaacaactctttacctcctgagcaatctccctggctcaagaaggaatgaggatgctcagtagagcacttgcctagtgtgctcaaagccctagtttaattaccagcactgaataaaataaaaaacggtggcaaaacacctaccataccaacattgactcgggtggagcggtagaggcaggagaatcagaagatccaaggttacctctg

SEQ ID NO: 33656 - DNA, 2323 bp, Mus musculus
ataggataatatttaggggaagtaaactacacagagcctatggttttcctgtgaattttttttttctttttcagtttagattgtgtaggattctgtgaggaaataaatactactgtagcaataagaggcaagtcttcaggcttggggtgttgcaacccccctccttaatgttgatactttgctctcatacatgtgaagtctgctgaaaggctgccctgtgcagcgggcagagctgacagtggccttcctggctttgccattaccactcaacactgcgcttatcttttctagggaatgggattttgatctgaagaaattgccaaacatcaaaatgaggaaactttgtgctgatgatgcagttcctaagaagcgcaaacagaaaaatattttaaatatagaaaaggatttaggagaattagaactatcagggccaactggagccactacagatgggaaactggaaccagcaagtgaatcaagtgacacggatgaagaaatgactccagtgcctgtcagccctcattgaaatacctgagaccttcatgttctactcagtgaccatggcacatagtcatttatatgtgggctggtgacatggcttagcaggagggggcttgcagccaagcctgactactgaagcttgagtcagagaatccatgggttaaagagaaaggatgctacaaattcacctgcacacaatgggaagtgtgtgtatgcatgcacacaaataaaatttattttagtaattatctgtatgtaagaatttgctattgaactcactcaaataagtatttgcagttttaaaatagatttatgatttttatttaagaattctctttaaattgcttttaaaatacagagattgtgttagtctgcttttcattatagccaaatacccagtactgggaacttagcttagagtctaaatagtaacctagtgcagttctgatgagacttctctgtctgtatcacagcatggcctacatcatagtcatagaaacatatatcggaggtggatggggcaggcaagataggaagccagcaaacaggaaggtctatatgttgccctagagtcctcttggctctgaacatcagcacatgggagagagccagttaacacttagggaaaacagcagtggtcttcaatggccgtttatccagaattttttagaaggggaatgtaaaaaaataggggtaaggaagatggcctggtcagtgaagtgcagcagagtgcctgagtcttcccagcacccacagtgatcaaggggctgttgccatgtgcccataatcccagtgctgtggaagggagggtgggtagagatggatgaacaagcagaagtgaagactgctgtctcaagtccccgtgagctaaagtactcagaaggggcagtgctaccaaaccgataaccaccgccctagggcctcaccccgcctcaggattgcactgatgggtttcagtctaaagcggcatttttactctgtgtcactgtgtattggaagtcacttggttttttatcttactgagaatcacacctaagtttggcttgattctcagaagaaagtttggccttttgaacagttgggactattcagggaccatggagactatctaaagaactgtggcggtggttaactaaactcattttgggatggccaaaggtagaatgctgtgctttgaattttaaatgtccccgtaggctcatgccttgagccctcagtgtccaccttctggtgctcttctgaaggctatagagcatttctgaggtggggcctggctgtcagtagggacaggtctttgaaggttttacataccctgaatctagccaaatctgtcaccaggcaagaagtccttgtcaagttgctgcaggaactgtgacaaacagaagtccctctgaaactgagtcagcatatactttccttttagtttccccccagttaagaatttggattacagcagcacaaaagtaacaaatccatctttcaaatatcagttcaggaagcacacttcggtgactcctgagtacctacaggcagagatcattgttggagagtaccagtcaaaaaggcttttgccgagtgagtgccaagtgacggaaaccatgcgtggtgatctgcttcccactaagttcttttccgaactttaagataattaactcacacgatatgtactcactgataagtggatatcagcccagaaacttagaatacccaagatagaagatacaatttgtaaaacacatgaaactcaagaagaacgaagaccaaagtgtggccactttgccccttcttagaattgggaacaaaacacccatggaaggagtaa

SEQ ID NO: 33657 - DNA, 1196 bp, Mus musculus
tttagaactgaactaatgaacgtaaaggtatattctctattgtcccagagactgtgatccgtgtgaagtgctagtcatttgtgtggtttctatttgcataattcaagctcaaattaattaagaaactgaaagtcactcagaaaaagactatgtgttcatatttgggccactgtttatctgtctttggggtttcttgacctgtggttgaaatggtatgaaatagtatgattgcaaactatctgtgcatgtacctgtttgcatgcctattacttagaaaaacacttagtttttatcacataagtaataaatgtatctaagaggaatcctcctaaattgcaatgtatttcattaaagtgaaaaaaaaacacttccttttgatagactagtaacaacaaatatgaaattataaatcaaatactgctaatattttaggaaatgttttttatagtttaaaatatctcaaatttacattcttatgagagattaaccaatctttattctaaacttttgagaatagaattttattaattccaatatttgaaatatttcataccttgtggaattctgtagatactttccatcattatcaaaggaaagacatagaacgtattcttcctgtcttcacatattttgcagcatgttgaacaatctctgtctaataacactgggcaacaatgacatattgttgctaatagtgatataatttatcatcatcaccgtcatcacccaccagcatcatcagacatagaatctgacctatcccttccaggctgcccccagtgccctcccacttctgattgtcctgcctctaactgccaagcactgggattacagggctgctgtaacaggcctgtcttatgcagacacagagatcagacctggagcttgctgcgtgctagacaaacattctgccaactgagtggcatcctcacacatgttatctaaaggtgtccactgcccataatagagctgtgttccaggagttctccagtgcagagctatagcaggtcacttttggaattgtattcttaaatgtgtttataaaaatgccaaaatctagcccctgttctggactgacttgctctggtttcttttgtgttgttgatctaaaacagtaagcctcatagttactttgttatttatttgaactctcttaataaaattgtgttcagacagttgaataaaatagaggtgac

SEQ ID NO: 33658 - DNA, 1210 bp, Mus musculus
tcccggaagtcccgtgaatgatgccgggggcgtgtcctcaggtcggtccgcgtgcggttacctgagaaacgcgcgggcttcagcgtggccgagttggctagcttggcttctgaggagaccctcgcgctgctctgcggcccgggcggcgccatggaggtggtggaggccgccgcgcagctgcagacgctcaagttcggcggctccggccaggggtcggcagcaccgcagccacctgaggatcgccgggaggccccgccgccgggggtgcagccgccgccgccagccccgagctcggatcccggcggaagaccaccgccgctgccagccccgagctcggatcccggcggaagaccaccgccgctgccagccccgaactcggatcccggcggaagaccaccgccgctgccagccccgagctcggatcccggcggaagaccaccgccgctgccagccccgaactcggatcccggcggaagaccaccgccgctgccagccccgagctcggatcccggcggaagaccaccgccgctgccagccccgaactcggatcccggcggaagaccaccgccgccgccagccccgagctcggatcccggcggaagaccaccgccgccgccagccccgaactgggatgcgggcggaagaccaccaccgccgccagccccgaactcggatcccggcggaagaccgactccgccgctgccagccctgaactgggatgcgggcggaagaccaccgccgccgggcggggcctgggtcaccggccggaacgccgcggagccgccgccagtgctgcaggcctcggactcctcggactcggattcggacaggtcgagtgcacgagaggccggaggggggccggggacacggggcctggggagcggggcgcgcgggcgtgctctgcggggcggcgcagccgagctccgtgccacgtgctctctgggagctgggaccccgggctcgccggagtgcttcccatggtcccagctacttctaggagttcccgcttcctttccaaacgtgatagtccccaaagttacacgtgaagttagtcacatgtttgcagtgtagaagcctcgacgttggtagattatttgtaaaattactctgctatgttattaccataggaactcagtttaacatgtgcattggggttagaaattctgactcttgtttcagttcagaattgctacgtttttcgtcgagacta

SEQ ID NO: 33659 - DNA, 1127 bp, Mus musculus
tccaaggtgagaagaaactcattaactagtctccttcataagtgaatcagacaggtacttggcctagagttaccattagttactgattgtcacatgcttgattattatttgtagagatttataacaaggtactgttaggccagaaagggcttaggttttgtataactttagtagttatatagccaatgtcaaaaatggcctctccccacaattatccttcatcccagtgttaccctgactttctcatggcctttcatccaaatgagttctgttcttgttttaagtcaaggatttaaaaataaacaaaataatctgggtgctgtggtgtacatctttaattctagcacttaggaggcagaggcaggcagatatctgtgagttggaggccagcctggtgtacagagggacttccaggacagctagggtccaaggagaaacattgtcttgaaaaaccagaacaaacaacaaactaatatcccaccaacaaagtcagtttgaaatgttagtttcctacttggaacaaggttttattttaatcataatagtacttgaccaagttttcaacttttcctctatagtgaaacagattcagatagctccagctcctcctcttcgtcgtcctcttcatcttcatcctgtgtatcatttcctcctgtgttgtcagatggagatgaggattttcaacttgagaaagaaaataagaattttcctcttaaaacaaaagatgaattgcttcttaatgtaagtacttacattgattgttccgaaaatgtacctcctcttggctttttgcatgtacctctgatgggctgcttctaaccctgacacttgatacttaactgttgaagcattggcttcactttggtggcttacttgttttcaaatctttagaatactttctaggctggatgtaggaccactagcatgcatgagaaacctaaagctctgtgttcattctctagcactaccaaaacaatgtggaaaatactgtactggcttttgtgtcatattgttttgtgtccttttctgtcaacttgacacaagctagaatcatcagagaggaaggagtcttagttgaggaaactcctccatgagacccagctataagcatttttttcaattaatag

SEQ ID NO: 33660 - DNA, 1096 bp, Mus musculus
tttcatgtttactaattttgtctgtaatgactcatttcatataatcatctaatacactagtgtccttcagcatattcagtgttttccccagactcaccagtctttcttttacccttctgttttgagaatcactcacaaaactgcagatatttcttaagtgagttaaggaaaagaacttgtgcctttgtctctgcctgttcctgtgacgttctagaaagagacttgttctattgttgttcatgcctgcagcagcaggagcatcttctcatgtgtgggtgtggagccaagttttatacaaaggccaggtatcttcaaagtgaaaatcaagtgcggaaccacttactgtgcacacacaaccttctcatttcagatcccagtgttaacacacgtgccaggtgtccctgtgcgtgtgtatgtttcctataggatgcctgcattatttgagattgataaaggacaccaaaaatagtttcagtttctttgtattttcatacaaaaggaaagactgggctcatctaatttctcatagtgttaggttctataagcacttaacagaatatgatttttttctagggacagaggatcggacgcttcttggaagaatgatcaggaaccccctccagaagttagtatgagccttttcatctaatgtttcacaaggcagcgtataccttaatcatatacattgttaatgattctatcttacttagtttaattctcatttttgtaaactttgttgatagacaaaatgttattactttaaatcaagtttactcttaagtttagtgactgccagtgtggaactgatagccttcggctgtgatgcaaaagtaagcctcctattggggatgtgggtagtgccaggagcagatgccaactctactccctcatgtttgtataacacagttagtcttctaaaacgtcatctcttgattttatattttgtgtctatgtccataggaccttagtttcgtttcctaaggtgggttagtaatttattctagacctgctgtgtgtcttatttgggaatcacatatgaatgagtcgtggttagtttcttccactccaggagatggagaattgggtattctaaaga

SEQ ID NO: 33661 - DNA, 1721 bp, Mus musculus
ccatgtttgatatgcataactttccacttccgcccccacccccacccccgcctccgcccccaccaagcatggggtgggctgcacctagcatggcctctcatcctgtgcttaacttaccatactccatgcccccaccacctcttcctccaccacctccacctccccctccctctcctggggaaaataattcttctcattttgggccttatttttagttgtatgcttgtatttcagagaaatatgataaaaaagaaaatttaacatatattgtagaactagattattttttataaaaacattgtaaaatactaaatcaaatgactcagttgtacattcatatatatttttaataactcagttgtaagctcatatatatttgtaacctttatgaaatgatattgctagggaaagttcatctcattcttaggaaactccagttcatgtaataattaaatacaatgttgtctcatgtcctctgctacccacagcaggtaaacagcgtgcatagtgatggttatgacacagggttcatcatggccgctgatacactgaacaccgatggaaaacttgacacttggtttataagtgcaagaattctttttttatttacacattgaagactttattgaaaatatttctaataataaccactattttgtgtggtttagctcactttaccaaataaaatagagcaaatagagcacatcttgagaagtctaattatatattacttcataacttaatcattaatcaggtataggcatttatttaatatacattagaactatgattcaatttttaattttattgacctactaaaggcaaaagaataagttgtctgctcccttcctgtaataacagggtctaaaatcacttggagtcctaaaaacaagcaaactcacatgtttgagttcttctgctcctgaatttgttatttttttgatacttgcttctattaccttttatatatatatggttatcctagtgcaaaaattcattagacttgattcccttaagcaagttagaagtgtgaaggaggaagacattggctgaagctctcataatactagtgggttagtagtcactgtgcattgacagacttgtgttgtctatgtagctgtcagttagttagaaagctttactgttccactgtgtacattaaggcatgtgttggtatatatgtgtattctgtgtctagtcacaggctctccagtacctgacatgtgtaacgtgtaataaaggcatattaaatgactgagtgaatttagagtttttaattaaatgagtgggttttttttttttttctttctggcattcgtgtaaatgttaaacgtggttaaggaatattggagcatgagtagtagacctgcagagtactctccatttattgactgaggagtcttgagtgctcagaagaggctatcatctaaccaaggccactgagctattacaatggcaaagagttgaatccagatttctcttctttctcagcaccgtcctcagttggtgcttctaacctttcattccttgacattcttataatactttgtatggcacacttattccaagcctgtcagctctgtttgcattaaggtgtcgcattgctccctacagaaagaggcaattacagtatttgtagtagagagctgcagatatctgtcttggtaccaggagctttacttagtctgtgtgctacatgtgtcaactttattatgttgggg

SEQ ID NO: 33662 - DNA, 1156 bp, Mus musculus
tagttcccaccacccatgtcaggtgacgtacacctatacataattaaaaataatgagaatatgtatgtatggtttgtgtattacttttaaagaaaggaagcatggggaggggggtaactatgtgagaccagctgagaaatgggctgcttcactgaaaccttgtgcatactgtatgatcttggtgtggtcagaagctagggaccacttatctgatgattgacctgataaagtgattgggtaggatatctgattgaagaaatttttgacagcagtttcctttcctttctatgtgacattgatttggttcctcggagcaatgtgtcacacagcagaataactgacacagtataacacagtataactgaagctcatactgaagctcagcagcctgttttaccttgactgtttgggcagcgtggctagccacgcccggtcacatttggcctttctctccactctggcttctttgtgacatgaaatggagagtggtagaaacctttcctgtaatcactgagcattcctgagtaggtacatcaattccagactcacacctcagcagagcggaaggtggcgtgggtgtgggcctggacatgtgtgcagagtaagagggccccttgtggggagaaagctcggacttcattctgctgtgtgacagattgctccgaggaaccaaatcagtgtcacatagtaaggaaaggaaactgcagcaagtgccacttacacactctcagtgtaagaatctgctccgacttgaatttaactaagttgatgtgtttgggatttataaaattttctcttcagaaaccaaccaacaattttaaaggcacttgactgcatgagaatgtcaagatgaaaatcaaacattggtcattagagatcagtgttaatttagaaaggctgtgcacatgtagtgttctttgatataaaagccatagaagacagtgctcagaacagagactaaatgatgtttcagtccgatttcgcttaatcaccttcaatgaagcatactcttgctgtcccacaagcagagttcagatgatgaagagtgttcagcgaaaggcagaaaccggcacattgttgtcagcaaagctgacctcagcaactccatcgaagtactggagagcttcaaactggccagggaaagctgggagttact

SEQ ID NO: 33663 - DNA, 1131 bp, Mus musculus
tatttgaaagaaattttctttagtcataaattgtgctttttttaaaaaagacaaatgggctagtgcaactacataagacattggggtgatgcacgggaagtgtacttcttagcacataatacatgcttacagatgctgccatatagaaatcctgtgggttggtgatatagcgtcagtgggcaaaggcacttgccaactggcctgatgacctgggactcgtaaggagaaaggagaggaccaagtcttgtccttgtgctctcctccctacctgcaccatggtgcacacgcacacctaagtgagtacagtgtgaaaaaggagtccctgcatatcagcaagaagcgtccctggctttactgcctaccagaaaatgcagaacaattgtaagaggaaccgtccgtctttgattagtgtgtgtgttttccctttgctgcctctgtgtttagtgtgtgtgttttccctttgctgcctctgtgtttaccagtttgggtgaatttgcttttgaattctcacgcagaatttacaagaatttgcttggcttggaagacagacacctggctgtggctaagaatcttcctcacagatatgatcatctaccaggtagagtggcagcctttcccgctccctgtctgcagggtgggctgctgcaagctgctcttagtgctagtccactgcctcacgtcttggagcattccgtggttgtgagattacagcccactttcatctccggtgtctcacagtgacacttcttggtgacatttgctgtgtccagtcatgttcctgctgtccctgtgtatagaagcaacaactcctcacacacatattaatctctacccttgtgcacattgaagatggcataagtaattttcagtgtttgtaactaatatttctccattttaaccaccttacagaatctttggtttccttatggcatttaaatagaatttgcttatgttgctctgccactacccaccttcccctttgtgcccttgcacctctctgtcaccataaagctctgtttccctccctctttcccttcctcagctctttttatccctcactcatggtcccctttctagtctcatgacctctgcctgcagtacccgcataggagagagaacatgtagtgtttg

SEQ ID NO: 33664 - DNA, 1182 bp, Mus musculus
taaaccaagtgtggataataatattaaattgttattaaataatattaaattgtaggtctactaaaacctgtgaggcctttctcctttatgattattttatagtatagcatttattttaactatcttagtaaactagtggtaattgcaagcatatatgagggtgtatatgggttatatgcaaactcttagtgtcttacattaaggacttgagcatatcttggtgtctatgggttcctggagctaatctccttaggagtcctacagatggctgcttctaaactttatcttgcattgattagattctcttcctaagtcccctctcctccagagatgatcatgaaagtgcattacattgcttattacttcttgtataataaactcagaagtaagcgtgtttgtgtgtgtgtgtgtcgtgtgtgtttgttttaatggcaatgcctttgtgtctttccaagggtcaatataagaaggccatagccagtctgcatcacttagcagctctgcaaggatccctttctcagccacagatcacaggacaggggactttagaacaccagagggcgctcatccagctggcaacgtgtcactttgctctgggggagtacagagtgagtaccgggaagctcatgtggcggcgttatcaaaggctgcaaagcaccttgggacatctctcccctatagtgggttttcaggtcaatgtttccttgagtttgactttaccactcagacctgttacttaatttgttgctgaaaatcacaatgatcgtattttacttggtgtttctatagcataacttacctgaaattgggcttcaatattacttgtttattgttctatttttgacacaaggtatcatgtatcccatatgagttgctatgtagtttaaagataggcaatgtatatgctttatataaaaagtcagggtattttttaacagtgaagaatagattaccgctcctccatttcatagatttaatctgactatagctttctttgcactcactgttgaccactgagcaatggtcatgggaggacaaacctccatgcacatatgctgcctgctgctttgctgtaaatgtttgcagttgtatttcttgttttcagtttagcacttcaggttagtacctgtgtcttgtctcctgcagatgacgtgcgagaaagtcctagatctgatgtgttac

SEQ ID NO: 33665 - DNA, 1155 bp, Mus musculus
taatttgttttaaaatcattaaagcttaaagccagatgttagcattttataaaactgagagaccagggcctggagagatggctcagcgctctcgcagatgacctaggttatagtcccagcacttacatgccagcttctaattatcggtaatgccagctccaggagatccaacaccctgtctcacctccacaggtactgaacacatgtggtacacgtacatatatgcagcctaaatatttatacatgcacagaaggtgagtgacaagcacattgggtttgttagagtccctttatagatcattgtgcatatttgaaataaattataattatttgatagaaaaaataattataattatttgatagagtaggaaagaaaattgagaaaccaactctagaaatcagaaaccattgtcatcgttacacaattaattgttgtctgctgtgtctcagattctgtgactttttctcctattgagggagcatgtgagacatttgtttgtcagacctcttgtctctggttcactaacagtctggccttgtggtaggtttggatctgaagcttctgccctgtaccagtaaggctatcatgccatactgcctgcacttgatgctggcctgctttaaggtgagtctaaaacggggttatcaggaaacacattccctttgaagcactcctggtaaactggcaagagctaacagctctgttcacactgttttatactgtacaaggcagatgagaaaagcttgtgggctggaaattgacaggtgggctggggaagtagaaaataagccctgtgcttgaggaatagaagtagggaaggcaagcaggtccccttgcttgttatggcaaaattgttgctgttgtgtatgtcagaatatattagctaaagaagaaggcaatataaatattggggtcaccagtgtataaggagttaattcttttagacatgagggtcagcaccgtcaaaggctcagtaccatcaaaggctcagtagcactggaaaggctccaagactcttgaaggtaccacaacccttggctacagtggaatagagccttggggtcggagtatagccatttcagtaggcttgtgtgcaaaaggcaacagtacaggttactgctttatgcagtagtcccacactaactaagcgttaa

SEQ ID NO: 33666 - DNA, 1194 bp, Mus musculus
agttctaactcccttagttgcttaaaagtcaatccgaagagtataggaagttatttctatttttaagacttcaggtttttttagtttgtacaaaataagattcaatccattttgtaaataaaaacccgaaagatttgaagttttaaaaaaaaacttatttttagtttcaagtagggtacatttgtcttctatttttctaatcatggcaaaggggcaaaaatccaacacaattaaatgcaggaatgaattttttgatatatttacctaatggaatatgtcttccatgacctcaggtgtgttttattgatatgctttggtaagtattacacatcaggataacattggacctttcgttttatttatgcacagttgaacttgggcctgtcctgtccctgctgagagcccattgcaggcatggtactctatagtctctgaaaagacaggatgagaaatatcggagacagcaaagtgcaggggaccctcctctctgctggggcctctggaagtcagtctggctctgtggactctcctaggcccttggggccgtgcatcactgcttgacagccatctggcaccctgccctgccctgctctgccctgccctgccctgccctgccctgccctgtacttgtctgtgtgatcaagaatgaacatgtgcaaacacagacacacacacacacacacacacacacacacagagcaactagaattatgttttctaggtgctgccaaagactaggttgttttacagatattttctaaaaagaacaggcattcttatttcttccaaaggtcactctagtgtatgttctgggtcttaacttatggaggcataggtcttaggtataaaggattttcttgttaaatcaactgtcataatttgaatagtgtcacccaaaggtcattgtgttcaaactggccctaacttcacactagtttagtgtgtcacacatacatttaacgatggttacttatagacagtcagtaggggtttctattttttttttaatttcacttatttatttcctgctttatgggccccagcaagctggagaatagacagaagaaaaataaagtgatttcatgatttgagtgttattgtccatattccattaataaaacaaaggtaaaaaggtcacatagtagtttatatttaacggttacattcctaatggatgccaagttcagatgtgag

SEQ ID NO: 33667 - DNA, 1358 bp, Mus musculus
agaaagaaagaaagaaagaaagaaagaaagaaagaaagaaagaaagaaagaaagaaagaaagaaagaaagaaagaaaatgagcttgtaattgaggtgacacataaattttgctgaaagacaaaaatgcctaggttgattttacttcttctcttttttgctttcttgaaaaaagtcacaattgtcccatgctgtaaccaagtctggcctcgaactaaactatgtatttcaggctggccttgaactctcaaccatcctgccttagcttcctgtgtcctgggagcttgagaactgtaattttattatcagatttttcttacttgttttcatcaatttgaaatgcccaatatccaatactttgtatttcatttgagactcatctccgccatgcctctgtcacacttctaacacatcacattaatttctagtttagatgtgatcaagttcaaattctgcactgtgcaaagtacaagttttagagcaggaccatttttttttatcacataaaagttgaaattactagaaaatgtgcatatggatgcttgtaaactgctgtgcaaagagaagagccctcaactgtaatagctatagaaagtaccaggattgttgccgctgttttgttttaccttaacaacaacaacaacaaaaatcaataatgaagaattatttatgaacgagatctcacattttcagattgcttttattattcattaatgtaaaatgataaagaagatctatctcagaggctatagctgggagcagaaactgtgaaatttgtgggtatctgaacaccaacccacatgcaaagccccacaagtgtagtcgtcattcaatgtgattcagaaaggaaagagtcaagggatatactggaatatgttagagaagtagttccagatatgctggaatgttagcccttgctaggagaaagctggttgtgcctatgtaatataggacaaaggtgaccgatttcatcaagtttggagtcaattctaacaataaaaatatgtataatttgtcaccggcatccccattattgctaattcattacagtatatacacatccatgcatacatatgtcaatgatgctttagctttcaatttatttattagctgtaaataatgtgtgggtatgtaagaatgcttgtaaacactggaaagtctgttgtggttatctgcagtatagatttgtggtgctaactttgtgtccgtctccatccatgattgtctgtctcactgagccaacttaactctgatgaaacagtacaatgaaataggcttttgaaagaagaaaactcacctgtgtgaagaaatggtatctgctttcaataaaactgagaacattttatcatgatactaagtc

SEQ ID NO: 33668 - DNA, 1053 bp, Mus musculus
attcactggccccaagaattaaggccaggggagtccccatggggaggggagggagagaaagaggaaggtttgtgcacacatgcagagaaagaagaggaggaggaaagaaaaaagaggaagagagcttgactgtttaaaacagaataatttagatttatagcttggccttcctcagaaatagatgctgagaatgttcttttgcattgcactgatgacgtcactgatacttaggtaaacatggaaacagcccggttctttaaatctgactttgaagaaaatggctcaatggacaatgtctgcctttttttgaatctggctaatgacccaacgtaagtaaaacttgtttctctctgagttactgcctacagaggcatctttaaagtaattttgttttcctctcctctgtgaactaagagtgtcaaaaggaaaatgctgctgtcgcagccttgttttggttgtggcttttgagtgacctgggacgtgtgttccctttcagcattgagcggatcatcactcctcgcctggctctgaccacggccgagtttctggcatatcagtgtgagaagcacgtgctggtgatcctgacggacatgagctcctacgctgaagcgctgcgagaggtaactcttcccttctttttttccttcttttctcaaacaaaatgtgtcaagtagggtcatcttgatcttttgtaagtttctgtttttctttaatcataaaagagatagtacaaggctgggtgtggtggcacacgcctttaatcccagcccttgggaggcagaggcaggaggatttcggagttcgaggacagcctggtctacaaagtgagttccaggacagccagggctacacagagaaaacctgtctcgggaaaaaaacaaaacaaaacaaaacaaaacacccagatagtacaattttttttgtctctgtcaacttggaaatagtagagagtgagattaaaattagtaactgtcactgtctctctcaagggctgaagaagtaagaaagcaccacaagcggatggtagtgtttcattcccaagaacttctgacc

SEQ ID NO: 33669 - DNA, 1688 bp, Mus musculus
tatgaaaaccgaactgtttatgagactttggacattggctggcagttgcttcgaatcttccccaaagaaatgctgaagagaatccctcagagcaccctgagcgaattttaccctcgagactctgcaaaacactagtagctgctgctgcttgtgtggcgtgaccctcttgtgaagtactggttctgtttcctgattccttttgcactcctccatcccacctgtgagtgggagtttacctgttaccctgtaattaaaaacaaaggctaggtaactattgtgccagtgttgacagtttaaactgctaacagattgagagatccctgctcagaaacctcacctttagtgctttctttaaagaagctgaggggtgaagtttgcttactgatgtatctatttgtacagatagtggagagctagttgctaataatgtcttgtttgggtctcccaaaccctacctctcaactcccttaagagtatcactgttctgaagctaaaatgcttcagtctcaaatttaggggcaaagtggagactggaagaattctcctttcagaagaaccacgaggctctggctgagcctccctctggagtgctagtgtacctgtgggtctgtcctctgctctgtgcagatgggttttactgtctgctgtgttttcttacgaaaagagtttcgttctgccagtgctgtgagttgggaattcctgcgtggcgactttctctgaggcccacagagaatcaggtaacattgcacagcctgcgttctcctgcagtggtggcacgccttgtgctgacgacccccactgggctacagtcacaggagaattgagacttggaaaaggcttgggtacaattaagaaaaaccctacatcccaccctcctcttgacgcgtttctggtggtttcggtttctgcgttgccctccagatcctgaggtgggccgtgagacgacttgctttaaactctgttcaatccccaggctttctgagtccgctctaccttttctgggtgatcttgtggcacatgtagcaatgtttctttcattcctgtcccttcctggcttgagctcttggctgtattctgtgtgcctctaccatgtctgctgtttgggtctctgcgctgtgtgttctcaggtgcagccatgactccccactctgtgcattccaccttccagttgtttttctctgagggggtagtgggggggtcagcatgattatattttaatgtagaaaatgtgacatctcgttataaatgaaaataaatgttaaattaaatggaagttacctgaaatgactctgtgttttctctcgagaggaacggcagcaagcaggtgggtaactcgagtcttcacagttgtgatcttcatgagtgtggcctgtgttagtgtgtaagaaatgtgagtatgcttcatattcctgaaggcttgaagaaggaaggcatctatgtgtcaaactgtagtgtctggtccactgcagcactcaggctgcagttattaacaacctttatcaagacagataaaggggctggaggggtggcacagcggttaagagcacttggctatttttcctaaacagttttctaagttcagttcccagcaaccacacggtggctcacatccatctgtaatggattcaattccctcgtgtgtgtgtgtgtgtgtgtgtgtgtgtgtgtgtgtgtgtgtgtgtgtgtgt

SEQ ID NO: 33670 - DNA, 1269 bp, Mus musculus
gaaataaatcatactggagagaaaccctataaatgtagccaatgtggtaaagcctttgctgttcacaattatttccaaatacatagaggaacacattctggagagaaatcttatgagtgtagtcagtgtggtaaaaagcatttgcacattactgtacacgttgaaaacatgaaggtgtacttactgtagagaaaccctatgaatgcaagcaatgaggtaaagccttttcacgacagagtcatctccagaaacatgaaataaaacatagtctagagaaactgtatcaatgtagtcagtgagatagataaagcctttgcacaacagagttatcttcaaatacacagaaaaacatatattgaagagaaaccctatgtaagaagtgtagtaaagccttttcacatggtagttatctaatacctaaaaggacactcaccagatagaaaccctgcaaacatagtcagtgtgaggaagccttttcacaatagtagcctctaaattaaaggtaacaacagcaacaacaaaaaaacatactggagatttattctgaatgtaagcaatgtggaaaagcctttgcatattacaattatttctgaaaacacaatacatactggagagtaaacttatgaatgtaattgctgtgttaatacctttgtgtatcattctctgaggacatgaacccatactgaagggaatctgggactataaagtatttggtaagattgttagccagcccagttgcatttaatacacaagatcattttattctgggggaaaaagtctgacaagtgtccacaatctctttaagccttttgcctatctgtattttgtttgcacctacaaactcatagataaaagccctctgaatttacactattaggtagcaacatttagatttcattcacctcttcaattacatcaaataagttatttaagtgtaaaactttatgggtctgtcttagtaacttttctgatgctgtgatataacatctttggtaacttatcaaacactttatttgggctcatggcaccagagatgtatgggattaccatcaacatggcatggcaacaagtgggaaacatggcagtaaagcaggaagtttaaagctcgcattcaagtgctgtgacatgtttcctccaggtggggtgtcatttactgaatctttcccattgagaagggttggttttctgaattccagctcaaatcctttccttttgggaagttaaccttttcatgaagaagaaaaaccctggaaatgagcctttaggtgc

SEQ ID NO: 33671 - DNA, 1196 bp, Mus musculus
ataaacttaatgcatccccactaaaatcagggagaggccatggctgcccactctccccaaacctcttaaacatagcacttgatgttctagttagagcaataagacaaaggagatcaaggggatacaaattggaaaaggaaaaagtcaaagtatcactattcacagatgatatggtaatatacagcagtcacccaaaaaaattctaccagaaaactcctacatctgaaaaacaccttcagcaaagtggctgagtacaaaattaactcaaagtaatcaatagcccacctctacacaaatgataaaagggcagagaaagaagttgagaacacagccccagcagttaaagacagacgtccctccttttcctgtttgagtcatcacaaggatggtatcttgtgaaagtggcctccctctcaggttacatcctagagagtagctcagggaacttgtatggccagacacacacatcaattcaaagcctctccatcaagagagaatgaaactaggaactccttctggaaggactttattcccgtttaagcttttagcttggcttgtcacctctaataaggagaggaggagggtatgtgtaggacatttaaaaagattctttctcttgtagtctccatgaggtcaggctgtatcaggattgcggaagatccttcagaatctctgtctgcatagtgcaccttcctctgagcacctgtctgggaagcttatgcaagcctgaggcagctttgttccatccttcagttttgctctttggaagccaagctgctaggaatggtccaagaggcctgtctccctcccgctgtgctggctcattttatttggatgtcattctctagcctgttttccggggtgtatgctgttgggtatacctggaatccaagggctagtgtattgagtccacctcagaggcagggtgctgactgtaggcttgggatgcagccagtgaactggtccttagtaacgtatggaatgacttattcctgtgacccaactcttttactatccagtgttgtgaggaagcacgattgtacccgacactacagactcagccccaattacaagagttttcggttgtttggtttctttccttataattctcagattgctgtgtagattcttatacagcaatagaaagcattctaaatagttgttagtctgcctggtctcagtattcatttattaga

SEQ ID NO: 33672 - DNA, 1238 bp, Mus musculus
accaatgtggtaaagcctttgcacatcacagttatctccaaaaacataaaagaacacacactggagagaaaccttatcaatgcaatcaatgtggtaaaacttttgcatgtcacagaagtcttcaaattcatgaaagaattcatactggagagaaaccttatgaatgttgtcaatgtggtaagacctttgcacatcacaattatctccgaaaccataaaagaacacatactggagagaacccctacaaatgtaaggaatgcggtaaagcctttgcatgtcacagtcatcttcaaaggcatgaaagagttcatactggagagaaaccctatgagtgtagtcaatgtggtaaagcctttgcatgtcacagcagtcttcaaaatcatgaaaaaaatcatattgaagagaaactctatgaattatgtaagcaatatggtaacgcctttgtacatcacagttatctctgaaaacataaaacacaaaagaatatattctacagaatataatcaggattttaaagtcatgtcacagttgtctttgaggacatgaaagaactcatactgaaaggaatctctgactataaagtgtttagtgagatctgtagccaacacacttccatccgggacagaatattatttactagggagaaaataatctgagatgtgtccacaatattttcaaggcgtttgcctgtctttactttgtatctacaaactcttatggacaaaagccgtatggatgtaaattaaaagatatccaatttaggtctcacacttctttttgatgacatgaaatagctcatccagatatgaaactttatggatgccagatatgaaactttatggatgtgttttagtaaattttctgagctatgagaaaacacaatgtctaaggcagtttataaaaaaaaccattaatttagtttatggttccagacggatgtgggatcaccatcaaagagccagggcaatgagcgccaggcgtggcagctaaggtgtgaagttaaaagttcacctcttcaacttgaagcatgaagcagacaggaggagctggaaggcgtgtgaggatttaagctctcaaagcccatcccccagtgacatgtttcctccagaagggtggcatttactaaatcttcccaaatgacacccccaactgtggggtgttgattctctgactttaagtctacatgcttgctttttattagggtaaccaatccacagggaagaaaatccctgtaggta

SEQ ID NO: 33673 - DNA, 1182 bp, Mus musculus
tcccagtcatagcctccctccttcctttcttcccagccccaccttacaaatctctccctccattgaccttctccccttcttttcagagaagagggtatcatcccatcctagggcatctagtcctagcaggtttaggcacaaactctcccacagaggcccaatcaagcaatccaagtaggggaaaagaggatacagaagcaaggaacagagactgagagccccgttcctctttttagggggaccacactaacaccaaggaatacatttgctacaaatgtgtaggagatctagttccagctcctgcatgtttcctggttagtagcacaggctctgcgagcctccatggtcccaggttagatgactctgtgggtcttttttgacccctccaacttacttacttctatccttcactctactgtaagactcagggatctacctaatgtttggctgtgggtctgcatctgcctccatttgctgctggatgaagcctctccggagacatttatgctaggttcctgtttgcaagcatagcagagtatcattaatagtgtcaggggtgagctctctcacatgggatgggtctcaagttggggcaattgttggttggctgttcacccagtctctgctccatctctatccttgaacatcttacaggccagacaaattttcagttggaggttttgtagggggattgatgttcccaatccttcctctggaaatcctgcctgactataggaggtggtcatttcagtctccctatggtaggaatctaagctagggtcatccccttaacctctcttatcccaagcctccagctacttaccagagatgccctgccatgatcgccattctcactcccagtctcttaccccacttcttaccttcctgatcaccttccctgttcccgtcctcctcttatctcctacccagttccctctctccatccaactcagatgactatttagtttccctttggaggtaggttcatatgtccaccctgggtcctcattttacccaatttcattgggtttgtggattgtagcatacttatcctgcacttcatgtcttatgtccagttaaaagttagcacataccatatgtgcctttctggatctgggttacctcactcaggatgaatttctcaagttccatccatttgcctggaaaattcaagaatctttg

SEQ ID NO: 33674 - DNA, 1213 bp, Mus musculus
cttcaagtactatattgaataggtagggagggagtgggcagccttgtctagtccctgattttagttggattgcttcaagtttctctccatttagtttgaagttggctaccggtttggtgtatattgcttttattatgtttaggtatgggccttgaagtcctgatctttccaagactttattgtgaaggggtgttggattttgtcaaatgctttctcagcatctaatgaaataatcatgtggtttttttttctttgagtttgtttatatagtggattacattgatggatttccatatattgaaccttccctgcatccctggaatgaagcctacttgatcatgatggatgatcattttgatgtgtttttggaatcaatttgcgagaattttattgagtatttttgcatcgatattcataagagaaattgatgtgaagttctctttctttgttgggcctttgtatggtttaggtatcagaataattgtggcttcatagaacggaattgggtggagtaccttgtgtttctattttgtggaatagtttgaagagtattggaattaggtcttctttaaaagtctgatagaactctgcattaaatccatcatgtactgcatttttttttagttgggagactattaatgactgtttctatttatctaggggacatgggactgtttaggctgttaatctgatcctgttttaactttggtaagtggtatcgtatagaaaattttctatttcatccaggttttccagttgtgttaagtataggcttttgtagtaggatctgatgacttttttagatttcttcagattctgttgttatgtctccctttctatttctgattttgttaattagtacattgtccttgtgccctctagttagtttggctaaggatttatctattttgttgattttctcaaagaaccagctcctggtttggttaattctttgtattgttcttttttttttttctatttggttgatttcatccctgaatttgattatttcctgccatctactcctcttgggtaaaattgcttacttttgttctagggcttttaggtgtgctgtcaagctgctcatgtatgctctctccagattgtttttggaggcactcagagctatgaggtttcctcttaggactgctttcattgtgtcccataagtttggatatgttgtggcttcattttcataaaagtctaaaaaatc

SEQ ID NO: 33675 - DNA, 1089 bp, Mus musculus
tggccataaatgtttcttgctgcccttatatggtggccagaatgttttatatgagaggaagataccatttaggttatttaagtcagattgttttcgattgttaaagttacagccagtagaggagttttttgttgttgttttggtttgcacttttttttttttttcaaatctaaaggggtgttctcatggaaatctgaaagaaaaaatttaacagataggtgtccacccggccggggagggcttttgctgaccatctgcgggagacatcttggttcccggaccccaccaagactactctgcacaggcgagagtgtggactacagaagctaacagcttctgggacaggcaggagccacagtgcttctaaggcagccccctttttgggctccagacatccgggcaccttccctgccagaggataggtgtttgcccggccccggagggctttgcctgagcatctgcaggagacatcttggctcccggactccaccaagactgttctgcacaggtgagactgtagactacagaagctaacagcttctgggacacgtcctgtttcaggccttcatcatctgccaggaagcaagtctgaacgccagatatctgtgcaccttccctgaaagaggagagcctgcctgcagagagtgctctgaccactgaaactcaggagagagctagtctcccaggtctgctggtagagaacaaaagaatcacaataggaacaagctctaaccagaaacaactataacaactgactccagagtttaccaaatggtgaaaggcagacgtaagaatcttactaacaaaatccaagaccactcaccatcatcagaacccagtactcccacctcagctagtccagggcaccccaacacatccgaaaacctagacccggatttaaaggcatatctcatgatgatggtagaagacatcaagaaggtctttaataactcacttaaagaaatagaggagaacactgctaaagagttgcaagcccttataggaaaacaggaaaacacattgaaacagatgatggaaataaaaccatactagacctaaaaagggaagtagacacaataaagaaaactc

SEQ ID NO: 33676 - DNA, 1533 bp, Mus musculus
gatagaaagtagagtactttctccaaggttgccaaatacatattgactgtatcttgtgaatacaattctcacttgatggttttcataattgttcttattgtatatagcttattgatggtagagaaagaccctttattggactaaaagggggagatgtagggataatctttatttgtcctgcatagagatgtgtctctgtccttccttgtatgcccaaggcactttctgcttggttacaataaacagcatatagcaaggggtagaatagaagggagagaacaattctgggatagagttgggcacaggtacatccaccaagaaacaggggaacctggaggtatgatgctgaggagaagtaatcagccatgtggcaaaacttagatcactgcaaatgagattatatattttgagctagtgggaacaagcctagcttaaggcctaagcatttattaataagtaataagcctctaagttgttcaggaattgttcccaggtagaagggccaaaggtttcctcatcacccagtaacatttcctccggcagggtagcatttactcaatatccaattggtggtatccaaatgataccaccgattgaaaagggttgatactttgaagcctacatgcttccttttgttaggtgaactaatttatgaggaaggaaaatccctgtaattaagcctttgggtgcttcaatatctgggttacagaaatgaagccttaagtcagtaaaacaatcaagagtaaaaattatgtttgttcaaagatttgttattacagagctataggaataaagacagcatgatactggcataaaaactgatgtgttgatcaatggaatttaattgaaaatccaggataaatgcaccatacttaaggacattgacaaagaagccttgctatatgcaagcacaaatgcagatggaaccaaagtaatacattgctaagttttagagatgatgttgcactcaaatctattgcatctggaggctatggatgacgctctgatgagatttaatgtgctggctcatcatcatactccacaaggtatcttctacattcctttttctttaagataccttggactcctttggtccagttcactgtccactcccatgatgccccagcagactctccaaatctatacttttgctttcatcttctagttgatgtgacatgaacgtgtatgcaaaaagagcattctaaggtcatttctttctccattatgtttgtggtttctgtatcctatatcctttggcatataggtacttatcaaaggatatatatggtaaattatgccttttctaacccagaaagcctgacttatagaaagctttgtaatatttactattgttaactgttctaagcagaaagcatgttttatttaaataatgcctttatgtagctgacaatttcactcttattgtctgaccataactttgacttcaaatttctttatcacaggttggtttctaaaatggcaaaatgaaaaaaaaaattttttttagcaaacttcgcttacctcatcatttga

SEQ ID NO: 33677 - DNA, 1102 bp, Mus musculus
cacaataaacggtcttgctgcaaattgcaagaggatttttattcaagagcgctctcgggcccatggtcatacaccacgcaggggtagaggaccgtggcgccccaagtagctggattagggggtatttaaaggaagaaaccacgacttaaggaggtgggaagggcgttgttggaaaataccaaaaatactagttaagagtcacaaggaagtacaaagtcacaggtgtcacaaggaatacctggtaattgttaactctcaagacagtttctaagagcccctaaggatagcacatttgcattgcaggttccagcaatggtcagggtgggtcagggtgactttctttgaatgaacactccttgaacccaggaagcgggtgggtggaggaatgtcgctatctgttttatgattagcataccttggagcactgagtttactactctttcaggtgctgggcataaaggcatgggagctccaccttctggggtctgcccgcgcttttccagttcctgcattcagatcttaatcttgtttgcagagctcccttgatcttctctctgaccccgcctcctctgtaccagctttaggattcactagctcaccccctggctcctctttcttctcctagccaggtgtgtctcactgatgtgcttggcctggtttggagcacaggtggagttctccctcagtgaggtcttggagttgtgcaagcgtgggaatcaggggtggaacactgagggaggatcttcagggtccccagggactgtatgccccacagagtctccaggaatgagtcccacgccccactctgcctacgtgcactcaggagtggggctcccagcattcctcccagccccttccagcccctcctagcccactgctgccttgcctgggagccaagtgatcagctgtatcttgtatgaccatccttactactagcttgtcttcccgccttgatctcgtctcccttcccttcccctcccctcccctcccctcctcccctcccctctttccatcccttccttccatcttcctcctcctcctcctcctcctcctcctcctcctcctcctcctcctcctcctcctcctcctcctcctcctcctc

SEQ ID NO: 33678 - DNA, 1161 bp, Mus musculus
aagattaaaaaaaagaaaaccctaacacatggaacaaaagaaacaaacagaaaggaagggcctccaaggaaaagtgcataacagatatagagactcaggttttcaaatgtttatattagacttgaggttgtaaagtcgactattaacttcgtattaactaggaagtctggaagggggaagaatgagattcagtttagcaaatcctgacttatgttcagctgtgtgaagtgacaccatttaatatttgctcttcctctgcagaagagcaataacaatttctagtcttcaaagagtaatgattatattcatccaatcactagggcattgatgtcgaataagtaacagcaatgataatgtttgctgctttgggcttcacattaattgatggcgaacacaccccagtgtgtttaacctccccatgattaaactttgcaaagcagtcattccagttggtcttggataaatgagaaaccgaagcagaaacagatgaacgaaatttgtgttactaaattcacccacaatgcatataaggctgccatcagctgatttcaaatatgcttaaagacatactgctttgcttgaagatggaactctaacacatgcctcttggtatcatttctgcttgaatttctagagtgtggtcttttgagtaaatctggttcattggccccaagtgaatctaaaagccatcagggatagattgttcattttaccagttagagaaaaaccaagcaccgattataaagattagctgactcaagactgtcagctgtgactttagggctctgagagactccagtctgtgtgtggagcctcctgtgacagagctgccgttgcctaagatgtctactaagatgatctgtttttttagatttattttttattagatgttttcttctagtttcctctccaaaaatcctctataccctcctccttctctatctctatctatttatctatatgcatatatgtatatatgcatacccccatatatatatatatgtatatacacatatatgtgtatatatgtgtatatgtataatgtatatatatatatatatgcatatgtggctacaactcttcctgctccccaactctcctactcccacttcctggccctggcattcccctatactggggcctagaatctttgcaagatca

SEQ ID NO: 33679 - DNA, 1209 bp, Mus musculus
caacataaatttggaaggacccatgttccaacaccatgccccacaaactagagccggttaccattagatatgctttgcctgagagaagtcatattaggtccactgatggacatcaggcggaatctcaaagacaaagtagaaagtccttccataaggtctgaggacatgccagtaaataaagttgtcattgtgagatgaaggagctcaaggagcacaataaaatatttccatgccaagactgatatggaagttttaatgactgataggcacttcaggcagacacacagcaggtgaatcctgaaagagaatattttgcctaagagtgaatggggtcaattttatagtcattaggaaatatctgtccttgtctcctgggaagtttgtttggcctcttatttgagtagttaggaggacagacaactatggtttctgacatggttggcttccttttctgaaactgaccattgggtaatgtacccagagctatttggagcggtttgggaagtgcacggggcggagatggcggcggagcagcaggaggcgttgagggagttcgtggcggtgacgggcactgaggaggaaagggctcgtttcttcctggagtcggctggctgggacctgcaggtagctccgcaaggcgggccgcttcgggcgggctggggaatgcggagtgcggcgtccgctccgcgattcctacgctgctgaagcgcacagttatccgtgcggggctgggccctgcctggcccaggcctcatggtatctggggtcgcttgccacgcgtcgccggcctggcttggaagttcatggacgcgggcgggcccggcctgcttttcagggcctccgttttccggcgggctcgcactgttagcgagactttgggcgctgcggcagtctgcgtggagtcgccgcctggggacgtggctgccgcggcgagtgcttgcgggtggcctggtggagtgccctgcttccagatggagccccaccaaggtcgcggtggccttccgattccgcttctgcaaggatgctgtgctggtgggggaaaccctgcagggcatcagcccacgccccactcttgcctaatcgcagggagaaactacttgtgggactgtggcgcacgtttgggatctctgcacatttcgtagttaagtgtaaaatgagaatttcttaggacttactgtcttgttcgctggcatgtagtaaatattcatt

SEQ ID NO: 33680 - DNA, 1212 bp, Mus musculus
ctacagagtgagttccaggacagccagggctacacagagaaaccctgtctcgaaaaactcaaaaaaaaaaaaaaaaaaaaaaaagaaaagaaagaaaaatatacacatgggtgggtgtacatcatgtttatatgtgcatgtgtttattcggctaattcatatggccatctgtgaatccttgttacttttcattcacagtgtaactgaaattaagaatagctagataatcattcataggttacttggttaattattgtctcagctctcatccagtatgtattctaaaaatattcccattgcttgggcaaatcatggctcttgggtccctacaataccgctccactctcacggatgattgctctcagctgggaggggatcctctaggctctgctgttcctaggatgagcaggggaaaagactgaaccctatgctttcagctttcacaaagtgattgtcatttctgctttgttcatcacctgattgaaaacttaaatctcaagtcgggtttatttaaaaatctgccccgctaagcttttaagtgtcacataacagccaaaatgtaaagtgatttgtcaatactagtgtataactaatcactgttcagtactctgtggtcagaggatgtaaatgggatggacagtaatttgatctttatcttccaaagccagctaggttccaggaggctgtgggggcatctctcaaagtcatgcagttatgaagaatcgcctgttctcttgtatttagaggctctggaagtcccatgagggaattgccagcttacgctgtagaagcgagtcaacacaggagcatgttccctgtgcttcccaggaagccatggctagagtgccctgactcaatatgtggaacaactgatgaaagaaaaccggaggagctaggagcccctctcaagccccggtgaccactgaggagaaaataaaaccaaagtgagggtgtgttggctaactgcacagtggagaaaagaataaagttaaacacttgatgtaaaacccatgagtacagctttccaggctactgtgtatgggtggctggctaccagatggagtactcatggctatcccactaattaaaggacttttgtgctttccctaaccataaatatactgttgtttttatggtttaattctattcatgcctccattgcttatttatttatttatttatttatttatttttgtttttcaagacagggtt

SEQ ID NO: 33681 - DNA, 1219 bp, Mus musculus
tgatgattagcaaatattctgcctctggagggctggaaggcttgaggaaaacatgaatgaaggaagataagagaaagcagtgcagctaaaacgtctgagcttttcctgggtcatttcccacagaaggggtgtactctcctgcaggaaaggatgtttgtgtataaattgtttgttcaacccagagacctctcagtagccaggagcatccactgaagaggcagcagtatgctacagcttgagcccagagactgtcagaccctgccagtccatgggatacagcaggtgagcatgtctgggtttccccttggccctacacccactggagaacaggagccagctccttccccagcagatcagctgggggtgaggagatccataggcccaagctacactcagggtgaggttgcaagatggctcatgaggaatgacagatcaggtgcaggataaggtgcaacctcccgtctcctctactgtgtccacactggcttgaatttattctttgttttcttgaggaaaattcttatatagcctgggctgctcttaaatgcactgtatagacgacaatgatcttgaaagtcctgatcctcctgcctcctcttcccaaatcctggggttgcgtgcatgggccaccccatctggtctcctgtgcttcagaacgaacccaggctccatgcacacactcttagctgtgctatgtcctcaggtcaaccctgagaagacacttggtacaagtcttttcatgccgttggatcttgttaatagtttattgcccccttagctgctgactgctgagttcagctggcacttgtttaggatggtgggtttaaagccttccgtgatcctgagaccccgtctcctcccagtcctctgtgtaataaggaagaggatcttgcatcatgctgataaaatgctagcctgtgatgctccacagatctagaaaacaatccaggtgagctgagggatgatcaggacaggaatatgcacaggacaggcacatggcaatttccaaacaaggtgaataggggaaatccttcacagcctgtggctagcattaaacattaaaaggtgagttgaagagcttggatgaaggcaccctgtgtgaaagatacattcaaaagataggctatttagttcagatgcagtgtcagaggtagactacttccccaggagctgttagccagggatgctcctgaagtcccctaaacagtacagactattg

SEQ ID NO: 33682 - DNA, 1114 bp, Mus musculus
tcttacaaatgtttctttccttttgcctctgtcctacccagctctctctttaaagaacctaggatgatttctagtttgtgcaaaccttctccttctgcctgcctcaccccctttttttttagacccaaagtctcacagtgcagcccagtccaccctagagctcactgtgccactcaggctaatatcaaactctcaggtctcttcctgcctgggctccctgagtgctaggaatgacaagccatattgagcctgtgtctgactgcacagcttggaaaagcacagctatgcagggggcaccagaaaactccatgaggaagggcttcagtgtcccttggactttctacttctgagtcccccaagacctcagatatgccaggcctgaggttaactccctccctccctccctccctccctccctccctccctccctccctccctccctcgccagagaagcctcctagcaggcagtgtgagccatgaacttggctccctgctctgcctcaccagagaggagtcggggttatgttctcacctcagattcacagccgaggaacagcaggaacttgaacctctgtcttatctgaggccaaattcttaaggcattaaagcatctgtttcttaagaacggaaaacgtctctttctttctacagtcagtgcccggcttttcccacagctaggaccttgcacactctaggcaagttccccagcacagatcttctatcacgtgagccatgtccaaaaggaaaacagtgcagaccgaactgaagggctggattgcagtgggcctttgcttctttgtgggttcttttttctcactctttatgcctctggtttcaccccatcagtcacaagatagaaaaagaaaaagggagaaagatactgagatctgtgaatctaatttctttcttcctgtttcttctttgagcacaactactaacaaactatgatcaaccaaccacactacctatggggccctagcattcatacacccttgaaaaagtttccagaattctaaacatcacacaaccacagaaactctctgcagttggcaaaactgtgcctcatgttccaaggtgatagcccaggaacctctgcagccaggtgttcattaag

SEQ ID NO: 33683 - DNA, 1592 bp, Mus musculus
attttcccttttccacttagaggcattatgcttttttgttctttgagacagggactcactgtgtagcactggctggcctctaactcacaaagatcagcctgcctctgcctcctgagagctgggattaaaggaaagtgccttgtgatttacagatttctgcacttgcgtggatgcacctctgcatgtggaggctggagatgtgtcaagtcagccctgaaggcagggccaccttagtcaacatagcagggtctctgtcacatccagagctcaccaatacagctagtctcactgggcatcttgttctgagcaatcccctgtctctgccctccaaggcaggagatatactcaggacactgctcctgtccccacttttatgtggatttctgaggttctgaattctggtcttcaaacttgagtagcaagcgctttaaaaagtactgagccattgccctagcctggcttttccttgacttctctgctgtgtgacatcaagcttttgtctcttttagaccattggaacttacagtcttctccctcccccagatcaggcctgtgcagtgctgggccactgtctgaccttttgtacactctgggcccaccttaaaggcttctattacttcctgtggctggggccaagcctagggttttccttgtgcttacacatttgaatttcttgccaggcacccccggaagtctccatcttccccatgccccgtcgcccccatacacacatgctgcttgagtttcctcttcagtaagaacaaaaggcagatgacttgacttcgcagtcacactgacccttcaccaagccttcacctgaattctgtctctgagcaaacattcagggaggctctgtatctctagagagggatttgtgtgtgtgtgtgtgtgtgtgtgtccctttttaggactcacaaacaagagagacaaaaggcctgtgagagttctctgtcttggggtacacctgagcattgatattcggcaaagtcttcattctttagccatgtgctagcatttgctagacctggaatgctggggttggaaggaaggactggatctaaggaactcagcagggagaagcgcttcctgccaagcctggcaacaagagttcaatccctggactcatggtagtagagacccaagtcctgaaagttgttctctgacctccacacttgggctatgatgtacaaacacatcacacttgtgctgtggtgtgtaaacacattgtgtgtgtgcatgcacgcacacacatacacacaatgacaaaattttaaaagaacaaacaggttgaggtcactcccacgttggatcttgataaaacaatagagttaacttctccagtggagaaaggtactggattctagcttccttcctgccatctacacaaatctacacttttcatctgtccccccaccccccccaagcctggtaaaagggaaacagaaaggtttagggaaaggcacggtggagggataacctttttgtgcactgtataaagcatgtcttcctattacccagatgctggttttgttaacacccctctctccccttctgactggttttaataaaaagctgttggcctatagtgaagc

SEQ ID NO: 33684 - DNA, 1099 bp, Mus musculus
cttggcagcaagctctccccactgagctgtctcactagctctgtgcctgtctctgcatttgcacccacaccagcatggcccctccccagcacttaggatgctctgctcactcaaggcacctaccctgaaacccactcagcctggctgtgttcccatgtggttgtcaagttctgcccacacatgctgctgtgtcccagtgtcctctcctcagccaggactgtgggcttgaattgttgtcccagtgggtcactaggtgtctctgatccaatgtggaaataaagaaactggaggatggcttagaggtcaagagtgtttcctggtcttgcaaaggactgagttcagtccccagcacctacactgggcagcatacagttgcctgtgaacccagctctaggggtcagccatggacttcctggactcccagggcacctgcagtcacacatgcacatgcccacacacagatgcgcacataattgatatttttaagtgatgcccagccatggtgccagtgccacttggtcctggctacttttctcttcagagagcacatcctggtctgcctctgttccctctagccgtgagcatccagtttcaggaagaggaccctcccgatgcccagctgctgaggttggataacatgctgctggctgagggtgtgtccaggccagagaagagaggccgaggagcagcagcaggcagcacagcaacaccaggtggctgtccaaatgacaatagcattgagcactcagactacagggccaagctgtcccagatccgacagatttaccactctgagctagagaagtatgaacaggtgatctttctacatgcaagagtttgtcttgtgaatgtgcactggccacagacagatgtggacatgagctccctgctctatggcagagcagggacagcccgccacagtcagtcactgcagaggggctggtgtcactgaaagcgctttcccctcactcctcagagctgacctgagtgtgagctgtgggggtggcagatgtggtcagctgtggagcccactgccccgcaccactggctgctgagtcacaggctggcccatcttttcccaccccaggcctgtcgtgag

SEQ ID NO: 33685 - DNA, 1165 bp, Mus musculus
ggggcacagaactctgtccctacacttaacctcagagccatgactccagctctgcggaagttttcttgtgtagtcacgggtggcctttgtcctgagttccagcctagctaactgcacatggctggttctttcccaaagagcttccagtctagctgatggactcatagtgtcagcattcctacctgtgcctctgctcctggtcgccaggaactgctgtagcctggggaagtgaggaggagcctccctgtgagcagacctcaaactggcgtctcccagactggtttcggacaggcctgtgttctgcgcctccctcagcttcaccagcaccctggtgttctgcaccaggcagccctttcattgttgttgtttgggggtttgaaacagtctcactgtgtagctccaggctgggcaggaacttacattgtagcccaggttggcattgaactcagagattcctgtgcttctgactcctgagtgctgacattaaaggtgttgagtcactgcaccaggcagcgtatgtgttcttcattattggtgacttgagtctgtatcttggctcctatgtcatctctgcaaatattgtgattccctgtggcctgttgagctaatggtgtcctttacaacaggaatggttctcttatttaaggaatttgcatttgtgtttgtctagagtacttttatgtatccattgtgagttgggtcaggggctgtatgatgctgtatacagctcctctatttgtttgaaccaggttctcactctgtatccctggctgggctggagcttgcagtaaactggggaagccagttcttgtgccccacccacctcctgagcgctgggattataggagcgcttgatggtctagacctctatgtagatggggctgatggggtttacctgcctctgccactcaagcctttctatattactcccagcctacgcctaagatggccccagactccctatgtaaccaaggatgaccttgaactattgtttctcctgcttccacttcccaagtcaagtggtgggatcacagacatgcattgccactcctggtttgtgttattagggatggaacccaggaggttatcgtgttaggcaggcaagtattctaccagctgagccagccccagggaagcagggccactgtgcatctcaggctgccag

SEQ ID NO: 33686 - DNA, 1187 bp, Mus musculus
tcccaaggccctacagccgcgatgacttttattgcccgggtaacaatttctgccttgtgaagtgactgcgggcgtcactcggccttggggcggggaccctccctcccccgccccgcgggctccctaaacccttcttaggctttgtgactcaatcgcccttaatggtcagttcctcgtgagaagtcactggcgaggagactgcccactgatgtggaacaggacaagtccctccctgaagtgatggtgctcaggtgggtgggaaccagcctgttgcctcgagcctggctaccatggctcacgaaagaaagtaggtgaactcccaaggtttttagtgcaagaaacacgcccgagagagctctagatgcagaccacagttactccctgcctagggccagagggaggagggactgacttccggatcgcagcaaggctagcgtaacgcttccaaattatagggaacctcctgggtgacggaacttccgccacactcaaaatggtggtcgcgcgttgcctcacttccgctggtggccggaagttgcgggtcctgcaagtatggcggcgtcgaaggtgaagcaggacatgcccccgccagggggctacggccccatcgactacaagcggaacctgccccgccggggactgtcgggtcagtgtctcagtgtcgtcctgttcgtcgcagaccaggcttttgttatgcggttagacgagagagggcagcctgcgggcttcagagtgcacagtgtgagcggaggctgagttggaatcttggttttctagtgcagcatcccggaagccagaatgttcatgtcccctagtttccagctggcttccacgggcctggaaactaagcctgcgagaagcactaacctggagtttggaggcttttgttttgttttaggctggcctcaaactccgtagcagagactgatctagaactcctgatctcttgccttcacttccgaaggctatgctcataggtatgcaccgttatacgtattttttttttaatgtttttaaatttttttttttttttttttttttttttttttttgcagatagggacttactatatagcccaggctggcctcaaactcgtggcgaccctgcctttgccaatggattgctgggatgacagacaggtccacccaaggcaagatgtgtgttgattgtaacatagcatagaaggc

SEQ ID NO: 33687 - DNA, 2851 bp, Mus musculus
tactgatctcttagcactgagcccaaccactgatccatacttaggtcacctctgtgggatctgggattgatggcagtgtggaggttctgtgggtcatggtcctgctcatgggtccactgaggatgtgctgagataggtgagtctaggctgtatccatccagggccttgcctggctgatttgccactacccatcactgctctgttgcaggtgggaccctcgccttcgtcagcccaagcttggcagtacacaagacctcctcggctgtggatcgacagcgagaatacctcctggacatgattcctccacgctccatcccccaatcagccacatggaaatagtgggagccggcccagccgaggacaggccctcttctctcccaaggcccttggtctaggacacacagactgcctcctagcgagttgcctgagacagctcaggccttggctgttgccttgctttggccaggagagtgtgccaccatggtgcccaggatcagaatgagggacctcccaatgggccttctctttcctttttgcctttagtttgcccgacaccagcagaaactcggaccttggggccagctctgcctggccagcgtgggtgggagctcaccctggacactgtgacacacccgggccaggctggcaccgggggctcccgaagttgagccgggatttcgttttcttttggcttttcccatcttagctccccagtctctgcctcttcatggccatctataggttgaagtttgggttttattgggtttttttttgttttgttttgttttttttgtttttgtttttttataatcacctcataatgatgatggaattaaaagtgaactgcatagacccagagtcactgtcatacacagtgcacttgggcaggctctaaccccagaggatgctcggagtggcaccagagatggcaggtaccaccctgactctagttgtctgttgctgctcactgcaacccctggcttccacacttagaacgaattgcagcccatattctgtctgaaatctagaggctccagagagatgctgagtccactgtgctggagccagagctggttgctgggttactttttgtggtttattttattaaaaatttctatcctttttctcttttgatggacacaatctcatgattcccatgcctgccaagaggcatccatccaggtagggcccagccacagcccttaggtctggagtcagcagagcttactccctctcaatccacagggacgcctgaaagggcccagtctacttctgttctgttttgtttccttctccccccattctcttaacaattggttccatggtgaaaggcagaagtagctgtgtgtccagcacgcacgggcggccttctgctcttgtgattggtcgccgtcgtttccccatccaaccctggtttcccttgacacagtacagttagggactttaatttaaacccttgttctgcggaccaccgccctctgcagacacgccccctgcctcctcctaataaaggctcatttaactccatgctcacctgtgtggaaatcctccatctttagaaatcatttggacatgtgggagttgagagttttggaaaacacttttgttgtgtgatacccaagttgctcagtgcttttgagtgtgtcacttcccagggtggttttgggggaattaacagaaattgaagttttttaaaaggggggtttttacaccaaaaataaaaaaaaagagagagagaatatatgcaagcatttcttagtccttgagtatttttgtgcctggcaagtcagttcctgttctccacccttcctaagtggcaatgacatagaccaaaagtcttctggctccttggaacggcagcaccggggtggcctctcagccagaagtcctcattcctatgcagtcactgatcagaccatgtcacctagaactggatgaagacctccacttgagttgagggtctgaccaagagggttcggttgtcctggtgcatccagacttccaagtcttgtgacttctcccatacacctgtcatccaacccttgtaggcccagtttatgcacctcacaagggacagacctccctggctgtggttcatacttgccaggatgacaagctgtggtaaaggtctctctaaggagggctagagtgaggtgccttagcttactgaccttacttgaaagtgctgcctgttcttctgcaccacactggcctatgcagcaagccctcaacatgataaggactggggactgaagggccatgtttgggggtgtacagagctgccacccccaccaatgctggctttatccctatcctgaatggattaaatcctgggttccttgagacccccctagagatagattagcctctgcttcttgagtgctgggattaatggcttgtacctccacacctggcttaaaactttttaaaaaatattaatggcatggtaactttcctgtctatacttgggaggtgaagatggaggtgatggttcctacttcattgatttcccagaggcaacacatcagtggctctggtcatcaaggtcacaggtaacaccatttcctctactaactgctagggacaggtttgaagggaggagccaagcacagaacacatctgtatttgtcgaaccagaccttttgacagatgtgtgacctaggtttggttgttgggacagtggtcctatgaacagcctccagacctgatcacggtcttccccaccaccccagggaagccaaagcttgccccaggcagtagtaaggattgtaaatgctggctgtaacaaacacctccatgcactgagtcagcctgaatgctgttgagggtaagagtggtcctcgccatgagt

SEQ ID NO: 33688 - DNA, 1131 bp, Mus musculus
atacgaccgcagccccagctcttgatgtgctcgtgctcttacatgctctcatgcagctctcctcctcctcgtcctcctctcacagcctcccctgactgtctcctcctctccctctttctctgtcccctagtgtaactcacatggccgttttgactttggactcttaaggacccaagtgggtgggaagaggtcagccagacaaggagaggctgctcgaagtaacctgcccaacccctgcccaccataagcctggtcctctttgacttctgtaggcttccagccagctgtcccgaggctcagccacagcacctcgtggtgttctgcacactttcagccagtcacccaaactgcagaatgcagcctcagctacggccctggtaagcaggactggcagacattccgagagagtcgtgggcaccggcaagggcaccgcctccaactggaaaaagacgcctctgagcacaggtacacctctgcctctatgggaacccactgccactaggccacctttccttgtttgtaaggtgcagtccaacacacacaacccagcagcctcctccttactcttattttttccttgagacagggtttctctgtgtagctagccctggctgtcctggaactcactttgtagaccaggctggcctcgaactcagaaatctgcctgcctctgcctctgtgctgggattaaaggcgtgcgccaccactcccggctcctccttacttataagggcattttcaaaggtaatacagagagcctgcatcttgtccccttcttgagagcatatcctcttgctcccatcctgaggcaagtgacactttacctccagtagaagggcttggctcatgacttccttttatctgcctcaccctcccctaacctcacccacctcaaccctttcaagcaattagtggtgctttgctgccctgctctagagattagtgacaccagcagccagcctttgcccatctctcttccactgccttctccctgtgtggaccagaacagaaccatgaacccagagaagggtggactgtgcagggtgctcatggagcagcaatgccacccttggaacatagaaatctctgttgggctcagccttccttgcagcctgtaggaagaacagctgg

SEQ ID NO: 33689 - DNA, 1231 bp, Mus musculus
gagccatcacactctgtagacctgagcatgaagtcagtgagagtggttcttttgagtttgaaaacttgtagccactgcagccacttatgtgtgtcctaggtaggacaatgcagcagatggccccaggtccccttgtgaggtagagagcaaaagctaacagtacatcattgtgctttttggtcttctggggggctgtatgggactgggttaagagaggggtgggcttcccattgggtagttcccaatgtgagaccttggctttggagtgctcacgtccatcctacccagcactcaggagctgagatagcagaccaagatctgaagctctgtttacttgtgacagagctctggggtcgagtagcactttctgaagcatccatgctacacctgagtactcagagatggagcacaccatctggtgtgtatggccctaatgaccagtgatgatacccatggtgcccacggtggcaagaggaggcacctaggggtgattgggcatctggggtagtctggcctgcctggtactctgccctgctaagcacctgcttatctccatttgacagtgacatgaagtctgagaagagacctccctcgcctgatgtgattgtgctctctgacagtgagcagccatcgagcccaagggtgaatggcctgaccacagtagccttgaaagacaccagcactgaggcgctcttggtgagccttggcagagcctggaagccccaccaccccaccttgcagagcttctgctgaggctttccccaattttgtgcttttgctctcctagaaaagcagcccagaagaacgagagcggatgatcaagcagctgaaggaggagctgaggctagaggaagcaaaactggtcttgttgaagaagctgcggcagagtcagatacagaaggaagccaccgcacagaaggtgcctgtgctctactgccccagaccccagagaggctggcccagggcagaggctcgacccacgggcgggatggcaggcagtgtatggcgttagggagcaagcagaaagtaattcggggtgggggggtgcgtgcgtgcgtgcgtgtaactttacacaccaactccttttgatgtctcttgctatcttatagcctacagcttcctcagggagcactgtgaccacccctcccccactcgtgcggggtacccagaacattcctgctggcaagacctcacttcaggttcgtgcgcccttctgcttgttgccctgcac

SEQ ID NO: 33690 - DNA, 1109 bp, Mus musculus
gaacagtgcaaggggacttcatgcttcttttattgttgaaatagagtgccatgtagttaggcaaactccttatcctcctccttccatctcctgagtatgtgcatgtccacattggatagtactattaatgtctcctccatgtagatgatttaggaagcaaatgggatagtgttccacctatactgcaaaagaaatgtggaggagggacgcgctacagtatggctaccataccagatatatggtatctatatgatgatgcattactagaaacaatccatagaggttaccccaggttgtgtgtcttgttctgcaaggtcccttagccttgagattgtgaacagtgctgccccaccccagcctggacctctggtcaaggctgagctggtacaaacagaagaagctgcttggtaccttatgccccactcctagtctggatctctgctgagctccagctggccttgcactcctctttaacctcctcccctcctcggtgctgggatgagagatgtgccaccatgcaggacttactcgaaccttttctgtggcatcatcttggactactgcagggtgagtctaatatactgtgttgttcttgaggaggaaggaagtactgacagtgtggcttacttgaagtgaatgacactgctctccagcgagactgtctccaagcccttaccctgagaggagactgtaggtctgtggccttcacgtccaacttggagtccagtgtctctttccaacctgtcccaggttggtgctggcacctgcccttcaggagtttgtcttctcctccctcttccctttgtgtcagttgccatgtacaggctgtggctaccctcccttcacccaacatggggtctcgacttttggaaagttgaggttgattttaccagctctggtgtccatgtcctccatgacaggaccactgaaaaaggactgaagtgtcacatatatagtatgtacacattacacaactaccaatgctcctgtcttccacaaaagccaagtagctgtgacagtgcagagagcgggctgtgtgggtggccttgcttcctctgcagagatgggggacaggcctcaaaatgtattcatggtgccaaagccagcag

SEQ ID NO: 33691 - DNA, 1331 bp, Mus musculus
ccttttctttgaatcaagataaatgtgtgccacatgtacagggccatggtggtggcactttgggatggaccggtccatactgtgctcagagtgtatgtctgccagccaaaaagcttagcatgaccctcacttctggctccctggggggctcaggcacacagcacctgaggtcacctctatccaggtcctacacacaccattacaatacagatgccaggcccctggactggttttcagacccataataggcaccgttcttccacagaagggccctgtccagtaacagctgccactgcttttctcccacttggattccatggcttctcagagctggccacacccaagaggcctgtgggactccttcctgcccagccatcctaagggtgtgaggggcgtctatggccctgtctttgttgtcccttctctagttagctgcctctgaggaaaagaaaaccgcacttcaaactaaacttgtcagaaggggttcaaatgctatatcctccctttcgcatacagaatgagtgaagaagcatgccgaacccgcagtcagaagcgcacccttgaacctgacctaacggaggatgatgtggagaacaagaaaatgaaaatggagaaagggtcatcagagctgacagtggacggagacagcagggtgatgccagagccgagtgcaggctcagcccaggggttgctgaggacaacagaggccatgggcacaggatctggcgaggggctgttaggagacgggcctgtggacatgcgcacttcacacaggtgagtgagaaaagacaatgggctgggttggagcctagcagaggctggtacagggcaggatgtccctgagtcctaggctgggacactgtcagtggcaggttcatgggttcattggggaggaagtcccctgtatttatttagtgggtctgccatctcttggattgtgggaggactgaaacattcctttggtgggagtgcctcagggaggccaggctaccacactttgtgtcattcctcaaaggaggagcctccctattctgcctggcttctgttatctcttctgtgggtttctcctgtatatcactaattagttcaagggaactttcctgaaacccaggcttccttcttttggtttttttcaagacagggtttctcggtatagctctggctgtcctggaactcactttgtagaccaggctgtcctcaaaactcagaaatccgcctcccaagtgctgggattaaaggcgtgtgccaccaccggccggcccagaacccaggcttcttgacactcataggtaaaaggctaaaggaagtcagactcaacctttttctcccag

SEQ ID NO: 33692 - DNA, 2168 bp, Mus musculus
aggcccaagttcagttcccagcacccttgtcaggcagctaacagcccatctgtaactccagctctgggggtctgacaaccctcttctggcatctacacatacctgaacacttagagcatttacaaataattaaaaagaaaaaaaaatgtcaggtaggagttggcaagatggttcagagggtaaaaagaaaagccagtcatgatgttttaggtttgtaattccagcaattgacatggagacaggtggtctctgaggctcactggccagttagcctaagcaaagtaaatggtacctaaaagaacacataaggttcccctctggccctgacatgcttttgtacacatgaacatgcacaaaaaacctgagtgtcaaccagctctaaagatttttgatcttcaagatgaatccattgaacctaggtgtttaaatagtgtatcagaagtgtaaactaaggccataactgctccaaagtatggttgaagggaaggtttttgttgtagataataagggagagtgcagccagaggcatctggaagagtccagaacagggagaaagagaagtagatgggacatggccagcagactggctttgtccatgagatgagtgggtcgaggaagaggagatgatcaagagaggaagaccaaagatgaccaagcacacaaatactcaaaagtgacaggtttataagggactaagatgctagggagggaagcccatgtgcaagagaagggtaggggtgggtgggagagacatgggcaattagaacccaggaaacctgaagcacagaactcactaagaagcagcacagatttgtcctcactttcttttgggtctggcaggcagagtgccatttggctttaatccctacactcaaaggcaggcagaacagtgatttggaggctagcctggtctacatagttgcaggtgagtcagaaaccctattccctaaaacaacaacaacaaaagagggggcaggggtctgttctgaatgtcacccaaggctaggttccccactgtggtgaagtgcactctggccatcctcctctgggtgttctcccatgaggcctgggatattctacattggccaccagagggtcagaacaaacccaggagtccaggacagctaggcatgtccctactaaatagagacactggaggcctcatcctggagtccgagtagccagactgaagggttagaaaggcacagaattgaagtgtttaaactgatccacttgtaactccagtacccatggagccaatgttctggtgtctatgggtatgcttgtggtacacagacatacatgtgaataaaacatacatacatgcacacatacatacactttttcgaagcagtgtgaagtttctttgggaagcaagttgtgtctgatggtatgttctgggtcagacatgtgaaggagtgttttcctgaaggggacacaggtgaaaggatgttttgctaaagcaaatatgaaaggacgcatggaggtagggagccaacagaccatggactatgctggatggtatcagtacactttgctattccttaaacatcgtttgttgtgacttcataaccaagaatattctggtgatgttctggtggcttctgtttcctcagacttgagctgattgatgtcagctggtacagactcctatggagttttgctgaggtaccaaccatgggagagcacaagatgtttggagagagaataaaaatgactcaactggacagtgactggagttcgggaggtggggcttgcatagctagctttgcaacactttgttggtctcatgcttctttgatcttaactttgttgagaggcacagcagagaacctttggtatccctgctgttcctggtcactcttactgactcctgccagttcagctgaggactggctatttctgctaggctgtgccaccactgctgattcatgtttgcaatcttgattctactgaactggactgctggtatgtatcctgacaagcagaagggatttgctccaaagaactatttctaaacaggtccacttccctgatatcctaataacctttcctttctactacctctggtgggctagaaggaaggttaaagcatttaagaacccttattaaaagtaggttttgaaaaaactaagcctacacagtgttctgtgtggtctggctgtcct

SEQ ID NO: 33693 - DNA, 1106 bp, Mus musculus
caagcccctagacacgcttgctcctgtacccaggtgcaacgcagaaaccagctggacatggtggctcacacctgtcacacctggaaggctaagaacactcccaagttacatgccagtaagggttacacagtgaaatatgaataacccagtaaaggagagcctggtccagcccttgtgctcctgggtagggaaggctctttgcttttccatgggttagttgactcttgactgcaggtgaaatccatataaaattagacaggtttaaaaaaaaaacaaaacaaaaaagccgggcgtggtggcgcacgcctttaatcccagcacttgggaggcagaggcaggtgaatttctgagttcaaggccagcctggtctacagagtgagttccaggacagccagggctatacagagaaaccctgtctcaaaaaacaaaaaaaaaaataattagacaggttttactgataggtggttgacttaaatttgacagactttaactgtctatccctggctgatcttgtattgtagctgctgttccccaaatctcacccaaggttatatagtgtgagctaccactgtaggattagactgggtttgtttgtttgttttgctttttgtggcttggtttctggatctccactggcttacataggaaattcttacatttcaaccccaagtttctgagaccgtaggtagcactccaccatgccatctcttcagccacttgtttgtagttttgtactttgttgggggtggaaccaagctcttgtgcacagcaaacacacctctcaaactgaactatactgcaggtgttcctaaattcaagaccccagtgctcaagactcaagggaggagcatccactgccttcggtatgccattgtgtgcctaagcactgacctttccgaaaggattcagagtccagctatgtgtctcatcccccacacctgggcatctctgccttccagagtctgcttaagctagatttcaggtagagtccactccttcctttgtcaacttgaaggctctatcgtcagaacaagcctggtcctacctcaccaaccctggatggtggggtttggagcaagtgaggtagatgagtcctggggctttgc

SEQ ID NO: 33694 - DNA, 1984 bp, Mus musculus
aaaggcatgtgccaccactgcctggcaacaaggctgatcttgaagtcacaaatttacattcctttgtctgccaagtcaccacagcttgctttcaaggggatttttaagaactctggcaggtggagactgggttcctgctcagggctttgtggatgatcctcctgcatctcaagatgggtttggatgtctgagggtaactctgtctcccctgggttggtatgagtttggccacccagggatgaacagtgacacctgccccatcctcagacctaaacaaggcatgtgggaacgccatggatgcccatgaagccgcacagatgcaccagaacttctcacagcagctgctgcaggaccacatcgaggcctgtagcctcccagagcacaacctcattacggtataaagggtggggaaacagacatagggatacgggctctggatcttcagctgggaggggtttactcatgtgtgttctccccacagtggacagatggcccaccccctgtgcagttccaagctcagaatggacccaacaccagcctggccagccttctgtgaggcctgtgtccgcaacttggacccaacactggagctctctgggaacaaaaccaccagggtgcccaccagtccctcaccattgtccagagctaagtcctaagagtgctgaagccatcatctgcctctgagggtgacagccaattgcacctgttccaggactcagtgccatctattgaagggactgatggcctaatctgtgtctgggtgtcacctgagaagaacagggtgacaatgtgtgtaggggcatcatctgagtgctcaaccgaacctaagtgcagctgcacaaagtggcctccaacccagggcaagctgaggggagagtaatggctctcactttcctcggtctgctgttcttccagtgtccctgcactcagggacttctgaggacctggaagtcagactcttaatctgagtggtcctccaaggtgacccagtgcaggggaggagtttgggaagaggtgtacatacgcagttgatgaggctgagacttcgtgtgcccttaagaagctccttgctcatattcagcagcacgtcttggcccagcctaagcatcaggcagaagtcccattggacctgaatgagagggttccttcctggcagctatttagctttcccatggaggacagttatgggaccagctcagctcctcttggcttgatagctgccctaagggtgacaataatgggggggtacggggcacagtggttcctgccagctcatggtatctaggcaggtgctcaccaagcaatgtgaagaccacttctcagagctttggaagccatgactgaagggacgaagctccaagaccttcatggacatcctttctgagccatgtggcagagactgcccatggccaggtgctcccaacccttctgtcttcctctagcccttgggtcccagggacctaccctcaatacctgcatcacagccctgcttatttatttaagctttttttttttttttttgcttctagggcattttgtacatacagcaattcaaacaaggacctctcgacttgccatctgtcctgatgttagagtgcttttagtgtccatatctcaggcatgtgaaaactaagcacagggtcacgacaaactccatagtctatgttgagtttccacctacatgaccccaccacagtgtccaacagctaaagattgaggggaaatcccagatgggctagcacaaagaggtattataacccaggagttactaagagccagccctgagccaggctaactgtagccctatatgagcccttaagccacaggtgacactctgagtgaaggaaggcatgtcatctattgagagggttggtttgttttcataaacatgggtggctttgcctggttttagcagccttttaatcgggaactgtaagctgagatctgtgagaagtctgtttgctggtctctccctttaggacca

SEQ ID NO: 33695 - DNA, 1197 bp, Mus musculus
gcatctgtctcctcttacaggcggtttcttcgagaaactctgaagatgtcaaatgcagaggacctgaaccgcctcacagcctgctcccttgtgctgctgggtcacatcttctatgtgttgggaaatcacagggtgagtccctacctagcctgtgcacctatctagctcgagacctgaggagcagcaccgtggagcatggtatttcctgtcctggaacccagggtgtggaaggcatggggtcctgggtcctgggtcctgggattcccttccaggatatatgtgtcgggctcacaagccttggaactaagagacagctgcatcctgccatgttccttgtaggcttctctgcataccatcccttgggaatccatggccctgtgggactgtctcagaaacttagatgagactggcaatgtcaaaccctcctgtgtctgtggcaccatcaagcacgtgactttacaagacttttttacttgaaattactataaaatgtagtgagggtaacttggccatggagagcagggagtggccttcatgttcctagtgctgtggcctgctgattgggcaagactggttggttactctgtggaactctggtgtggtgtgctttggaggagcacttagagtagcaatgtgggccagaagcctgcttgtccagcagtgtttcccactcaatggctttctgtaaaatactccctttgcctgtgttagccgaactagggagctagcagggcctgtgaggtcagggcagtcagagtgagcctggtggtgagcagcagggacagagagcagggagggttgctctctgtttggttgtggctggtggaggttaaggcctgaataacccaactgagctgcatttggttaggttgttttccattaacctgtacctagaactgaaatctggtttgaggcttttaaatttttgttattcgttcaatatttgttatttgggtatttcccaatttacttattttatgtgtgaatgttttacctgaatgtatgcatatgtaccatgtgtgggcctggtgtccacagaggtcaaaagcaggggtcagattccctggttcaggaattagacaattgtgagctgccatgtgggtactaaaaactgaacctgaggactctgcaaggacagtgagtgctctcaacctctgtcacagaaagtacccagacccacaggctggggaggtagag

SEQ ID NO: 33696 - DNA, 1099 bp, Mus musculus
gcagtgggagcttctgtccttgttttcagggtgtacatagatctccttgggaaagtccatggagtggggtttgagagaggccacagaaaccctgctgacagagaggggagggcactgactgcccatttataagttcatgtccttaatcctgagagagacgtgaggtgggcacagccaagagcacgggtgaggtggtgacagcccaagccaatccctgcttcctctatcctctgccagaccgacttccgctgagttgaaacattagggtgacttaagggtgccatcttctgctctattcttttgcgatgctcagaagtgtgtctgcatcatgtaaaacaggagctacgctacggaagctccattgggcacacctggtagatgatggaggatcccaagttcaagattgaaagggtgggtcaatggttaggagcactcccttctctcacacacattagaactcagatttacttctcagcacctacctcaggagtcataatttcctgtaactccagttcctcaacatctgatgctcccctctggcctccttggtggtacctggatgccagtggtgcacttgacatgtaggcacacacgtgtattgtcttttttttttttttttttttttagacaaagtctctattatgtagctctgactgacctagaacttcatatatagaccaggctaaagttcaaagttaagatggaagtatagtgcagtgcagagtactgtcttgcatgtgtaagaccctaagatcagttccagcatctgcccccctaaagatgtagacatagatcagaacaaaatgcagcactctaaagtgtctataaataaagcacatctccctgaggagcaaccgtattgatcctggtgccttacaaacctgatatcttgtgtcttttccagggcattattcctgctcagcaaggggatggtaagttcaggctggtgtgcagccgagttgcgggcatgaggccacctgcacaggcttttctacacaaaagcaggggctgtgccctaatgggcttcatttggggctctgaggtttcaggtggtagatgtgctattgagaaagcctgctgtggagccacctgtacccta

SEQ ID NO: 33697 - DNA, 1213 bp, Mus musculus
tggccggggtctaacacactctcgggtcccacaggccgcgtgtttttcctgaaaccgctgcgacctgtggccttggccggggcagtgcgcgcgtgcgctgcgcggggtgccacagtggccaaggtcgggcagctgttcgctgcgtggaagctgcagctgttggaccgctgcactgcaggctggctggcggatggcagcgcgcgctatcccatcgtgaatccgcgaactcgctgtggaggtcctcggcccggcgtgcgcagcctgggtttccctgacgcctcccgacgtctcttcggtgtctactgctaccgcgctccaggtgccccagatccggctccaggcggctggggctggggctgggccggcggaggaggttgggctggagggtcgagggatccggctgcctggaccccgctgcgtgtatagatctggaaggatgcgtgtttgggggtgttagtggctgatccagtggcctcatgcaccccctggataccgatcacgtctcagagtctcagagattccttggacatatgacacacccctgcggtgcactgcagactgatctagctacctgtggtctttggacattgaccatacctaaggtctcctggataagcgacctacccctgcggtgagctgcaggctgacccacttgttgtggttcttggtcgctgactatgttgccctctgaggatcccctttggatagtggatatttcatcttttagactttgcccagaagagtcatactctccctaatccccgggaccccagtagaccagcaggactctacggtttccaaaagatgaaccttctatggccttctgaaaaacaggtggacacccccctcagtcacctggaggctggacccccaggattaactggagacctgcccccaaaccttctgtatttcccgggagctggaaaactggtcttggatcgtcagctgtacactgactccatcacctggtgaagaaacagaaaaccacaggtcacaagatgatcgtgccctgtacgagcaagtgacccagattcccactctttcagagagtctctttacgttttcaaggtagcatactttgtccctgggtcaatatggaggacagacccaacacctctggtgtcacaggagagtctcctcagctggctcctggaacagcggccatgcctatccctcaggttttcctctgaccagagagtagactcgcttgaat

SEQ ID NO: 33698 - DNA, 1197 bp, Mus musculus
cttgtaagtagcagaatgagagagtttcatccctgagaagctgcacccgaggcagtcgctgagcctagaggtgtccttccctgagccagtggaaaatggctcaggcagacagaatgagttttctttacagacatgagccctctctttagttaatagtcacaccgtgttggaagggtgagcccacctccacagcaccttacagagggatcctaggctgctgctgttgccaggacagaaactgaccctcactcccttctgtttcagtgctgtgaagagcttggtggacagcagcgtgtacttccgtagtgtggaaggcctgctcaaacaggccatcagtatccgggaccacatgaacaccagtgcccaaggccacaggtagccctggccacctgccctcaccccatcctaaccagtgagctgtcctggtagtctttggcatctgtggcactcattttctgtaactcagctgctgtgaggaacacagtggtgccaggctcacagggacagtgactgagagacacagttcagagcaggtgtgggtgataaagagcagctgcctggcatccccaggatggtgaccagagcaggggccctgagactggcactctgggcccctagaggagtgatttagtgggaggtcgaggcttgtgggagctgggctctccaccctgtgtcatggtttctccggcttagagactttcagctaaggcccagtgcagtggaaagcacctgctggccccttttgtgttggccatgactcaataaacatagcttgcctgctcgagcctcagccagcctttgaccagtctgtcactggaatgagaagagcagcagaataaagtgctgcagacccctcccactgaatctgtgtcacacccaaccttccctgacagcctgtctggcctctgaagtgaccccatatccttacagcacacccaagagctcaggctatgggtcttggggccaaggtggaactcccctctagtcagctcgactgagcaacctcctggcctgtggcatcagtctcatacatttgcatattttgttccagccaggagaaactgtcccctcctccttccctggcctgaccctgaccctggaagactcagggctacctgcttccccacccaggtcagtgtagaggccgtcaccctgctgaactaacccatttctttgtgtccctgcagggacctgcta

SEQ ID NO: 33699 - DNA, 1198 bp, Mus musculus
agtactttgaggccagcgtggtctacagagtgaatttcaggacagaccagcagaagttacataggtactctgtcacacgcacacgcacacacacacacacggcacacacacgacacacaccacacacacggcaagggcaaaaagagaaagaaaagaaaaaagaaggaaaagccagcagacgaaacgacctcatgctccagctaaaactacagttcccagcatgcattgcgcacacccatcccattcttagcccgatgactgacttcccaggatgctcgtcaacagcattctgtctctaattggccaagatacctcagcgcttccccgcctccagcctcgtaccgctgtgcgcccagggagcggacatggtgagcaggccctctgggatccccggggtggagaacggcctaactgagctgagagggttccccaaaccgcgcgggctatttggaagtgtcgtgtagtcagtggtgctggacgcgttgggaggtgaagctagggctctggactggagtgagggagctgggattgcagctatctttgctttctgacagggtcccatgtagcccaagttgtactagaacttattcgtagcctatggggacctcggacttctgattctcctggctctggagtgctgagatgtcaaacttgtgccactattcacggctttctgtttgtcttttaaaatctttttttatttttcattattttatttatttaagtatgaatgttttgtatgtatgtctgtctaccgtgtgtgtgtgtgtgtgtgtgtgtgtgtgtgtgtgtgtgtgtgtgtgtgtgtgtgtgtgtgtgtgtgtgctgttcttagaggccagagaagacatgtaggattccctgagagtggagttagaaagggctgtgagctgccaaatggatgctgggaattgaacctgtgacctctggaagagcaatcagtactcttaagccctgagctatctctctagcgtcccagtccttttatttttttctatttacccattaaaaattatttacaaagggtcttacttgttggtgttgatgggcagtgatggcaaatgcctttaatcttagcacttgggaggcagaggcaggtgaatctctgtgagttcgaagcccgcctggtctacagagtgagttctaggacagccagggctacacagagaaaccctgtctcaaaaaaatccaagcaaaa

SEQ ID NO: 33700 - DNA, 1920 bp, Mus musculus
ggctagcagataaaagtgagggcagggtttgggaaaagctacagttaagacccataggcagggaggttggaggcagggccaacagacaggggaggatggaggccccctaaggcctgcggggtgtaacctaggtgtgggcggggtgtgagagcctctagattcccaccattatgtctccacctataattctcttcttcactcctgcaggaggctactcttgggccctgagctctactcctcccccactggccccatcccagccctcagaggctttgatccctgtagaccctgcaggagatgaggcccagcagactgcagcccaggttgcagggatcctgggtggcctgctcacgcccctcttcctcagaggcatgctggcttacatcatctggtggacagctgcctgccagctgctctccagcctcttcggcctctatttccaccagcacctggcagcctcttagcaggaaggcactaggctctagtgtctgattcctgcccaccaggattgggactgttccctgtgtgtgtgccttggtgcccctagatgacataagggttggtgtggggactccctaccatctctctcacttcagtgcctagatcataaaccccttgaagcaatctcccctgggccatgatccccaagtgtgtgtgtgtggagggggcacgttttacagaaatatcccagagactgggggatgagcaggggagacctggatagtgagaggggcctgggagagagtggaaacctcaagatcagaggtggctaggagagctaggggtgggactctggcccagcatccatatagccccggcatctgtcagtatccccaggagggagagacagtagtctccatgcctgtctccccagcacacttggggaagctgaggtaagagggttagcctagactagtaacaagactatgtaaaacaagaagaaaaagggggccgggggaagcttgaaagggaagagagggaagaggttgtcaccatcctccaaagctgtgaggatgactgctgtgttttgaggtcttggtgactaagggtcacctccaactccaaagttatttttttgctatgacttagtgtgtttacgtgtgtatttatgagatatgtgtgaccttcctacatatgtaaaatgtgtattgagaataaaaaaggagggcttctgcaatgctgccttaccatggtgccagtgtggtctggcccagtcatgttcaagagccagtgctcagtcagagccttgagcctctgggtctctgtccaagaggacttaggagtgtgactgcctatgtgctgtgaacacaggtgctgtgaacacaggtgctgtgtatgatacaataggtccatgtgtgagagcagggatcagaggacaacttagcatgtagatcctagccttctactatgagacagggtctcttgtttacctgagtccctcaggtcagctgtccaacaggctccagggagtctctggtttctgcttcccaccttgcttgtaggagtgctaggattatagactagtgctgctgtcccactttatgtgggctctggggacttgaactcaggtcttcatgactgcagcaaatatggctgacgtgtgtgttatgaatcaacaggatgtccttgaagggctatctggagtccctgcctcccaaactgaccctgacaagggctgcaggaccttgtggaagtctcatgggaatcagggatgcccatgctctgctgtggatttcagagtgtaggggcacacgacgtacagggccccacctccttcagctacatggctcagggctgactgggcctgagctgtgtttcagagcaaggtccttaggcttctggccgatgcccatttgctgagcatgatggagtatagctgatgactccagaggtagttgggccagccagtgctatgcaaga

SEQ ID NO: 33701 - DNA, 1156 bp, Mus musculus
agacatgggcgtggactgtcttcatcaggcagcatttctgtttatctctaagggcactgggcaaatgttcaatgtgaacagatctctcccttttgtcttccagtccacgaaccagttcgaattgcctacgacaggcctaggggtcgtcccatagccaaaaagaaggtgtgtgtgactgcattgtgacacctccctacccctgcagattcagcatcagaatggttgacttgctgcttgtggtgaggcttcaggcactttgcagagctgggtgtggagcatgcctgtgtcccaggtgttcagaaggctaggacaggatgattgcttatgcacaggagttccaggctggcccagatatcacagcacactccatccctaagacagcagccaggcgtaggcatgcctgttatcacttcactgccttcgggaggctgggctgtaagatctcaggcttgaagccagagagtgagtgtattcagccctacaatataaactatgcagtacacaggagagcagtccactcagaagaggctggctgctagagggccattaatccttacaggtctcttgttcagtcacttctcctttaacctgggctccaccctcctcacagagtttctctcatagtcttagtacagggcagcagcatgccaccccacagcctgttggctagttctaaccctggggtaagggacctagcctcaagaagtcccacccccagggatgtttgagggaagctggtggtgagtggcgctcaccattccaggcatctagggttagaacaccacttggagatccagtatacactggaacagagtggtctacccactgactttctctcctcagaaacccaaggacatggagttttcccagcagaaactgacagacaagaacgtgggcttccagatgctgcagaagatgggctggaaggaaggccatggcctgggctcccttgggaagggcatccgagagcccgtcagtgtgtatggcatggctgggggaagcctggggtgccttgggttggggctatacagagtatacagctaggtcatttttttactagctgcacacttaggtgcacaggagtgaccagctccttcctacatagacctctgaacagcttcttgactcttacatctaagcaacatttagtaatggc

SEQ ID NO: 33702 - DNA, 1249 bp, Mus musculus
cttgagagacttctcaaaagcttagccccagtttaatatagttgaggcttataccacacctgtttctgtgcctgggaagtgcattctgaggaaaccccagtacttgcacttgcagcctccactgtggcccctgcaggccagtgcgacggtgctgcagcagttcccatgtacagtgtctttctgaagcctcaggaaggatggtgtggctcagctgccatggatgtctgctttggagcccaactccacccatgcccgctacccctgtttggtacagatcctctcgatgcatcccagcctccccaccacagtgctgggcatttgaaatcagtctgtggaagtctggaaaggctgatgtcagggctggggacatggtggtcaggtgtcaaccatgagcacagcaggaggatcttgctgtagtgatactcaactctcctctcagcttagctctactttctgtttcccagcatgcccttcttcacagctgctgcagctcacaccacctcactctcttctggtgtcttggcaactaacgggtctttgtagcaatagagatgctgcactgccagtgggtcacagtctgactcttgaacacaaatctgcagggtgggaaatgacaggtcagggacaccaggctgcagtttcatcttcaggtctttctttcaccttctagcagcttccatgttggttgtgggttggaatgggactctggtccatggtgggctcttaagaggagttcccatccataagtggagcacacagacctgggtgtgctgctcacttcatatcttcagcttctctccagccacctgcatttgtgctgctccattggggcttcaagatgattgaggaattgtgggtagatggcccttgtgccaagactctggaaggtgagactgtcaggcagccccccaagttgagaatgacattcctaggcactcttgtcaagacaggatgaatagtggggagagagagagcacatatcttatgcccctcaacgtgagccatcttgatgctcctcacacacaccttgccatccttgccctcctggggcaccttgctctccagccaagctgctctaggggcagggctgtggaggacacctgatgtatactcatgtgaccttgttcctgtcacagtgtttgtcctgtcattctagttccagggtcacatccacaaggaccatggattccaaaagttgtgctggcctggcctgccctggctccagtttgttcctgttcctggatgtgcg

SEQ ID NO: 33703 - DNA, 1088 bp, Mus musculus
tggcacgcctggcagaggcagcaccctagtctgccatggagtgtctgcggcctcaaggcgccctggcaggggccaggggaccccagctgtctctgagctttgcactgtgtagagttttctagaatccttgggcagtgcttctacccaggttacatttctacgtgtggcgttgctgtccctggctgctgctgccctgcgccccagggacactgcgagggaaggctgcactagtcatccccatggggcaacagaggctttgggatcctgagacctgaaggccctgtactcatcccaccccattctcaagtcagactgacaacttcaaagagtgtttactgaagtcaggggccaccagcaccaggtttacagctcagtcctgagcctcagcctgggctggctcttggggccgagatctgggaggacgcgaccgtcggacagtgctccctgctttctgccgccgaagtgtctgccccactttctccttgaagcgtcggttttgttgcttgatcttggccagctcagctttgcgtttggcctccaggtctgggtcctgcggaagggagctgagaatgtaactgggcagcttcccagggactggctcccccacccctacccgaccccaggtcccacccacccttactggccacactcttatgcctgtccctgcatacccatgcctccctatactaccttcccctccaggatcatctgtttccgcttgttgatctctttcttttcatcaaaatgcgaagcctccagtttctaggggtggggaggggaacaggtcagtcaggcctggggcaggaagccccgcccacctcaccccactccaccctaccctgacaggctggccacacttactatttcgcactcccttcgcactacgttgacctgcgtgaggatttgtagaacctcagcctcctccaccaccagctctgccagctgctgctctgcagggacaggaaacactgagttgggctgggagtgcaaccagccctctgcacccccagctctggatgtctggatccaaccaaatgtggactgatgatatttagaaaaagcaaaatgctgccaagcttggcagcaca

SEQ ID NO: 33704 - DNA, 1824 bp, Mus musculus
ctgctatggatctgaacctgtcaccctgccactctggctgcagtatggggtttcttcccatcctcgggtctgcggactgggtggctgtgggctactagctttcctggccatgttcacactacctttgcctttcaggacagctacctcggtgatgagtttaaatcacagattgacgtggcactctcacaagactccacataccagggagagcgggcataccagcacggcggggtcaccgggctgtcccagtactagaaggcaagtgccctggtgggttcagctctctgcacacgtgtgcaaacagggtcttcccagacagactgggcaagtagatatggtgtgttggcaggtcctgcctctactggccctgacacctctaaccctgtccctgatcacaggtagcggaggaagagctaagctatgtggcttagtctatcagcatcttattctgggtaataaaaaataaaaataaatggatacctgttttccactgctaaaactgaagcaccactgtgtgagcagccgaggagaggagaggaaagaggagcgagagcgagcagagagcggccagggaggacgacagagcggagcgccgaggagcgggcgccccctgtgggcggcgagaggagagaggcccgcaccgctgcgaggccggcccagcgccgtgcccgccagagggagaggcctcgccaggaccggccccgctgttctttttctttgtttctcgtgattgaggggctacgttttagcaggacgaacttcgcgtttctgtgcccaagcgggcggccaggagcatcagtgcgcggtcccagcgctaaggggtttcatttaaagaaaatacggtgtttggggtttttctggtttttcttttttttttcttttttttggttttttttttttgtttgtttgtttggttttttttttttttctttttggttttcctttcctcccccctacccccttcaaagattctttcaaaggagtatgggaagtacttggatcggtttgtctctagagacctgactgttaaacctgagagatgcgagaagcttccgggaaaggcagcgctgagaagcctgagccccgcagcctgggatcaccgcctgcaccgcagccggaggatttgtttttgagtttgagcttcagaggccacaggcgaactcgtgagcacggcctgcgggttcttccccatcgagggtggaggcctcattgctgggcgccctgccccggacccccacctcccgcggcagccacccaacccctacccaggcacacctgcgccaacgcaatggaacttaatttttagtcaaatttgttttaagctttttgtcaccaataaaacatgaacaaacagtccctgcttttgcgtggggcggtccctgaaagggtgtcccgggtggtcaacggcagccacactcatccaccaccatgtcttcgtagtgtcgcaggaccacgttgtcactattgtcgaagaagagcacggagatgggtgatagacgctctggcacgcagcagggcgagcctgcacccggggtgggagcagctgcgtgcatgagcgcgcgcagcacagcgtggttgagtgcaggcggcccgccgggtcccctcagcgtttcgggtagtgcgcacgtgccctggcagaagttggctaggaagccacgcggcgcgatcacccaacggtgccagcccacctcacggaagctcacatgcaaccgtcgggtacgacaagtgcccactggaccaacttctaccctgggctccgtgtggcgccgcaatcgcggcaagggacacaggcgtgggtccagcgtcaccagcagcagggaggcc

SEQ ID NO: 33705 - DNA, 1187 bp, Mus musculus
aacatttctgggatatgggacccatgccaccaattccccaaagtgccttccctccctacagagcctggcgtgtggggtctcctgaggctctctacaaagcttgctgctgggactggcttaggcagtgggtgttggggggtcctggttgcttctttcccagatgctggagttcctggccgtggatgctgtgctctgcaccccaaaggcagcacagcacagacatggccttcctagaggctctgacctttgggaagcccagcccgtgaatgagtgtggggctaacccggcccatgtttctcatgtgttcagactcaagataacatcacggtcaggtgggacctgggccttaacaagaagagaatcgccttcttcactttgcccaagactgactctggtaatgaggatttagtcataatttggttaagaggtgattttaagttttaaaatatttgtgactataagtagaataaaattcctagtcccccatatcatgtcccttatgtgaactctgcatggtggaggccacgccctcttgaaagtgctaactctgctactccttcctgcaagacatgcggctcatgcagggtgatgagatctgtctgcggtacaaaggggatctggcgcccctgtggaaggggattggccacgtcatcaaggttcctgatagtatcctttgtcatatctgctaggaggatgggttctgtaacaggacccctggctgtccccagggctctaatatgtacaacttcttcctcttaatatacaatttcttctctctttccactttgtgagacatacacaccgtgacatggtagtgagtgcgcgtgcgagcatgcacatgtgtgagtgaaacagcctggagtctgtctgcagcagttcctttgcctgataggcaaggagagccggtctagtgatgaagtcaggggctctgtagaaggtgactttgaacaggaaactgacttaactcagttgccagattatggtgatgagattgctattgagctccgcagcagcgtgggtgcccctgtggaagtgacccacaacttccaagtggattttgtgtggaagtcaacctcttttgataggtttgtgagggccatacccttgggggccacctccacctttggtacctgtggctcgtgtgggttttacactggctgtttttataggatgcagagtgcactgaa

SEQ ID NO: 33706 - DNA, 1139 bp, Mus musculus
gctgccgcaacgtcttcctgctgggcttcatccctgcgaaggccgactctgtggtggtgctgttgtgcaggtgagctgcctgcagcagggctgggctggagaggacagtgtctgctgggaccaagttctgtgtgtattctggtcaaattagaaaatgaagtctggcctgatgtggtagtgtacacttttaacttcagccctggggaggcaaaggcagaagtttctctgagttcaaggccagcctggtctacaaagagaggccaaggccagccagggctacccagttagaacctgtctgaaaaactgaaagaaggaaagtgacaggtctgctgtgaactgaggccagagctgggcgtgcagatgctgctgctgccttctggctagtttgaggcctcctgggccaggtcccaaccctctctcctgccccacacctgcacaggcagccctgtgccagccagagcagcctgaaggacatcaactgggacagctcacagtggcagcccctaatccaggaccggtgctttctgtcatggctggtcaagattccctctgagcaggagcagctgcgagcacggcagatcacggcacagcagatcaacaagctggaagagctctggaaggtgagccactcatagacaaaagaaaagtaacgtggcaagcctcacactgggcaggagatattgggggtgggggtggggacatgacctagggctctgcaggggacatagtggatggtctgagtaattgggttaggctgttatgagattcctactccaaggagcacctgtccttatccctaatgacaagtcagggttccagattaggttggagttctgttctggctagctttagactctgaccttgttttccaaatgtgactaggggtgtcagttgagcaccctctaaccaggaatcccaagtagtattggatagaaaccttctaagcttgtccagcttagtctctttgcacttgggtggtcaagttccagttacctcagtatgcccaggttctctgctctctgtctcagtgaggctcacagagggcagttggtcccagaggaggtatgttgctacaggatatgagagagggacttggctcactgggagaatcatgagactctgacagccgaatctggggc

SEQ ID NO: 33707 - DNA, 1099 bp, Mus musculus
agccctagtcgtcctttccaccaggaatagacgagagagcccagtgagagcgttttctggtttgacacctcatggccccagcctgccggtgcacaacagagctatggagacccagtgattcaggggcctcccttagcctgggttgggcctgagcattctctggttgcacagtacctgccttctggagtcaggtgctcccacaaccttgttagaaacttgcaggctgaagggaaggggccaggattgccttgggcctgtgccactcaggcatctgtgttgccctcacactaaccaaacctgaaagctgcaggccagtactgactgttgatgtttgggcttttccagttactgtggaatccatgatcctgcctgcgtggtttactgtaataccagcaagaagtggttctgcaatggccgaggaaatacttctggcaggtagctgacagccatgcatgtgtgtttaatcagcaacactagggctgctgtgagttacggtgttgttggagcaaagctggaatgagatggtgctggtgaacctgggctccccctttgactggtgtaacttgaaacagatggtggcgtgtgaacgcttcgacatgtttatccttgattgattctctgcctcgctcattatgtgaggagtttggcttaattctgttctcaggctgtgcctgcctctcatgaaatgaggctggcatggcctgcctgtccttgttcctgggaggttgagggcatccagctgagccagttgacttgattgtctctggaaccaatggttcaagatcctaagtcattaggaacaactagactcatccctatatcatgctggctctccatgcaagtgtcagtaaacactgttggagagaaacaactgagccaggtgtgcctgtttcccactgccaccaggggtgtggcttgtttctgaggacattctgtaaaaagaatgccacagaaggttgtaggtaccaggtctacagtgaggcagggattatcatctttaaaagatcttaaagtcactttcagggaccaagacatcccattctcagaaggaggagtaagacctacaaagctaagaatggctggatggtcactacagtgg

SEQ ID NO: 33708 - DNA, 1140 bp, Mus musculus
tggagacctgccctcgatcaaaatgctaaggctctgagagcagtactgtgggaaaaagtgagcaaaccaaaagagactctccttgcctctgtgagccctcctcactcctgggaacagctgttgtaaagtgagataatagttacgaacttttacagagtccagcagccactgtggctctcctttggtgcagttcctgggcagcacctgctccagtggtcacaggtgagaccagtggcagccctgaggccctcactttgctcatggctgggactggctccacctctgcaccctcaggtgtttctctgccccacatgacctcttggcagcctatggcctggcttctattctcagccccacagcaccttcttttccctcttgtatggtggactggtggaggaagacctgaccagtgctcatggtgcccactctgagaagctgaggaaggtggcactcaggtcatcctggaagcctttgggggcactagcctctgagttgggtgagagcatggcttggatgtgcctggggctgcgggcactgtgatctgccctggacagaagggccttaggcaaggctgagaggagaactgacagagggtggcactgtgtgactagggtgaagcagtgatgtgagaagacctctggccatgtgtaagctgcctgtgaaaggagccctctctttagtggctgctgagccccacctgcccttctgggctagtgagagaagaggcccctagagccacaggtgccagattggtggcccacagcttcaacagtttggtggtcaccgaggtgggatgttctcatggtttgggacagtcggtctgttccatctctgcacagccttgtcctggtgggaagcaagcctgcagcactgctgctacctcaggatgcaagggtgccaccctgtgagggtgtggttccccagtctgtgtgtccctgcccatggagttagctgtgcactcaggtcatctgtacttgccactctctgctacctgtgtggtcccatcctgtgtgcctgtcggacaaggggtgagctcataccacacagagcaaaggtcaaaggccacaggatggagaaaggagggcttcttgctgaactgtcatctctttgtaagtcaaaatggctacaactcagcttgag

SEQ ID NO: 33709 - DNA, 2714 bp, Mus musculus
gggtcctggtggctgggcgtgtctgtagaaccgcagaacatatcctgggaacagcctttactttcactggagcctcctgagaaccctctctctctgaggatctttaaggcgtctgccaggccttagcagtggctaagtgggggctgtggaccggggtcacctttggcctggaagttctgatccccaccaccctaggtcatagcttgacatgccctctgcctctgctccgtaggcccgggccgcggcttcactgtttctctgtgccgttgcccactgcccatgctgggggtttggggagcacacaagctgtgtgtgtctctccccaagcacctaggcagccgcctgcatgagaaagctgccaccctttcattgctattccccttcccctgggtctgaagacacagcattgctttgtccaagtcacctgtccaggtctcaggcctttctgtcaccacggtgcggacttgaagggaatagtgggaactttatcatcaccatcaccatcatcatcaaacgtatgtggtggcacgcgtctgtcaccccagcactggcgagctggaaagcacacagaagtggggtgggactctcttccagctgtagaagtctgagcaaacggcctcaacagggccgagaggctgacagggtacctggagtccagttactcactggctgtctgagttctcagtgagccagggcaggacagatacagcccatggccctcctaagctggtggcctggctttcagtgccctgaagccaagagtgcatgtagctgtattaatgtgaccagttcattgccaagtcctatgatgaggtgacacgtccctgcctcagcgccccaggcagctgtgagcatctcatgagctctctggcccagccaggagccagcactcgggtgcatgcatgttcccaaaggggtcaccctcccctcccctgggcctagctgctgtcagggggactcctgggaggtgtctttgttttctagatataggtcacctgtccgataatacccctgtattgccaagacatcccaagatgatagctcaaggccgtgggggcctcagctggtgacatgcagatactgtgacccattgaactgtgctgggagcagccaccttgcaatgtgtacatagaccctctgcccacattcatgctctctcaggacaggcttagacacctggcccttgagaggtcagatgcgtgagccaggcctggttttttcccctccaccttacccatgtgtcaccagcttcagccaagcccctcctcagccatgtggctgtccagcccacttccctgactcagaaacaggactggggcatcttgataactctatgcccagctgcctcagttaaccttggcaatctacccaaagccccacagaacaacaatgcagctggacccagcccctttctatatcctaagaaatggcttgtccccttgacccaaggccctgtcatatccccttcctgcaacactatccagtgtggctctgggaagtccactggtacttagcctagccttcaactctttggaagactcttacacaggggggccccctagtgaaacccatgtgctactgcacagcacccaaggatggctgacagctatcacactgggcttgatgtcaagagtcctggcactccggtcaggacaagaacgggcaaaaggcatggggacagcaaacctgcaccagtgtcagctgccgttcttctcacagtgggcctggggttttttattttgcagagatttagcacaggttgagagggctgctggtatcagggtcttgatgcagctgtgtgcacaggcatggggttgtagagttgtgccctaggtctggctgctgtccctcagagctgtccaggtgaggacaccgtggcgcagtctaccccatgtggtctgcctctggtgtggtggtacctggtcctttttataccccttccaccttggctcccagggggcctcttccttcagggatctggtgggtgatttggcgaccctgatcatttctgtctcaggcatggccctcagtgtggcacaaatgcctgccacccattggtcatagccacatctccctgtcagggcagaagatggagggacttgtatcctctcgagcctgggtgctggggtactcccaaggccatggggtgccctgaacctcagttttcctctttctcaaccctgctgggctcaggggcccaacctcctggtcagggtagggatagcagcagaacccccacaatgggaccagcagtcccttctgcactcagcctttccttggggctagggatccatcacatggggtaaggcctagcctaatccaacccagcacttctggtcacagggggacatgaggacagggctgtggccataactccagaggccaggctcctgtttctcaggccccatctcaccccttagttggaaaaaggacgccatgggctggggtgcccctttgatatatgcaaatggctggttccacattcccctccccgtgcccaggctggctctgcccccggcatgcgcactccgctgcggatgtctgtggatcgtgcgcatgggcaccgcagttgggggtcaggttgctcagggcacgcacggccgcccgccccaccttctggcgcagacgcttctttgtatttttgcgccctttgtaatgaaatgtaataaaaacccaatgttttcgtctgggcctcttcctctttttccaatctc

SEQ ID NO: 33710 - DNA, 1500 bp, Mus musculus
aaagcttgtaccgccctacctggcccgagcatgcaggctggactgcatgtctcctgccccttctgggatagcactgctggcttttgcaccccagccccatggctcagcaggagctggggctgccagagatacctatggagtagagtttaagtgtatccccagagcagagatctccaagggtagagctaggggaacctgaagctgcagccggtaacctgtaagatcgctgtctcctttctgaacctctgttcctgacccattctcttccccagaccccatttcagtcctcaggcctggacacgagtcggaccacacgacatcatgggcttgtggacagagtatatcgtgagcgtggcagacttggctccccgcaccgtcgacccctgtcagtagacaagcatgggcgacagatatcctttttgcagaggatgtgtgtgggattgggagggaacaggggacaggcacacactgctgcctgtggcacacactgttccctgtggaccagggaaacctggggaaaggcctccaacacaggatgttggagcccagtgtggggcagagagaagggttaaggagagtgagcccaaacacagagggctggggccacaaggagagattcccagtgtagctttcaaggctgggagaagtggggcgtggctcagttgaggcagcatggacatgacagtgatgccacacagcctctgtagtttgaagggtggacacctgccaggatcccatcactagagtggctttgggtcactctcttcccaccctcaactgcagagtagagctgtccgcctgctcctgcctctcactcctgagactttggtgctgggagcgcctcggtggaaggggtcagtttaaccttgcctccctaaggcatctgggacccagcttgaggcccaggcctcctcggaatggcttgggagcatggtgctgagttacaggtgaatggatctggccccctgggggacccccacccgcagttgcactttttttttttttaggcaggaaatgccctttgccctcctggctagctgtctgcaggcccagccttgcgctgggagcaggggccactcccagtagctcccagcagcctggccccacaggctgtgcatcaggcttcctgggtcagagcacactctgaggttcccttaactcattcacgctgacagctgcccctatggcaccgtgtacctctcgcctcctgcggacaccagctggaggaggtcagtggaggggcacctggcctctgggaggaaacaatgtagattttatcttatcaactgtgtgtggagatgcaggacatagtcactggaaagtgaccaagtgattgagatgcttccaaaagatcccagaagtcaactctaaattgtggggaccatgtcttcagagccttcagaaccttgtttttcctctcttcctcctccttttctttctcctcctctttctcctcctcctccttctctttcttctcttcttcctcctcctctttctcct

SEQ ID NO: 33711 - DNA, 1122 bp, Mus musculus
ctttacctgctgagccatctctcagtgtctctcactaaatgtggaagtcatgcttcagctagcctgcgtgccagtgagccccaggaatcctccagtctgtaacttcttgaacttgggattagagtcatgtgcactgcacagcaagcactgtgctgcctgaactatctcaccgctcacagatccagttttctgtcctgtagtcatagttgtacctggctctgtagctctacctggcatgtgttccatgccagtttccccagtgtcacctccctctttcctttctcctgcccttcactctagcaggctgcagcctgccttggggccttagcacttgcagtgtgctctgtgtggcttcccaggccccagcactcaggctgcacacacttgtaggcttaaatatttcaaaaccttttttttttttttttgagacagggtttctctgtgcagtcctgactgtcctggaactcactctgtagaccaggctggcctcgaactcagaaatccgcctgcctctgcctcccaagtgttgggattacaggcatgtgccaccactgcccgacctcaaaacctatttttaataagcgttctgacatgctttaaccttccttctagtccatcaccctccagagatagtgaaaagaaggtttttaggatacggggaaagtgaacctgtttagaaacagttctttgggtcgagttcagtctctaattgtcaggatatcaggtgtctagttcagttgtgtcaggagagcaaacatgaatcagcagtggtggcatgacccagcagaaaccccaggcctcaatgaatcagcacaagtcagcaggagccaccaggaccaggaaggacaccaggagaagttctcggctgtgcctctctcaataaagtgaagatcatcaaagacgaagacttgagaccaatgaagtgttgaaaagccagctatgcaagcccccttcccccattactgtccattgggtcctgtttatactccctccaagcatcatgtgtcctcccactggtcttgcctcattaaaacgccatgtgagtctgtcttagcaaaactctgacagatccagaaatttccatttcactatgccaattggcccaagtctggagaagcggcc

SEQ ID NO: 33712 - DNA, 1201 bp, Mus musculus
aagatctacatcgtgggtggctacaactggaggctgaacaatgtcacaggcatcgttcaggtgtacaacactgagacggatgagtgggagagagacctgcacttccccgagtcctttgcaggcattgcctgtgctgctgtcctgctgccccgctcaggccatgggaggtagcttgggatcctggctgtgttccccacaagtgtcagacccccagcccaggggtccctacctcccagccccaagtcaacagagagagagatctggtccccaaggtttaggtgccatggcagccattgcccagtgggtgtctctgcactgtcctgtgtggttaggtcttggtatctctcatccctagccagacagatgaaagcttgtggacagaaaacaccaagtccagggaggagcaactctccttgtctcctgactaaactcttctgtttaaaatcctagcctggatttctgccgtgggatccacaaggcagagagactcttcagattaccctctgaactccacgtgggcatcatggaacacacatgcacgcacacaatcaaatgagtaagattgtaaatcagctctctggtgcctggacagcattcaggatgcaggagtcagagtgtgtcccagaggccccctgacaggtgacagatgcagccaagtcttcatcaccaacctccctggcccgcttgacttgtggattctggagcatcccaaaggcccctgtcccgttaacccagcattctttgcctgtgccacccccttttataagaagacagagctaataagtgaggcatggtgtggccttttccaataccctggaggctaaagagggaggagaatcattgcaagttctaggccagccaggaccacagccctgaaatgaggaaacccacaaaaaacaaaagcagagaaaccacaaaagccacctcaggtgaggaggcctgtgtcagctggcccgggaggagagccagctgggggcccatctaacatgttggctatagaaagccatgctcccaggtctggcccaccctcgggtggggtggtgggaggtgctatggccgtgagccccagcagcctcattcgatggcagccctgctttgttttgctgtttaaatcctgaactctcatcttcatattttgtttaatttttttcttgtttaaggaagccagccccactgtcttccaaatgagtatgttctctgg

SEQ ID NO: 33713 - DNA, 1308 bp, Mus musculus
ctcaccctagacctgtgatgactttccttacatctgtccaggtctcagtttcctcctctgtaaagtgggctgagtcatgccccaagggtgagagttttttaggtgccacccataaggaaggctggaatcttgaccaacatgggggtttcttccccagacatcccagagggttcattcctagaggatgaagatgaagaccctatcccacccagtatcaccacaaccatcgccacctcggagcagagcacgggctcctgtgacaccagccctgacacggtctcgccatccctaagtcctggctttgaggacctatcacacattcaacctggctctcctgccatcaacggccacagacagacagatgatgaggaagagacacatgaagaatagcctccctcccaccatcccagaaaggctcagggcagccgtgatcctcctagggtcacagtcggtcagcttggctgctccattctttcataggcaggattcctaattcctgccactccccctaagagcaggacttccctatgccagcacatgtgccccaggtggggctgagtacaggtaaccttgagctcagcttgggccagctttgaacagtgcttctgaggtccccagagaccaaagccagatcgtctgtcccccacaccttaggtgggcacaggagggccgagcttgtttctacccactggcagctgctgactcaactctgggctccctgccatctgtggagtacttttttcctgttgtgttgaatactggagaaatagaaggttcaagatagaggcagacctgactgtttcttgagggtccatcaggcatctccaggagctggccagttatcttagaaaacaactgaatggaatatttttgtacctgatgtttccagatgttgggaagttatcaataaagactgttgttaaaagggaacacttatagcaacagtggcttgcttctgtttttgggcctcacaccccagaacatgggcaggtcccggatggctccagggggccctgctggaggaggctggccaaactccagaccctgtgaactactaagacagagttgtgccagatgagagtcctgaggcatccaagttggggtcagagggcaaaacctgccttgatggactaccttctctgtgaaagtcttgttccctgctgaggccactccttggcctagggtttctggttcctgctatctagacactggagctagattgcagataccagctaccattctaggcagcttttacttttgtcatggggatttgaacttggttcttcaggcttgcacagcaggagcttt

SEQ ID NO: 33714 - DNA, 1399 bp, Mus musculus
gggacctacgagaagaagggagcagtaatgatgacaggcaagtcagctgcctcctgcacgtgctcacccactcctacccacctcccacagacgatccacgcagagctctcaaagctggtaaagaagcgtgctgcacagcggagcacagagaccgccctgtaccgaaagatgctaggcaaccccagccggctgcctgccaagtgtccgggaaagggggcctgggtgagcctgggtggggttgggtagggctggaggtggtgttggggacattagcccaggaagaagatgggactctggacctgcaggactcgtggtgcgggttggaggctcaggcagaggaagaaaatccattggaggagtgggtattgtttaggtgtgggtgtgtgtggtataaaccctggctaggaggcctgtgtaggtcacagtggctgctctggccatgcagccagctctcacccttccctttattcacagtccatcccgtggaaatggctgtttggggcgactgccgtggccctggggggcgtggctctctctgtggtcattgctgccaggaactgactgtccccctgctcacctggaccccaacctgtgctccctaactcccccaggctccctgtccattgccctccctggctgagatgcctcctatgggtttggggagcaaggattgagggtcaaataacccaagaagcaggaaggactgagaccctgaggggggacatggggtgcagcccagagggagggaccctgttcttctagacccagttgtttctatcccacaaccctgtcctctggggtcaggcctcggctgtgacagcctcagttttccctctcagtaggcctggggcagcactaccattccttcctgcccgtctgcaccctctgtccaggcttccccacagtgaattaaataaagcctcaccccacaccctactgctttctaggcctctttctgatgaaactgagaagctctgagtcacagctgagccaggtcccccacaaaagctgctttaaggagctgttgatggcctggcccaggccacatacagctgtacttgagaggactttgagagccctgtcagcgcttttcatttcctacttgaggttgggccatgttggggtcctgtgaactctggggtcattttgggtgttatgatttcaaaagagtcactggcctggcgtacatgaggccttgagttctacaagaaagaggtggaggaccatgcaggcatgatcatggcgagaaggtcagtgtgtatgtttgtgttactttgagttgtgcagggtccctgtatctgcagattaagaaggcagtgctgcagttcacaacagcagtgactgcagggtctgtcatgttacatctgaaacactagggctgacggctgaggggctgacc

SEQ ID NO: 33715 - DNA, 1833 bp, Mus musculus
catcattaattcttggcattttcccccagacaacccgtgggcaaattcttcaggaatacaggaaaatcaaaaaggtaggtgaggcagggcgggtgctgagaggaagactgcttggctcgggtgggtgtgtctcacctgccccctttgtccctcatagaccaacaccaactacagctgtgagaagcgacgctgcgaatacctgcaccgcaagctggcgcacattaagaggctcatcgcagagtatgaccagcggcagcttcaggcctggccctagcacagacaggcagacctgacggctccgcctgcctttcctagttttatatgaactcggccctttagctgccgcagagacatctatttttgtaccttttctactccgtgcctcctccaaggcccacgcctccaagtgttagaagccccagggagagtgagcagcgagtgccaggccctgctgccttcagatccccagcggacaaggttgctgcagtttgctggctgtgcccaaagctcttagcagcggcctccgcagcatgtgctcctcagtccccaacacactgcccttcatgtcacactgtggctgtgtggttctgtctgtccctccatccatttgtgggtcctgggatcacctccctgctgggtcccacttggggggtgctgagggtggcaccttgcttgccttctccagggcgcaggcctgaggcccccaattgctgctttctcactgtgcctcgtctcataccccaaatccaaatccaaggggccatcagtgtgcatgtgtctgtgtgcgtgtacatgtagtatgagtgggtctccacacattcagagggaagccattggggaggtggtgggggccactgctgtagggcagggaaagaatgtcaaagacagatgtctatttttttaaatggtgaagatgtctttgggtggcttccaaagagcctggctgcctggaggcacctgcctggcacagtcccccacccccagtcagctcttagctttcttttgggattcctagagtccccagaccctagaggaaccaagctttcaatagatgttggtttcttctccggggcaggaccaggctctgcatggtgcacttctctcacagctacactgcgcaggctcagggtagatcccaggttacccctctcctgccctgagaactccatccagggctattgattgaactgatggtatgtttgagttgtttcattgtctgagattttgttgtctgtctgagatttgggaaaggcagggccacactctggggctgcaggtggtggctggcagcttaagcatggtctaacttattggtgttctccccgcctttgaactgtgctgtggagaaagtctactttgagccatggagttggtgtttacaaagtcttcacttttgccaaaacgttacaattgacagagaggcggtgcctccaggtcctttcttagagtttgtcttctgtacacaaagcaggtgaaccgccaactttcaaagtctataataaatttgatggaatttaacctctctgtggtttgagtatgtcactgtaggggtggggtagccctaagtgagagcttgacccagagccccgagggctttggcaaggtgtgagcactgcagtgctgggcatgggcatgggcagagtgggctcccctgcagcacccaggccttcaggtgagaaggtgctgccctctactagaataggtgggacagaaagtttgcttgagactgacacccttttaaaaacaatagaccccagcgagaattacctgtctcttagagctgtcagtccagctagcatctgaggccatggaggccgagcatggccaccatca

SEQ ID NO: 33716 - DNA, 1098 bp, Mus musculus
gatcctcgtggatagcccggacgtggtctacagccccgaaaccatcgaggcgcgctacgagtaccggacaacgcgcgtcagccgcgagggcggcgtgctgcgggtgcgcgcggggcgcgggcggcggaggacactgggaacccgaggtcccgcgactcactcccaactcttccttaggtgcagcccagggctacgcgtttcaccttccgcaccgcccggcaggtgccccgactcggggtcatgttggtcggctggggcgggaacaacggctccacgctcactgctgctgttctggccaatcggctgcgcctaacctggcccacgcgcacaggtcgcaaggtgggggccgtggctactaggagaatacggggtgggggtgtggcgagcagaactgggggaggggcgtggcttgttggactagcgcgtctcagcaagccggacccctcagcccctcaacaccctgctctgcttgccgcaccccctcccttcccaggaggcaaactattatggatcgttgacccaggcgggcaccgtgaacttgggtctggatgagaacggccgggaggtgtttgtgcccttcagtgcgctgctacccatggtggcccccaacgacctggtgtttgatggtgggcaaagcctcgggacgggatggggttaagtgtgggagggcccagggtacgggatgggtcctgtgttaagggtccccgcaacccaggctgggatatctcgtcgctgaacctggccgaggccatgcggcgcgcgcaggtcctggactgcggtctgcaggaacagctgtggccccacatggagagcctgcgtccgcggccctcagtctacattcctgagttcatcgctgccaaccagacagcacgtgcggacaacctcatccctggcacacgtgcccaacaggtggggtcctcgacccactcccaggccttactgtcacctgttacatggccacatggtctctccctttggcaataattcctataccccggggcccaagcctccggacaacttaagacaacctccacctaatcttcctccttcctttcccagttggagcaaatccgaaaggacattagagatttccgatcc

SEQ ID NO: 33717 - DNA, 1193 bp, Mus musculus
ctgggctcaaggtacctccaggcttcatgcggtgctgggaggaagccggggtgagggtactgcagagcattcaccgtctctttgaccacacagaccatgtccatcgtgagctataaccacctgggcaacaacgacgggcagaacctgtctgcaccgctgcagttccgctccaaggaggtgacaaagagcagtgtggtggacgacatggttcacagcaaccatgtgctctacgcgcctggagagcggccagaccactgtgtgcgtgcaaccggttgcaggcgggcactgagggcaggggcttggtgctgtttggggctatgtgactttttaaatctctgcaggtggtgatcaaatatgtgccctatgttggcgacagcaagcgtgccttggacgagtacacctccgagctgatgctgggtgggacaaacaccttggtgctccataatacctgcgaggtgtggtgggcgcagccgggcggggtgggcagggtgggcgatgatccttcagacccgtcacaccctgcaccaaacaaaatctaggattcgctcctggccgcgcccatcatgctggacctagtgctgctcacagagctgtgtcagcgcgtgagcttctgcacagactcggaccccgagcctcagggcttccacacagtgctgtccctgcttagcttcctgtttaaggccccgcttgtgcccccgggcagccctgtagtgaatgccctcttccgccagcgcagctgtatcgagaatattttcaggtgcgcccctggtggcaggggagggctcagggctggcaaagacagccttaagatggtcttgctgagcctgcactgtcccctgcagggcttgcgtggggctcccgccccagaaccacatgctattagagcacaagatggagcgtccaggcccaggcatcaagccaggagaggtggtggccaccagcccactgccttgcaagaaagagcccacacctgccaccaatggctgcaccggcgatgccaatgggcacccgcaggcaccaacaccaaagctgtccactgcttaaatcaagtgaccggaccggacccttctacccccaatgcctccaaccatagtacttcagcccttgccaaagacaataaagcaagtctcaagcaagcctccttgtgtgctttttccaggaaggggtctcaggttgacctggaatatgctatg

SEQ ID NO: 33718 - DNA, 1245 bp, Mus musculus
ccacaggctcgggcgatatggacgggctgccgaaggtgaggtcctgcacacttgatgggtgggagggcagatggccaggggaggggtggggacccacgcgctgatcagcgccacccctagaattcccccggcgccgtgggcggcctgagcaacgccccggggaccccgcgcgacgatggcgagatggcggctgccgggaccttcctgcacccgttcccgagcgaaagcgtaagcgcctgcgtcgactccccacccgcggccgcagcgggccggaggggcctggcgggcagaccccggcggggcggccgcggggccagagcaagaccgtgaccgcggcgggccaggtgggggggcggccgcggcaccttccccctccttcccatcctccccgggttccccttgtccccgggagggtgggccccagcctcggccagagctgagccgcgctccgcgcgccgccctctctccgcagtactcccccggcatgaccatgagcgtgtgatagtcccggcctgagcccagggtcctgctggtgaggtctcggtcgcggcagcacccctgccatccggactcctggctagcccggccggccggcagggcccccacgaaggacttttatcattttctaaacacacatatacacacacaaactcaaaaggacctcagagaagtgcaggcctctggacctctgtgcacacaaggctggggggtgggggcaggggttctgccaataaatgccattccgttttgactttggtactgctgatgtcttttacttgacatggcctaaaaatcttgctatggcctaaatctgtactttgatgggctgggagcccaccttcccccataggctgaggcaaggcgtgagtttgaggccagcctagcctggtctacatagcatattccaggtcaacctgagaccccttcctggaaaaagcacacaaggaggcttgcttgagacttgctttattgtctttggcaagggctgaagtactatggttggaggcattgggggtagaagggtccggtccggtcacttgatttaagcagtggacagctttggtgttggtgcctgcgggtgcccattggcatcgccggtgcagccattggtggcaggtgtgggctctttcttgcaaggcagtgggctggtggccaccacctctcctggcttgatgcctgggcctggacgctccatcttgtgctctaatagcatgtggttctggggcgggagccccacgcaagccc

SEQ ID NO: 33719 - DNA, 1130 bp, Mus musculus
tgcttaccctggggagtgtgggtggggcttcaagaggtaggcagatgtgtgggcagagcctgacctgggcctggctggcccttaccattaatggcaaagtagaaagctagcccagcggagcaagagaagtaacatggcataaacctgaagccagggacttgtgcagggacagcagtggtagaatctgaggtctcagccagtctgagaaagtgtctgatttatgatatcaacttaggtgtggagatgtagctttcagaccaacaccagcatgctgtgccctgggccactccagtgtttcctgaggccacgtggagggccaaactgcaagaattggaggcaggatcaccatagtgggcaccaatcttctgaattcatttttttgggagatggtggggggtggtacaggatcttgtgtagcctgggctggcttcacactatgtggctgagggtgaccttgaattccttgcctccaggtcccagggatggcagggttaagcctccgcctgagcctgctttgggggcagatctttgaagttaaattgatggcttcagctaaaatgggaactctctcctgtacttctcaagctggcgtgtaaaccttcaggaaagcggggaccccgaggctgggggaagttggaaaagcagactctaggtgcttttgagtgaggactttggctggaagtcagaccagctgctgtgtgcacaggatgcttgtgcctgcgcccccaaggtgaccttgctgtatgctaggagagcgcctccagcctgcccttctccctcccactgtctagacagctcacccttgacctctctaccccttggagtgtctgagcccagagtcccctctgggaacatagagacaaagccttactctcagagcctggactctgagagttggggctgtgggggtccctgtggggtccctatgcatgccgatggcttctcaaatgtgtacccaggcaggtggcctccctccccagcccaccatttctctacatccacaggctggagagagcaaacagatagaggggctttggtgttctgtgtctggtgaaatgcctcccgccccccccccccaaagtacagtgtctggactagaaaacagggcacatagctcttttttttttttt

SEQ ID NO: 33720 - DNA, 2586 bp, Mus musculus
gccccagagctttgaaggacttttcagaagcctggtggctttggcctgggacatagtgactgtgacttttcctcccatctgtctcaggtatctgtgtgacttcacgtattatacatcgctctaccagggccgcggccgctccgcttttgtccacgtgcccccactgggtaagccctacaacgccgaccagctaggccgggcgctacgagctatcatcgaggagatgctgggtgtcctggagcaagccgagggagacatcagctgttgccgccagctctgacagccatgtacacctgggtgcggtgccgagagaggggccatcctgactcatctgcccctcctaatggaccacaagggggcaattgagagagctcccatctgaatatcatctggggacacttctgcgcccagaggccagggctagtggtctgcacacatgccatggggccaccttgaccctgacgcagtctgcattttcaggtgtatggacaaggagttgaagcttgccctgtggctggggcctcacaaagtatcataaagtagattagctctaatccatgtcttaaaccctagatggtccccgccaaagccacttgggacctggttgccttttctatcttctgtctgtttctgtctgtgtctgtctctctctgcctctgtctgtccccatccttctttgttgtacccaccttccttcagtgctagaacagaacagcgtaacttatgttcccattgttaagacttcaggcctaaccaacaagtgtctttcctttctcctggggagggcggcctcttttgcctcctgccctgaaaatgccatcatactttgggtctccatagtgggttccctttgctcagaagagcaggctgctatggccaccaagggcctggccgcagtagcctctggtgcctgtggggagccgaccctgccatgatctttcttgttctctttttgatattttaagactcttaaaattttagatactctaaactttagagggtatttgttgtttgtttgttttttctttggagacagggtctcaggtagcctaggctggcctcgtgtgaactcctgatcctctggcctcagtttcctaagcactaaggggacaggtgtttgccaccacacatggcccacctgggacccagaacctaccgtgtgaaccatcacctggagctgtggattttctccatcttgagatagccagcctctaatatcctgtgagggacctggggtgagaggctgcggtgcccaggcatgtccctgcatgtcctatcagccacagggatatctgctgaactgcatttggaagtgtgccagggactccagccagcctttgtctctggctgactttgaactgccaagccaggaggaggggctctcaggaagggtgggatgtagcatgtgacctggactccttccaagaccaagtacagttcctgccagtgaagccaagtacattgtggatgccaccttctcttttgtggatggatagagacctcggtgtccccacgggattgatggatctgaattctgaagtgacttctcatccctggatcttcttgttgtttgtgagactgggtctcctatagcccaggctagcctccaattcactgtagctgaagctgaccttaaatcctgaccctcctacctcggcctactcagtgcagggcttgtgaaagcctgtgtgctgggcctggctacttttaagctctagtgttccttgttctgatgtggtttcttcatgtcatcatcttgttgatcctgggtctgaagcttatttgtcgccacatggagatctgagtggttggctctctttctgaatctcagggttgagggcaccctggagtgccccagggtgatttgctgtccctacaaaggcatctatgggtgtgggcctgcagtttgaataacgagggctccccctcttaccctccccccagtcctgtgctaacaccttctccagagagagaggccctgcagtttcccagatagccatgggcaggaagatgggggctcaggagtaagggattccccagggctctgggcttttgagacatcatgtagacaaggcaggccttgaactcctggtcctgtggcctcagcctccccctgagatgaccaaggtggatctgactttggttcccgtatgtctttgtttttgtgttctgaggcagagttctacctgacctctgtagctcaggctggccctccaacgtgtggcagtcctgcttcagatgtatcagtgcctggcaagtcttccttaggaagaccatgggctgtgctccactctcaattttcccaaagtccctggcatgggaacaccatgctcagggaccccaggagggtgcacatgtcatgttctagtccccactgttgagctgagggggattccaggacatggggctggtagttatttatttaggtatctcttaaacacacaccccttgccctgatccaaaactacttgtttttttttttttttttttttttttgtcgttttttggcaggtagggctcagggtctgtagttgccaggtgtcacctagactggtcacattgacccttgaggtccaggtcacccca

SEQ ID NO: 33721 - DNA, 1291 bp, Mus musculus
accatcaagtacctgcgcatccctgatgagatcattgacatggtgcgggaggaggccgccaagggccgagggcgaggaggaccgcagcagcagaagcagcagaaaggccgaggcatgggcggcgctggccgaggtggggtccctgtgaggatgaggtgggggagggacacctgggcactcgcctctctgcaccctcttcaatcacatgtagggcatggtggtgtgggctcctgtaggctgagtacaacctggaatctcccacaggacccttgcgcagtggaccagggcacagaggggaagacccttgtccctgtctagggacgctggtgtctaactctgccttttctgttctgtgcaggtgtgtttggtggccggggccggggtggcatcccaggtgcaggccgaggccagcccgagaagaagccagggcggcaggcaggcaaacagtgatcactccctgcctgagccgagcccagaacggtgggtgaggcctcagggcacctttgtgtgaagccccacttggcgtctggtccagtgaagtccctcgctggccactgactcagtttctggaaggttccgagtctgaggtgcctgtggagccttagatgccctttgaagggctgacttcttccaggcatgtttgagtttcagttggagctgcaggctcagcccatggcggctcacctgtcctttaccagccataccctgtacatcttctgtttgaaaaataaaagcaaacaccatagaaagagccagctgttcttctgcctaagccctgagcatgttgtcctcagggcacctgggtcttatcagagggagcagttccctgggcatggggcttgtctgtgtgtcctgccagtggaggtgagagtagagcagatcctgcatttagaaggctaagaggtagagtcaggagttttaggccaactggagctacaaagcacttaaaaagccaggcctgtaatgattggactgtgggagactagggtaggaggctgtcaggctgcttctgcaggcagaacagttctgatcccatacaactccagagtgcaccacagggaaagtgacccagggagagcacagcacgggacatgtacgtgtgtctgtctgtgcccatgtgtctgtgtatttgtccacgtgtgtatttaccacatgcatacctggtgcatattggaaatgagatgacagccattggagtgcttggaatggagctcatccttgagtactctccaggtcccctgtgtctgtttcctgtccctaggggtcagtctgtgccacagtcctgcctgct

SEQ ID NO: 33722 - DNA, 1163 bp, Mus musculus
gaagctcaaaacccagcagtgagtggtcctttgggaaccagtctggttctggctgccgacatcaacatgggatgtcttgacagaagctatttcacctcttcacagtctgtgacgtgtaccgagatggtgccgtggctaccaggacgacattagcattagatatgatggagtctgtgtcgtgctgtcagggcagcgcacacaccacacagcacagctctagacagaactgtttccagggcacgggtgcacagcccatgcagtttaatggaagaatggcccacacagcaaggagggattcctcccacacactgagtcatagcttgagccctgactcggtttacccattagtggtccagtctgcagtcttccagaagcagcaagtaccatgcaaagactgtgaatgagacaggttgtgaggagtcatctcctgtcaggtaggacagggtatgtgtgtgcctggctggcctgaatttccttaagtgcttcctctgtagtcctgactcaatggccactatctcatggacccttctcttccttttgtgcccactctcagccagtgagaaggctctgaccatgacctgggctggctcaccagctcccagtcactctgaacacttgagtgcagaaacctgaacccatctcagctggctgatctgtgaatctgtgaccctgaccttttaaaatttacattattttaatatgtgtgtgtgtgtgtgagagagagagagagagacttgcctgcgtgttgtgtgtacacatgcaccatgtgtgtgcctggtgcccatggaggggagaagagggcatcagatcccctggaactaaatcacaagtgtgaactttccgtggaagtgaatgtctgtggaaaaagtagcctgtgctcaaaaccactaaggagcctttaatcccagcacttgggaggcagaggcagaaggacctctgaattagcggccagcctggtctacagagtgagttccaggacagccagggctacacagagaaaccctgtcttgaaaaaacaagcaagcaaacaaacaatcaaaatgctgagctgtctctccaacacccccccccatgttggacagatatatggatgggtgtgggagtgtgcagggaccctgcttgctgttggacagtatatggatgggtgtgggagtgtgcaggga

SEQ ID NO: 33723 - DNA, 1115 bp, Mus musculus
cctccccccaaacccccgcccgagccttgaccagttgttgcctcagagagccacacacccaggttttatccccttttgtaggcaagtgaccatccagaaagatagagtggactctcccctcaccacacacgtggggtttgcgcttcgcgagccatatcccagccagcaccccctcccccgccccccgccaaacgactgagccagctagtgctggcccaacgccagccagcccccggcgccaggcctgcctctccccggggccgtacggagcttggcggagcgcgcgaggctccgccctgaccttgggacttggccttggcgggtgggggatgggcgggcgtgcgctctggaggcggtggtttgagctgactggggacaggtttacgtaccaaattaagttttacctctgttgagactcactttccctatcaggcaaggagagcattttgtagtggcatggaaaatgtaaagaaatagtaagacctgaacatttttggttgcttttcgagacagggtttctctgtgtagccctggctgtcctggagctcactctgtagaccaggttagtctcgaactcaaagatcctcctgcctctgactcccgaatgctgggattaaaggcgggagcggcctgtcctgactgactttttttttttaattgtatttctgtaggaaaagggcttgttgagaggctggggaaggacctcagctttcagagtctgttctctcccattctgtgggtcctgtgaactcaagtcagctctcaacaagagcaacaagagcctttacccgcagagccatctcgacaccccatcagtcattcttcaattttattatttggagaaacttaacctgctggtcttggggtgcccttagcctctgggaaaaactcctactaaaccttcaaaacaactgcaataaggagtggagggattcaaaaagtctcggggcgctgggttgggctggaggccatgcagtgcggctggtcagtgggtggcagaaacagcgcccactctggattctgttttcgcttctgtcttccctggtcagtgtctggggaagtgacttgtacgggacgcatggcccagcgtggagactgtgcacccttcacattga

SEQ ID NO: 33724 - DNA, 1191 bp, Mus musculus
ccgacgagcagcatgctgaagaaagacgcgctgacgctcagcctggcggagcagggagcggcgggattgaaaccagggtcggccactgcaccttctgcgctgcgccccgacggcgcccccgacgggctgctggcttcgccggatcttgggctgctcaaactcgcgtcgccggagctggagaggctgatcatccagtccaacgggctggtgaccactaccccgaccagtacgcagttcctctacccgaaggtggcagctagcgaggagcaggagttcgccgaaggcttcgtcaaggcgctggaggacctgcacaagcaaagccagctgggtgcggccaccgcggccacctcaggggctcccgcgcctcccgcgcccgccgacctggccgccacccccggggccacggagaccccggtctacgccaacctgagcagtttcgcgggtggcgccgggccccctgggggcgcggccaccgtggctttcgccgcggagccagtgcccttcccgccgcccccgggcgcgctggggccgccgccacctccgcatccaccgcgcctggccgcgctcaaggacgagccgcagaccgtgccggacgtgccgagcttcggcgacagccctccgctgtcgcccatcgacatggacacgcaagaacgcatcaaggcggagcgcaagaggctgcgcaaccgcatcgccgcctccaaatgccgcaagcgcaagctggagcgtatctcgcgcctggaggagaaagtcaagaccctcaaaagccagaacaccgagctggcgtccaccgccagcctgctgcgcgagcaggtggcgcagctcaaacagaaagtcctcagccacgtcaacagcggctgccagctgctgccccagcaccaggtcccggcgtactgagcccgagcgcggggcgcatgcgcggactagctgcggtgggggggcgccccggactctttcgagactcggtgcccccggactcgacaagccggaccccccttaactctggatggggaacccgagcgcacgacccccgccctcgcgccgcctctctacccccagtcctgcgcgtggctgcccctttgtacctccgagtaggggctctaaggggcgcgcagcctcacgctctgcctttccttttttttttgccttttggaagagagaacgggagtgtccgattccgccctatttatgttt

SEQ ID NO: 33725 - DNA, 1127 bp, Mus musculus
ctagaggggcactaccactccgacgtggcgtaccacaacagcatgcatgctgccgatgtggtgcagtccgcacacgtgttgctgggcaccccagccctggaggtaccacacccagccaaggacatgggtgggcagggcagagcagtcaccctccgccctgacgcccaggctctatccaggctgtgttcacggacctagaagtcttggcagctatctttgcatgtgctatacacgacgtagaccacccgggggtctccaaccagtttctcatcaacaccagtaagtgaggtgaacatagccagagttgcccagtatgtcctcaactgtcctatcttgcagactcagacgggtgtccatgacttgaatggctttctcctggaaggggcattagagtttgggctcccctgcatacataggagttggccagtgacatttctcctcaacagtgtttgggtggagttggatcttgagtccctggttgtccccacagactcagagctggcactgatgtacaatgattcatcggtgctggagaaccatcacctcgcggtaggcttcaagctcctgcagggggaaaactgcgacatcttccggaacctcagtaccaagcagagactgagtctgcgcaggatggtcatagacatggtgacgtcacggcacggggcagtgatgccctacgagggttaggcttcccacacaggctgcatggcaacaggcacggggtttccagtggcccgcttgatttatcccagtcagtgggttgtcgggggttgagggtcgcatatttcatctataaattcaatactatattaggtgcctgttgtgtactgacttcacctgtgccctttgggtattcctctgtttgttatctacgttttctaagttcatccccctgccttcacttctgtgctgacaggcgggcatcttcagttgacaactgtgccgcccagtgtttccatcctccctctcacaggtggggatactgaggcacaggtctcagaggcgcagcatccttaatttactgtcctcccaggtgctggccacagatatgtctaagcacatgagccttctggccgacctcaagaccatggtggagacgaagaaagtgaccagccttggcgtcctgc

SEQ ID NO: 33726 - DNA, 1239 bp, Mus musculus
tcagacactagaggagagctgccaggagctgcgggccaaattctgggacttctacaaggtgggcgtgcccacgtgggctctctcaacatggctccaccccccctctttaccttccagacccacacccaaggccttggcccccacccacttttcaagccccgcccctcgtagccgccccccctctcacagtggccctcccacttttccacaggccgactggtgtgtgtggccagctgcccagctagtgaacttcctcttcatcccttctcatttccgagtcacctatatcaatgggctgacactgggctgggacacatacctgtcctatctgaagtactgggtgagctcaactccatggtgtgggagtgtgggagggcgtgggttccggcctattcctgtttgactgtccctctgctgcggacaggtccctgaaccccttcagactccgggctgtgcagactgaaactgaagcctggcagatgagttggccgatggatacactcccacaggagattaccgaagctggtcaaaaagctctgggccatgtccaaaacccaggctgactgcccctggaccagcagtcccttgagtccaccagagactgttcccatgtagaacagacgccagcacaggctgtccgccctccccccaacccctcccggttttccagtgggaccatgaagccctctgtctgcctggacaccctccacagccttgaagtggggtctggtttggcctcagaaaacttgatgcaaggctgggcagggtgcggaaattcattaaattctctttaatgtcaaggactgcgtgtgggtgggttcaggggctgggccagcagactcagcaaggtccattcgctttattgactgtgtgtagtgttcataacttctagggaggagtgggacacatttgacactcacgacgtcagaacaggtttgggggtatcccaaagtagtgaatatatcccctacaccccatttatcccaaagtataaggcagaaggcccaggcaagcaagaagccgtctgtcaaccaggtggtccatatggcgatcccccagcctcggggttggcaggccccgccatcttccatcagcctgctgcagagtgacatctggtcccctcttcacaactgacaactgtggacgggatggtttacaaaaacaaaatgggggtggggggtaaaggagagggagcagcagtgaccacaatacaccacggccgagctgggtggagctatg

SEQ ID NO: 33727 - DNA, 1171 bp, Mus musculus
gagtaccaggacagccagggctacacagagaaaccctgtctctaaaccccccccccaaaaaaaccctcagagggcccgggatgtggctcactgggagactgctcccccaacacgtgcaaagaaacctttagtccccagtgccacaaggctgaacgaactataagggtcttggcatagggctgccctcttcaggggtgaccggggccatacctcaccagacacctctcttcctttcaggcccacgatgtgtgcctcttggggccacgcccattgcccccttcaccacctgtcagagtcagcctgtattatgagtccctgtgtggagcttgtcgctacttcctcgtccgggatttgttcccaacctggctgatggtgatggaaatcatgaacatcaccctggtgccctacgggaatgcacaggtactgggggcggggcaaagaaactgaagcaggagggatgccaagggacaggaacacctggtcacctgagctcaccaggaacacctagtcacctgagctcaccaagatccattgctatcttgcaggagagaaatgtcagcggtacgtgggagttccacgtgccagcacggggagctggagtgtagactgaacatggtggaggtaagctggagtgcggacctgcggtgaagggaggcgggattggccactttctctggacaacacttgcctgcctctccaggcctgtctgctggataagctggaaaaggaggcagcgttcctaaccatcgtctgtatggaggagatggatgatatggagaagaaactgggaccggtgagttgttgggtgggaggttgtgccgccctggctccaatatctaggcaggggatccattcctgagccacgccccaggccctcactaggggggttctaggcagggctcctccccaagtcacacccctagcccttggcgtgactttccctcacgtagtttctatacaggaaaacctttaggtctatgagcaaagcctgggatcttcactatttgtagacacaagacacaggtgacaggagataagccaggccgagcctgcttcccagagcattgtgggaaataacgtccaaaggttcacagctctccaatcactactgtggcttatcaaacaaacgtcaggcctcccagcctcctggagcctgcgggacactcccagc

SEQ ID NO: 33728 - DNA, 1139 bp, Mus musculus
accccaggacatgccaggaaagactgaccacctctggctgcagttccttatgcagctatcatcttcaccaagtcacacctagatggggtgcagctatcagcctgggactcggccgagggtgcccccttcccaggaagggctgggatgggggtgccagtgacttgtaaatagcaagccctcgcgactaatttattactttttataagcaatagccaggctggcccgcctggtggactcggctgtcttgtccttggcccctggagcacagcctacagaccctgttctctgggtcaaggcaaagcactttgggcaacttctgtgttttctagtttgtcctttccgtgtgtgtgtgtgtgtgtgtgtgtgtgtgtgtgtgtgtgtgtgtgtgtgtgtgtgtatgtgtatgtccatcccattcccaacccaagacccacttgaaggcacacaaaagctggtccctactgagttttgacagaatttggaagctgcaccctaaagcaggcggatcaccaattctgtggcaggctatactctgaagactaccttctgtgtctgaatagctctcctcagactgtccttactccactctgcctgtgatcctgcatgcttcagtttaggggaagtatgggaacaaaggacttgggggatgaggaatgctctggtttgaggcagaatagcccatataccttgcaggaagtaactgacagacctaagggccatcaaggtggggaaggtgtccactgcagggtgggacaaagcacttgtcccaagtgaggaccatgcctgaccaccaacccctgcaccacaaagtctatgcccatgtgcacgaggcccagcatggtgagtgccagaggaccgagtgtggaccccagctatgctgtgtaattctagaggagtgtctttcccattctgtgcctctttacaggactaaccccagtgacttgcacacttcatgtgcactgagcacacctgaattccccccagctttgtgtgatccaagaagctgaggttcctaaggccagaggcatgtcccacaatggtccagtaagagtggcagcccaggacaggctctcctagccctactgtgagcatggccatgggggagcccagactcccatgctgtgtgatctagcagccat

SEQ ID NO: 33729 - DNA, 1306 bp, Mus musculus
tgctggtcacacagccggcgagctgctggaacaaaaactgctcagtcccctgctctttaatcctcatgctggcccctactgtccttagccctctgccctcagccatctcctggtccctccctttatcactcggtctgtctctccatctctgtaggcacagagcatcgcatatgaggtggtgtcagagctgcaggcccagcaggaggagttggaggcacgcctagccgccttggagagccgactggatgtcctgggtgcctccctgcaggctctaccaggccttatagcccaagccatatgccctctaccaccaccctggcctgggcctggtcacctggccacagccacccagagcccacaaagccactggctgcccaccatgggatcagactgtgggtgatggctgctgaccgctagactgctccatctcagccatcgtgtggccacagctagctccttgccgttttggacctccggactactgcatttagaagcttgggtgaactgagccgactggactggcactcatccttctgaggctgggccacaggatccaggtccccttagctgtcccaggccccaggagggcaaggagtagtagcaggggcctcaacatttctaagtaaatcaggagcttccagcccgctttctgttgacatgcagggggctgcaaacatctccccagaggaggtagatgaccccacctggggattccttaatggacggggacagacgtggaaagtcactgcacatgcattgagtatctactgtatacagggactgaaacaatggcttttcttcaggatctatctaactggagtaagatacaaacaaatgagaattcagagaggtgaggccacttgcctgtagccacacagcaatggtctgaggcaaacacacttgttaaacagcataagcggatagattctacttggggatcctgatgtcaaagtaaggacacacgggagggtgagaggccagggttacagacgagcagagtcaccacggtcacttcagaccttaggcttcagactttgggtacttggggaacactgagacacctcacaggcatgggcggcttatcaagagcagcctaagtcacagtgtcctctgatcagactttcagccacctgtcttgggagatagtggacctgtgtgggaacccagaggcccagtttggattctataagtttgtggggtggagctctggggtggacctgggcaggctttattcccctgctgctgtgggaaacaggcctaacccaacccccacacgggtcagacagtaggtgctcaataaataccc

SEQ ID NO: 33730 - DNA, 1159 bp, Mus musculus
gtgcttgctctgccccaccttcagtcactttcagcacccctctttttcccttgaatctgaggttttgtagcctggcctcttgggaggcaaacatgggtgactcttttgtttcacaactgtttgctcttttgtgcttttttgtatgggtctttctcctcattctttgtcccgactctgtagtattccctccagaactttccaagttcaaagcaaacaagttgctttgactttgtcaatgtggcttttcccaaaaagaggcttctgggtccttaaagaccttaataccaaccagggttgagacaggctcatcatggtggtctctgcactctgtggccactatgcctggcctcagcacctgcctccatgacctgatggcacctcttgggtgttggaggctccctgtctcactgtggcagagtaccctacctctttcctgtgtaacttctcttgtccccctcctactgtcgcagagggctgggacactgggagggcttcctggaggagggcaggcctggcgttgggattctgacatgccctcccaccacacacagggagcaggctgcactgcactcgtggtggccgtcgtggctcggaagttggaactcaccaaggctgagaaacacgtgcacaacttcatgatggacacacagctcaccaagcgggtgaggggcctgcaggccactcctgtctctgtgggtctccaccgtagctattccaaagtggtatcaggctcagcccagtgttcacaagtgtgcagcacacagagaagacatggccatactgcgctcccagctctggatcaagctgctaagtgcacatcccagactctccagcgtttgcacatggccctttctttgcttcagttccccgtgtataaaatgaggggctggaagtcagtcagcagtgtttgcctaacttgcacagagtctggattcaaaccccctcccaggaccacacaaaccaggcatggtggtgtgtgcctgccatcccagcactcaagccagaggcaggcgaacaaggccagcctcagctacatagtgagattgaagctagcctgagctacacaagaccgtgtaaaacagtggctctcaatcttccttaatgttacaaccctttaatatcttttttgatcctcaggtcaaaaatgctgctgcaaacg

SEQ ID NO: 33731 - DNA, 1222 bp, Mus musculus
cacttatctcggcacttgaaatcgaagcagagcgtcgctagaatcatccttagctagttctaaaggctggctgacggtagcctagggtgccggatctcatactggccccggtgtgttggacacaatccttcggactcttggtgaaaagctagtctggaatcgtcaattagtcccaatccagagacagtttctctgtagaacaaatggcctttttcctgctctgggattaaagacgtgagccacctttgccatcttggcctggagtttcagggagagcagagcagcctgccacatgtagaccctgaggcagcttcgtagcggagcacaagccttctgacttgcctcacactgggctcgagtgtatgagcccactttggacacccctgcctgtgggaggactgaatctcaggccggctctgcctccacacccctcccccacatagacaactttctctcctgacatgtctttcagcttcgggagtacaaggtggtggggcgctgcttgccaaccccaaaatgccacacaccaccactgtaccgtatgcgaatctttgcacccaaccatgtggtggccaagtcccgcttctggtactttgtgtcacagctgaagaagatgaagaagtcatccggggaaattgtgtactgcggacaggtgaggtctggggccccacaggatgccggtcgctgggtaccatcagagccagggcagcactcctcatgtcctccctactccccacaggtgtttgagaagtcacccctgcgtgtgaagaactttggcatctggctgcgctatgactcccgcagtggcacacacaacatgtatcgggagtacagggacctgaccactgctggtgcagtcacacagtgctgtgagtctccaaccctctgccaatttctggcacccaacccaagaactgtcgctgcctgtagcggctgtttaaatagtggtgcacacagcaaaggggcttcgtcgcctttggggggctgtgcagtgccccccagagtgaatcagtaggctctacagaatgtgggggcattctgggtggctggggctgattttcttttctttccacagaccgagacatgggtgcccgacaccgtgcccgtgcccactccatccagatcatgaaggtggaagagattgcagctggcaagtgccgccggccagctgtcaagcagttccacgtgagtgaccccgagtgtggggctgacgcagggctgc

SEQ ID NO: 33732 - DNA, 1222 bp, Mus musculus; identical to SEQ ID NO: 33731

SEQ ID NO: 33733 - DNA, 1190 bp, Mus musculus
agtctgttccagaagccccgcacctccttcctgtgagtcccccagctcctgccagtgcagcagccaccactggctgctcctccttcacatgattggccactaacgctccctcatcccacccctagcactgcctcacagttcagccctcagccagctgctgctgacctgccctaatgtccctgccagctccctgagctgagcagtgctcctctgaagagattcctgctcttgtgctgaccaagtcctttcctccctggccagcttgcagagcacaagcctccattgcctggcctttgcctgctctgaccttgttgtgaagcccatggaagcaaggagcatgtaaagctgggaccaatcgtaggcaggtgccccactccatccctgtcatagttctctgaaaggggatgataagtctcaagaccccttatgctgatgtagcaccactgaggtgacctgtcagggcacccacagttaccagccacagtctggttgagaatagcacttgtgcccaaggagcctgactttttggtccttcccccaacccaaccctggagccaaggtctcaccatgttgtccatgctggcctccaactctctggctcaaagatccgcttccaggtggatgatctctcagcacgtgagaacacttgctcctctgttcctagcaacagtgttgactaacttcctgatattccagcttgaggatcccctcctctagcctccatgggcactgcactcgtgtgtgtgcacatatttatacatactttaaaaagaaatcttcggagaatcctcctgcctcagctctaggagcagctggggctgcaggtacttgccaccgtatccaaacgtgatttttgcatgtttctctgttgctttcttttaacccacattgagatgcagttaagggctggggtgtggcttggagacagcagaggtttagcattcacagccctaaggcctgaaagctcctggccacatgcatggtgagcagggttcttgtgtgctctagctttccacaccatacccagataccgtggcacttgcccaagcacacccagcctgaacaaggcgaaggcaggaggatttgggtggggtgggaaggaggtattgcatgcctgtcatcctggcactgggatgctggaggctggaggatcaggagttcacttaccctcagctacatagcacatacag

SEQ ID NO: 33734 - DNA, 1165 bp, Mus musculus
cctgcagttgaatacggctagtctggtggacacagacttacatacgctcttacctctgttcatgctcgcctccggtggcatccttatcctctcccctgtaggcctcttgccctgtttccccagccgtgactgcccttgtcatccctgcttcctgcagatgcctgtggcctttctgacccagcccatgtggagagcctgcaggagaaggcacaggtggccctcaccgagtatgtgcgtgcccagtacccatcgcagccccagcgctttgggcgtctgctgctgcggctgccagccctgcgtgctgtgcccgcatccctcatctcccagctcttcttcatgcgcctggtgggcaagacacccatcgagaccctcatccgggacatgcttctgtcagggagcacctttaactggccctatggctcgggctagtgatagtcaccttccaggacatacatggaaactggggccttgtggggaccctggggatcagggccccagcttctcttttgagactgatttctttttttaaagactgtgaaatgtttgttttgttttattttttaaataatcatgaaaccaaaaagatttggatctcccaggccttgtcctggcagaccttcaacagtctggagccagcatgctgatgcctctggtgtcatgggtatctggaaaggccactgcagctaggcaggagtactatgggccaggaggatcccctggatacatggtccacggagggcaccatgggatgatgaaaacctggccaataataaaggtattcccttacttggtcagcctctgctttcttctgcagtattgggaaagtaaccccagggtctagtctgtgctctgtaggtcccagtagggtgggagactcgcctcactactgtggaggaataagaggccctggaaaaggctctctcaaaacagctttgtgattgctggatcaagccacacctgaaagcctggtgtttattcatgttcatgagaccaacttacctttttacattggggtcagtttgaattcaatttcttcccccaagtaacatattcctgtttctaaagttaccataaagaaggtggggacagattgagatgtgaatttaactgttgatgtgtggtgatgaagggagctgggggagtagcccagcagtggtggcacatg

SEQ ID NO: 33735 - DNA, 1173 bp, Mus musculus
ccgtgggagatgccgtctggtggggacccctctacagggccatgcagggcgtggtcttgcttactggctgccttaggggacagaaagcccctcgaaaaagaggttggctgtccaggccaggggttgtagagcactttctatccatgcatgcagcagactttgcattccccaggatcgtgcagggcctcagaacagggcaggcagccccgtttcccaggtgcctggagccccagagaagttgtagagttatgggaagggtcctggcccagtggacttaagcaggtagagctgtgggggctggatgtggagatgagttccttcccagaggcagatgctactgacaggtcaggtgggggccacccccatgttagagtttggacttgttggggacctgccttgctcccctcctccacctgtaactgggccaccagactttggcctcattcttgtgtctggaatgagttgctgggtctggctgggtctttggggagagtgaaggggactggggcgggctctctaggatcctcaggacctatggtgtggggcctcgtgtggttggtctccctctctgaacctaagtggactagcagctgtctggagctgggagggcttcaggaagtggcctcaaagccctggggtagggcaggcagaggaggaccctccccccatgatgcttagtgggctgtgttgtcaggtgagcccatccgggcacagcagaggcatgtgggcatgaagtgctgggttgagggcagcagggagccatggacagtgtgtgagcatggtatggtcacattggattgggaagctggtcactgttacagccccagctactcagaacacagcctggacagcatagcaagggggcagtgtccaccccatccccaaacagagatagagatagccattgtgatgagcatagcacaacaggcaaagcatatatcactttaggtgagatagccagaagaacttacaggtttatgggttttaatctgtcccaaccacacagtggagacgtcaaagccttccctgagcagagcccacccgcttagggcctggccagttccgcctggccgccctgatcccccatcactgcttggctgctggctttgttctggctttgcctgagttctctctgtcccagctgggccccttcctgggggcctctaaaagtca

SEQ ID NO: 33736 - DNA, 1208 bp, Mus musculus
tggaagaggaccaacgcatggctgaggtaggatctgtggctctagaacaccactcccgatacacactccttgtgcctgtgcctgggcgtgacttaggggtgtatgtggtccatcctgccagcatgggttctgagtaggcttggcctgtgggaaagcttggttttccagaaaggagccagtgggggcaaggctgggtgggtgtgaactttcccggtgggtgtggctttctgacagctctgggtgggcggggtctttgagtggcaggctttgacatgtagcttcctttgggtaagatatctgaatggctgtggctttgtgattcttaggactgttcaggaaaggcaggagcatgctcaccaagggcaaatcttgaagacatctagaatcattcgtgggcaggggaggagggcagagaacttccctagcatccactcctgaggttgaccaaggaggctgcccagcaccctacaacacagctgatgctcccaagcaacgagccaaccccaagagtcagcagagccgaggttgagaagtccaaccccgggcatattataaggcgcttaatgggtgttggctgagttaagaatacctggagagggtccagaagggtgacaggtcatccctggcatcctcttgggtggggctgaagggtaaacaacaggaggaacttctcggtgtgcccgtagatcctgctgctggcctttctcaagctcatcgaggaaggcagccacatggtgatgctggagtgtcctgaaacggtcaacacgctgttacacgagttcctgctgtgggagccagaacccgaggctgagccaaagctcgagccaaagcccaagccacagctgctgcagccagagccggctccaggggaggagaagtgaccagcggcgcagggactcctggatcttgagtagtagaggctcttagactgggcgtgggctggctgggcggggcctcatgccgatgggcggggcctgggcatgccccagagcgaaccaggcacagtcagtgttggagactcagtgcccagggcagctatggtgccctttccacgcgcgaccgaagggtgtgaccttgtacagagccccctccctgcctccccgagtccctgaagctgcagcgcgcgggctgccatcccactcggtcttcccctccgctgtgctccattccgcactgggaagccctaaggagaatcctggggaagggct

SEQ ID NO: 33737 - DNA, 1272 bp, Mus musculus
atccatctggccactcgagaacattgcagggctgaggtggccacattatcattgggatatgggggaactacctggactggtagagtggctgtgcaccctcagctgtagcatggtactcactgcaaggatggggttctgaggaccctgcatacttgtgaaggctaacggtgtctgtgttcactgggggccattattatttggctgtggccctactgacctgggcctggtatggccctagtagcatctcagcctcatgctgtgacttggcaactgccgccgtgccctattaaaccctgggatgccctggccagaatcctccacggtaccgttcctggagctgctccctgtgtctgcctctgaaggcctctcccctttcagatacaggcagaagtttctcccactctcaggtcttggtctgaattccaactgccttcctatgattgccttttgctgtgctactactgtgcattcttgggagtcacctggaccacccaggttcctgcaggtgggccatatgacctgagtctaggctcagcaggctgctcccggtgcagaacctctgtcctgggcacccctatgagtgaaccatgtcacatctggctgaggtgtggagtgccatgtgtatctggacccagaccagagaggacctggacctcctagaggcctcattctgggagaactagggtgctcagcctccagccacggatctggcaaggccccttcactgctctgacctcgagcactgttgaaatagacattttattgcatttctgccgttttacaaaaatatgacaaaataaattaaaaacaaataaataaccgcccatcctgtgtatttttctgtattgtggggggtctgctcgaggcccccatcctggtcgggagaacggcaggggcgcggcggggctagtggcgggctgtgggccagcaggcaggctgtgcaggggcatccgctgggacatccgcggggacacggggcgggttgtcgccgcagccccagggcgcgtcccagcgccaacagccagcaggaggcgaggcggaccctgcggagggagagcgcggttcgcagggccccacggcgcccactgccctcgcgacgcgcgccccggttaaggcctgtgacctgcgtcctccggccgcggttcgggctcggcggccgcgggctcgtccccggcgctcctgtgagcgcgcgcgccgcccccgggggccccgttggctgagggctcgcgcgccgagaatgcgaacagcttcccgggccgcggcggggacggg

SEQ ID NO: 33738 - DNA, 1187 bp, Mus musculus
cagggcgggattctaggctgtggctccactgctggtcctcatcagttccaaactgaattttagttaatttataatgagtggtggctcatgtctgtgatcccagcactggggagggtgaggctggaagattcagaatttgggctacaccgtgaaaccctgtctcaaaaacaaagaaagggaaaggggtgggtagattctcctgagaaagccccagcaggtctaatagcctccccatccccttctctctgagcagcagccccgagtttccttgtcttctctcagttcctcaggcactggggggggggggggggggatggggtggggcggctggtcaggggttcggagcctggtcgtagtcggctctcagcccgcctgtctcccccaatacgcagcggcacgagcggcaggcgcagcagcgctttcagcagcagcagcggcggcggcgcgaggaggaggagcggcagcggcacgcggagcagcaggcgcggcgggagcgcgacacgggaggccgcgaggaggcgcgcgcggaggcgccgggtcctgaccccgtggcggagcggggcgctgccaaggccaagggcagcgagcggccccgacggcccggagcgctgctgccacccggacctgtgctgcggctgaagcagatcatcccgttgcagactcggccgcccgcgcccaccgggtgcgcgcccccgccgcgctcgcccgcggacacgcgcctgcccgccttcctcagcctgcgcttcctcaaggctccggagcgaggcccgtccccgccgcggcccgggaagctgttcgcattctcggcgcgcgagccctcagccaacggggcccccgggggcggcgcgcgcgctcacaggagcgccggggacgagcccgcggccgccgagcccgaaccgcggccggaggacgcaggtcacaggccttaaccggggcgcgcgtcgcgagggcagtgggcgccgtggggccctgcgaaccgcgctctccctccgcagggtccgcctcgcctcctgctggctgttggcgctgggacgcgccctggggctgcggcgacaacccgccccgtgtccccgcggatgtcccagcggatgcccctgcacagcctgcctgctggcccacagcccgccactagccccgccgcgcccctgccgttctcccgaccaggatgggggcctcgagcagacccc

SEQ ID NO: 33739 - DNA, 1397 bp, Mus musculus
tcagcctcagtttctttctctctctgcaaaaaaaggtttccatgggaggtctttttccaaaagtggctgagtgaggcaactgggtcttgtctttggcaggtgtggggacccatccacaggaccaccgctcttgacccgggtcaggcaccagtaccacctccagggctgcctggatgccttgggccactaccagctggccacagacctggctctggcggccgaggccctgcgccaggctcggaggcaactaaatcacctcacaggtggaggaggaacggaggagatcctggatctcatcttccaggacttctgtgtgggcaagtgaggtccagagcctgggactcagcctcggagttcccacaaggtcatgatccaagatggcaaacctagcagagggcaggagagcactggcgtctgcagccctccacagtgaggagagagacatggatcagggatctgacagtggatacttcctcacccccgatgtcgggattaaggtcagcatcaccttgccaagtgcctgaatgatgtagtgctggatgtgaaacccgttgcatgttatatgctgagccacgacagggcttctctgtgtagtcctggctgtcctggaactcactctgtagaccaggctggccttgaacccagaaatctgcctgcctctgcctcccaagtgctgggattaaaggcatttcatttttaattaccaaaggagaatgaagagttcaggaaatccagaagcgtgtgtccacaaggatcagtcagccttaccttctagaactttgctgacgtgcttctatttatggcatcgtttgccaattaaatacatttttaaatttttacttgtgtagtagcatgtggtacctggaatgagtattgctgtgacagtttcatccaagtatctcctgtgctttgatcatgcccttcccttatctcacttgctcagtccctgctctcactaatctccttcctttccctcgaactcagaaatccgcctgcttctgcctcccacgggctggggttaaaggcgtgcgccaccacgcccggcttcttttttctttttggttttttgagacaggatttttcttttctttcttttttttttttaagaagcaatactgggacaaagcaccttgggtcatgctttctttctttcttcctctctttcttcctctctttcttttttttttttttttttttttttttttttgatttcttgttatatttaagtacactgtagctgtcttcagacacaccagaagagggcatccaattccattacagatggttgtgagctaccatgtggttgctgggatttgaactcaggacctttggaagagcagtcagtgctcttacctcctgagccatctcaccagcccaagacggggatttttctgtat

SEQ ID NO: 33740 - DNA, 1151 bp, Mus musculus
agagctctggctgttcttatggaggacccaaggttgggtcccagcacccacaaccagtggcttgcaagcgtctgtaactccagcttcagggactatgactcccccatgtggcctctgttgctactgcactgacttgctcataaccacacacagatactatatatatatatatatatatatatatatatatatatatatatatatatatatatatatatatatatatatccctgaggataagaattgtaactcagtagtgttgggtgtggaggtctagtcacagtattttaaaaaagaataaaaaaagaaagaaagaaagaaagaaagaaagaaagaaagaaagaaagaaagaaagaaagaaagaaaaagaaatgttaggcatttttgtcttttgtaaatgggacatgggaggagtttctagttgccattccgcttttctccatcaggggtctccgaagcctgcagagtggcaagggtgacacagactccagagcccagccctaagaactgggaaactccttttaaaactggagctggaggcgtggtggcgcacgcctttaatcccagcactcgggaggcagaggcaggcggatttctgagttcgaggccagcctggtctacaaagtgagctccaggacagccagggctatacagagaaaccctgtctcgaaaaaaccaaaaaaaaaaaaaaaaaaaaaaattgggactggagcttgtcaggatgaggtttaaggccagccttgccttcacaggaagtttgagactagtctgaggtgcatgagactgccacaaacaaataacatctgaaatggttgctcccacctgtaatctcagcaggaaagttatcggtttacagtgaagggtaatttacagtgaagggtggtggagtgagaactgagtggcactgagactcctctgcagccacggagctaggtcatgtgaccggcctgcacagtgaccggcctgcacgtctgcaggcagcaccaggcctgcgcttttctgcctgttttgagacaggtcttcatgtagcctaggctgccctccaatctgctatgtagctgaagatgacccacactcctgattctcctgcctctgcctccccagtgtacctcctcacaggcaggtacaggggacagaagccagggcctcac

SEQ ID NO: 33741 - DNA, 1174 bp, Mus musculus
gggctaaggacctggtaggactcctgcatagaatcctcagagaggggctaggggcatggctcaggggtggagttcatgtctagaatcccccagtttcatcccagtccaggaacatataaaaaggaagcagatcagctagactcaggtgacctctgccactctctctacccaggatccaaaaggagacttctagcacagtgcaggtgaactctggcagctccatggtggtctccagcctactggtgctcaaagtgtcactgttcctgctcttttgaggactcattagttggcaggtgagggacccagtccaggggaacttgtgaggaccccagacccacgggggcaggggggttggggatggggtgaagaggctatgcatgtgggatatacttgggcccagagtggcccagctcagggaggaggcatggcttgaggtggcgggggcagggtggcagttaacctttgaaccttccctttttcccaggtcacagttgtttgaagtcactatgggtcatagtgactctggagaggtcctggcagccctgaggatgtggaaaccactagggggctccagattgggtcttcctccgcagaactttaggactggggagtggggagggagttctgctttattgcttttgcagttattggggggggtcacatatttctggtgtctttgacctggaaaaataaagtaatttaaaaagaaagagcttgcttctaagttgctagtatcattgggtgcctggcttccctgctctgcttccccacagtcaggggccaccctacaagttgaggtggacacagtgttgctaatcacaccagtccccccccatcctatctgctggaatcatcaaaaaagtctgcaacaagaacagggaaacgccagggccaaaaagggggagtgggcgggtaggggagtgggggtgggtgggtatgggggacttttggtatagcattggaaatgtaaatgagctaaatacctaataaaaaatggaaagaaaaaaaaaaaagtctgcaacagacggtggaagggagagggtggcagctggctctcagatctgattgtctctctaaggagagagcagcctgagaccagaatgcctctgctgctccttggtctcctgcagcaagtctgagctggggtttctattagtcagggttctccagagga

SEQ ID NO: 33742 - DNA, 1223 bp, Mus musculus
gggcagtggtggcacatgccagcacttgggaggcagaggtaggtggatttcagagttcgaggccagcctggtctgcaaagtgagttccaggacagccagggctacacagagaaaccctgtctcaaaaaaaaaaaaccaaaaaaaccaaaaaacaaaaaaccctcttgacctcatggaccacacacaacagctgtaggttggactttttaaaagaggagttctgtgaccccttgggttataggaccagggaaagtgaggttggggtgctaaaataggtactacatggttgattccacagtcccccccgccccctgtcaaatgtcaatctgttttactgattccaaaaaagttagtgaatctcctatttataatttagccagctccccggtgtggtccctgtcagttttgtccctacaaagtacaggcaagcgtcttccggggctcccattccggtggtacactcccctctctcaccccctgcccccactcccagaggcctctgtgtccaagaagaaacgcatgtgtgtgaagctgatgcccctggggacagctgacgtggttgtgagtgacgtgaagctgagtgggaagactaagaccgtgcctggatacctgcgtgtggggtaggtggagcatcctatcccaccttctgtctctgccatgttgcatcctgattttaccggcatctctgcatgtggggatggcatctcgagggccctgtggtcagtatgctgattagcatgagggtgagctgctgaaagagaaacactcccaaacggtggccaccggagttaccctgctctcctccccttactccagggacattggtggctttgccatctggtgcaagaaatccaaagccccaaggccggtgcccaagccccgcacgctcagccaggacatgcgaggcctctccctggacccacccaaagagcccaggtgaggctcaggcacccccatgggcagatgggccaggaagaagacttcaggcctgactgaagtcactgtcccctgctccccagcaaaggaagccacccagagcggaccctgtccaggctgggctctcgggcctccactctacggaggaccgactccatctatgaggcatccagtctctatggcatatcaggtgagcacagagtggactctctggggttgttcctgggactgtgtcctgggcagacagggggctgggatgcggcctctccttggcctgccctaccaag

SEQ ID NO: 33743 - DNA, 1171 bp, Mus musculus
gggggtgctcctggcgtgcaagaaagggtcatgtcgagggaggatgggagctgatgtgagccctggggtaatgggatgtgacttgttaaggtttgggaggtagaattgggatttgggggctccttatctcaaagagctgcctttgcagctctctccacccccgggtgtgaatttcgactttctcggagtctggaatgctgagaagcctcggggcttggatctaggacaagctggatcaggcaagctccagcacaggcaggcgctgggcgggagtgggtcatgggcgcagggatggggatcttgcagactttctgggatttagcgggacggagccacacccctggagccatagccccgccttcagcacctgcttgttttcaccgcttggttgccgtggagactcgtaggtaccctgggctagccgctctagcttgagagtctcgttgggttgcgggctctctggcccgcggttcttctcgatggcctaagccttccggaagggggtcggccggtgcggagccgggttgaggggctgagagcttttggccgcggattggaaggtttggggcgggactaggtgggccgcacggaccgggcctctctgtgaacagtgactgtcgaagcctggaggcaacgcgggaggctcaggtagaatctgggtcccgaatgccagatagtctcgggactgtgggcgggcccgcgcctgtgggcggagccataggcatcacctggcgcgtagcccgggtcagtgcggaggtgcggatgggggcggaatgttgggactgctgagggcggggtcaaaggcttcacctgtagggagggatttgagggtagagtgatcacctgtgagctaggggggtggggtcacaggccttcatctggaggaggagcctcgatcaggttgccggactttgatttgaggctcccaatgtgggcggagaaagaggcctcagttggggcgtggcctaatgatgagggggatgatggaggctgtccttgtaggaacacccagcctctgaggccggataagcatgaggataacaagtgaattttgagacacagaggagggatgaggcgacattagggcatggcctggaccattggctgcgaagggcctaggtgtgtgcgggttactaggcgaccccaggcttggagggctgaagctcaaggg

SEQ ID NO: 33744 - DNA, 1145 bp, Mus musculus
tggcccggcgacaaccagagcgcctggcactggtggacgccagtagtggtatatgctggaccttcgcacagctggacacctactccaatgctgtagccaacctgttccgccagctgggctttgcaccaggcgatgtggtggctgtgttcctggagggccggccggagttcgtgggactgtggctgggcctggccaaggccggtgtggtggctgctcttctcaatgtcaacctgaggcgggagcccctggccttctgcctgggcacatcagctgccaaggccctcatttatggcggggagatggcagcgggtgaggcctggtggataccaggagggtggggacctagggacctcagggatagggagatgctggccaggggtgcttcatgactgtgaccctgagcctctgtcaccacagcggtggcggaggtgagcgagcagctggggaagagcctcctcaagttctgctctggagatctggggcctgagagcatcctgcctgacacgcagctcctggaccccatgcttgctgaggcgcccaccacacccctggcacaagccccaggcaagggcatggatggtaagtggaggggtccctgacatctatcccccgtgttctctgctctcctggtgcctgacccttgctttttgtgcagatcggctgttttacatctatacttctgggaccaccgggcttcctaaggctgccattgtggtgcacagcaggtaagcagggccctcccttccccatggcctgccattgctggaacctgtccccctgtgccccatgttccccatggtctttttctcctcctccccttctggcagagcgccacctagctccttttccacccccgaccctcccgccgtgccccgcattggctagcatctttgagggttttacatcctaaatcccgtgaccattctgctttgcctctagtgagtcatacttagtcctctctggcccccagctaaccacgctcttttacgccttggaacctttccatttgctgcaccctcaggcagccttcccagagggctcaagtcctctccagaccagaagactcttacccagatgtgccaccgctagatctctgccagtgacttagctctccctgcaggtactaccgcattgctgcctttggc

SEQ ID NO: 33745 - DNA, 1197 bp, Mus musculus
tctgttgacactttgagcagtaggtgtcttgcccaatgggctgagacaggagccatgtagagtggactcagcggccagttctcctttgccttcctggctcaccttcctatggccttcagtctggagccctgtgctcctctgttctccagggtccccagcgccctgagcattgttggttaacagagtccccagcacccccatctctagggcacagcatcctggcattctgacatttgcccccagcctctccctggcattgctccactgagctggacttactccaagagccagacatggagacacaggcagggtgtctaagagtagatcacagtcttcttcctggagttcacctctgtatagtcaggtgccagctgtgtactggatgcagccaggctgagtccctgattgagggagcccgagccactccgaagagtcagccaggctgtggagaagaacgccgtgtgactcagggttcctggctttaggcaagtcatgttactccttgactatcccttccccttctacagacacacctgctctcaaagctgcccatcccagacagccaggtccttaccatcaatcctgccctacctgtggaggatgctgcagaggactatgccaggaaactgagacaggtgggtcccgggacaggtaggaaagctgtaaaagactgcggcagagatgactgcttagggacacagactgtcaccatggtggggagacttgggctggagccttacatctcagggacactcatctgcagacctgaggttcttgtccactaaaatgggaaacaagcccccggactggatcagtcaggtgtggtagtgcatctgtgacccctagcacttaggagactaaggcaggaggctttttgaggcctgcttgggctggagggtaatgcttaccctcaaaaaaaaaaaaaaaaaaatcctacagacctcataccatgttgaagctgccctgtgcaggagtggccactgttgtgtagggaatgtgctgagcgggcacattcagcagaaggtggtctaagctgagatagaaccagatttcagcttttttgtgtgttacctctgagctcgcacacacttgacccaccatccttctgtcaggccttgcaaggagacgctgtccctgtgtttgacctgctgatcctgggagtgggccctgacggccatacctgttcgctcttccctg

SEQ ID NO: 33746 - DNA, 1172 bp, Mus musculus
acatataggagtaacacccatacacattaaatagaaataaataagtaaataaataaaaaagaatttgcaaaaagtgaagggcggggatggggcaagatggcttagtgtggttatagatgcttgcccccaagcttgacaacctgagtccagtccccagtacctcctgttgtctccatactggggaggcagaaaggaggagtccttggctacatagcatgttcaagggcagcccgtgctagatgaggccctgcctcctaataaaaacaaaaaccaaatccaattccacacctcgaagctttggatcccacggtgtgcgaggcggagcgcagagcaaggttccgtgggtcccgggtcccctgtccccagaccgaacagaccagtgtgagccccaacttgctctgcgtggcctctgaggcaggtcctggtctcgcacacagcgcatcctggaggacaaggagggcacgttgcccgccgccttggtgcagccgcgcacgggcgccctctgctggttcctggacgaggcagctgcccggctgctgtctgtgcccttcgagaagcattccacattgtagggggtgcgccatgcacgccgtgggcacttcgggtgttgtgggagcggactagctgcggattaaacagctttgctggaactattgtttctgtggttcttgttgggggagggacaacagagcagagcatacacacggatcagagaagcgtggcctggacttctggcccggcagtgtatgctctgttccaagtctggccacattctctgctccaagggtcagaactaactcacaggtaccaggctccttgcggtcccgagtgactgcttgtgttctagccatggtgaagagaagggttcacctggggcctcagccagagccttcatggccccctgaggatgcactgtctcctgcaagcttgttcggagccttgagcagggtgagctacctgataaggttctcctgatgttgtcacagggccccctaccgatgggagaagtgtctggggtgactcttgggatgctttctcccttagacagttttttctcttgccgcttataaagactgggatgtgggtccagagactggagtataagcagccagcttggagcatgaagtgggtcggtgcatcattgtcctgaccctgccagttccaaggaccta

SEQ ID NO: 33747 - DNA, 1111 bp, Mus musculus
ccaaaacagaacactctcagggcgtggtcaaagaactgtctgtgtctttaaagctcgagctaggggcggggcttccggaacctccccgcaagtgacgtcttgtgaccgggttattgcggtcggcggaaagcagtggaagcttttaaaggcgtagccttgtcatgcctctctccaggactcacagtatgacccgcgggccacttccctttaaggagcgtgtcaggggtgggacctggatgtgtccttcccgccgccgactcctttaaggcgcggccctcgtcccccggcagaaaagctgcttaaaggcgacgcgtggcgcgatggcggcgttgccacgcgggtcacgcgggctgccgctgctgccactgctcctactgctgccgccgctgggcggcccgcgcggcgcggacggctactttccagaggagcgctggagccccgagtccccgctacaggcgccgcgcgtgctcatcgcgctgctggcgcggaacgcggcacccgcgctgcccgccacgctgggcgccctggagcagctgcgccacccacgggagcgcacggcgctgtggtgagctgcgggcccttgcgcggtgcaccgggactaggcgggactcaagtctctaccggagggaggttgctatgcacttgggctcggctgtgcgctgcggagactcggtcctctttctgaggacctgagttatgtaccccagggattacgcacttgagggggctcggctctatatccatagtgcccgggctcgtccccactgcggcttgggaccccaagctgctgcctcctcccctcaggtacttaggaatctgttctgatttgctgccagccctcacagcgagctaccatcctagaacctctgactccttagaatgggccaggctggtgcttccagacccttatagcgaactccgggacttccagataagattcctgaggctcgggccagcattccacgctaacaaagttaatgaacttatctttgtgacagggtctcacaccaatgtgctttccaaaccagcaggttctgttcagttgtgtactagtgagctgggtgtcatctttactcccctgtcaccgatggatgggcaacaggcttggagt

SEQ ID NO: 33748 - DNA, 1804 bp, Mus musculus
atctcccataggtcagaatacaagagtcacttctctccccgcaacctgcgtgccttctctgtggagcccctccttatctaccctacacactacacaggggatgatggctatgtgagtgacacagagacctcagttgtgtggaataatgagcaggttaagactgactgggaccgagccaagtcccagaagatgcgggaacagcaagcactgagccgtgaggccaagaactcagatgtgctccagtctccactggacagcactgcccgtgatgagctttgaggcaactggcaaacagccaaagccactgctacacacctaaacttcatgtgcttgcctgggactatagggccactcaggcagacaacagagagctctacaagcacagaggtctccatgtcttcctgtttagcagccacttacacacaggcagcatttatggagtacttactgtatgccagaaatagggctgaccaccaagagattggtcaggaacaagcacagtcagttgggtccaccatgaaggaagttctcttgttagagcaatgaaagaggcatgattcccccttatcagtgatgaactgatcatcagtcttttattgttcagactgagtcaggtattagggatacatactcatttttaaaatccgtttgagtatttattgagggcttactgtatattaggtaccattcttagctctgggaatactgaaataagaaaaaaaaatcaagcaaaatataccaagcagctgctatgtgccaggtcttaggaagcactgatgagttaagtgtctactatgtgtcactcagtaggtgctggagatggatgtcccagtggtgcttatccttgtagtgggcatgatatgcttacggtggaaacagtcttattgaccctgtgtgctaggctacacgctgagcacaatgacagagtctaaacagaatgtaacaagcatttattgagcacctagagtatcaggcctttgactcccagttggttgagaaatagccaccctccaacctgtctgccggaggacactgggcttcccttgtctagaagggagcattgctctccttcccttggttgactgctaggttcaaggatactcatgaccttgcaagtcccccaccccccgtgtccctgggctggggctcccttgcccaccccttacttccagagcttctctctgcccttgtatctcaggtgtcccttggctgctcatatgtttggggccttgaggtgcccacctgtattggggtgctcctcttggcctgagcagtgtgtttaccagcaggccagggtgttgctgtcccttcaaaaccaaattgactgtcaactggacagtgggtaccatcttcttgggatgactgcttgcctgctcaggtcttggtaacttgctcatgtttgtattaaattcttattggttttcactgaagtctttgggtttggtgccccacgtccctgtccccgccggtcaagatttggggagacagtagggcttgtaggcatgtgttgttcagaccaccaggcactgaagggagtgtgggtgtggatattttgggaatcctatgcccctacctcacaaaggagctgtgggagagtctggtggatagattgtgcaaggtctcatggtggccattacagcctgttttcctatagaaacagactctacaacttgttcagggaaggagcccttcaggaggtgacagcagtcactgtctcccctggacagagaaactgggttgctagtttcagttcctgtctgatgaagcaggccaaaagcagcttgaaggcaaactcaaggccaga

SEQ ID NO: 33749 - DNA, 1190 bp, Mus musculus
gtgggtggataatgggtagatggatgagtgagagggtagatggatgggtggatagatgagaggtgagtagatggatttgtggtgggtgagtagtgggtggatggatggtgcattgataacatggtttgggggataatggtggtgaatttgggggtaaggttggtagatgaggggtcagctgggaagcccatgctggcagattgtccctctcttcaagttacctaagtcttcaggaattgtcttgtcctcccttgtctttggctatgacctcaatccctgtgtatcatgtcttcaggcctcacatttcacttgactgcacacagtgtttgttcatatttgaatatcttgccaagtctgccctgagcactctgtagccagcctaccttcaccatgttacccaggtgttttccccagagccccgctgttggacttccctgcacacactgtgcggtgctcaccctgtcaccctgtcagggccaaacctgtgcatagagggtggtggcccctctctctgacctcagcctcaccctcagcctcaccctgtttgccaaaatctgtgagaagacagttctgaagcgggtgctgaaggagctctggaagctggtgatgaacacaatggagaagaccatcgtcctgccaccgctcactgaccagacggtgagactcctgtcccaggacacttggccatctctgtgagggaagcccagggaatgcggtgcctccaagataagggatcaagacactgacactggggtttagggggtcactcaggtgtaatcaagggtgaacactggggacaattggaaagtcagagcccatagatatctcaggccaattgtttccctaacatccagtgaggagctggggaatctgagataagagccagatgtgcctgcacatgacactgataacacaggctgagggcccagggctggcagcaggatgcccaggggtggacactcacatggaggagggtggcgaggcctcagccaggtgcctgtagctgggcactcaggactggtcctctgggcaaggccagggctggggcggggcgacatcgcctcagtgtcttcccagagccactcacagtgacttattcccctctccccaccctgcccccattccggctggcagatgattgtaagtagagacccgtttgtccgtctgtctgtccatcgtcctttttcgtt

SEQ ID NO: 33750 - DNA, 1234 bp, Mus musculus
gtcaattgctcctgcctgcctggaatattggcttggctgactatgctaggatgtggaggtctgtggatcaattggtgatgtctgcaggggtgcagacatgcacagactcaaagacacctagtccccagcttggctgtcacttgggggcatgtggctcttcttccctctttcagtcacacccccttccatgcctcttcaggttatactcatggcacctccaagtgaggagacacctctgatccctcagcgctcttgcagcctctcatcctcagaggcaggagccctgcatgtgctccttcctccccggggacctgggcctccccagcgattgtcattctcttttggggactacttggctgaggatttatgtgtgcgagctgccaaggcctgtggtgagtgggtccctagatgaccatgccatgtaatagcaacatctattgagaaaggggatgctggggttttgaggggtgtggaattttggtaagggaggatcatgggatcagcccgtgtagttgacttgggtgaactgatgtgcccatcccttcaggcatcctgcctgtttatcattcgcttttcgctctggccactgaggacttctcttgctggtttcccccaagccacatcttctgcatagaggacgtggacactcaagtcttggtctacaggctacggtaggaagtgaaccccttgatttatcttcagggtagtatttctattcagtctatagtagaggctcttgaaaccagagaggttgggctgtttgctgtaggccacactgcacttcagtgacccaacttgggctctgggaagccagagctgagtgggccaccccattctgaaacccacagcttttatttccctgactggtttgggctggagacatgtcaccgctttgggctgcgcaaagatttgaccagtgccatccttgacttacacgttttagaacatctctttgctcaggttggtattcttcggtggggaaggctcaacccagggatgggggaccccaaggtaacaaatcccagcacccaggacggaacctcacctaaccacccttctgtggctgacccagcaccgcagtgacctggtgagtgggcgcctcccggtgggccttagcatgaaggagcagggagagttcctgagcctggccgtgctggacttggcccagatggctcgtgagcaggcccagcgcccaggagagctgctgaagacggtcaggtgagggcctcgggcc

SEQ ID NO: 33751 - DNA, 2555 bp, Mus musculus
tctggctcccgggacgcacagcggagtgcgcactgcgggggttttcccccctagcccacgtgtgtcatccttcgacccctgcttctaccgcgacctgctcctcgtgcaccgcttcctgcccttcgagatgctgctgatgtgggatgcgctgaaccagccccagctcctctgcggcaggcagagccccgcctactgagaggtttgggggagttgacatcccctagctcatgtcctgcctcatccacgtgcaaagggctggcttcaaggagaagttcaaagtgaggggcagaaaggtgggtctgaggagttcatagggcaaactcctaagtacgcttggaaaccctcttggtactgttcacagcaggaactctgagtctagccaactctgagtggctctaagtggccgctaagcaaaaactgctgtggacagagcccatgggttttaggctctgggccttggcctctctcaggcccccaaggaattgggcagaggaacaaggtggattttaaactgaggtgctcagagatcttgacttgacccccactagtgtctcccaagaacttggagaaccacaggggcaggaggggtcctgtgtcccacagaccgggctggcaggaaataaagtccatagaaggttgaacgtgattgtagggggaaggttaagataaaactcagggctctgccacgttttaattttatctatttaggaagggagccaggtcctgtcttcctctctgtttgggtcctgggacttgaactcaaatcttcaggcttggcagcaagtgcctccattaactgagtcatctcgccagtgcctttttagttttcagcactactcatgttttaacaccggctgctctaccccacctctctttgaccttcaatattaactcattgcaacatgttcacatctacagcatggctgtatgtggctcctgcctccccttgctcccttccctgtagctactttgtgggttctttttcttccaaaattgcaacccctccccaacaccagacaggagagaaaaaagtatagaggaaagaaaagagattacccaataaagtctcagcgcttggaaaggtggtaatgttacttttagacctgctgttactgttaatcctgctgattccttggggcaagttttgatcttccctgtcaaaatatctagttttttcttgtccttgtttcttcttcgaggatgactacttagcaaacctccactaacaagaacaacccaccctctgggtccctagcatttataaaccctctaatgagtccccagaattccaaacatcacacaattgcagaagctgcaaaatcgcatctgctatagcacaaagcaatgcatagtcaggtgctggggactggcagaagcattcccacaccccatacctgggatcaaaatgagaacactttcctataagatttctggttacttgtttgtttgtttttgtttattcaagacatggtttctctgtgtagccctggctgtcttggaactcactttgtagaccaggctggccttgaactcaaaaatccacctgcctctgcctcctgagtactgggattaaaagtgtacaccaccaccgcccggtaatatttctgttttttaaaagaaacccgaattctcattatgctcccccattcacttttgaggttctttcccaaaagacatggtggataccttgtagtgaatctcagcgcatctctgctctccccagcccagctctcgcacccttcatagctcctgaaacctcagctgtagaacagggaaccttccagaccaatctggtctccccacctggctgcctcagccctggttgagctcagttctgatcctacactgcctaccaccttgtagttattttgtttgtttgtttttctttagacacagggtctcatttgtccaggctggccttgatagccaaggctgacccttagagccaagaatgatcttaaactcctaatccccttgcctccacctcaccagcctaggataacattgtacaacatacctggtgtgtttggtgcttcaggagtgcttgtactgtctattgtgcacctactgtgtacttcacagccttgtaaagagctcctgacacgccttggttgccccagtagatcctggtggtgcctccggtctggtctgtgtgtgaccagagcagagtcacatcctcctgcccccccctccttgttgcttttcccaggggggaaaaaaagtatgaagttgcttttttatttagactttttgggacacagggaggaggtgggcacaggtcatgatggggcttcttggggacagggcctgtggtccttgcttactgcgatctatgaataaactagggatcctccaaggcaaactggattgttgcaatgacatagccaggaggtggggagcaattaaggacgcaccgcctgagccctgtgccccttcagtggggacacagacccaacaggtcttgctgggtgcagccagtaagacagcagcggtgcacagcgttggtggcggcactgcggcgctggcgctgagaagcctggagaggaagctgcggg

SEQ ID NO: 33752 - DNA, 1103 bp, Mus musculus
gaataaataatacagagcatattagcagaaaaaacacagctcaacaaggaagacaggcatagtttattgagtggccatgactggaacccccaaacaaccctctatgtctcgctgtggacacatgagtggtggtggaggcctttaatcccagcactaaagaggcagaagcagacagatactgattgtgaggccagcctagtctacagagtgagttccagaacagctagggttacacagagaaaccccaccttgaaaatactttaaaaaaaaaaaaaaaaggaacaagagtcaggaagtgtttatcaaaggtgtcagtgggcctcaggtttaaagcaagtgtgaactcagtcctggagttttctgatgctgtatgtaacattctcagatattctgggtttgatgtaagctagtggttgactaagaattgtaggattttttaataatttcaaggggccaaaaaacagccctcaataatttaaactctccataatcttttgagtggacccatgtggggacatgggaactgaaccgaggacctctagaaaagtaacgtgcgctcttaaccactgagtcatctctccagccccttaagatggtctcactatgtggccctagaactgaaaaagtataactcaaaagcaaaattctagacctttaggcccaggcttgagaatgcgacctctgtgactcaatgctccaaggtatgctaatcataaaacagataacgacattcctccatccacccgcttcctgggttcaaggagtgttcattcaaagaaagtcatcctgacccaccctgacctgctggaaccggctatgcaaatgtgctattgttaggggctcttagaaactgtcttgagaaataactcgcacaattaccaggtattcctcgtgacttgtaactttgtactcccttgtgactcttaactagtatttttggtattttccaacaacgccctccgcatctccttgagttgtggtttcttcctttaaatacccccttacccagctacttggggggcgccacggtcctctacccatgtatggtgtatgaccgtgggcccgagagcactcttgaattaaaagtcctcttgcagtttgca

SEQ ID NO: 33753 - DNA, 1102 bp, Mus musculus
gagggagtatggatgtctctctcccaggaactagaaggcacattgtaccccaggaaccatggactggaacctattgtaccccaggaaccatggactggaacctgaaaaacttacgatacatgcttcttagtgcaactagactagaccaactccgtggttccctgcatcccctgacctctgcttctgtgttaccagtacatactgtatacatcattgccttctgtgtacctgttcttctcagctttgactgtcaacttgatacagtatggagtcatctgaaagggagtctcaattgagggattgctcagatgagactggcatgtggtcatgtctgtgagcaattgtcttggttggtaattgatataggaggccccaattgtcactgtgggcaataacattccctggagaaatagtcctgggctatgtaaaaaagctagctgagtatgagccttcaagtgagccaacactgttcctctgtggtttctgttccaaatccctgcttcagtctgtgtgcaggtttccctcactgatggactgtgacctggaaatgtaagccaaataaaccacttagttacttttctgttgctgtgaagagataccatgagcaaggcaacttacagagattaattgggaacatggttacagtttcagagagtgagtccatggccatggtttcagggagcatggtggcaggcagccaggcaggcagacataacactggagtagtagctgaaagcttacatttatccacaagcatgaagcagagcacactggtactggcataggctttccaagtgatggctatggacgactcctctggaactttaagcaagtccccaagtgaatgctttcctagtgacacatcttccattttcattcgaaccattgtacattctttcctcacctaagtttcttttggtcagagttatcagagcaacagaaatctatttgttgcttaaaatcacagttgcagtatgggagaaagtgcagacagtacatctgattacctggtcctggaactgactgaagtcagcattatcttctaagcctgagatcaatggagaagaaatatcagctgctgccagtctccttatctgtagta

SEQ ID NO: 33754 - DNA, 2434 bp, Mus musculus
tgcagtgcggaaagacattcacttctggccactgtgccagaagacatttagggactcacagtggagcctggccttacaaatgtgaagtgtgtgggaaagcttatccctacgtctattcccttcgaaaccacaaaaaaagtcacaacgaagaaaaactttatgaatgtaaacaatgtgggaaagcctttaaatacatttcttccttacgcaaccacgagactactcacactggagagaagccctatgaatgtaaggaatgtgggaaagcctttagttgttccagttacattcaaaatcacatgagaacacacaaaaggcagtcctatgaatgtaaggagtgtggtaaggtgttctcatattccaaaagtcttcggagacacatgactacacatagttaattagagagggatagttttaagtataatttaaatatataaaagagctctacacattctagctcctcattaagaaacaaaaaatttcacactggaaaacgagcctatgaatgcagtatgtgtgccaaagtctcagtacatgccacagttggacgtgccaaaactctctaagttgaaagactatcaggaagcatttcagctctgaagacttactgaagatgatttccacatagagaccttgggaaagctttctgaccatccttgctagcatacgtgggaagacctggtgaagagagaaaaatctatggctgttggcctctcccatttcaccttggattttagcagtgtgagaaagtcttaagaaaggtgcagccttagtacgtatgcaaaccaccacagacccaaactctgtaaatggaatagctggattcttaccaagttaacaaatgttttcaaacccatgaaatgagtttccaaatctcacgaacctaagaagtataaaacctgttggtcccagtgctgcctagaagccagccaccatgggaaacatgacagtgtcctgtggcttctctcagttgctcagtgctaaatgtgtcagtatactgtggacttttgattcttagtcataattcggttggtatttttggggttttgtttagtctacaatttcaaatgtgcatactgccttgattatatctaccccaagacactcaacatttctccctcccaccttcatgtgcattccccaccccatccccttttcttagccaaagcttcagtgtgttgaagaacaaaacagctgcccccttgtccagcaagcagcacactcccagtccatagctcctacatctttcaatcccatttatgggttttaagcaatcgtttctcggtggttttaatatctatttgttgagggcagagtgagtcatgctgaaatatctgtttatctgaacctacctggttccactttcagtctccagtctaagtgggaccatagctgtctgcaagattcccaggctatgtgtgtattcaatgggagtgtttttccttgttgacaaattcttatttattgcaccttaacaaagttagatcctacagtaaattgaaatgtatttcaagagctggcaagatggcttggtggattaaggagcttgctgcctaccctgatgacttgagttcaagtcctagaaaaggtgaaaaggaccaactgctttaggttgccttctgacctccacacgtgccgtggcacgtgtgtatacaataagtgtaaaatatagttcaaatatgcagacatttaatcataattttaagtacttttgtggttaattttttaaaataaaaatgactttgaaaattgtccagtttgtagagactcttatgtattgtatggaagcatcacctgtccaaaataaaatttaaaaagctgttggcctattagcttaggcaaaaagtaggtgagagttgtggcagggagagtagattctgggatagagtcaggtacaggaggagatgatagagacagtcacatgaactgaggagcgagaactagccatgtggcaggacttagaacacagtaaatgggttaattaagccaaagctagttggggaacaagcccaagcctattatagcctaggcaatcactcatcaaagtcattatcattattcccaaagtcattgggaatttggacacagatgggaaagcctgcaagttgtaccagattttgtcactggatagttatggctgcactttatcattttaatatattccatgtttcttttctaatataaattttactttttcagcacaaagtttactcatttatacacaaatagtatgtttgttataatgggggagagtgagtgtatgtgtgttcaagtgccagaaaaatagcattggatcccctctagctgaacttagaggtggctttatgccacctgacatgggtgctgaaaaccaaaagtaggcgctctgtaagagctagtgttggaccctctctccagccccattggcatccatgtctggggaatgctttcactt

SEQ ID NO: 33755 - DNA, 1670 bp, Mus musculus
aaccagaagagtactgttttaacaccaactccactccagagagtgtgccctgtcttcctcttttgtaagaagttccgcttattaccaggtttccaccttgcaggaaatgccaagcagataatgaattcatgaccaaatattttgtgttagacaagctttgagcaccagttaagtttaattctttccttttccattcaaatggcaccagcttctctgattattcttattcttaaattgcatttattcctaaaataggcagggaatttcacactgagtatagttgcttaagtctgagggcatttggttcttgggaattagtcagccccacactttgaagcacaggctcaagtatctaatcttagctggttgctgttggggaagttttgtgaggctaggggttgtcacaagaaaatatgtggaaattttccacccagagcaaaaattaagtctcctatgggaagttataaagcacaactagattagcctgatcatactgagtctgctccacacggccctgtgcagaacagattgtctttaagcattccaagcgagaatgctggggtgatcattgttgcccatgtgccttctgactgagctttaatgctgttccatgttacatctttccttcactccagaattgttctctgaggagcaagcgtcttattccaggacttttctgctgtggtctaatgatatacccagcagggaatatggcagagtccaacccttttcagccagggctatacggcgaaactctgtctcaaataataaaaaggcttagttgccttcaatacattgagcattgtactaataccaagtgttgggcaacaaaaggtctctccagcagcaaagtagtgatagaaaaagaaattggcttaacttcatctccattgttcagggaacaacaaatggaagcttgactttgccaagacttgaattccttcgggaatgacactaataaaagaccaagacctcctgattgaactggatgtggagtgctctgtaggctgcacattttttggctttgtagttttcctttctcagttaacatctcacactgaaacattccacattccccagcagtgcggggccaactcaagtttacagtcctgactgaaagtcaccctgcttctagcttatctgaaccctgcccctcactcctatttattaagcatcacactaccagggagatgaactttgagcaaactgcaattgataaaatctactctgttctttatgttcttgctattgtatcatacgtaatagtatcactttttctacattttggtcaaataaatttttgcataaataatgtgtctggatttattcttttagttgacagttttgtaggtatatataatgcattctagttattccacatacacattcttatctctttcccattcctatgtatcctacctccatcaataccagtctctcagtgtagaacattcactggagcctggcaggattccactggcaggtacacaactgaaagcagtgactactccaccttttctgaatctatcatcaaactagttctgaaggatgggacccccaactccctcctctatcaacacctagctattgattgaacaactttggttcaacaaatgttagcagaatgttaaggtgactgtgccaatagctcaacaagtaacttctttttg

SEQ ID NO: 33756 - DNA, 1855 bp, Mus musculus
agaagatagagattcgatgagtagatggacagtaagttagcagggaatggttgaacatcagggggacaaatagatggatggatggctagtgggtgattggatctagggtaatggatggtggagtgattagttggacagttatggacagaccatttgacagctgtttgtgggtagtaggtagagctgacaagccacagtaagtaacaaggcaaacttgtgacttcaggaagggaacagcccgcaggggagcagccatggagtcaagatcacagtggagcagcagaagaggaccagcttcttccggtgcagtctcctgtgaggacaaggtctctgcccattctgagcctgtgctcagcccagctgactgtgcctgccccgggccagcctccacctctgatgtttggacacggctgcccggactcgattgagaaattgattattttttagtaaccgtctgatcttttccaccttcagagatggagagagttagaattttgctgtttttcctatgtcatctgccagtcaggcctatccgtcccctgcctcataggcacagatggagagaggttgggtgggggcccggcagcctccatttccagccttctgtccttccagcacagaaggtagccagcggtagtgcccagcctgcctggcccccatactccaagcaccaccaccggggccactgagggacaagcctgcacctgccttcagctgttctcagttgtggacaagtgacagccatgtccactgtctccttacgtgtcaaaccaaagggaagcacaaactaaggaaagctcacttagaggattttggaagaagtggaccgcttccatggccagagcaggatgggagtctgcgattcagactgaggtgacgtcaccaccattctcccatgacccactgtcattgggccacctgcctcagtggcaccaaaaccgcctccccaatcttctctggctggctctaatcggatgttcattttctatctaagatgatttttttatttttccagattcctaacaccatgaaatgaatctgtctttgattttctagcagcatacctgggaaattgggaaccagaatgactgccctgtgcccacagggcacctggtccctgagtcccagacaagcattccatggcacagcgctcccctgctgtctttacccagttgtgatgtgacagctctgtcctcctggggagactgattgggactgatgtcctggtgggagggtgtcctggtgggactgatgtcctggtgggactgatgtcctggtgggagggtgtcctggtgggactgatgtcctggtgggactgatgtcctggtgggagggtgtcctttgggagcacctttctttttactctaactcttcccccaagctccaagctgctgtcagtccaagctgtcagtatcaaaatctctcccttttttgaaattaaaaccaacgtaccagcaatagtcacctgccctcccctggagtctctgatgtaccatgtttacactgactagtgcactcagaaaattagattaaagtgcatttaaaaagaagtagttccacctgtgcagcaccaccaggtggctgtgattggttacaggttcaataggtgccttttagcaaaaagtggcctgaggcctagagaggtggctctgcagttgagcactcgcagctctaacaaatgagccagcagtcatctattgccagtgtctcctcagtttggggtgggacatcatccttccctccccatccacactaggattttggctggcatggtcttttggtggtcttgtgcttgcagtcatagaatcagtgagctacttgtcatgtctggcaaacactgcacacatcctcccct

SEQ ID NO: 33757 - DNA, 1286 bp, Mus musculus
tccgtgttttctagaatgttttacacctggctggtgaatctgctgagaccaggttttctgagacttgattaaagtcagggtgtcctttcactgggttttggttttggggtagttccctttcctgtttggacagcaacattgtagattgatatgctgaggtcatttctgggtgaaggccttggaaggatggcccccctcccacccccattgcggcatctgtcttcacttacaccacaatgccaggacagaaagctcacgtggaccaccacagaagttcccacagtgctgctctattttgggccacctggacatcagattgcatctgcaacaccacctgaagcaagagtgggacacaggacacaggtctgcagcacatagcctgtcccacagtccaccctgtagactgccatggcagatgttgctaatctccgttctcagtgatggcacctgagtttttaagtatgtggcatgtggcataagccgggttggcattcctggtctaaggagaccaaatgctagacgtggcccaggcagagtgccagcagacatggtgtagtggtgcagatgctgcagagctgtggcatctgagggactaaggggaccacttgaagagtttctgcacacgctgttgagagatgcagctccttttgccatagatactgaaagaatgacaaatccgtggagctgacatgtctggaataaagtgaataccagttatggagtgtgaatgttgtctgtcctggctgtccatcacagggacacctttccattctcgtccctgaagaatgaagaatgcactccaactcagcttgtgagacttggctgcaagtgattttacccactgagctgtgtcacagtcaggtggactgtgttcacacctgagggagatggtgtgtgcataccttgtctcaagtgtttagaatctttgtggatttggggatttttccagatttggggaatagggaacacaatgatttttgtaatatgtaatgaggtgttgcagtgactgtcacagatttgcatacatttgatttctgttcgatttgctcctgtgcacatagcctaaagtcatattaatttttttctgtcttcgaacatagcatacaatatacacagtctttttgaagaactttgtgcgtgaaacagatatatgagatttacttgtttggggttttttgtttgacttggagcggggttggagacatggggttggctgtcctgaaacactatgtagaccaagctattagattctcttccttctgtctctggagtgctagaattgaagg

SEQ ID NO: 33758 - DNA, 1527 bp, Mus musculus
tctatgacactgccaagggggtgtggcagtttaatgggttggctccgagggactcaggtctcaagaattcgggacataattaagaagctgtggagggctgggctggggcttagcactgcatataaagtttggcatggtggcctgagcctgtcatctcagtactgagcagaagaatcaggaattcagacctaatctcagaatgttaggggaggaatgcacctgagcctgctagtggtcagcttcaggagcccaaggttctctgtttagattagatgtgggatggagatgagagggagagggcagtgctatccggtgcagggtgcccagagcaggctttcggggaaattgaggctcaatgtcattcctctctgatgcaggtgagaagccttatcattgcaactgggaaggatgcggctggaagttcgcgcgctctgacgagcttacccgccactaccgaaagcacacaggtcacagaccctttcagtgccacttgtgcgaccgggccttctccaggtccgaccacctggccttgcacatgaagcgacacatgtagcctgggtcgactcggctagcccatgcgcgactgtggcaggttccacgcgcggggcacggtccccttgcaaacagactgctatttattggaccttaggacagagccggacaagtgtggccacaggaaaatgactctgccaccagttctggcccccacagtgactgaaggccccaggaaagaagacaggagtctgtgaagaatgttttcaaaatggtgcaataattgacttatttccctcgggtccccactagaggatcgaggctagatgccttgtgagaaatgcctttgagtttactgtccccaacgtttttataatattgtatataagactatgaccgattgtatttctataagggagacgatggcatctctgccgcctgcttcgtttttatacgacttttttttaattaaagttttggatctttggaggaatcacggtagtggtgtggctggggatagggtaggtcctgaggggacagggagcagtcagtgcctgtggccaaggtcaccagctgcagcccccagctgccaaggcctgtgggttcgctataaatgtaaacatggtgttttaggattgagcacaggttatttttaagtctgctactttgagccataatttgccccacccccaccccctgtatcccaagtgggaaaagccttggctccactgatgtggctgaccattcctttttttagaaagaaaaatagaaaagaaaattaaaaaccttttcctggtaccatcttggggtttagccaaacttatggagcgtgcaggtgttttggcgagcgcacgtgtgtgtgtgtgtgtgtgtgtgtgtgtgtgtgcgcgcgcgcgcacgctctcgagcgtgtgtgtgtgtgtgtgggtaaatgtatgggtgggtgtgtgtttccagcagggtttctctgtagccctgactgttctggaactcaggctggcctagaactcacagatccagctacctctgcctcct

SEQ ID NO: 33759 - DNA, 1385 bp, Mus musculus
catttcaccaggattctgctgcctccaaaaagacctttgagtcagtggtcctgcccaagtgcatcatgcaattaggagcaaaagagtccaggtagggtatccagagagtgagagatttggatactgttcattgtgcttttatctgatttctgtttattagctacactgaaaaatatttcaacctagatgaccaccttggaacctcttttcttttccaagggttcagaaagaccacttgtccaaagtggctagagactttgtggaagctcccagggctctcactagcactgccttgctatctgtggagagcctgccagtgccttcagcatagcctcagcatcctccagcacctcagggcagccgtgcttggtgctgtctcctgtaatccatttcgcccttcaggttgaggccgtttttttttcaagagctctcctttgtgctggtgaagctccttgcttggctgtcaggagagactggagagctgctctgtttactgatttatgtttgtttctttgaaataagcctggaccttcttagtctctatcctagaatgaccttgagctacttactgatccttgcaccctaacctatgtgtactatgtgcacggctggaatgacaggtgtcaagcggacctggagggctgaagtgtgtagctcagtcatgatggacaggcagagcctgcatataaccctagcttccattcccagtacaaaaccaaacaaaacccacttgtattgcacaataaataccctggtcctccccagccaattgtcctgtagcttaatttgaattgcctaaggcatacctgggcccagtggcagttacctctcatcccagtactgggatggaaggctgaggcaggaggatctcaagtttgaagccagcctgagatacagaaggagatgctgcctaaaaatattaatagtaataatatgttgattcctggggtcttgtaactatttgtctctgtagcccatcagttccgttgacagtgcctacaatgtgccttcagaaaagtgacattattagtaaaaaccagagacaaaagcactttgagttgtttggatatcaccagggttattttctggtggaaactactaaccacaaaggccagagctggtatagtgagtccagcgtgtgcctagcatgccctgccctgggcccatccccggggccacacagccttctctctcagcagcaggattaggagttccagttcagcctggactacaaaaataaaataatccattttaaaaacaagcagtgccggtgtgatggtgcacgcctttaatcccagcacttgggaggcagaggcaggcagatttctgagttcaagaccagcctggtctacagagtgagttccaggacagccagggctatacag

SEQ ID NO: 33760 - DNA, 1596 bp, Mus musculus
tctacccagaagcagcagctggagagaaaggcacggttgtgtacacactgctgggtggtacgtacagatgtgtggtggatgcatgtcagcccagcatcccatgctgttgatcttatcttagtctctaactatacaggtaccacatggtacctgtgcacagctcaggaccctcccctgcctcagctgacctattaattagccctgtttgatgggaaagcatttggctctttgccccagctccctggttcatgcatggatttggagcatagccgtgcacttcctctgcccctgacccatccttatcacaccacagccactcacccaggttcccagggcaacagtgcacattgaccagctccaccgctacactcgctcagaagccaaagtggaaactttatcttattttatggtgtttgagacaggatctctatggtgactgggaactcaaccatcctcctgccccattatacactgtttttggatggtggttttctgcctacccaatttccattggggaaaaccatatgaccagtgtacagcaataaatacctttagctggtcacaccccattgctcagtcccttgggatgtcagacagatgtggaactctgcagtgggctggtcccagcatggctaggaggagatagatgaggtgagggtgcctgcccaaggacctccagggatggtcggccttctgatggagaaagcatgccacagtgcttcccaagacatgctttacctggctcaggagtcaggagagacagtggcttctctgcagtcctgctgccctgcatgtgagagagctcttaggccaccaccttcctacctgggcttttctaacctgaaggagctagtgggctctgggctacctatccaactctaaggggttgttcagtcaggctgctttggggaatgtgaaggccccaggcagatgtccctgggcagccctgagtccaagatgtcagtaaagcacttggcatggtggtgttgtgtgggatctgtattgtattatgtgttcaccccccacagccacctgtgtcacctgggcctgacccagatgaggtgacaattcagaaaaatgtcttctgttgaaaagtgttgatgtttaaggtgtcaaatttaaagccagccctgggtcccctgagaatcattacccaggatgagtgtcagtgtgggcctggggttatacactactctgctgttgtgttctatcttggagttcagtctctgctctcacagagatcagtttggtctgtcgaatagtctccctaagcatctggacagtcactgctgctggtagcagctgaggtggctagcagcttgatgctaagggtatagttttctccttgaagcttcagagtgtgagccttaggctgctgggatgtgcacagaaattggatgtcttgaaagctctacattctcctgcctggagatcttttctagaaaggtccatcaatgtattaaataacctgcaggtgtctgggactgaagcagttgattgctttcagacacatgcaaaacagccctgaaacacgccagttggagtgagcacacgcctccctcaggtaaacagtggtgtattttcttcaacggacgg

SEQ ID NO: 33761 - DNA, 1177 bp, Mus musculus
gaggaaggagtaagatgcctgggctgcagttgctgggagccacacccaggacctctgcaagagcagccagcactcccagtttcactttagttcttttaaactatagtgtgtgtgtgtgtgtgtgtgtgtgtgtgtgtgtgtgtgtgtgtgtgtgtgtgtgtgtgtgtgtgttgaatgcccatgtgcatttgtgattacaagagtttcctctttctaccacacaggtccagggattaagttcaggttagcaggcttggtgacaacacttccctatttgcttgctctccaccaggtgtggtaacacctccctatcttcctagctctcaagaggttgaggcaggagtatcaggaaactccaggactacctgacataagaaagcagtgtttcttacccacccctccccacacagcatatagaaggaaccagctcttttctgtgagcacctcagtcgagcttgtgtgtcactagtctgtccaggctgtgtcccccattagtcagaggcactgtatcctatgatgctgacacacgggcccctgacagccactgttcagcactgaccttgaaccatgagtagacgaggcctgtggcacaggaggaatgcccaggcccaccactgagatagtgccaaggcagagttgtgaccgacaggcagggctcagccacagtgggcttcagctactgaactacccatgggatctctaggatttggctgagtcctcagggccgctctcagagctcataccaagccttgtttgtttgtttgtttgtttgtttgaggaaatgggcttggggataagacccaagacttggccagaggaggatgggaccttggagtgtgttatgacgtcagccccatggatgccattgtcttctgtttatccacccagcagctctctcacaacctctctccaccgcacacccacctgtccctctctgttaatccatccatctatactcccttcatccatcagtccattcatgtgtctacccactgtccatctactccttattctatccgtctggcctagtttctttcatgttgctctaataaagtatcctgtcagaagcaactttaagggagaggggcaggctagtccatcactaccctgtggaagtcagggtagggcttgaaacagccagtcatatccctgtgatctcgactgtttaagatcgggg

SEQ ID NO: 33762 - DNA, 1099 bp, Mus musculus
acttaccaggacagattagatacttgaccacttctagttccagtagcatggaagagccaaggttatgggctcccagcaagcatttgtaaatgagagcctcttagctggcagcttgagctaggacaaaaatttacttcaggacaattggtgggagcaccagcattgggcctctacacaacacagttcattttgattatgtttttgagacaaggtctcatggtgtagccatagctgtcctggaactcgtaaatgaagactagactgcccttgggcttacagagatctatctggctctgtctccaagtgcagagatgaaaaggcatgcatcccatgaccaactcccagcactctgtaaaagccaggaatgtcacagaaacttcttgagtatcctttgtggccatgtctatattctgaaaacaggcagagcttaggactagctgttttgcctttgaaaatgttttctgtagctgggtgtggcacagcagtgggaggccctgggtcctgtccttcatgcaatacaagttaataattaaataaaagtagttgctgggcggtggtggcgcgtgcctttaatcccagcacttgggaggcagaggcgggtggatttctaagttcgaggccagcctggtctacaaagtgagttccaggacagccagggctacacagagaaacactgtctgggggggaaaaaaagtagttaacatgttctacctctatgatggtactcattgctcgccctagtgtaatatctccccttataccatgctcagtcaccgagcaaccacgtgattcagtgcactaaaaagatgccatctactagtaacattgtaggttataagttcatcaacttgtctgcatggtgacagaatgggtcttctgtgctgaagaaccataggcctatacttaacccttatatttctgtcccctagggtgatatgttcttcattttcctggctggtggctgactgtattcatgtttggagggcagggggctcttttcagcttcaagtctggcacaggctgtccccttttttccttacttctaatgtgagtcctgccagggccttggctgcagtgctgagctgcgtgcatgcttagt

SEQ ID NO: 33763 - DNA, 1477 bp, Mus musculus
ttgtctgcctgcccaggtcccagggctggtggccgagttcctctgtcatctagaagctgtgaggcccaggtgtttcatctcctcagaagtgtttcttttgggccagtcacccaaatgtggagggcaaacctaaccaaagccagtttggtcccatgctgtgggagctcggtgctctactgatacagccttgggtgcaagtatgtgtcgttcaagtcaagtgattctgaaagatggagaaacaggctccagctgcagcttggtagtaagcactgcaggctcccagttccatcactaagcaccacagcacatctgctctccaggttctgtgcagccagctgttggctggcctctgggaggaagaacctcagcactgtgtggccacactgctcgtgagccattgatgctccatgcgacccttctctaaggttgtcagtgcccttgttggagtcatcagccccaactcagggagggatgtctctgtggccataatccggggtattatgtatgctactttaacctctcggccgcctcatcttccagggctctcgttgctccagccctgctgcttttcctctttgtaccttccctcttgtggtcgccactcgccttgcactctaaacacagctaccttccctctctcttctcttctctttctcatccaagaactcacagagaagcctgttctttccttggaccacttagaaggtgctgtttatatttctgcctgtccctcatgtctgcccacctggagttccccttcactcttagacttataagtaggtggcttcctgcccacagtgggcatctgttccatggaattcccatggaattccttgctttttggcctgtagccagtgtgtgtttctgtcttcttactgtagtctttgctttggctccatctcaccattgtcccctgtgcagctggcttgtcctatgtcctgggccagggaaatgctccctctaagtctccccttgtggattgtttggtgttttctttctttctctctctttctctctttctctctctctctctctctatatatatatatatatatgtctgtctgtctgtctgtctgtattctttctttgcttctcctctttttctttctgcaacagtgtcactgtgcaacccaggctgtgatggaactccagagatccctgttgcagggattaaaggtgtctatcaggttcccctgtagcttttatcacatcctgggctgcatcttagcagttggtgacagtttacaggtggtggtcatttctgtcactaccagaacattttgtacatggttatttttgtccatcgtttaaccagttggagtttgagtggtaaactgtcatttgtacagtgtaaccataagatatattacctagaaacttaagacttgtgtccaaaggaacccacatcttgtatttttaaaaaaatgggggggggcagttgtttccatttcttaataaacagtttgaagcgaggtct

SEQ ID NO: 33764 - DNA, 3098 bp, Mus musculus
tgtacccatgtctggggaggttctaaaccccaagtgctggcttctgtcttactcctttgcaaaaccctaatgggtttcacccaatttgactgctacagccagctagagattaatgttttgttttgcagacatgggaccccctcatcaccaccctggccaccgaatgccacaccctgggatcaatgagcacccaccttgggctgggccccagcaccctgactttggccctcctccccacggcttcaatggccagcctccccacatgcggcgacagggcccacctcacatcaaccatgatgaccccagcctagtccccaatgtgccctacttcgatcttccagcggggttaatggccccccttgtgaaggtgatgctgggccctggctgggaggctaagcacgggaggggatgctggttttgtcaggctgagttcctaccttgttgctaagatccactgggtggccaagtaggactcctcagggcccaggcaacagttatgctctcctacagctggaggatcatgagtacaagcctctggaccccaaagacatccgcctgccaccccccatgcctcccagtgagaggctactcgcagctgtggaggccttctacagtccgccctcccatgacaggccaaggaacaggtaaggacactgggtgctaaggcctggctgaggcctcactctccaagtctgtcctgcagataaggaactgcttcctctgaacaccacagtgggcatggagtggtggctctgtgctatccagcctgctgtggcagacactaacagcagcagtgggcatgtttatgaggtcacctgggatttggaaagggggctggacacctagcagagccccagctgcctctggttagcttcctagtgtagggaaccccttcctggccactgtggcccttgggggctgactccagcctctcatggggaccatgtcatgcagtgagggctgggagcagaatggcctctatgagttctttcgagccaagatgcgagcacggcggcgcaagggccaggagaagagaaacaggtgagctgtgctggtatcatggggctggcattgtggtatgtggttgctgtaactgccgtcctcacggtggcattcccttgcagcggcccctccagatcacgcagccggtccaaaagccgaggccgctcctcatctcgctccagctcccgatcctccaagtcctcacgttcctcctcccgctcacattcccggtctcggtcccgctcctcctctcgctccaggtccaggtaggcacgtggggacctcagaaagcccgagtgcatgctcctgcccatgccccattatcctgctgtccccacagaagccgcagccggtcacgttcctccagaagccgctcgcgctccaggtccaggtccaggtccaggtccaagtcatactcccctgggaggcggcgacgctccaggtcccggagccccaccccaccgtaagcaacaagtgtgggaattatcaaacgtacccctgttgctaaagagcggggtggcacacttcccaccactggctcttggtgtcaggggcctgttgtagggattgacaacttacaacatagctcttcattccagctctgcagctggcctgggttctaattcagcgcctcccataccagactcgaggcttggagaagagaataaaggccatcaaatgctggtgaagatgggtgagtatacccagaccagtgcccccttcctgcatgaccacatgttggcatcctgctgggggttcaagtagccactcccagggaacatggccacagccctgccttatatgttctttcccctctgaaggctggagcgggtctggtggccttggtgcaaaggaacagggcattcaggatcccattaagggtggtgacgtccgggataaatgggaccagtacaagggcgtgggtgtggccctggacgacccttatgagaactaccgccgcaacaagagctactccttcattgcccgcatgaaagcccgagatgagtgtgagtagtagttgtgggtggacacggtgggcttagcttcgtgcacgaaaggtgaaggtgacatccctgttctcacacagtttccacatttgggactcgaaaagaagagaaggaagactgaccacaggcttcagcttcgcagtgtggagggcttgtcctgcatttgccctagaggaggtgctgcagatactactcgcagtgcccagatagcaaaacaacaccatcccaccatcccccagcccagagcctaagtcccacccacagtgctgcacagcccagagagagaaggctgcctgcactgagcgtggcaaccagaatagcctagcctctgagctgtagaggtcagaaggaattatggtttggctctacttggttttgtgttaggaaaaaggaatactgaccccctgaggcagggattttctgactcctgactcagttcatcagttactttaattgttatcatccctttccacaaatgttagctgtttgcctctactacctggacataacttctgacactgggctaagcgcccttgggtcagggaagatggtgtccagagctcctccatctagtgcagcatcttagcttggggcttctatctggagaagccaattccagcacagagcatggggtgctgggctccagccagcacctcctgtgctgtcatttaatttgggttccttagccattcccagagagggggaggtgaggcccagaaggagcagcctggtgccattgtttgtacacaaacttttgaaacattcttataaataaaatgcagagtcctctacaatttttcagtatcatataagacacttgatttttgttttagatttcccatacctatgacgttcagatgtgtctgactcaggataaacaagcagacacacatgtgctgttaacaattgtggattttactgttttgccttccaataaagccttttgtaaaagatttcctctagctgtggatgagagatactgtgcaggctgctctggatagatgcaggctgtgcccaggcaccaggctcatacctgtttcagcacctggcatggagtgttcccatggggcagctggtcccatcttggat

SEQ ID NO: 33765 - DNA, 1215 bp, Mus musculus
agtggacttgtacccattgtggatgccaacacatggcggcttaggtacctaccattcttaatgagtagggaggggcattattggccccatcttttaggttggttctgttgccaaattctatagggatgagctacctgaaatgaaaggagagaagacatacagacctgagtgccagccccactcagggtttccttgcttaccaccatcacatatcatgcatggatgtttaccatcagtcatagtctggacagttaggtcttagacagcagaaccagcctctactcttggtgacctatacctactatttacttgcttgtgtttagattggtttggtttggttttgagatagcatctccccaagctgccctcagcctcccaaatggtcacaggcacatgtgttagcctttaccccctgccttgctctgcttaggtgatccatgagcaccctgcctccttcacattttcctgttagcttaggccaggctgccttgcctgctgtgatgatggacgataccagtgtttgtgcaagggccctgctcataccacctgtcccttgtggttttcccaggagcaagtaacgacagccgtggcacatgcagtggaacagcaaatgcagaagctgctggaagagacacaactggacatgagcgagtttgacaacctgctacagcccatcattgacacctgcacaaaggatgccatctcggtgaggctcagtatggggtgggggtgtcgtcgcctgcccgactgaccacccactcaccctggactgactctcaggctgggaagaactggatgttcagcaatgctaagtccccaccacactgtgagctgatggcaggccacctgcgcaaccgcatcactgctgatggcgcacacttcgagctgcggctacacctcatctatctgatcaatgacgtgctgcaccactggtaagtacttgaccacttggtccagagcccacacctgtcagggacccccaactcctccagtttccacccttgctgcacttgcacactggttcactgcttgtactcccaggacagtggctggcaccccacaaggcaggccttgggcactgctgcctcctctctgcctctgtagccatcatgtgtctgcttcggtctgcatagccagacacctggccgatgcactgtctgctcttccatgtcttagggctacctttgctgatcctctctccatcagtcttctctt

SEQ ID NO: 33766 - DNA, 6415 bp, Mus musculus
tgttttgttacaggaacagaaagtgtgcccattttctgctctgtgcagttttctttcccttacctttggggtgtgtgtgtgtgtatttgcgcacgtgtgtaccagcagtatgcaggtggaaaacagaatccagcttcctgcatctccctcaatagctcccccttgtctttttgaagtaggatctcactaactgcctaggatggctgcctggccctctttaagatctgccaatttctgtcacccaagcttcctgcctctgcatacatgcagctacacccacatttttttcacatgggtgctgaggctttactgatcagctccacctttggtgcttttaagacaggatctatgtcctgtaataggtagcctagggtgtcttcagactcctgatccctctgcctccacctcctgagtactagaatacaatgtgtcctccatgccgggattggaagccaatatgatttggtagactctatggttcatccttttcagacttcctccaagatccttcccttggtggccagctgatatgcctgttaaccaccatgtctaacaaagagccagctgggacttgtggtttccacaggatgactgaggactggcagcagtccaggaagttgggtgtgagttgagatctgaggaagctgatgcccagggcctcctagtgtccgagctgggcctttgtgttctcctgatgtcttgaggataggtgtgctctggggctgtgtttcactctctagaagccctgcccaccactgatacctctcgaagaaagtggcagtagttgataatgtcacccatatccttggctttgtctggtttgatgttttcacttctgttttgtgtggggtttggagctgaaacccttggcttcatgcatgctcagaatgctccgcctccaagctgtggagatggctcagtggggaaagtgcttgttgtgcagttgtgaggacagagtttagacactaggaggcaggggtgggatccccgcaacacactgtgccttgctcctgccagacaaactttttttttttttttttttttttttttttggtttttctagacagggtttctctgtgtagccctggctgtactggaactcactctgtagaccaggctggcctcgaacacagaaatccacctgcctctgcctcccgagtgctgggattaaaggcctgcaccaccacgcccagctcacacaaacatttttgattgcctttttaagaaaaagtattacatatatgtttgggtattctacctgcatgtaacatgtgtgcctgggtaccctcaaaagtcaagagaggccattgggcccgctgagactggttttccaggtgattatgatctcccatgtgggttctctgggagagcagccagtggtcttgcctgctgaactgtctgcaacccttgggtggctggttgtgcatctctgactcgggagatagtactcagccaccgcatcatgcagtggggcagttaggagggttagaggtcatgtgtataaagcataaactgctgaaatggctctgagggtaaaaatgcctgttgccaaacctgccgcccaccagtttgaggccaaacaggactgcatgaaactctgtttcaaaaaaagtaaccacctgctgcccatggtaataatctgcccgagtatagatgtgcccctcacccactgatgccccctgtccatcttcacaggcctatgtgtctcagtggccctggacgctgctgctcttggcagtcagtggcttctgcaactttgcacagaatgttattgccttcagcattctcaacctcatcagcccacttagctactcagtggccaacgccaccaagaggatcatggtcatcactgtttccctcattatgctgcgcaacccagtgaccagcaccaatgtgttgggcatgatgaccgccattctgggtgtcttcctgtacaacaaggtgagcattgggtgctactgtcccctagcaggcacacccttgggacaaggagccaagggaaagagaggggagggatttctagctgtaggtcccaagggtgccttacagggtgtgtgggttgtacgtgctagacagaagagtgtggcagtaggcgtctaagcacaggccttctagaactcactatcctcctgcctctacaccctgatctctagggcaatcggtgcagaggccagaagccttctttgtgtcttacttgttttagaacagtcttgtgtagcccagagtggccttcagcttctgaccccctgctccacctcccttggagtagaatgacaggtgtctgtatctgtatctgtatcctggtttatgtagtgctggagatggagcctcgagcatatatcttgtagacaagcattctactacagaagcatccctagtccttggttttagggtgaccttttttatgctgatgttcttccctcccctcccctcccggtgacttctcttcgtttttttttaagtctcatgtagcctgggttggcttcaaacttaccatgtagctagccttatacacctgcccttcctgactctgcctccatagagctaggatgacatgcccccccatacccaaagttcccttgtgcttttcattgctctcttcacacagaccaagtatgatgcgaatcagcaggcccggcgccatcttcttcccatctccacgtcagacctgagcagcagagagcacttgcggagcccagtggaaaagccccacaatggtgcattgttcccccagcagggtgacttccagtaccgcaatatcctcctcacagaccacttccaatacagccgccagggccacccaaactcctatgctctcagccgacatgatgtataggccaggccaggccttctgcacccccttcttgagctcagaagcttcagaatattctggcagcctgactgagcacatgacacttggtgggccatcaggggagctctgggtcctggcccctggcccctgatgggctgcaggatgtgatcatagcatggacacccacaaactcggggcagaaaagaaccacagagagaccctggtttacgcctccactaagaggccactctgcatttgtgtacagggttgtccctggcatattacagaggtctgatctgaacttctggtgagagtagggacatgctctacagaactggcacctcctggctgcaatcctggaagccaacaggagatggcatctgggatatcatggagaggacagctgggatacagcccagaaggatggagggctgacatgggtggcattacctgatcccaccaatgatacagagccctagaataccccaaggcagttggccacttgcagctagtgctgcccaagggcagacttatagtgaccatcagcccatcagctgtgaccttcctctgccttgtgggtgccaaagcagggcctggggggcccttggactctagaggagcagcttgtctgctccccactctcctgatggcacagaaggccaaggagtggtgatgacagtttcctcagaacctaagtttctctggggaacatcttgtcggccatgggatggaaaccatcttgtctcatttcaaaatatgggatgtttgttgctggagccagtccctcccaggtcagtggtagcaggcaatgccgaagggtactgaagttgcagccacagaggtagaaggaggtattcatacccgagtacagtgttgcttgtcagtgaggagaccgcatgtgtatcagggttttaactgtgctctggcaaatgggacaccaggcaggtcttggttttttagttaagaatcactttgaggctgggtagagtgcctgtctagcattcgtgcagccttagattctgtccacagaatgccacgcagtggtacaggcctgcctgccttcctagcactcttaaagcagattcaggaggatctagaggacaaggttctctacaaagtaagttccagaccagcctgggcttcaatgagaagctgcctcaggaaaatgatcagtttagggacctgccatagtggcatatatcgaggggctgaggcaggaagatggccatgggtttaaagtcagtctgggttacataatgagactctctctgaaaaagttgaggggctggtggcccatacctatggtcttaggtactcttgaagcagaagcaagagacttccccaagcctgtgagctcaatgccattgtggcaattgacagcaggtaaatgataggaaggggtatcaatgggtctcagggttttttggttttgagagagggtcttataatatagaccaggctgaccttgaactcatgggatatatctgtctctgcctcctgagtgcttggattctttaaaaccatgggcaccacatccagatggagtcatcccactaagcctcccaggctgaccttagcatttgtgcctcctctgttgctaagaactgagctcacaggtacatcatggcaccccagtccttaactcctgatttgttgggtccctctgcttttgattacttggggttttatattgaaggttagggttttttgtttgttttgtttttcgagacagggtttctctgtgtagctagccctggctgtcctggaactcactctgtagaccaggctggcctcgaactcagaaatccgcctgcctctgcctcccgagcactgggattaaaggcgtgcgccaccactgcccggtttatcatattagtctcctgcttgcctgagacttggcacccccggcctcaggacagtcccgtctgccttgcctagtcctagctggtttgcagaagaagtcccttggtaaggccgtctgttgggttctcctcactggggaaggctggcctgagacacctgtcactgcagaggtctctatgggtgaccctgactcagctctggactcagaatgaattatgtcttttaagattaccaagatgttcctataatttgtgtattaatgcatttttcctttttcagggagcaaaatggcccgtctcacttttcttaacggtttataaattaataaatgggatatttagttctgttcataggctcacagcaagtatgaacactggaatggatgagacaatcagggtagaccagattctcggatcaaaagacaaacagctggggctgccgctctggctacagtgcttacctgcatgcatgaagtcctggccaccctcagcactgcatacacgaatgttactccattactcaggaggctgaggcagttaggatcaggagttcagtgtaacatagtgaattggaagccagcctgggctatatgagagcaacaacaaaacagacttgatccacagtttacatctgtccattcaaagtcacattagccctactcctgtgtcttacatcccactacattcacctctccctctccaggactgacccgatccacctctgttggggtttatttgagaatttatgttgctgttcccacgtaccctttgaaattgcttagccaaaacgctgatcctgacctacccagctccttcattttacagaagaagaaaatgaggcttagtggatgtcttctcactattagtgcacttggagcttttatttatttctttgagatagtatctgcctatttagaccaggctgaccacagaatagaaggcactcctccagccttagcctccgtgcctggaggagctgccatacccagcaccttaatttatgtcatttattctagggaaacccaaaactttcttgacagagtagaggagccagatgaactaaggcagcaaaatacatggaacttgatttctctgtatgttgggaggactccaagcagtgagctcttcatggctagaccccagccccaaaaccttgggtctgaaacaggaaacctgtcatgctcttgctttccattgtcatcttgaggctcctgtgtcatagactgtactatgggagtagctgtgctcctggttggcatttaccaaaaataaatggtggtctccaggggttggagtttggttctggtttgtcagggagggtcttgctctgtgctcccatcaggacaacccacaaaaatccagggctgggaagatggcttggtcagcctttgactggcagatatggaaatcaagagttgggatctctacaacccccaaaagctgggcagatccagctccacctgccatcctagtgggagagtcaggtaaaggttccaggatcatgggcaagagcttactattggccaggttcatcctgaaaccatgccttatgtataaggtggagggccagcaagatagctaagtaggtaaaggcaattactgctgagcctcaaaatgtgagttcaatttctagaacccacatggtaggagagaaccaactcctgtaagttgtcctctgacctccacatttgtgttgtggcatgcacacacccacacaaaaaattttaagtgtgctaggcac

SEQ ID NO: 33767 - DNA, 1225 bp, Mus musculus
caggagacacttaaccctggatttctctcggttggtctgtgaggggaaattgacacctaccgcacagcttccgaggacccggcgtagtccagaggatttaccgcaatcggtttcttttcttctaaaagatctaagccctgtctacgccccaggcacgcggcttccacagcctcaagtgggcgggcccgcgtcgcccggcacctcccacggagtcctgccagtcaccggagagaacgtaacgcgcttaacccacccgcgggccctacggcccgccttccgggcttagccccgccccctcccggaaagcgtttaagtgagggtagggccctcgccgacgacgtgtacgggcgcgtcggcggacgcgcgacgatgacgtatggggcggtggccaatggcgagcggcgatgacgcaagggccaggggccaatggtgagcggcgtctgccggcgcgccctccagggctgtcccgccccctgcccgcgtccggcggtcgtccggcgggaaggggcggccgctcgggcaggatggcggcggcggcaaccgcgggtcccggcgcgggcgcaggggtcccgggcgcgggtggcggcggcggggcgcgcgagggtgcgcgggtggcggtgctgtgtctactatggtacgcgctgagcgcgggcggtaacgtggtcaacaaggtgattttgagcgccttcccgttcccggtcaccgtgtcgctgtgccacatcctagcgctgtgcgcggggctgccgccgctgctgcgcgcctggcgcgtgccgcccgcgccacccgtgtcgggccccggacccggcccgcatccggcgtccggcccgctgctgccgccgcgcttctatccgcgttacgtactgccgcttgcctttggcaagtacttcgcgtcggtgtcggcgcacgtcagcatctggaaggtgccggtctcctacgcgcacaccggtaagtgctgaggcgggctttgcgcgctgtctggggcttcgaagtgtgggtacgagtgcgcgggccgtctgactgagacgccgccaaggtgcgtcggattctcacgttggaaaaggtctgaggagtttaccgagcgcctagcagaattgactccagctattgggatcgagaggaagccttacagaaggaaggttcagggtcgggtgtgcaggttgccaggactgcccactgagtgccttttcctctcttgcagtcaaggccaccatgcccatctgggtgg

SEQ ID NO: 33768 - DNA, 1189 bp, Mus musculus
ggcccagcaatggccaggggttaacgggtgtgaagacacacagggtaattggtatgactggacacagtgtatatcgctcgaccctcatggtgacgatgggcgcttgaacattctgccttatgtctgcttggactgagcacctgacctggccatcatgtgcattcccacctcgcaagggttaggctggccagctgagaaggcgagcatgaggctcgctctccaccatccttttgtgaaatgctgctaccagtttactaacgattgcaaaggaagggccgctcgggggaggggcagatagatggctgaaatctatagtaagccagctataaagcgttagtcccccatcccagaagaggtgcagaaccactctaagcaccgaaggcagggacctcagtagcaggcaggcacaggaaccctgtggaagaggttaccttaacagcaacagacacatctcttctttgcatctcttgctctttggccctggtgtctctgaggcacaggctactctcgagccagtggttttttttgtcgccctcgtgttgtgcgctggaagcttctctgctgtggtgaaccctggtgttgtgtgggtgggccagcctcacccacactgcacagtcgtctgcccatttgtatatggtttcagttcagtcccagttcttaaaagaaatgctgcagaaacttgagttttctcatttatttcattctcttttttcccctaccaccagccaaatgacttttccttcccttctttccttttctgcacaactctagaaaaatgccatctttctagagtctttaacccacaaagttcccgagggtgctactggtgtgagttgccctggtgggctagggaagagccgtctgttggctggaaacactcataaccattcctttagattcgtttgccttatggtcataaacgcgatttgcaaaaacaaggagccttagtgaatgtacagtacctagacttctgtgttcgcgcagaagggagcaactttgctatttggtccagtaagtggacaacttgtgatataaatgtggaaataaaaaaaatatttgcacaaaccagttttggaatcatttctcatttgcacatgtatagctaaatctggcctttcctacaggggtaagtgcctggagcccacatccatacctactatgccagccttggtgacatccctttagcttt

SEQ ID NO: 33769 - DNA, 2970 bp, Mus musculus
aacagtctggggccagtgaggtcttacttccaaacgtttcctcctcaccccataactgggtctacctggggcagccaaagattgctccaacatttggaggagccggtcctcctcccttgggacaccagcctcttctttagacactaagctgttagccataacatactcagcttctccagaagaggcctgtggaagaggtgctagtggtgatgttagcagacacctctctgtgctttcaagccacttgttaataaagtgactttggggccactcctttattgttgcttgtgatgttggcagcgtactctgaaggtttgggtttctgggtctctctttgaaggaggggagctcaagcttgaggtgcatgaggttcagaggcgactacgccatcagctctgagatgcgttccatctagagatggccatgccggcagtgctgagggactttaatcagcatttgaaagctgtagcagctggcttgctttggggctctctttttggattggtttctttcttttctttttaaagattgttctgttttatatgtatggtattctgcctgcatgcatgtctgcacacatgtggatgcagggcttgcagaggccagaagtcctctaatctgcagctagagttacagccagttgtgaactgtcatgtgagtgctgggtcttttgagagtgacctgtgtcctgagcccctcattttggcttttttttaaagacagccccaaactgtggcagatgaccttgaactccttatcttttcagtagtgagacaagatcccaattgagtactaccataccaggtttttttattggctggttggttagtctttgagaccatcttgatggaatctgtgctgattgagaactttccattctcctgcctcagcctctttagtgctagaatcccaagtgtgtactaccaaccctagtcataatagcattttaccccaggcttccccgggaactatggggaaaactctggtaatgtgggaactgggtcaagtctaagttcaggctgcacagctgctgcagacattgttgattgtgtccttcacacccgcagcatgcctgagcctacccacttgcctagcattgtaacatgccactctgttggctgatccccagccttggatagttgggatggctttctgcctttctcagcttaggactgtagtttcaggaaaaaaaggttccattcattctgaagaggaattgtgctgaaaaagaatgctgtcatagggtttgcacttattatctcatttgagttctgataaagtgtttttggactacttactgtgtgtgtgaaaaattgaaacccatgaatcttcttggtttttattattatttatttatttatttttggttctgggctagggccttttgatgccactgaaccatatcaccagctctatatgtgtgtctgtttggaatgttgttcagaaacttctcgtggctggagatgtagttcatgtagagtgacatagtataattttacaggaaaggactgagagtctggctcaggggtggagttcctgcctagaatttcccagtgaggggctggggtgtgtggctcagggatggggtccctttcagaaccatttgagactctcaagtcagatgttctagaagctgttaagcaatagctctttcccttgctataaccagatatatgtaacctgaagtgacaacccactttgtgctcctgaaggttaaacctgttatcccaacgttaccactgggatatggagtttcagttaaattgtctctcacgcttaagagctacaagatatgaagtgctgtcttctgcctcccaccacccagcctgaacaaataagccctctttttatcccttctttacaacactgacaaacacacaggtcaagttgtccacaagtgatcatgctgggatgctgcagagcggaggactgtgttgtactgggtctacctgattatagtgtcgcacatacagccacaagcatatgctgtgtgcaaataaaaaacaaaagagttaccatgacaaacattcagtctatctactcctatccttacccagatagccttatgaaagtataccaccaacagagaactgaagagttcaactcatcacctaggaccctctgacttttcagatgatggctgcctgtaggtcactgagcagctcagaagggcagtgcctctgggctggcagcagtgttcactccaaagggccttcaggttctctaggcctcacgctgagcaaggcccatctcgaaggatacaagagtcgccaagacagcaccaacagcaagaccatgtggaagaagccatggtatgtgaggagcagggtccagggccaatcatccagggtgtagccattctgtagcatctgactggacaggcacagtacagccctgccacttcgcagcatcccatggatgctctgagctaatgggcatttcctagatggaagacataagcaaatccttagccttcattgtcttcctggcttcgagaacaaaatgtgcccgtggttacagtcctgccatgtgtatgctgtggtttatggtagcttctctggtggggtgcatagcttctcaggggggaggctctggattgcttggtcctgccccagcagggaagcttctgtttgctttactctaagtttcttttctttctttttttttttttttttttttttggattttcgagacagggtttctctgtgtagccctggctgtcctggcactcactttgtagaccagtctggcctcgaactcagaaatccgcctgcctctgcctcccgagtgctgggattaaaggcgtgcgccaccacaccctgcccattttgatcctttaatgattgtaacatacagacttgtaagctagcttcacccacccatggtcgtccatgctcagaggcacctggagcatagccctctagggaaatgtctgtggtgcatgaggtttctttgtgcattattacctta

SEQ ID NO: 33770 - DNA, 1828 bp, Mus musculus
caccatgacaaccatggagcaccacatggcatgggactaggcacccagcactccggcctgcctgccaaggccaaggaagagctgggcgaaggatccaggaagaagaagaccaagaaagcggattaggggttggccccaggaatccactgcgtgcttggtagaaggatgtggactcaaagaaactcagaacttaggggcattcagggctcagaccctcccctccccccgccctgctctctaccaccctcaacttccccatctgcagtttggagccatcagcaattccaagggctgatgtgggctaaattagtgtggaggaattcaacagatgtggaaaaccctgccctctgccagacccctcaaaaggtcacagcctttgggggcacacagtctaggcccaaagccctggctggtaggctcttggttttcattctgtgttctgtctaattatatcttgtaactaaaagaatttaaagccacatggagactcaattatctagatcctctcgagagccaggtgctggggtcccatgtccttccgcactcaggacctccctagaattttgtgactcctgctggacatctttaggcaaatggccttccttctctgagccttctgtttctgttctgtagcatggagaccccaggtcctcctgtgtacaaaagggtctttataatttcaagcagttgcttaagcagcgtgctagtgagaaggagactggagcagcatgaaggacagtggcaggctgcttggtatgtaggccatttgtgtttgaggccagaaggtctcaccagatactcagctgagcatgagcaggcacatttagggcagactgctaacaggaggggggcttgagttcctaggtgcccacaggtaagaggtgtgggtgcagagcagagggtccaagagccaacagccttggttactcacaattgggctctgggtgtatcaggtgtccctcatgcctgatcagcatagttcattcagtcattcaacaaacacacagatccacacatgctcgctatacagtgtcatgctgctcctcttaggagcgagccttatacaggggaagggccatggtcgccaaagtctccagggcacctgagagaggtgagcatggggtcctgctggtctcaggcttatgtgaggctcagatctagttgaagtacccagtgtagcccatttgttgagaaaatgctcctcataactttgcctggaggtagggtaggccctgaggctggaagctcccgagtttcatccccttgatgtcaatcaaagctcagtgtgagtgatcagccaataaatctggtgcgagtaaatcaagctctttttctttattcagcctcaaaatgtagggatccagcagagtctgttttagagatggcccaggcctccagggataggagatgggtctgaagcctgggaagcagggtcaagcatatctgagttctccaagataagtgggaaggtgcacacctgtccagaagctgaggcaggaggatcactgtttctaagcctgcctgagtgaaaccaaaaagtaaggaaggaaatgaggaagagaggagagagagaatggggagggggatggggaaaggagggagggaggggagggagagaatggggaaggagggggaaatagaggaaggggcagggaagagagaggtgaggaggagaggggaggggaggggaaaactccttttgccactcagcacttccactttcaggaatgtgctgcaaaggggacctagtgatcatggcttttcacagtagctaaaatttggaggcaggaagaaaggccataaacccctgacagcggatgggtctggt

SEQ ID NO: 33771 - DNA, 1192 bp, Mus musculus
acacagtgatacttccttgaaggtagaagaccctgtttccaccttagaacagtcttgctaagatacgggatgttacccataaccctgcacagagctccgataagatttagcttccaggatctgtgactttccctctgcatgctaatcttagagtggaaaggacttgctggagcaaacctctgactgaggcttaggtaggaggttggtcagagttgaagcctcatagagatatctagtctcaggaatacaggggtaggctttgtgaaactgcaattctagcctcagtgctcggagatctagggagactccagagggaagaagtacttgactcccaggggtgcataggagttacagaaacaatacttttcagcagacaataacggtgcatcatctatctcctggccaccccatgccactcactgcgtctattccacaggacaactcccatagccatggtgactgtggggaggacttcaagcagatgtcctacaaggaggacagaggccaggtgcccctggagtctgactctgtggagttcaacaatgctatcagctatgtgaacaagatcaagacccgctttctggaccaccctgagatctacaggtccttcctggagatcctacacacctaccaggtgaggcctagcccacggcattgtttggcattaggagatgagagtggagtccaggtcctcacaaactagctacactcttatgcataccacaacccggccagactctctccgtagctttccttagccacatcgcacccccagtgatcagtatggttctggggttcaggagtaggttgaggtagaaaaagggttctggttgagaggtttgtaggccagccactggtgcagtagcagtgagaaagaatgctgggcacagcccctgagaggtccaggggtcaaaatacacagctctgattctcatacaggaaactttatgaaccactcaacagctactactaaccctaataatggtccacatttgacagcacagctctattaatgttaatgtgctggggaagcagctgtgttatgtggatgtggaaccctcaggcagtgacattgtaccagcatagcagtaccttcagggagggcacagatgtgggatactggtatggttttgtattcttgggggcaaatcagccagctgggtgcagtttgctaccagactgtgtctgaggc

SEQ ID NO: 33772 - DNA, 1116 bp, Mus musculus
gcttgtataggtgcctgggaccagactgcacttggctccccacttcctcccaatggcctgaggcctgccagaggtgccttttctgtgtcttcttttatatgcatattagtcttttttgaaaagtagagatgaaattcatgaaccttaaagtacaccataaagttcaccactgtaaagtacataattctgggccaggtggtggtagtggccaacactgggaggcagagccagctaatttcagagtttgaggacagcctgattgacatagctaattccagagtactcaggactacacaaccatgtctttaaaaaaaaaaaaaaaaggtaccgttcaatgccatgaaatctacttaacaattaaattaggacaactgtcactttcagtccttacaggttacgtttctaaaaagaaacctggtctccatcagcactcaccctgtccatccccagcctccgacctgcttcctgtctggatttgcctgctctggacacttgtcactagggtctgtgtatttagcctttgctagtgttcccttgtgtttgtcagtggctgagtagtaatgttcccaagtgtggttttttccatttcacccacttgtgttgtggacatggggtggtttgctttgggaatgaacagactgtgtacaagtgattgtttggacgcctgctcagctctggatcagcctccataggctccccagataacatggtagtttcatttaactttctgaggaacttgtgctttctgtagcagtggctccatttcctgagtcctgccaatacttgactttccattctatgttcagttgttttgtcagagatgtttgtcagttttgactgcatttccctagtgctcattgattctgttgagtgtcatgtttgtgtactgactggattttaagatagattatttattactatttgtgtgtacatgttttgtctgtatgagttttgtgtaccatatacatgcagatgcctatggagaccagaagagggcgtcacacccctggagctggagtttaccagtagttgtaagctgtcatgtgggtcctgggacctgattccaggccctctgcaagagcagccagtgctcctaaccattgaaccgcctgtctc

SEQ ID NO: 33773 - DNA, 1227 bp, Mus musculus
aaaaaaaaaaaaaaaaaaaaatgccttacagctgtatcttataggaagcatttttcaactgaggctccttcctccaatgactctagtttgtgtcaagccagccagtacaccatctgaccacctcctgtgtttgtgtctttagtttacaggcaatgggtcgtgcgagatgaacagtgggcagaagaatgaggagaagagtctggaacacaacaagaaacgctctcggccttcactcctgcgccctgtgtctgcgccagccaaggtacttgtccatgtgtgggttctccccgcacatggcagaagtggtgtggaggcccaagcagcaggggagcctgaggccagagcctagtctggtaggaaagcaccatctcctgctgacctggccatcactcgcctgctcgctctcctggttcacttgatatgaggagaggaggagggggaattggaaggatgggtgtggtgaactgctcattctccttttcactgtcatgactctttcgtaggtggggctgcagttgaaatgtgcagttgtgtggtttggttactgcacagctgaggagtgaaggtggctggcaacagttcctgtcctgctcatcacccatgatggtggatttctagacctgtcactctgttttctagttgactttctacagtaataaaatgatttggcatttctgtttatttagttatgtgcagcagtgtcgacctcaagtcacaattcactactggtatcttgacacccaaactgtcctgggctgcccttgaatctgctcccatgtcatccttttcatctttaactcactccttggggcagtatgcttcataccatgaacctgggtcaaatgcaggtccaagtctggtttattcatatgtgtgtgtgtgtgtgtgtgtgtgtgtgtgtgtgtgtttgtatgactgtggcatgtctcagagattagagaacaacttcagggctcatttgggcattgactttttttttgttttgtttttgtttttgttttgttttttcgagacagggtttctctgtgtagccctggctgtcctggaactcactctgtagaccaggctggctttgaactcagaagtccgcctgcctttgcccccccccccccccccccatgctgagattaaaagtgtgcgccaccactgcccggcgacatggttctttacacttactcattcccctgcctctcaagtccagagacagtgtcttcacatagctttaca

SEQ ID NO: 33774 - DNA, 1617 bp, Mus musculus
aaatatctcacagctgagaacaacagctagcactactagggagagccaccactagggagagacgtgccacaagggaagaaccacttcctgctggggcccagcctttgaagacaaaagccaacactgcttttctttggtttgtttccctttgtctctttggccccacaaagctgctctcttctgaagtcttggacagagacccagcccaccatgggtgcttccaggatgggacatagaagagtggaagcaaatgaagagtttaacatcatcacaaagccacagaccaagtcagggcttctggatattcccattgctttttaacagttatgggtcaaaccttagctgttgagaaagtaagagcaataaagcttcctacgatggaaatgtatcctgccacctagctgggtacccatatggacagcaacccaaggacccaaacaaacatctggagactctcatatggacattacacatgagggacctgaaggagggatgaattggttgtttattctcaaagtcactcttgttttgttttgagttgtttgaatttgggggattttgttcattttgatctagaaatctaagttttttaaaaaatctaatccttaaagctctgaaagaaaaatcaactccctcgatcaacacccctcagcagcagtggccctgcaagtcaagcacccgtggaggatgttcctgggtgaacagcttccttcatgatgaacactgagaccacctgattccaagtttccactctctagatccagtactatgacagggactacagaaatatgagtccaaacactatatgcaactcacattttctatggaccatcaccaagccacaaggaaagggcttcatggaactacttcagcactcacagaaggtatgattcccttcttgggcctatagaagaacttgaacagttcacagaagtccaatttgaacacttgtatgactacattgaagccactggaagaaatgggtcaggtatctctgtgttcttccctgcctcactgttgaaagtgagggagctgatgaacttagtttcccctcaggacctgtccaagtgttggcacgaacctcttcattgtgcatatggaagacactggacccattttctttactcttcactattaatgttgtgtttacattgatgagaacaagagctaatggcataccctgtactgggctgtttgtattgagttgacatgtgaccagcgaaagctgcattcaataaatgaagtacagactgtttcttcctcttctccctcccacccttgtaagaagccacatgacacacttggtctagaaggcaaagtcaaatctgtgcacagcacctcacactttctgttcttatatctcatctttctcttgtctaaaatgtcacctttgtttccctcccaattcaaggaaaattcagattttccatggtgcatctgtctcaccactgtagccagatgttttacattttaagtatgcaaactatgataaacagtatcattcaattgaatagcctgtctttaagggatatcttgtcctgtagagtcccatgatagtccaatcaatgagaccactacatgtggtatgttcaagggtgttcccctaaattaatacaa

SEQ ID NO: 33775 - DNA, 1179 bp, Mus musculus
gtgaaggttctatgtcccagtataggggaatgcctggactaggaagcaggagtgggtgggttggagatcagggggagaggtgagaggatagggaatttttggaggggagactagaaaaggtgataacacttgaaatgtaaataaagggccgggtgtggtggcacacacctttaatcccagcacttgggaggcagaggctggggaatttctgagttcgaggccagcctggtctacagagtgagttccagaattgccaaggctacacagagaaaccaaaaaaataaataaataaataaaaagtaataaagaaaatatctaataaaaatgggaaaaaaaagccctcttcattaattagtaaagagtggggctggagacccatctctgtccttccagagcaccttagtttaataactagtaccaatgtggcagctcacaattgtccataactccagtttttgtggagtctgatgccctgttctggcctcatgagcactgcacacagagagtgtgcaaacactcatgcaagcattacatcagtatacattaaatcaaatatgctttaggaagtaaactaaagaggatgatcttccaggacaatcccaggactgtttactgtgaaccacctttggagtaaatggcttccaagagctcactcacataaagacactttactcaacattgtctctctgagagaacattttaattttaagaaaaaaaaaaaacaccaaaaggaatcgtgacatctacatggaaaagtgaaatatttgtataaaggaaatgtataaaatctgcattaaaaagaagctcattacagaagtggatgctcacagtcatctataagatggaacacagggcccccaatggagaagctagagaaagcacccaaggagctgaaggggtctgcaaccctatatgtggaacaacaatatgaactaaccagtacccccagagctcatatctctagctgcatatgtagcagaagatggcctagtcggccatcactgggaagagaggccccttggcattgcaaactttatatgcctcagtacaggggaatgccagggccaagaagcaggagtggatgggtaggggagcagggtggagggacggtatagggaactttcgggatagcatttgaaatgtatataaagaaaataatctaataataaataaataagt

SEQ ID NO: 33776 - DNA, 1155 bp, Mus musculus
aatcccacaatacccagatgagggatgggaccagttttgcatagccttcagaaatcaacatggccccaggcagcaacccaaggcaggggcatctgcctgtcctttgatggtaacatacccaccatgctgcagggccatggactcatggccctcagtggcagtacagcccaagaccccacccaccatgaccttaggtggcttcgccagctacttacatcagtctgttcttcactactctccagtccccagttccacctctcttcattgtgtacatatccttctgcttctctttctctttcatgtcttcaccacttacttgatcatcaaggcccttgggtttgtggcgttatctcaggagtactgtgccccacctaggcagtgtggcttcaagcagggtttgtctcaggcaggtctgcctgcctaggcctgtgctttgctggactggtagtggactcaagcttgttttccactcaggcccatgacaccagactagtggttgtctctgatttgtcttgggctctctttccacctgggccatgtgacctgaactagggttatctgagggtgatctgactgcccaggccttggcaccgagttagtattcacctcaggctacctcctcacttgggccacatggcaccaggcagggctcttttgttgttgttgttgttgtttgttttttgttttttgtttttgttttttcgagacagggtttctctgtgtagtcctggctgtcctggaactctcactttgtagaccaggctggcctctcatttttttttttaagtaactaaaactaaaatatgtaatcagagtaaaattgtagaaaagctgttttattttttgccaagcccagtgtgaccatgatgggaacagagtgatagggttcctgcccctaagacagcaccactgtgaacctccacaagtatagatagctgctgttggcataaggctgtgtgtgtgtgtgtgtgtgtgtgtatgtgtgtgtgtgtgtgtgtgtgtctctgtgtgtgtgtgtctgtgtctgtgtgtctgtgtctgtgtgttagcaataatgttcatactttctaattccttcaaggtatgtcttccctgtaaacattaatgctccatgataattaagtcagtatctgacagagtctggtgttgagccca

SEQ ID NO: 33777 - DNA, 1194 bp, Mus musculus
tatcctttgagtagaggaaggacactcatttgtttgagttaattttatatccagctactttgctgaagttgtttagcaggtttaggagttctctggtggaaattttggggtcacgtaagtatactatcatatcatctgcaaatggtgatattttgacttcttcctttccaatttgtatccctttgacctccttttgttttctaattgctctggctaggacttccaagtactttattgaataggtaggaagagaatgggcagctttgtctagtccctgattttagtgggaatgcttcaagtttctttccatttagtttgatgttggatacagtttgctctatattgcttttattatgtttaggtatgggccttgaattcctgactttccaagacttttatcttgaatgggtgttggattttatcaaatactttctcagcatctaatgaaatgatcatgttttttttttcctttgagttagtttatgtagtggattatgttgatggatttccatgtattgagccatccctgcacccctgggttgaaggtccctttgatgtgatcttggattaggtttgcaagaattttattgaataattttgcattaatattcatagggtaaattggtctgaagttctttttctgtattgggtctttgtgtggtttgggtatcagagtatttgtagcttcttagaatgaattgggtagagtaccttctgtttctattttgtggaatagtttaaggagtattggtattaggtcttctttgaaggtctgatagaactctgcactaaacccatctggtcctgggctttttttggttgggagactattaatgactctttctatttctttagagaatatgggactgttgagatcgtttatctgatcctgatttaactttggtatgtggcatctgtctagaaaattgtccatttcatccagattttccagttgtgtttagtataaacttttgtagcaggatctgatcattttttgcatttcctctgtttctgtttctatgtctcctttttcatttctgattttgttaatgaggatactgtctctgtgccctctagatagactagctaagggtttatctattttgttgattttcttaaagaaccagctcctagtttggttgtttccacttgattaattttagccctgagtttgattattttctgccatctatt

SEQ ID NO: 33778 - DNA, 1099 bp, Mus musculus
gtatgtatcttaggtataggttgactatcaaatatatatatacattccaacattgcccccccccaccatcaaaagacaatcaagttctctatttcttagagccctttcagggctaatgctcagtgaatgtcttaagtcaagacaccaagccctctgcttgcatagcacattcctctatggaattctcactcctggaattgggagaaaggccacaccgtggcctggagattacactcgagacctcttcctctctgctgtggcttttgcagaccacaagggtgccagtttctcatctgttaccttttctcattgacagtagccgaaatgagcccagagctgccctctactatgctgaaaataccttgtagctgcacagctttctattgtctcttctgtcacaaaattaattcatttattcagtaaacatgtatggagttcctgtcatatgccgagtactcttctagacctcacggtttactgcagctaactacagatgacccaactccctactttctggagctggcctttgttaggaggtctgagaggaggggcgtggtatgcaatggtatgacaggacttgtcatctgtccgtggtgaccttcgcatttacagtggtaaagaacaatgagcatttggacccaaagcctaaaattctaacacccagaccacccagttagaatcagagtgaggagcttgtggtctgaagtcacactttggggtactatccgggctcaactctattcaatagtgtctccagtgagatttgagtccaaactctacccagggaccacctcataggagtatggtttcctatgagtacacaccacacctaaagcattcaccacagttggtatccacattgtcactcttagtgaagctgggcaaaccacttttcctggctcttgagtgtccccctgtataaaagaactgctggtgacagctctccatatttctttttctgattgaatgagcatcacacctaggctagttatgcctttgctctgtgtagtctgacccactaaaataaggctatgcatatttaagtaagtgtgtatgtgtatgcatgcactcacaatgacacacatattgtgtatataca

SEQ ID NO: 33779 - DNA, 1099 bp, Mus musculus
ctatgttctttcacactcacaggaacacatcactctttccaaaagcctgaagtctataagtgggaacccagagtacagagccatggttgagattgtttatgacttctctaaaagttttcattgtgtggagtggtatatactccagactgggtaggctgcttatacccagtctctgggagtgaagataagaacttatctgtatagattttacaacagaggtcttcctgagtgtctgtataggctgctcagtggttaagagtattcattcaagtttggtttccagtacctttgtaaagcatctcacagcagtctgtagctctagcttcaggaaatacaatttcctctctgtcctctgaagacacctctacacacacacacacacacccctacatataattaaaactaactttacaatatctagaaagtgttgtatatgtgccctacatgcttaaaggcccacgcaagatattgttggttatattattataagcccacttgcttttttttatttttaatctagtgataaccctgaaacttaatcatctcacttatctgcccacttactctgacctctttccatctttagggatcctgaactcactgggaaccccatatattatatatgttagttatttgagaattttatatgtgttgtgatcatattcattcctcttctcaaactcttcccagatctaccctatctactcaactttttcaaaaatttatttatttatttatttatttatttattttacactccacagtttatttccctcccagtctaccctctgactgttctacatcccataacttttccctctcccccaccctcccactcacccaccagacctgtaaacttctgggacctccagtctcttacgtgttgggtacatcttctcagattgaacccagacccagcagtccactgctgtatatgtgttgggggcctagtatatcagctggtgtatgctgactggttggtggtccagtgtctgagagatctcaggggtccaggttatttgggactgcttgtcttcctacagggtcgcccttctcttgatctttgacaaagccaaaaatatacaatggaataaagaaa

SEQ ID NO: 33780 - DNA, 1196 bp, Mus musculus
ccaacaataaaattaaaccaaggatatataacaatgttatagaaaagtttgtaaagtagtatttctcttccttccccagtagaaaagagtaaatgtcatttaagctttgtattacatgacttactttccctctgtgtcatacagaagtcactgatgtataaggtcaagtttactgccaggattcaaggccacaatgtcttgttccctccttcccagacctggttctcactgttaattttttattattattattattattattattattattattattattattattacagctgtttggtcttatgtgcctaaactacttggtgaagatttgaaagtgactgcaggcttttccatggatgtcacatagatgtttttatttcagttattgattgcatcaatcatgagaatttctcattttctcctagggaaaaaaaaaagagttattttctcatttcaaattctccctaactaacataaattataatataaggtttgcattctttatgttctcttaaggaaattttatttatagcttattgttttggatagactttactgatgttcaccttgaaaggacatgtgcctacaggcattttgagcatggggagtagcatgggggtgggagatgttaaaagttctgaagttatctaaataaatattctgcctctgtatttttctgaacacaaaatgcacagcagccaccattcctagaaacatatgccaattgtagcttacattttgctgaatttgagaagctggtatggccgacaatcagatgctcagaatgaggactttaaaaatgtctttgtgacaggttggacacacttaaaccttggtcgagtttcagagaggcgcaacttggtctttcatcataaatttgaaggcaaaaagatacatggaaatctctaggtagtatgaattgttaagtctttctgttgagttacagatactgaaagggaaaaaaaaaatcttagatgtctttttattcccttaacaaatacttccttgcttttgaagcagttgaagtgtagtgcactggagcttaaaatgtcttgggtatagagtaaaaagacttggtttaaattctatgcccttgcatgatccagcgaaagaaactttctctctgcaaatagtcactcagtgtcttgggaggtgcatgtctcaatgttgagccaagtacatatttgcaggtgctg

SEQ ID NO: 33781 - DNA, 1124 bp, Mus musculus
gttacagaatgcacagcttatcctgtgctggcctcagggcatggtatcagcatcctagtagaaacttcccggtttttttttttttgttttgtttttgttttttttgtttttcttgaacagcagaggaattgagtcctggatgctctgcttagctgtgtgagtttggataagattctcaacttctctgatcctgagcagaatggggatcactaactacagtttgaacatgttcagtttgtgttcactgctcagagtaaagaagcacttacaatagcctattgagggtttgatgtacattaaacattcataaaactgcaagactgtagattccggaacattccagagcagaaggtgctttattattcatggtttctagacagagagattgaggtacatgcggctaagttcctcctccatactgccacagcagtaggaagctgagctaggatttgagccaagaggaacttgactttaggctttcctgtgtatggtggcagaaccatttggggtttccccaagatttctcagctaaagggcatgtttctatcaagaagactccctattgcagttaatattgatggtcaacccagtggaattttgaatcacctaggacataaacatctgagcatgcctgtgagggattactatgattagcttaattgcattgcaaagacccatcctgagtgcaggcagaggcattctccagttggcatcctgaactgattaaagggtaggaagtgagctgagcatttgtttacatgtcattctgcatcctgactatagacacagccacctccacctcatgtacttatcaccatgctttccttgccactccctggggctttgtgtgggtgaggttccctagctgagacccagatattactaccttctacatgctagcttctcagccaggtccccaggtagatatgcatctgttagtgcctttccagcctagtgttccctttgacactgttgagaaaagtcaacacaaataagccctaccatgtgactcttttgtccaggaagagctcatgctcacttatctaggcgtgcctccatggagtgctggaggagttaaaaaaagaagtactcgggctgatccaagtgctttttgtggacagggt

SEQ ID NO: 33782 - DNA, 1117 bp, Mus musculus
ttccttaacaagacaagccttcattagaatcacttttagtgactttatctctacagcttctctgatagtgtggtaaggtcacaccaatattagaattcatgggaacatcccataagtgtgtcaaattaaacctagagacttctgatcttgtccttgagatactcagttggagaggttgggaaaaatgtgctgagtgaagaagcacaatagcagataacaattgagtcacaattgagtagaaaggcaatggcattgagtgttgagctgaagatggtaatgggaactgcacactggagctggctttagcctttaaaactcagtgaaagaggcaatatttacatcagacccttggatatgaagttcttaaaccattattggaagggcttatggaaggtcaggccatgtaaagttgacaaggcaaatacctaatttgaggtttgagaagaaaccagtgagagtctattagcagaagcattgcaaataaaatgaagaaaggaatacactctgctttgacccaaatacctcaccgtaggctccgtcttcagatactggcagaaaattcaggttctgacacatgaacttctgtgaacaatgctccttacctctgacttatgaacttctggaggacccactcaattgtaacagcatgcgttgtctaaagatccctggctggcattgttgccataggatagaggccaacagatgcttctgtaaacttttccagtcttaatcattggctcaacttaagcttggcattgatgttgtagatatttaacattactcatcataaaggcagcctacttggaacaaagtacacttgtgacatagccacaatctaaaaatagcactttctatttgggctgtgctgggggacaggggtttggtgacctggaacctctcttattggaagtttgtttaaatggacccagggttatagagcaaacaatcttttctcggctttggataataacactgagtgtaatacagacaattctgttcttcgtgagtgtctcctatgtcagctacagagaggtgaaagcagactgctcagagttcttccatctgggctgtgtgccacaattggagcctgctctgtgctccaccctctaccctcatg

SEQ ID NO: 33783 - DNA, 1172 bp, Mus musculus
aaagtgatttattgtgggtctctgtttaatggctgctcctttatggtatttgaaattattttatgaatacaatcctgatggacagttttaggagactcatttgttgttaggtaatgttggggactttgagccataaaatagaatgtctcatttgatagccaactagacttacctgccatgaagcccagtatgggatttgtacagaaagaaaagcatggcttatttaaatgtttgagttcaccaactaagtatatggaacaaatcacttggtaaactcactgttcccaggattctgattttcttgttatcttaactttggctttttttttttttttttttttttttttacttaaatgtgtgtgtgtgtgtggggggtgtacgcgagtgtgcacacacgcactcacgtgctgacagttctttcactgccacagtactatcagttgttttgcggttgtgtgtccccccacccccatccccaagtacctttatctcttatcaagttctcagaagagagtttgttctaggaatggagtgcaatggaggcgtttactctgcagaggtaattttggaattgcaggtaatcacaggccccggtagaatggaaagtgcagtctcacccataatttgagcctctcttgccacattatgggctttgctttggacaggcagcagacatggatggaaatggagtcctgactactggcagagcttttgcccttaacagtgccttttctgaattaccaaggccaaatggaaagaaagggcttggctaatctttccagctctccatggtagctctagagtttaggaggatttgcatagcacatggtcttgtgcgagtttctttctttgtgtttttttgtttgtttgtttaattcataaaggcatctggtcttgagtgttagtctgtagttagattgctattgcttcagatgcattgatgtatatgaataaggttaacatgtgtggctgactagaaggcatcattgcctccttcctttagtttccagaatagttgtgtggatccttaataagccaaaagtatgtaccagttttgctgacagatacagattctcatctgggagaggcatttattgttctttggaaatgcaggtggaaggataaggggtggatttttttctacctctactgtggtgactggttcttagtag

SEQ ID NO: 33784 - DNA, 1133 bp, Mus musculus
tggcccaggtctacccatagcaactagctcttatgaaagacttacaggggatgaaggaagagtctaagagactggccattccagcatactggcactcaaaggacaattttcaccaagatattggtcctgctggagtcttaaaagcttgatttagcatgtagacttagactttgttcagaacctgcaaaattctgcaagttgtttcagtacctggaaccccagagtctgttagattgcatctgtgaccttttactcataagtatagtgcatatgtaggtagtttaaggagaatggctactgtggtctaggaaaaatgatcaacacagagtctcatccttctcttagggctttaaggattgatcttcataggtgcagtaggaccaaggggtaagagactgaaggaagaaaatatttagggctgtggtcctaaggcatgaagggaggcttataaatttggggaaatccctttggtaggggtggcagaagaagttgaggcagagtattggattctgtaaggtcagtgaggcaggaacaatgacaatttggggatgtggctttgctttatgtgctgggcactgtgatgttgatatctggaaatcagtaggtagatttcagtagagttaactgttcttgcttttagtgtagcaagtagtgatttgattgattctgttttttgtttttgtttttgattttttttaatggcaaatgctttgctctgtgccgaagtcataagggttcttcatttgtctcattggtgatcagctgtagcaggcagccattcactcctgcaagttgtgtacaactgtgcaggtatgttcaaaggatgactttgaagtttctacattagtgggagtaaggaagacagcagtgtggaaaccccagtatacattgtgtatgaatagtcagtggaatggcaactggaaaaggagaatttctagaaaaggaaagcttggagtcagaaagttagtgccttgactgggccccttactagcaattgtgcctcagtctcatgctctatgaaatcaaaatggggcaagaatggttgttgggcaagttccaacagaggtagttgattatctcatattactattaaacatagacagatgttttggtgtccatgtttttctccatag

SEQ ID NO: 33785 - DNA, 1148 bp, Mus musculus
gccgtgaccttccaaggagcatctatcccggccccgcgcccccggtcccgcgccccaggcccgggcgaggccctcttcagcgcccgcttctcgcggagccgcgggcgggcggcgcaggcccggggggtgggggggagggtcaccgcaagcagctacggtcggtcccagtgctcgttcgccacgctggtctctcggtccggctgagctgcctccagcctcctgcctcctgcctcgcctcttctccgtggctggggctgccggtgtacttgcctggccgggccggttgcgggcaggccctgccctgaaggggttaagcggtcaggggcgcggaaggtgaagccggcagagctgcggctccccgtttcttcctggcgctggtttcccggatccaacccagggcggcccccaggcccttgcccatgcgaggcgcccagggcttggaagagtccttctggcgtagagcagctctcggcagccgcctcggaggaggagaaagaagggagagtgctcagtcccggcaaggcggacctttcctattgatatttggagcccaaggctgtcccgaagtctgtgcttggcaccgtcggtcggtcgggttagaacagctccagctgggatctccaccaggacccactgcacttagtaggcgtcagtggcaccacgcggttcagctctttcggagtgtacctctgcctggatgtagtcaaggccaaggtaagagccctgatgtgcgagagaaccatcgtgggaacgctttagtgagcaatgctggacaacttatccaaacctgtggctggtacccggtgtgcttaggatgctagtaaaaaggatgggcacaccgtttctgacttggctttgagtcccggaaaagcaggaggtggaagaccccaatctctagtgtccccaggatctgtctcagggcctgacatgctcttaggtgtacaagatattgataggcaagagcgagttggtgtgtgtgtgtagggggcaggttcttagtaacacctggaggtattgttttcccgccaccctgggacccttcctgcttttcttcgacgttcacctgccttttatgatgggatgcccagagaactttccaataggttgaaaagaggccgggttgggtgtatgcatccacattttccaaa

SEQ ID NO: 33786 - DNA, 1191 bp, Mus musculus
tttcatgtataaaccactgggtcatatagctaatgagagtagaactaaagccacatgcctggctctcatccaccaataaaatccattctgagtttgtaacatttctttttccactctctgatatataaaggtcattttggatttttcttcttgcataagaaaatacaggagtgacagaggcagatggtttgctgggctccccaggcaggagtaatcttgcttctctctgggtttccatgggcctttgtatatctctgtgttgaagctctaagcatattgtcttacagctggagctgggattcacactaaagtcagagtgtatcatcctccctctgcatgttccagggttacactgggccattgtgatgtatctaaacagaaaagtgtagcttagggggacttgctggctagtgaagctctgaccactgagagaagaatgggaccatagagagagtgtatacagaactcagagaaggcactagagttatcatgccaagtttttaactccaggtttggtgttggtgctgtgtgatgtgagatacttttcaggacctctctgtacgctcattttctcatctgtaaaaaaggtgaaagcaggatcttcctgtacttgctagttttatgtcaacttgacacagctggagttaccacagagaaaggagctttagttgaggaaatgcctccatgagatccaactgtaaggcattttctcaaatagagatcaaggggaaaggccccttatgggtagcaggtagtctataagaggctgagcaagccaggagaagcaaaccagtaaagaacatccctccatggcctctgcatcagctcctgcttcctgacctgtttgagttccagtcctgacttctttggtgataaacagcagtatggaactgtaagctgaataaaccctttcctccccaaacttgcttcttggtcatgatgtttgtgcaggaatagaaaccctaactaagacaaattggtaacagcatagtggggtattcctgtgacaacctgacgatgttttggggaggactgtggaaggacttttgaactttaggcttgaagatccattccttgttaagagctctgtcagatgttgtgtaggagcatggaagataatgttgagaacagtgcagaagatggaggtctggcttgtgaaatttcagagggaaaattaaagactcttttcag

SEQ ID NO: 33787 - DNA, 1109 bp, Mus musculus
atcttagggtttcattgctgtgaagagacactatgaccaaggcaaacaattggggctggcttacagtttcagaggtttattccattattaacatatcagaaagcatggcagctggcagacatagtgttggaggagccaagggtcctacatcttgacctaaaagcagagaggaggagactgtcttgcgcgtttcgtggcgcttgagcactagaagacttcaaggcctgcctacacagtgacacacttcctccagcaaggccacacctctttactagtactacttccatgggccaagcatattcaaaccaccacatacgggaacaagaattatcattcttactttgaagaatagctttttaaaataaaagtaactcttttccacccagatgattcttgatagcttgctgttttccattgccaggcaagttagaggaagtggctagccactggacattactgtactgagccagattttccgctgtatgacctacctacatgtaaccttagagtattttaacagtactgagacttgacccttggcactgaagaatgggtgcttgtagtcctgctgacttttaagatatcagctcaccagtcttgaagctactaagattcaaagttactatttgcccactctccaccttctcccagctccttgctccctttctgtttcctcttttgcctttcttaattctgtgtgggtgatctgttgcagatctggaagcaaaaggctcagtatctgcagcacaaacagaacaaagctgaagccacaactgtgaagagaaaagcatccagcgcagaaggttccatgaaagtcagaggtagcagacacttttctctactgctttgctaggaggccgggagagcagacagcttataatagaagtaggccttgatacctacgtattactgaatatgacaggctacataaaagtagttcaaatttagaaactgtaagaagtcacagacttcgctaaaaagatccagaaagtaagccagggatcaggccttctgcctccatgtaatgcaacaagcaggagaatgcaagttcaagccttagcaacatagcagatgtagtagacaagtctggactacactgagactacaac

SEQ ID NO: 33788 - DNA, 6918 bp, Mus musculus
tttctacccctaccttaatgagcactgcccagcactcctcatgaggtgaatagcactattacatactgtccacagaccatgacactgtgtatcagctgcatgatatgatttcagtgaaactagaaaacatgccgtttttcacaacactactctggagagagcagtccagcttagcccttgaggagccgcagctgaaagcagctcgtgtgttttgtccacttgttcccatctctctcctgagcatgccttgtctcggggactgcagtgaggtgtgccacagctgagtcctttctccttatttacagtcaaacacgctggacaacattgcatacattatgcctggactgtgacttccaagacgcctgggacagaagactgtctaccccttcgctagtctatgtatagatgactgttccagaccctccactgacctctgggtgtaggttttaaatttttataatctatatatacgtatataatgtacagtatatacataggatataactactttgcttttaataattttatgaaatggcaaaggtttagctaaaaggaaactttagcatgaatgtgggcttggaattatttttttgtgaaaaaaaaatctgccttaaaaaaaatcagtgtaatttggggactaggggcttattctgggtgccatgtatatctcctcatagactgctaaaatgtgattttttttttttttccaagcttgggtttacctccagacccatcactgaccatttgccttacctgtcttataatcagaaatgtagtaaagatcttgggaggaggccagctgactacaaacttttggacatggagtaacctgggtggggaggtggagcttaggtggactgggtaggggactcattccaattcctactaaagagatacctgtgtctccagttttattgtaaccacggttccacagagtcatcggtaccatctatagcctcagctatgtgattcttggcagcagagaaataaataccttgcagaaaccaaagctgttggtgccacctgttgaacctgcttgtctggccagcaaggcttggtgtataaaaaccaaagctgccatcttccactagcagcattggttgcccaacaaatcctgaggattctgctgcttagctgtttggtggttcttggttcagctctggttcccctggtgggtacattgtgctctgcattccacacagagctggatcacaaagaagttcttggttctcaggagggttatctatatgtgcgtgtgagtgtatattttaattatgtgtatttaactctttagaatttcttagattttaatttatcctgtaaatttctgtatatataatttaataacaagcctccaccagcaggagcatgtggagcatacagatttgtcatttcttaatgtctgtctaaaagctccaagacgtccatatgttaaggtgttgtgactcagaaaggaacttcatggccctcaataatgttaggaaagtgaaatagaaaggaatgtcaccattcctaatttcccttattcccaaagacccagacctgcttccccattagagagaagatagctgagtgctccagggttgcttgggaactcggtgagagattcccttccctgccaaaaccaagctgagttaataaccatgctttcttctaatggcctggatggaacgaggcagcatcacagtaaacctttggggaccatgtagccagctggcatcctagggaactccttcccatagcccgactgctgtcacagctaagcttctcacaggactgtgtcagctcagagcagttttgagatttaatctgagaaatagggaaaggaacagaaatatgtgggaactgaaatcaagcagagcagaaatttccatttgagttaacatgtcagaacctcatttgaccctgcagaagtttcctgtgagaaatggtatcaaggagaggccagggaagacatgtgtggtagaggaagcagccagtcctccattgcccttgctacagacagtagtgaactcctaaggagaaccggctttttcgggtttgttttcctctgaagcctagccctgttgtatttgtattaaagatttgtacacatttgtataataatctgtaccttgtggtatttggtactattagaggaaaaattttggattcaggccttcttgctgtttttatatcattgttttattttgtttttttaaataaatcctagtggtttgatccaaatcctattacagttgtataaagaaacaatattttgtacttatattaaagatctcatttttaatatttatagtccagtcttagctgtcttttccctaattgggctaatcgtagtcggtataactctactctaccctgacatttctctataagggagtgggggctgaagagatggttcactggtgaagaatatttcctgcccttgataaggacccaagttagatcccaacactcatccaattgaatgtaactccagtttcagaggatcagtcaccctctgtagcctccttaggcaccagcacacaagtgcatatacccacacagaggtacacacacacacacaaacacaaaatttaaaaattttaaaaccaaatcctgaaataaaggtcaagttaccatgttcctatctatcctgggccatgcagcccttgggtctcaggttgaacacaccttatatgtaaaggctctcaaatatcatttgcatgtattataaaaggagagaatatgatagttgtggcatagcaaatgaaaccatttaaaatattgctattggcctaaatcaaaaagtatccatcaatcttttgtcagagttgcatgaaaattctatgccaaaaaacagacagttcatatcccaggagctttccagagtcttgtctattttaaataaaaaaaaaatgtgatgtcacctccttgtctctgagtcaacagccacatggcctgaagtgaatatgtgctaatactgtgaacattgaaatatggaaatttgacctttcatggttaaggaaaaagttaatggaaaaacaaaatgttaaaagtcataagtagcaaaaaaaaaataataataataataaggctgcatgctatgatgcacatacttctccaattccaacaccccagggatctgagtttgaggccagacaagggatattgtcaaaaaaaaagggggggtgggggggactgcagcaccgggtttcagtgtggcaaagtcctaggtatgagccctgccaaaatggaggaggaagtgtgatggcccacagtacttgtttaatctcagattaaatgtggtgagagaatcgattcctccacgttttcttctgacctctctgtatgcaccatggaacacacacatatagagttaaaaaaaaatttaaaagtttaaaacataatgccttacaaagatacagcaaggaggaagcaaccattacggaatgccttatgagtgattttcatgtcacctcaatactctgaaagcattacattatggatatttacagctgaggggaacagataaggaaaaagcacttttccggtttgccaggtgagagccaaggcagatgaggtggcttatgaggtgaaagcatttgccacaggacaggcagttcattctctgtctcaagagagcaaaaacccaggcccttgcctcctctggctcttggagcggggagacatcaaatggaaatttcgagtccgacttgggcaaggaggctgtcatcctcagggcttggtccccaggactaaaggctaagacactaatactaatacctgtctgagtatgcgtaacctgacccaggtctttccctggccagagacccagtttcaggatgtcaagacttccaggctccacagtggcgcgcactgaagcttcaggggcgtggcttagaagccggccctcccaggccccgccctggtgtggcgtcagccacggcccaggggcagcctagtagggggcggggcctcgtggctgcgctccagagcccccgcctgccggcaccaccccgcgggctggccaacgggtcacgtggcgggtcggcggcgccggcggttgctgtcacctgattctgggagctggtggcagcggtagccgcggcaatggactttctcctgggaaatccgttcagctctccggtgggacaacggatcggtgagtccccggagccgcgcgcagtcccgcccctgtgtgccgctctggccttggccctgggacctgtcggagtccgcagtctggcagacaggagggaggctaggcggtgaggctggcgcggcgctctgggctccgcccaccctatgacccacctgattgacaagaacacgggccaatcggaagtcttatatggggattgatgcttgatgtagccaataggcagtggaaggaggcggtcctgggcggatgtggttcagccaatgtgtgcgtgctggggtccgagtagagggagaaagtttgggttaaagggactgctgtgatgagaaggcgttgggccgcgccaccaccgggcgcgcgcagactaagagcccctcccgggctggcggcgtcttgatcattcgccgcgtcaccgactcttcacattccgagacgccggggtgtctaggttcggccgcgcctctgtccccatggtcgggagtctcgggtttatgtgacgtcgcccccgtgatggtcctcgcccatagttaaagggtcatggcccagccttcctggacttgtttgatcattaaatgcattaataagatagcactgaggatgtttcctggcacatggctaacgcctgtcattgtcaacgtgttaccacctactggggctggagcccatgggaaggtgccggctcccagcacctactctcgggcaaaggccaggcggcgacgtttccccaggaatgggtggtctgggcgtgacatccatacccccttacctgaagggtcccgacggcattgtgaaattgggaaggccgaatctgaaagctaaggcttcccctgaaactgttaacccagctctgtgttgtaaccaacactgcagctgttagtagctcttttgaggttctcatcagttctctgcaagggagctctgatgcctgaagcccaggtgcttcaccataaatcgttgtttgagacctggaaagagaaggcagtcttcttcgcagatttcctatgtaaaacaggcaaattagtctggccttcaaagccagcctcaaagtcctgagactttttggataaagtcttttgggttcagtcttttaaactgcctgtcagttcaaagctcagcatctctcctgccctgaaagttgcctgccttgggcaagaaatacttctgattaagagtactgctacatcagtacctcagaacactgactaaatctcactgctggaccctttctgccttggggttcatgtcagacctatccaagactcagatgggcaggtgtagggttcccagttctctttgcaactggctgggaaaccacacgttttgaaatttcccaccagaagcagtggttcacatctgtaatcctatacccaggagactaagacaggaggattgacacaaagtcccaggctagctgattctgaaattagttgcagggtaacataagctgcagagtaagacccaaaaccaagtgaattgagacaagatggcaaagctgtaaaagagccaggtatggtggcacatgcctataatcccagcattcaggaagctgacacaggatgattttgaactcaagtccagcctgggctacagagaccctaacttaaagaacaacaacagtatcggtgttacatactcttccgtgtatagagatagaagcactggagattgagtctgcatttgtttttgagacagggtctcgcagtgttgaccaggttggtcagaaacttcaggactcaagaagtcgtctcccatcagcttccaagtagagaagacctgactggctgtgatgattaatgacaagcaggttttagctgcttgtattcttataatccaagcccctctttgctgcaggagtaaagtggtgtcttcccaggtctgctgacttcctgccctgagagtggagtctcatagaattggcatcctagaggatagcagtcattaagtggtgttaatcagagcccagtgtcactggcctcacaattcacaaacaccttgataattgctggtctcacagtctggagtgctgccatgccacatgctgccatgaggagttgggctcattcctggaagcactgggcaccatcacctcctccctaaggccatttcccaactcctcatccaatttctgctcttttgttctgtcctcaatctattaccagtaggcacaaaacagctctaacctcaagagaaatcagagatagttcatcctatccctggatcaaatatgaattgccgtgacccaagaacacagattcacatcacaccgaataagagatgatttcctgtttttgtagccacagagaacaaaagcaagctataaatcagacactcaggttacagcaaagcatgaaaatctatgctacatgtctcaggtgctagctgatgacatttctaactcttgggttggtggacactagttttctaagttacctggtaagtcacagaaatgttaggtcagacacagagatgagcaataagcagttactaaatgatctaaagcaaggtaatttgtctcaagatctgcagcattccaactctccacaatcacacggttgtaatcaaccttctaacatctttaacacaggtatagctctcctgggaacttcagtttgtaaacttgaactctcttgcttgagggaagttataagaaagctggtccctcggtgagtgactgtgcagtgagagggtatggaaagcagctcctgctctctagtattccttttccacctccatcacactgatagcatcactgtccctgcaagtctgtcttcagcttg

SEQ ID NO: 33789 - DNA, 6918 bp, Mus musculus; identical to SEQ ID NO: 33788

SEQ ID NO: 33790 - DNA, 1229 bp, Mus musculus
gcagatcctggccttggactggaactgtagcagacatgacaccgagtgtcctgtgctctgtgtgactttaaagtcatccaccccgggctgtgtgagtctgaccttgtctttttctccttcagatactgcccctgcagagacaccccgagggaaaccccagatcagcactagctcatcccagacaccgctcctccagtgggtcctcactctcagcttcctgttggcaacagtggcagtgggaatttatgccatgtaaatgcaatactggcccccaggggctgtgaactctgtccaatgtggccttctctctgtaagggagaatcttgcctggctctcttctcttgggcctctaagaaagcttttggggtccctagcccactccctgtgtttcctttctctctggaatggagggagatacctgacacagttccctcaccaaaagcacatccagccagtggcctgaactttgaaaccagcagccccaaatcctgcagcagagccccaaaactggcctgtaaaagcagctgttctgagcccagtgcccatggttgtaagcatccatgttgactgaccacgactgctgtcccccagtgccatggccactttgatatccgtttccagacatttctgtctcgtatttctgtcttgttttttattatttccccagttctaccagagtaatggtattttgttgttttgttttgtcttgtttttcctaacaaagtggggctatcttttgaggggtgggtgggaaagaattatttaatagttgtaaccttggtctctaacttctgtgtgaaataataaatggcattatctaacagtcactagaagtgcattcatgtctatgctgtctatgagcagggccctgctcatcttgtctcttcagtgtctggcaggaagagggcaggtgaaggtagcattggtagctgccatggttggctgtgcctgagatttggaagtgagctttaagcagttgggcaaagcagttgggcagattttccagactgtgtttgtgtgtacacagatgtgtgtgtgtgtgtgtgtgtgtgtgtgcatgtgaaggccagagatcaacctcaggtgtgtttatgaactgtaggatctcactatgcaactctgttggaggaactccctatgtagaccagctggccttgagctacaggtatcacaggcctgcctctgccttcatgccaagattacatatgaaagctaccacacctggccaa

SEQ ID NO: 33791 - DNA, 1180 bp, Mus musculus
ctcagttcccttttttttaatcccctaacctcagcaagcatgctgtttggctgctctactttcatccccagggctgaccacgtcttacctccctgctctgagtcccactctttctcctggatttggattttcaagcccctctgccacttggtcccaccctaccttctccattcctcagcaactcaagtgaaccatgctgttttgatcaagcaattgtgttggttctctactctgtctgcattatgagagactttccagtggtccccaagggcactgtgatctggcctgattgtatggaaccttcttttcctctctggatctttgagatttgaaagactgatatagtcctgtactcttaactttcctgagtaagactgtgtgcgtcctcctggtgctgagagctgttggtgtgtgtatgttgacagaggtcagggtgttcctgatctaggtctaggcccagcagtaggctggaggagatgccccttgctcatgtatgcacctgttccctcctaggccgaagctttgctgggtctgtcagcccacaggaagaggaggaatttcgtcgcctggctgccctccccaacatatatgagctcatctccaagagcatttccccctccatctttgggggcatggatatgaagaaggccattgcctgcctgctttttgggggttcccggaagaggtaaggggtctgggaggaaggtgctgatgacaaggctgctgcaggaggatatctgtgtgatgaggaccaggtgtgttcttccatgtctcccaggtccctcagcctgctggccctggggagcacagtgggaaactctttggtctaatgtgagagatgccaccttgaaccaaagtttctgaatgagacctgtgaaatacctgacacttagaaattgtcatatgtccttttcctcttcctctttccttccttccttcctttctggtttttttttcttttttttttttttcttttagatttatttattatatcttaagtacactgtagctgacttcagatacaccagatttcattacaggtggttgttagtcaccatgtgtttgctgggatttgaactcaggacctttggaagagcaactgctgagccatctctccagcccctcctcttcctttttctttttccttacctttccttctctctctgtctctctctctcct

SEQ ID NO: 33792 - DNA, 1577 bp, Mus musculus
ggctggagaaagcttgacttctagggtcacagggacttaagtcctagctcacttaattgctatatgacccaaacaagtgacagcctgtgcctatttcttcctctgtaaaatgagattattcctaatactaggtgcataaagtcgatatatgtacttacctagtacacaagaggcatcatcacatacacacttttctgaagtcaagggagaatggaggtggatattttttgtctgtttaaaattgtctatgatccggtgatgcatcaggtcccttgggtcataatgatatacctgtgcatctgtcttgtgctccctcctacagaaatatccagagcacgctatccgaaaggtgctgcagctcatgctacgcaggggtgagatccaacaccgtatgcagcgcaaggtgctctatcgcctcaagtgagcccattgcccatcaaccctcaagcctgaaatgctgccaccaccctatctcccagtcagtgctccaaacctccttttgccctgcctctccacctcagactgcagtctgcagcacatctgcagcccctggaaatgtactttggtctgttggcctcatactgtgtttgagtgtctgaggactctctgctctgggtgtctatcccctgtcatgccttctcaacaagatgagtctggagcaggaacaggccctggaatgtagatgggtctgtatattggctcccgggccactcactgccaagcttctttgtatgtacagaggtaataaagcaattgagtccctggctgctaaggtcagtggacccagtatgatagtagtgctgtgtgaatacaaggttgactctttcagctttcttcagcagcacctaatgtgagaactggatcattcattgagttgtctgcctcagtttcctaatctgcaaacaaatttgatgaagctgagctcagtgagtgagtggctgtcagtgaaaacccaagtagactccaatgtagaatgtctccagggctttatttatagcaagtgggcctcagtggtgtctggggaaggaaccagacgtcagggtttatcagttaaggagctatgagtacctgagcaagcttcagcacagtaggaggtattagtgacaacattgttaaaagaagacacccaacacctcgtattaccaaaatgccgaaaattatgattttagaaatctataatttataaaattaaggaaaagtcagtgaaatatttaagtatttgttatgtaaagtacatttataaatgggaagctagtgctgaaaacactgcagtcaccaacagtaaagttactgtaggaggaaggcttgagagaacaggaagtacatacacaggcctttctcgtagatggcgtcctgtgctgaaatggctgttgcttgaggtgtttgcttttttttttttttttttttagttttttgagacagggtttctctgtgtagccctggctgcctggaactcactttgtagaccaggctggcctcgaactcagaaatccgcctgcctctgccttctgagtactgggattaaaagtgtgggccaccacgcctggctgaagtgtttgcttcttactccctcctgg

SEQ ID NO: 33793 - DNA, 1195 bp, Mus musculus
caaggacactagccaacagcatgaggcttgatgtggttctctcattattgttcttatccagaactattaagagttcctgtcaatcccccacagccaaggtcgttcacaatgcaaactgctccattgtcagtgagctcatcttgttacagaagaaaagagtaccccggtgtggagacttctattcatatattagttgctgggttatcccaacaaatattcagatgtgtgtgtgtgtgtgtgtgtgtgtgtgtgtgtgtgtgtgtatgcacatgagcaagctatatgcataggtgctatgagattgcttatcttcatttttaatttattactgattcattttgcattttttaaacacttaacttctgctgcaaggtcattggtaaataaacacttcatcgtttatgttcctcagagatttattatggcatatatatatatatatagccatacactacatgacagcctttctgtcaatatgcctgattatatgggtggagacggtgccataagatgatatcacatagtggtgtttcggctgtctctgtttttatgcatgtacacccatgtttgcatgacaaggaaatcccctaaggatgagcttctcagaatgcttcccctgtggttaacgaacacatgatttattttaaaaacactataataaaagctgcatgtctatctttctgggtgttgatgtggaatatagtaattatccaattatttcatgagaaagcaagtttgtgtgcacaacatgttgacccactaaaatctcatggatatggtcttatgcatcactaacccaaggagaatctcagacttcacatcacacatttatcttagagtacacttctccaataaacacagctgcagtggtactaggagacatgacgtgtggatgctgtgtgatttgctgactaaaaccaccgatacatagcattttactgtgttttctaccttcaaattgctgacagtttggtggaagagagaaaaaaacagactacacttcaaggttttgatattacaatgagtcttggcagtagctgaggatgccacttgtaaggtgacagccatggtcaggtacacacccgttgttgtacccaacatggaccagatggactttaaattcattaaataattcattcctggctttaaattcattaaataattcattattatcatttcttgtcagaaaatatga

SEQ ID NO: 33794 - DNA, 1300 bp, Mus musculus
aggggagactggaaacatagctcagagagcacaattctcccattccagaaaatcggattttctcctctgggggaaaaaaaaaattccatgcaccctccacatctgtcaaagatcagaagtcacctctggccttggacagggtccttcactcctggagctggtcacaggaacagcagtcatggcaggaggtactggggcaatccatctaagcatgagtcggtcagaatggagacccacagatcactagaaggtttttagatttttttaaaggtaggttttaaaagtgaaaattttatacataaacagttttggaggaaaaaaaccacaaaaacactatgaatcacataagcaagacagtggcactaaaattttaattcattaatctgtccaatactgatgcaatttatggcttttttcttgccccaaatcacagacatgtgtatctctggggaacttcagtatgattgcactaaatgatctttgaatagaggccaaattaatctttcaaacatgatgatgactctcatcagtactcagtgatcatgaattcccaaaacctaaaaggtgaagcagaaggctgggacaaagcccccgtggggtcagcagtttcccacagggttcaccacgcaggcaacattaccttgtctttcaaaagacgcctgccttctgcaaggggagacccagggacgctgaactcagagggagggggctttcttacatcatttgcaatctggaggatttaatttataggtctttaaacacagtcagcttacatgcacagcaatatgaaaaccacactttgaaggccatgaacacacacagcatgcagacgagatgtttctgggggaaaggagctgagttaactctaagaaactggaattccaccttagccaggattgaagtggagaaggtctgcattagctttttgtattaatgaagttactggctcctcatgtgtctccaggtaactctgcttaactaaacagcaaagccatattctctaaaattcactgttgaatgcctgtcccaggccaaactgtctgtctgctcttatttttgtaccatattgctcttaaaaaaatctcggtttggtacaattcataattcaccaaaacttcttcatataattaaaaacactaaattagtttaaaatgaagcaatttatatctttatgcaaaaacatgtctgtctttgcaaaggactgtaagcagattacaataaatcctttactttaatcacctgttgtcctggaactggttcattcggatgcctagaggatgcctagggggacaccggggac

SEQ ID NO: 33795 - DNA, 1212 bp, Mus musculus
ttgaaatcttggaactagaaaaggccttttggggctggtgaggcgtctgcggtgaagggtgcctacagttcttctggttggttcctcaggcatgtcaggtggctcataaacactggaactcttgctcctggggatctgacacattcctccgtgggtatgtgcacatgtgtgcacacacatgcacacacaaagagaagttttttaaaggactttgttggtccagctagtgtgtatctgtgtgtgcgtgcgtgcatgcgcctgtgctaaatagagtaagtacctttgcgttaaatcccacctgctttctgccctgtgttccttatggcttggatggagatggggatctttcataatgctgaaatggggaagctcccattggaaagatttgttactgttttcaccaagaggaacagaatgacctgaaacatggatttttatcttttggccttggtttcagcatttaaaaaaaattgattttttttttttttggtgttgagtgtcagtgtgactagttgctcaagagtctagccttgagagtttgcttccgggcagcagtggtgagaggtgttggatcactctgacccccacccatgggttaagcattgatggactcattgcagacagaaggttgggagacggtagaaactgggccagtgggacatgtgttgcccctgcttcaggctgcctctatctaggtcagcagcattctactgtgctgtgacctccccaggaccaagaacaatggagcaggccaaccttggcttgaaacagccaaaataaatcatcttttaggttgtttttcctgctattttgtgatagtgtagaaagccaactaagagggatggagggagggaaagagagagagggaggggggcccttttgtctatcagatgttaccagttttgattggcagtacgttttcttgtcctttcttgtctagtgcagtataactgggattttggaatacggtgcttgcatttttctagtgcactaccactttgacctaataaatgagatctgttgtgactcgggctgcttgctcacatcctgccaagaagctaccatgaaaatgctgctcaaaagttgctgtcactgtctaggtttagtggcccagcattcaggatgcaaatgcaaacagatctctctgagttcgaggccagtctggaccatacagtgagttccaggccagctggggttaacatagtgagaccc

SEQ ID NO: 33796 - DNA, 1244 bp, Mus musculus
caatatgtaaccccgccgtgcctagaacttcctgaataggccagactggccttgaactcatagagatccactgcttctgccccctgagtgctgggatcacacccagcagagctttgaactttttaatgatacaatgaaataacaataagacatataatgcctttcttgaatctctgcataggccaaatataaaatcttccttcacttcaaaacagaaataaagccaagcatatgtctcgggaaaaaacaaaaacaaacaaacaaacaaacaaagccaagcatagtagtgcgtaactctaattccagaccttgggaaactgatccaggaagataaggagttcaaagccagtctgagctatgtagaaaattggaggccctttttttccaacatcttagcgaggctgctgtggtccacacgactctctgagcttcgccatgccgcccaaagacgacaagaagaagaaagatgccggaaagtcggccaaaaaggataaagacccagtaaataaatctggtggcaaggccaagaagaagaagtggtccaaaggcaaagttcgggacaagttgaacaatcttgtcctgttcgacaaagcgacatacgacaagctctgtaaggaggttccgaactataagcttattactccagctgtggtctctgagagactgaagattcgcggttccttggccagggcagcccttcaggagctccttagtaaaggacttatctagctggtttcaaagcacagagcccaaataatttacaccagaaacacaaagggtggagacgctccagctgctggcgaagatgcatgaacaggttcaatcagctgtacatttgggaaaataaaactttattgaatcaaaaaaaaaaaaaaaagaaagaaagaaagaaagaaagaaagaaagaaagaaagaaagaaagaaagaaagaaagaaagaaagaaaagaaaattggaggccagtcttgtctacacaataagatcctgtttcaaaacaagcacacacagagaactaagtcagaggtaaaagcacaacatgtattacactgtatcacattatcaaacccgaaagaatctcagcacaacaatgtaatacactatatcaagttatcaagcccgaaagaatctcagaatctctggcctggagagacagcccgtctgcaaagtacagactgcacaagcacagggacatgagagccatccccagcaccaggtgacacccgtgtttgtcctctgacttcacct

SEQ ID NO: 33797 - DNA, 1147 bp, Mus musculus
cggtcgtcgccgtaatgtctcgagtatacgcgcatagacatagcaggcattggcgcgcgcagccgccgccacggcgcagcccggtaccggcccagcgcacgccgcgggtctctcgggctcagggcagagtgagagacgctctctgcaaggcatgtctcggggctcgggccgccgtcaatatagctttactgcagcgacacccatgatgaggctgggcgtctggggcgcctcatccctctctcccactgcgggcctccccaagcttggccgtgtatgcacggcggcgggtcctgttagtgcagcccgtgactcgtctcacttgcgtgctcctggtgtgcctccgttttacgtcccctgcgccctggtcctcggcgggtgggcgcgtctattctgaggtgcgtggtagtgatggcggcgctcagcgaggctttcctgtcactgggtactactactcccagcccgcctcggagccgcccgagccacccctcggtctttagtttacgagtggcaatttgacttgctctgctgcatgtctggagggatcgaggaaagtgtggagacgccccggggatttagggatcgcagtttggaaagcaagccagccaaacaaataaacaaaacccacccgccctaacaaatatgaggctgctggagagggcgaggaaagaatggttcatggtcgggatagtggtggcgatcggcgccgctaagctcgagccgtcggtcggagtgaacgggggtaagtgccgcacctccgccggctgcagcgcgccggctcccacttctgaactcgtcggcgagtccccgggaggagcggccgccctggctgcggcacagccctctgtctcgcagcgggagagaggggggcttttagcaggttcttctcacttgctagcccaggagggaattaggaatggggcaggggagtgggagtgcaggttgccttttctgcgggcaatcaatgacttctgctcagtgccggagtgagggtacagaaactgaaagttactcctctcgttcttagtagcatcccatcccaagggactataggttgccaggagttctttatctatcctggaatagacctcattatccagtctatttccgactcctcccttttgccgccccccccccccaaaaaaaagtc

SEQ ID NO: 33798 - DNA, 1144 bp, Mus musculus
atggaagcgccagtttatctaagattaaaatatatgtgagaatactccttttaggtcacttactgtgataaatacattttctatattaggtatgttgtacaaagcactctttagctttttcatttctctaagaattgtgttaattatcttatttgtatagtcttacactatgctgcttttatagttgggcaaatgaggatggagaagttaacaaacctgtttcaggtcccacagctaggaattcctgacctcgtcaggacacttccatccctcatccaaaattaaaactctattattagctctactgaaatcccagtgccatgttggttcttcaccaaagtgattggcttagtacttgtaagtactaaggagtagaagtcagcactaccagaacagattgtgagtgcttgcagttactaaggggtgagatactgttctggtgactgaatgggtgagcctggtcagtaagggaagtcatgggcctacagagctctctgaagagttggctcttgaatgtgaatgacacatgttcttactcagcgtggctgggacttgctctgtgggatcaggatagcaaactctggaagatttatgagacaggatctggtggagagggtgagctcagatactgtgtggagacttggtcgctggaatggttttaccacagtggggagcagaagaaactagccagggaggaaacaactgtagttcagccagcaaatagcttgaaaaattgcttcttgtggcaagctggtggcaaagttattgctttgtggtgccccagagatgcaaagtttgattgggtggtgagtgacacaggctgtttctatgtcctgcattatcctagagttgtggttctcaacttcccaatgctctgacctttactatagtcccttgttgtgataacccccaacataagattgtttttgtttttaactcataactgtaattttgctattgttattgttgtgtccggccagcagaccacaacctgggttttagcctggaaaggcattttggaaacctggaagagaagaggggctaggtggcgagagaaaggaatgtagccaagacagttactctgatcaaggctcaaattttattgttgcgacactagttatgaaggaagggggaggggacccga

SEQ ID NO: 33799 - DNA, 1196 bp, Mus musculus
ggaaaatattgatggttccatggctacaaaaataccatttttatccttgactttgaattgtttagcctgcatcacttcgcacaatttcatttccacagaaagaaacccactttataaaacctttccagaaggttgttgtcagagattccttagaaaaaagaaaagtcccggctaaaaaaagaaacaggccagggagttggctggaccggaggcatgagcagtgtttgcagagctcagacactgtcccatagttttagtgtagccttcagctaacaattaaaactctttgtcttatcagtcatcgcccaaccctaacagatgggtgaagagttaatctgatttatattttccccacaactttctcatcacatacaatagcctgtgattaacattcagtggacttgcaagatgattgatgggccttaatggtcctctatacatccctttaaaatcatgccagggtaaagcccagggccgaggtgctccagaggacctatagaaatccaagactatttggtactctctccactagaaaggaatctgctaatattgtcatgtttttccctgccaggaccctccttgcctggtgtcatatattttttttttttttttgagctctctcgggaggagattagtctgaaacaacaaagtagccagatgtctggttctaagagagtcccagaggccaggctacagtaggcagtagaaaccgcgtggggctgaagatcaaagatacctgcgcattacttatgggcacatagtgtgtgttgttctcattattaacagtcggagaaaatttgttttcctaattaacccttttgttggaataaccttaaattttagagagtttatttcagtttggatcaattttcttttgtgtagctagttgggagtttaccatccaaaaaaacctgaaatgaaaagagctcatttgatttaaatctctcaactgttgttcttagccccagcagacgagccatcagaagggcatcatcgtcatctgctgtgaccatgggggcattgcagttgtgagtcacagtgtaagccactggtgagggtctggttggcttctgtgtgacaggggctggctggcttctgtgtgacaggggctggttttcagtccctcataacaagctgttgttttggagttggatgtgggagcactgcttcctggttttcaaatgaattgagaatac

SEQ ID NO: 33800 - DNA, 1108 bp, Mus musculus
tctaaatgagttttcacaaaattaatatttcttctttaaatgttgcattaggagctggtgaggtgggtcagcaggtaaaagatattagctgccaagcctgatgacctgggttccatgcctagggcctatggggtggaagaggagaacagagacacacagcttgtcttctaagttccatattgcaccatggggtatgcacacacgcgcacatacatgcatacatacacacatacatttttagaaatgttacattagcaccacatattgctgttctttttgagagccagttcaccagttaccaccactcaggacttggaatggagacatcgaggggcccctcgtgaaaaaataatctccagtatgtgtgttaggaaagagacgagcttggtattgaaagtgtcatttctaacttatattctaaatctgaaactctagaagaactgctccagctgctgactctgaagactatgaagggtggacaggccttgttgttagtgacgccagtgataccctttttgaggaaaagggcctggattgggtggctgatagagggccatggcagctctgcgactgcgctatgttgtgttatttccctgaagacggtaggaaagctactttactgctaatgaaaaggtgaggagagccgttgctgagggattgatccattgccctcttaagcagctctgagatctcctgccctaatggatggaaaggagcagaaatttcagagtcgagaagaagctagagtctaaaacttgaaagaaaccctagattgctttgacagaggttgtcacttccgttttgtggacgcccttcttcacacagtgccaagggagtttgtgggccagattttctcctggtgtgctgagagctttgtccatggttggcattgaatagagcgtccattaattgatcagagaaatgctagttgtatgccactaggagatattgacacgccctgtaaggaaaatggggtccttcactgccaggttttcttaaccctttaaagtcattgactttgttttaggctgtcgttcttaactgtgactctataggctattaactttctgtattcaaaaatacaaaataagcttaacaaatttgtgtt

SEQ ID NO: 33801 - DNA, 1133 bp, Mus musculus
gattttgccaggaaacatggaaggtagagtttttgccagaaactcagggtacccatctgagatggtaggcagctccctgctctctgccagatttctgacctggaacacgtgccacacttcccacataaggaaatgtgacctgtggtcacatagacacagagttctccatactgatgaggtacctagatgccctgagagtttagccaataagctcctccttcctccctacaaaaggttttgaatctctggtccaccctgagaactttgtacacatccattttccacagcggacaaccagtaatccaggactgtctcttccatcaagaacgacctttgggaacatggagaggcctttgccttcagagctgcagttaaatctcccttagaaggcccatctgtgcccccagacagctgccacatcaccttccctgatgagctaagccagagctcccagtcctggcccctggctagacaccctcctcagcccttgggtccccaaccgtccttggcctcattcaggcctgtggaccttcaacacttcatccccgactcctctctgctgtccccagtggcgcctgggtgactggggaatcagggaataccagcttcggctttccatatcttggactgtgttttcccatccccggagaggtgtctcagtgctcccctgaagcccagcacccaggtgttggttaagtgccgtcaagctcccggcatttcagcccccagcagctatgcccagtggcagggtggaatgaggacccacatgtgtgtggatgcatgtgaccttcctgtgtagaggacaggacgacctgtgggagttggttctctcctacagtatggtttccagagggcaagttcaggttgtcaggttctgcagcaagtaagtctccttgctgaactattttgcccaggtccccagttttgaccttttgtctccacgttccttgcaatccgcattgatcagcagtcattgaacaagattgagtagatgcggggtgaggagtgtctgtttggttttgctgatctcctctcgggtcatgggactgactgtaaggcatagaagcttccagatgcacttttggagacggaagggcataaccattgtaggaagtttaaggtcaagctttgga

SEQ ID NO: 33802 - DNA, 1194 bp, Mus musculus
gcctctaatgctgggaaacctttctctctacagtttctctgtagggtactctgctatagtgttagaaagctggtaacttgttttttttttttttttttttgtgtttgtgcttcttgtgactgtggatagacctcatttagacatattttcccaaatctcttagggagaagttagaaatgaaattgctgggacctgaggaatgtgttttgaattcgaagcagccttcaaacttttgcagtgtcttaggttcccagaggactgtgtggagcccagttgttctgcatccttgccagcgcttagttttagcaggtttgcatttagtcattcttgtggtcatgcagtaacatgacgtcatggatttcatttgctgcccctcactggctaaggatggacagtttttatgagtgttgatttgctacctctatgtctttggatagtgactgttcatctttcttgaccatttaaagaagaaactgaactgtcggtttctttatacttgggtgtaggtccttataatggacccaaataatttatcagatgtttgtaagtcattcttcctaactcatgtacacacgcgcgcgtgcacacacacacaaccttctcttttattattagcagtgacttacaaggggaaattcattgtattacgcttatctgtttttgtctttcatatcttgactttttgttacttaagttctcggtttacctaaatagccacaaagattttcctcccatgttttctctcagttttggctttaacttttttccttaggtttgtggtccatttggagtccatgcttaggatttgttactatgcttatggttgtaaaggttaaaattctttaaatgatacatttgtttatttatacagatgagtgttctgtctgtatgtacacctgtatgccagaagaaggcatcagttcctagcagaggtggttgtgagccaccatgtggttgctgggacttgaactcaggacttctggaagagcagccagtgctcttaactgctgagccacctctctagtcaaacttaatttttttttttttttttatgtccagcttatcaaacttgcccctggtggcttttctccgttgcctttgtacatgacatttttccctacacagcatctgacataaacacaccatctcttcttttagtttataatcggaatatacactgactatctaatccat

SEQ ID NO: 33803 - DNA, 1119 bp, Mus musculus
ttagtaagtctactatgcctgtgtgccatagctactctctgaaattatagaaattagaataacaatttctacttttatgcttctgtaagtaaatattttattctttcattaaagtgttaataaagtttaaaagggaaagtataggaaaactgcacaatataataatcataatggtagctgggcagtggtggcacacacttttaatcccagcacttgggaggcagaggcaggtggatttctgagtctggccagcctggtctacagagtgagttccaggacagccagggctacacagagaaagcctgtctcagaaaagccaaaggggagggggaatggtaacatatagaggtactggcttatatatttgtgtgtactgatacaattgcatatagggatcagatggctttgctgcaaagcatgccagctacattctgcactgtgatggcgacgctctctgcagctcttctgcaccggccacgttagtgccccgtgtgaagcaggtgctcggagctgtgcggctgaagctaagtacactgctgagtgggatgattttctaaactaaaaaataaatgttggcagtttgaaaaaaaaaaagcaaaatacattacctaaagataatgttttatacattgatggtaagtagcttttatgagacaaagttctcagtttaatcagaatttctataatcatcatcttgtaagtgtatgtcacaagtctactggcacagtgtccctcaattactaaatgcatagctaactctggcagcgtgcatgcctttgtggaagactcacatatactcaaagaaaagggcattttccccttaggtttttcccatagttgtccattttggtttcctccctgagagagctgtaggttggctcagagggatgagagctaagaatcgctgggtccaagtgaattttattcagtcagttgtacctttcgctacacttctgtccatagctagttaagtcgcttccttcccagtggatatcaaattttgctcagatgccttttaagaaacaggaagttagctgtcttgcttggtctctcatggtctcttccgtcctcctgggatttagacactgacagctatttggcaagcagctatttgtgtag

SEQ ID NO: 33804 - DNA, 1177 bp, Mus musculus
gccattttatgaccaaaagatggcatctgtagagctctacagctcttacattctccaccccacccccacctgtgtgtctgtctgtctatctgtctatacatctattcagggtctcacaatgcagccctggctggcctggaattcattatatagactaagctgacttcagagtcacagaggttctccaccaccagctatttttttctttttgctggagtcccctctccagagttcctcaagctggactccttagcatcattattttgtagataatcacctgagtttgtcatacatattctactcccaaagtcacttccctcattcagttccagatgccgcgctaactacatttctagccttaactttttttacatttgtctatgtgttttggttggttgattgggtggtggggttttttgttgttgtttggttttggtttggccttagggtttttgggttttttttttgggggggggtgttttggttggttttggttgtttgtttttaagacaaggtttctctgtgtaccctggcttttctggaagtcaaattgtagactagcctggcttcaaactcacagagatcttcctgcctctgccgtccaagtactgggattaaggcaggtgctaccaccaggttcttagggcttccagtgacttgggtcctggtgaccacagcattgttctaatatctccaaagcttagttaaaaataaaaggtagtttatgtaaacacaaaggggagagcagaatgaagctcattgtgtgagtctgttttgccactgtgagagaccacgtgtatccgttctacctaagctttatgttgaggtaaaatcttgattgtttcctagaaggacttcatgctttctcatttctctctgtcactgaggctctccccaagcgcagcctggtatccatgttctagtgcatgtgcgtgtgtgtgtgtgtgtgtgtgtgtgtgtgtgtgtgtgtgtgtgtgtgtgatttaagaagcttccctatgtgtagcccatggaggccttagactcatggcagttttccagccttagcttcccagatgctaggattgcacacatgtgccaccaggtctagctcatctttcctgttcttaaaggcttacactaaataccacttcttctgctggtggaattcactcagtacatattacttaagcctggg

SEQ ID NO: 33805 - DNA, 1526 bp, Mus musculus
aacagtggattatgtgttcacattccacagctggttccaagcacattcctgttacactgttccaaatcgttcctgttggcaagacacaacctgttacattaagcgcacttgagacatctgagaagatttatgaatcatttgacagatgttcacaacatctcttaagaaatcaaatcctatcgccttaggagccagagaaaataaacatgaggccgtgggcatgagctaatgttacatgtccacactgctagtcaggtggaagaagggctggtccagaagagcaggcaggaccttccactcaccgagctgtcaacaggatgagtccgggaactgggcaccagctttggaaaggactccagaaaagcctacgctgaacccaaacaagaagctaaagcagcatactgaacagtggtgggagcgtctttcctgagcttcctgcttagtgttggaacaggcatcacgggtctccccagcagctgcctttgctgttggtagtgggggctgtggacccacaatcaatcattccttcagaattccctgggcttttcagtggtgttgggttatgttatggttagcattggtgttgtagatgatggtagtttatgtcatagttaccgtggttggcgctggtgttatggtgttagcaccaggtcctctgtgtcactgtctcgggacttcataattctgagcatagctataacactggtgtcaggcctggcagagatccacgctgcacggcctgtggggaccatgctggggacgaggaggcagtgagtctgtttggtgagtgtgctgcctccatggagcacaaaggttttcaagtctcacccccacagccttggggctttagaggaagtagacactgtctgcctgccagagttgtagacgcaacccttccgtcatttgaacactggtttccccgccgaccacatctacctctctgtgcgtgactgcgacaaagttcaactgaagatgctatggtaactttttctcttttgctttaaaactgtcttttgttttcaaacaaaactgatttatatcatgagttttgggagctttagtaacatgtctgtggctacttctccttttacacaaatatgatagcatatttttcatggtaaggaaaaaaataaaatcaaaatttgctttaatttatgctcattaggattgaactgtcagcttaaaatactttctatgtttctgcactgccaatgtctgttttatgtatttgtttgtccaaatgtacctataaaaagaatacattagacagttatgtttactcattccaacctggaattggttttaaacggctggaactttaaggaacggcactgcagtctttacgcatgttacaaacgttaaggttctgtggattttttaaattcttccctattctgttttaaactggcacacctctggttgacgctcagtgtttatgctaaaaaccaaattttttcaaagagatggctaagtaattaagtgggttatttataatgaatggaaaatttaaaaaaaaaattctatga

SEQ ID NO: 33806 - DNA, 10390 bp, Mus musculus
cagtattaagctgaaaaaatttcctacatttactatgaactttgttttcaaaaacatggattttacttagaatatgagagtgtgtgcctggggttagcggtatgtgtgtatacattccatttggaggccaggggttgactttaatgggctctacaaagctcctcacgtgacctctcagggaagctggagctcagtgttttggctaggcgaggctagttagcaagtcccctggggcctcctgttggtgcccctagtgccagagttacaggtgtgtctccgggcacctaccttctaatggtcctgtggagccaaacccagggtctcacactgaaacaataggcccttacccaccaaaccagctttcctctcatactaggttttgttttggggtttgatttttaatgcaaaatagatgctctttgtatttctgattgtacatgaaggaactggagtcgtgggatttagcctctggttggactcgagaggactctgggccttcaaggttaatagtgtctgtagcagtgtttagctgtagaacaagcagcatgtgtacacaatacggatgtgtggcttagaggtgagcagaagatttgtttatactaaactcatgaaaaagtactgaacctgtcacagtagttaccattttctctataaactcaaaacaacataaataaaattgttgtgtagccagtggcagttgtaatttcagctcttaattaagattgcagagctaagacatgaactggcagctcagtggaaacattgacatttgctgagcaaaataatcagttgatgaatttctttctttaatctttgaaggcttgcgggtatcagctgtgaatggcccaggattacctgagtacttggcttcttgggtaaagagaattgttttccttagattattgtccctttgatttgttcatgcctcctaagagagtgcttaacttctggagtctctgttcctaaggtaaaactctggcatgtatccttacgttgccttgcacagtctgtacctttacacttttgttgaactgatgaaaaatctgccgcatggcattccagcttcaccaagtggctaagcctgcatgcatgggactggggagcagcttcgcagcaccgagtgggccgggcggacactggggggaagtcagcagtactatctatagagaaagtgtagttttattgaaaacaaaaatgtagaattggaggagcagtgagtgtttaaaataatatgtctataccagcttttaagtctcatgctacataagaggtcactgaacttcactgaaacaaaaaccagtttctagtctctataatttttgcttgagtgactagtatttttctttatttactgaatatttttgagaggtagctattgcacaagtaaagtttgtaagatatgatggccaactttgatattcctggtccagtaaatttgggtatgcaattctgttctgtgtttgactcttagaaatgaattttcaagacttttccccttgttacttagagcactcctgccataattgtaactgaacaattcaaaatctaacttaactctctggctttgagtgggtgtttagctacctgtaaactgaggataaagcagtacctgctagggctagggaggtggctgccagaaaagggtttgctgagtaagcataaagacctcaggtcccggacctgcacccttgtgaaaagcctggtatgacagcatgcctgtcttaactagggtgtcattgctgtgaggagacaccatgaccaaggcgactcttatcaaagaaaacatttaattagaactggcttctagtttctgaggtttagtccattatcatcatggcaggaagcatggcagcatccaggcagatatagtgatggaggagctgagagtttttcatcttgttctgcagatagccaggaattcacacaagaatttaagacctcagcccccctcagcccccccccccccagtgacacacttcctctaacaaggccgcacctcctaatagtaccacttgctttggccaagcattcaaacacgtgagtctatggggtcatccctagtcaagccgtcaagggccctataactctagcactggagatcagagacagacagacagacgagggcgggcgctggagggctccttgcccacccagtctagccaaaccagtaagcttttggttcagtggaaaaccctgaatctaatagaagagaaagtgggggaaagcctcgaacacgtgagcacaggggagacattcctgaacagaacaccaatggcttgtgctctaagatcaacagtcgacaaatgggacctcataaaattgcaaagcaataggacaaaacagcaaccacagattgggaaaagatctttaccaaccctacatccgatagagggctaataaccaatatatacaaagaactcaagaagttagactccagagaaccaaataaccctatttaaaaatggggaacagagctaaacacagaattctcaactgaggaggtcccggggactggaccaccaaccaaagagtacacatggaggaacccatggctccagcctcatatgtggcagaggatggccttgttggacatcagtggggggggggggggcggctcttgggcctgaaggtgtttgatactccagtgtaggggcatgccaggacagggaagacaagagtgtgtgggtgggggagcaccctcatagaggcaggggagggaggagatagggggcttctgaaagggagacctggaaaagggaagacatttgaaatgtaaataaagaaatatccagtaaggaaaacaaagaacaacaaaaaaagaaaaaccctgtctccaaacaattgggtggatagagacggaggaagactcagcatcagcctctggctgccacattcgtgtgtaagtggcacttttgcacacaccaataactgcctcattgtagtgaagtttaagtgaatccatacagtgaaggacttaggtacagtatgtctatatcactttttaggtttcaattaggattttccagagaaatgtttagatgtcagttgttgatgagtgggcctgctttgttggttcgaagttgaattaacttaaatattctgtcatatttttgtttcacaacaatttgctacaagttatttaatgtttctattctgtttttatcagtaaagtgggcatgttacgccttctcccagcgccctaacatgtggcatttatagatgtcagtacagttgttagcagagaacaagtgttcattaactgagccttggtggtggcagctgtaagggtgtcgtgtgtgacacattaggacaggtggttaggaatccctgctctgtaaacagctctgaggctgtgccctgacctgctggggctggggagatgcgtgtgagacacaggtcctcgagtcctttcatgcttcattccttacagatatgttaaaggcccaagagttttgttttgctttttggtgaataattaactttagtgtgtacatgtattactctttcccgtttctaatcagggttgttaaacatgagcctgcggaagcaaacccctagcgacttcttaaagcagatcatcggacggccagttgtggtgaaattaaattctggcgtggattatcgaggtaggattttcatgtttgatcgtaactggtataaccaaaataagaaaatgtgactaacctcttaaatgtgctcaacagaccagaaacattgttcattgacaggtttttgtttgttttttgtttgttagttggtttttttaatcttctgcctctgaggcggttcgggttgttgttgttatttgcagttcctcttatagtaaaatgcctgcctgtggtgtgcttttgacttgcagtgtttgtgaattctgtctcctgtctgtcctgaggtcaggtctgcctgagttcccggaaagtagctagggagtcatcagcaactccgctgtgcagagctgggacgagaggacacctgggttcggcagcatttgttttggcagaagagttcacagttggcaagcttttatttagccagaatcatttcacagtgtgaccttcacagccacgtaatgaagtcgccaaagatgcttttctgttcctgtagagaatcctttttaaggcgctctgggtgctgtcttgtgatcccagcactggggaagagacaggaagagtcagagtttgaggataatttcagctatctctgattttgaggcaagcctggactcaatatgaccctatctcaaaacaaaaacaaccaacctgaaaggaaatgaagaatactgaagacaaggcagaggccatcggaggtggacatagtgtcatatggttggagctgcatctcagcaactcataagtagttctgggaaatgatagcagattctgtttaaaataatgacatgcctactcttctcaaattgagatgtgctaagctgcttaggctgtctcacagcgagatgactgattcagcagagttgtgtggctatctcggtctcttctctaaagttctttaaacttttcctttccccacacattgacatgtgtgctaagcactttaatacgttgtcactttgttctctataaactctgagattttgtggttgttctcactaggaagtgaggagctagcacttactgaagcttgactggaaaccggtgttaagaaattgctgactcagcagataagagcactggctgctcttgcagaggacccagattcagttcccaccacccacgaggcatctcacaaccgtctctaactccagttccaagggatccgatgcctcttctgacctctggaggcagaagacaatgcacatgcaggggagacactcgcacatataaaatgaaaataaatatttagtaacccactaagttctagcacagggtatagtagttctagtaggagggttccacccccagcactgccaaaaggtaaggggctagagaaatggctctgcagttaggagtgcataatgctctccaagaggacctggattctattcctggtgctcacattggcagctcccaacctcctggaactccagctccaacctctggcctctgaggacacctatactcgtgtgcatgtacctacacccatacacaccataacaagtaaaatgaaatctttaaaaacatagagggggaaatcactttgtttttgtcttagttttttgacgtaaatagcctgttgccaatattttgtgtatgtttggttacttgcttttgagtcagggtcgtcctatgatagccagctatcttcaagccctttttctttctgcttgttccctcccagtctcaactcacaaacagtgaataatagtgatgttacattttgaatgaccctgttgtctaattccatatcatgcagtgcaagtttcctactcgtctctgaatatgctttcagtgtagcatagcagagaagaagcaaactgggagactgtcttaagctttctttggctaggaagttattgttcttgatagttgacagtccagtctgattctttgaaagtttatcccttctcatagaattctgttcggttaatgtcttgtgctcagattacacacacagagatttgaaaagaaacctctgtctagaggataatgggggcagagcagagagccaggagcatattaatgaagttaagatcttaaatgggactattgacttagttaattgaattgaatctgtggtgtgtttttattctcttttaaaatatcagttttgcttagagatgagaattagaagcttactagcttcatcttttgaaaaaaatcttctggtcagattttagaaatttatgccatcttaacacgagtaaaaatccacccgagctgttttccttgaaagctccctggcatgtttgtagccgtttttctctattagttttgattttaaaaatagtccaactctgacaaaacagaatgcagtgtgttgtaatgcaatatgttgctctctgttcccaagctgctcctcgctgagagccacagctctgagatggtctctcaggagcacctgctgtctattatcttaacagattgtggagacttcctcttcaccctgggtccattcatctgctgcagtagatgttgtgaaagactgagacaaactgccagatccctatttcaccgagcgagcgagtggctgaagtaacaaatgtcacctcgatggaggctcatttgtccctgcatagttgccatgtctgtcccgggctcccatagaagggcattttggttggaatattctaatgcttatacttttgtgaaggctttcaaagttgctgtggtgagcacacgtcccaggagggagtgacagttggctgcctgtcttgtggtggatgcacagctcctctcatgctctgcccgcccagccttcattcacaggggcaccgaggaaaggcaggcgccttttgtgtttaagtctattgagttttgtttacagtgtgaatttttatattatgtgtctgaaggctaatgaataaagtgattgtcagttctaagatatagcctgtaattttgaattctgtcttacttttctccaggggtcctggcctgcctggatggctacatgaatatagccctggaacagacagaggagtatgtaaatggacagctgaagaataagtacggagatgcgttcatccgaggaaacaatggtaagagcttcccttccattgagtgttcagaataggccgttcctgcgtgtaatagggagctgcggggcgtctaagtgttaaggttctctttacttttgcttgtttgttgtacttatattttaggtctttagtataaaccaggtctgtttgtgagtgggaagaggattttccatggaggttggaactagaaattctctttctcagttgctgaggggtattggtatactaagcaggcccattagaccagggacccagagggtgtgcggcacacaaccacatactgtactctcgcagtgctgtctgggagtggaagccatcctgtgccacaaaacgcccttgacatttagcctgtcctttgtcctttttctgttcaagatttaggtgccttttgtggagctttgtacctttccgtgtgtcagaagtaggacagaaggcgtggctctcaagttctcttcttaaaagccttaaaagttaggtctcgttaggaattaaatatcctgacttttgtagacataccttgcttgcagttcagtagaatttcttctatttcatgttattcttacttgccctcctccttttgcttggaaatattatgctcttaagtagcccccatagcaggagccattcctacactgacatccacctagcctgtctggtttcccaggcagtggctttcctcctattctgatggctcctacactttactgccatcctcagtaacaggtgtcattattcctactacttgtagttgggtcttaaagaggatcctagttcacttgattgaagtctgtgctggactctttgaggaaacatctactgttcactttgaacaagcttgttcgtatctgaagatgtgtgggatgggagagggagggtacaccttaggtgacagcctgaccagagccccttttgtcctatctctgtgcagcacacattccactgtgctaagaatgactggcgaaaatacatgttggatgacaccaaaggtttatactaatctcagaataaggactttgctttcttaaaaatgttttctcatttttttcctcctatggaaattatcagagtaaaccaatttacagagtaaactggggagataaacgaaaataatgccatttctttcttttacatttttttcatgtgtatgagtgtttgtctgcatgtctgtaagtacatcatatgcgtgcctggtagttgaggaggccacacaaggtcactggactccctggaactagatttacagttggttgtgaactgctttgtaggaattggggacccagccctgttgctccgtaacatctgcaagttacatctgctcttaagtgatgggcgtcgtctctccagacacatgtgctagtcattctgaatgtgacacctaacctaacagatctggctgattcgcccttttcaaaacttgtgatatagctatttacaaatcattcttacattttaggcactttcacttttctaattcccagtcataatttgtaaagtcagtaacatgcatagataagactagttataatcaggtaagatgtccaagcccggtctagacgcaaagcttgttttatagagaccttcattgcatggtagaaacagtcttttaaagtgttcgaggtgtaggccaggacccatgaatgcctttaaaactgaaccgatgctgtgcccctcgagtgactgctcgttctcttgtctttccagtgctgtacataagtacacagaagaggcggatgtgaagacaccaggaggcagtgctcttcagagatggatagatgaagtggttttggttctcttaccatcttagttggcctgttttcatggtggctggtgggggtttgtttgtttgtttgtttaattgacattggaataagatagaggtattgcattacagatcgactcttaagtttttcacatttatgtctcagtctttatcatttctgcctgtacagaatgctaaaactaaaacagtttgtttctccaggattattttacctaagattcctgccctgtcattccattggttgattacgtattcagctgactaagtggtacatcccggaacctgtgatcaagcattctggaggcatcctttgtctctttctctactcaccatccgtaccatttaaagcaggtagatagaaagtcatatggtttcagccttgggctataaagggacaagaggtcagaaaatcagctgtttatttagtcacctagttagtggtggtatctccacaaaggagtgcaactgtagagtcaggaattggaaaggtcagccacgtgaggtgagacactgcctggaagcctcctgtgcagttagactcttcatgttaacttgctccctgttgagagtgttggtgcaatggctggttacgccagccaggggaggagctctactgttcctgagaaactggctgtggctgaggtggtgcaagcccagagtgcttagactcagtttccaggcactgagcttcggctgcgaaagtttctcctgctttttgctttagcaagtggccttggggaaagggttgtattcttggccttcaggtcacgtgactcccgctgagcgggcttgtgctgtctgtggactgtgtgtgggtgctttggttgcatggacgctagggctttccttaccctccttcaatctaaacagatccctgtctcgggaggtcggacagttttagagcaattgcccggctggaggaagtggaggcagatggacagctaaggagggagggtgtgctttctggagaggtgtatatatggcatttgtctaatttaaatagtaatcagaaacaattaataactcaggaaagagaggagtaaggtttgatggtgtgcacactgaaaataaaacactttatcctaagcttcagtaattcatcacttcctgacaggggcttgcaaaggcaccagtgtgtaagtacaaatcaccaatttgctcttttataaatggcttctttaaaggagaaaatggatgtctctcggagtggagcacacatgttctcatttgttttttagagtgtgtgaggccgccaggttactgcatcccttcattcatcccctcagctgccctgaaagcagccctgctgttatctccagcagtctgtaacatcccggctctgctcatttcttccctgacctcccctccagcctgcaggtctttatttccctcttgccatttctagcttaatagcgctactgcagaatattgttttcatccatggaaccgcttttaatcaagatggactttgggaaatgctaccatttttatggtaataaccatattatgcatctggaccagcacatgttgtcccctgtgcataccttcttgtgatagaattctgaaacaaattgtaaatggtaaaattactttttttttaactgtagtctcctcgtggtctgtgaatggttttcagttggatggtagcaaagacaattgttgtagggtgaaaatttttcacttgagtaaatacattttccgtgtccctatgcccccaaccacagttgccaccatctttctcttgggccgtgacaaaacagaatgtctagcaggaaacagaacttgtgcttgctttccagactatctgccttcatattttgttttggtctgtgagctattccttggctaatcttgcagactgaatcaattcttacttcaaaagtgtttatcccaaacagagctgtagacgagtacaaatacagatggcggccatgtggtctgaaccatgttccccc

SEQ ID NO: 33807 - DNA, 1099 bp, Mus musculus
cacagacacacgtggcatcttgagaactcgtttttcttggagccttgtgggaaacacccagtattattaaggaaagagaaagagctctgtgtaggatgcagaatttgtaaaaatgctaactaaagacctttggggtttccaggagggacttctacaaccagtcatggttaccttgtgtgggtggggtggggcagagggactgtcttctcttgcctgggaagggaacttgggggtcggggaagcttgcaaagtaggttctttcctttgttctatttgactcactatttttacagtattgtagattctcactttgaagatggtttttattatcaatagatagaggctctccaatcttacagccatcttcctttcgactcatgcctttgagaagtagtaactgaaggcctactttgtacttggtactgtcccaagagatgggggacacggctacaaatgaaacaaagacctgctctccccattgttgcttgagggattacctgaagacatgaggacattggacactggccacatgaacagttgggagagaaaaggtttctgagaaagagataaacagtcacaagggcacatggcagtccaagtgagtgcctggaaatgatgtcacaggtatggaggtcatggctttgaggctgggattggatcttggtgatcacaagaagcctcgtggaggccttggttgaggctgcgaatactgggatttgacatagtcttgagagctttagtctggctgctgggtgagactcccagccagaacaaaactgcttctttggcctcagcaatgtccactaagggggtcttggtagaaatggagaagatggccaaggacccttgtacagaagaaagaaccaataaaatctgtgagtggatgaaatataggataggaatactgagaggaagctgaagtgtttggtggggttctaagctcttctcttggagatgtagaggggtgtccatttctgtcgagatggctgttttgatggaggagctgtctggttgcttggtcatgggaagatgtgcccaggctctttatctgagtacatcgaacctggtgtactaactaggttggaattcatttcaaaga

SEQ ID NO: 33808 - DNA, 1207 bp, Mus musculus
ctgtagaacaggctggccttgaactcagaaatccgccagcctctgcctcccgagtgctgggattaaaggcgtgtgctaccactgccgggcagcagtgggctttttatcaagccacttttctctgagtgtttttctcctctttctctagttcagctcgtactgaatcactgcttaaaatgagagactcgtaacatgagctattcttttttcttttttttttttttttgtctttgcctgtttagcatgtttaccttgagtcagctcttggtgtagctggctttggtgtggttctcgggtggaagggaaaagtgtgcatgtcatcgcccctcccccgccccctttgagtgtctcaaatgaactggctgttctctttgggagtaacctggtcttcttgattccctccagatgttagtaggcaggacgaggcggagggagatttcagcgaaggagagcagtggtacggaaactcctctgagactccgtcagaagcgtcctatggggaagtccaagagaactataagctgtccctggaggaccggatccaagagcagtccacatcccccgacacctccctgggcagtgccacacccagcagccacacgctggagttggtggcacttgatggtgaggttctccgagactcgctgcagtgtcaaggtcacctttcacccggagtgtcctctgtgtgcgatgatgacccacctagttccaataaacctctgagcagcaatttgaggcggctgctggaggccgggtccctcaaactcgatggcacagccaatggcagggtggagtctcccgtgaatgttggccccagtctgtcattttcccctccgtcccaccatgcccagcaactcagtgtcctggccaggaagctggcggagaagcaggaccagagtgaccaattcaccccaagtaaccgtttcatatggaatcaaggtaagtggttgccgaactcaaccaccacctgtggcctgtcccctgactccgccatcctcaaactgaaagccgcagccaatgctgttctgcaggacaaatctctgtcccggactgaggagagcctgaggtttgagtctttttcctccccgttcagctcgcagtctgccagctccaccttggcggccttgtctaagaaagtgagcgagagaagtctgactccgggtcaggagcacccgcctcctgccagctctttcctgtcattggcctc

SEQ ID NO: 33809 - DNA, 1182 bp, Mus musculus
ggatcagaaatttactcctcagctaattagagaattagaccaacctggactacatgagactctatttcagaaatgccaaacgattctcaaaacaaatcaagtaccctaaattggtactcagtgcagcattttccagtacagcttcagtctctgagtatacacctctcctctctttctgtctgagcccacgagaagggcacgatgttgtgagtctgagacacctcactggaggtcacagttgacatgaaggggacacctggctgagacatgttcattgggctctctgattttcccagatagctatgacatcagagatcctgtttgaaaatccccagcccagactggaagcctccagatactgggagccactggggagatggctctttcagtgaagtgtttattggagcaagcatgaaagcaagggtttagtccccagcatctgtgtaaaaagctggcatggtggcacaaacctggatggattcgtgaaggtcactggccagactgtgctaattgtcaaatcctcggtacaatgagaggccctgtctcaaaaaacagagtagacagctcctaaaactaatgctcaagggtgacacctgacctgtgtgtgtgcttatacacaccccaacacatatacacctagcctatatgtgtgcatatgcacaccccaacacataaacacaggaacacatgctcacacaaagagcatcctcattaaaggaacaaattacaagtctcctatcatctttttctccaagatgccatttttcaagatataaattgaattctagctccccaaattataaccaagcagctacttgacagaaacttggcaccttgcttgttggcaagcgatatcttttttgtccccggctttccaaaataaaagatataagtcatttcgactatttttaatctggaaactgacaaaaaagttttgtgctgtctcccacatcctattagctctatagaatcgtcaccaaaataattttaagtagggaaagggagggccttccagtgtcccctctcactttcagctgcacagagacagctttggaaaagacagtcacttgctcagttgttttctggcttatgagtgtctcagccatagttgttacttagacatgaaaaatgcccacaaaagtttctgtgtcatgggttcttgtttcccagaagccattgttc

SEQ ID NO: 33810 - DNA, 1193 bp, Mus musculus
tgaaggatggacaagtcagacaggatggagacctgacgaaggagccacgataatacttgacctctgtgaccaactattggattgagaaactgacaagccttggttgatagcaagaaccctttcagtttacattgtgacattctgttgtaaaaatcaactaaaatgctgactttcagcaggacttttgtgtatagttaaaaaaaaaagagatggccaagccagggacaaattatctattaggaaaaaagaaaaaaatgattgtaatcaatccttttgtgtggggtgttggcagaaggttggcgctgatagtctttctgaagtgggctttcatcaggctcagagcccacgttgaatcatcttctcatgggttttcttaatattttaaaactacttgtttagaaatgaatgggttttttgtttgtttttaaagtacaggttaatcgttatgacatgcatagtaatctttctgaaactgtatgctggctgtattactgtcagaatgatggcaggcatatgctctttgctaaatatgtatatacagaatatttggaggttatgaatagtctaaatggctagtgggtttacagagtatctgaggggcggggtcgggaagaaaacgacggctgcaaatgtagactataccgtaaagctcagcttgctgccttaaacagacaagctggtgtctgaatttgctgtgtttcagtttttgtagagttttatctgacttcttttcttctgtcttatccgctccacggcacagttaagcagctggttaattcctctaactgtgagagcagatgagtaattccttctgttcgcaaatcaactggcttcgtgtttcagtacccagtatatgaaaagcttgaattgaatgagcagtttttatggagtttacagtacagacataggctttgatttccaaataaattgtttgccaaacctggtaactctgttcattattcgcaggattaaagatctctctattggaatccatttcaaaggttgttttttttgtttttgtttttgttttttgttttattttgatttgtttttttttgtactatttggtttcttttcttctgttaatttttttattctcctttgctcttatacagcgagtacttttattccaacactagcagggtttttctctactggaaatttttaaataaaacctgtcattattgcttact

SEQ ID NO: 33811 - DNA, 1206 bp, Mus musculus
atgcaaattgcccgagtgagtggatctttgtgcccgaaaccctcacatgacctttgtccagggcttgggtgctgctgtgaacactctcttcccttcctcttgtaaaactgccaatcctgctgcctcaaggccccacccacccttataatctcatttaaccccagtgagctcctcagaggctccaagcccaaatacagtcgagcagagtgggcactacgcctttaacgtatgcattttaggagaacggagcccagtacctggcgtcatagaacacaaatgttcatgatctcagcatgggcttgcatctctctaatgaagtcaccgagttgtgaggctgaacagtgtacgccaagcatagactacctgtacaaagacagacttaggtagttactaccggacacacattaattagctaattgtggcacagttggagctaattttaaagtcagcttcctgtcttgtcttttgcaggcgctaactgggatcctcgctggaacaggagggacagtattttctacctttccaaaccgcagaccaagaagctaaggagaatctatgtaaatatactgaaatctctgttggctctgcgcccaacaccccggagctggcacctcaccctgtctgaggagcgtgtagaactagaccagccgctatgaatgtgaccagcttgttttcattcacaagtccagctgtgaagagactccttgggtggaaacagggcgatgaagaagagaaatgggcagagaaagctgtggacgctttggtgaagaaactgaagaagaagaaaggggccatggaagagctggagaaggccctgagctgccctggacagccgagtaactgcgtcaccattcctcgctccctggatggcaggttgcaggtgtcccaccggaagggactacctcatgtcatttattgccgtgtgtggcgctggcccgacctccagagccaccatgaactgaagcctctggaatgctgtgagttcccatttggttccaagcagaaggaggtctgcatcaacccctaccactataagcgagtggagagcccgggtgagtgacagagtcctgagtcccactgagatcaaaacaaaagcacctttctgtttggggttgtaattctaaaatatttggggggaaattctgtacgtatttgtacctgtgtgtgcaaaagagaaagaacgcaggcatgctcagatgtccgtca

SEQ ID NO: 33812 - DNA, 1196 bp, Mus musculus
gagtgggtaattagcagcttgtcccgagactcattttccatgcctgcttctcccctacacatctgccagggcaggcctgcagttttcattgcatttattagtagacaatatatttttggtatgttggcattagcaagacacaaaggtggagacagatgagaatctcattatgccgtatacaggcccttctttgggggcaactaacgttatcaatctttaacgtcttatgatatgtgtagttatttgttctagggattgaatccctggcctcatggatgctaaatatgtggggtacaatggaatatactttcattctgtgtttattcttccttcatcatgtgcaacttcttgaatccatacaactagaaagcaggttaacactaataacccaatttatcgtctttcattttaccactggactatgaaaaagcaagtccttgaaaccatggcttctccttgacagttggtttctgtagtcctgcgggtgcaacataggcctgtaggttagaaagggcattgaccttactcagcagtgattcctacaatctaaatgaccaaccaacccctaagacaagatgtgtccacttagtggtaccactgttatgggtgtactaagtgctctttgatttgatgtgagacctgctccaagaagagaatccatgctgagtactgcaaacctggggtgtttgtttgcttgttgttttggtttttgtttttaaagaaacttcattgttggagaagtcataagagaacaggagagactcatggatgcacaagttgctgagaataaagattgcctgctctgaagcgcaaggaacattgtggaagagggggacagaaagaatggaagagctggaatacaggaaagactgtgaaatgtgatctcgtagctagacacaaccgaagtcctgaattctcagaaggggcaggtacctgcatgggtctgcacaacaatagcccagtcagcagtcaggcctggaagaagaggggaccaggggccctactcctcaccaatgaactctttgccactgagagattcagggagaagggaagttattgtgtgcatttgtaacccactgatgaccccagcagactctaatggctggttccaatccaatggttataccagtggccatggttaaactaaatgagtcacagagctgaaagtctgggaaagacactgctattgactggga

SEQ ID NO: 33813 - DNA, 1176 bp, Mus musculus
aaacttctttctttattttatgtgtatatgggtattttgcttgcatgtatgtatatgtaccaggtatataactggtaggtgtggaggtcagaagagagtgtcaaatcccttagaactggaattacagatggttgcaagtcaccatatgggtgctgggaaccaaactttgggtttctctctctctctctctctctctctctctctctcttaattttattcacattggtgttttgcctacaagtatgtctgtgtgagagtgtcagatcttggcgttatagacgcttgtgagcggccatgtagttactgggaattgaacctgggtgctctggaagagcagtcagtgctctcaactgatgagcgatatttccagctcataataagtgctcttaacctctgagccatctctctatcccacatgaggatattttgagtttgatagttctttatagttctcagaagtgtggcacagtgttacttaaatcagttctctccgcatctggcagtgactgacatagcgtttcttgctgtgattgtccctattttgctctagttttttcaaaagaacgatgttggactcccgccctttcttactggctcttgtactggttttctttccttgttttaatcttcattcctctatgtttttaaaaaaacacattttacttatttctcttttgtgtgtgagtcaatgtgtcacagcacgcctgtgaaagtcctaggacaggctttagttctcgtcccaggatgtggctcctggggatctgacttccaggctggagaggaagcgtgtttaccaactgagccacctggctagccctctctgttcttgaatctgtaataactcttcccccagaaaagtctggccctttgttaagatgtccacactcattctcccagaaggggtcagcagagctccttctcagtgagctacttgttgccataggagagcaacaaaccccttttggtcttgttgatgtagtaaagtttccatggaacactgtaaatcttttaggctcagctattcagactggagttatatctttatctaacattaacttaatattaactttaaacagctttcaactcagtaaatttcatttaaaaattatatttgtggatttattttctgctgaatttcttactgggaaggcagtcggtcaccaagtttggcctcat

SEQ ID NO: 33814 - DNA, 1239 bp, Mus musculus
accacacaatccaacctggtgaaccagaagttttactggggttacttatgggaatatgggtgagaggttacagaaacaggaatgactcaaatgcagctgcatccacacacggggaccccagcacaggagatagctcagaaagaggagccctggaattcattagacttgcatgtagcttggtgggtcagagaacagtgactttaggcagatggctggtctgtgtctcacccaggaaacccagctggtctgtcttccaggtagcttggttggtctgagcctgtgtaagcagcgtggctgagctacctcttccaggaagtcccgatggtcaaagagtgtctttcaacaatttttcctgcctaagtaactttggggaagaaagagttcatgtggtcagtttcaggattttcctgatgcctttttttttttctgttttctttgtttgtttgttttgaaatttccctgagtcttactgagtttcctttaggatgtaatgtttttcctccctttggaatgctcagcaagacaggaaagtttatcttgtaggacttcactacatgacattgcgctccagcctgcattcagagctcagagaacaaacatgggagtctggtctctccttccatcacgaggatcctgggactcgaacactggtcatcaggcttgatagcaggcttgtttccccacacagctctccagtcacttctccctgtagcctctcttaagcttttgtagacattctgtatgaagtataacatgtgacctgagagttattaataataattagtattagacttttaaaaattgtgtttgccagtgaccacaatggaaatcagattacctgattaattccagccaacaaaaccattgaagcttatgaattcattgctaataaattattgtactgtcaaagacatacatgtgctcatctgtgcttctgacatagcacactcatcacatatttataggtaaacaaaactgttcattgtctgtcttaggtttgcattgctgtgaaggaaaaccatgatcaagtcagttttttttttttttttttaaataaacaccaggccaacttttttttttttttagattcatttatttattatgtgtaagtacactgtagctgtcttcagacactccagaagagggagtcagatctccttaatggatggttgtgagccaccatgtggttgctgggatttgaactccggacctttggaagagcagtcgggtgctctaacc

SEQ ID NO: 33815 - DNA, 1181 bp, Mus musculus
aagaaacccaagccttctgccttgtcagctagtgcattctaattctgcaactctcttttctgcaaacctaatgaagctttagtttttccatccaaaacctttgggttaggcctcttgtgtgacataccaaagctgggatactaaaaatacagtacttcatgtgctgagatcaaacgtgagaacacagcaaagctttaatgtttgtaaatcaagtagtgctcactaaagtttttcactttccctgatgtgtttgcttcacagatttgatactctttgtgttttaaaaatgtaattttaagcggtattttgaactgtatataccacggacaaaggttcctgctgctttctaggtatctttgagagtaaatggtgctgttggctgtaagggtttgtatatacacctactaaacatttcagaagcctgggtggtgctgtcaaatttctcctgtttccaaaacatgcctctaacgttgcatactgtgcttctttaattacagctctcctttatgagttgctgtatgagaaggtattcaaaactgatgttagtaaaatcatgatgggactagaagcctctgaggtggctgaggagagcaacagtgagatatcagactctgaggacgacagctgcaagtaagagcacatctcagtcctaaagtgtctttctagtgtcatccagggaaacattttcgtgtgttaaggtgtgcatccgtaaagcatttatctgcaggagaggttctttgttgctgccatgaatttgacctagtgctataatggttttgcctttcaaaattgtttttagttaatgagaatttatatgtatgtaatcgataaacacgtagactagatttgatctgtgtgtacattgtaaaactgtaaagttaccttgttttcacatccagtgatgaagtgcggttgctttggtcttcgggaccttttcatagtttccttcctttgcttctgccacctcttttagaataaggagtgcttcactgtggagttgtcacgaagactctcagccctggatatacaggcatacttttggacatccaagcatgtttttagtatgttttttttgctaattagatatattagggacatattatttaaattttctaaagaagcctcagtctctgtagcatagagtgagggtgtttaagtatttcctaaaagaaacagtatga

SEQ ID NO: 33816 - DNA, 3789 bp, Mus musculus
aactgggctcaaacaatcctcagcctaaaacactgttgtcttttaatatgcttccaacccaaaggcctttcatctcagtatctgtcaaacttgaataacgtcttctctttactattacacacgaggcagcctattaacctgtgtcttagaattgttgtatatagttcttttaatatccatagggtatatttttgaattttttggtgagtatttgttgaatttgagatagcatacagtagatgtttaagaaatagtaggaagtccggtgagacggctgtttccatcaagaactcctagcactgctgtaaatatcatggtgcctactggaagggaatgtagatgctatgcattttggaaataatctgcatctgttaaacctgcagaagttttttaatgccactttaacactaatgcactgacagattctaaatattttgtgagaaatgttgaaatgtttaacctgataggcttctctataaaagagtgttttgtttttttccctgcaccacaagctgtgtttatcactttacagttgcatgttcaacttgtcatagctggaattactgtataaaaagaactgattgtgacttgtagttcttctctagaggatgctgctagaacgtggttttgctttgcattttgtagttcttcccgtcagtgctgtgtgtagtcctgcttcttccagtctgcagtattcactagaggcgccctttgcatgttgcactctgttctcatttggaggttggactcagaccagttagcacagtattctctcatctgtgtcactttgtaaaactaactgtactctgtatttcttatttgtacatatcaatgtgagaaatctcccttttttatgttgcaattaccttgtgatcaggcagcttgagtgctatgcaaatagtaagtagtgtagtggtgatttttctttgcatgttgtgtgtgatatacctagccagaaatagatgtggcttttgttttgggggcagattactttcaaaagcaaatacaattcacttgaatttgacaaactgaagcagacaagtgttctgggtcctctgataatttggggtgtttggctgtcagctaggctcatgaagtccactgtactgtaatgatggtatttacctctgtgctattttaattaccctcgcgtctgtggaactgctgatttgagtagtgattagcatttagaaattttgtaatgtagagttttagagagagcactttgaaagataaacattttattatgatggtgctaggtacaaaatttatagcatgggatgtgaagaaaaaaaatgagaacccattgaaaggaagaaaggaatttgttgtctgcttctaagctagagtggttgtaaaggttctgctctgccagtgttcagtatcagtggctgaattatggataagaactgtagagaatcttctgtttagtccgtgctttttatgtagaattggttttatctaatagttttactatggaaatcgccttttgatattaaagccagattttagaggtttgatatgtttggtctcaggagctcaaaagaagtagctttttccagtgtcttttgtgttactgatttgggaaatgttgaaagattggacagggaagaatagcgcttggtgtcctcatggtcattctgtcttaccttagtggcttgacagtacttactatagctcctgagggaagccaatcaacttctgttttcctacctgacctgcagggcatgatggatcagtgatgaaagaattgtagcctgtggcactttgttttgacctctggtatagaactctgacttttatagttttaaaatgatcaatctttgtatgaaagtcagttttctttctttaggtatcagaagattttgccttattctgaggtcggactagggccaagcaagctttttccttcatatgagctgtcatactgtattttgacctctttctgcacgaaaaaagaaagaaaaatgacagctggaaaaagtcctttgtattggcacatgataaatcttgatgacgggctatattctgaacaaacgcttgcactgaccaaagcttgtgtttagcgtgtgtttagcataggtgctgtagttggagtgggccccacctctgctcctttcagtgttcttgctgttcaagttattcctctcagacatcctccattgtcccacgcactccttggcagcagaatgctggcagcttgtgaccctcatgtttcctgtaagtctgtttcatggtagggttcatacctgcctcagcctgacaggagtaggttttccgcaacccactgtgctgagacagttgatgtgatgcaaactattcttggagtgtgttgttttctttggcccaagggtaaactaaaatacctgtgaactgcaaacttgcttgtgattgacttggtgcaatacagttcctttctaaacgtttctggtttagagaatactcagccatcctggaaactagcaatatttattttgcctcatttactttattttcagttttagatgaggtgaaggttttctttcagttagggtacttggcaaggtccattctagtgtagctgaagaggaagctatactattttctgtttactgtattttgctccctattttatgctttttaaaaatctttcacagtgactcacttgattgagcatattgatttgaaagagctaagattttcctgcttaatgtcagccattggctctcctgataattgggactttttgtttgtttgttttttgttgttttgttttttttgtttcccctttccctaaaattataagtttagagaatcctgtaagaggggtgggtgcatgtcttaatgctgagaagcagcagctttggggttgaatttacttgaatggtttaaaaagattgcattgttacaaagctagaaaaaatttatgtatgaaaaatgatcctagccttacactgagtacaataatacttataagcatgtgaagatgtgatctttgtgatgttacttgtacaaacatatatacatatctatacatatcttttgaagtgttgaaaggaatagtactttatattctttatcataccacttttgtaagtgttgaatatattgctgtttatttttctatgttctgtttcgtagccttaagaagtgtttcaaacgatctgaatgtataaaacaagtcaatgccctacatggtgtgatgctgcattatatatacaaccgtgtgcatatattaaattctgtttgtcgagtctgcttgggattctttggtctttgggtaacccaatatatcatatgtaaatctgaggatgaatcttagtaaactcttgaaaatgacatggtttccatgtatgtttcatgctggaagatacttacagtagaggcaactgaaagtgggattcataccttattagtgctggttcccttttatgttctgcactgcaaaggttagagcagttgatggagctcgtcagtggcggcgtatgtaccggcagtgtaagtggctggacgagaaaggctatgtatgccccatccctttcagtacactcaagagggatgcagaagacccaggctgtgtgtgtgtgtatgtgtgtgtgtatgtgtgtgtgtgtgtgtgtgtgtgtgtgtgtgcgccccatccctttcagtacactcaagagggatgcagaagacccaggctgtgtgtgtgtgtatgtgtgtgtgtgtgtgtgtgtgtgtgtgcgcgtccccagtccccaaaagttcaggaaggtgttttctaaagactgaacaaattggaaacagaaataatgttatcagattaactga

SEQ ID NO: 33817 - DNA, 2381 bp, Mus musculus
ttaaaataaacattctcctttgcttattaagtcacttctgtatgctgggtcattttagatagtaatagagcataacactaatgagaagctagctgatcaggtgggtaagcgcactattactattctataaacagtgctaagaaaatctaattagttttcaagctgacaatctgttgccttttgtaccaggagcttaaaaatgggatttatgtttgtgtacaatttttatgcattaaagcgtcccacagagcgcatgctctagtagagcagccctgcatagaggacaaatgctcactgtgtcacttctctttctttttaggatgtagaacaaaagaagagtggaaactactttttcttggatgattagattgagtctgaacttataagccatttacttactgggatttttatcatataaaactttaatcaggttttatggccccacatactctggagcttgaagtatgattttcttaatgtgacatcaaaaagccagttgtcttgtaaattgttgtttaagaactattttgttcttaagattaaacctctgtgcatactacatgaacatggagacatttcagattatcagttacctccagattttcacaatctacggggagattttcagttgtatattatattcatgtaccaaatgcttcctggtgttgcccatctttaaaatcttggataaaatctgtacttacctgtttgctaagtgtaccagtataacagaactgcccccttctaaaaagccagtcacagacttgctgccaaagtctgatacataagcatcagggctatatttgctacttgtgttcagtgtgtgcttccaaggaacagtgtctgctacaaacaccattgttggaagatgttgatgaccaacttatgcattgtttttaatgagtttttggtgcttttgaacatctgtcaaaatttatttcagtgccctaatttaactttttttttttagttcttacattctataacaacattcacagtaatgttacttttataaatatataatcactgatcaagattagggaggaggcatttctgaagactatttgcttcctgcagaactataggcttgggctggggagatggttcagtcagtaagtacaagctgcacgctcatgaggaccatatttgagactttagtagaagtgaagtccagcagatccctaaagcccactggcctgccagcctaacacagtctatgagcacattcagtagaaggtcctgtcttaaaagctaagtggacagtaattgaggaagacactctggcaccaacacacacacacaaaacccaaccgatacagtctttatagttggtgcctaagtatctggattttagggtttcggttttaattttgttttgagacagcttgtcgtcctatagcccaagctggcctcaaattaggtatccaaggacaaccttgaatttctcagcccactacctaggcttggattacacagtgctgaggatcaaacccagggctttgtgtgtgctaggcaagcactctaacaactgagctacatccccagccctacatatttagactccagagtcttctgttgagcaaccaaggacaacctaaaacaacttctccagtgagtgcagggaaatagcaatacaaagtgtccattgctgcagtgcatactcatttgttggatacaaaggacattatccacattttactaatatgccaaactggaattatgaggaaggtggattacaatgaacagggcaggcagaacaggaaaattagaaagtatttgacaagactttagaactttaaataataggtctgattaatttgcagacaatgatagaaagtttgttttgactgatacccattaggctttctaaaaatgaatttatataatccataaatatgtatctgttgtaaaggaacacaaagtatatggaataaaatctccctttatcagtttctgagcttaccggtgtgtggtcattctttccttcactatgtacttaatcttgttatgggaatatactaaaatatatttgtgaatattacagatacaaagttcatccaccttaatgctaatgacaatatgtgaataagagtatttttgtgcaaatgaaatttgaaaatacaaaatcagatattaaactttttttgacttctttgagacaggtttctttatagattggctgtcctggacttaagagacccacctgcctctgcctcctgagtgctggggtagaatgcacgtgccaccactgcccagccagatactaaaactttgacatagcagtaggaaggcctatgctgctaacaggagtttgtcaaagtgcagagtttggctatcaaaaagagtaccactggaaatctgtaatactgaatgaacaaagt

SEQ ID NO: 33818 - DNA, 1316 bp, Mus musculus
ggatgtcctgtttcacatacatatatatacttaaaattaatcttacactggattaagggaattattttggtttggtggtagaaaatgaatttttctgagacaggagctcacactgtaaaccatgcttgtctcacagtctagcacttgccagctcggctttctaactgttggactataggcattaactaacctctgtacctggcctgtgttcattgtcgaaacacaccaaaaaaagcactagtttttgcatatgtgcagacttaatattaacaaaggtacaaggtatgtatgtatgtattcccaaaaatcagtctctttttttggttggttggttggttggttggtttttttgttggtgtgtgtttgtttgtttgttttgtttctcaagacagggtatctctgtgtagccctggctgtcctggaaatcactgtagaccaggctggcctcgaactcagaaatccgcctgcctctgcctcccatcattattttagatttgtttatattttctttagatctttactaatctcatggcaattttttcccaacaggcataaatatatttttggatggctatgttccaacagagaacctgaggttcagggatgcgtcgcttgtttttaaggtagctgagacagcaaatgaagaagaagttaaaaagatgtgcatgtataaatatcccgggatgaagaaaaagatgggagagttcgagctagcaattgtagctggagagttcacggactctgagatcatggtgatgctgggggagaatggtaagctgtggtttgtgatgctgaaagtcggctctgtgctaacttgtgctcctggggaactgactcgaggctacacccgagtttaaatccttacagttactgttttaacttcacagttttgtggtatttactaatattgccccactgttgttgaaacaggctaatcattattttcactaaaaatatgcagtttctgatcagctgatttttctgtgaagtaaactagtaagcagtcactcctgcagagggactgaagcaataggcaggtggtgactcagtcaggccagctttcatgatttccttggataactgtgtttagaatttttcttatataaaattcagagcactctgtttaccttcataaatgttttattagtggctgggcagtggtggtgtacacctttaatcccagcacttggtaggcataggcaggaggatttctgagtttaaggacagcctggtctacagagtgaattccaggacagccagggctacacagagaaactgtgtctctagggaaaaggaaaaaaaaatggagattgcaa

SEQ ID NO: 33819 - DNA, 1125 bp, Mus musculus
tgcactggaacaataagttcctcttgctttttgcatggatcctggctccatgcagttcattcggggtccccaataagctaaggctccccagagtcttatatcacctcagtagcattttgcctgatttcacatcatgtgtgctctgcagctcccttcctgttccttaatccctgttgtcccctcctgtggtgttccccatcctggttatgtgatacccacatatcttcataagacacttcaagctaggttccacatgtgagagaaggcagacagtacttgtcaggtctggattattttgctgtcttagtgttactattgctgcagtaaaacaccatgaccaagaaggaagctggggaagaaatagtttatttggcttacacttccacagcactgtttatcatggaaggaaggcaggacaggaactcaaacagggcaggaacctggaggcaggacctgatgctgaagccatggaagaatgctgctaactagtttgctcagcctgctttcttatagaacccagaaccaccagcccaaggaaggctccacccacagtgggctgggccattccccatcaacctttaattaagaaaatgctctacagggttgcctacagcctggtcttatgaagacattttttaaattgaagttccctcttctcagatgactgtagttcatatgaaattgacataaactcactcaatatatttttacatccatcaatttttctgagaattatattttcctttgtgcctgaataaaattccattgaatacatatacattctcataatccattcataatagtgggcataaaggctggttctgttttcttgctattgtgaatagagcagcaataattagggatgttcaagtgtctctgtggtagtttttatttcacattagtaatattcacatgtagttacttcaccctgatttttaaaaaacgatcccattaaaataatacagtctttgacttacagcttttcaatttggactgaattaactagcccaatagtagatgggctattattaaataacttaactaatattaaataactgaattaaaaaacaacaggaaaaaaagagtagaatgttctgtaagttcctgctcttggctctgcctctc

SEQ ID NO: 33820 - DNA, 2032 bp, Mus musculus
ggctcacaaccatctataatgagatctgatgccttcttctggggtgtctgaagacagctacaatgtacttacatatattaaataaataaatcttaaaaatatactagaatattaaacatagtagctttacaagttctgtggtattctaagcttggattcactttcttagtaatgtgttagcagtttgaatatttcaggaggaaataggcatcttgctatttaacagcaataaattatttggagatttgatagtggttttgaaagatttgttgtctagccctggagaaaagtctcacgctgttactacttacatgctgcatcatgtttggcaatattttaatttttgtatcatttttgacttgtcatgagaactaattgttgtttgtttatagacacagaaacgtaagatggacggtgcccctgatggccgtggaagaaaaaagaagctgaaactatgaatgcatttttgtcttataatcactaactggtagttctttaatttacgggtcttcataagatgtgctgtacagtgctcaactgttatgtcattcagacatcaggtccatctgcttactgagctagaaacatagtatgtagtttcactttttttaaatgcaacagctgtgctgaaattttttttatcattaacaattgaagtaataaaacaggcttcatttattaataaatgtttcatttgatttatttttctaatagtttcatttgtgaggattgtggctttttatcagctactttaacacttgtatggcttaaaaacaagcaaacaagtaaaaaaatactgcagataacatttgattggtcccttcagcttggttgtgtaattaattacttcacattctttgcctttgctgatttttttttttttttgtggtactattgagtctcatctggaaagattgtaaattgcattcttgcttattatagaatggggaagacaagtattaataattttctatgcatatttctgttatactttctgttcctatggttctgatgtgaatgtgtcctattttgttggatgaatggccttttttagttgtatagccaaagacatttagtattttctggttctttaaggtgatgtattattttgtaaaaggaatttttttaagtatttggaaaatattttgacaaatggccttgcagcagccacaagataatgtcagaagtaaggtgatttttttttttttaaatttgaatgacccagccaaaatgaggtttgaatttgtcatactgttataatactaatagaatgtaccctctcagtttatagtatttttgagtttttagagtaaatgaaaattttattttattatattttaaaaataacttctaagtcttagtagcaagatggagtataattccagtttttattttctatggaatagactggtaaactggagaccctgaagcaggaatacccagaggcctttatgtgctacacatcatttgtataaagttttatatgtgcaaattgggtacataagcagttctccatttttctaagggaatgcaataaatgtagcatcgtgaataaatataacttttataatccttaaagtggtcttttctttccatttctttgaatttttttccccatttatttaactttaacctttgactataagagagtctatttttcttagacctctatgaaacttaaattttgtgtgtgcatgagtcactgaaaagactgatgcccgtattgtgacagtcttatttgtcttaaatgtaggattgctggtgtgtcatgcagatagtcttgggaaattatagagtactttgaattttcatgttctcggagttaattaatattgaacatcaaatgtgccctcattttggaagaaataattgaaaacattttaagatggaagaaaactctataaacaaggtcacaaaattgaggtttggaagatggaaagagattgggaggtgctgtgcagtggaaggaagtagaattgagcatgatgtatctgttgagacctggagatttaaaaatagaagtataaaggga

SEQ ID NO: 33821 - DNA, 2474 bp, Mus musculus
gagggtggattacgttgtggtggaccaacagaagactctggccctgaagagtaccagagaagcttggacggatgggaggcagtccacagagtccgagacacccaccaagaatgtgaagtgaagacatgccgtcgcctctgccggcagacgagatctgagtggaaagagagatgccaagtgaagatgttcccactctcagtggagcctcgagccagcaggggcagagagaaggatctctcacacatgttcaagcaaattaggttgtgaatggtgctgtgtggtattggatttataacgtgtaaataacccggggaaatagtgtttttagttcacagagaagcttctgtccctaattaacacacctgtagtattactatactgatgcacttttcatttaaaaccttggtttgggtcttcccgatctaccttaacagactttccttgggaggtcttttggcctcctcacactactctatataacaatactaagtgaactgagctacttgtaattctggaaattccagttgaagctacagggctaacaccattaaaacaagaagtaagttgacacattcgcttttctcttgaaggtggtagccattagcttaagctgtagaacatagttggacttgtccttcgttgttttccaaaaattccggggatattgtatatagcaggtcaagacctagctctctgactcatgtacacttaggttttaactgtaggactttgttattattattttttttgttaatgacagtgttgggttcatcgtgtgaaggttctgctgggtaggatcttgcacctttcaaagactgcctcttagttacactagtaagcccccaaatcatccacagcatggactgctggcctgctcttactcctgtttatgtgttaaacattatctgcaaaaggcagattatacgactgaccaatcaggtacgtacaaggcactgatgtgctaatacagtgattgggtcagacaaagtgcttcagttagtgtgcgttcgtcctaatcttggtttagaattaatgaaacagttggcgttcactgtcagcagcatagtgtgattttgaatgaattaggcaggaattcaagattactactcttagctcgctcgctctctctctctctccaccgtagtgctcttcctagggttttctttcttctacttaatatcttcttggccttatatttaaatccctatgcaattaatgttttatatctgcgtttttaaaaaagaaatgtcattttaagtgattcttgtatgtagcaagcacctattgcttttgtgagtaaatgaattaagacttttgtactgtgatttgtactcactgccccagttccccaactgttggagccttgctgctgtgaaacgctgtagtcaccatagttgtgtccaccacccagccgggtctgtgagtctcacctgtcacgtgacatcgtctggtgtggatgttggctctgaattagtgtcactgcagttacacgtgtctgtctaggctttgcaagatgctgtagtcaccatagtcgtgaccaccacctagccaggtctgtgagtctcacctgtcacgtgccatcatctggtgtcactgcagttacacgtgtctgtctaggctttgccgcaaccttgagaagcagctagcattttccgttgttcacacagtaaggacaatgtctctgcattgatctgaggctcactggtggcctggggaagggacacagagaacagaatgtctgcagctgaggcttgtctctcttcgttcagacctcttacctgttgcctgagtacacaatgcaccccgctttctggcccactggccacggtgctgtgcctaatctgagttctcccctggcttttccagtcagtttgaaagctgtgttcataactagatgaagtgtagaatagtaatattagatgcttttaaatgttcgcttctttttaaacaaaaactaaaacccagaactgaattttgaggtggatttttaaataaaaaaagattgagtttgctgtgtgagctgtgttacttttttcttacttttaatatactttctatttttttgagcaagcaacaagtgtcaagaaaacacatactggggttggagagatgattcagtgattaaaagcactggctgctcgtaagaaaagactggatttcagttcgagcttgacatagcctctcacaggcaatcataattctggttccgggagtctggctcctctcctggcctctggacactcactgcagacgcgtgcacagacatgcatgcaggtgaaacacccacacacatactaaaaatgttgttatgtatgtattctcttgggaacatgacacgtagagagccagagagagggcccagtgcttacagcacgtgttgcttctgctgagaccagggattcatggtagatctcagccatccatttctccaggtctagggacccagatgccttcttctgacttcctttggcact

SEQ ID NO: 33822 - DNA, 1157 bp, Mus musculus
gtaatttggattaagagtaccaaacagcatgcgactgggaaggacgtgaggatggagggtcccaagctagcttggggcaagctagttaggggatggttcagagaggaggactgagctgagttcggggtggcttatgtgctcagaatagcatctgttacagggccaaaggcggaaaagaagacacaccgaagaggatggcaaacctttgaggagatacaggttgggttattatgaatttgagctctctcccatgtagacagcagacagataaccagtaagcagagggcaccgatatcagaggatggtacatctaaagattcactaaagttggtactacattgattattgggcttgaaactcgagtcattgttgtaagacatgatggccacaccgtaagttgttatgtaattttctcagctaaccttatggatactgtttcattatcatggaagtctaatagttaaaatggtttttcatgagatttttatttaaagttgatttgagcatttgctttgaaggtttcaagaaaactcatctgctttgactgttactcaagcaagactgggaggcagtgtacagctgtctctggggctcccgagacagcagggtaaaaataggacaaactttaagaatcccagatattctcagataacaaagactggtttattggggccttttttgtgcttggacaaaacagagaagcctttgtgctgtgattagcaagggtgctgatgacagatctcctgtcaagcatcaggctttattctatgactaaatggtgctttgtcccgccatccagagaacctttgtatgtgccttgttaaagtgtgagtttatgtaattgcttttgtttttcccgtttcattggtgccagattcaatgagagtgactcattttgtgaccgagacaaacattcacatttagaccatgttaaaaataaacaaacaagaggcaggtgctgcctgcctcggttctgcatctccgggctgctgtttcctgtctcaggagttcaggtctcaggtagtggctactactcagctcccgtggtcactggtccactgtgccccagggcagtttctaaaggccttttggatgttggtgacaggaaggtccaaattaggaaatctggttagatgggaagtagaaagtgatgtgta

SEQ ID NO: 33823 - DNA, 1206 bp, Mus musculus
acatgtgcatcagctcactgtgctcttgaagagtgtcttcctatcagtacctcatttgcctgctctgcaaacggaggctaatggcaaatgttcgattggactattgaagtccagcagcctctgagtcgtgtagagtgcagagaacacgcctacagtgttgtgcagtgaagctctttgtgttgttagagctcagtgtggaccaggctttaaaatctcatgggccgacagcaggcttcttagcagctaatagctcattggaggaaactcttgcttccgaacactcaggccttggccgcctctttaacaagaggtagctgttctcttagaagctgccctggtctttcttctcttccctgctccctgcatccactctggctggcttttgttattaatgtggagcagttgaagtcattgacttgggtgaaggccaggcagcattactgaagtcatatattactttcctggactggccatgagcaggatgataggagtcgggggccagggaagccgcctctctaggcagcccacatgaaaggtgtgtttgttttctccatcatatttgtgtaagtagatctgaagcccattcactgtctctagttttccccacgggctgctcttctctgcttaggctgactactcctgtgtgtgtcgcatctttctttgtcctttgtgacgtcattgcacaaactcctgtctactaattgcaggtagaattgttgagtgagcctggctgtatctgtaggcactttataatatgctaggtcaggtctgtgctttggtgttggcttttgtttttctcatgttagtggaatactgctgggagagagtccttagtgacagtcagtgaaagtcttcctcctcggagtgtggttgaagcacacacttgtttgttctgctctggtatttggggcctgggaaacggcagcggaatgttattaggcattttcctgaacttcctacctgctctttgctggaatactccttgtttggctctggaaaggttccatgctttgatgagcacagacgctcgggggatcggaggctgttttgatggtctgttggcatcatgaaaggagatattgtttgccaggggagatacagtctgggaaagagtgctcaaggatcgtgtgacctcagagtgagacagaacagtggtctttgcctgtgccattgagcttttaaaaaattgtttgtaactaataataa

SEQ ID NO: 33824 - DNA, 1147 bp, Mus musculus
ctttgtcttttctatccagacagtttcattgttatttctttaacagtcctccattggctcagctcacacttactgcacagctagtgtgggcatgatttgttcttggtgcccagtgtcagacagaggcatcttgaagggtaacgactgatatggagccagtgaatataaaacatgctgtctgccagccctaacagtggagacaaagagcagttaaccccggtcacgagaaaactgtggtttcaataaggtttcaattccttatgcctcaaccaggtgatgcagttgccaagaagcccagccggactgcctcatcaccctgtggatgagtgatgagagccaagaagtcccacgtactttcttcctgtcaagcaagccttagagtgcttcggacagacagcagcaaactaggaagtgtttataaggtctctccattgccaccttgaagaaagccaccatgtccctggttctgggctcagcctttccagttagatcaaattgatcacacagcatgatttcagtcccttaactgtgcgaatctttctgtgtataattaatatcgcctcttaaactgctgctctcagaaggcacctggtgtctccaggtgtggtttcttctaatgccttttgactttctttccttgagctaggttttgttttttgttttttgttttgttttgtttttacagatttatgtatttattatatgtaagtacactgtagctttcttcagacaccccagaagagggcatcagatctcattacggatggttgtgagccaccacgtggttgctggggtttgaacctaggaccttcggaagagcaatcagtgctcttaaccgctgagccatctctccagcccttgagctaggtttttgtttgtttgttttgttgttttgtttaattaggcagttgacgattgaggtacccgtaaaagaataaaagtagaagaatgctctggttggttctcagtgtcaaagtattgctaggccgcttcccttgttcagtttattcctgtgtacagtatagtaacttagatttctctctcttaaaattataagttctttgctttccacactttattttctgtcaggatcttatttttttaatttgtttatttttatgtgtgcatgtttggctttttatgtgtt

SEQ ID NO: 33825 - DNA, 1489 bp, Mus musculus
gcctcccaagtgctgggactaaaggcgtgcgacaccacgcctggcttctatcacttttttttttcttcgaaatatgtgctgtcactctgtagctggggctggcttggaattccttctgtagatcaggccagacttgaacttttgagagatcgacctgctctgcctcctcccaagtgctgggattacaggtgtgaaataccacacccagatttttaactttaattttttaaaagtatcttaggagatatttggtaagttgacctttgtccagcaggtttgaagctttttctgggaggcagactttcttctgggaggttttgtgtgtgtgtgtgttgtgcgggtgcctatgtaaacccataaatgcttctaccaggacagacagggtaaactatggcccctgtagagtgatgctcacattataaagatgccatatctgtagcctgggatctgtgtctgtccttgacacgtgatcaagaccaaaactttgggttctaatattagaattgaaagagaaggcttctagatgtgttcatttgtactgttttgtttgtttgtttttgtttgtgtgtgtgtgtgtggggggggggtggtgatgagatacaggtgtccagttctcatttcatgaggcgggtttgaggagcactgctcatcggagggcctctcagtgtgaagggtgtgtgggatggatggctctgtggtgaggcgcctttataatctgtacccagtatgatgctttcttactacgtaccctctcagttcattttgcctccttcttctgtccagtgctagggattgaacccagggtttcacacatgtgagacaggcgttgtggctgcactcccagctcatgcctctttgggatggagtgtttccggttagagacagtagctctgacctatcaaagactatgaattgaagctgggtgcctgtaatcctagcccttaggcgggcgaggcaggaggatcggtggggctttgagggtagcctggaatatctagacagaccttgtcaataataataataataattattattattattattattattattattcagcaatgacggtacatttactaggctcaccaaggggctatagaggtgtctcagcggttaagagcacttgttgctcttgcagaggacctgggttcagttcccagcacccacatggtggttcacaaccatatcatccaggaaatccaatgcccttttcggggctctgtaacactgtgtgttccatatacacgcaggcagaaacactcacacacagaaaacaaaacacatctaaaacataattgaaaaagtagactcaccagaaatggggttccccttcccagttgagggctttactttttcttttgtctcttcaaagcctgttcttaatactttcaatatagggtctcatggtgcccaggatggttttgaactcctgattctcctgccttagccttctcatttgctttgtatgtatcaccacaagacttactta

SEQ ID NO: 33826 - DNA, 1197 bp, Mus musculus
ggtttagtccattgtcttcatggcagggaacatgctggcacgtaggcaaacatggtgctggagaagttgagaatattacatccagatctacaggcaacaggaagagagagccactggacccggctcaggcttttgaagccggaaagcttagcgtggtgacacacattctcctgcaaggccacacctcttactctttctctctctctctctctctctctctctctctctctctctctctctctctctctctctctctctctctcgttagcagcactactccccaatgacaaagcattcaaatctatgagcctataggggccatccctattcaaaccaccacactagtaataatgattacaatcataatcagaattaattaagtgttggaggagttgaggcaatgccatctcaaaaatagtgcttcagttcatggactccttgaactgagaacactgggcaggattcaagcagctgctttctctgagttcttcctacctgcctcaagactgaccctctaaaattcatcacctagggtactggaagggaaaagtggaagatgacaccatgctccgatggactgtcacctcttcttctggggactgctctagacaacttgtccgcttgaagggtgtttctacattgcaagaccactttgagccctaaggcttgccccagccttagagaaactgtctctactgtgccctcccaacaccctcaagattcagtcctttctctggtgcagggtactgtgtaagcttgaatctgacccttatggggccttttactttgtttatttttctcttataaatttagttttatgtgaatttaatttgtggctcagccaaggaactcaggaaggtggtggaagccaccgttcattcccctacccttacactagctgagaattatggaaaataacattcaattgttgacacctacgaccctctatacctgtgggtcatgacctacataggggtcgtgacctgcacaggggtcacacatcatatctactgcatattagagatttacattacaattcataacagtagcaaaattgcagtcatgatgtagcaatgaaataattttatggttcggggtcactgcaagttgaatttaaagggctgcagcattgggcagtttgagagccactattctgtacacaccatcattctatagtcgatttccattcccactcag

SEQ ID NO: 33827 - DNA, 1529 bp, Mus musculus
cccaccaggaagctgtgggccaactggtgggggcggtggaggaggcttcaatacagttggcagactcgtattttgaccctgagagaactgaaaatgtatctggtcacaaaacatccaatactgtggctgttaaaatgtcaggctgtaacctatagcatatctatcttttatttttcttttcattagacccgaatactttaagaaaatatactcagtggttgtttttattttcttgacaaaaattcatcatggaaaaaaaaaatctacctcttaaactcatttgcagttacagttagacatgtttggccacaagtatttagaggaaaaggcatacctgctccctaattaagctgcattaaatttggtagaaggatttaaatggtgtattttcagttgtactgaacaaaataattcacttatcattctttgtacaaaaattgatgctagatatatcttaagaaaaatgaaattcttatttctggtataattaccccaatattaaattcaagtctttgaaaatagtagagatggtgagtctctggaggcgatagcaccttccaccccagctgccagtctctgggctgctgtctccgctgtcctcggcgttgcactccagattcaggaacaagtgtcatttacacacgtggcaagtgaattcacacaaggtgcatgacgccagagggcaggggttttaactgaactttgtaggatttccagttgtccaaggactttaaaatcctgtttcagggagtgtatctcctatgtgttttaaaggaggtgagtctctgaatgtgccttgcagtactgtaattcaaaaataggttctctttggctgcggcggaaagttttctaaaacaaagcgttaggaaggaattttgtgctaacattaaaattataattttttaaggtattagatatttcagaagtaagatctggtggttctaaactagtaagtgtaatggtaaatttctaactcttagaaaaattcggaggaaatgaagctagtttaagtaaaaaatctttaattgatttgttacttaatcttcacattaaacattgataacatttttagagttgtatatttggatttttttcctttgagacacatgccttacacataaaatataatctgcttcatgaaatattaaaatgccacacctcacttccctactgtcctgttttggttttcctttttgatcctggggtgtttgctatttaggtgggtgtttaggtgtttaggtgggtgttttttgcacgcgcgcacgtacatatgtgtgtgttgtagcaggaaattggaaacatgtcagtcctcctgggacttgactatatagtactcaagcattgtcccaaagatccgtcttcctggccattttagcacatccatgcccatgtattgttctgaagatcagtcacatttattatgaaaacactttaaggaaataatggtctttggtggcttaaggtttatctttttcccaagcatttgtggcagtaattaaaaacagctcctcatcttcgtcctgctgccc

SEQ ID NO: 33828 - DNA, 1134 bp, Mus musculus
aaagcgggggtgggtgggtgggggggaggagtggagggctctgcagtttcctgtgagcacgcctataatcctagtgctgagagacagaggtaatggagtcgtggcttcaaggccagggttccattcattatgtctcagaaaataacaacaacaaaaattaaaaatgtgccatgtgaggcttgtcaggctcccagaaaggaaaaggatttcagaagagtcaggcaaaaaattgctagcaaagttcttgttctcctctcaaaattttttgtgggctcgtctttcttttccttttggactttttagctctctgagttaaataataaaatcagaatgacatagcagaggccttgagatgcggcagctctctgccctctactttctttgcaacgctggagcctctttccattgtagcaagtccacttccgggaaggcgggtcctccccgaggagggggcggaacatgcgggattcttcctgttgacgtgttcaacctgggcgctctgacatagcaggatatccggtctcgctcccaccgttggaaacgggctgcttctgccgttctagcccgcggctcgccctctcctccgcgtcctcggccactgcggtgagtggcgcgtccccgtgaggccgcgcgacgtgggtgggtctggagaacgtgaggggccctcgggctgctggcgggtcgcgagccgcgtggctcttcccgcgcccccgcctcctggcctcccagagcctggaacccaatgtcgctctgctgtcaccaggatctaagcttgaactcaaagaaatctctcctcgttggcacaaacagattcgaggaaaaaaataggtctgagatgtcttagtgggtacagaattcatccacggtcacccgtggccactcagccacatgctccagacttcccttttaaacactgaaggaaggccccgtggcgtggccagcatgattaaccactgattagctctgaagactgtcctgtccgaaaggattggggcaccagagtgagaacacagaagcctggttgtctctgttgtagtttttctgtgtgctgaaaaccagcactgtaaggtttgatgtctgtgtgggaaacaaactccaaagcatctgacttgtcgaaactgttgcatctaggca

SEQ ID NO: 33829 - DNA, 1108 bp, Mus musculus
gatttttaccacttccatactttctgtagagacaagaaattatatcatgtcgctatagaggttacgtttgcagggaggggattctgcaggaagacgtaactagacgtgtaaaacagagcctgtcactttatttaacagaatggaatgttctggctcctggtggggtgtggccatcaaagctggcatgtctgcactttgaatccttatttccgtttactgctgttagcttttgctggttgcagccactgggagaccttccgctggggctctcggccacacaaccacgttcctgttcacagtacctctgcctgttctgaggttgctttccaacgttccctttgtttattacataccgtgtcctttctttagctgtcccagatgtaattttttttaaattttatttgcagaatgatttttaaactgtcaaatgaaggagttatgaacctcggctaggataaatgtgaacaaataaaatacttcagatatggctcgatgtccttgtacttgagtttctgcctgcttgagtttctgcctgagaccatatgttgttcctttgacaattttgtagggaatctatcagcagacgaccatttcgagtaagtaaaattttatgagaaaatattttgagataagaaaatgtgtagagccaagaaattttttttttttttggtgtttttgagacagggtttctctgtgtagtcctggctgtcctggaactcactttgtagaccaggctgacctcaaactcagaaatccgcctgcctctgcctcccgagtgctgggattaaaggcgtgcgccaccacgcccagctcaagaaatatttcttaaaaatagaagtacagtgctgcattccaaaaatatttgaaataaaaaagatagtttatgttagggtttccattactgtgaagagacaccatgaccacggcaactcttacaaaggcaaacatttagtttggattgggttacagtctcagaggtttagccaaatattatcatggcagaaagcatggcagcatgcaagcagacatggtgttgaagatggagctgagagctctacatcttaatcttcagggagcaaggagaaattgtgtaccacactagtcatag

SEQ ID NO: 33830 - DNA, 1226 bp, Mus musculus
gctaaaaactccctattgcataaaatagttcatttggtgttgaaaagataggaatgctggtcatatgtgtgtgagaaattaaaaaacaacaaacaaacaaaaaacttgagaaaagataggaataagaaggaaaactggattaacagaaataaccagctcgcagtgttttccctctaaatgtgtattacctctggcccacagctgcactttggggacatatatgaaagtggactgagtctaatgtaagtggattaagagagactagttaagagtttggtctcaaagtttatttgtacccaggaaatgaacttttgcaaaattaattgagagtatattaatatcagaatcatgaatataagagttttgtatatgtgataattattaacctcggtattttatctcagttgttttcccagaatttctgtaaactcaactacttagtttgcagaattttagtcattcttttaacaaattttaaaaatttagtttgtagcttccatttgataaggagctgatatcagaaataatagtgaagtcttataataggaaagatccactaatgcagctggtggctcttaggctgggctgctttgacttgtggaattatctaatgtattaatgtaagccttgatgagtgacgttagctatatggatgtgtaatcctcacattgcagacattttgcaacccttttgtgaccttgttacagatatttaaaattgtgttcaagttctgctttgctgtttaataaaaagctgtttcagaggttttgtgtgtgtgtgtgttttgatacacttgctaagtacatgtgcattgggtatccagggtttgcagtatcacattgtaatagtgtatcttatttaagcacccaagactgctacagggcagtctttagtagcacagtgttgcagaagcttaccctttattgaagttctagggaagggggctggcttagggttaggctccttcccctcacttgttcccaggctagagggctctgctgcatagattgttctgtcatggcttctgcatcatcagttacactattcattctatttacaggaaagagtttgtgagtgcccagaatctaggtatgaagagttctgtcttgaaatggtccaggcctctttacatccaaagcctcggattggctgagcagtgtgatttcttccatgtgggaggaagtgaaggacttgtcctagcagtcctagccacagcttgatctctt

SEQ ID NO: 33831 - DNA, 1140 bp, Mus musculus
gaaggagggaatggaatgctgtggagagcctgaaggacaataaaccctgctacaaacttgaccacattgtcaaggagcggtaccccacatttatcgatgctctgctggacctcgaggatgccctgtcaatgtgcttcctcttctccaccttcccttggactggcaagtgtcacatgcagaccattcagttgtgccaccggctcactgtgcagttcttgccctacgtcatcactgcccaagccctgccctgtccaataaaggcatttattatcaggctgaagtgctgggtcagctcatcgtatggattgcaccctatgctttctcccatgatcatccgacagatgtggactacagggtcatggccaccttcactgagttctataccatgctcctgggcttcgtcaacttccatctctaccagtcactcaaccttcactacccaccaaagcttgaaggtcaagcccaagcagagacaaagatcagcgaggacacatatgcattggactctgagagctctatggagaaactggctgccctcagtgccagcctggcccgagtggtggtgcctgctctagaggaggctgaggctgatgaattccctactgatagggaggtgacagcacaggaggaagatcggaggaaagagctggaggcacaggaaaagcacaagaaactctttgaaggcccgaagttctttctgaaccgagaggtgccccgtgaagcattggccttcatcatcaggagttttggtggggatgtatcctgggacaagtctctgtgtattggagccacctatgacgtcacagactcatgcatcacccaccagtttgttgaccggccggggcagcaaacccccatcattggcaggtactatgtacagccccagtgggtctttgactgtgtgaatgcccggctcctcctccctatggcagagtacttccccagggttgcagctgcccccacatctttcacccttcgtatctgagaaggaaggagattacattctccctgagaagctgaagctcctggctctgcagtggggagaagacccaggaaacttggaaaaggaggaggaggaggatgaagatgatgacaacgaacgtgatgttgcatgggaaaatgaggaggaggaagatatgg

SEQ ID NO: 33832 - DNA, 1182 bp, Mus musculus
catagatctgccagcttgggaacttctccatccacatggctcttcgggaccttcggcctgctggtgagtggcttgctggggctggggctgggtgagcagggtgaggagggggtctgacctactcttatcctccatgccagggtcgaaaaccaggaagatcccataccccaccaagaaccccttcacctggctgttcctgttggtgtcctgtcccaactacacttatgaggtgagggactgtactgcctttgtcctctcaggtctgaggtcctgcacatggtgaagtgcaggagtgggctgtggggagtgagaaagcttgacctcagtgaggctgtggccgtcccccggggctgtgatgctgggcttccctctctgtcctcattctgcctgtactgtccacaggtgggctcctggattggctttgccatcttgactcagtgtgtcccaggtgagttccttgtccctgtgcggtgcgctgcccttccagcaaggcagcctcattctgataccccattctgcccacagtggccctcttctccctggtgggcttcacccagatgactatctgggccaagggcaaacaccgcagctacctgaaggagttccgcgactacccgcccctgcgcatgcccattattcccttcctgctctgagcagctcctcacggctctgcccagtaatactctccacccctcactgcccctgtcctgatgtgtggctggccatggctctccagcagcaacaataaaacctgcttacccaactgactgtgtgttctttaggggtacagggaccacaccattccttcccatccttgaagtagcacagatgaagtttaggcaggtgacccaaagcttttatttcactgataggtccacaggctggcgggtaatccctacagggccacctcagggcccacctctccttctccctggccttgggctacccgtgcttccttcagtgcccttcgcttcttcctttggagcagtcgccgctcacgttcaaactccttcatgcgtttcacgtaactgtgggcagaacatagagggtctcagtgccataggttttgtcttgagtccattccagccacctggaagcccttgctaggggtgaggcctcccccaggaattctgacttggcccctgtcctaggtggctccagcctcttcccatgcccatgtgg

SEQ ID NO: 33833 - DNA, 1068 bp, Mus musculus
ctctggcacatatgggcaagcaggcctgggtaccactgcctggcataggaaccttgctctgaactcaagcccaggccctacagggcagcatcactgtgtagggttacctccgtgggggcttcccgacctgtacatgcacacatacacacatgcatacactttctgtgtgccagcaccatgtcggcccacccatgccttctcaaggacccctagcagatctgggatcgtgccatggcctctgttgttgggagcatgtaggtggcaacagttggcttctctggcctgtgatgcccccttcttctggaaaaaagtggcagatctccgcatagcccttgggtctcccccagccagcatgggcagtgttgagcatcttctctgacctgctgggtccgatgggtcagatcccctggggctcctgcctccttaccctgcccctatgcatattttctggcctcagcctgcaggtttctcctttggggactgtggaccccaggggtgcaggcagggtatgtgttgggagggtatgtgttgggctttggtaggctcgtccatgggtgagcacattgtgttggcctgatgtggtaggagctgtgaggagtgaggcggtggagagggaggtggagggacttgggaactctgcaccagtacctctggaatttgtcacctccctgggaacacaaatgcacaagggaaataatccagtgtcccttacagcttagaagtggaaatggatgatctgtctcggagattctccagatagctggcatttccccaggctgggtaacctgttggccagggctgcacaccggggctgggcttgcggcgcctgccatggctgtgggccttttccttcttcatgcccctggcacttctgagggcctgtgcccacccaattaactgcctgtatgagggtagccctcaggggaggactgtggctcctttggtggggactcgggctgagatggttttatatttagccaggccaggccctggtgccactcgggttacatctggcgttggcgctggctgagcctggtcagacacaggctcccttccagcaccgaggca

SEQ ID NO: 33834 - DNA, 2246 bp, Mus musculus
catgaccttcgggtctcccttgaagagatctacagcggctgtaccaagaagatgaaaatctcccacaagcggctgaaccctgatggaaagagcattcgaaatgaagataagatcctgaccatcgaagtgaagaggggctggaaagaagggaccaaaatcacctttcccaaggaaggggaccagacctcgaacaacattccagcagacatcgtctttgttttaaaggacaagccacacaatatcttcaagagagatggttctgatgtcatctatccagccaggattagccttcgggaggtaaggtgctaggtgggtggaggagtcataaaaagagatggctgctgtgagaataatgggttgtggggttgggggggctttggagtggggtgtcagcgggcctggtctggtagacctgacccttctccggacggtctggaggagtgaagctcctaagccagccactgcctgacactgtccttttgcttccctaggctctctgtggttgcactgtgaatgtccctactctggacggcaggaccatccctgttgtattcaaagatgtcatcaggcctggtatgcggcggaaagtccctggagaaggcctccctctccccaaaacacctgagaaacgtggagaccttgttatcgagtttgaagtgatcttcccggaaaggattcccgtctcatccagaaccatcctggagcaggttcttcccatatagccacctgcactcctcaaggactgagccaggggctttcagagctgcagatctccagaccgttccactggttgcatactgcgggagggcccagggagggcttttgctctgccgaatgttttccacagaatatattacaatctttcaaagtcgcgcactagactacagtggtttttcgagcgataggcaggcggtgggaacagcagccctcctggaatggacccaccctctgcaccccagctcctgcccaagggtgtgaggcaggcctgcaactggactcttgccctctgttgtccttagtctggctgtcatgtgacagtggtccgccatctcagttgccagaccctgtgcactagtcagtctccactgtgtgggaggttcttgttttatctgtatttgtcccatgccttgttcctcctccccagaagagtcctgtcttgtcttggccatctcaaattgagaccaattccctaggactgccaggccagcatcacaagcaatacctggttgcaggaccacagggccagcctccttccaggttctggggcctggccagccaggagatcccctggacctctggctccattgacatcagatggctggcttacagtcacagtacttgctggtccagaggtagaccttggccacacctggcacttctcagaggcacaggtgattttgtgtgtgtgtgtgtgtgtgtgtgtgtgtgtgtgtgtgtgtgtgtgtgtgtaatggactctgaactctagaaggatacaatccttttggattttgcacagtcctagatctaatcccttttgataaaagggtctttgcttctgatgaaaggagcactgtggaacgtatgtaaatatgtttttataattccattggaagctggtgtgcactcagacgaaagcagtccctgtcaactactgtccagggctgtgatgggatcagacctgggcgtgaaagtatctgttctttggagctagcctggtgttctgaccattcaactcattgtaagttgccactaccaacacaagaccaaagtgtgtgacttgtcattatgcagtgtgacagcattaaagactgatgctaaacctcaggggagcagtccttcgactctgtttgagggctttgctggggggaggagcggcatggttactgttctcattctcaaaagaaagctctgtttcccttcctgggacacattggtttcccgttcaggaccccagcatcactgtggtgacggttggggtaggagcccgccctgagtgccttttctaccttgcaagctcctggccacatctggggacctagtaaccaccagggctgaggattacagtgccatctgcctgaattcccccttccaacttggtagggtaggctaggctagcctagagctaggatgcacctgcccagagttggctgctctggggagaaacccacttcctttccccacttgataggggtgtctgagaacttctttgaagaggtaggttgattatagagcaatgtgttggttttgtctctgtgttctggtgg

SEQ ID NO: 33835 - DNA, 1180 bp, Mus musculus
ccttgagaggcttgtactctagtaggtgggggttggggatgtgtgttcccaacaggccttatgaggctcggaggttgtattgcccattaggtctgaagtagcctgtgtcctggtaggttgtggaggactgacagacacgtggtagctgggtttccataaggtattaggaggcttgtgcccccaaacactgggagctggaggtcaggagcagcttctatttctccatgatgccctggaggcatgactccaagctcgaagctgagaagccgcagggtgggagggcgacagtggggcagagattcaagtagaggcgggtaggaaggctgggtgggagtctagggtccattcactcctcagtaggtatcaagtgctctctgtatatcaagctagctctgagttttaccacgacagaaatcctgctcgtagtatgtggacctctccttggccctgggtgtcaccagtccctagggtagggatgtgttgggaaagaagacccagggaggaaggcatgagcatcctgccctacctctgcaggtgatgttctgcaccctcaacacccacaaagtggacatggacaaactcctggggggccagatcggcctggaagacttcatctttgcccatgtgaaggggcagcgcaaagaggtggaagtgttcaagtcggaggaggctctggggctcaccatcaccgacaacggggccggctacgccttcattaaggtgcccgggtgggtggcacacccttagtcagtggccagggtctgtaatgggacctagagtggagcttccagggttgatgcctgcccctccacagcgcatcaaggaaggcagtgtgattgaccacattcagctcatcagcgtgggggacatgattgaagccatcaacgggcagagcctgctgggctgtcggcattacgaggttgccaggctcctcaaggagctgccccgaggccgcaccttcaccctcaaactcacagaacctcgaaaggcctttggtgagccatccttgcaccctggaccacccactgggatgaccttgagctcttaagaaatacaggtggcagtcctgggaaccaccagcaggtggcgcccgagcctgcaatgcaaaatggggacagccccaccctacccaagaactaagtgctggctgacagcccagcctgaaggaagttgtccccac

SEQ ID NO: 33836 - DNA, 1741 bp, Mus musculus
tatgagaatgatcatttctgggtgttggggactaaagagatggcttagcagtttagagcacgtgtgactcttgcagatcacccaggttcagttccaagtacccataatgggtggctcacagtcatctgttaactccaattccagaggtccagtgttctgacctccacaggcaccaggcagacacttgtacacatacacatgtgcaaccaaagcagtcctctacataaaataagtaacgacaaaaccaggagctggggatgcagctcactggtagagctgttgctgagtccctgggagccgtccccagcacttagggcatccagtgcctatcacagtactgttgacgttattgtgctgtcttgtccccgccctccacagccgtcggcctttgaggagaaggccattgagaaggtggatgacttgctagagagctacatggggatcagagacacggagctgggtgagtggggcacccacccatgcctgcaaggtgggagtgggcttccaggtctcacccaggctgagttgagcctacacctctgcccatcatgacatctgtgcctccatcttttccagctgccaccatggtggagctgggaaaggacaaaaggaacccggacgagctggcagaagccctggatgagcggctcggtgacttcgcattcccagatgaatttgtctttgatgtctggggagctatcggggatgccaaggttggccgctactaagactggaactgaacctggaccttgagataacctggcttggcctggctggggtttccaggaggggtgccacagccgggacctgggcacacagccgaggctcgtaaatcagcagcctgggaaaggcatggggtgcaaatgccctgtggtcctggccccactccaatcagtaccaccacggtgcccagcctggttggggtccccggccaacccctgccgggttccccacctacctcaatagagtactcgcatgggagggaccaacacactgggcagtcacctctgtccccaacatttcccaccatcagctggcaactgccccttctgtccccctgggcctcagttctctttggggtcatgacctccctactttactttttttgctttgtttattttcaagacaaagtcactatgtagctctggctgtcctggaactcattctgtagaccaggctggccttgaactcacagagatccacctgcatctgcattcacagtgctgggattaaaggtgtgcgtcaccactccctgctctccctgctttcttgacaccagaaatgcagaatggcaataatgccttcccttgggcatctcccacctgaggggagccctctcagttggggtctgttacctcccatttgagtggacactgctgtgaaccccggttccttgtctttagacaatgaggagggagggggagggaggcagtgggcttttgtgtccacacaccctctcttggatatagagattttactctgggagctgtttggctctggggaaggaggggtggccagggaaagaatgcagcagctgaaatctatctcctggattccaaattgaattaggaattggctgccctgctgccccctccccctggctggaggccgtcaagcttccaggcagtgctggagtttctggctggcttggggttcagacctggttccccactcacccaggcctcacatatgctcctcttgtgtgagagcccccgtgtgtggcagcaaggcctgttgccct

SEQ ID NO: 33837 - DNA, 1208 bp, Mus musculus
gcaatctctcaccagtctggcattgcctcattcagatgcccatcccatacccctatttgaaccgcccccggcttgcccattctctagttgagaggagatggacagcctaggactgagagccattaaacagcaagagagcaggagggctatagctagccttctttggcttgctatcctcaatgtcccagcttcttacccagtgctgctcaggatgcagggtccccatggcctggaacttggctcctgctgcctgctccagctactccctggctcccggcaggccgctccctcttcctggggcggctcctcggctccgtgccgcctccacccgcacttcactggcctccaggggctgctccaccccatgcatgtctgctctctggggctgggagccttgagtgggcaaaactgctggcaacagtcagggcaactgggcccagctccttcccgccaaggactgaggttctctgaattggtttggtctctgtgacccccctcctctcagcggggcaggagcaaacccccacaccctcacccgggcctcttgcccgcctcattaataaagtggataaaatctaaacactggaaaatgtgagcatcgcctggggcaggctggaagggctatgagttcccgtggggggcgggggggggcaggagagtgagtgtgtgtgtggaggagtgttgtcctcattggacttgaggggttgggagttgcctgggtgtgatgggagctagcaatgcctcctacccttgcctttatggttgtcacagttgggcagaggtgggcagcctagaccagggcaacagggagtcatcctaggtgaagagaggtggctaaatgactcaggggagccaggctatcatctgtatcctgccttatggggaggtaggcaattcatagggcaccctgcatccatagctatgtctcaccttctgtcttgaaaaggggcacacatgcagccactgtcagcttagtcataatggggagtaaacactggatagcactcaccattgctgactgtaacatctatcccccctcccccatatgaaactgatgcttacctcagcactgggtgtaaatctcactgtcactgtaagtctgttcccagccccagagcacacctcctgatgtagtctcccttaaaccaatgcccatggaccccgagaacttgtcctgagacacataatcacatctctaaggcctgttt

SEQ ID NO: 33838 - DNA, 1200 bp, Mus musculus
tatccccgcttcctgtctgcagaggccatcggcatcatgagaagggtaggcacacctcccgcctcccgaccacctccggcaaggtaggctgggaaggggtctcgggactggactcagatatagatcaactcctgtgcatgctcacagctactgcggaggaacccggagcggaggctggggtccactgagcgcgatgcagaagatgtgaaaaaacagcctttcttccgggtgagcggacccctccccatcctctcagtcaccccaaggacctgagtattcttctcagttccagttcattcccaccccaaatctagtagctgtatcttaaagagctttgtagccccacacctcacagccaccatgattcttcacaaatgttacctccgtttgtctgcaaccttcatttcccttaattgtcatccccactgcttctccaggcccaaatcatcatcacagggcttaccctggactacctcaggctccctagatttatctgagttcccagtccctccccatcttatctgcttcctgctgatctctagacttcccttcagaccctcaaagtccatcatgactcactctgtccccctctccacagtctctgggctgggatgtcctgctggcccgccgcttgcctccacccttcgtgcctacactttcagggcgcacagatgtcagcaacttcgatgaggagttcactggggaggcccccacactgagtcctccccgggatgcacggcccctcacagctgcggagcaggcagccttccgggatttcgactttgtggccggaggctactagccccaagcccctgccttacccaagagttcttgattttttaaaaaacaagcctttggggtttactccatacatgcattttcagcctctgtgtgcatctggactggagtgtgcttggagcaggtgacagaggcaaggcagactcttgggggcaggactgatggggcacatttgaaaggtcaagatgggaacatgcagtagtgggcttaggggtatgttggagagcattggggttttaaggccgtgtgggtagaaggtgttgagattcttgggatagtttgggatagacgcttgcaagagtctattggggtggtgacagagatgggaagtgaatccaaaactttgctctatttatggagagcccgaatcttagaactaaggttgcggcgctgtgcgcatgc

SEQ ID NO: 33839 - DNA, 1187 bp, Mus musculus
agagctcccctcttcctgtgcgtactgacataggatgcagttcctgtgactcatctgtgactcctcccctttccagagtgaactctgacatgtcttcctctctgctcatggtgtaacagtccactagagctcacacagtcacaggcaggaggttcggactcaagtgtccagtcttggaactgcctcgggtttggggtcagggtcctaggttaaaatcatcctctaacagatgtgcttccagatgctgggaaaggcaggccttccttagaacttagcctcctgatctgtcagatgcccttggatctcgtcctcttacgactgtctagcacattaaagaggaggtcgagtcagagaattattcacagttcttgatccctgtggaggcttcaggctgtccctagacttcccagccacctttttaatgaccaagaactttaataaccaggaacaaaagctcaaataaggaagagtttatttattaatctgggttgcagagcccagtgtgtctgccttaaggcgcctctgtcctgatgccactgcggtgtcactgcggttggtcgtcggtctgcttgtctgcgggctgggcttgccgtcctctcactgacagggagggaagcctctcaccactgatcagaccccatgcttcagtcgttacaccgagcctgatgagcgggccagtgcttcccaagcccgtccccagcatggactcagactgtctgtctgcttgagccttgcacccttacccatttcccaaaatgagaaaagaatccaatcgctcaaaattgcacagcggtgcaactcaacagatacctgagtgaacctggagggcatgggtattggaggggcagctgggctctctgacttctgcctcctgtccagcctgatgtgtgagaagcggattttggcggccgtgaccagggcaggacatcccttcctggtgaaccttttcggctgtttccagaccccagagcacgtgtgctttgtgatggagtactcggcgggtggagacctgatgctgcacattcatagcgacgtgttctcagagcctcgggctgtgtgagtctatcccagcaccatgcccctcctgcacaccacccgaggccccgcctttctgccccacctcctagccctccaccctcaggccttcctcctgcacagctttgggaccccccaccaccccccggggt

SEQ ID NO: 33840 - DNA, 1171 bp, Mus musculus
ggctgacatgtgtatgcctggaaccctagtactcaggaggctaaggcaggaggattcaaagccaatctgggttatgcagtaagttctaggctagcttggtctttagagtaagattgtatctcaaaaccaaaagaaaaacacaaaaatgagcaaccccttccccccaaaccccagtctgaattaaaggctttattgtgaaaggcaagctggctgagggagttgaggggctctgacaggatatggagcaagccctcccctccccctttcctgccgccctctcctggtttcagctgaggtcagcaccgtgctcaagctggacaacacagtggtggggcaaacagcctggaagccatgcggccccaatgcctgggaccagagctttaccctggagctggagagggtgagccgtgctcggggaatgggaattagaaggggagtttaggcgtcagacacaggaagtgatggccctgtttcttcttaaggctcgggagctggagctggctgtgttctggcgagaccagaggggtctgtgtgctctcaaatttctgaagttggaggacttcttggacaacgagaggcatgaggtgcagctggacatggaaccccagggctgcctggtggctgaggtacagcctggtttctgacttctgaccccaagatgtttcctgcctccttgcctccaattgcttagcatggggaggttaatttcagaggtttctgaatcttcatgggaagtaagcctcacgaaggctgggattggtgccaggcgaatcagcagcaacagaccacatacgtgatcgtgttcccagaaggctgggcctcgtcaattgcatgttggtctggcaataggcaggactcaatgggtagaatgcttgcctagcatgcacaaagccatgggccccatttctagttcagataaaactaggtgtaggtactggagagatggctcagcagttaagagctctggctgctctccagaggacccagatttgattcccaacacctacatggccacttacagctgtctgtaactccagttccaggggaactgacaccctcttttggcctcagtcactaggttctcatgtgttgcacagacatacatgcaggcaagacactcatatacattaagcaaacaaacaagcaaacattaacactagatataatacaa

SEQ ID NO: 33841 - DNA, 1673 bp, Mus musculus
gttagcatcctacctcaggaagatggaactatttttgcaggctagggaagatgagagacaggcctggctggtgtgtgccttgtacttggtgtataagggattaataaagtgtgtgtgggggggggggtgagctcgtctcctgagaattccatttagcatcttaactggctggcttgctggcctggcccaatgggaatcctcttcataaaagctcttaatgattcccctgtgtagaccacaaaaggtaggggaggctaggctaggctgggctgggctgggctgggctggtaggggaaatgctgcttgcttcttgaccacaacaactcctttctcaacaccaaggcaggtacaacttcaggtccaagctgtgggttccaggagctccttgggagggtggtctgagaaaccttattagtgccaaaacttgaatgtcagtgaggacacattagccaggtgaaatgatgtcaacctgtaactgtccgttctggaacagccaggactattagggctgtctaaaaaaaatcttgtatatacagacttgaaaacggccatgagggctatagtgacgaatctgtgtgataactatcacttatttgatttgtggtgttggggatagaacctggtagatcactgggccaggtccccatttgtagtatggtagaccttagaatgcttgggctgggtggcattggatgggagagtggtgtgtagcagatgggaggttgctgagaggatggtgacaggacagtaggctgaagtgggaagtcctgtacaccactgagctctgcctgtccagggcttgcccctgccaccctttccttatcctccttctctgccaagtgggttttcctacgtggttctcagatgtgtttctaccttaccctcttttctgttctcagtgccatggcagaacaggatgtggaaaatgaacttttggattatgatgaagatgaagagccccaggcaccccaggagagcactccagctcccccgaagaaagatgtcaaaggatcttatgtctccatccacagttctggcttccgggactttctactgaagccagagctcctgagagctatagttgactgtggctttgagcatccttcagagggtatgctacactggtgccaccctgttatgccctcttcccagagtaaatcctacccatcctgagcttctcctgtgccttggataggggatatgtcctccccgtgagtcagttatatcagcagcctctatgcaagcagatggttggggtctggcagaagagtgtgcagagaggcagcagccagtgtcttaactcacacgcttttttctttcttagtccagcatgagtgtattccccaggccattctgggtatggatgtcctgtgccaggccaagtctgggatgggcaagacagctgtgtttgtgctggccaccctgcagcagattgagcctgtcaatggccaggtaggtgtgggctcttttctgggctagagttaccacatgacagtacagtcttgggcctcataaaactacttccattttctctgtgggcttttgaatgtatctgggaagtgaaattttactgactgcagtcaccacagtgactgctgacttgttttgcaggtgttcttaacactaccactatagatacattgtaggatcttaagatttacactggagtccag

SEQ ID NO: 33842 - DNA, 1118 bp, Mus musculus
gcctgtttgttgctctctaggtatcagtcctggtcatgtgccacacgagggagctggccttccagatcagcaaggagtatgagcgcttctctaagtacatgcccagtgttaaggtaagcctcctcaggtgctgtgctgggtaccacggggccttctggagccctgctggcctcagtgtcagctcaagcagcatttctcaatcttgaggtttatgctaacttatgttccttatgagcctgatgaattatgcccaacccacaaggcttgtgctggtcccacatacctcagccttgccctgttttttcggccccgcctgggttctgagggagtggggctggagtgtcaggtcccctcaggatgggtgggacctatgctgtaaggatcactgcccccagatggtggaaacagctttctttctgtccccataggtttctgtgttctttggaggcctctccattaagaaggatgaagatgtgttgaagaagaactgtcctcatgttgtggtggggacaccaggccggatcctggcacttgtgcggagcaggagcctcaacctgaggaatgtgaagcactttgtgctagatgaatgtgacaagatgctggaacagctgggtgagcatcctactgtcctgtccagctggtttcccactcatagagtcacagccgttttctagggggcctgatagggcaggcagaggtggctcttatagtgggtcacatgggtggccagaactcagggtttctaggagaagcctaaggggaattctgaggttacagagtatgtgctgcttctggaccctaggccccatgagctgccagccctttagggaatctagaggagtagagtggcctcagccaccatcaggggctgggagagatgggcatgtgtcctgggaagcagctgcagctctcacgccagtggctgtctctgcctcaggctccctttcctgaagcgtggctcaaggcgcactggcagccgctccatgctggcagcgagtaagtggaccgcagctcctcccatgcttgcgctcccgcccatccgagcccagcccctcaggcagcggggacacccctgggcccactccaccacggctatggtgccagtgttgtccggtcca

SEQ ID NO: 33843 - DNA, 1139 bp, Mus musculus
ctcaggcttgcgatttgttggcatcccatccagacatgcgccgggatgtacaggagatctttcgtctgacaccccacgagaagcagtgtatgatgttcagcgccaccctgagcaaggagatccggccagtctgcaggaagttcatgcaggatgtgagtagggtgacgccccagctggctggctgcctgcccaccgtggccaacacctcagcgcagcagctttggccctctctgatgggctgggccactctgcgacaagcacactgctctcatggcctggaggatgctaggaggcttcgccggcctccttccttcccctggtttgtcaaactgggagctgagtggtccacacctgagccagaggcagagcttacatccggcttttgggagagaattgtttactgaggttgggtgcaacaggccctctgggaatcatcaatacagaggagctgctctctggaaggttccgggcacatgagacgcccagaagtgagccctactcgccccttcctgcttccctccccacacagcctatggaggtgtttgtggacgacgagaccaagctcacactgcatgggctgcagcagtattacgtcaagctcaaggacagtgagaagaaccgtaagctcttcgacctcctcgacgtgctagagtttaaccaggtgatgcttccttccttccttccttccacaccaagatatgggcctgtggggtgattatctatgcgcctaaacacccttcttcttcaggtggtgatctttgtcaagtctgtgcaacgctgcatggccctggcccagctcctagtggagcagaatttcccagctatcgctattcaccgaggcatggcccaggaggagcggtgagtgcatgagtgagtgatgtccaccagggccaaggctgctcacacctgggactcgggtttaatgcctctgcttgtctcccgctctagcctgtcccgataccagcagttcaaggacttccagcgacgaatcctggtggctactaatctgtttggcagaggtatggacattgagcgagtcaacattgtcttcaactatgacatgccagaggactcagacacctaccttcaccgagtgagcgcctcctcccagtgtgggcgggctcaggacctcccccacc

SEQ ID NO: 33844 - DNA, 1395 bp, Mus musculus
gctgaccatcacctccatcgcccagctccttgtgctgggctgcacctggggcttcggcctgttcctcttcaacccccatagcacatggctatcctacatctttaccctgctcaactgcctgcagggcctattcctctatgtgatgctctgcctgctcaacaaaaaggtaggctgaccagagctggctatggaagagcccagggtgggaggaggcagggccaggcctgagtccctagcccagctccttttttccccataacctggtgccttgtgttcacaggtgagggaagagtactggaaatgggcctgcatggtcactgggagcaagtacacagagttcaactcttccacaacaggcactggcaccagccaaacacgggtaaggggctggcctgcagtggggctgggagggcaggcctaggtgagctcagcctcaaaggcctccttctctgcaggctctcaggtcctcagaatcagggatgtgaaggcgagttccatgaaggacagcagcacatactcacggctgtcattctgccttctgttcctgccacctttcggcctttgaccccacttcatataaagaagggatgcaaacccagcaatgagccctgccacggggcaaggggtcgctggtcctgcttctggttgtctctgcctcaccacagctactgcctaccagagaaacagaatgcagccagcccagacctgcagcccactgcctggtacacgaggcaggcagtcctaggacaaagggaagagcccttgagacctgggctctttgccagggtgctgggttcagtttccttaagctaagactgtggatgccacgtcagccactgaagcccgcctgctgctgaggctcacggtacagaggcctcgctgctccacatccagggcagaaggtctcacagctaaagactaggttttgtaatttttttaacctgtaaacctttcaatgttgacacacaaaattaaatatcatattgataaaaaagatggcacgtttgctggtgagaagtttgctggcttgacccaaccccatgagatgttgaccgaaagggatggggctggagccatgcattcacaataaaagtttattcttacatcactaaagctttggaacaataaaaagagacatcgatttgtcacctagaaagaggttctgaagcagcaggtgggaaagagagtggccatgttgccctggctacacatacggttaccggctctgctcaactgtaaagacaagaaagacacagtgagtgaggatagagggcctttgctcctgaagccccgctcctgccctgagtggctccaggtactcactgtatgtggagatatctatttcctctggaagctcagctacattcacttcaaaccggtcctgaacatcattaa

SEQ ID NO: 33845 - DNA, 1689 bp, Mus musculus
gcagtgactggggcagttaagattggaattaagcagagcatgatggcccactctgcttggggccttaagaaggatctcaagttcctgagttagacatcgatgacatgcctgtgactccagcaggtagaggcaggaagagcagaagcccaaggtcataatggaagagcaccagtctagaatccccagtgagggctgggggggggcatggctcagcagagccttggcagtccctgtgcctactgttgtttacgtgctgttgtgacatgcagatgcacagggtcataaacttcacctccttgttttctggctactgtgtaagtcttactgcatcccgccagctgactccccagggagcccgcgtggctctccagtgtctgctggtaggcagagtggtcagggtccttcatttagtttctgtggttcaaaaccttagcaactctgtcactcattaccccagaaactcatcgaggctgtggacaagctgctggaagaccccatggagactgaaacccaacaagtagctgcccagttgctctcgaacctggaacaaagccttcggaccttggctcagtttttacccaaaggccccttcacctacacgtccccttcaaatactggtaagccttcttcctgccccaccccaggaaccatccttggttcccccaatcatgtccctgtctcttcagaactgtccctgatggtgaaggagcaagacaacaaagatgttaccacagtgcaccacggccaaacttggatggagctggactgggctgtgacagctggagccaaaatctcagaaaatggtaggggtccagagagggcgcctgccagggaaaccagggtgaggtctggagaggacagggagacaccagcccactgggaggagtacagagaggggacaggagttgagccttcatgtctgcccccaggctcctcggtggcaggcatcctgtccagcccaaacatggaaaagctgctgggcaacaccccgctgaacttggagcagagaagggcctccttggaggacttctatggaagcccgattccgagtgtctcacttaagcttctctcaaacatcaattctgtcttcctgaccaacacgaacactgaaaagctcgcctcgaatgtcacgttcaagttcgactttacttctgtgagtcctccaactggagagaggggaggggtggggatgctctgtggctcaccccctaaccaaagtcaaaagtcagggcagcgcctcttgacctacatggtacgagagaactaactcccaaagttattctgactccttcctccaacacacacacaaaataaatgtaataaaaaacactaaaaatacataaaaaatttaaaatcacagctgtggggtgtgtgtggtgacacatgcttttaattctagtacttgggaggctctctgagtttgaggccagcatggtctacagaaattcaggataaagctcataaagactctgtcccaaaaaataaaacagcaaaaaacaaaactaaatagataaaaaaagaaataaaatctgagctgggtgttgtggcacagacattttcctctcaattgctgggaggcaggaaattcaaggttcaaagcctgcctggagtgaagttaaggcccacctgagcaacttggcaagaccttgttttcaaactcagtgctacagttggttggcattcagaaag

SEQ ID NO: 33846 - DNA, 1183 bp, Mus musculus
cagaggtggtacaaaaacaggaatgcagtgcccagccagaatagccaatcgatgaactctgggtctaatgagaccttattcagaaagatggtgaaggaggtagagagagaacttagggaatatgcctgcatgaccttacagagacacctgtcttgatctctagcccccacatttgtatgcaaacacacacaaatttagccacacacacacctaaaaccttttttttttaaataaagatttattttatttctgtgaatacattgtagctgtcgccagacataccagaaaagggcatcagatctcattaaggttggttgtgagccaccatgtggttgtcaggatttgaactcatgacttctggtgaaagagtagtaaactcagtgctccaaggtatgctaatcataaaacagatagcgacattcctccacccacccacttcctgggttcaaggagtattcattcaaagaaagtcaccctgagcattaccagaacctgcaatgcaaatgtgctattgttaggggctcttagaaactgtcttgagagttaacaattaccaggtattccttgtgatacctgtgactttgtacttccttgtgactcttaactggtatttttggtattttccagcaacgcccttcccacctccttgagttgtggtttcttcctttaaatatccccttatccagctactcggggcgccacagtcctctacccctgcgtggtgtatgaccatgggcccgagagcgctcttgaataaaaatcctcttgcagtttgcagcaagaccgtttctcgttggtgattttggggtgtcgcctctcctgagtcagaacgtgggggagtcctcacgttgtgggtctttcactggaagagcagtctgtgctcttaactgctgagccatctctccaggcccccctaaaatcttttttattttaaaattttatgtgtatgagtgttttatctgcatgtatgtctatgtaccacatgcataccagctgctccagaatgaaagagtatcagcttccgtccataaagggcagcagttgggtggcaactcctatgtcctgtgctgcaggctcaagttacctgggaggcagcagagctctgtggtcttgttcaacatcaaggtcagacatccttgtgctgacctgagtctcaggaatgggcatcctgacttgtttaagt

SEQ ID NO: 33847 - DNA, 1201 bp, Mus musculus
ttctctgggaggcagtggcgctaatggtggttgggggtggtatggggagaggtatgtctgggtgtcgagtgagtttcagcccggaggggtgctttgggcaaccctggtgcagttgtgagacatcttctgttagtggtaccctgttaagcacggatggaggctgtcaggttggatctaccggaacgagctttctctcctcttccaggtgttcctgaaatagagctgtgtggctcagttgtcatcgtcccgtttgagggtcctgggatgaaagtccagttcgtgtgtgtgtgtgtgtgtgtgtgtgtgtgtgtgtgtgtgtgtgtgtgtgtgtgtgtggtgggagggtagtgtgtacttatgcagtggccagaaaatgtcctcaaatggcatcacttcagtgcaccccaggcacctatgtgaagatggcaccccgccggcaaacagcccctaagctcacccatcccaatctgtacacttctcggctaggttagcttccagccctatcctcgcccagcatcttattactgtaccttcctcatctccccaccccgccttctcctcagctttggcatctttgtggatgtccctcctgtcccaatgtgaaccagagagcccccttctttcccagcctctctgggacccagagccggatctgtcttcccatatccaaacatgtggtgcgtttgggggagttgggggaggggttcaagatggccgccaagatggctggcagcctctttatctctgtctgtctccccctctctctgcttaccctcatgcctccagtggagtagggagggtcaacgtggggagagagttggacagtgtagggacaggtgtggaggacacctgagggtggatgtctgttctgggcctgttgacctccagtgctgctgagagagaggccattggtacctgcttctctttcctgcaccccaagggcaggcgtgagtctttaatccgaccccagacccaactctatctggcccacagcctgatggctacccctgctctcccccctccctagaccctggcaataccccatcaatcatggaatgtcagagtgttcctttgagggtccccacaagcatctctggcatcctcttcttcatctgcccagttaggaactggggaccttggtgtgtgtgttgggggacgcctgctaagacaggtcctagctttggggacaggtgacttcctt

SEQ ID NO: 33848 - DNA, 1137 bp, Mus musculus
acggaatacaaccttcattatcatatcgagaaaattatctgtgattttcctaactagcaatttgcctgccatgccgttcagatatgacttgcccattaattacagagatgaaaaatcatctggaaggcggaaaagaactaattccgtggctggcggcatggcacctttgcactgagccacagccgtgcatgtggatatgtgggtaccagccctcccgctggcttcccagcatctcccccccccccccccccgctggcttgggccgccctgttgcttttttccgtctgatgtgcttgcttactcccagtcatggggacgggtgtaccccactatctcctgtgctgttggacatccttggacgtggagacagtccccggagttgtgggagtgtaaggagctggggactagtgcacctgggccaccgagccaggggggaggaggtggaaggccagagatgcggagccaggcttctattcccagcctgccctggggaacccccttctcctagggggcgctctggaagccccacgaggggggaggagcctgtgagcgcctggccctgctagaggagtctgtttgcatcaagccctctctgatctccatctgcacatgggactctgctgcctgctgtctttcttgtctgtgttgactattccaccaggctgacaagagaccctctggtgcttcggcctcaacatgggcatctagcagaggggaaggaagagggtcaggtgggccccaaaacctctaaagcatacacccctgaaagaagagtagtgggaacgggagccacctcccactcccaccacagacaggagcttctggtctgtgtccccgccctctgctggttcctcagccagacctggccaaggacactgaaagctctagtttctgtgtgggcttctcccagggatcagatttctagtcgccagacacttcccctcctccagcccctctgtgaggacactggaggaggagctgctcgaggtaggggttcccctgtgagctggagatgcccagcaagacttgcgagcctctctgcctgtgatagaaccagatgtctgctactaaggacagaaagtggggtcctggggtgggggtggggctctctctccactgtcagggaagacctggtgt

SEQ ID NO: 33849 - DNA, 1130 bp, Mus musculus
tgagcatgagtgggaagccagcacaggctacagagggagatcttacaaagaggggaaggaaggaaggaaggaaggaaggaaggaaggaaggaaggaaggaaggaaggaaggaagaaaggaaggagaaagggagggagggagggaaggaagaaaggagggagagagatggcttaagagtcacaagtgtgctgcgctcgtacaggaccagaattcagttcccagctcctggggatcggacatctctggcacctacactggtgcacacccccctccaacacataaacatgattacagataataaaagcaatgtagggcaaagggaggagggagggaggtgggctggcacaattggccctgtacgataaccctttgacctgccccctcccccctttagtagcaaggcaagggctggtttaattatgcttacattcttatgtaattctgtgcacatctggggacatcaaaggtacccttgcgtgtgaggacgtgtggggacatggtgccacatgactgtgctacagggtttaggctctagagagggaattcgagggacccttaccctcaccaggaggctgggagcccttagaatgtgagcagttgctcccaagatcccacggacactgaccctctttctgggatgggatcctccgtggtttaggcttctctgggccctggggagcgagtaaccttgtcttgttcgcctccccttccaaagtggggagaacataacagttcagtcaacaaactggaaacgccccagagctaaaaataacaacgtccccacacttacccagagacttaaaaagtcacacatggactgtgagctactagtggcccaatggtatccctgatgttggagcctgatgtgcatgctagctagccctttctctctcccccgtctcctctctgttgtcccaggcttccaccctcttgcctcagcctcctgagtgctgggatgatggacaaggttcttcatggtgttctttatgggaccccctggaatctgtaggatgcccaacaccaccctagagatacactgcctcagtgtcaacagtgtcctccacaggtaccacggcagcacccagtagtctctccaggccaatcaattccaaggcagaactgtccagctg

SEQ ID NO: 33850 - DNA, 1077 bp, Mus musculus
tttccagcagtctgacagcagcctacaactctagggacaggttcctaacctggtttctgtggggtacagcacatatgtggtacacaaacatacatgtaggcaaaacacccatatatataaaaaatgaaagcccccccccttctagctttatcttccactgaactagaacataaccagactacttccttagcaccagctcctgctcctgagtgctggctgacacatggtagctgcttaggagagcaggtggaaagactactttgtctgtttttctgtctgtctgtctacctgcctacctgcctacctgaggcagtggagatatggggcctgggatttccacagccgggcaagtgctgcactatgaggtgctgcaaccacaaacccaacgttattctgagcctctcaaccacactttgccactcaatgtgcccctgcagagacatggttccaaaactgtgacctgcatacatatctcgtcatttagccagaagtgaacctcatcaggatttgaaccttggacctgaggatgctcttctgtggctttgtccctttgccttcctgagaattctgcttcttttttttccccctttctgggggacttcgcacctcccctgccagcatgcagtcatcggggggacaagagtgtcctgtatgccctctgcctggcatgggaggtgaagctgaggtgaacaggggcactgtgaggtggacacacaccatggctgccctggtactgaagtaccacagtagagagcagagcaagcaggcaggtcggtcagagcttcttagaagaagggaaactggctagaaagcctgagaaggaagtactccctaaggtgaggaagaggcagggctcaggtacggaaatagaaggtgtttgtggctgagtgtgggtaggaagctggactggacctcagggctgtcattgggtttgaagggtctgtgttcacctgtggagggtagtgaggcccagcatgacatctgctgctggcagaactgaagtgctaagctgccagggatcggtagggtctctggactaagcagatgtggggcaggggtggcccagtcaggcagtcc

SEQ ID NO: 33851 - DNA, 1099 bp, Mus musculus
ccaggggcggggagtggggctgtcactgaaccatacctccagcctttacatttttaaaaattcattcatttatttattttgagacagaatctcacaatctgtttaaaatcctgactggtttggaattcagtttgtagaccaggctggccttgaccctatgacagtcccatttctgcctccagccagggcagccttcaacatttctctatcgaatgcttccatctccagttcctgctctgctgggctctgggacacactcatacacagccctgcagagccagcacccaatgggagaggaaagcatatgatgaaaatgccgggttcctccctcggcatcagagccgtgggagatgaagaagtaggggcagggcagagcgtagcatactggagttggcaggccttcctgggctctgaggaagcatgagagcgaagtccagtagacaagggggtgggcaggatatgcaaagatcctggggaagggctgtgtgggacctcagtgaaggctttgccttttggtctaaggaaggtgggagccatggggtgttctcagagaacccgagggaatgattcaggggttagctggctaccccgacctcacttcagagaagggaagaagtgactttatgacaaagatgtcacagggattcactgcagctgtctgtggggaagtgtctgcagcattgagtatgcactggggacctgtcctcgtcctagccttcttgggaaaggactcaggcacctgctctatctctgccagactcccttgtcagttcccatgtaggctccaggaagaccaagagcctaatcagttgatccagacccaggcctctactccagactggctgtggtccctgcacagtgtccacttcctagaagtggaggtgcaggtgagtccacagccaagaacaggagacaaactgcctcaggatggctgtttcagggacgggtgagtgaggccaggaggggcccagcgcccccatcttgttgcctgtcacccctcctcagactctcagactcccagactcccacccactcagcatacagggttgccgtagcaactgcaggctagggcaggctccaggcgccccctctcctccag

SEQ ID NO: 33852 - DNA, 1681 bp, Mus musculus
gcaggagaccaagacaggagagctgctgagaatttaaaggccagtttgggttactcaaaaaccaagcagtcaaaatgaccctgtagttaataccacttactgtatgcttaagtggttcggagactgggggtgcagctcacaagtagaataaattcttagaaacacgggaggccctaggtttcatctgcactctagaagaaaacacatagtttagatgatctaaattatgtcatgatttatatataacgtatatgagtatgttattatgtatgtactccacctctgtgcttggtgacctcgggagtctagaaaagagcattggaattggagttacaagtagttatgagctaccatgtgggttctgggaactgcaccagggtcctcagcaaggacaagcggttttgaccataaagtcatctctctaaatcttatgttgtagtgttaaaaacacaacatccctcggcctgcaggaagcctagagtgttaacacaatgaggacagacccctgactcactcagaacagaaaagggtcagggcttctgagatctggacctggaaggtggctgccactggtggataggaggggttcttggggtctggtcctgctagagagtatacttgcaccttcgcaacctctgctgtccctggggccttaggtcatgaactggatgggactctgcatcgagaatgtagacttgggggaagactttgtcccgtgctgttgtccgtctacccatcactgtcgctgtggtgtccctgcctgatgagggtctgataagcccactgcgcgcatttgaagattgttgttctcgtaagagtataataataattttacctccctgaggggggaggggtggcagaggatagacttggccctagattgtttcaaggtgacttgactttggggacctggactcacatggggcaggggctcacagagcctcctgtaactgttgtgagccatttccttctgcctctgaggctctcacagttggaaagaaagctctaggaaggacaggtgaagcctacccggatgggctgggaaggagaggggtggagagcgtccgaggggtctatcccagagtaaatgggagggaggtggctagatggtcaggggggctggcggataagacgagagctggttctggtgctgaaaggacagaggacagtcaaccctggatgggttctactgatggacctgcctccgtgggaaggaaggtcaggggtggctggagcaggagttaaatttaagctgagctgatggtgttggtgaactgccgatttctgagcataggctctgggcgtcacaggggactatcccagtaaggggcaggggaggggggctagaaatttttgtgagcaagaagggaggaaaggagaggtagggttgacacaacagggcacttgctgtcttaggagtagagggaagttgagctttgagatgtaccatgtcccttagctctggaaggtgaggggcagagtgggggctatacacagaggtagacttggcatggaacttatgagggagatggcaggaggtctgagattcagtcaacaaatacgatttctcagtatgtagggattgctctagaagttgggtgtggtggtcatgaactagatatctaggtccctggatggcagtttcctacccagataaacagtttcttatgagcagaatgat

SEQ ID NO: 33853 - DNA, 1255 bp, Mus musculus
agtgatggcctgggaggagcttgtgaccaaggaggccatcagtacacccttggtccctattccttctcctcccaccccgactgcctgtctccaactcaccccgagagtcccttagataggaaagaggggacttgggtgtccctggtcccctatctgtggcgccagccagctggattctaattagctgccagagcagagagacaggaagcagagtctaggggcggggctggattcctgcccaaagctgaagctgaaatcaggttagacaccccttgccctcctggagggatgaagatgtgtggtggtgcagaggactgagttagggatgaggttggagcagctctgctgtgggtgggtgcttggcagccatgctgacctatcaagctgcccccccccccgagctggtgacagtgacctgggacagggcagtgtgcacccccagggtgcagagggcccaggaggggcctcaccactaacagaagatggatgccctctgtgcttgctgaggtcagctcctgcccagtatcattcccctgtcctccttcaggctggtgggccaggccgtggtaccctggtgatgcggggcgaggccccccccacagtccgctgagatccctgtgcccaaccctggccttcgccatggcccgcttggctgcagcactctggagtctctgtgtgacgactgtccttgtcacctctgccacccaaggtaggtgttgggaagggctgggtctccaaacccagatgggagggtgggtaatatgaattctttatgggttgcagcctccaccccagatgaagttggaccaggccagagggaacctggtgatgccactcttagcaggcaccactgggggatgttgaccacccagcaggccagggtaccatgtgctgtcttgcttggggaccctgaggaccaagacatgccttctggggggccacccatttctctgtctttccctcccctcattcatcacatctctgagtctcactgggaccaaggcttaattaaagcatgcctgctgacgtttatttaaaaacaagtaattacccagctctggcctgggatcctgcacacgccacaattagtgccctgagcacgctgcccactgtcgattacttagttaccatcgcaagtcgggtaccagctgggtgcagagcaacagaagctaagatgggggtctgttatccttgccctctccagagaaggtccccctccccatacgtccagtcctgtcctctggaaagtcacagg

SEQ ID NO: 33854 - DNA, 2105 bp, Mus musculus
ggggtcaaagtgtgcccagagtacttgaggtaatagacagcatggggcccaggctgctttgtggtccacccaggccaccataggttttgagggaatggcagctgcgtggcctcactcctttgaacctcagtttccctagctgtaatcagggtgccagtaggcctgacttcgagggcctgcactgtccctgcatcctcatgagcactggccgtcactgtgactacacttcacttctaactagttactgttattgccatggtaatcaaaataagaatagcaacatttagtgaacccagctctccagacaggcagtcccaagactggaaaggtccctggtccagtccagagtccaaaccaaggtacaagaataaaagaagaggccatgggtactgagtggagtttagagacttaaagccaacaccaccaccaccacaccatttgtctaaggagcacaacccaggaagacgggctgtggggttaaaggtgacacagggcagaggtggcaggtttagactgaggaaaatacaaatgagccttcgaagacagtgcacagacagagcgggtgtcgtggatagggctgaccacaagtgctcctgggcaggcagttgagttagctcctgtacccccgccccaggtcattggggttggggtccaggaatagccaaagccagggagctgacaggcacacacctccatgactttccctgagcatatcctgagtgctaggccctgggcgaggcgctggggagccagacagtccctgcagaacccaagccggtgcccagaggggaatccaactgctcagccccaggaccttgggcttcagaggctggggtgaccccagtgctggtgaaggtggggcaggggtggggggcaggggtcccacagctgggggaggtggatcactggagtgtgggaaccccagacattgaactaacactggatttgctttgcagctgagcacagcctaactctcccttcctccccaggtgccacctgtgcgtcatcaagggcggtgggcagggtagggtgcagctagggcttctgggcctttggtggactgggcagaacagctgaaccttgagacacccctccagcccccaacccccacccccgagagtgtaggagcctgtctgccacgtgctgtccagcccagtctatgtcccctccaattctgtgcctcttgtctcccctaccctggctctgtctgaggccggggcacctgcctgcctgcctctgttgttctgtgtctggctctactagcctttctttgtgcgtttcaggggtctggagggtttaggggaacatagctggattcaggtggggcctactcgaaggggaaggggctcagcctatgctcttggctgagtggggcacctaggccccggagacacccttctctcctcccctagttctaacagggtaatttagcacacagggtgaagaggagccctgtggttctctactgcctggtgtgtgcccccctagccagagttcagctcctgtttggggctcctctttatacctggggcccttcctgcctgagggctctgtctacctgcctgtctgtaccatacccagtctctttgtctcttccctcctgtgtgtccccctgacccttctcactttctcctcagcaccctctcaccccatcctaccccaaaagaagggacttgggggtgggggctgaaatgatgctacggaaggggttgggaaagcaggaggaaagacaggaagagggggcgtgtggccagaaaagaaacgaaagcaatttaatctttttttctcttttttttttcttgcacattttttttcaatttgttttctctctctcttccgatgcttaaagtagaagtggagcagaaaggtaaacgcactgttaccaatgctaacccctaactcacactttgttccacccgtaccatactcatgtggcccacccctcccccccttcttctcccccaccctacttggtccagtgatttccctgccccgggtgtcctcccggcacagctgggctggccctggtgctgcagcaccaccaaggccaaggtcatggccacgggcttctccaccctccagatactcacggaagctcctctctg

SEQ ID NO: 33855 - DNA, 1127 bp, Mus musculus
tttcctttgagggaccagatttctcctctctctctggctcctggtggcttaagttcttctggtttggcgtttccaaggcccagagctgttgtggagcacagagagccagtctcctccaactaccctcctgaccagtcgggtctagtactggggagggttgtcagctatcccagtcccctgggagggggcagcctaccaaaaccctgggatgggggttggggcgggcttcctggagagggcgggagtgggttctgtctctgcacacttgcaaagctgcagtcagggtttcttccgggctgagaggaccagggaggggcggtggggggtcacagacttgctctggggacttccacaggccccataatttcttgcagagagccccatggcggcggtggatgaggctatccattacgccagggagtggagggtggcctgctagtagtagggcaggaagccatcaacagtgagatggcccttcagggtccctctagccttgaaattaaggtggtctgtggaggctcccctaccggggaggtgggcggggtccctctgagctgctcccctccctttccttcccaccttgcccatctcagaggcctgggcaccgtccctcccttgctctcctgagtcgagtcggccctgcactagccactcttcttgcaggcttggaactacgccactggatctcctctccggttgggctgagggagggaagaggtgtgtgggagctgggtgctgaggaggggtccttgctgcccaaggcccctggcagacccttcctcatcttccccccttccttggaatgacctctaactgtgtttttctccactggtaccctctgactagctcaggccctcttcatgaacacacaccctggcaagggtttctgtgggacagaggaaagacctggggaacaggaaaaaaaaagggtgggggccaggtagtctggtcagagggtacagataaagctgacaggaacgccagggctgtgttactggctgccttgcgcctagtgacctggtgccaagctgccccagtgctgtgaagggagagacccagcttacacattccccaaccatgctagcctgctgagtaactaggcactaaacctggctcctacccagggg

SEQ ID NO: 33856 - DNA, 2142 bp, Mus musculus
ggggcggggccccccacctttctgacatcagcgctgcctcggtccctcctcccgagccggggatggtcacaggtaaatcggggtccggggcaggggaggtggggggttggctggggtggtctggggctttatcctagcacctggttccctcccttgccccctccgagctggacctgggactgcccctggaagggactctcagtcgggcctgggccttggagtgaattctctgctcaccccctctctcctcgccagcactaaccttttcttcccaggtggtctccagagcgtctcccttggagccaggactttgtggatatacacacacccctccttgtctctcttccctctgcacagctccctcacccccaatgtcccgggagtcctgttgttctccatgcccccactccaccctgagccaccagagaccctgccggctggggcagcactggactcctccctaggagctgcttccctccgtcctttcctcagctacctactgaggctgccagctgagaggagcccagacagcatcagggacccgaggagaaggatagacagccctaagcctccctgccagagtgggtgtggaaacatcactctaccttgcagcttttggaggaggaagaaagtgaagtttttggttttgttttaagagaaaagaaagtctacccctgcatggttggtgaaggatgggatcccggcccctagtttttccatagaggcagagaagagaggccagggtgctgatacctaaaccttgaggctaggtggcatcgcagcagaggaccccactccccaccccctcatacccaatctgggagagctccggccaaatcctttatccccagcctgtagggtctctagcagccaaggaagggaagaggcgccaccttcccacactaaccctgctcttgatggtctccagggttcacagctccagggagaggggcagctgggcagggcgggagttccagcccacaaacccccttcccatcaccagcccgaccaagcaaccatgactgcagcagcaggaggggacagcgtggtttcctcccccaccatgtgaccaacttgcctctctctcccctctctccttgcctctgctcctccccacctcctccctgcctacccacccacccacccggcccagtcttcgtgtgcccagggaccctgcagaaggtgctggagcccacctctacacatgagtcagagcatcagtctggtgcatggtgcaaggacccgctgcaggcaggtgaccgtatctacgttatgccctggatcccctaccgcacggacacattgactgaatatgcctcatgggaggactatgtagccgcacgccacaccaccacgtacagactgcccaaccgtgtagatggcactggctttgtggtctacgatggcgcagtcttctacaacaaggagcgcactcgcaacattgtcaaatatgacctgcggacccgcatcaagagcggggaaactgtcataaacacagccaactaccacgatacctcaccttaccgctggggaggtaaaaccgacattgacctggcagtagatgagaacggactgtgggtcatctatgcaactgagggcaacaatgggcgcttggtggtaagccagctcaacccctacacgttgcgttttgagggcacttgggaaacaggctatgacaagcgctcggcctccaatgccttcatggtgtgcggcgtcctctatgtgctgcgttctgtctatgtggacgatgatagcgaggccgcaggcaaccgcgtggactatgccttcaacaccaatgcgaaccgtgaggagcccgtcagtctggccttccccaacccctaccagttcgtatcttctgttgactacaacccccgggacaaccagctctatgtatggaacaactactttgttgtgcgctatagcctggagtttggacccccagatcccagtgctggtgaggatcggctttaagggatgtaggcctgtttgcatgcattactccagtaccaggatgtggggcctgctgtaacctctgggggattaggaggtaaagaaaatcacaggttgtggcaaacatcctcccttcttcgagttcatactgcatgtgtctactgtcttcaaggcttggtggggtcacggtac

SEQ ID NO: 33857 - DNA, 1650 bp, Mus musculus
agaccgaccaagggtgggcatcatgcctttttccaagtgtctgctctgtcttttccttccttggctcctcttcatctcctctttggcctttttgtctatctgcaggaattgcctcattccagtgcctcccagctctggggctctggaatcctcggggccctgacctcagcaactgcacttctccctgggtcaaccaagtagcccagaaggtaccagtaactgctgccccttgcaggcaggccaaccagaacccagggttagcaggagtagtgggaaaagttggagaaacacggggctgaaagccagggcaagggttctctttctatctagaccttgtgtggggaaggccagcaggagaggatggcctgtgcaggagggcggggcatatgaagagggaatgtgcagcagtgaaggcccctacccaccagacctgaaggcccctcctccccatctcatgcagatcaagagtggagagaatgcggccaacattgccagtgagctggcccgccacacacggggctctatctatgctggggacgtgtcctcctcagtgaagctgatggaacaactgctagatatcctggatgcccagctccaggccctacggcccattgaacgagagtcagccggcaagaactacaataaggtgggcctgtgggaagggtctggcttgtttttcggcacctgctgccaccctacaatgaccagtgagggatgtgggccctcaggggctgctgcactgtcccgagtagtccttacgaggtagggttcctgaggaaggtctctggaagagtagtctgttaaggctagaggagaacattgcctgcagactccatttattactccttccatttctttctctagatgcacaagcgagagagaacctgcaaggactacatcaaggtgagcccaggaatgaggggccctggaagggagaggaagggacatcaagtcactagaggatgtgggagacttattctattgtccttgctacccacaggctgtggtggagacagtggataacctgcttcggccggaggcgcttgagtcatggaaagacatgaatgccaccgaacaggttcatacagccaccatgcttctagatgtcctggaggagggtgccttcctgctggctgacaatgtcagagaacctgctcgcttcttggctgccaagcagaacgtgggtgcgtactgcaactatcccaggctcagtctcaaactctggcagagggtgttgattcctgggcctgtggttttgccacgggcctcagggtttagcatgagtcctgcctgagggtagacactgacagcatgtcttccctgcccacacagtcctggaggtaactgtgctgaacacggagggccaagtgcaggagttggtgttcccccaagagtatcccagtgagaactccattcagctctccgccaacaccatcaagcagaacagccgcaacggtcagtgtcccacgggctttcctctgcgtgcatgtgggccactttgcatcttgatctcggtatgggacacacagtagtcatgtgtttaatgggggtgtatctgccactagtgtggatgttccaacgctctgcagaagtctgggttctggctccctttgagatggaggcatagagaggctagggatctgcccaagg

SEQ ID NO: 33858 - DNA, 1068 bp, Mus musculus
gagagatcgtaagctggctggtgctctgctgtccgggtgggcttgcttggtgctggcctggctttgcatggcattctagagaacacacagcatgggcgatgcctatgaggccagctcataggcttggggtgggggatcaccagtcttacctggggcatgaggccttgcatctggctccctccggccccaaggcactctggagaagcaagttggtatcacaagccttccagagcataaggaagtgagcctgcactgccacatgggtaggggccagcttggtggccagttgggcagcactagagggccttgtggcccacagccttgcctgggtcctggcctttggctggcacctggccacgccctgaatgcacctctttctgtccccagtaccaaggccgtattaatgagctgctgctgtcagtcatcacctgggttggtattgtcatctccctggtctgtctggctatctgcatctccaccttctgcttcctgcggggcttgcagactgaccgcaacaccatccacaagaatctgtgcatcaacctcttccttgcggagctgctcttcctggttggaatagataaaactcagtatgaggtgaggcatacttggggccaaggctccgcagcggggagggctgcagctcgagggcagccactgactgagctgcccttgcaggtcgcctgccctatctttgcgggactgctgcactacttcttcctggccgccttctcctggctgtgcctggagggcgtgcacctctacctgttgctggtggaggtgttcgagagcgagtattcacgcaccaagtactattacctaggtggctactgcttcccagccctggtggtcggcatcgcagcagccattgactaccgaagctacggcactgaaaaggcgtgagtcgtcctgttgtccctgtgttctccatcttcttcgttcttgagtggctggctttctttgggccagggcagggtggctgggctttcaggcatcttcccactctggttgtgtttctttgtagctgctggctgagggtggataactacttcatctggagcttcattg

SEQ ID NO: 33859 - DNA, 1105 bp, Mus musculus
aaagaccctggggagctggtcccaatacacacccctgtcagcctattgcttttggcagacgccactgcagcagaggaagaagaaagtgggaacagaacagagaccctgggacagacccctcagctcctttgcctacctatccaaccaggcccatccttattgctccctctgccctgcagagcaccccttgggaggccgggaagcctgtggcatggacaccctgccacttaacggcaacttcaacaacagctactccttgcgaagcggtgatttccctccaggggatgggggtcccgagccaccccgaggccggaacctggcagatgctgccgcctttgagaagatgatcatctcagagctggtgcacaacaacctgcgaggggccagtgggggtgccaaagggcctccaccagagccacctgtgccacctgtgccaggggtcagtgaggacgaggccggtggaccagggagtgctgaccgggcagagattgaacttctctacaaggccctggaggagccgctgctgctgccccgggcccagtcggtgctgtaccagagtgatctggatgagtcggagagctgtacggcagaggatggggccaccagccggcccctctcctcccctcccggccgggactccctctatgccagcggggccaacctgcgggactcgccctcctacccggacagcagcccggaagggcctaatgaggccctgcccccgcccccacctgctccccctgggcccccagaaatctactacacctctcgcccgccggccctggtggctcggaatcccctacagggctactaccaggtgcggcggcccagccatgaaggctacctggcagcccccagcctcgaggggccagggcccgatggggacgggcaaatgcagttggtcactagtctctgaggggcctcatggacccgaggcctggccagggagggaatccaggaggggctctggtgggagcagagactgacggaggcagtggctggtgggccactctctccaggtgcccctctgcctgtgggccccacagcccccttggggactatgacctgggccccaggtgccagggttagtagacagggtttccac

SEQ ID NO: 33860 - DNA, 2707 bp, Mus musculus
ctggagactgggccttataccacgagaaagcccaggcccaggggctggggctgggtggggcgggaggggggctggtggttaatggtggaactttctctgaagctcctttctcctttgctattggtccctgactcccaagcaagcctgcccctcagcccccagagtgcacccaatgacccccctcccttggggtgactcctgatgaagcacaactccccacagggcccctaacccactggagtgaccatatttgggcagttcccagtcctgtgggctgggctatctggggaacagatttggggtctggggctccctgaggagtgggtcctgggtttggatctttctctagggggtcctcttacccctctctcttcctcccctattgctgtaaatatttcaacaaaatggaaaaggaaaaaaaaaaagacaaaaaaaaagtaagaaaatctcatcacttgaagccaccgggcacctgcagcccaggccagcccggactttctccggaacagtgcagcggccagccctggcagccaggacttcctgtatgtgtacatcccagccggggtgggagccgccagagcagctttttacactccagagacagaacaaatctagaagcaacagcaaaacaaagaacctgtccttcccagcaccggtcctttcacctctgctctgtccaccctgcatcagtcagccctcctggggcgtgtacctcactgcctgccccagggccagaggcctgtctcccctgccccactggccaggagacaagatatcttcacacccaaagatgcttttgccaagatggctgcactatccctttgagttcctgcttcttgtatatcacttcaggactcacagcaggcaggaggaggctggtgtcccatcctgagaagggcaagggaaggaaggtcagatgtggttcctggggctgagggtgggatggcagtagtgatgtcatttcaggggtgggggacaaaggtgagaggttgcatttccttaccctatccctaccccaagccctctgtcaggcttagggtgtcctctaaacacctccagcccagcctgccctccccccagttttttggggggggtttcataatcctgctgccatcatccagaggtggcaacacacctctgctgacttcatcctgtctcttccctgcctccttcctcacaagtgccatgagttttcaagcatccttgggtctcagcttgctgctgccatgagcttctttgcattgtgggggagggactctaggtaggagctgaggaggaggtggatgggtggctggaaggaccctttttgctgctagaaatccctctcctttctaaggagctgggactggcttgtccccaatcaatgagggggaaaggggccagaccaaagataatggtttgccccatggaggggaacagatgtgaaaaggcagggtttattccatctctggttttcttctggtaatgttttagcttgtcttgccagaagagcaagagtgaagtctagataggggagaagagacaggatggggacagttgccaggcaggtgtgaagagagcatgaaatggctcatagcccttgcctgacttaactggatctggactttgctgtggctgtatggagtggctggcctaggagccagaggacttgactcagcccaggcccaaggccatcagacaccaataaagctggaagaagctgtggggtgaggagctcctcggggactggcaggcacaggagtcctgcgtcctttcttcctatacagcccttctccaaatgtgggctatggagggcaggctgtagtgtagtagggcccatggtttctgcctagctggaatcactagcacagggagcaacttgcttctaggcctcagagctacatggcaggtccccaagtggggctggatccactacaatccagcgtaagccacccagagagcccaggtgtcccctaccctaaccagacctggtgccttgacgcccccaccccagcggggacggtacagagaagggtcttggtctcctcctcccttccttgggctcctgaattcatttgctcctgaatcttgctcattctttttctctaggtctttttcttttgagttttcctagctattcaactttccgttgtgtccttttttgctgtctctgtgttcctctcattctcaatttcttagtccatttgggcctcctccctgctcccacaccctactccctcccctccttggtctccttttcgatatgccaaaccaattttgggtcgagtgcatttaacgagaataaaacaaaaggctcataagaacgtttcagaaaaaaacaaaaagttttaaaaaaatgttgagtcaaaaaagtcaaacaataaagaaattaagatttcttgaaatgatagagtggtgtgatcaattggtggacaaaaagatgcatagtataattcccttggtccctgagatacaacattctgaagttggatgagcatggtattacaggcctataatttcaacctgtgggaagctgaggcaagaagattatcagtcttggtcagcctgggctacacagtgaaaccctgtctcaacaaaattaaggggatggggagatggttctgtggtaaggaacacttggctcttgcacaagttccagcttctttctgttcccctatagtggcacacaaccacctgtgactccagttctaagggatctgaactctcc

SEQ ID NO: 33861 - DNA, 1150 bp, Mus musculus
atcttgccctatcaagttctgttttgtttcttaacggtgttatggatggaacccagggctttgtatgccgtagacaagtgctctacaattgagccacatccccagccctgtaaaaatctttttgttcttttggttgtgagcctgtacgagttgagctattctctccagcgacctgtaatgctttctgttttattcttaaataactcaggctggtctctgagtctttgcctttctcagtagccgagactctagttgtgtgctgtcacatcccacacgattttgttttgggtcttgcaagctctgtcctctgtcttgcctgtctagcaaatgatgactgaggcttgggacagtagctcctgcagaactgtcactttctctagaaaatgcagtgctagaaacatggacaactgggaagatagttgtcactgaggtttcaatgcctgcccctccaagccactgtggtcttcagctggggcccagcgtctggagacagggccttgactccctttgcctcccacaggacaactcaaacctgtacatggtcatggagtatgtagctggtggcgagatgttctcccacctacggcggattggaaggttcaggtaagcgggccccatccctgccaccctaggggccaccaaaccgtccagggacatgtaggagtccagtgtgcttggaaatggaaagtgagctctgggtgccagtgggattttgtgtatgtgtgcacatgtgcttgcgtaccgtttgttgtagctgtgtagccaaagctggtcttaggctcacaatcctcctggtcttgcctcctgaatgccgtcaactcattcagctcctgtggggtttgttgctgttatgctaagcaatttgtgatgtttcagtcaaccaagttgaaagaccagtcatggtgacttaggggtcagaatttgaattggcatggctggaggtggagctcagcaccattttacaaactctagcacagaaaggaaaaaggaagtgaggtagcactatgtagtccaggttagccttcagcttctagtctgagtcctccctcagcttcctagagccacaggagcccaccactacagctaacaagatactagtatgttacttaacaaacatgtatctctatatatgagattgttgttgttattg

SEQ ID NO: 33862 - DNA, 1736 bp, Mus musculus
ttgtgatggtaaggtcagctaatgtgatctgggtggttttgattcctatccaggtggaagctcccttcataccaaagtttaaaggccctggggacacgagtaactttgacgactatgaggaggaagagatccgggtctccatcaatgagaagtgtggcaaggagtttactgagttttaggggtgtgcttgtgccccttgggttctctttcattttttctttttctttctattttttttccggttgggggtgggagggttggatcgaacagccagagggccctagagttccatgcatctaatttaacatccactccacacccccagggttaaggagagcaggaaagcgctccagatactggggaaggggcaacatcagctgctccccctctcccttcttctccacccttccctgcctgttttcaatgaatttcttagctccagccatacccaatcttgctggtgtatccaggggcagggtacggaaagagggccccaaattcagcctccttcccgaccctagcactggatactaaggatgaacgaacagtaacgccaaccttcccttccatgcagccctacctggaaagggagattttatgacctgtacagagggctgcttgccagtggggttttttttttttttcatttaaattaagttccaccagtgcctcccaccctccaaactgtcccaccctccccaaacaccctcctcactccctaaatccattctgatgagacccgggtagccaactgaccctgtcaaggaaggaactgggcttggaatctcgccctgagctgctagcctcccggcccccctttccagtggtctcatgccaattgtcctgtgcatcagcccccttaagaagcctcccccatcctgggcgcctcgcttctagcttagctgtcagctgtccatcacctcttgccgtgcgtccccactcactgcaaccccaagtctgattgtgctttttctctcaatagaaaggtggggagctgctggggaaattaccccatttatccctgtgtttatccctctcgtaacttctcccaaaaaggaggagctctcaggcctgggtgggggccccgggtggacgagggggtcgttcaacctgtgtgcttcgaaggatgagacttcctcttgaacagtgtgctgttgtaaacatatttgaaaactattaccaataaagttttgttttaaaataaaagtgtcgctggttttcccgacttcgatcacacccttggggtgttggaaagggaatttcgaacctcaatgtccaggttctggagaccccggcctcgggaccttggagaaaccaggtttggctggaattcctgtacttcctccgcctggccagagaaaggaggggtggggtgggcaaactgtcctttgaccctgagttcggggccctcaaatctgctcccacccctacttcggtctagtccgggacagagagggcactggagagggccactcggaccggttcggccaaacagcagcaggattagcagggtaggagaaaaggggagccccgcgcgcccccaagccctcatgtaggcgcggcagggccgctggtgaggtctccgcggcttcccaggagcgaggcgcgtccggccgcggcgcggctagttcccggtaagtgcggtcccgagagcgctgagcgcggagaggcgtggagagggggctgggcgccgaggacgtctgggtcccgcgcccaatggctggagggcggccgaa

SEQ ID NO: 33863 - DNA, 1082 bp, Mus musculus
gcttcagcaaggccactttgaggatgatgatcctgatggccttctaggctgagcacccagccatgtccccaccccaaccagtccagactgcacccagggcggctccatagtccaggagctgggcatgggtacactcaaccttcctaacagactccagggagggggtgcccttctccattctcccccttttctcacacccctgaccttagttcacccctctccacagcagtggagtatggggttggaggacttggttggctcatttacctggggtcaccctttctccccagaccaggacatttttgaaaaacaaaaaaacgggagcttcctgtggccccaaacccctcttcagttcagccagatgtatcttatatgtgttttgttctgcctattcatcctggtggtggttttttcctcgtcccaccacccccgtgtcctcccccttgacccccagcctctggggaacaggtgaggtaagggaccttgggtcctcttgtccttccctttctgtctgtctactattgtaccacctggctgtattgctttttaatattgcaccgaaggttttttaaataaaactttaaaaaaaaaagttcattttctgtatggaggaagaaggtgctaaaagcctccttgaagagtttaacattaagacagtaatgtggtgaggcagaatagctacggcttccctcagcccactactcaatgggctcaccaagtatacagatagaacgtctcggttctatctccaccaccacaaaaagagacggtttttgtggctgggcttggtggcacacctgttatcttcacacttcagagagggaagtcggatcaggagttcgagactagacttacctacatagttaaaaggcagcttgggctacaggcactcagtcctgtctcaacaatgacaaaatcagtctaggactggaatagttcctttgtcttctgccatctcattccagaaccacctgctcaagtgtttgttgagtgactaacagttaactgcacacttgctgagcgttttgttgtcacctctgtagtttggtgaagcagacgtcataaaactcattttatagaca

SEQ ID NO: 33864 - DNA, 1169 bp, Mus musculus
ctcaacacagacctgctggtaggcccgcctggcgcagagaggtgagcagggcctgaaagaggtggagaggagggggctgtggtcagcagggttagaacaggacacagcggaaatgtgctctctcaaaacgcagcctctgccttggtagagaatggtaggcaaacccactcactgttactttgttctgtgttctgtgcaagttggttgtcttggctagatcttagtttgctcatccctaaagtaggaataccaactcagaagtgcctttggaagggccagtgagattataattgaaagcaattagcccaatctcgaagcccgcgaccttgaactcgtgatctccctgcttcagctttccttgtggtaggattaccggttcctaccaccaagccttgatcacaaagggacttagtgtgcatgcaggtgtgtgaatacaggtgtgtgcagctgccccatcgtctttcttcacatctttccttcactccacgctggccacattgtctctcttctattattccctttaacgtctggctcacccgggcagtactgtagccttagcctcgaacaatggtctccaactcagcactctggacagggcacacccttctcggcaagcctcttgaagccacgcccagctcagtctctaggggaaacctcctcaccctagacctctcttccttttcaccgctttgttctctccccttaactatttgcaaacgcggcttatttatttgttgttatgtctattacttacctcctcccattggaacttaaagtctgattgcatcaggtctttacaggttgaggatgtggttcaacagcaatattgcaataacctagtgtggcccagggcttgggttccatcccaagtattccttcccccaaatactttatactcacctcagaagctgtccacgcaagcactaacatgatatactgttaacatgatatactttatagtcacctcagaagctgtccatgcaagcactaacatgatatactgtttaagcgggtggggcacaaacatacctgggaagtacaacctgggaccaattttgaccttgtctctattctccttgcagggtccccgtcctctctctcagtctgccatggaagcagctcctaccggtaagcattggagtccccaagacctggggtaccgtcaccac

SEQ ID NO: 33865 - DNA, 1096 bp, Mus musculus
catttcacaggctgtgagtcgaattttgtaacaaggtcagagaacttttatggttgggaggacaagaaataatgattttgtttcttcactgatggagatggaacccaaaaccttgtacacaatgaacacttgctctactggggagccacacggcaaccctgccatgccctagccccacgccaggggactctagacaggaactcaatgctgaggtaccatccaataacagtacttaaagacaaacaaacaaaccaaccacattcttttagattgtttcttatgtgtgtgggtgttttgcctgaatgtctgcctgtgtaccacatgcattcagtgcctatggaggacagaagacattctcagttactgggactggagatacagatggccgtgagctgctatgtggatgctggaaaccaaaccccagtaagagcagtcagtgctcttaactgctgagcctctccctagctccgggaatctgtctcaaggggttcagaaggaaaatcacatgcaatcctataacccctgttgacagtcagggaacattctttgtatatttgagccttggctttgctcgaaactgaactgcctctctccctccttctttccctctctctctccctccctccttccctccctcactttctcccttcctttcttttttatcaaaaaacaaagccatctaagcatctgtaatcctctttgtctttcagtggtgtgaaatatgacaggtgtccatcactgtcgatgagtacagactggagccttcatctttactgtatctgtaagcccatttcagtggttgtcaagattgttactgtcctctgggaactcagtgacatagagttcccagaagctgggaatgtaggggcagggtggatgagaggtggctcttcggggacagagggaggaggaggaggcgtgtagctcaccgttcctgcagacagtggagaggcctctgctctgtatgcagaaggtgtagtgagtagcctggcctctgagctggtgtcttggtacttctccccaggctacaacaggtgtccctggggggtcatctggaagtcgccaaactgctggcccagcaaggggtactgtgaag

SEQ ID NO: 33866 - DNA, 1133 bp, Mus musculus
tacatgtaggcagaacacacacacataaaatgaaaatgaacaacaaaaacaagcaactgagttaagcaacaccaggaactgagcaaccgaggaaaacatcagctgctaacctttggcccccacgcctgtaccggtgaacacttaaacaataaacaaaagcactgttaataacgaggtctgacaaacgcccatgcacccgtcactggactccttactcattcgtcccgtcccacttccctaacagaaaacatccagtccagaaatctcagtttgggaccagggatggcttctgtcgattgttttgagacagaatctccctctgtagtcaattcttgaactcgtggttcttctgcctcagtttccccagtgttgggagtttaggtatattttcaccctcttctacctcactttcaacatattgaacccctttaggaacatgaatttgttttcaatctataatgctttccatctttattacctcactcctaggatgttctgcagtaactcttattctgtgactgtgggagactgaattttcatcccacatatattaacaactttgtctttagctgcaggtggctagtagcaagtgtatcagtcagtgctgttctagaaagttctaagactgtaatccccaggaatactgtaacaggatatgtgacttacagctggcaagggtggctttcagaaccattgtggaaagcagttgcagaaaactcagccacgcagactgtcagcactacccagtcttctcgtgtgctccaggtccagtggctcctggataattacgagaccgctgagggcgtgagcctgccacggagcaccctctactgccactacctgctgcactgccaagagcagaagctggagccagttaatgccgcctctttcggcaagctcatccgctcggtattcatgggtctgcgcacgcgccgtctgggcaccaggtttgccccccctccaccctcatctgcccttggccaggggggtgtacactctgcccacgtgacccacctcaactccaaggggtcttgaaccacagggcaaagaccctcttgccccttgttaactcccttgctcagctctgcttgtgcctaccctggggacatcccttgggccatcttccctttcct

SEQ ID NO: 33867 - DNA, 1105 bp, Mus musculus
aaattgagatctttttacccctgtcctagatatagggattacacgtctgcagtctgctgtcatgtcacatcatctcgagctctgaaatgattcatttttgctttcttgcagacagagactttgccacagagcacgtgtgttctttgcccatagtcagccagcaaagaagctgcatagctcacatgcaggctgacgagctccagaactgagtgtcccgtagccaaaaccctttccttccctttcctccccctccccctttaaaaagggcctcatatgtagaccaggctggcctcaaactcatatatatcttcctgcttctgtctcttcctagctgggatcacaggtatgcaccactgtagggcttatataagacctggccctggtgcatggcatgaaaattctactctcctcccttttgtgtgtgtgtgtgtgtgtgtgtgtgtgtgtgtgtgtgtacagagtgcaatgtcaagtgtagtttctcaggattgtgtgtgtctgatgtcctaaaaggtgggagacatagaatctcctgtaactggagttacagatggttgtgagccactgtgtaggtgcagggaactcaacccaggtcctctgaaagagcaacaaatgctcttaaccactgagccatctctctagctccaaccttgttttctcagagaaggtgtcttactgggacatggagctggtgaggcgggctggtggtgagccctagagcatcttgtggcttcccttccccagctctggaattacaagtgtgaattgccatacctggggacaacacaagcccttttgcttacatggtgaccactttattgattgacctatcactgaagaccctgatgtttttttttttttttttaagatttatttatttattatatgtaagtacactgtagctgtcttcagacactccagaagagggagtcagatctcgttacagatggttttgagccaccatgtggttgctgggatttgaactccggaccttcggaagagcagtcgggtgctcttaccaactgagccatctcaccagcccgaccctgatgttttataaagaagacgtgtgtgtgtgtgtgtgtgtgtgtgtgtgtgtgtgtgt

SEQ ID NO: 33868 - DNA, 1402 bp, Mus musculus
tcttaaccactaagcatctccagccccatgagaccttgtctttataaacaaaaacaaacaaacaaacaaacaaaaactagttgggcgtgatgacccacacttgttatcctagctcttgggaggcaaaggtagttggatctctgagtttgaggccaagtggggctgcagagtgagattaactgcaccccttcacatacacccccccccaaaaaaaaaacaaaaaacaaaaaaactgatgaagctgggaggattcagagccaatggttgtagggtgggaagggaaagggcagggtctggctgcacagatacacactctgccctctccccacacccaggcccaccagcgctgatgagcatcatgaagaactggtactccttgttcaccccagtggaggcggtcaccatagtggcagtgacaggcaccacgcatgccactttgctgcgactgcagctagatacagctgggcgagaggagctctgggcttgtgcccgcaccttggcactgcagtgcgccatgaaggatccccagaactgcgccttgccagccctgaccctgtgtgagaagaaccacgcggcctttgaggctgcctaccagattgtgctggacgctgcagccggtggcctcggccacgcccacctcttcacggttgcacggtatatggagcatcgaggcctgcctctgcgggcctacaagctggccacgctagccttggcacaactcagcattgccttcaaccaagacagccaccctgcagtcaacgatgtgctgtgggcctgctccctcagccactcgctggggcggcacgaattgtcggccattgtccctctcatcatccgaagcatccactgtgcacccatgctctcagacatcctgcgacgctggacactctcagcacccgggctgggcccactgggggcccgcagggctaccaaaccactagggactgacagggcaccactttgtcagcttctggatgccgcagtagccgcgtacataaccaccagccactctcgcctcacccacattagcccacgccactatggtgacttcattgagttcctgggcaaagctcgagagaccttccttctggcaccagacgggcacctccagttcgcacagttcttagaaaacctgaaacagacgtacaagggaaagaagaagttgatgctgttggttcgggaacggtttggctgaggaactgcagaaagccgggagcatgggtgtcccaggcccaccttcctcaaacaggaggcccatggctacttgcagtaaagttacagaggtgggaggcagagggtgacatcattccaggtgtgtgcctaggagtgtgcagacaaacgggacatgcgatctgaggatccgaagccatactgctaactagaccctgcagggagtatgtgc

SEQ ID NO: 33869 - DNA, 1157 bp, Mus musculus
ccattgagcaatctcttcaggccctgagaataaacgtccctcatggtgcttgcttttttttaaaaaaatggagacaaaagtagtcccacggaaggtcgtttgacacgctgattaagcgctgggtgtctgtgagccgtggataggcagagctgagagttccaagtcatcgcttcagtaacggatggacgatttccggcaaaaaaatagccccatcaccaagcatcttggagctagaactcggccttgggagaagttacagccactctggaagacgctaatcgcccgataacctaggagcgcgtgcgcatgcgcacgcggcaggacgcaactccgccccgcagcctgtgcaggattcctcgtggccctgcagggtaggcaacatgacactggaagcgatccgctactcgcccggctcgctgcagatcctcgaccagctgcagctgccagagcactgccactatgaggcactgagctccgtgcagcaggctagtgaagccatccgcgccatgaaggtgcgcggagccccggccatcgcgctggtcggctgcctcagcctggccgtggagctgcgggccggcgccggcggtcccggactcgctgctctggtggccttcgtgcgagaccagctgcgcctcttagtcgccgcccggcccaccgctgtcaacatggcccgcgccgcccgcgatctgggtcaagtggcagcccaggaggcggaacgagagggtgccactgaagagaccgtgcgggaaaggtacgggatcctggaccagtcttgtgtgctctgcccagctttcctctctaccattttctttcccatcccacttccggtccagccacttggttcttactgcttttctgttgcaccggtacggctcctgcctgtggctgagactagagtctagagcattaaagcactggagttagaacttcatctccaggttcctgctccttcccctccccttctgtaaaaacaccttgtccctgattctgccccttcctgttcatcaactgcctctcccaccatgacgtcatcatcacagaggtaaagggtttcctcctgtttactgctgtgcgtcagccccagctcctggctcacttatattagtgatcagagtggaagtgtcctcaggctctcagaaccccacctcacctttaaa

SEQ ID NO: 33870 - DNA, 1137 bp, Mus musculus
atgtggctgaggagagtttgagtcatgacaccagctttgctctgtgttggggctgaaaccagggtctcacacatgctcggcaagcactctaacagttgaatgagcacattcagagtattttagaaaaaagcctaagatgtgtacaggcaagcataagagttggggttggcaccactgatgaatgcacaccctccaggccaaaggacctctgtcttcccctcccggatcacatccgaacaagatcggctgaccctctaacctcctttttatgcctcatgtaaatgggactggagcagtgttcttttgtacctgactgctctgaggatacctttaagatgctttctcatgctgcaatgcatccagaatgtcactgtgtggtggcctctcggatgtttatcatgggcctttagggatgatctcttctccactttctgttgtttccctcggaactggtcttggagtggcctgaccctaccagtttctaatgtgtggagcagggcatgcttttagaggtcagtttatagagggttgtgggaccatatgaacggtggccatctttgctgtctgtggagggggaggggttacaggactgtggagttgactgtggccagggaatcttcctcccacctgcaagttccagtgtggtcaactgctaagggtggagccttgctttctcctcactttgagacagttgggccacctcagctccatcctctctgtctcccagcagctcaggccaccagaagaggtgtccttgcatccgggtaagaaactcctagtacagtctataaccggcgatgttctctcagcgagctgccttgagcaagcggcacacaccttcactcgtggtcccatttatttgaaatctggttagaatgtagaaaagaggggctgtgatggtccccacggagctaggatccgttgaaccccaactttcctagagcatcccctcatgctgccatctgcttcatcaaatgccagtgtcatctttccaccctccttatgctagtgtgcctccctactctggctgtgaattctgactcttcagtgctggggctccggtttgtgtccctctccacacattggccaagtttgtaaaactcaagaaggatcctggagtcaccataacatcagggc

SEQ ID NO: 33871 - DNA, 1143 bp, Mus musculus
tcaggtcttcatgcttgcacagcaagtgctcttgtccactgagccatctcttcagactctggggcaccatactttttaaattacctttttatttgttaatttatttagtactgaatttatatctgatacaacatgcatttggaggtcagaggatgacttgtggtttcttcttatactgtgtaggtcccagggatcaaactcaagtcaccaggcttgatggcaagcacctttatctgctgtgccagcccctcaagacataacattttaatgagcacctactatgtagtgggcactgagctatagcagagtatttaataccacagtggttacttttatgatgctcacagttgaacaagaagccttgctattctctagtcacaagtcctgcagggaagggacaagtcctggttctctgaggggcaaataaggaagtctccatgctggggtgacatggctgtacatgtgtgagaccttgggttcaatccctggcactgtgcaaatggatttatgaacgagtaagacgatttttctctgatgtggtggcccactgagtccttaataggactctgcctggaagggtaagaaagatgctctgactggggaaaaagcatgtatggaggccactggagcagcagtacacacatggccgtgtgtctgggaatggctcccactggctgctgtgtggagcacagttcagaacagggaacagtcagatgccttgaaactcagctaagaactgatttcaggcttccaagtcaaggctgtgtgctgggggagaggctggtggagatgcaggtgaatcggagagcaatcccgtggcagcctcgcctgccctccctccctcgcctttggactcttcctttcctggcaaggttttctgggtaaggaaagcagcctgcattcctgccaagggtatgcgctctggggggatctccacagatggccattgggattctgttcccaagaggctctggccagcccctggccttcagggctcctggaacccagtcaacagcctctgctgttaataacagagctgagctgatggccttcccttcagtatccctcagctttcatggttccttctcaagccaagtgtcgtgccaccgcagttggcatggggtgagaaaaccaagttttttc

SEQ ID NO: 33872 - DNA, 1196 bp, Mus musculus
aacactcaatttcctctcttctagctgcttcagaagtagtaaagatggcctggtacctcatgcacacatgcaagtgttgcagctgatatttatgcttgtgtttatcgtgtgttcatgagaccctgtcatggcattctcgtggaggtcagagggcaacttagtgtcaattctctccttttaccatgtgaatccccagggattgaactccggtcctcaggcttggtggcaagcacctttactcctaaatgatcataatggaccctataaatatgtataatgtaaaatgatacaagaggctgaagagatggctcagcagttaagggcactgactgcccttttagaggacctggaatcaattcccagaacggcatggtagttcacatccacaactccagtcccaggagagactgcctgggtatagcaagaacctttgtccgagtctccagtgtgtgttaacagtgcatggtggtcagatctgggtcattagcaggtcagttatctcagcttttgatcaggcagagtctggcttcaggcttgtctgattccaaggcatcgttagaacattgtttctttttacaattcagggtctaggctatcctgggacattctgtacctaacaatatccccatgaacaactgatcattctgctcctacctcccagatgttgtgattacagttgtgtgctcctggttttatgcagtgctggggatggaagccagggttctctgaatactaggcaagcggtctagcaactgggctacccctaccccaccccacccatttctatttctttactgtcttttttgtggttgcctccattgtagtggcttgactgcagttcctgcatgtctgtcttcttgtgtaaggtccagaaagaggcctttgcctaatgcagctgaaggtgacacctaagaatggcccctggctgagcctagaaatgagtcctaggctgaggcaggcaccatggccactccctcacctgtgccagcaggtgcagctgagatcttaacaatgccttggggtctggctgtgccaagtaactcctccctctggctcccagggtccatctagcacctatgacaatggctgggaccttcccacatcttttgtctcctggaagccctgtctccacttcttctgttttgtggctgtctgattgtccctcccctccagacagaacggaagagcaggccttc

SEQ ID NO: 33873 - DNA, 1153 bp, Mus musculus
acaccatgccatggaagaaagaggggtcacaaggctttgtccttctatgaggacaaagtgtggcaagtgtggcaacatctttctccaggggtgttgtcactgatgaagtacctgtgcttctgtgggcaaccttaaactcactgaggaagggagggagggaggcagaaagggagggaaaagaaatcagaagaaggacaaggggactgggttagaaagggacacagagaggaggagacaagaaaggggaaggggcttgaatatgacccacacgtgtagctagtacatgctaatagaaactttttaaaaaagtcattggtgtaggcctgcgagaggtaggggtgtcctccagcccgaaagggaggtgactgtgtgtatgaatggggtagagatgggaaagactgagggacaagggggtgggctggagatgttgggctgagttgctgggagaggacagagtgctgatcacaaagccattggaggtctgctccttaaccctcacactcccttcgagtacatgatcctggccaccatcattgctaactgcatcgtcctggccctggagcagcacctccctgatgatgacaagacacccatgtctgagcggctggtgagcaatgaggtggaaggggtctgggtccctgggctgagacatgtgtgggagaaaggctgctttgcaccatcatcagtgacctgggagcatggaagcccttactgcccaaccccaccctggggacatggaagcccttaccacccaaccccacctggaaacccagcagacctggtatacaccagggcacagtgaccttcgcactgtgaagacatcatgctcaatccaaattctgtttcctgtttcatgcagagacacaaaattttcatgaaaaagtgatacataagtatcaaacagagcagttagccactgtgaacttagtcctcaaattcagtcactgggatcccattctgcacacttccttgaccttagttttcctccattctcatcttcctcagcagaagtataggacacatccacagttgacaaccatgtccttatatctgcataactagaagtgcagacatctcgtgttgccataagaatgttttttatacccagcacaagtaccaccaaatcctcagaatcagtcagtatctagagatc

SEQ ID NO: 33874 - DNA, 1273 bp, Mus musculus
taatagtcaaatacagatttggcttgtttatttattgcctatttgttatttttgctatacttaggatgaacccagatccctacatatgctaggccagctctctaacactgagccatggctttgccctgtactaggggattctacactagggctttattcctggagtacacacaccctcagcttctcactagtggattctaggccaggttctactgctgagtagtgccctcttggccttcatagtcttcaccaaggcaacagccacatctctaactgtgggagattggtactcctaacccagggagtaggttgttcttagcattctttcattgtgacacagtatctgaggtagctcaccttgcagaatgtgttcctttggagttagtttcagaggtctcagcctttggtgactaggcccattggaaaggggagatgggcacacatctacgggtgtgcttcatactgcttatgtcactgacaatgctgtctctcccttccaggatgacacggaaccatacttcattggaatcttctgttttgaggctggaattaagatcgtggctcttggctttgccttccacaaaggctcctacctgaggaatggctggaacgtcatggactttgtcgtggtgctaacagggtaggcgactgcatcatattctttagtgtgtttttcccaaggatatcaagcagtggttagtttcatggcatgtgtggtcaggctggacttggagacctgtgcccagtgttcgttagcacactctgtctcctacctaccacctctgtgtcttcacccttcatagcagagagtgctgttgaatagaattgaaacaatggcctgttgtagctggcagcttctacagtgcatcgtggatatggccatgtatacctccctataacccaggagggcagaagatgctgctattcccaacccactggccaagacagagaagcaccctccatctgctgagcagtgaggctggcatttaaacctacaaaccaagggcctgagaactcctttgcttggtgatgtagtaactgttcatggtgctggccattgaggattattggctgcatggactatggtttggactttggcaggttgtgcttgtgtttttaagggagtttctgatgtgaatgcaaggaatgagctgtggctgacaagcaaatgtatatacacttcccatctcaacacatggttctgaactaggaatgacttctacctaatagcagtttgttgctcattgaaggtcaaagctggtgttttctgatt

SEQ ID NO: 33875 - DNA, 1134 bp, Mus musculus
gcttgatgacccaagttctattcctgggacctcctgctggaaagagagaacacacaaccctacagactgtccctgacctccacacatgcaccatggaacacatacatgtacacacacatatgaataaataagtataacttttagagtgtgtgtgtgtgtgtgtgtgtgtttctgtgtgagtgcatttgcttgaaaccaaagattcgcacatgctaggtaggtgttcttctattgaaccacactcccaggccctcacttgggttttccaggcagctgctatactgctgagtagcaccctaactcttgaccaccctaatgtggagttcagtgagaagcactacacagtattcctctctatagcatcttcatcttcccaaatggggagagtttatcccaatcaaacattcagtctccagaccccagtccccagtgaccacatcctattaggatacccagccagatattaagttctaatgcttaagtttggggtccacagcatccaccccatcctgatcgtattctcactttccctgctggttatagtcagacccccctgaaaattctaagacctgcctctgtcctcgggtgtcccaaaattgatttggaaaagaccccagtgagaaaatggctgaccttgggaagcatctcagcactctacccctccctcttccccccttcaccctctccctctctctctctcacttcttcctttcttcctcatctctttccctcttccccttctccctctcacttcctcctccctctctccctctttctccctctctcccctcctctcttctttctctctctccctctctctccctccttctccctctcttcctctcttcctctgtccctcctctttccctcttcctcctctttcttcctcctcttcctccttccccctcttttccctcctccctcttctcccccacttctctctccctctgccctccctgtcaacacaagtatgatccccacacccatctcctcttccccatctgagcttagtggtgcacctggcatcttgcggcagtgtgtggcagtgaccacgctaacacatggagcttaagtgaccatggagtgtgtggtcctgattggaggggcagaaaactgttcagagccagaggatgg

SEQ ID NO: 33876 - DNA, 1150 bp, Mus musculus
tggtcgcagatggtatggccactacttaaagcatcatgcagccagcgtggtggtgtgtgactgagcacagaactgaggtaggaggattgaaagtttaagacgcgtgccacataaagaacctgtgttccctcaaaaaaaaaaaaaaaaagatatgcatgtgtgtgtgtgtgtgtgtgtgtgtgtgtgtgtgtgtgtgtatacacacacacacacacacacaccacatgtgggaaagccaaggccagggaaggtagatgccagtgccatacaccaggaactgcaagagcaaagatggagccctacaaagggcagagaagagctggggcaggaactcgggaagaaaagtcaccgggtgagatgaagcccaggtttcattcctactcagtgacgctgaattatctggggacaagctggcatcacgtgcccctcaaggcatcctccggcatcctaagtgtcctcaggtccatgccagtcaggcctgggggaggaaaccctgctttctgcaaagcagctcacgccccctggtggctgtgaacagagcagccagattatgggctgcgcagaaaaccctggacaaggtggtgatgagtggggcccatgtgccagagctgggctcatcggccttggaggagaaaacatagagaaaccgcagtttgtgcagtcttgaggtgtcagggacagagaccatctttcctgcagccacggctggctctgcagaattaacacacaatgcttgcaggcagagtcttcctcccagccccggagcccctccccagtgcctcagaacccaggactgcaaggctacaggggtaggggctgccaagcttccatctgtttgccctggcaggagggagggagaatttcccagccccacctccggcagggaaaagcggaagtctcccaccccaggcacaaagccaagagttcagccaccatgaagctggctggcatgtgtcaccacagtccgatccagccatgagctcatccaagacacaggaggctggcatgggaagacaggccagctacactccaaagtgaaggcagccatccccctgcagacccccgtcttccccttcatccactgtacatgtggctcacaccattgtaatccccaagcaaaggaagggacttgtttgagctacattttaca

SEQ ID NO: 33877 - DNA, 1180 bp, Mus musculus
cagtgtttcatagaagaccctgaagtgacactccacagagaggcctagggacttctatgttgatagagacatctgtctacctgttataaagcgtggtgtcactcctatgatcctagtacttgggaggtgggacaggaggatatgaacttcagggccagccttggctacatagtgagtttgaggccatcctgggctacgatgctattattattattattattattattattattattattaacatcctcttgatccacctttgtattgttatgagagtatcatactgatttttttgatatacaaaatctgacccaggtctatgggaaaggggcatttgtacaacctgtaagagtcagctttctccttgccctgtgtgggttctgcggtgtcaggcgtctcacagcctaggcagcacaacttgtgactaggcaggactcaagggcagccatgagactctgttctaacaggagctggccagtacaggttccagggtcacacactgagaagtgggattcccaaccaaatgggagcttatacaagggtctggtcgtgtatgtcggctgtgttttagcccaggctgtgaaatccaaccagtacctgcagacagtgggggctctacagagcatttgacttcatccgtttccatagctataaccaaatacctgaggtcaggttacttataaaaagtggaagtttctccaacttgtctggtgaccacagagtcaaacacaccaacgtaacgccagccgctctgagggcttcttgctgcatcagacatgatgagggcctcccgtggtgacccagagctgtcatgccagctccagtctcttctcactcttataatgccaccatggggcgcatcctccccccgcccttgaggtcttatctaaccgcaactactacccagaactctgaaaaccatcatcagacaaatttagagattaaggttcccagtacctgagtttgtgtagataaggcaaacattaaaaccagagcagaaacactaaaaaatatgaccaagatgcgtcaggcctacaaggaaagcatctagagaaatgtggagtggcagtcaagggcagtatatgctaaggtcctggggtcgatcagaagacagccagcttgcaagccagtgaggagagggggcaaagggtcagtgacaggctaagaggactaaggagca

SEQ ID NO: 33878 - DNA, 1176 bp, Mus musculus
tcccggtactatgtcagggagcttgtgactgcctgtatctccacgctagaggacctgtaagttttctggcttccacaggcatttacacacatgatacagatacacccataacacatatacataaacatgtatgcccataggcacacacacaaaagtaaatatatctacacaaactcttttaattgacaagaaagcttggctgcattatcgtgaagatgctttatggtaaattaattgctcagcatatcaggggataaagattgctgcaaataaaggcacgagctgtggctcatggcattttgtgcaatggcagcacttgggaaggctgagctgggaggattgctgtcattctgaggccagccagtgttacagggagacgctatctcagggcccaggcctttgctgctgtcgccctctctgggctctgagatcagacctgcagcctggctctcagccaagccgctgacttctctgcctgtccttgtccctctagttctacggagcctcggtggcctatgaaaacgcccttcgcgtgttcaacattgtcttcacctccctcttctctctcgaatgtgtgctcaaagtcatggcttttgggattctggtacgtggggcctgagggtagtgggtggggggagtacacagggtccagggtgcgggaggtgtgtgctctgggccccaagacctcgtccccagcaaaagtctacaccccacctgcacagcctcaggccgacctaggagtagcagggagacccaatctagatttcccttgggtgagtggtgtgtggattcagctgtcctccagatgacctggtcacgggtactgatgtcaggaaaccacgaccacagaggacaagtccccagtattcacagcggccaggcctgtctctccagcgtttgggaggctgaggcaggaggcttgggaattcaaggccagcctagggcagagtaatgcttgtcagaagaaaagacagaaaggaaggaagggaggtggaaagaggaagtaaataaagaagacagttgtgaccacagcccaggagatctcaggacacccaagtggaatccccaagatcggaggtccgtcagtctggcctgtaccactgcactcaaaccaccgtcttcttacttttcatcctggtctttagtgaattttatttacatgtattggtgttttgc

SEQ ID NO: 33879 - DNA, 1219 bp, Mus musculus
tagagtttacccagttgcctgttaagctgagcttgggtctccttaaaatcgtaaacagagaagcaaaagccacatatgtcctgcttctgccaggtccttccaggagcctacttctcagttcacggccccttcctgcacccccttttccctacagccttcagtttcctggcctgtgggcctcaaagtcacccctcctcccggctaagaatctgggcacttggcgacccctcccccagggccctgcctttccagcccgccgccacccaactggcaccaattaatttccaccccagtctgtccactcacatctggccgccagctgctcgccctagccctgcgggtctctggggggctcccagagacgctcgcagttcttttcctgagcccacccacgagcccagaccaccccaccgagtcagcagatttgaaaaggcttccaaatgtctgaagcaaagatctgaagtcagaccgaagaggatgcgcgaagctttcggacccacaaatgtatggtgggggaaggaagacaggttctcccaggtacctgaaagccacagaccaaaaccttctggcttccagatgggaactgagagagtgctcctccaactcatcagctccctaggaccctgaagtgacagccatgccccccccccccaagccccatccccgcctccccaagcccactccaggctgccgagtttccttttcctgtttgccctccccaagggttggactagagagagcgccgggcccctttgaaggggctcctgggagggtcttccaggaagagggggaggggacagactggagaacaataagacctctgtggctggccagtggggcgccagttgtatcctgttaacccttggggagcccctccaagccctggcctctttggggagtggagggtgctcttccatatttagtttgtgaaagtgttcaggacaaaggtgtcctgggttaactggattgccttcctagcttggagcaggaatgcaaatcacgcaagtgcatgcacagggctggatttgtagcctgagttttagtgcaaaaaatcgggaccttttatttgcaaaaggccaggctcagccacctgtctcaatatgccaattaaactaatgagtaggggtttagagacggtccatcgtgcttagtgtgcaagcatactgatatgagttcaaatcccagcacaatgtaaaaaacagggtatatctggggaaaa

SEQ ID NO: 33880 - DNA, 1423 bp, Mus musculus
aggcccgtctagaagaggtggagggggaggcgacgtcggaggttcccgatcgcctgcagcttcctccggcacaaagcgaaggtgccttccctaacctcgcccgcgtcctccaaaggcgcttctccagtctcctgaactgtggacccgccgtgcccccgccgacgccccccacgtgcgaggccaagccagcctgccgcccggccgacaatatgctcaacgtgctggtgcgagctgtggtggccttctgagagctctggtggcttctttcgagcggcgccaccggagcggagaacgcacacccgaggcgaaggccggcgggggccgtgaagaagagccgcggcccgagctgccgagaggccaggggaaggactgaggagcgaggggcgcgggcgccttctcccagacgtgcgtccataggtgctattaaaggactgtcccttccttggcttggagaagggacacctagatcttgaatctcagggtcgaactctctaggggccaggctgccctttcaaggccgtttcactaccattcgcgtttcggcccctacaagtgggcacgcttgtgcaagcggtcagagttgcgtcatgggacagacgcgggtgcttcctgttgccttgcgtgggtgtggggcctgggaggaggccagggtgtggacccgccctagggactgggaagtgacttgagtcacctcgcccccacaggctgctgtgggtgagcctgaactgaaccaatcaaatctgcgatcagagttgaagtggctggagaccccgggactggtcaacctagatgatcgcctggcgtggaccaccgcgggacgggtgggccgctggtcgtagttgctgccgtagacacagcttcttcgggcaggaaagaaaattttttttttaccagcgtgtttaagaaagtctgtttacttttcccacggtgggttgtttaattagcaactacctggagttttacaatgtcagctaggaaaataaagaccatcggtgtaaaacgcgcggcttgtctggcttgcttccctggtgggggaggggtggggttaaggggtcagccgctccctaagcctccggaactggtttgactgggtgcggagccagagggaggccgggccccatttctttgccacaagtttacctgcttaagctagccctgtaatttgggagtgccttagaaattaacaaactctgggggaatagtgtgtggaaagcttagtttacaattggggaggggggtattgggtgcagtgtttcaagaagagctgaggaattttaaatgatggcgtttctccccctcgaccggaattgcgtagggcccccacgggtagagtggcggtgactgaactttgaacctgcgttcagccccttacacgatttctttagtgtggctcaggcagataattgagtgctaacttaagtta

SEQ ID NO: 33881 - DNA, 2427 bp, Mus musculus
gagagggcagtgcctacaacagctttctcagtgaccatgaggaagagcagaacttgataggcatagaatacagctttcacacagacagccccctcagcgaaggtcctccaatacctgcccaggacccttccatggatgtcacactcccctcctgtcacatacatacccccaccaccttagtcacgagctactgtctgtccctccccagaacctgcaggggtgctgcatgctcccagcccctctgcctccctgtcatcccacaccttttccccaaagcaagctgggctgggtcaagagaggacaggcatcaggtgggatctgtgaccttcctcaacactcacggggagccctggttccccttcctcttaggcatttcccagcaccaggcccggctaggggacgggcaggactcaacaagagcctgcccctcactgtggctgcttgggactccacgggcccaggggtcttctggacccctcccaccatcccccagtgcttccatgtctccaaaagcgccttcctgtccctctcgtctgtccctgcaccttggggctggggtaggtggggccaagagggactgtctactttacaaactgaggaaacaagcccaaaaggcttagagaaactctagaactgaccctctgtgacagcctccatcacgccccttttagtcccaccctgctctgcctctgtgggccccctcagcccaagaggtcattccaagagagcagtgctcctatgggcaggtgagggtctcaggacaggtttccagtctggcagaatttgtgggtgtgcgtgcgtgcgtgtgtgcgtgcgtgcctgcgtagagtgtttgcttttaaaaacatgaagatcaagaggcagcaagaccagggtcggaaccagggagcaggctgggagactgctgcccttctcccatccgaccctgggcagggctcccagcccccaccccctgtacataactttttgaaacatttttttagcgaatgaaatattgaagtataagatttccttttatttttcaaatcaatgggaatgtgtctgaggttccctgggtccctgggctgtggaaggcaggatgcagggaagactgaatgtgtgtgtgtgtggactgtgggtgcatgtttccacaggggcccagtcccagtgccccaggactcctgtggatccaaccagcttcctctcccccgggactaaagttttagggtgttcacaggtcccagttagctgagcccactcctgggggatgaggcagggcagggtccgcatccattgttactggtttgcggagcttatctctggccgcactcctttccactctagctctccaggagcagtcttttgggtgtcttgagtttgacatgtgagcacagggtttctgttactcccctccattaacgtcctttcacatctcactggttctgttctagccctgacctcccccccctccccaactctgcattctagctgccttttcagaggcaggggtttgcaggattggagaaggtgggatggagccttttgagtcagatctggagacctgtctccaggccagcagcaccctctaatctgccatgatccctcttaacatctgatggtgtgagggtggggtgttgggtctgacttggcccccagtaccttagccctgggtggccaagtggaggggagtagacatccctagctaaagcacaagcaccttagtcataccccctccctccgccctcgccctggcctgttacccacctcccccagcaaagatcccaaagcacaatctcctgataacttggcgagcagctgagcctggccgggatgagcgcaggctgtgctccctgcccaggtttagtaagggggcagttctgtggggcggagagggcttgtagagtgggcagcagagcccattggttccaagcacctcaggaggtggccctgactcccggggcttgggttgagggaagtataaagccaggggtgcaggggagaatactactcacttaggagagccaaagacagggttgtgccttacctcaggagccacccctgcacccctcctctggcagtcagctgcttgccctgccctcctgagagctgcatggtccccaccccaagcacccaggagagtaaaaaagtaacccacttagcaggaaagacaagtaggggcaaacccagtggctaccctcccacccatccatgcctctcatggggacaggccatcacccactggcccatgtgaagtgccaatgccctccccacccagagccgagcccccacccttcccaggcccacaagtgagattgcacattaactactgtatggagaggagcggtgttgggaaatgtgaaccctgagagtcagtgatgctgataagaataaacaagacgcctttgtaacagccctgctgtgctctgctcactggagagggacatgcta

SEQ ID NO: 33882 - DNA, 1154 bp, Mus musculus
aaggcaaaggggcttgagtgactgtgcataatagtatctatagtgttcttgcaccagtcccctgcagaggcccttgggatgactcagtcataaaggcatggctgtgaggggacagaagtggaagtggcactgccattcttagatgtatcgcagattttaccatgtggctgttgtttgtgactcccacatgctctcctgtaggaggtgaggaggttgcttgggcagggcagggcctatgttggtttctgccacctgacctgtcagtatcttatctcttgtccttatgcagctgctgccatggcgcagaccttacagatggagattccaaacttcggcaacagcatccttgagtgcctcaatgagcagcggctacagggactatactgtgacgtgtcagtagtggtgaagggccatgccttcaaagcccaccgtgctgtgctggccgctagtagctcttacttccgggacctcttcaacagcagccgcagtgctgtggtagaactgccggccgctgtgcagccacagtcattccagcagatcctcacattttgttacacaggccggctgagcatgaacatgggagaccagtttctgctcatctacacagccggcttcctgcagatccaggagatcatggagaaaggcactgagttcttcctcaaagttagctctccaagttgcgactcccagggcctgcacccggaggaggccccatcctcagagcctcagagtcctgtagcgcagacattggggtggccagcctgtagcacgccactgccccttgtgtcacgggtcaagacagaacaggagttggactcagtgcaatgcacacccatggccaagaggctgtgggacagcagccagaaggaggctggaggcagtggtggcaacaacggcagccgcaagatggccaagttctccacgccagacctggcccttaaccggatgcctcagccactctcaatggccacagctacagcagcagtggctgtggttgcagtagggggatgtgtgagtgggcccagcatgtcagagcggaccagtccaggtacctccagtgcttacaccagtgacagccccagctcctaccacaatgaagaggacgaagaagaagatgcaggtgaggagggcacagatgagcagtaccgtcagat

SEQ ID NO: 33883 - DNA, 1072 bp, Mus musculus
tcttttggcccagtctggccaaatagagtcaaaataggtgtgtgccacaatgccctccaaagccctgcttaattgttgcattagaagtagattttgacgtgcaaattggtttttcttttttggagttttgatatcgttttgagattagctcaggccagcacacttctctacctcatctacccactgctgtgactacccatatgcaccatcatactagactagtatgtttctttgtttgtttttgtggtgcacaggtataaccccctctgtgtctctgtgactttggggctcaggtgtattgcctggactgccttctgcaaaagccagtggtctcgtctcaggaaacatcctgccagacccctttcctcagtgagtcaactcaatatgactgagtctgaaactcagtgacatcacttcagaagttccatcctaacttgtcctgaggtcagctatctgaggaggtcaagacagttctctagagcttcactcttgttttagacatggaattagatttgaggaatgatgattggttggggttttggttttgtttgtgtttttgtttgttgttggtttgttgttttttttttaaataacatgtataaaggggctggagagatggatcagtggttaagaacactggctgctcttcccagggacctgggttcaattcccagcacccatggggcagctcacagttgtctataactctagttccagatggtctgacagccacacacagacatatatgcaggccaaacacaaatgcacgtaaagttaaaataaattattgttaaaatgtgtatgagttttccctgcatgtatgtataccatgtacttgtggtttccagggaggccaggaaagggcatctgattcccaggaactagtgttagaaacagtcgagttgaattgtgtggcctaagctgatcttgaactatattcaagctatcctttccacctcagcctcctgagtagcttcaactacaggcatatgccaccatgcctggtccagtcctagggaaagggacacagtaatgaacctcttgggtgaactttctgcccctatggggcctc

SEQ ID NO: 33884 - DNA, 1696 bp, Mus musculus
gaagaggggggggactttgcaaaagtcaccttacggttttctgggtttaactaaagatagagcagttagcatttttagcctttgagatgggatttctctactagaatttggggcagtaaggaagggactttatggattagggagggacaacaaccttttcaactgtcaaagggaggactgaggacctgggccacagctaaggagctggcatacaatgtgaccacctccctaccatcccctcctccaggtgtgctgtgatcacagagtttgctcgaattcatcttggggccaagggaatccagagtgagtggaggttcaggcctggggggaagagtatcactcacaaagttcacttcccacttcatccacacctcatttaggttcctgaaagctctaggctctctgctctttctgcctttctcctgggggttcagggaaacaccttcttgcatgaatcatcaggattttgaccatttgaaagttacggtgaaatttcttaaaaggatcattgatagtctggtttttgcctgagtgactgcagtcaaggttccaggagagaaggactcagagaaaatagctgtggacttgtctgatcaagaagaggaaacagctggaaagaatgaaaatctggccccaggggactggccacggactgctgcagtgggtgagatctgtgaggtacgggcctcagaaagaagtggccacttgggagtttgggtgagaggaaggagctgaggggctctagaaagtggttgtgggagatccaccacagcccagaaaaaaaggagacctggacatcagtcagagggatagctccctgggaaagcacatgccacaagacccttgagagtttgatcctcagaatccagttagttaggagccatgtgggtgctgtaaaatggtgggaggagagaactgattgaattgtaaatgaacattaaaacagaaataagacatgtctttctttgcctccttccaataggaaggtctacgagtgctggaaggcctggcagcttccggtctgcgctccatccgttttgccctggaggttcctggcctccagtctgtggttgccaatgatgcctctgcccgggctgtagagcttatgcacagaaatgtggagctcaatggtgtggcacatcttgttcagcccaaccaggcagatgcccggtaggttgattagccattgtcattggtggtggtaccggagatagagcccaggccttcatgcgtgctaagcagtggctgagcaacagctccagctcccaagaggtccctggaatgaggctttctggggactaatcctaaccctgtttagccttgggtcatactctttgaactcttttttttttttaagatttatttatttattatatgtaagtacactgtagctgtcttcagacgccccagaagaaggtattggatgctgtgagccatcatgtggttgttgggatttgaattcacaaccttcagaagagcagtcggagctcttaactgctgagccatctctccagccccctctttgaactcttttttttttttttttttttttttttagatttatttatttattatatgtaagtacactgtatctatcttcagacactccagaagaagcatcagatttcgttacggatggttgtgagccaccatgtggttgctgggatttgaactcgggaccttcagaagagcagtc

SEQ ID NO: 33885 - DNA, 1431 bp, Mus musculus
tccctgcccggccgcgtgcgcctcttcggtcggtcgaggacagtcgggctgtgggcgctgtgggattgcggggcacacgccccgggcgaggtcagaagctgcaggccagctgggccggggcccaaggtgcccgagagaggtaccctcgggaggactggggtgggggtggtgctcctttcccaagtggtggtgtgaggggcaggcaggcagggacgatgagggcgacagatgtggggacgtgtttaggagaggaaacaacccacaaaaaaatataggggaaattaacctttttttttttattgaaccaagtgcaatgcatcagagagttttcctatctttgtatgttaagagattaagaaaaaaaattctatttttgttgtaatgtcctcgcggctctggggacgctaaaagaactgggcctgccctgcccttagcggggatgaaagctgagtgttttccttttttttgtttttttttttgtttgttttcctttttgatagttttctgggtttttgtttgttggtttggttggttggttttttttttgtttttttttttttgttttgccttttttcctgcgttgacgaggataatctggggtttaaatttgtttcgtcgttcggtttcggtgggagggctgaagaaaacgtttaaaaacacctcgacattaaaaaaaaaaaaccaacacaagatcaaaaggaaaaggacgagagaaaattatttttaagataattaaacataaaaaccctggtgcttattacattataaagtacgtttttaaaaacccacaaactattatacatacgtttatgaatcaattaaatactctgcacttgttaggaacacgcatatcccttctttgttgagtttaacggaacgggacagcggcgtgcgccccgcggctgggctgctctggccgcgggtctccccaggcgctccccccttcctcgccccctccccctccgggcactggggcgcggcgggggtccccggccccctcccccgcagaggtcaatgccaacgaacaaacgtcccttttccctccctccccactccgagcgcccttctttgagccagacgccaacttgaccctcaccagcattaatcaggagcgcgctcagcaagttggtagtttcctccccgaccccttcccacgtaacaccactattccccctccctccgggaggttcgatgctccaggacaggtccagccacgctgacaggtcgatttgcccaggcccgcgcccgcacgcacgcacgcacatagcccggcacacacccccaccctaccccgcaaccagccctgtcgactgccttacacacccgcccccgcgctggccggccgacctagtgccttgttctcacccccgtgctggcggagcggacgccgcgctctgggtcccagaggggccgggtggctcagacgaccca

SEQ ID NO: 33886 - DNA, 1129 bp, Mus musculus
acagaatctctgttctttgctagtttcccaagacagttctgctcttccacaccctcagttctaagcttctctgtaaagctgggccccagggctagggttagtctacttcaaatctgtctccccgagggagggcacccggcaatgtctaaggacatttatagtcatccaataggctggccggatgcaccctgtaatcccagcacttgggaggctgaggtaagggcatttagagcgtgaggccagcctagctgttacatagctaggccctgttgcaaaacaaaaacaaccgactaaagaaggggtagatgtttgctactggcatctagtggtggagccaggaatgctactgagtaccttccaaaacaaaggctgcccttgcctcaggaagccaagtggcctcacacacaaccctgggcccaactgggggaaatgatttaatccagggaaccacaaggctaggcaggtctctagaggcaagggatctatgaagaagaggccatgccctcaataaatggtactataggcttggtagccgtctgctctacccacaatgccgataggtcagctagcaactctgagctcctcatcccgctccttgccatcagcccgagagcctgaaagtgccatccaacaaacgaggccaccggaagcaggggctgtcacaccaccactgccatgcccatacctgcatccacgtcattgggccatccgctagactggctgctgccagcggccggagagcggcctgtcccaggatagaacacatcatctactggactctccatctcactgtcgtcgatggacttggggcgcttggtgctgctgaggaggaggaggaagaagaagaagaagaagcaagtcaagtgggccaaagttccaggcaccccagttctaggagcagagcatctccagacctgctctccctcaggttgccaggacaccctgaaggaccatcaaagaacaggcaaagcacctttatctgccttccacaccccacccactctttcctattagctctcagctgtgccgtggaactcagtcattaaagagtgttttaagccaacagtggtggctcacatctgtaatcctagtactcagaaggctgacacagggggactacagtcaattc

SEQ ID NO: 33887 - DNA, 1186 bp, Mus musculus
caaacattggccagtccggacaaggcagttcttgcatgccctttggtctgcaccctcaggggcagcaggacactactggaaccagctgaccctagttcacagctgctgtagaacatggacatgtcatgggtgcgacagaaggggggggcagcaagcccatggtgtgtgtgggtatatgtgtgtgaagcaacattgtgtgcatgtgtgtgtgtaaagacgagagagagagagagagagagagagagagagagagagagagagagagagagagagagagagagagagagagagagaataggtgtgtggacaagctctcgtgcctctggttgctgaggctgagatgggagcaagtggctggcgaagctggtggtggctccaaaccacacttcagtagaacaatctcaagagaaaaaaattgctggggggagggagaaggagaagaaggcggttttcctgtgcccccttctaacgctgtgtttctccttctctctttccccctcatcccgtcttccccctcctcccgtcctccctcgccccgcatgctcccggcttgccgcctgcaggatgagttccacccgtttatcgaggcgctgctgcctcacgtccgagccttctcctacacctggttcaacctgcaggcgcggaagcgcaagtacttcaagaagcacgagaagcggatgtcaaaggacgaggagcgcgcagtgaaggacgagctgctgggcgagaagcctgagatcaagcagaagtgggcatcccggctgttggccaagctgcgcaaagacatccggcccgagttccgcgaggactttgtgctaaccatcacgggcaagaagcccccctgctgcgtgctttccaaccccgaccagaagggcaagatccggcggattgactgcctgcgccaggctgacaaggtgtggcggctggacctggtcatggtgattttgtttaaagggatccctttggaaagtactgatggggagcggctctacaagtcgccccagtgctcgaaccccggcctgtgtgtccagccacatcacattggagtcacaatcaaagaactggacctttatctggcttactttgtccacactccgggtaggttgctctcatcaaccccctccctaattttatttcagttgctggtatttgttcagtttattgttctcctgtttctgaacagcactgc

SEQ ID NO: 33888 - DNA, 1189 bp, Mus musculus
gtagactatggactgctttttgttcttgaaccaactggtatccacggtttgcttttttcatttgattcttaatatggatatcttgccgtatagcccaggctggccttgagcttacagtggtcatcttggggctacaggggtgaaccaccatgctctatcttggtagttttgcttttgtggttgtttgatggagacaggatgtcatgcatcccaggctagctctgtattgaagataggatccccttgtctccactcttaagagcttggaccatgggtgtgaaccaccgcctagaggtactggcttttctttctgtggccctggctttgcacacacctcctattcctaacataaaaaacgagacagacacaagttgggttacttttggcaccccactggggtcctgggagatttcctggggtgggcctgactgagttcagagccatggttcttttgggttaatacattccccaaaggagcttgggttctaggcctagacatgagtgtcttatgcactttccagggctgccagatggagggtgtcggggcagaggtcaaggactagtcagagtggggttgggggaatttaagtttctgctctgcacctcctggtcttcggttttcctggtctgtaaagcacatgcatatcttttagccctgtaatgcagctcactgccatgatgagtacatgatgtgtgcttgagaagtgtccctgttatagtggttgtcatcatctggaccctccttgaatagagaaggttgatcatgaaagcaagaagagttggagccctttgccactgtggcaatcctcatgtacgtcctggaggaggaagcaagaacttgggaggacaaggctcagctctttttctcttattggggtcctgtagcctccactaagcggagggtgacagatttcacagtagggtaaggtgactggcgtgaaatgaggagatggcctttccagtctaatgggaactaggtgtctcttggtaaagagtatgtaagcacccctggatctggatggagttggacaaagcatggagacttggttcatcatgagatgtctccactgctccaagccacttacaacgctgcactgattgcgatggggatccacaggacactgtgtgagcacttgacagtgtgggcaagatcctgaggtgactctgggtccatgtgttttgactgcat

SEQ ID NO: 33889 - DNA, 1752 bp, Mus musculus
cagatttgccttggtctgccctcactgtctgctttcctatacagggagcagcgtatcgcagagtgcatggccaagatgccacaaatgattgaaaactggcgaaagcagaagcgagaacgctgggagaaaattcaggctgacaaggagcggagggcccggttacaggctgaggcccaggaacgcctgggctaccacgtggacccaaggagtgctcgcttccaggaactattacaggacctagacaagcagcaacgaaagcgcctaaaggaagaaagacaacgacagaagaaggaggcacgaattgctgctatggcctctgctgaagcccaggactcagcagtgtctggtgaacccagctcctgaaagctcccttcccaataaagccagctgctgacaacccatattctacacattctccctcaagttgtgacttcctgggtcgcccggctcattccccaacacctgggcgggagaatccctccacctggctgtgttcacacctggacactaggccatgccatgaactggggctttggggagagagaaaggggaatggatgggcaaataatgaaggagcagatggcaggagaggaggaggcttctgtttaccaacattaatctccagtaattagccaattaccagggggagtacagccaaacagactgcatgatagaaggagcagcagtccttctagggttgagctgaggcaggggcccaagtttccagagggaggagatgctggggcccgtctgtaaggctcctaggctcctccccgtttctcagcatgcccacttcacctgtgcccccggctagctcagactcacaaacagctgtgagaagctccagtaggcatgaaccattattagggctcatttttaaaactttattcacgtcaaaacctttatcagagatgtggttctgtcctggggaaggggtggccttggccttcagaactgatgataaccccttttccaggctggaggccaaggccagactggggagaaggcctttggcttctaacatagacttactccagatggaaagatctgggccactccaatagaggatcaaagcttagggctccagcttcccctcatcatggtggaggaaggagggttgtccttggggatgcttcagggatggggaagcaggcaggcgcccctccatctggctgcagggagctgggacagaggccaagaggggcccatctgtcgcctcatggtcttgccaacaacttttgagtaggctgggctgttaagaggacggggacagctgtctggcccaggtcttctcggactgatatgggaatgggggccacttcaggagggtgggaagctgggctgggtttttttttgttgttgtttttttaatggtttttgatattcttcctcttaaacatgaatatatatatgttatatatatatatatatactttctcttataaacgtctgtggagtggggagggagggaaggggggaggccctggcctcccagaatcactcatcatcaaagttctgactcaggaggaagttggcagccaaattctcatttttttcacacgcgaagtaggcctggatcaccaggctctctgggaagcccagtgccttcagctgtgggaagatgggcaatggtaagaagggggaggtactgggctacccaccatgaatggctcttcagccaggcctcttaccctttctatagcctccttctcctgcggtgtcacctggatatagttcatctgtggggcctcc

SEQ ID NO: 33890 - DNA, 1145 bp, Mus musculus
gtcagaactttgatgatgagtgattctgggaggccagggcctccccccttccctccctccccactccacagacgtttataagagaaagtatatatatatatatataacatatatatattcatgtttaagaggaagaatatcaaaaaccattaaaaaaacaacaacaaaaaaaaacccagcccagcttcccaccctcctgaagtggcccccattcccatatcagtccgagaagacctgggccagacagctgtccccgtcctcttaacagcccagcctactcaaaagttgttggcaagaccatgaggcgacagatgggcccctcttggcctctgtcccagctccctgcagccagatggaggggcgcctgcctgcttccccatccctgaagcatccccaaggacaaccctccttcctccaccatgatgaggggaagctggagccctaagctttgatcctctattggagtggcccagatctttccatctggagtaagtctatgttagaagccaaaggccttctccccagtctggccttggcctccagcctggaaaaggggttatcatcagttctgaaggccaaggccaccccttccccaggacagaaccacatctctgataaaggttttgacgtgaataaagttttaaaaatgagccctaataatggttcatgcctactggagcttctcacagctgtttgtgagtctgagctagccgggggcacaggtgaagtgggcatgctgagaaacggggaggagcctaggagccttacagacgggccccagcatctcctccctctggaaacttgggcccctgcctcagctcaaccctagaaggactgctgctccttctatcatgcagtctgtttggctgtactccccctggtaattggctaattactggagattaatgttggtaaacagaagcctcctcctctcctgccatctgctccttcattatttgcccatccattcccctttctctctccccaaagccccagttcatggcatggcctagtgtccaggtgtgaacacagccaggtggagggattctcccgcccaggtgttggggaatgagccgggcgacccaggaagtcacaacttgagggagaatgtgtagaatatgggttgtcagcagctggctttattg

SEQ ID NO: 33891 - DNA, 1745 bp, Mus musculus
cccccagccaggcaggctggtcttggtgtatgtatgtatggtatgtactgactggcctaaaattctttacttctgcctaccttctcagtgcatcaacttacatacttgcctgtcccacccacttttcttttggacatgatctcactataatcctgttggcttggacctccacaagtagtctgtcttctcagagctgggatctaaggcatgtcctaccacaccctgctgccccacacattttggtggattcaaagactaggaaaggtgggaatagaggcctgtccagagccaggactgccagaagtcactgctgaccacctgtctttccgttctttcccaggtcaagtccgggacaatctttgacaatttcctcatcaccaatgatgaggcctatgcagaggagtttggcaatgagacgtggggtgttaccaaggtgggtcagagctctttgtttactctaggggtcatctgggaggactggcagacagatttgagccaggtattaaaagatatggttggttggtcctcacaggctgcagagaagcagatgaaggacaagcaggatgaggagcagaggcttaaggaagaagaagaggacaagaagcgtaaagaggaagaagaagctgaggataaagaggatgatgatgacagagatgaagatgaggacgaagaagatgagaaggaggaagatgaggaagaatcccctggccaagccaaggatgagctgtagaggccacaccacctgccttcagggctggactgaggcctgaacaccctgccgcagagctggctgctcccaataatgtctctatgagactcaagaacttttcattttttccaggcaggttcagatctggggtagattctgattttgttcccctgcctcccccattacccccccccctttttttttttactggtgtttgtctttaattctccttcagccctcatctggtttctcatttttgaatcaacatcttttccttctgtccctccctttctccatcttttggtcactaccctccaactctaggaacaggggtgtagaggagaagccctaggcttgagatttcatctgctctccttcctgcatctcagaggagggcaggagaagggggtggtgttttccctccccccgcactgaggaagaatggggctcttctcatcccctttctcccttgcccccaggactgggccacttgtggggcagccagttctagcacagctcacactgagagtgtaagaactacaaacaaaatttctattaaattaagttttgtgtcttccctattgtgtctccttctctgggaggatgtacatcaggagctaaaagcagcctttctcaggtgcgggtgacgtatgtttcagctactggagtttgcagagtctcagaaatgtcatttatatgtatcccatagtctctaaatgggagagtagccatcaggtcttgatcctaaactcatagacgtgtaagttttgattctagcacagacctcattgacagactgactagaatttagtgaattcaaatattagccatcttggttaaaagtgggatggatctgttggactgacacctaggaaagctgagcaaagttcacagtagtggggtgcatgctggtagataatagtcaaagggactgactgagctcagggacagtgatctactttccccaagggcccatggttctaggactgagctgataaagatagattccaggattgggttatgtagttcagttgga

SEQ ID NO: 33892 - DNA, 1097 bp, Mus musculus
atagaattcagtggtttcagagaacacaagctcagttcccagcactcacacagtgtcctgtgactcccgtgcccacttcagacctctgcaggctcctgtgtatgcatggtatatagtcacaaatagatgaggttaggtctccctttctcaaaggatagagcctgccatcagcctgcatatgcttcctacataggtccggacatctgcggtcctggcaccaagaaggttcatgtcatctttaactacaagggcaagaatgtgctgatcaacaaggatatccggtgtaaggtgtgcctggggtagtcatttaaatggctgtcatgggaggtcccggcagcctggtgggagggactgctcacctccttccctcttcaggatgatgaattcacacacctatacacactgattgtgcggccagacaacacctatgaggtgaaaattgacaacagccaggtggagtcaggctccttggaggatgattgggactttctgccacccaagaagataaaggaccctgatgctgccaagccggaagactgggatgaacgagccaagatcgatgaccccacagattccaagcctgaggttagtgttgggagggtagctccacctctgtcatagaatggaggacatctgggtccactttgacctccacgtgtactcctaggactgggacaagccagagcacatccctgaccctgatgctaagaagcctgaggactgggatgaagagatggatggagagtgggaaccaccagtgattcaaaatcctgaatacaaggtaggcttgggtgtttgggtgtggctccctggtgggatgtttccttgggtgctatgattaatgttgcactgcagaaacaaaccaagataggccttggggtcctagtcggggttgttggctgtactgtgggatgtgtctgcctctctattcatctggttttcttctacagggcgagtggaaaccacgtcaaattgacaacccagattacaagggtacctggatacacccagaaattgacaaccctgaatactcccccgatgcaaatatctatgcctatgatagttttgctgtactgggcctagatctctggcaggtg

SEQ ID NO: 33893 - DNA, 2002 bp, Mus musculus
ataggaaacgctcgccatcggtgggcgttccctaggtgcaggacagacggaacgtgaaagttgcaaataatccttacttcttccctctgaccagagaggatgggaaagggccgaagctaaggacccgtctcggtcccgcaccgcacggttaacacctggtaccgctcgcgcggattctttaaacgactcctagcgagccagagactctcagcagcaagggcggggttgggctgaggttcagtcacgtgaccgtgcctgagtgggctagcggcccccaccccaccagggggcgtcccccacaacgcgtggtcgaccctcattggcccatagtgcgaccaatagaaatcagccatctgggatcccagcgttccgagccacagcctaacttgctgagccaactgggaagcaatggaaagggacagctgtaggtctaaaccagtcaaaaggaccgaggggcgggctcagcggctgtgtcaggttcgggtgagaggtaggtgaatataaattgaagcggcggtggccgcgtccgtcaataccgcagagccgctgcctgaagatcgtcttaaaaggcctgtgtgccgccgccccctcggcccgccatgctcctttcggtgccgctcctgcttggcctcctcggcctggccgccgcagaccctgccatctatttcaaagagcagttcttggacggaggtaaggtctgggcccgtctcgaggccgcttagcgactgctgggccccgagacctcggctgcctcgtcgtgtgtaatgtaattaccgttcagagggccaacactgtggccccagagggactagggccgcgggcggttccatgtgtgcgtccttgtgggactaggaaggctcagccgtttcccgcccccagagttaggattcgtccaaggacctgaagcccatcgagatgtcaagtttgaggttgggatgggaatccccttccccacccccacctgcttgtagctcctgacagacgttggttatgggggcgggggtcggacggccccgctaatctgactctatgcccttccctttcagatgcctggaccaaccgctgggtcgaatccaaacataagtccgattttggcaaatttgtcctcagttctggcaaattttacggggacctggagaaggataaaggtacaagggagtgggtgcaggacaacttcctggaggaagctgtagtcagcacatacatcttgttggggcttttcccaggaacacgggagccaaggacaggtggaggaaggaagggaggtcagccgtgcccctctaggtctagggtattccgggttcacctgatgacagtcccatttcatcacagggctgcagacaagccaagatgcccgattttacgcactgtccgccaaattcgaacccttcagcaataagggccagacactggtggtacagttcacggtgaagcatgagcagaatatcgactgtgggggcggctacgtgaagctgtttccgagtggtttggaccagaaggacatgcatggagactcagaatataacatcatgtttggtgaggggcccccagccagtgctgacctctgccggttggacagtgggtgcagactgaaaccctttgtaaccagaatgctgatcttcataccatggaaagcacttgaatgatgaaaatttttgtcctgaaggacaactttattagttggtgtacaatattacttgaagacttatattgttcatttgtatgatattttctacgtgttaataattttagaaatgatgctaatgacagggtctaaaaatcagtgaaaaatctgagcatgtgcatatttcttctgtactcaagtatgaaagggtgtgctagtgtgaaggtcagagggcaactttggaaatctcttttgtcatctgggttctaggatcaaatttggattgtcaggcttagtggcaagtacctaatttaccactgagccatttgctggccccagaatggtaatcgtttcagatttgtagtcttttatgccttt

SEQ ID NO: 33894 - DNA, 1197 bp, Mus musculus
ctggcctcgaactcagaaatctgcctgcctctgcctcccaagtgctgggatcaaaggcacgcaccaccactgcccggctgagaattcttgaaggatggcagtgatctgagcctgctagtggtggctggatgaaaattattgggggaaaccaatagaatttcagtcaagccttagagtgattgtctgtaatcctagcacttgggagaagtaggcaggagatgaggaggtcaagtctagcctctgctaaagaagacctgtttcaagatataaaacaaaaatcccaaaagaaaactacttttgcccttcaagtcatcaaattgacttcactagttaactaaaagccactggggtcaaactacatgcagcatcctgaatcccttaagtacatttgaggctcatttgccacacttaagatggcgacgaccagcttccaagtcgccctttgcgccacactaaaaatggcaacgcacgcgctatcgcgacttccggttccagttccggtcccctagtcaggtccggcggcctgcacacgccaagcacgctgggagtagccatggcggataatcccgttttggagctgttgctgcggcggctggaggtagctgatggcggtctggacagcgcggagttggctacgcagctgggtgtggagcaccaggcggtggtgggcgcagtgaagagccttcaagctctgggtgaggtgagtccaggcgtgccgcggctcggcctcgctttcataccggcagccccattatttctggtgaagggacattacgtgctggtgcaccgtggggtgcgctggtgggaagtctggaacagttttcgtttctcaagtgactaatgtctgttaaggcgaaaacatggcacatgtaggggtgtgacaagacgagtcgcttcccggaaaggggttgcaatctaatggggaaacacaaatgaccagagtgatatgaaggctcagagaactagctgtgacagttgacttagcgttgcgggacagagagccgggatcaggtacagatggaaactgactcgaggccaatggaggaaaacgatggcatccaagacatcagtggcagggcattggtgtgggattataggccgcagagaccatcagggcagaattaaatggttctgtaaggttcctgttttccccttttatctccatgttagggccttctgctgctagtcaaaagctac

SEQ ID NO: 33895 - DNA, 1217 bp, Mus musculus
actggaaggacccactcatactggaggagcagctgactgccgatgagaaactgatcagggacaccttccgtaactactgccaggagcggcttatgtctcgaattctgctggctaatcgaaatgaaggtgccttggtggaagggtgggcatgctgggtttcacaaccatacatgatttgcatgtgctgcagtccctggagtcagggactccatgagactgagacagggtctgattctgacacccatctctgcagtttttcacagggacattgtgtatgagatgggggagctgggcgtgttgggacccaccattaaaggtaaggacatttctgtgtatactatgcagcctatacccacctacaacatcttgaaggaccatcccttttcctcagtcacgcatttcatctgtaaaatgggcaatggttatctctcctgaaaacagctgtgggtttgagaggaacaaagtcctaaccagggcagccccctgcccacttccagaagggccatattacagccctactcagtcccagggctgatctttggcctttggtctacccgttcttcttttgcaccagggtatggctgtgctggtgtgtcgtcggtggcctatgggctcctgacccgagagcttgagagggtggacagtggctacaggtcgatgatgagtgttcagtcctcccttgtcatgcaccccatctatacctatgggagcgaggaacagcgacagaaatatctgcccggactgggtaagcagctgttgccaagaggaggaaagtcagatgtcggtctggaatgcaggtcccgcctggtgtccctccacagcctgccttctttcctacagaccacctgtgtccatgtcaggtcctaggactcagttgtcttccttgatctcctgccagcactgtcggttcctctctccccccaaccctttgattttacctctggtcaccatcatctccccttggatttgttttctaggcctctcacccctgtccaaagtttaaagtcttaactgctaaccagatccacgaggctcatgagcggacctttcctctacttctttggctactcagattttatttgtagatatggtctcactgtgtagccctgtttggctgggagctttgtagaccagtagcatcaaactcaaaggtctacatgcctcggtctcccgaggagggacagcttggattaaaggcatatactatcatgcctatc

SEQ ID NO: 33896 - DNA, 1164 bp, Mus musculus
ccgggaaaaatcacctcctacttcagccagggcccgcagacctgccgccctcaggccccccacagatacttccaggagcgaggcctggaggcagccagcagcctctaggagcccacgtgtgcaccacctgcccttctaacccaggaataaaagctgttcaagaagtggaccgagtgctttgtggctaaggtctggtagcagtgcctgtggccagcagctgattcatcaaacaaaataggcatttctagattggtgacgtttgctttttttttaaagaatgatttatgtatgtaagtacactgtagctgtcttcagacacggcagaagagggcatcagatcccattatagatggttgtgagccaccatgtggtatcactggatagctcaatgctggaactgtgtagaccaggttggtcttgggcacattgtggcactcacctgcctctgcctcccaagtgctgaggttaaagacatgcactatcatagcctttttattttttttaattgtaaaactatttttgtctttgtgtgggtatacacacatgtgagtatgcacgtgtaaatgcaagggcccttggaggtcgtaggcttcagatttctctggagctggacttagagaaattacggcctgctctgttggtgctgatctgaactatgtgcttttgaccactggctttctccatcccgcatatttttctttggtgctccctctttgctttgtcttgttttgagacagggttcctaagtagtcttgactgtcctggaacttgctacgtagaccagacaggcctgagacacagctgcagacttggaattaaaggagttgtatgtatatttgtgcaacacatccatgcagttctcaaagaagccagaagagggcaccagatcccctgcaactggagttggaggtgtttttgagccaccttgtgggtcttgagaatcaggtcctctgcaagaacagtcattgttgctgtcaaccagggagccatctttccagtcctctgcctcctctcctcttccttctgtgtgtgtgtgtgtgtgtgtgtgtgtgtgtgtgtgtgtgtgtgtttgcgtgcatgcgctgttgtggtattgcatacctttaatcccagcatttggaggacaggtaggtagatctctgagttagaggccattctggtcta

SEQ ID NO: 33897 - DNA, 1173 bp, Mus musculus
ccaggctccagcagcaacggggcggagcttgcaaagtgaccctgcccaccctccattacaaaccacgcccttggagatagtcctcaaagactacaattcccaggagagaagagcagaccagcggcgacagcagcgcgtgcgtaaacgaccacgccggagggcgcatcgagggcggatcctgcgagccgattggtcagcatcaagagccactgcagttttcgcggaaaacgcgcgctgggacctgcgcttgcagtgttgttttctacaattgttggctgtcgcagaggcagcatggatctcagcgagctggagagggacaatacgggtcgttgtcgtctgagttctcctgtacctgctgtgtgtctcaaggagccgtgcgttctgggcgtggatgaagcgggccgaggccctgtgcttggtgcgcttccagggccgcgggctgggaggcgcgtgggtgaaaggggtgcagttttcagggaaaccggagtgaggatcatgctgggccttgggatccggaagcgatagtgggatggccttgggccgtggtgatgatggcgcaaggtggcttttacgtactgtactctctggtgggaaccctgctctcagaactcttgacttgtcctcttcctaccaaggtcccatggtctacgccatctgttactgccccctgtctcgcttggcagatctggaggccctgaaagtggcaggtgagcctgtgcagaatgtctgcactctgggttcctgggtatgtgcaggggggcaggagagatacagaggggaaagcggaatcgggaaacaaccacttgtccccttttcttttaactttcttcccagactctaagaccttgacagagaacgagcgggagaggctctttgcgaaaatggaggaggatggagactttgtgggttgggctttggacgtcctgtctccaaacctgatctctaccagcatgcttgggcggtgaggcgtcccttcatgagtggggggaagagcaaccaacacaggcaggctgcgtcctgcctttgcaatggtgtggactaaactctgtcctttaccagagtcaagtacaacctcaactccctgtcacacgatacagctgcggggctgatacagtacgcactggaccagaatgtgaatgtcactcaggtgagctgttgggttacagccctttg

SEQ ID NO: 33898 - DNA, 1199 bp, Mus musculus
cagacgagaaatcacactcagagaaaaagtgcccagttccttgagacccagcctgcactgagctgggcagggatctgaagtcagccagagagggtctgtttgtagggccttggccaagtgaggccttcgggggttggggtggggaggacaccttttcatagcgtaactcccgtccacctgctagtttacccttttgtcgctgcagcgtcagcagctcccaggtatcaccttcaccgtgcgggccaaagtattggtagtctgggtcgatctgagtaggggacaccagacctaggagcactaggggagtcagcaacggagccaagtggctccgggccatgcccggattccaaccgaccccaacgcgccccgtggccgaggctcgcgaggagcccacagcacagacaatcttggcgtccgaaagggcacaccccacccaacccttgtgaaagcgtgtggaccgggccacgcggcgccttcccctcacccccccggcagccgcaatggatccgaccgcggcgctgtcccgcccacctccccgcgcactgcctggtgtggtttgggccacgcataaaaggttctccggcctagggctctctcggttttgagatctctttcctgtctctacccgtgtctggacgtccgtgtgtccggctcttgctcacgcaggtatgaaaacccagaatgcacacgaatgggaggagccccactagtgtggtgcaggcctcatcacgacctctatgcttggaggtctttgttttccatgttcaatggtggccgctttgtccttgcccgggaaaccaaggcccgagccctggcttgcaggctggatcaccgagctcggcagtccatcgctcttagcttagccgtcctattctggaactaggagctcacttccccctccacccgcactcggtctgactccataatttgggtagcagcggtgacccatcattcgttccctgtttaggggggcgggtattcagaggccttgcagactttatactgggagggtgaatatgagcgctccttccacctctctcggttttactatctagacttagcaccaaaagtgaccttggaaaggcaagacaaaggatcttctaaggctctaaagaccaagcttgtgtgggtctctgatttcagtcatggcctccggcaacgcgcaaatcggaaagtcggctcctgacttcacggccaca

SEQ ID NO: 33899 - DNA, 1099 bp, Mus musculus
gagacgctagtgcgacttcagctggagaacaagagactgtgccagcaggaggccgcggaccgggagcgacaggaggaactgcagcgccacctggaggaggccaaccgtgcacgccatgggctggaagcacagcaacggtaagagcctgccttcttgtttgaaagcgcaaccaagcgcaagcactgagcactgttccctgccaggctgaaccagcagcagctgtcggagctgagggcgcaggtggaagagctacagaaggccttgcaggagcaggggggcaagaccgaggacgtgagtgcctgcctcctccctgcttggccctcccttgtgctccccagtaatccccctttctccctccccccttgctgcccgatgcctgaagaaggccactgtgagtaccacgggtccagggaggcgcaccactgttacctgcacagcttctcagaccttgtccccgtcccctcactccccgctgcttctcttccccagcccaccctgctgaagaggaagctggaggatcatctgtaagtgcagagaaccttcactcctggggtgggaactcttgggacaaaggtgtggagaattgtgggtgaagagacccagtcagctcaggtcaagtagagtctttattttgagactggaagttgtgtacctgaaactggtcttgaattcctgatcctcccatctcccaagtgctaagatagaaggtgtgtactaacatgtcttgctctcaagggtgatcctgtgcttgtttttgaagtgtactgattttatgtgtgtgagtgttttgcctgcatgtctgtgtaccacatgatctcatggagttccgaggaaggccgtaagctgctgggcggtggtggcacacgcctttaaaatcccagcacttgggaggcagaggcaggcggatttctgagttcgaggcgagcctggtctacagagtgagttccaggacagccagggctacacagagaaaccctgtctcgaaaaaatcaaaaaaaaaaaaaaaaagaatagttgtgagccaccatgtgggttatacttggggtcctccactagaacagcaaacggatcttaactccctcctttgtattattattaa

SEQ ID NO: 33900 - DNA, 1127 bp, Mus musculus
tattataatgaaggttgctctcctgtgctccacaccccccccaattcctaggtcattcagaccctggaacccaagcagaggccacccactgtggtgtccccagaattccataccttgaggtcacagctctgggagcggaacctgcggatacggcagatggaggtgggtatcctcatcctatcatgccatgtggccctcagccccacccagcccctgactcttgtctcctggcagatggactatgagaagagtcggagacggcaggaacaggaggaaaagctgcttatcagtgcctggtacagcatggtgagtgggttcctccccagggaggtcatgtgggtcatagatgtcataccaggttcacatggctcaggtaggctcacttaccctgctaattataccatttctctagggcatggccttggagcatcgggctggggaagagcacgctcctgcccatgcccagtccttcttggcacagcaaagactggccaccaatgctcgccgtggacccctggggcgccaggctctgagcctccgccccactgacaagcactgacaagacctcgacttcctgctgcctgctggagtcttccagtttacatttacccagctgggcctttgaccttgattgagcctgacttctgccctttgcttccttagatgggagagaaggggacaggcaggtagcaggtgtggaactattccttttagcaatgtgattcttcttgattcttctcctgggcctcgtgtactacctgggaagagcctgattttatatttgaaaagaataaagactttaaatctgtcatgaatgtactctagacacaatgacgaagaataaaaactgcactggggacacagaccattgcttttaaaataaagtttttacatgtatgagcgtttttgcctatctgtatgttgtgtgcaatcgatgtgcttggtgcctgcagaggccaaaagagggcatcagatttgtaactagagttacaaatggttgtgagctaccatgtgggtgctgggagttgaacccgggtctccaggaagaagagccagtgctcttaaccactgagccatctcttcaagccttaacttgcattcttgtggggattttgtttgcttgtttt

SEQ ID NO: 33901 - DNA, 1204 bp, Mus musculus
taatgtctgccaagcatctactaagtgcctcacaccaatttgtaataaaacacatgactgctcacaaagcacaacggctcttgaagggaaggtgtgaagatgggagacctgagaggtcaggaggtcagataatgtgtccatgtttgcccacaaaatggaagagctacattacacagacctaccccatgagttggccccagggcccacacctttagtggagatacttcagtattcagtaagcccctgaccccgaggctctgatgggcccagcaaggtggcaaatctattccctcatctccacagatgtgcaacatgctgggcctgggggacatgaatgctgaccaactggcctccaagctagaagagacgttgcctgtcatccgatctgttagcgaacagttcaaggaccctgtgagttatgatccagttcagcaggtagtgagaggctcctgaggacgggatcagccagatcccttcctctctcctgtcttgtgccctacaggaacagacaacgttcatctgtgtgtgcatcgccgaattcttgtccttgtacgagacggagcggctgatccaggagctggctaagtgcaagatcgacacccacaacatcatcgtcaaccagcttgtcttccctgaccctgagaaaccctgcaagatgtgtgaggcccgacacaagatccaggccaagtacctggaccaggtatgcccacctgcccagccaagagtcccctgtcttttactgtgttctctggggactggggctgcagctcagtagagaatgcttgcctagtgtgtgtgcatgcacgcgagtcctgagccttctgtattcagaggactggagctcaactgggaagcctgacacccaggccatccctggatttactggccccacttaccttacccttagcttctgccctaacctcccagccctcagtctctgctttctgctctctaacctgattacagatggaagacctatatgaagactttcacattgtaaagctgccactgttacctcacgaggttcggggagccgacaaagtcaacaccttctctgccctcctcctggagccctacaagccccccagcacccagtagccacccccatccctgctgctgccttcataccctcctctttccccatggggcagagtttgcacaaagtcccccataatgcagggggccacttaggaggtgggagggg

SEQ ID NO: 33902 - DNA, 1190 bp, Mus musculus
atgtcaaacctggagatgcttccattctaataggaggtatcaagttagatatgctttgtagacctagttaggggccacacaagttcccaagggacaattgaaaacacaggctccaaacaagatccgttcagttacagagttctggtggctgcctgggattgttctcttagcccttacagggggcctgggtcccaaacgatggtcccattctcggggagcttctggctgcttagctaactcgtatctagcaggattagggaaccgaggaccagaaggaaagggaccggcttctgggctccatcgcctggtggccaggtcagaaccctttggccccacctaagctccgcccactctgcgttggcttctgggttccgacctctcttcccagcatgcattgctccagacgaagccagtcccgcgccaagcgcgcggtctgagagcctttcccgacgtcctttgcacggcatctggccacaaaatggctgcccgagggagacgggcggagcctccgggtcgggaggcgcccggcccggcgggcagcggcaggagccgatgggctgagtcgggaccgggaacgtcacccgagagtggggacgacgaggtgtcgggctcgagtccggtgtccagcggtgtgaacttgtttgccaacgatggcagcttcctggagctgttcaagcggaagatggaggaggagcagcggcagcggcaggaggagccacccccgggcccgcagcgacccgatccaccggcctccgccgcggcgggcccagggaatccgaagaggaagggcggcccaggccccacgctcagcttcgtaaggagccgcgggggtgggggcgggcgccggggcccgcgttggctgggggagtcgggcccgggaaggggcgtcatggtccaaggcagtcctccgcccggctgcctggacggtcccggtcgcttgctgagaatctcgagcctggattccggaccagaggtgtttctgggcgggaatgggaatccttagatctcattcgtgggacctgagaaccgggaaattgcattggaagcagcgctctggggttagggggccctagatgctaggattcccgtttgatttgtacccagactttgaatagtgaggcccacatataatgtgggggaaaaagaggagacacatttaaatcccgagtctgctgtaatcgttagactcg

SEQ ID NO: 33903 - DNA, 1187 bp, Mus musculus
gcttgttgggcatctgtcttccaaccattccttccctcctccgaccccacaggtattaacaagtaaaggtgacgcatgggccaagtacatggcagaagtgaaaaagtacaaagcccaccagtgcggggatgatgataaaactcggcccctggtgaaatgactccctcccgggtgctcactacctgggactctctgcgatgtacataatatttaatgcggttccggcagcagccttctctggaggactgatacacagaaggaaacgaaggcgcttgctgtggccgcagaccgttctccaggactctttttttaccttgagcacttgcctcctcagacttttagaccagtggtttactgtgccctttcttcccatcaccttgctctctctggctctgtctcttcttgctgtctctctccttttagcagtcacttctgagaagtaaagaacctgacttagtgctggagtttgtgcttggtttatcttctttgcgatctccaagctaagcctttccccactggtgcataccacatctgcccgagctggggtggacccattgtggaaagggaaggggaaggttctgtaggcaggggcacatgctgcctgtctcaagacatccttagtaactgtgactattgaagtctggtcttgtttttagttttgttttgagacagggacttatgtacagagttctctcctgcctcagcagcatgccttccaagtctcctcacagcatcagtttagctgtgactcaggttagtctgggttgagtgtgtttgcctagagcacgtggcgctcgctggtcaatctctagcacttcaccttttttgcagtacactaatcttagcttttggccattatggagctgttatttattccccagattctgaacaactacttactatatgtcaaagatgtcctggtttctagggaccggagcactgaacagcctacattttccctgtcctcctagacaagtgggaaatcagagaggatgggtaaccttttcagtggtgactactaacaaggataggatagaggcatttgttcagggaggaggggatgtctgtttttaggccacattttatatttttggttgtgagcctaacccttaatggctgagctagccttctagcttgtaatgtcacttttcttttctttcttttttttttttttttctttttttctt

SEQ ID NO: 33904 - DNA, 1104 bp, Mus musculus
ctaatggagtcaactgttgctgccttggaagccagtaccagttggatcttaagcacacatagacacacaagtaggtcacaactagagcagcttggcctctattttagagtgtgtcagtaagcagggcaagctgaaatccaggcccctcccttcacagagactaaccaggtataacccaggaatagtgaaaggaactatacacgggagggtgagtcagctatggcttctgcctcctgtgcctgttagttgaatagtccccttaagtcgcttagcctttttaaaaagtaaggtttttcatttatctctatctgctatatgtgtgcagatgctgtgtgtgtatgagtgtgagttgattccctggagctagttgtcaagccactggacaagagctgggaactgaactctggtcttatggaagaacattaagtactctcaaccactgagccatctctctgatccatttctcaactgttttttatggtttaggtcttttgtctacttatttttgggcttttgagatggattttctctgtgtagccctggctgttctagaacttactatgtagataggttggccttcaatttacagagatcatcagcctctgcctctcaaaagctgagattaatggtgtatgtcagcacactgggcttacttttagccatttttaatgctagggaagcatcgtctaaattcaaggtgagccagggcttacactgtagctcagtgatgcagggtctttgcctggcattggagatgttccccatatgatcttcagtactgcaaaaaacaagacgtttgactgtaaccctgtgagtaaaactgctttcattggtttcctgagagtagttagcgtttgtttacaactatgttctacagttctggagatggagcctattttctagtgtgtgctggcaagtacactaaccttgacctacattttggaggccttgtttaaaaattagactggagctggagaggcagctcactggttttcgagtacttgctgttcttgtagaggacctgggtttggttcccctggagctgttaataggtaggtttcttgttgcctgatatagaagtctgatagattaggtcttttgcaa

SEQ ID NO: 33905 - DNA, 1192 bp, Mus musculus
aaagtacttgaaagacaatttactctcctgagggcttgccttgtggctacccacatcttgagcttatgcatcttcacttcatacccctctccacttgtaaaagcagtgatttggggcggattcctataacctggaacagttgtctcgtagtgaggctatgtgcagaataggcaaggacgacttgaagagggcctgtcactctacaatggagtgcgtacttggcattcatgaggcctgggttttgtccccagcaccccaaagagaggctcagggtgccatgcagaacatgcatgggagaggaaagaaagctggtgagccagtcccttggtggggatggttgagggaccagtagacccttgctcagcctgactggcctcctctccctggctgccccaggcattctcatcaccaccatcgcttccaagggtgagctgcagatgtggccagagctgctgcctcagctgtgcaacctgctcaactcagaggattataatacctgtgaggtaggtgatgggcagtacctggcctgacccaagcagggactacagcttagagtcggctcacagccatccatctctctgcttagggagcctttggagccctacagaagatctgtgaagactcctcggagcttttggatagtgatgctctcaacaggcccctcaacatcatgatccctaaattcctgcagtttttcaagcactgcagccctaagatccggtacgtgatgttcctcagagcagaatggtcttagagttggtaggcagacgcaggagttcatatgtgagccttgccttcactgcctactaggtcccacgccatcgcctgtgtgaaccagttcatcatggaccgggcccaagcgctgatggacaacattgacactttcattgaggtgggtcaccaggctccaggtggatagggtgaggctaaggggtcctcaggcagctgacctttcccttttacacagcacctgtttgccttggctgtggatgatgaccctgaggtgagaaagaacgtgtgccgggcccttgtgatgcttttggaagtgcgaattgacaggctcatccctcacatgcacagcatcatccaggtgcgaatgctcaataccaagggctagtgggtggcttgggatggggaatcccccgcagttgagctaggtctcagcctctctctgttgcccagtacatgctgc

SEQ ID NO: 33906 - DNA, 1206 bp, Mus musculus
ttttaaatcagtattttgcttgcatgtatgtatgcctgtaccacatgtgtgcaatgcccacagaggccaaaggaaggtattgtgttccttggggctggagttagagcaagtcatgatcgtgactgctgagctatctctccagcctcaagaaggtgtatgatttctaggccagtcatggcttcacagaccgtttcaaaagagggagaaaactgtgtctcctactcatggctgaaaatatgttgctcattccctgaagggaagtgaacagaaacaggacagaggaatatgggtgtgttgagcatagtctgccacttgctccgtactcctattcacacctctgctttcttttcaagatgggtacctagccagagtccctgcatccttacaaccagtctctttcccaataggttgatccctatcctcgtgaatgggatgaagtactctgaaattgacatcatccttcttaaggtcagccaaggggcatccacagctgactgtgggtggccaagaccattgggtattgggttggaggtctccagccagtgctgagagaaatatgcctgggctggtccctagggggatgtggaggaggacgaggcggtacctgacagtgagcaggacatcaagccccggttccacaagtcacgcacagtgacattgactcacgaggctgagcggcctgatagctctgaggatgctgaggacgacgatgatgacgacgctttgtcggactggaatctgagtaggtagtaggctggctcctgggggagggggagaagcgggtggggagcactttatgaagaactggtctcagggctgaatacctgccccacagtcctccctaagcttagcctccttgtccccttcagggaagtgctctgcagctgcgctggatgtccttgccaatgtcttccgggaggaactgttgccccacctacttcccctgctcaagggcctcctattccaccctgagtgggtggtcaaagagtcagggatcctggtgctgggcgccatcgctgagggtgagtctctccatttcgttggcactgcctgacctgacctgatctgacctgagcaatgcagatggaggcagccccatagcacaggcaattaaatcttacttacttattctttttttgagacaaggtttctctgtccagctttggctgtcctggaacttgctctgtagattaagctggccttgaa

SEQ ID NO: 33907 - DNA, 1308 bp, Mus musculus
tctttctttctctcccccccttcgccccccctcttttcgagacagggtttctctgtgtagccctgactgtcctggaactcactttgtagaccaggctggtcttgaactcagaaatccgcctgcctctgcctcccgagtgctgggactaaaggcgtgtgccaccacgctcagccttctcttaaaagccctcctgtctcctggtaattgcaggctgcatgcagggaatggtgccctatctacctgagctgatcccacacctcatccagtgcctgtcagataagaaggctctagtacgctccattgcctgctggacgctgagccgctatgcccactgggtagtcagccagccacctgacatgcacctcaagcctctgatgacggagctgctcaagcgtatcttggatggcaataagcgggttcaggaggcagcctgcaggtgagccctgacccctgacccccattcttacggtggccctcaccctgggaaatgatgatgcctgtgactgctgacaagactctgatgtctgttgtattcgtactggctgatcctggatacaccctccctagctgcctgtggtgctgctccatcccctagggttgatgaagctttccttcctatcttctctccaccagtgcatttgctaccctggaggaggaggcatgcacggagctggtgccctacctcagctatatccttgacactctcgtttttgcctttggcaaataccagcataagaacctgctcatcctctatgatgccattggcaccctggccgactctgtgggccaccacctcaatcagccggtgagaccctagacatactctgtccatgctgtgtcctttaacatctggtgccttggtttgacctgtgttgcatgccaaggacatggccatgaccttgtcaggcaggctgaagctcttagccctgtccttactctgcttccagtctagtgggatgaccaagtcagctcagtcagtcaacaggttttccagggagggatcaaggattaaaaagaaaaaagaccattagacaacactgtagcatgatcccaggcagttctgaggctggggcaggtttatttttttcctagtctgtttttgttttttggtttttttttgtttgtttgtttgttttttgctttttcgagacagggtttttctgtgtagccctggctgtcctggaactcactctgtagaccaggctggcctcgaactcagaaaaggcgtgcgcctccaccgcccggcttttttgttttgttttgttttgtttttttcctagtctgttttcataccattttaatttatac

SEQ ID NO: 33908 - DNA, 1785 bp, Mus musculus
ggtcagccaggtctatgtagcaagacctggctcaaagagaaattaagagtgtatgtaatacaatttattttttgcggttttgggaggcgggataggtaggggtaaaatggggttctagagagttttcaaagtaaatgcttaccaatgaactccaaccccgtgtcctgggaaacaggctgtagtatagtagaaggctagtgaagtaaggtctgtgtggtggacatggtggacagacctgtacctcagtatttgtggtcagggtgtgctcgagggggactgtgccacctccaatggcttagatggaaggagtaggagcagccctgccatttccgccatctttcccaactccaggattccatgcctgaggtccggcagagctcctttgcccttctgggagaccttaccaaagcctgctttatccacgtcaagccctgtatcggtaagctaccctgtttgcccccgtcccatgacctcaacattggccttaagtgatggagacataccctgggaggcccatgaccggactgggatgtattcgtactgtctgatggggctgcccagtcagttctgggagcttggcgggcctcagtggcctttctgctcagttggggtttttttctcccctccctgctctgctctttgcattagctgagttcatgcctattctgggtaccaacctgaaccctgagttcatctctgtctgcaacaatgctacctgggccattggggagatctgcatgcagatgggtgagtgcctcgagagtggcagactgcctgcctcttcattgctctgtctccatcctattggtcaggggaaagaacatactttgatccccctgacaagtgaagtcaaataactgaagggccatttatgacgtggggtagacagtttgttcctactgaccggaccatctcgtgtaattgtttttctgaaaggtccactgggatcagtgactttgacttcctgtccttggggaagactgggtggagtggtcatgttaccttctgggtaatgacttcagagactcctttgggtggttctgttgtgtgttggctgcggacttggtggggagcatcccgagaagggtctttgttctctcgggtgtggtggtatgccagtccgcatgtaactgggatcatggcgtgaggtcagctatgcccagctggcactctgtgggtggagtgggccatgcagggctctgaatggctgctccctaggggcagagatgcagccttatgtgcagatggtcctcaacaacctggtggagatcattaacaggcccaacacacccaagacgctgctggaaaacacaggtgagtaccaggccggggctgagggggccgttcccggaaggaaggcttctaagacctgaaatagagtcgggagggacgaaggaagaatactggctttagaatatatggatgggaagagatccaggctgggtggggagaacacctctatgggccaaactcaagggcccaggatagccacaggatcgttcagttggggcctgtggggcggggctcggtgcctcctgtcagaggccccgccacgtaccgtcccggggccactcggggttgcaggtcgcctgacgagtccctctgccattccagccatcaccatcggccgcctgggctacgtgtgcccgcaggaggtggcacccatgctgcagcagttcatccggccttggtgtgtgcctgcctgggtgggacctgatgggggtgggcaggacagctgtaccctccagcgccaccccccccccgcccccatggatgcatgtggga

SEQ ID NO: 33909 - DNA, 2651 bp, Mus musculus
aggtctttaagcactggggccgatgggagagtgaaaaggaagaagaccctgagccccaccctccctttcccttgcaggtttttgtctgcgtcatcgtcggagggtgtgctgggaatgtgctgcttccagaagtcactgtgccctggtcgaggggggttagggaggagtcagtgggacctaaatccaggtgcaacgcagtctgtgcatctgtccatctgtcggtccacttgccccaccgggcctgatgagtgggcaggtgggtggggactccattctcatcctacaaatagggaggggggtgggacttcttggtgggcaagagttctctgggctctaatctgggtcatctcgggcagcccacttgggccagctatgtgggagggaggaatccataaggcctaccgaatccggtgtcagataaggcaagggaattacaggtggggaggggggttccttgtagagaagcatacactcacatgtacacatgtggacacacgcatgtgcgggcaccacagccagctaggctgggccaaacgccccaccatttcctcgactgcatggagacagtagaattagtgaacccccaaattatgcctatggcctctgtgtaccttgcatctagagtataagaagcttctgctgttctgccaaaattggcgggaattgggggggctgggaggtttgggggacctcagctgggctcccggggccaagggaggagggtggtcattttggggctgccatctcagcactggctcacttggacctgctccatacacttcctgccagcttcatggcagcctcatgtagtgtgtccccatcgttgtcacatcctagccagcagcagagtggggatcattggagcagctgagactggcttgaggctaccctgttcctgtgctccaaaggtaattaaaggcacaggcctgggactagttttccttgagaaagctaataatggttgccagagctgctttcctggatctcttgaaacagctttaaggatagttcagttctctgcacctgagaaccccattctcaagagctggggtaacagcatgtgatggtgagaacaaaggacgaagtttactgggtccagcaagatttgaaagcttggaggagcagggtgtacccagggcctcaaactttgtcccttttgggacttacgtttatcacagtgtccgctggactcagaccacgccagattggtacactgactcaaaacctttgaagaaatttgttggcgatgccatcggggtgggaggggcttcccgagaggagaggggcatgattatttccagattagctgtggaaatgagtcttgtaaggtccctgaggtttatcctccatccctttctttgcttcctacatatttgggagcccattatatcttgggctttgactggagttctgcattttagggcctgctccatcatccctccaaggacttggacctttatcctttccaggccttgtgtcctttcttaagtagggtcaggccctgcctctgttcccagggacacttagtgcacattccataactcagctactggtccccatcccctccagcctgaaacttgagcaggtctctggaagccatttgtaggaaaaaaaaattttttttaaagaaaaataccattagctttctggtaattccacttcttaggagcatcctctgctgggtcttggggtgtattgatggattgactatctgatgtagttgtggcccctctttgtccaatggggagggggagggagttccaactaccttcaggaaacgggagcctgattcttgtatttccctttttttattttattttattttattatttttttaaaagaaattatttaattttttaatttattttttagttggtttttgcacaatgaagtttgagtttcttaacctcccttgtccggggctgctgacatggactgaccttgatctgtagccctccctgctgccattcccctgagtctttattaccatcacccctgggctcccaggtctatccatctgttactgtgctgtgctggggactagcgcctaggtggcgtgagattccactcgtgtagaactttgttgagtaaaggtcagtttcttgtgaaacacttggtgtctcatttcctggtccttggctttggtggtggagtggtgactgtggatgtgacgaggggtatacgtggcctagcagtacacagaacacctgcccttttctcctagcttctgagggtgtgcgcacacacaagtggagatgtactgctgctcctggtgctctacctgactgaggcaggaggatgtcaagtttgaaaaaatggagataaatagaattccttttatgaaaaaatgaggctagtatgaaaattgaggctagcggtagccagtttagctggatacatagttctgcttttattcccagaacttgaaaagtaaattgagtgaccaaggaatctccctcttctttcatctttatgaggtgggagagtgcttagacatggtaggtgtcctccttgacagttaacaacctagtaaaggcctgccgtacagtgaactcatttgcaaagctttacagcagacataacacaactttgggtcactaggcagattggaaattctttgtgatcttagaggccaggctgaatggtggtgg

SEQ ID NO: 33910 - DNA, 1207 bp, Mus musculus
tccttgccaagggcatcagctgggtgtttcccaagcttgaaaagagcaataatgacaggtatttgtgcaggaacctctggcagagggtagaggggtgtgtctcactttgtagcccaggctgggcttgaattcatcctgcctccgtttcttaagctgaaatatgaaggatggatgaggggaaagcaggaaagatatttgaagcaaggggaatagcatatgctaaaggacttggagaaggtggtggctgtagctggttccaggtgggtcacaaggaaggctgagctaggtgctttctatacccaaggctagcagtctctaggccaagggtgtggctcagtggcagggtttgcctagcattctcagtaccaacagaaagtcagggacaagctgactgaggacttcaggcaagatctcaaggagaccgactgatagtaatagttccccaccactcattccttagggtgccttggcactggccctgcctgtgggttctaatgtggtacagtcactggcttaccatcccacggaaccctgcctactgactgccatgggaggcagcatccagtactggcgagaagagacctatgaggcagagggtggagcaggctgaggcttacggacctgacaccaaggatgcagactgactcagaaaacccaaccaaagggccatttattctagagatgctgctgaccaaggagtgggcctagggaggggctggcatgtaaagtaataaataaaggtgtggcaaaaagcctcagtctttaccaatcttcttagtcttcattcttctcagctctgaaggcatctgccttttgggcgaatgtctcagccaccagcaaggggaaaaccagagaagcatcagcatagacctgcagaagacctcagtgagccctggagccatgggcagcccacggaccctgcaccctgccctgccaccatctacctttactggctgtgcgtccatccggatcttgccccaagagacagcctcatctggccgggctccggagtctgagccatcaaactcctgggctgtgttgatataaacagcgtagtctgctccattcctctgtgggtagaggaagccctcgtcagaagccgtagaaggctgggtatgatgcagaggaaggcctagagagcttttaggaagggcccatcagtgcctgaggctgccacaaaccatccgcaggagaccacacctacctc

SEQ ID NO: 33911 - DNA, 1270 bp, Mus musculus
gtcctctggctgtgctagaggtggggaagggggtgaggtcagctaggggtggagctagggtgacgccccaaacgtaggggaagttgggcttgcacttgacttgtacactgcctagcggggtctgagggtggagcctaacttaggcaagttacagacgacttgtggaaaagaggccgggagggtccttagcatgtgggaatgttagagcagtctgagaggatgcggtagggtgagaggtgcaggacacacattggcatcagaagcctgctgcttcgagtaggctctgagggttggtgttgaggtgcttccccgggaacaaggtccgagctgcaggtagaacctgatatctgaggaccttggtggtgggagctccttggtatacttgtcactgacccggtcttctcacccacctttcttcagctgaagtggtgtgcttgggttgctgtctactgctcctttatcagctttgccaactcgcggagctcggaggacactaagcagatgatgagtagcttcatgtgaggatgctgaataaggggatggggtcccatgcgtgctccccagcactgacagctcttttccatctcaggctctctatctccgccgtggtgatgtcctatctgcagaatcctcagcccatgacgcctccctggtgatgccacctaggagggttggatcctggactcaggcccaccttctctctggcctagcctttggctgcctccgccctccctcagctgctgtcctaaactttcctgagtgtggtctctgggctcccagctgaatggaaggaagttggctctttctttggggccctgcttctgctttgacaaagagataaacctgcagacttcccttttaccttctcccccccccccaaacccggccactgttatgagaaacactgttcatgtttctacgtagtcacttgttttcttattgaaaccagttgatataaaactttccgctctggttggcttgcactgttgcttctcttttgttcatggggtgctctgcccagtgaagactgccctgtgctggggcccctgtctgactttttgaaaaaatgagttaatgttaatatttcacaagcctcgggtctagggttaggcatcagggtgattgttggccctgataacctaaccaatctaggttttggttttcttggtgtgtgtgtgtgtgtgtgtgtgtgtgtgtgtgtgtgtgtgtgtgtatgtatttgcttatttattctgaagtgctatgtatgaaattcagggctttatatagg

SEQ ID NO: 33912 - DNA, 1218 bp, Mus musculus
ctttctacaataaacgccttaaaaccatgaaaaaaaatagaatataaaaagtgtttacattgatgtaaatgaggcattatgaacttttttcaaacctagaacctaaaaagatttttgtagccgggcagtggcagcgcacacctttaatcccagcacttgggagacagagacaggtggatttccaagtgagttccaggacagccagggatatacagagaaaccctgtctcgaaaaacaggaaaaaaaaatttttttttgtaatggctaaaaatgtataatggttttctggttttacattttagcgagtgaattggaagaccaggatgtttcaaatcagtacagaatccaagaggaaaatgtaaggtgagcttacacactaaagaaaacagaatcttacatttttaaattaagcaaccaaaagaaactcctatatggttttctttttaaaaaaaatgttcccgcgtcgtccccacggcggcgcggggtctctctccccccgccgggcttcgggaccggggtgcggttcggagagccgttcgtcttgggaaacgtggtgcggccggaaagggggccgccctctcgcctgtcacattgaacgtggaacctggcgctaaacgtagacgacctgcttctgggtcggggtttcgtacgtagcagagcagctccctcgctgggatctattgaaagtcagccctcgacacaagggtttaaaaaaagaaaaaagaaaaaaatgtttagcaaagtattttaaatgatacatattgaacatttaaatattattacatagttgtcatggttagggttgcctgtgaagagacaagcatttaattgtggctggcttacagtttcagaggtttagtccattatcatcatggtgggaagcatggcagcatccaggcaggcctggtcctggaggagccaggaattctacattctgattcaaaggcagctaggaagagactatctttcattcagggcagagtctgagagaactcagagcccacctacacagtgacacacttcctcaaacaaggccacatctcctaatagtgccactttctatggccaagcattcaaacacatgagtctatgggggccaaacctattcaaaccgccacagtggtgcacatcggtaatcacaactttgaagacaaaggcaggaggatcatagtaaatttaaggcaggaggggggctttctccaggccctggattaatgt

SEQ ID NO: 33913 - DNA, 1422 bp, Mus musculus
ctttttcataattactcaagtatttgatgaaagtaatgcaagttccttaaaacagtgctgctaaattttcttttgtgatacatgcctgctacacaattattctttttgtaggtaaccattcaagtcttgaaccaacttattcaaaagattcgagaagatctcccaaatcttgagtccagtgaagaaacagaacaaataaacaagcattttcacaacacattggagcacttgcgctcaagacgggaatcaccagagtctgaggggccaatctatgaaggtctcatcctttaaaagaagacagctcagcatactcctttctacacatcagaaagggcttaactaggtctcccttccatagattgtgcctttcagaaatgctgaggtaggtttcccattccttacctgtgatgtgtttacccagcacctccagacaccttcaggaccttaactcacttcataattgtttaagtctgtctgatcacccaagtagcatgactgatctgctctttaaacttctgtgatctgtgaaaattgaaagcaaaacccacttattctggctactaatggagctctcctttcttatttttattttgatgaattgttgattgtgtattttcttcattaatgaggaatactaacccaaacatacttgtttcttcgttctctggtcctatgtgagattactttagaggacaggagtactgtgcgtgaaattcagcgtgggctttccctgaatgcaagataaagcctatgtgtaatatattccctacaactagaatatattaatgcatgttgaagaattttaaagcaccatggtcagaagcagaagctatattttgcatatttggactcagctatccattaagaactatgccattatctggatacatcaaagtaatttgattctataaaatagaaattttgtgacttaatgtaatttatgtataacctccactattgtaaatttatgtgaaatgcatcacaactacaactttttcatcagtggaataataaagttgctgttaacaattttggattatctttgttttttgtacaattgatgaaggaaattagtagattacctgtggaatggttgccatgtagtcttgtgcttactgaattctcttatttaatgctgaaggccagttttgacaggttaaataagtaaaccaagaaggaggcatggagtcagtgattaattactcagtagactttttctctgagggagtaaaacttgcaaaaagggtgagggagcaaaacttaattctctggggccaatgaaaaagggagaaaacatacactcacatgcacacggtacacgaagcaaggttccaacaagatccaccaactttatttttctcttagcctttttataccaccttagacaaaaattctctatgaaaggaaaaaaggttacctcat

SEQ ID NO: 33914 - DNA, 1149 bp, Mus musculus
catagtcatttactttctaccctttgagttctattaactgttatccactgcaaaaagaagcatcattgataagggagaaagctataataatctgtggctggaaggatatttagaagatagtttgttactatgtccacttagcaaaataatagtagtagactctgccttagccctttttcttcgtaatccttgggttctttgccaggtttgcagtaccagtaccaggcatgaattctaccctgtggaacaaaccttaagtccaagtagaaagccctggttattcctaaaatattcattccactattgtaccaatgggcgaattttgtcaaactggttgttactgtagcttaaaaagttcacagctgggtgaaactgtttattctaacttttttacaaaaacactgaattattttgctgatattgtttcattatgtatccacttagaaactgttgccttttttgttgatagtgtcaggctaatattttctactttctgtgttgcaggtagattccataatgaatttggtgtccacattgattcaggatcagccagaccaacctgtagaagaccctgatccagaagacttcgctgatgaacagagccttgttggccgatttattcatctgctacgttctgatgatcctgaccagcagtatttggtatgagttatctcttactgtaacctttcctcacgcttaatgagcagaaaagtgtttaaaatggtttaatgcagcttttgcattggtttaaggtgttaaaaaacttgttactgaattaaagttcatgaccttaaaaaaatttatttacctatttagtttttttgaggcaagttctcactgtagccatgttggccttaaaattatgatcctgctgccctagcttcctgagtgctacaaattcagttgtgtaccaccgtgcacagctgggattttatttttgtataaatgaatagttaaattgttggcactcatgaagaacaagtcaggtattccagcttctcttgaaaacctgagaattgcagaaaagcttgctttcctttagttggatattacgtaattgttctgtgttctgtgtctttttcaacagtgtagtgcatttagaatgtttagttgtttatcataataaacttaatgagacataaaatctga

SEQ ID NO: 33915 - DNA, 1251 bp, Mus musculus
aagccatcatgctcaggagtgcagtgccctccatcctgacccctcttcagtggtgctgggtcatcatgcatgcttgagttcttgtaagaagtgtggtagctgaagagtaacagaagctgccagcatcgtgtgaagccctgtgacgctcccttacaagtatgggtgctttacagatgctgtcactgtaggggccatgctagtccctgtactgtttccatttcagtgtgtgctaccaaatagagcacatcttgttatattctagtgtgttgccgtaagggcaaagtccagtgagctcagcacagggagtcatggaaagtgatttgccccttaaatgtattgtattctccccctagcatttatttcttacgctagagtctattcttgaagtttaacaatgagccaaatgaaatgaagctgaaagtgcttcttgaagcatgagtggttgtggagtaagaaggaaacgaatggaggaggagtaaattgatcctgtcacgtgtactaagatttttctaactttttcttggcagtgaagaaacaactggtgatatcagtgattccatggattttgtactactcaactttgcagaaatgaataagctctgggtgcggatgcagcatcaaggacatagtcgagatagagaaaaaagagaacgagagagacaagaactgagaattttagtgggaacaaatttggtgcgccttagtcagttggaaggtgtaaatgtggaacgttacaaacaggttcttatctttttgttgtcattttttcttacattatgagatataaactgaaaatcttattttaaatgtatttttgttaaattgaaaaatatttttttttaactaaaaaagatctagataaaagtactaccatctttacggattagagattcagtattgtcgaggtaacagtgttacttaaatataactatagattcatgcagtctcagtcatatctacctctctgactgttttataaagtcaataaactgattctaaaatatgtgagaaaaagaagagaacctataatacccacagcagttttgaaagactaggacaaaaggacctaaatgcactctcactgaagtgaaggtagatttgtggtattgacatataccggttgtgctggctgtattttttgcatgtcaacttgacacaagctggagtcatcacagagaaaggagcctcagttgaggaagtgcctccatgagatccagcattatggcattttctcaattagtgctcagtggg

SEQ ID NO: 33916 - DNA, 1182 bp, Mus musculus
tttcttgtttgtttgtttgtttgtttgtttgtttgtttttcgagacagggtttctctgtgtagccctggctgtcctggagctcactctgtagaccaggctggcctcgaacccagaaatccgcctgcctctgcctcccgagtgctgggattaaaggcatgtgccaccacacccggctgcatgcctactttcttgactgcagtcaaatgtggacttttggactagtttcctagtttgtagaggttgaaaagtttgaagttactctatgaaacatactgtcttagttatgtaagccttgcaagctttatagccctggtgaggagttaggctttttttttcttgtatttttaatttaaattttcaataaagagacttgtgaagttgatttttatgtgattaaaataagtgttgtagattcttaaaactgtgtaacaggtgtttggttaaataggaccaagataaatgtttaggtaaatgaagcattcttgtcttttttttttcttccgttggcatttctgtaggacaaaaacaagctgatggatgctctgaagcatgcctccaatatgcttggagagctccggacctctatgctgtcaccaaagagttactatgaactttgtatcctttgactgttgaaggataaacacttgggccagatttatttattgtttggtttattttttgttttgtttttgtttttgtttcctctatgtagcctggctgtcctggaacgcaggtagatccacctgcttctgcctcctgagcgctaggagcaaaggcgtgtgccaccatacctggtttatatttatttcttgataaggccaattttgttgttgttactagatttgtatttaaagcagaacctatacagatttattaagaaaaaagtgagaaaagaacttgagagtgggagggcctttaaggcctactctatattgttttatttttatttatttatttacttatttattttactttgtatgtgtaagtcttatctgcatgtgtgtatgtatctggaccacactcataactagtgcctgcagaggccaaaagaaggcattggattccccggaactgtagtcacagatggttgcaaaccactgtgctggtacttgaacccaggtcctttggaaaagcaaccagtgctcccctccctcccaccctgcctcctctgaaatggatgc

SEQ ID NO: 33917 - DNA, 1157 bp, Mus musculus
agaatgtgctaggcaccagatagaaataaatggcagagatgtgcttttgaaacattctgctatagttctttgggctcctggtgggaaagaggttgtgttaggagctttggaggtaatgcaaacagattttgaggagaatgggcagaaattctgcacaaagaaagaattttgccatttaatgttcatggtgtgctccgtcatcggatttctggggtattgctaagttagtgtgtgtatgggatccagacggttaactttgtcttttctgcagtcttggggattgaacccaaggccttcagcctgctagacacaaactccccaacctaaattattttaaatttcctgttttcttgttaccctcagttctccttgaagtattgatttgtgctttctcatcaggtttaaatactatattcatcaacatgatgattctgtttattttacaatttatgttgtattgtcatattgcacatgcaacttataagtgggaaaactaaccaacaaacaggtccctataaccagtagaggtaaatactctcaaactggatataataatagctgacatttatgaagcgctcgttactgagtgctgtgcatattcataactttgtgtgcttttttatttttctagtctgtaccaaaaatttgtgattgcttatagcccatttataggttatttccacatagtagccagcgctggaaacaatccatatgtctatattgagtgaatcaataaatgtatacacacacacacacacacacacacatacacacacaagtatatacagatactgggatattacacagtctttaaaaagagagaaattctgataaacgctttcatacagatgaatcttggacataatcctagataagccagatacaaaagggaaaatgctgtgtagttctatgtatataaggtacttagagtaataaaagttagagaaaagggtagaactgcttagctgacggacattgggagtgtatgctaatatttctcctatataaattaacgtttcttaagatacttgttttttaattaatttataattaaaataagcatttttcattaaaagattttaattacatgtgtgtgttcatttgtatgagcatgtgactgcaggtgcttgtagaggccaatggtgttggcttccctg

SEQ ID NO: 33918 - DNA, 2107 bp, Mus musculus
aacactggcattctatgttgggtggtgttgggttcatcctgtgaacagccaggctgatattgttcgccttcctgacagaatgaccattctccctccggtggataaactgaagaccgtgctccacaaggtgaaagactttcacctgaagttcctggagcagtactcatgaggacgcctcaggcaccggagccagaccctcccaagaccacccaggccttcctcaaggactctgcctcagacctcagacaggccaccaacgctgttcatcttcatttccccaaggagacttctttctttgtgccttgatgtttgagagttcttcgagcaaacagtggttttgcaatgtctcacaggccctgtttttgtttttgtttttgttttgttttgttttgttctttttttaaatgcaaccaaagtagagtcaacctgctcggcagatgtacttggattctctgaatcgctattctgtttggagagttcctttgggtcttaagcagccagagtacatggaaatgagattatgtcagatctggagaaacaagcaggtgttgggaaatatgtgacttgacatgataagggctgggaatccagaaatcaatagtgagatccatgaaatcaaaccctgaccagtgtgaaaatgtagccttttggacagtaagcctgcaagtctagtgagaactcagagaaagctgaccattctggtctgaagataggcagcgcatcacaggcaagaatatcgaagtcagtagtaggacaggggtcacatcagataccagctcaaattgcactagctatctagaacagttttctccaggtttgcctgagccttgatgcataccatcgccctctgctggtcgcagcagagataagcaagggctgaaaatggaggcaatcctttcccaaggccctgaaagttgtttttcatggtttcaaactgaatttggctcatttgtaactaactgatcacggtgcctggttacactggctgccaagaaggagcgcatgcaatctgattcagtgctctcttcacatcagtttcctgcctccctccctcatctgcggacagcatcctatctcatcaggcttccctgtgtgtcacaaagtagcagccaccaagcaaatatattccttgaattagcacacctgggtgggccatgtgcgcaccaaggaaacaggtgctatagggagcgccaggccaggcttgtctcttaactgtctcgttcttcagtgagagtgggaaagctgtccggagctcccgcgcaggagcctgggtacccacgcagcgagtcaagggagttttcggagccagagagagaaagatgtgaaggctgtggagtaaggctgaaaccagcctcctgccctatagtcccacactgcagggggtgcgactttaaaacagaacttcaagttgttaacactcacaagcattgcattactgtgaaggaagtagccgcatccataacaggatgtgatggtctacagcttttcctttaaaagctgaaaaggtaccatgtgtgctcgctaggcatataatccagatatgctccagagttctgagattcttccatgaaaggttaactagaagctagaatatttttttatatttttgtaacaattggcttttttcatggggggaggggagtagagggttagtatttatagtcctaacaagtccaaaaatttttataagtgtcttcagattataaataaccctccaaattttgcaatgtttacatgttttttttttaagatgacaaatatgcttgatttgctttttaaataaaagtttagctgttctaagagattaacttcaagtaggatggctggttatgatagtttggattttctacaggttctgttgccatgccttttgggtttcagcatcactcgagtcgcagcatgtgggtggggctgtggaaacctggccaggctggacctggtcagccacacctcagagacattgtttccatttggatgtgagcaggcgcaggcctgcatgctctttcctacttagcatcatcagttcttccgcctccttagcatggttctttgtaacagccatgctgggaagctctgaacaataaaatacttccagagtggtgactga

SEQ ID NO: 33919 - DNA, 2250 bp, Mus musculus
tcctggctcttttgagacagagtctctatggtggcttttatttaatgtttgcatgtctgattttttttttttttcctagtttggtttggttttattttattttacttttggggggggggggtcattttggaaaaatgttggctgatgtaagtgtttatgggacagccaagcaaagtgataataaatggctgagtatgaggtactgggaagtctttgaactctctggagagcagatccctcagccagcactgttgagaagtacagtggaacatatctgcagggacgtttctagcgtttaaatatttattttgtgtgagtgttggctacatagcaaggccttgtctccaaaagtgtttgctcatttgtgcacacatgtgcacatatgtatgtgtacacatctcctgtttttgtttcatgaaggaattagaagatctcctgccatctagaccagaagttcctaatgttattggagagacagaagaagtggagcttcaggaatttgatagcactcgaggctctggcggtggtcagagacgtgaagcctataatgatagctctgatgaagaaagtagcagccatcatggacctggagtgcagtgtgcccatcagtaaactgcaggccactgcacaggtgggttttctttccacatttgccggatttgccagctgctggagtacctgataagtccagatggactgatggacatctgttgatctatgtgtaacttctaaaattggtatcgtatccacagagtgtataatttaaactaaccacagagctttacatcttcatttcgactgttctgtagcagagtaaagcacttgaaataagactccctttcacatgtgggttataagtttcagtcctggtatctgcttgatttttatcagttttgtgtagactttatgtttcatattttaaactcaaatccagcattgtaaagtttgtacaatttgtcctgaagctttgtgtttggctgcacctgcataagctgctacaaatagaataaagaattcatagcctgtatctatcatttagatgcatggaaaaatgggctttgcacacaatgggtttgaagctgactgggaacaatggaaaaaaattacattagccatggttgtaaagttttttggcttttttttaaaaccattttgtgaaaggtttctgaaacttgataataaaaagcagttggtgtaaattattctgtgtcacatttttagaaagaacatattttgaactgtaaaagtatccttacactgaggagtgaatctttaaacagcctctaaaaacccatcagcctgaggcttttgccttgggtacctgcccattttatagttaaataacactaatgttggttgaaacaggctttattcacttcagttgatgctctgtagcatcaaaaacatccaagttacccaactcctagattacctgcatatcgggacaaacccaggcctcatcctcttgcaccccattttttaaaaataaggtaataggtcagtagttaaaccatgtttacatagacctgttaaaatgctgttttaattaaatgttatgaaaagttgctctgtctcattaagttgaatatctgagtttgggtgagcgtggactgtttggttttctgtgtagaaaactaagattcttaggttagcagaggttctcatgcagagtggccgagccagcagtgcctgtgggttcagtttgatccatgctctgatgagcgcctcacttggattacagctgtcctgatgggatgatgaaagggtgtgtgtccatcctctgatgatgactttgtcactccttgggtgtttttaaaacatttccctttgaggtccaagtcataccaggtacacatcttttacatttgtcaaaggaacaacaggacaaaaatggaaattcagatttttcaatgtatcataccatctctgagcctaatagcactagagtacatttctagagctattagaacttggatgtaaaatgtctcaaaactaatcaagacctgtgagggttaaattactgccctatccactctacctccattgtacaaaaaaatattttgcaacaagcctgggcaagattcaaccacataatagttttgtatttgaggtaacttccccacaacactttaagcctaagcaatgcagtgataatataaactttgtagcctttccaataaaggtttataaaaccagttcctcagcattcttcagttcttctgctaggttgtgtgtgtgtgtggggggggg

SEQ ID NO: 33920 - DNA, 1067 bp, Mus musculus
tttttggtgacaggatttctctatatagccctggctgtcctggaactcactttgtagaccaggctggcctggaactcagaaatccacctgcctctgcctcccgagtgctaggactaaaggtgtgcgccaccatgcccggcccaagtttgaaatttaagcaagataaaatttctttgtacctgtatgaagtgcaaaattgagtccttaactttcctggctgcaccttattgattgagcttttttataaacactgattttagactcccttcttgcctcattgggatcatgtaatagtttctggcatattccttgagagtagctagctctgctaataaaaagctttgaaattagggacagtggctttttggctctggtagtgaatggtaaaggtaagattctgaaattgacttaaggaatgctcagcagggtaatgtgtttttgtattttaatatattttgtatatactttgtctataggtgttccagagagatgggaatgatttgcatatgacatataagataggacttgttgaagctttatgtggatttcagttcacatttaaacatcttgatgctcgtcagattgtggtgaaatacccccctggcaaagtaattgaaccaggtaaatgatttcttcttacccaggttctgggttttgttacaatttgtgtttatagtgggtaacaaaggaatattattgactatctttcttgggtaaaattcttatctaatttccttttttaaaataataggatgtgttcgtgttgttcgaggtgaaggaatgccacagtatcgtaatccctttgaaaagggtgatctctacataaagtttgatgtacagtttcctgagaataactggatcaacccagacaaactttctgtaagctggtttttaatgttccttaagcagctgatttgtggctctccctttggtttcctctcatttccttcttttgcttcttttgcttgtgtttcttttctcttcattttgttttattatagggtctcccgccacctgcaccccaggctggcctagaactcacagttatgtgtactccctatctgttt

SEQ ID NO: 33921 - DNA, 1101 bp, Mus musculus
acactcttaaaaaaattctaagcaaggtttagtctttgaagtaaactgcagtaccaactgtacagtctagtaattcaccatcaagaatattcaaggaccaagtataggtcatttgcaagttcttttaggttcagtaacccttactggaaagaaaaattaaaattttacttggactgtctctgctgatagcgtacttgaagtaagagcttaaaaggtttgcaaaagcattcatagaagctccagcagctgactgtccaaggagctaaggaaatgtcaagataggttttactctgtaatcttgggctttttgagttaagggcactgtcaagacagtttcatgttgggtgctcttttttacaagaagcttgaatgacgactctttgcaggggaggtcatcaatgaaaaagaccgctgtaaaaaatgtgaagggaagaaggtaatcaaagaagtcaagattctggaagtccatgtagacaaaggcatgaaacatggacagaggattacgttcactggggaagcagaccaggctccaggagtggaacctggagatattgttcttttgctacaggaaaaagaacatgaggtaatttccttttgatttattcactttttttcccctttctattttactcagaattgatcttacttgtgagaaatagatctgttggatgctttgaagttaaaactgaacacaaatgaagttaagggagtcaagttaattttcagctcatagtgagcatggctagcttacagaaactgactggacagataaaccaagtaaggtgtggccagaagcaccatcagtgcccttactgtagattagcactgtgccctttagtgatcttgttgtctctgcacctcattttcctttatgtaaaataagccattagactagatggtgttaggcaacataatttcactttagatctccttggatgcacagtgggtaggttcagtcttcactcttctcagcactactatgttaattttactctaattactaagtagccagctaagttttctgaggtcacgagtttatattttaaagtaatctgttttattggtgcgaaggacttactcatgttatagtatgtataagag

SEQ ID NO: 33922 - DNA, 1471 bp, Mus musculus
gtctggctactggccatcaaagacatttgataatagtttgtaaaaaaagaaagaaaaaatgtttcagtatcttctttgttgttttatttgtatttttcttcagtaactttgggtatattattagtaaatactattgaagtggaaaacgttaaataataagtgacattttttggaaggctgtaactttagaacattgcttctcagaaaagtgaatatcttaaattgtttgctgtgtataactcttatccaaaatcttttttgaaggcataccgaaagttagccaaagaataccaccctgataagaatccaaatgctggagacaaagtaagtcattgagttttattcttaaactgaaacttaaaatatatcaccctcccagaaaggaaagtccatttatgcctacagagtgaatttttcgctgttattttaatttacttgaaaatgaccttagtaaaacctattgcttgtaatattcttcaaagataagaaaaattatagctattgagatagctctgtgttccaagtcttgctaccatataagcctgactacctgagcttaatccacaatggaaggatagaaagttgtcctctgacccccatacatactcccacactcatatgcatatataatagtgatggtgataacggtcagaggactatagttttacaacgagaattctaagatatttagcagtaggtgatgaagaggaccaaaaggaaaccaactgaaactcaaggctttttattgaagttaagtggcttctgaatttctgaagtctttctcacatccttacactaaaaaatccaatttttttacttttactttatagtttaaagaaataagttttgcatatgaagtattgtcaaatccagagaagcgagagctgtatgacagatatggagaacaaggcctacgggaaggcagcggcggaggcggtggcatggatgatatcttctcacatatttttggtggaggattgtttggctttatgggcaatcagagtagaagtcgaaatggcagaagaagaggcgaggacatgatgcatccactaaagtgagtctctttaaaaatgcttctccaaacggtgttccttagagggtgactacagaatattttgtcctttgtttcaaagttcttactttaaaatgtgttcttattaagtgacattaattagatgtattttgcttcaggccttaaaagggtggaagggtgctctagaaatacaggtcagttgataaagtgcttaactcacagacacaaaattctggacgtaagccagattgggtggtctttacctataattacaacactggagaggtaggggcaagaggatcaggcttcaaggtcataaatactcaactgaatagctagtttgaggccaacctgggatacatagaagcctgtctcaaaacaaccaagatcttaaagaatagttgatttttcctgagattttttttttcacatgctgtt

SEQ ID NO: 33923 - DNA, 1099 bp, Mus musculus
agtggatgctcacagtcatctattggatggaacacagggcccctaatggaggagctagaaaaaaagaatacctgtcatggtctaactctgcgaacaatgacttgtgtccttatgctcggcaagttggtggagtgacaatttctctgccagctctaacatgaggtgctgctgttgtgggtttggcctaattcttcttgtattctagtgttaatttgggtctctcaaaactgtttgcatgagagagtccacacatagacaccaaggaaacctgtctccagttaatcttgattggtaaataaaagaccccagcagacagtagctggggagaagagacgtggtggggggcagtttaggtttcctgggcttgggaccacaaggaaggagaaagaaccatcatgccttagaagagtgtgcaggagagagacaagagctgccatggcacagagaatcaaggaaagtaccctgggctctgggccaagggaacgtggcccagagggctgactagttggagttaagagcatccaagataggacatagaaagtagtaagcagtaactcgaagttatcaataggaggtagatcctaacagcatggaggataagcatctgcccagctattgagctgcttacggcatgttaagatataaggctgtgtgtgtatctttcattcgggaacacaaatggtcagaggtaggtagggaacccatgctgggatgaattaaaaattcatactccacgctgctttctaggtcttctcttgatgaacagatgcccctctcacctctttagctggtttggatactcttgatggcgaacctcagtttgtctgcttcagtcaggtttaacatagcgagggtgagctctgttaagtctgtgttgtggtccccggaactaggctggactcagagcagaagcccgtgcaattcaaagcctaggatggctacctgtgtatgtctgtgcactgtgtgctccctggaacctgataagtgtcctccaaaccaatctgcttgaggagattcctagcaccatgctgagggaagggtctagccacatgtctcagaggttctaattctaccacaaaactcctgttttttttttttt

SEQ ID NO: 33924 - DNA, 1176 bp, Mus musculus
atatgaagttaagctgtcttatgtgagttattataccctacaaagtacctgtgttaaacacacccttcagtgaaaaatgcaaagccagaggatagtaaaaatctccagtgcaagaaagtactaagtacaaactatatgataccaacacattgctgtcgttcatcccaagttcactacaagctgtcagctcccaagtagccacagactgcaacctacacatcccactgtctcaaagacatgggaataaactgttatttgtttgcagaagagagttatcaatataaatattgaacaaaaaccaaaggatgtttacatttcacatcatggatctgaaaggctcccttagctttgctttaggagagtctttgtcactctcctacatgcgttttgtatcattgctaagcattaaggaactgcagtctgcactgaacatttctatactttggatactacctaatgatggtacttgcttgggtcaggaacatatcagctaagatgagaaaaggctgcttgtagttccaggaataattaacattcagagattacactttgttgcaaaatgatgtctgccatatgcccacttttatttactacaagtgttaagagaaatgtgcctgaatcacattgattgtggacagaaggaactttattttgttctgtttaaagatccaagagagatgatctagtctagttttgtcaatgagaagacaaaaccctgatggtgaagtagctccccatggctccatcctcctagcccagtaaccttccttggcttcttctctccctgcttagcttttaaaagtcacataattccaaacatcagcctagatgttccatgcaaaacttgttagttatgcttacttaaaatgtaatgctgtaattttgtatacaaagggggtttcaccctccctttttaatttatataacactgttatcccatcagttttgttaccagacttccttggcacctgcagaatatgtaattactgtgaattcttagtaaacagtgctggttagcagcacataggctgatgccagaaagaaagctctgtgctttcacgtttgtaatttttttagttaaaattaacaatgtacattatagaaattaaatattgggtactgtatcttgagttttgagaattatttgagtctgaaccactgtaagagaacaagctg

SEQ ID NO: 33925 - DNA, 1101 bp, Mus musculus
aatggaatactgtctggtctttgtctctaataggggcagaagtaatgaaagacaaagataaaacaggattagctgaattgattgttagtgaattttaggacatggttttatgggtatattatatattttgtctgcttttacatgtttaaagttctccagttgtgagctattagattatcataagaatatcagaaaaaatctttattaataggttgataagtagtccattgtggtgtctggaatatagaatcttcccatttcctctctgtgcctctttctgtcctgtctttcttctcataacaccttaggatactaaagctgaggactctttttattcttgccaataaaactgggggaaagggaacactgtcaagtcatctagacaagagatactaagagatactgcttgcctggctagaagatggggagtgcaggacactgacactacccgcaggctgcaagcacaagtgagcctcagggcagaagacatcaagggtagggaggtgtgtagccacctggacctcccatagaacctgcccccagctgccctgcctaactacatcaccctgactctgggcaacagcaggatacccaagacaaatcttagcaatggtccactttttatggctcttcagaaaccaaaacaacagcaacttgcaatgaatatttgcatgtaaaactatttgggaaaaaaatatatgtactgtgtgacactgcagtttctgatgctactaccacaaatgactatataatggagaggacagaatggtgagtgtgaggtagagaggcagtgcaaagacagaaccacatggacgtccatgatccatgctctcgttgaagttaaaggacaaggaagctacttttacagtggtgactgcaggctcagtcttgagacttgagaaagagggacatagaaggcttctgtgacaacccttgcctccaccaaagcccctcaataaaaagtaagaggctagaaagaaaaccttcaaagaaaattgctaacgattttatcaaggatgatcgccacaatgatggctctggcaggagtgcagtggaggggagtaagccattgagagtataatatgggcaacacaatctgga

SEQ ID NO: 33926 - DNA, 1099 bp, Mus musculus
ttgatgtagaaaggctcagcccactgtgaatgggcacattcctcatggagatggcactggactgtatttaaaaattttttaaataaaagatagccaagccggtcgtgatggtgcacgcctttaatcccttaatcaggtggatttctgagttcgaggccagcctggtctacaaatgagttccaggacagccaaagctacacagagaaaccctgtctcgaaaaaccaaaaaaaaaaaaaaaaaaatagccaagagagatggtgcacattaatagtacacactgctctttcagaggacccaggttcaattcccagccccacactgggcttcaattccagggcctctggcctccctgagcaccagcatgcatgtggtacatagacatacactcaggcaaaatgctcatgcagaaaataaaacaaatgcatcttgggggtgggggagttggaggggagaagtagctaagcatgagcaaaagcaagccagtcagagaatgagcctgtaagcagcatttctccatgggttcagttcctgccttgctttccctcagtggtggattatgaactagaaatgtaagccaaatcattttctcaagttgattttggtcagtgtgggattacagcaacagactgatgctaagacaacccaggaacagccatgggtgacagacaccaataattccagcttacttaagaatttgaagcagaataagtttgaatttcagggcaggctaggaggccttaaaaaaattgtttttcacccaaaaggcataagtcaagtagagcaaattttttagactcttatgagaaagaactaaagtaataaaagtaaatatacaattatcttttaaaaggtcaacaaatatctggggagatagttcagtcattcccacaagaccttaggacctaggtgcaatccctagaactcacatgaaaagatcggtgtgtaataaacttataatctcaacactaggaaaacaaaaacacacccttggagcttgccagcctaatctatctgcaaattccagaacccagtgagaagtgttatctcaaaacccaaagcagatgactcttgagtaatgacaccgaaggtaacctctaa

SEQ ID NO: 33927 - DNA, 1197 bp, Mus musculus
agacccagtctgcattcagtcgcgcctgtctctgcagctagaacaaagtttcacttttctggctggcgtggagctttcagcccactgtggcgaggactgggagtgaggattcctcaagcagcgctgtgcctggcaactgttggagaaggttcagtaggtgcaacaacccttactgctggccgggggaactcacccgggcacctccagggcccccgcgggggtctcccttccaccgagatcagcaaggctgagcagacgttttcaagcacctgagcttgaggtcctccgagaggggatggaaaaatcggacctggggagctcaaggcttcgagaagacaccggcagggaggggtgggccgcgcgcgaggcccgggaagcgagtggcgggcggggcacgcgggagggcggggctgcgcgtgcgcagtggccccgcggccggcacgcggcgctgcgctcgctgcttaaatgagccggggctcccggcgcgcgccacttcaagggagcccgccgcgggagcgtccgccgctggctttcctcagcccgccgagaggcggcggccgtcggggacccggcacggcgggccgaggcgctgcgcccgctgctaggaagcggcggcggccggcgatggggacggagcgaagctaccccgccgggccgtgaccaccgcgccgccgcctcgggcgctctcggagcgccgacgctgaggaacatggccctggagcagctctgcgcggtcctcaaaggtaagcgcgggtgcgggcagcgcccccttgcgggccaggccgcgctccgctccgctccgccgccgccttcgcgccctttgtctgggccaggccgcccgccgccgctgcgagctcgctccgggggacgccggcgactccgcgccttgcaaagtgtgcgaagcgaaggccggtggccccaggttgccaccgcagaaagtggtagcacacaaaccacgaaagccccaactccgacgcgccgcagcggtttcggagaagcccccaatgtccgcgcctcccgcgggtcccacctgctgcggccgggaggctgcggcaccactgcgggctcggggctgcgcggcggccctgcatgccccccgcgccccgcgccccgcgctgccttcccgggatcgccgagtcccgctgcctcatgagtcctgtgcggaggatgcacgggtcggcagcggccggcgagctg

SEQ ID NO: 33928 - DNA, 1488 bp, Mus musculus
tcttaatataattagtttagactggtttgttagcatcagtgttaatagcgattctgttcttctagcatctaatgtttactctcaccttcaagttggttataaatgatagtaatgtaagttacaaaacttttcttcttgattgttaaaatcaattaatatatccttaattttaaaatagctatactattttaaatacactataaatattatacctgttatatactaaactggtatcagaagtgaatcttactattttcttagcacttaaactactttacaattgtctttcagaaagccgatgacagagaaaaacgacaggaagcacatcggtttcattttgatgctatgtgactttgctgaagtagtacatcctggaaatcacttgattagtgaaacattaaattttgactcctagtttaaaaaaaatgatggatctgagatatttataaattatgccttccttgtcaattattggaaaatactgaaataaatatggcctgaatatctcataaagtctgttttaagcactttgtatataataatttaggttcttaatttagcagcactgagcatttgtgttcctttgtggaatgtgttgcatgtacttggtgtatctgtgtttacaatgttgttagactgaggatggtgaaaggacgtgtaaataaaaactatttaaatgacctgtggccagggcgttgttctgcctaaattgatcttgtttttatctttaaaatgcatactttcacaaatatgtgccagataaagttattcaagtaacattcttcactgcagatcagactgctcatgcgtggcacagaatgaaactaaatagccaggctttggaatcataggaggacagcttgccttagatgcctggttctacaacttagagttatctgaatatggctgctgcttagcgtctccgtaagcctcagttttgtttgtatgatgaggctaatatgcttgttcacttgagttgtcatgagcatacattgtatgatgtacatgatgtacttagctcagtgtctgagcatacagaaagcactcgtcaagcagctgctgtcatgattgctactgtaggtgatcttattctactactgtatacaatggattgtcaccgaagacataaggactctttggaaaacttaaattattggtggtacatatcttacatagttaacttgtttaactagctctaatactatccaagagtaaatgtatcctgaaagctggtatttgaatactaatccttgcacagtaacataaatgatttgctctcttgaaagaaagctgatagaggcaaactcttcaggtgccagcatgccatacagttctgtctcaaaagacgggaaaggtctgtcccatttctacagacctcaggtttcatgttagaaacttcacattgccaacatttactttaaaattatttaaatctagatttcaggagagaggtgataaaattattatcaaagctaacaatatgctgat

SEQ ID NO: 33929 - DNA, 1198 bp, Mus musculus
cttctgtgaatcacaaggcttggtggctacaggaaatacacgcatgcctgtaggctgacatttctcttaaacctgtacattgatgctttatcttgcagtgctttaaactgtatcttactttgaaattttaaaatcttacttaagcataattttttttttggtattctggtaagtattgataagagattatcagttgtttctgcttttccaatttttaagttcaaatctgactcccctgaaacatagtttgtttaagtgcattcatttttacatgttaaggcctttactttttatttgtgttaaattgcttttaagtggttcaaagatgtttcatgttaaaccttattaatatagagatatttaaagtttgaacttatttttctagtttaaatacttgtgaggataaatgtctttgctttgtggactttttatgggaattttaaatctttttattgttgttaatttttttttaattctccaggttacataattttattttcatgaaaatatatagtgaagtcccattagttatctacttgattctaattttcaatagacattcagctttgaatatacttgtgtgttgaattgttgtgtccggccagcagaccacaacctgggttctagcctggaaaggcattttggaaacctggaagagaagaggggctaggtggcgagagaaaggaatgtagccaagacagttactctgatcaaggctcaaattatattgttgcgacactagttatgaaggaagggggaggggacccgattcccgctgaataatctctggtccagtagaaaggtgcacgtgtgtgtgtggctccgcaggttccagcagtgggcgtggcagaacgaatgagcaggaagctccacccctgagcaagcaggtttcagactgggggaggggagactacattgaatgactgcagagttataaaaactcctagcaaatgtgaggttagtcaatataatttcaaagaataaaacgtgatttaaagcttagaattttttcagcaaaccattctgtgttgtagtaattatttaatctcaatccagggtttttaccccacctttgatcattcagttcccagataaaaggcacaacctttgtatttataataagccttagtcagcactagagctgggcagatatctaccctctaagctgttagaaactatgatcccgtaagtcgtctcc

SEQ ID NO: 33930 - DNA, 1134 bp, Mus musculus
gtttaaatttttcagtatgagacataactgaatgtagagtgaatggctttggggtgtgtgagatactgaaacatagctgggtttctttatattgtatggctctggggtgtgtgagccttatctttcttgtttgaggtatttgaagtgtgatcattccaccttctaagtattagcataagtaacatggtctagacttaagaacttagatctgtttctcattggaaagtagttgagctcctgatcactcgagagcgttaagagtagtgggttgttagaccttgtattcactgcaccttggtgggtggaagacagcatttagggctcttctatgattgctaagatcttttctgctcttctcgtactgaaattttgaccaggaatcaatagggtcattcagaaatgaaactgaaaatttcattgttggttattgcatcttcacttatttagaaattttcatcatttttctgggtgagaatgacttaatttgatgagtttcctttttcttttaggctcagtttatgaacctcttaaaagcattaatcttccaagacctgataatgaaactctatgggataagttggatcattattacagaattggtaagcaccgattactagtattcaatgttccatagtcatatttcatgttttgttgagttattattctataatttgaagatggggtagtttctctgtgtaagtacctgaatattctagttgtgtatttatactggactgttaaagggaatccacaggtcatacctggcccatgaataattttgttaccactatcttttaatattttaactttcctaagtattaatatattgtatttattcatttatttatttaggtattttcagacagcatctctgtgtagtcctggctgtcctgaaactctatgcagaccaggttgactcaaactgacagaagtcttcctgtctctacttcttgagtattgggcttaaaggtgtataccaccacaacaactttaataggctctagaacttgagtatgtttttgttttggttaatgaataaatgtttcatatgagtgtaagcctgattgtttacatatggtcagtttctaactcactgaagcaaaagatacactctcagattattgctcccactaa

SEQ ID NO: 33931 - DNA, 1196 bp, Mus musculus
ggtatagatttaaatatgaaactaagaatccaaagcatgcggctggatctgttgtctctgttgattctagtacagcttgttttcctgtttgtaatccaagtaggattcacttacaataaaaacaatacaaaccaatgtctgaaaggagcaaggcctgtctcccacatctcacccacagttcaactttctctttagtcatagcttggcctttctggtcaaccattttgtatcttttcctctttaattgcattatttaaaatatcaagtacgtcaaaatgtccaaatatcagctatgtatgcagtgcctgtgagattcctttccatgttacagaaataatttttacctggaccacaggctctcatacttatcagtaaaggttagcattctttggtctgactgccttcaccatgttgagctataacctgtgtttgaatcagcaatgatagctaatgactgagtttggtaatttacacattctctctatttgttgttgaagaaatagctttaacaaccgatgacacctttgatttatcctaacttcatgcactggaagctatcctttagctgattaaaaaacagtctgagtccctgggttctgctctttttctgaaaggtaggtggtgcactgaaagaatttaagcaaaatttatcactagagatcagtttgaattgctgggacttggatgaagaatagaaaccaagtctagaaaatactggtaaatgaatctgcatctctggagctggagagatggctcagcagttaagagcatgcactggtcttacagagaggaccagagaccccttcctagcatccattgtctggtggctcacagcctcttataattcgagttccagggtccaatgtcctccaggcacctacacttatgtgcaaatgaacccaattaggcacacagacataattgaaaataataaaataaagtatctacaacgttgtatgttttgatcaatgactaatattctataacaaattaagccagtgtaacagacttattttaaaatgacatccagatcctagctgtgtaaacttgaataagttacgtcatctttgtatgcgtctgttgatcttaaaacaaagctgatagcagttactttacagagtcactacaataattctagtgtgctgtatgccttgaatgcctggtgttagtgtgacctagaatcctgatatgtcact

SEQ ID NO: 33932 - DNA, 1165 bp, Mus musculus
tgaatcaaaatagtttcttcctttatctcatatcatactagctaaactgtttgtttcttcattaaaatggatgtactttattagacatcttataaaatcaaaacatgatttataagaaaagaggaacatataaacataatatttaatgattattataaaattatttcaaaaagttcagaaaatattaaaaacataaagaaagaaaagtaagggggtgagaaagatggctcagtggtcaagagcactgactgctcgtctagagaactcaagtctagttctcagcaaccacgtagaggctcacaactgtctggaagtccacagttccaggggatctgatggcctcttcatggataccaggtatgcatgtggtgtacaaacacaaatccatttatctataaaacaaatatttagcgaaaactaaggtctttaataatctcttacacattgcattcagtaatggaaagtttttgggttgccttgtctcataaaaagaatgccatatggtttacaattctctgaaatgtatttctttttctatttccaggggtgttcctggtcagttatatttgtggatctcgatgctcacaaccgcaacaggcagacattgtgctcactgttacccagagaatcacgctctcatgtgagatgatgttacagcacactgaaacaaattctttttttgttgttgttttgttttgttttttttgtttttcttgttttttttttttgtttgttttgttttttcaagacagggtttctctgtatagccctggctgtcctgggactcactttgtagaccaggctggcctcgaactcagaaatccgcctacctatgcctcccgagtgctgggattaaaggtgcaccatgctcagcttcatttacagtttttattttgctttacacactcttcaagaaagcacactacagtgtggagttcctgcaggataagaagatgtaaaatagatctgcttctgtccttcagcctccagggctcatgcaggaagtaaacagtgataggcgaagctgtcctgtcctttaagcctttggttagacaacagagaaatagatattatttctcttttggagaaattagcaaaagtagcctaaacaaaaggaacagtattttttaaatgggggcttcggaaaatatatatcatctaagca

SEQ ID NO: 33933 - DNA, 1102 bp, Mus musculus
ccatgctgtgttcctcccctatatccttattgtatatgttctattacctgccctcctatggccttcaccttcactctcccttgcatcttctgacctgctggcctctacagacactccagattgaacatacaaacctgaaaactcaaagctagcatctgcagatgaaagaacatgcagtgcttgtctttctgggcctgggttactcatatatatatgtatgtataattttcactgtgcattcatcagttgttgggcatctaggttgatttgttcagagctattgtaaatagaacaacatggagtgtggatgagcaagtatctctgtggtctgtagagttctttggatatatgctcaggagtagtgtagatgtcacatggtatttctcactttttgaggaccccacactgatgtctgtagtggttgcacagtttacactcctataaacagtgcataggattactctttccacatcctggccagcttctgctgtcttttgttttcttaatggtggccattctacctggggtgtctaccaggctgcagttacctgaggtgtaccacaggtattataagcacattgttgtacagatgagtggttttcttaaaaaaccaaaacattttatttaattgttactagggctagacatttttcattaaaattatcaaaaagtagaaattttgctaatttctgtgaccttatgagaagcaccttggaggatgaggggttcactttggctcacggacttcctgttcatcatggtgggagtagtatcgtggccatgtgagcgtgaagctgcatgcccacatggcagtgggcctggtgtctcgcctgtgctctcctttccccaccttgttcagtacaggatgagtgcctacgggatggtgccacccacacttaggataggccttcttccaaattaatctccactggaaatgtcctctcagtcaaacgtatgccccagtgctctcagtgtttcctaatctgatcaagttgacaataaaaattaactattatgaatctcaagtgtattaattactaaattgtaatgtaaagaaagctatatgccttgaacctgggcagtgttccacaataatccataa

SEQ ID NO: 33934 - DNA, 1299 bp, Mus musculus
ctgggggtgcctggggacagttgaagcagggacacagaaaccccgcctaaccattggctcaggttccttctggtcagcgctggtctactttggtttcgaacttagaggacaaccccacagtccccagaagaggtaccacttccaggcattctatcacacccaggatcttaggatcccaggttcccaggtgcttggtcacaccaggatctcagcatcacaggataccagaatcacaggatcacaaagaaagctggactctgagaagtactacctcaactgggattacaggaaggacaggctccaatcagatatatcgaggtcagggagcacttgtgagaaaatcagatggcaggaagcaagcttaaaaacagaagcaagagaaaccaaggttacttggcatcatcagaaccctactctcctaccatagcaagtactggatacaccatcacaccaaaaaagcaagatatggatctaatctcacttctcatgatgatgatggaggactataagaaggacataaataactcccttaaagaaatacaagagaacacatccaaacaggtgaaagaattgaatcaaatcatccaggagctaaaaatggaagtagaaacagtaaagaaatcacaaagggagacaactctagagatagaaaaccgaggaaagaagtcaggagctattgatgcaactataacagaatacaagagatagaagagagaatctcaggtgcagaagataccatagaaaacactgacacaacaattaaagaaaatgtgaaatgcaaaccaaaaacatccaggaaatccaggacacaatgagaagaccaaacctaaggatactaggtataagagaagaaagaatattttcaacttaaagggccagtaaatatcttgaacaaagttatagaagaaaacttccccaacttaaagaaagagatgcccatgaacatacaagaagcctacagaacaccaatagactggaccaaaaaaagaaattcctccgaacacataataataaaaagaccaaacaacaaatgaactaaacaaagaatattaaaagcagtaagggaaaaaggtcaagtaacatataaaggcagacctatcagaattacaccagacttctcagcagagattatgaaaggtagaatatcctggtcagatatcatacagaccctaagagagtacaaatggcagcccaggctactatacccagcaaaactatccattaccatagccagagaaaccaaggtattccatgacaaaaccaaatttacacaatatctttccacaaatccagcccttc

SEQ ID NO: 33935 - DNA, 1099 bp, Mus musculus
ggggagcagagagagggtggagaggataggggattttcataggggaaactaggaaagggaataacatttgaaatataaataaagaaaatatctaattaaaaaaaagtgacagttaaggtgtgctcatctgctcttttgatcttgtgaagaaggccagtactccaaatatattttagtcatgtgagctaatttctaggctcttaatttcatgattagggagggaggtcaaacctaccatagtctgggtgaaaatatatacttgttcattttttcattcacgggggaagggtgattcctgatttgttttcttaaaatataaatatgtaaaattctgtatgaggacagtcatggtggcacatgcttttaatcccagcaaagacagaggctgagtcaggcagagcttagtgagttcaaggtgactctggtcttgctgtcaaattatgggcagccagcgctacatgtgagacctcgtgtggtgattgactattatgaaaatatctcctactttcgaagagactaaaactttcactggatgtcacagccagagttaataatagaacttggagtcacagtttaagactattatcatactgtgtgttcaaacagtttttctctttctttcttgttcatttgttttttgagacaagatctctccatacatccctggctgtcctggaacttactctgtagaccaggctgtcttcaaactcagagaactgcctccctctgcctcgagagtcctgggactaaagacatgtgcccaccatgcccagcctcaacctgttcctttagcctgccttaaggggacaatgcaacaatccaccttacttgccttggatttcccttgccatcagcatttacaacctaagctaatgcacaactgtaatcttaaattatgcatccttccgtgcacctgacacatcccaaatgaatgtatcattttttgaaagcagaaaatacagacattgatagcaaccttcccaaatgactgaatatctaccataaatgcatagtgttgaacacatttgggtagtttgataaacaatgattcttataatactatttgttatctgggtactttggagtcagtaacttaata

SEQ ID NO: 33936 - DNA, 1184 bp, Mus musculus
gaatttttctctccttgttgaagatatgctgggaaacattgaccagccaaagtatagacagatcatagttgaggtttgtattttttaaaaaaattagatcaccaaaggcttactttctgtctgctcaccgaagaatagtatggaaaactaccctctcctccaagagactgagaactctgcccatcacctgtcagctccttcaataaagtcctcaagaagatggatatccttgacctgggtcagagcatacctaccattcaagtaccttaaactccatcaggtgacaaaaccaaacagaccagccacccagcttcactcatcataggcagccactgcatcagcattgccacaacagcaggggtagtttttagttttagctttttcctattacagaaataatacagtactaatgtagaatgttgcaacagttcagagcaatacagggagcaagagatcatggctgctcaagttttgaaggacatctttcagaacatcagcctatgaagagaagacattgtgtagcacactagagtgcatgcacctgtgcacacacagtcacacacctgtgcacacacattcacacacttgcccttcctgtgcacacacattcacatgcttgcccttcctgtgcacacacagtcacacgattgcccttcctgtgcacacacattcacacacctgtgcacatacagtcacatacttgcccttcctgtgcacacacattcacacacctgtgcacacacagtcacacacctgtgcacacacattcacacacttgcccttcctatacacacacagtcatacacctgtgcacacacagccacatgcttgtgcaacacagtcacacacctgtgcacacacattcacacacttgcccttcctgtgcacacacagtcatacacctgtgcacacacaatcacacacttgcccttctgcctccatgagatgttgtacagtgaattcaatggagaactgagtgtgtggccaatcctcccattgcctctttctctggcagtgtctctgtcagacattctattcttgcaaggaagctataggtcttgttgacatagaagctagatttggcccctgatcagcccgttatttctggagctacagctaaacctgggtgacattcatgctcatctctgatatcctatcatgttgaatagtatggtccagtcatt

SEQ ID NO: 33937 - DNA, 1100 bp, Mus musculus
ttatttcttggggggcattagagattgaacctatggtaggtactctaccattaagctatagcctcagctcttatttgtatttttttattttgatactgagtctcagtaagtactctgtgctggctctgaactcttctgtagctcactcaagtactgcaccagtgatcctcttgcttagccctccaagaagtcagtgttacacacctgtgctaccaggtctaccttggtttgtttctaatgtatgctggatagttttatgtcaccttgacaccatgtacagtcatctgaggagggaaactcaattgagaatatgtttttataaaatcaggcagtaggcaagcttgaatttattcttccctgctaattcttgaactggtagagtaaacaaacctgatcagacatttagacgttgtgccagctagttttatgtcaacttgacacagctggagtcatctgaaaggtgggaacctcaattgagaatatgtcttcataagatactttataaaatgtagggcattttatttagtgattgatagggaatggcccagtccattgtgggtggtgccacccctcgtctagtggtcgtgggttgtataacaaagcataccatggggtgaccactcaaaacagaagcagcagtggagtggagccaacaggaacattaaaaacaacaacaacaacaacaacaacaaaaactgtctgtgtgcttcagagggtggtgctggagaagtggccctagctccttagaggagcctggaagagcatgagggaatcccagataactggacattgtgctacttagacctttggaatttgcttttgctatgttcaattacaactgtgccctggttcttccctcatgaggtaagaaagtacttaacttatatttagttttataggagcccacacttaacagattgaaatgtaaaaagagattttaggtttaaaaaaaaacttaaactgaattttaacgtgtttgacttgtaaaaatgatggatttttaaagtttgtaaaatgttttctattgtgatgttgaggttaatatgtgatcttggggatgtacaagaaaggaaaagtaaagtgacatgtttgtgtgttag

SEQ ID NO: 33938 - DNA, 1104 bp, Mus musculus
tctctactttctgaggctgaactgacagacaaatactgtatcatctggcattacatgggttctagggatctgaactcagggtttcttgtttgcccagcaagcactttaacagtcttgctatctcatagcccatagtctgtttcttattagttattctttggtttaaatataacacttatccttacaatatatctcagatcactgttgatattgactttttgaaataattttgctacctacgtttacagataataaagttctgttgttggaagatatcagtggctcaattttaaaggagatgaaaatcctctgacttctttgttgacaaattttcatctgtaactgaaataggaaagttataaataaaccatttatttctctacaaaacaaaaatagatgtgtcagtaggttcttttttttttttttaactgaagtacagtagatacactctggtgctcatatcctcctcaccacctgcctttgcatataacccttctaaaagaggtttatcgtaagccaccgtggtgtctaatattgactgttaacttgacaagatctaaactcatataggaaacaagcctctgggtatttgtgcaagggagtttcatggttgtgttaattctgtagaaagactcaatccaaatgtgagcatcaccattcagagtgaataaaaaggagagagtggggcaagcatgatggtgcacgcctttaatctcagagctgaggaggcagaggcaggcggattactgtgagtttgaggctggcctggtctacaaagtgagttccaggacagctagaactacataatgagaccctgtctaaataaatatgtaaatagaataaaaacgatggatcaattgatgtctctctgcttactgacagcgaatgtaatgtcatgagctgtttcacactccggctcccatgccttccttaccattttggactgtctgtacctccaactgtaagccgaaaataaatccttcctctcttaatttgtttcttgtcaagttcctgtcatagcaacgagaaaaggaagtaaaggcaggcccaagtttaggtttccccgattaatatatacaaccagtaatgatttttctcttcttg

SEQ ID NO: 33939 - DNA, 1175 bp, Mus musculus
tagaaactccctacccctgagctctataaaattcttgtcttcttcacttccagtgctgcccccccccccctccccaagccccaccttagaggaaggctgcccttgtacacaaatgaaagagcttgctttaattaacgtggccatgatgatttgggtcggcgttctttcttctcccagctttgcgattacaattgctttcctcactttttagggtttgtttgtttgtttgtttgttttagtttttgtttatttggtgctgggaattgaacttagggccctacacatgctaggcaggaaccctatcagtgaactatatttgcagaccaggtttaaatatcttttttttaaagcaattaccttgtgtcactccgtttatatgccttatctccacatatcataaaagcctcacaaaatcagtacagagctgttccattttatgaaggaggaattggctatcagaggagatgacctgttcagaatcatacagcaagcaactcatgcatctgagctcaaccaggttaacctcaaatcatgctggtcttcatagccaacatctggggtacatttctgccccccacaagtgtccaggactctgccacagctatgggagtaagttttgaacactgaaggattaacagggcaaggtgaaccccttacagaattgtgtattacaagggagattcaggggtcacaccttggcttcatctttcttaagaccaacaggccactgtgttagttactttcctgttgctgtgacagaatacctgacagaacaaagttaaggaagaaagggtggatttttttcgccatttaagaggcagtcaatcatgatggttggaagctttcagccaactcctggagtccctaatggatcaataagcagagaacaaggaatgctgggagtgagaggggtacattttgtaatccattctgatctcaaatgtaccatctttctacctcagcctccccaaaactaggattacaggcaaatggcactgtgcccaacagtgtactacttgaagaggagtttcaagtgactgtcctccaagccaagcaaccattagctggagagatttagccatactcccttgtttcctaccgagttttgtgtacaactctgccttaattgcatgtggcctggaagaggggctaaagtacatagattcggtaagaat

SEQ ID NO: 33940 - DNA, 1195 bp, Mus musculus
ttcccagggataccaaacccactggagaccagaattctaggtttaatgactttattaagccaacatttctgtaataaacaactacttaaacagactcattgctatcttgattatatccacagattagggatattttgcttgatcatttggtgcctcaaacaagctttgcctcataattaaattcagcttatgttcgggcctatagtttgctgtcaatgagaccaggtctggtcttgacaggaaagccaccatcaaaagctgcatttagaacttcatccaggcagcttgctgtaacaaaacttagatcctgtctgacgttgcttgggatctcttcaaggtccttttcgttcctctgcggaattatgatctgcttcagtcctgctcggtgtgctgctaggactttgtctttaattccacccacctgccaggcaaaagaagacaactctcaaggttcatgttcactgccgagcgcatctaccttttactgaaccatcactgacttagacattcagcccacctcccaccttgggatagtatgagctgggaggccactgaaaagcttaatggtaacctatattaaaaccttttaaggagagaacctgtaacctcgatggctatggatagttttaattgtcatttgcagccttgtgtttaggttgattgtgcttggttctactattcctagctagaagaaagaagtctgaagattttaccataaagaaatgacaaatggaggaaatatacatgctgatttaaatgttatgcaatgtgtacatgcattgaacatcatgctatctcaatacataccatttttgtttttacaaaataaagatttttaagttaaccaaacagaactgctcttacacaggaagctcagtgtgttccaggattattgtcttcattaccacaaagcaaggcttttgtgccacctaaaaatgagaacactccaaactagactcttgtaaggtatttgtttttgttttgtgacacaatcattgtagattggctcggccttgaactcctagagatctgtctttctctgttccctgcccccaatgctgtgattaaaggcacatgccactagtcctcgcccctcttgtggctataaataaataaataaaaataaataaaaacaaaaccctaaaatctatgcccataatgattccttcacaaaagatggagtctaaattctctt

SEQ ID NO: 33941 - DNA, 1140 bp, Mus musculus
atttcatgttagtcttggagaaacaagaaaaatatgatggtcatcagcagttctttgcaattgtacaactgataggaacacgcaagcaagctgaaaattttgcatatcgacttgagctaaatggtcataggcggcgattgacttgggaagcgactcctcggtctattcatgagggaattgcaacagccattatgaatagtgactgcctagtgtttgacaccagcattgcacagctttttgcagaaaatggcaatttaggcatcaatgtaactatttccatgtgttgaaacggcaatcaaatatttctggccagtgtttaaaatttgcatttgacttcacagagaataaggcacccatctgcttgccaacctaaaactttcctggtaggtagaagctagacatgaaggtaaataaaaagaaaagctgttaatacaggaaacagttgcatgtagtaacactaatatatttaaaaataattcaacagtaaaccactgaaaaaaatatatatacccaagatgggcatcttttgtattaagaaaggaaacattgtaaaatatttctgaactttgtgtttgttgtagattgattgtattgttgacaattttttgggggtgtgtgtctgtgcacgcatgcgtgcacgtgtgtggttggttttcttttaactgacaagccatctgcgtggtcatagaccactgttttccccttgtgagtcaacacatagtgctgctgtgggtttgtttttgtttttctgttttgtttttgttttttgatgtgtgtatttgctaatttttattctagtttttcattaaataaatttgactttcttttctgtaattcaggtttttctcacttttgtaccttttaagttagtgtctttttgatattcataattgcttaatgtcaaaagtttgtgttcagtacatactttcttttccttcaatcaatttattagaaatatttttaatttagcccttttgtgaaaataggaattccagaaaggcaaggtagcagagcagcagtcaaggctgaagtgagtgcaggatgctcttgtctctctcggtgactgtcccatggagccacacgtcaggtcaggctgactcttagaaagggtaggttagggagtaaactctgatttatata

SEQ ID NO: 33942 - DNA, 3674 bp, Mus musculus
cttcttaaagtctattttcttgaggtaatttgtcctgttcactaaacatggcgtgtgctcccctgccttcatccctagagtgggcctgctctgctcttgtggggccttctcagcgagccattatgagagtgaagaagtggagccactagatggcatctgacacccgggctgtcaccagtggccagacaaagtcagactgaggagcaggtgggaagtcttagaggacgtacagccccagcatgctccctgactggcgtagctccgtagtgcactcaccagccatggccgccatgctcccaccctggctccacagctaccttagcctcagaagacaaggtaggcactgaagcctctggtgaggagacccccccccccccatgtggcgtttgtacagctttgccaaaaagttttctattctcaaggatgacccaagccaataaatagcattagtcctttcagaagggcctcaaagcccctgcatttcccttcttttgtctacttagaggtttcttagcagcaattcctgagtctttcagaaccagttatctcagtattgtctcttctcggtgtagcttgaagtctgtgtctgtgaaccccctcctggtcattcttagtgtcttggctctcacctggaccttcaaagggctttgtgttctccatccatgcagtctccaggcccttgtggttaaattcactgccctgtggattgttgttctcccggtcccgcaggtaaccgtggacttggtgctggtttgttatccgtagtgcagggactgtgtagatcacagaatgctgccaccatgccgtgtcttggttcatttggtccctgcacccatcaggagatgaacagagccttctaggtggccatacttacgtgatctctcctgaatttgttgatgatccagcctgctgggaagctgtttgtcatctgtccctagggggtttcagacctgcaggctgtgtgagtacagaacagagacttctggccagccccaggagttgacccaccacagtcccccacccagtgcctcagcttgggagcacagcaaaggtgccaaggtggagctgtctccagggcttcctggtgtggtcaatcccagcccagcactgctgggaaccaggagagccgggagtactccatagctgcctcagcctgatgctggcctgaggagcacaggctctcaaaggcccttcggctagcctgatctttgagttgtgtgcctctgtgttcttagtattgtttctgagagatacctgcccatttccccttgccccatataggagggaggaaaaagctggaggaaaccaaaaggcattaattactttgtagattataatgtgaaatataattctagattctttgtgaaatctgtcacatttaggtataacatttacagcccagttatccagccactgaagaaagctcacaacttgcttctttgcctcatccaaagctctgttgctgctaggtgcttgtagatgcttgacctccatccctccagtgcctcctcagtgaacttgggagcgtcttggaattcctccctgtgtggagtgcctctgcctcctgtgtatcctggcatttggttgaggcggccagtgcagctaaggctgatacctttggtcattggacaaggtgtcgtgtgtgtgtgtgtgtgtgtgtgtgtgtgtgtgtgtgtgtgtgtgtgtgtcctggtccagtgtggttgacaggctcagctgtatttctaggacatgttaggcatgaaagagagctccacctctccttgccagtcccaagtacctagccctccccctgggaggggcatctactgcaggccctctgcaccaggctcacccaggcccttgcctgctccccatacctctccagggctgtccctcctcagcattctgagccacctcagctgggtccatcagttgcactgttcgcccgaatcgttacttggttcctctgatccctttagttaaaacacccttcgttctgttgctaatgcttctctctggcttcccactttcccctcccagatttggaaacttggcttctgcccaccacatgggagtagcctgggaaatcactggttgccatttcatcattaatggagtagctacagacagcaaagccattggcctccctttctctgttttccttcttgaagcgctccattcctttcttcttgaaggcctagccttaattcagtttctcagcaggtggctctcaaggtgaaccaccccttgggcttacagagaaaagggcaacccttgctacccttgctaaaaggcaggctgtcaatctgtcaccgccctgagggatggactcagtgctttagaggaaagctggtggcttgtcactgccacacgccttgagtgcagggccctggtaggtggtctggaactggacttccttaggagtcgccactctcctgactaccctccactctgtgacaccagtcctctcactaaccctgtgggatcttggctcccagaacctcagcctgcatcctgccatctctcacctaactctgaggtcccttaaatccttcttggcccttggcttgctactgcctaccacctgttcccacaatcctccgtgacaccgttccctccctcattggctaccttacagctcttccctctccctaattccaggggactccaagttcatctagagggccattttgcatcatcctcttcctctgtgatcttcgaccagagcatcacgttcctaccctctgagccatgtgtccgcggctgctgccccatggccgcacttgactgtctgctttctcttgccatgatccttactccagccacccagatctaggttccccataggccctgttcatgtttcttcctctcatagacatgcccttcttccctacagcctgcctcctcaaaggcccagccctgagttctctttgtgttcagagcagaagcagctctatgctattctgtggccccatggcaatttggtgtcttgcttctggctcttaccactctggccggtgtagctgcagccaactgtgtactgtgttgcctccctctagactgtgagctcctcgtgggcagggaccatatggtcactctgtatctcttgtggcacctaaaagtgccttgcacttggtaggtgctcaataaatgtctgttcaagtgagagctggagggtggtgctttcttgactgcggctttggcaagaggtccctggaggatctatggtgatcgtgttcagagacgggacccacctttgttcaatttgggggtgggtccaattgcctggctcgatctgtccccctttggaggtgggggtgggaggaattcagcacataccatcctggacagagttgcctagccctggaatcctgaccagatggaaccatcccgagcagtcagttggcccaagcctctcctgacagccttccttgggattttccccattgctagttggagccgaggggtgatccatagcagcctttggcaccgttttctaccatggggaagatgcatggtcaagagactcctggccctgaggttctgagctccccttgtcaaggaagcgctttctcacatgtcaccaggcccaggattctctgttgctgaagcagtttcatgttggaattaatcccttgagatcacgtgtgtgctcctagtgaagcgcctcactgtccttagcaaagcatggc

SEQ ID NO: 33943 - DNA, 2453 bp, Mus musculus
tacttcaaccttattgtttctaaatgtcttcaagaaacttggaagcaggacagtcatttttgttaattccagaaaccaaaggcctttattctctcctaactcagtaaatgaatccagccttgggattatccactgtgtagctaggcaagcccctaagatcacaatgcaagacacagtgaaaaggttatacattcccactctgtaaattatacaaagtttcagttcctctaaagttgattaaatagttcagagtgaaacagacaaatagcctcacacacacactcacagagttcagatctgtactttattctcattgaaatcaaagtatgttgctccaaattatagatatgtgtagtggttaaaaaaaaaaaattcagcctggctgttgacagtcatgtcctggggaactggtgaattggtctaactttgtcttctcttcacaggagtatatcaaggggatctgcgagccggagctggaggagaaagagtgctaccccaaggccatgcactgcatttttgtcggggcacaaagcctctttttgaagagcttaattcaggatacgtgtgctgacctctgtgttttagatactgggcttcttggcatccgaggaagcgctgaagctgtggtcatggccaggagtcacattcagcagtttgtgaagctctttgagagcaacgagaacctccccagtaatcagagagagtcggaaatcaaacgggaattcagacagtttgttgaagcccacgcagacagttatacaatggacctgttgattctgcctacttccttgaagaaggaactactgagtctcacacaaggggaagagagtctgtttgaaacagatgatgatgtcattactgttggagatgtacggccaccagagtacacacagagtgctgccacaggaccgagtagtgctagagatgaagttgttgtacaggaagattctagaaataaagctaggacccctgtttctgagcttacaaaacacatggacacagtcttctctagttcaccagatgtgctttttgttccggtgaatggcctaagtccagacgaagatgctctttccaaagacagagtttgtcacaagaggagatcttctgatacggaagaaaggcacaccaagaagcagttttccttggagaatgttccagaaggggagcttttgccagatggtaaggggtcagctggaaatgaagttattgacctgtctgatcctgcttcaaactctacaaatctaagccccgatggaaaagacactacagaagaaatggaatacaatatccttgttaacttctttaaaaccatgggctattcccaagagattgttgaaaaggtcattagggagtatgggccttctacagaaccgttactgctcttagaggaaattgaaaaagaaaataaaaggctccaagaagaccgagactttccaccttgtactgtgtatccagatgccagtcagagcagaaatgcaggggttgggagcaccacaaatgagctcacagcagactccacgccaaagaaagcacagagtcacacagagcaaagtatggtggagagattctcgcagttaccgttcaaagactctaaacactgtacctcaaattgcaaagttaattctttcagaacagtgccagtaggacaaaaacaggaaatctggggttcaaagcagaactcaagttgtactgtcgacctggaaactgatggccactcggcctctgccgcctctgccagccctaaagacatcagttttgtttcaaggggagcttcagggcaccaacagagaaacccagcttttcctgaaaatggttttcaacagcaaacagaacctttgcttccaaataatacgaagcctgcctgtgaaaagcgttctggctcctgtagctctcctcagcctaagccaaattatcccccactttctccaccactgccgctgccccagctgctaccttcagttactgaggctcgattgggagggtcctctgaccatatcgattcctcagttacaggggttcaaagatttcgagataccttaaaaataccatacaagctggaattaaaaaacgaaccaggacgagcagatttgaagcatattgttatagatggaagtaatgttgcaattacgtaagtcactctgcagatcacccttacacagttttctaagcagtgtctgagggtgtgtgtgtgtgtgtgtgtgtgtgtgtgtgtgtgtgtggactgtcctttgtgttccagtgaatctgcatcctttcttgggggaagaccagctgcttgtaaagttttgcatttggttttgaaataattgtttacaaaataaatccaggcagcaggctcattgatacccaccccaacaaggtttatgttcccaaatgagtcacataccgcctttatattttaatatgccttagtcagcacagtagctgggccacttcctaacgtccatgcggtt

SEQ ID NO: 33944 - DNA, 1190 bp, Mus musculus
tatgcactgtatgctgtgtttaacttctgtgtatggaatatggcacagctatgttaaaaggtgggaggagaaaggatccaagaataaacttaggtctgtgaatgtagttcagtggtagaatgcatacaagtttcaccctttggttcccagcacaggaagaaagcaaaacaagagccttgatcctgtatcttaaatgtttacgagtggggaatgggaaggtggctcagtggataaagcacgagttgcataagctgggaacctgtagtttgaatccccacaacccacgtataaggtgggcaggcacagagaccacctgtaacccagtgagtacgcaggaggcagaggctgggttccacaccatagcccagctgcccttgagttcatgtccacctccagcacttcctcctaagagctgggattaaggcagattgcaggtgtgagttgccgtacccattttttattgttttctagtatgtgcatttgtgtcgtataaatttccttttcaagctaggcatgtttgtctatgtgtgtgatcccggcataggggaggcagaggtggaaggatcaccaagctaaggctcacctggtgatcttcttagtggattgtactaggtcagttgactgtgttgagactgttggaaagaccagtgagagtaacataaacatccctttcagggctgctcctgtctgccttgatagttcatgttctttttatttaattcaatgcattcctaagaaacttcccctggggggctgtggtgcagctcagcagcggaacacttaacttacttagcaaggccaaggccctgggttcatcccagcactgtgaaaaagaactcacgtgtctggaagatccatggccttccaaagaaaggaacagaaaaaggaaaattcccttgacctatgagttacttagaagagtgctgttcagcctggggaggtggcgcacgcctttaatcccagcctttaatcccagcacaccggaggcagaggcaggcggatttctgagttcaaggccagcctggtctacaaagtgagttccaggacagccagggctacagagaaaccctgtctcaaaaaaccaaaaaaaaaaaaaaaaaaaaaaaaaaagtgtgctgttcagtttctactttccaatcattaggagattcttcttatctgtaagtgatttgtttgattattttgtggtc

SEQ ID NO: 33945 - DNA, 1101 bp, Mus musculus
cactcttaagtaactggtgtggccatgggcaagggtactggtgctggatcttaatcgtgattccatcggtcacaaagtattcacttctctggaggggtgagaactttcccatctaaattgctcatggagcagaggacacttagattttctttgacaaaacatctaacaataagcaatttgaagaaaagttgatatctcttgtgtatctaaatgatatttactggtgacatgtcaatggaaatggaccttaaaatgaccttttacctgcagtttgacaaaatggcatttcaccctgtttctattttatttagggatgattttttttttttaacatatatgagtattttacctgcatatatgcctgtgtagcacatgcatgcagtgcccttgaaggccagaaaagggtatcctctggaactaaaagttacagagggttgtaagccaccaatctgccatctggaaaagcagccaatgctcttaaccactgaagcatctctccagccccgaacaacacattaaaaaagcagtatatcaaactagccatggggacacaaactttaacagcagcatttggactgtggaagctgagaactcatgagtcagttcaaggccagcctggaccacagaagacctgtcttacaaagcaaatgtgggccatggtcacaaagaatataaaatagtctcccttagctaatcttctgaaggagaaaggaatgttttatgaagtttgttgctgaaatcagcattgtgtaccccgccactccagcgtgctgttcatgaggctgtgtctcactctgcagccctggctggcctgaagctcacacttctgacctgcctcgctcccctgaggttagggttgaagtttagtgtcatcacacacagcaagaacctttatggaacattcccttttaaaggaaattgtcatttaagagtaaaaggagcactctccctttaaaaaggaaagtgaaggaaaaccattgctaacagtcatctacctaagatgttgagggctggagagataggtaggtcggcagttttaagagcaaggacccaagttcatttgccagcacctgtgtcaatggctcccgacacctctgccag

SEQ ID NO: 33946 - DNA, 1187 bp, Mus musculus
actccgaaagggtaaaaccccttttaaagtcacaagcagactttcagacaggcaggtaactcatgaaccagagctagctagcctaaacataggcgtggtggcctgtgcctttaatccagtggttttcaaccttaaccctaagaccatcagaaagcacagatgcttcaacaataagatccataatagtagcaaaatcagttataaaatagcagtgaaaattttatggttgtggatcaccacaacatgagaatcggggttaaagggttgaaacattaggaaggttgagaaccactactttaatcccagcactcaggaagtacaagctggctgatctcttgagtttgaggccaagcctattctatatagtgttcttcagtccacctggagctacagagtaagaccctctctcaaacaaaacaaagaatgttggaatgaagccagtgaattagagaataaattggctacctaatatctcacagagcaaagaaattttactctttagggctatctcttctaccaactccaagagttatcatcttggttgtcgaaactctgcatttcaattaattgattgattaattttcaaaacaggggtctatgtatccaaggctgacctggaattctatgttatgaagaatgctgttgacttttttgttttttggtttttttttttttggttttgattttggtttttcaagacagggtttctctgtgtaaacctggctgtcctggaactaactctgtagaccaagctgaccttaaactcacagatatctacctggcccagccattctttcgtgtttaaccacatcattgttgcaggatgttggcccatgtttctaaccacctacagatattagttagacattgtttgctcagggtttctcagcagcaatgtgatttgggtcatataatttgggtgtatggggagaagtgtactatatctgtaggatgattagcagcgtctgtcttccaccctctagatgctggagatgccaagaacatcttctcaagctataaaagccaggtatgtttcctgatgttgccagatgtctagagaattacatctgcttgggagtaactgaatttgatagctaagagtagttcccactatctagaatgtgcaatttactggatttgtgatatacattacaatttaataagacacttgtgtttataaggcagag

SEQ ID NO: 33947 - DNA, 1216 bp, Mus musculus
catggttacctgaatgggctacacacatttgtgcagttgggggattcagagtgaaataagaagccatatctaggatgtagccttgactgagctgaatttttttggcttgctgaaacctgggtttaagatctcagacacactctttgctgccagacctccgccatcatgggtcgcatgcacgctcccgggaagggcctgtcccagtcggcgctgccctaccgccgtagcgtccccacgtggctgaagttgacgtctgacgacgtgaaggaacagatttacaaattggccaagaaaggcctgactccctcccagataggtgtaatcctgagggactcacacggggtggcccaggtccgttttgtgactggaaataaaatcttgagaatcctcaagtccaaaggccttgcccctgacctccccgaggatctctaccatttgattaagaaagctgttgctgtccgaaagcaccttgagaggaacagaaaggataaggatgctaaattccgcctgattctgatagagagcagaattcaccgattggctcgatactataagactaagcgggtgctcccacccaattggaaatatgagtcgtccacagcctctgctctagtggcataaatgctgttgtgtgcacaagcaataaaatcactttgagtaaaaaaaaaaaaaaaaaatctcagacactaaagaggagccatgggccgaagactcaccagctcagacgttcactaagtctaagcagggaaggtgtgtggtgaagtgtgctaagcagagatgtgggaagtggcaaaggaaaaccaccccaaagagaacaccaatccttagctcttccctgatctcatggaggaaagagacctcagatcaacatgtcttctggtttttcaggagaagctagaaacctggactttcagaacacatacatttcttaagcagtcgacagtcaatccaaatgagtatttccaaaacacggggaggggagacacacatgtgacattttcactgagttggcctggtcatctctagagtaggagagatttagtgcaaaggagaggatgagaaacacagcttggtcaacaaaggagaggtccaaccatgccagagctgtagagagaggaaacagcccatcagctctgcagaggaaggcctggtgtcttataagacattttgcaacaagattgcacaatcagtgatgaaatggaagtgtcttagctcc

SEQ ID NO: 33948 - DNA, 1748 bp, Mus musculus
ctacgtgttcgtagctacactgggtaccaaggtgcgcgccgccggcggtccaacttcgtccgctcccttactaagagaagtaaatttcgcttagctctgcacactcccgtttccaaaattaatctcgccttccccaagccagtcgcagtaatcgaggaagagacttgccttgtcattatggttccttacccacgtccatgtccctaacaattaacgaagtaatgtgaaatgtttctcccgacccgacccccctctgaaccctgccacttactgaaacttagtatgcccccctgccccagtttgaagagggggtcagattgtttttttgtttctgtttccgaatggggcaggtagttttaataacagattttgctcttcaaacaccgcgccagttaagctggagagaattcgtccccgcttgttagcgaaggaaagactcaccttcgtggtgactggtttgactatacataaatatgtatatgtatcatttgtacacgaagaactcttccaggtggacgctggctgtattccgtatttctgtcctgttcggagtgatcgtgaaatctaaggctgcttggtgtttgttctctgatgcttgtcaatgccccgtgttctgtggctccaccaaccgccaaggaggttcttcgggacgcttcttcttcctctgtaacatacgtgtgaatagccaaattttaattttgctttaatccaataaagtcaaagtgggacttttatttttctgaaacagctttctaaacttcgccttttccgggttgcgaggttgaggcgggcggagaagcaagagacttggaagctgcaaggagaggccagggcacaaggccttcttcgcagagccatttctgcgctgtctcccgcagcaggctccctttgcctttcctgtgtcccctgctttggtggaaagtgagatataagacctaaatcctgctaggcgtgaccgagggcctggaagcagtttcttgctcaccctcaattccaaatgcatcaggaattattcccaatcctagtactcgaacccgcctgccccgcgtgactgtcttcacgcctactttccttggatgtctccagctctatccgctccgcggcgcccgaagcacctgacactttgtaccagcgcctctgaacccgaggtccacccgccaaacaaacccgggcggccggactcgcgattgcgctcattcgcaggactttcaaggggttcgtccagaagttttgattgtaccgaaacataatgtgcaaagcaaaattgaaataaacgacttcgttttaagtctggaacgctgaccctgtgttgaacgcgggtgacgcaacgccagaagcgggaggaagcggagggtccaagaccgagatacgcagcccgggtgggcgctggtggtcctgagcccttctccagggttttcatgggctgaggttcagtttcaagtttcaatgttttttgagtgaggggtgggggaagcagggcttaacagtaccgcgggcaaaatttctggcatttctgtcttctgcccccacccccatctccggctctttcttagcttaaagtgcttctggcagccacgcccttcccagggctaggggcccaggggactgtaggggacaaaaggggggtttctgaagtgagatgcagtcgaatgtcagtctcttccagccccaccgttcccttcttttctcttttcagtctcaccgggagaggggccttatgggaaatttaataaaaaagcgaattcttt

SEQ ID NO: 33949 - DNA, 1136 bp, Mus musculus
atttttgaagaacatccatgtatatttctatagtagctaattgacattcctatcaatacttgtgtgaaagggtcataaaaaaaataaaataaaataaatccctgttttcttctcattcgttcctaaatggtatgagagatgaaagatgagaggtgagaggtgagagatagagagagagagagagagagagagagagagagagagagagagattgggattattggcttgcccataccttccattcatttctacagctgcagcataaaaactgtatttctgatcttaggaatggttgctggcagggagctggggagctgctcagttggctcatttctcaagcaaaaggagctgagttccatccccaaatcaccggctaaagattttaaaagaagaggaggaggaagaggaggagaaaaccaacaggcttggtggtatacatggaggaagtggagacagttgggtccctgggacttgctggccagccaacctagaatagttggaaagttccaggctagtaagaggccctctataaatgaatgaatgtggcagtactatagtgtaccagttgaagttatcgtctgccaccctacacacatacgcacacacttgcagggatgcttagaaaaaagaggaagccagaggaataaactaaaagcagttagctgacccttttgccgtttgccattttggtggcaggggcgggggtgatgtgttactaatcctgcactactgtttaatatttcagctttaacctctttctgctcgaagactgaatccagaagctttaatctggccaccacttaatgagagggcatttgcttttcttgtagttctggagttcacacacaggaaatctctgggctttgtaccaggctagatggtagtgcctagtgatgatatgtgtgtgtgtgtgtgtgtgtgtgtgtatgtatgtatgtatatatacactaatatatccttttgtaaggcatattagtaacaaaatgagaagtgacttcattaaattgaaatgtttgatgtctcagtatgcaaagtgagtttgaatgtatacatcgcacacattgctcttcccaattggggatttcacagcatttgaggattaaggttgtgggtcatttcattttcctgccatttta

SEQ ID NO: 33950 - DNA, 1179 bp, Mus musculus
aatagtgtctgcatttgatggctgattatgggatggatccctgggtggggcagtctctggatggtccatcctttcatcccagctccaaactttgtttctggaactccttccatgggtattttgttcgctattctaaggaggaatgcgttggttttctttcttaagctgctcttgatcgccgcctgctggcccatcaactgggtgaacccgactagaggagaagcgtgacctcccacccaagcaacaaaatgcagtctagctctcactctgagcaaggggccacaagagcagatgtccatccgctgtggccagagtttaagacattcaaatcctaggcgagtattcaggtaaaaaactcaggatcctcgaaatgagtagctggggggaaaaggcaaaagcagcaaggtaagactcaacttggccgcgtgcttgcttgtttgtgtctatgtgggaatgtatacacatgtgcctgtgtgttcaccttacctgtgtgcacctgcgtgtgcgtgcacgtgtgcatgtgggtctataggtgcacactggtgcatgagtgtgtgtgcctgtgcgctctaggtgtagtcctgggactggcgactgtcccgtgtagatttgttgctattctgccactgaccagcagatggcgagagtgcagcgggaaagtcaaggctgcaggcgctttgctctgggctggaggacaggggagatccaggaccagagagcactttgtgctatagtggcccatgggcagtgtgacccacattgcaggcaactccgaggacgtccagagccagagctgcgggcatgctgactttcctgggagacggtcaaggctggtttctacaactcccttaacttttcagacttcccaaagaccctctgttcaagtgcacttctctcaggagctagggcttgcatctaagaaaggtagacagctcagccatagaccagatgcaaggatgcgggcagctggattgggacagccggccctggtgctggactgttgtgaccttgagactcaccgctcctcttattgccatttcctcactccaaagggagttgtgctccaccacttggctgaacccagtcaccaaagtatccagggcaatgctcaggctatgtccccgaaggcccccaaccatggctctcaaccaggcctcagatctccttgcctggtgctgc

SEQ ID NO: 33951 - DNA, 1175 bp, Mus musculus
gcaccagacactttgccccccccccccccccccccgccagccttcttccaagaacccatggtacatgtatctgttatgtgcccgagtcatgcagatcccaactagcactgatccggggtgtctggaagtccagtctctagggcaggatgaacattccaaatcctccagaccccaaattcaaaccactcctatatccaaaagcttttgagcaatggcatgattctacaagtggcatgtccccacctaacccattgagatgtgtaacagtcagagagcaggtgtgctagagatcctgtctgagctgctctgcagtccgggtaaagaatgtatgaaggggatgccctgcttagcctggagtcccactcctgacttctctctttatgtaaaagctccagaatttgagtccaatgaacttcctccccccaagcatcgtggacgggtgctgggcagcctgtatgggcagatggggtcttgagatggcatgcttcagcgaggtctgtgagggcttgagaatgggagagatccttttgcatgtgaaggagacttgccaagggctgtcccaactctccacttgtcccatgtactccctccagccagaccactgctgagtcatgttcagggatgctgactgcaggcagacttcagaccctatcttctcagcctggtgtgtactcttagcattctccctgttggccagtggctatgggatgtcatgtaacttttgagtctatgtcctccttagtgaactggtggccttgagtagccagtgagtattcaataggccagtaggttagtatgctttgaagtgtgtgggaaagtctggtcctgttgctacgactggcccattccccaggccctgcttttgtgccttctgaggggccttttggggttggccaggcctgggctgccctggctactcctctgtctttcttgcatttggcttctctctcagctgaattctgagttcctgagagcagtaatgattcttataacctgtgctctgctcctgttcacgttctggacttgacagatgcttagtaagtgctcacctaactgaatattagagtacatttaaaggaccctcaaggtagagtgtggggctccatgctcttaatcccagcatgggggtgggggtagggcccacacaaaaaggcaggtggatctctgagtttact

SEQ ID NO: 33952 - DNA, 2350 bp, Mus musculus
atgggcagagctggcccaaggtcgtctacagctgcccctattgttctaagcgggactttaccagcctggctgtgctagagattcatctgaagaccattcacgcggataaacctcagcagagtcacacgtgtcagatctgccttgactccatgcccacgctctacaacctcaatgagcatgtgcgcaagctgcacaagagccacgcctaccccgtcatgcagtttggcaacatctctgccttccactgcaactactgccccgagatgtttgctgacatcaacagcctgcaggagcacattcgagtctcgcactgtggccccaatgccaacccccctgatgggaataatgctttcttctgcaaccagtgctccatgggcttcctcaccgagtcctcgctcacagagcacatccaacaggcgcattgcagtgtggggagcaccaagctggagtctcctgttgttcagcccacacagtccttcatggaggtctactcctgcccttactgtaccaactcccctatctttggctccatcctgaagctcactaaacacattaaagagaaccacaagaacatcccgctggcacacagcaagaagtccaaggctgagcagagcccagtctcctccgacgtcgaggtgtcttccccgaaacgacagcgcctctcggggagcgccaactccatctctaatggcgagtacccctgcaatcagtgcgacctcaagttctccaacttcgagagcttccagacccacctgaagctgcacctggagctgctgcttcggaaacaggcctgcccccagtgcaaagaggacttcgactctcaggagtccctcctgcagcatctgacggtgcattacatgactacatccacccactacgtgtgcgagagctgtgacaagcagttctcctcggtggatgacctacagaagcacctgctggacatgcacacctttgtgctataccactgcacgctgtgtcaggaggtcttcgactccaaggtgtccatccaggtgcacctggccgtgaagcacagcaacgagaagaagatgtaccgctgcacagcctgcaactgggacttccgcaaggaggctgacctgcaggtgcacgtcaaacacagccacctcggcaacccggccaaggcccacaagtgcatcttctgcggcgagaccttcagcaccgaggtggagctgcagtgccacatcaccacacacagcaagaagtacaactgcaggttctgcagcaaggccttccatgccgtcatcctgctggagaagcacctgcgggagaagcactgcgtgtttgacgctgccgcggagaatggcacggccaacggggtgccccccacctccaccaagaaggcagagcccgccgacctgcagggcatgctgctcaagaatcctgaggcgccgaacagccacgaggccagtgaggatgacgtggacgcatcagagcccatgtatggctgtgacatctgcggtgcagcctacaccatggaggtgttgctgcagaaccaccgcctccgggatcacaacatccggcccggcgaggacgacggctcacgcaagaaggcagaattcataaagggcagccataagtgtaacgtgtgctctcggactttcttctcggagaacgggctccgggaacacctgcagacgcaccggggccctgccaagcactacatgtgtcccatctgtggcgagcgcttcccctcgctgctgacactcaccgagcacaaggtgacccacagcaagagtctggacacgggcacctgtcgcatctgcaaaatgccactgcagagtgaggaggagttcattgagcactgccagatgcaccccgacttacggaactccctcaccggcttccgctgtgtggtctgtatgcagactgtcacctcgacgctggaactcaagatccatggcacctttcacatgcagaagctggctggcagctcagctgcctcctcccccaatggccagggactgcagaagctctacaaatgcgccctgtgcctcaaagagttccgtagcaagcaggacctggtcaggcttgatgtcaatgggctgccctatggcctgtgtgccggctgcatggcccggagtgccaatggacaggtgggtggcctggccccacccgaacctgctgaccggccctgtgccggcctccgctgccctgaatgtaacgtgaagttcgagagtgctgaggacctggagagccacatgcaggtggaccaccgtgatcttacaccagagaccagtgggccccggaaaggtgcccagacgtcaccagtgcccagggtaagtgcagcctgacaatcattcccgacctgtccttcttggggaccagtgggtat

SEQ ID NO: 33953 - DNA, 1179 bp, Mus musculus
tacccaaaggaccaataggatttcctttaaggttgggggccagggaatggggggctaggggctgagggttgatggaagttgactcccagatgtggttggaattaggggacttggattccttttggcctgtgggactgtggtcatttccggtgactttgtacaggctgtcccccacccccacccccaagggaagtggctgagagctgcgcctctgacgaaggtgcactacatccagtcaggttgaggcaggtgtcactgcgaaaaaggacacttcccttgggtgctctgccacccctctgctgtgtgtcctctgtggatgggaaggtctgtgtgtccacttacttccggccccctcgtcactcctcccctgcagcagttggccagctgcacagcctcagccgagagctgtggagaagctggctctgtccttgcttctcagcggccctgggaattgcctctaatctctcctctgccttcccctgcagatggtgatgacgacccacagctctcctgggtggcttcatctccctccagcaaggatgttgcgtcacctacgcagatgataggagatggttgtgacctcggcctcggcgaggaggaaggcggcaccggcctgccctacccttgccagttctgcgacaagtccttcatccgcctgagctacttgaagaggcatgaacagatccacagcgacaagctgccgttcaagtgcaccttctgcagccgcctcttcaaacacaagaggagccgagaccggcacatcaagctgcacacgggcgacaagaagtaccactgtcacgagtgcgaggcagctttctcccgcagcgaccacctcaagatccacctgaagacccacagctccagcaagccgttcaagtgcagcgtgtgcaagcgcggcttctcctccaccagctccctgcagagccacatgcaggcccacaagaagaacaaggaacacctggccaagtcggagaaggaagccaagaaggacgacttcatgtgcgactactgcgaggatacctttagccagacagaggagctggagaagcacgtgctcaccctccacccgcagctctcagagaaggcggatctacagtgcatccactgcccagaggtctttgttgatgagagcacgctgcttgcccacatccaccaagcccacgccaaccagaaacacaa

SEQ ID NO: 33954 - DNA, 1099 bp, Mus musculus
ctccaagaactgggtagttagccaaggaaagaaatcaaatattatttcaatctgcaaagctcttctttctgttctcctcttccctgtcgtcttctgggaatcttctcttctggcctctttgtcccacaatcagaaccctctggaacctccagttctgtagagcaagtctgcctgctccagattgagaaactggatgaggcgctcagctgccgcaacttctctcaatgaaagaaaggagccggcgcttgagacttaagaccacagggagggtctcggtggggccaggtgcccctgactctcctggggctttagaaggaaggagaagccaagtgtctggcaacccacgtggtgcagattcagcaccagctattctgtccaggagcaagactggcaggaagggagccggccccaacgccttcccgcgcaggcctccaggaaatgaacttttcagagcagggctgggctgtggccagaggttatcaagagagtcgagcaggacaagggcctaaagacttcacgctccacagctactctcgtcctgctcctgtatcatctaatctatctctcaacgcgaccaggcaggggctgcactgggtacaaagcagcaggccatgcctgcagaagcgagctggggagggaaaaggggacagggaggagctgcaggccctcgcgcagcttctccctgaggcatctgctctccaggggtcccttcaaacccggggttctccgaggaattagaaagcaagggggatgtgtgtacttggctatctatagctcctcacaaacgtgcgcaccctggggagtcagtacggaagacagcctgggtgcccgcggcgcggctgcccagggtggtatcggacgccccgctccaaggggcgctcacagcagccgctgtgctcccctggggaccagcatcccgccggcgcggcacagacaatgaactcctggcgaggctccctgcccagctggcctcggtggagccggcaggaagtgcgggggcccgggccgggagctcggcctgggcccggggcggggagggggcgcccggcttgctctctcttcgcgtccccgagtgaccaggagggcaccggtgaacgca

SEQ ID NO: 33955 - DNA, 1153 bp, Mus musculus
aatttagaccttctagcatggtggcacagacctttaattcccgcactagggaggcagaggcaggcagatctctgagtttgaggccagcctggtctacagagtgagttccaggacatccagggtcacccagagaaatcctatctcaaaaaggccaaaaagcaaaagccactctaatgaactgtagagaggacagaaagttagtatttgtgctcttacagatttgcctgtgtgtattgtttcagtctaataaatattggatggagcacctgtgtgccagccactggacgaggccagttcaaggccaccttgaactacttagtgagttccaggacagccagggctgttacacatagaagccctgtcttgaaaaaatcaaccaaccaaccagataaataaacaaatcttaagtctattgagtaagattagtgttaagaatatattgattattattaaccaaataattactatatgtataaatacaactagtagtaattgcagagactactattaggggtatgatggtttgaataagaatgtccctcataggcttatgtatttgaccacttagtattgagttctcctatttgagaaagaataggaggtgtggccttgctggagtacgcgtgggtttgttagaggaagtatgtcactgagggtgggatttgaggtttcagaaagcccacaccaggcccaacatctttgtctatgatcaagatacagctctcaactactgctccagtgccatgcatgtcaccatgctccacgatgacaatggactaaggctctgagactacaaacaagcctccagtaaatgcttcctttataagggttgccctggtcatgttgcctcttgaaagcaacacaacagtgtaagacaatgaattatttgatgtgctgaggaccaggacagttgaaaatctgtaggcttgctctctagcatataacaaatacagttttgttttgttttttcctgtggaaaaccttaactgtggttagacatacagggcttagcagcattttgtgagatgtgacttgaaagtaaaatgtgtttacatttcttatgtagaaacctcagtgcttgtggaggttttgacgtttgtgatgacatggtggcaaaggacatcatgacgcccctggtggcactactgagaga

SEQ ID NO: 33956 - DNA, 1176 bp, Mus musculus
tataaagcttcggagaagaggagcttaggtggaaatgggaggaaacaaggcacctcctggcattgtcagagaaaattgatcagtgtcccagtgtgtaagttctataccaggaaaagtgtgtgccaagatggaatgaacaaaggcatttgggttaggatttttgaaattacaccatagcctaagccctgtggaaactgcttttccctcactgttatatgttgttcaattagttataattagtaaattagttgaattagtttcagctagtaaaaattacttgtttttactatctagtatttccttttattataccagaatcagtctgtttattacctggttgggttagaacccatttttaataaagattccataggcaatttctttgtcttcattcttattttttcccaggcaccatctggaacctaaaggacattattccatctaagagtcaggcagaaatcattaatgccatcctaggtgccttgtctgaagttctgggtatgaatactggcaacatggtcattcagatgaaggaagctgaaacccagcggctaaagactgccgcagagagtgaggacatcctagcaaatgctaacggtgatgacttggttgaagatgatgaaatggaagaaatccctcataaaagaaaactcagaaggaaaacatttatttccgatttacttccagtgagtcagatggatgttcgatctgaattaatgcattttattttttattttatgtgcattgttctttgcctgtatgtatgtctgtgttagaatgtcagatcttggaattaaatacagttgtgagctgccatatgggtgctgggaattgaatgtggccctctgaaagaaccatcagccctcttaactgttaagccatctctccagcccctcaacgtgagttaatacatcagtttccttcagcaggcttccttagcattacaaaaaaatattaggcaatttttcaattagagttgtatttttctgttgattctcattgtaacattcgaaatgtacccatgtagaagaaacgaaaaccagcatctcttgtccaaaatggaaacctttctgtgtgggagctttcagagcacttagcaatagcatcctgtcttcttgactctgaattcagttacctgtctcctcagggagtcttcacgctgaccttcctctgctt

SEQ ID NO: 33957 - DNA, 1863 bp, Mus musculus
agaacaagctggctagtgagactagccaaatcagcaagctctgggtttgattgagggatcctgcctcactgacaatggaaaagaaaaaaatggccacattctcattttcctcttcttcatgttcgatattctatttaatctggagtaaaactttgactatattctttgaaatgtcttgtttaatagtaagtgaatgactagtggataacaagttaggtgataatgttctccttctctctgaatttctctcaccagatacggaaagaagggaggggcaagtacagtccagaccagctgtgtgttctcgacaatgtgaagatgaatttgagacggtttattgcttaccaggaaactgttgagaaaagactgacttcttaaaccatcaagaggaccagagctagggctggctgagcatctgcgtgcctagctggcacaacagccctgggtctatccctagttcctgaggaaaaaggagtaagagaagctgcttctcctgatggatttagtgctgagaatactgaagggtttcccttgaatatatgtgcttccaaagcctttttttcttttttgagacaggttctctctaggtagcccctcctggcctggagctcacagaggtctacctgcctcagttttctgattgctgggctttaaggtattcaacaccacacctgacctccaaaagccttctttcactgcctctgttctccgtgttagtttgaatgtgagaacctgtaggaaatgtgtgttacatctccaacatattttagccactgaaaatgccccacatttcaggtgctagggtcggcattcagggccttgctcctgtgtcgtgagctctaccactaactccaccccagccctcaggtggttcttaatggaagggcagtaaagagacttcaaacaagtacgtccttacattttttttttttaagaaaagaaattaaatcattgttgggatgtttttttaaagccaataaatatcattttatattagctaactcctaacagaaatgtaaagataagctttataaaatatttttgtcatgaagtactatataccaatgatgaatcttttgtgaagtaaatgacttgaatttgtcactgtgtagatagtgagatgattgaattctgtataggggtctgagcagttactctgggtaacagcatttcctgtcttaatttgatacagaatcagaaattagtagaaaatgctggacatggtggtgcacacctttaatcccagatcttcagaggcagaggcaggaggatctcttgagttcaaggccaacctggactacagatggagcaccaggatagccagagagaccctgtctcaaaaaaaaaaagaaagaaagaaaagaaaagaaaagaaaagaaaaaattagtagaaaatatttttgaataaataacttttaactggatgttttgtgtcatacagattattttttatagcctaagtatccgccttcctaggcagtttgcttcgtgtcagagcttacaaaggaaagcagcatgactttcttgatgacctctccttactgtaaaaaaggagggtaccagatagggctcatgctgggactgtagtccacattgtctggggacgccctgggctgctcccgaatccatccctctgcctggccagagtgatcagaagcaagctcaaagcacaaagtaggctgtaatttcccctagatctgtagctgcatggaccacttactaggattcattcatgtgcactgtggcctagtgagcagttttccctgtgcagagcaggctgttaggaagccaggattatttatcagctctgaggagtcactgagatggtgaaagcagagatagtgaggttttctggtggggtgg

SEQ ID NO: 33958 - DNA, 1194 bp, Mus musculus
gtcctaaagcttggtgagaacagttgtcataggtgagatatggaaaaggcacataaataatgagattggaagtaaatgcgtgtatttacacactgagagccagcatgatgctctggctttatgcagcttaatagtcaggtcacatctcattgaggcagcacacgtgaagtttaataccagaaggctctaggaaaaaccaaacaaaccaaaaaaccattcactaatagaatttaatatgtttgaggttttgtttctgtcagcattatctcatgtcctggggcctgagatctgtgaaatacctgagggtatgaggttgctaaaattgacactccctgcttctcctctcctctcctctcctctcccctcctctcccctcccctcccctcccctcccctcacctcccctcccctcccctcccctctcctctgcttcccttccaaaacttaccatcagcacactgatgctctgaagcagagagggaaagggattcttgttaccctaacttaaagttggtaagcataattgtcagctacaatagagacctgattgatgcttcttgaaacctcacacgtgtccctacagtgacatcgatcttgtggtgtttgggaagtgggagaacctgcctctctggaccctggaagaagcccttcggaaacacaaagtcgctgacgaggattccgtgaaagttctagacaaagcaacggtaagttcttagcattgtgtctttgtgagccttattacctgcaggagaaacttggactctaatctcgaatagcacagttggaatgtgactcagtgaatcattttttgaatgtcacagtgactatgcataaagactgtcattggagaatcaaagtaacttgtccaggctatacatttctttaagaataatacccaatttttcatgcgtaatgaaatataaaaatagattactagctgggcattggtggcgcaggcctgtaatcccagcacttgggaggcagaggcaggtgatcttagtttgaggccagcctggtctacagtgtgagtttgtttctgttaaatagcccctagttataacaaaagatattgttctcttattttgcacttgagatcttgtcaaggccttttttttttttttaattaaaaaggatatgtttttattttgtgtgtgtgttttggggctacagcagagggctttggatcctctagagc

SEQ ID NO: 33959 - DNA, 1119 bp, Mus musculus
taaatatatatattataatatattgtgggcagtgacttaggaagacacctctcatcaactgctgtctttgatatacatgtacacacacacacaccagaaataagagtacatttaaagcagttacccatggaagctcagctataactgacacatgttctttggataagagctttagttttgcctgtttggcagtggttgccagtaaccagactgctaagtgagatgaattccctgatgtggctcacactcagccttacctacctggtctatacccatggtgcattgcatgagctttgtagcatagctgtcaactggtccaagatgatgatgatgatgatgatgatgatgatagcgagtgctcgtagaagttgggatctcacttataccccctccttcataacagagaaaatccaaaataatttcttcctttttttttttttttctgttttagttacatcccagggaagatgcttgcatccccaatacaaactatggtgttctcttaatagagttttttgaattatatggacggcacttcaattacttaaagactggcatccggataaaggatggtggttcctatgtggccaaagatgaagtacagaaaaatatgcttgatggctaccggccgtcaatgctttatatcgaagatcctttacaaccaggtactgcgattcggtgtctgtaggcttcagaggggcgtcacagtccacccatgctttactctgttcagatgaaaatgcttatttctaagtagcacttgttcagaatattcttatcatactaaaagagacacatactccagaaaaaccacctgctagacttgcacataagttgaggtagtgtccatttgactttcaaagccaagcagagaggaattcactgtggggtgggtttgcagccatctctcctcctgtgggctgccatttccagctagttgtcagcagggctttagtgaggtaagatgggggctggagagatggctcagccgttaagagcactgaatgctcttccaggggtcctgagttcaatacccagcaaccacgtggtggctcacaaccatctgtaatgggatctgatgccctcttctggtgtgtctgaagacagtggcagtgggca

SEQ ID NO: 33960 - DNA, 1165 bp, Mus musculus
agcctttattcataataaccagcagccaggtttacttgtcttcgtatccatttcttttaaaggtaatgatgttggaaggagttcctatggggccatgcaggtgaaacaggcctttgattatgcctatgtggtattgagtcatgcagtgtcaccgattgcaaagtactatcccaacaatgaaacagagaggtaaaagtctagcccaggccagcctgtgtgttgagagtggttggtacttcttatcttcaacttaatgtacacctcttttgtttttttttaacctgtgcagcatattaggtagaataattagagtgacggatgaagttgccacgtatagagattggatatcaaaacagtggggcttgcagaataggcccgagccatcatgcaacggtaagacctccttgatggtggactgggtcttagaggctttttctatgttttgtgtatttaatgggaagaaacgttttccaatcttttgccactttttcaggaaatggtgttaccttgatagtagatactcagcagttagataagtgtaataataatctgtctgaagaaaaggaagcccttggaaaatgtagaagtaacgcctcggaacctcttagtaaacactcttcaaactcttcatcaggtccagtgtcctcctcctctgccacgcagtccagctctagtgacgtcgtaagtatgacacatgctgccccagcctgctctttggagggccctcacaggcaccagggatatttccaatacctttcattcttgtactttttccctaacatttttttttaaagaaatttgaaaatctagtgaaggtagaacccgtcagtggctgtagcattccatactccattagcattgacctgcttattatattcctgacactctgtcccgtaggcagctcctcttcctctttgatctgcttcaaagatggcagatgtcacacttcaccccagcctccatagcatgcatcctggatttagatggcttgcttattctttattcctcactaagttttatgaccatgctcaggtcactcagagctctagtaagagaatgtcctctcactaacccacagtccccagtctcgcctccagagggcatccttgtccttgtaaaggattttctacatcacatattggttttccatgtcggggttcctaga

SEQ ID NO: 33961 - DNA, 9888 bp, Mus musculus
tcctccttatcatgttgtgtgagcagtaggatccttgaggaagctttcatgttgtacacatgctgtcaggaaggggagctatagagttcacccctgttagtcctcgttttctagcctctagaacagtgtgtgatagctgggtgtgatggcacacccctttaatcccagcacttgggaggggaggtaggcggatctctgagtgtttgaggccagcttgaactgcataggaaggaagggccagactggccagagtgacagtgtgggagttgtcagtgggggaccatgttaagtgcgcgcctgcccctttctagtctgggagcggccctgcatgcggtttgccagggggcagctctgctccgattctcactgctttcttcttctgcagcatggatcagcaaggctcttccgttcttccagcaaaggcttccaaggtacagctcaaaccagccatggggccttgatgacaagcaaacagcatcaaggcaaatccaatactcagtattaccatggcaaaaagaggagacacaagagggacgcgcccctctcagagctttgtagatagtcggcgctctgcgacagactgtcttctgtgtgcaatgatctcgtgctcaggacagttgcacagggactcctgggacggcaggagcctcacactgttcagacgttgatttagcaactgcgttttttcccagctcgccacggaatggatcatgaagactgacaactgcaaaaacaaaaagcaagcaaaaaaaagggggaaaggctgcttatgtgataagtcatgtgctacaacagggtcattttaagatttaaagcttgaatgtaaaataaatatatttctcattggctttatgcagagttataggggctagtgctcagtgtgggtagctgacaggaagagagcagtgtcaaggagatgggtgggcaggtcagcaggagcatctcatgggaagtcagactccgagggaaaggagtttgtgcatggttttttttaaaaaataattttgcatatatttgccattttattgtgtgtatatatagaagaccatataggaaattgatatttgtaatagtggatttgttaatactttttacataacattactatttgaattgtaaacagatttttttctcaggattagtttgaagaataattgagttgtcactcttaacacatgcagggaagtgattagctctggtcctgtctgttttcttcagcattgaaatgacttcatagaacccttgtgacctgcttcaaaattctttcctctctaagcaaaaggtttatggtggcaaatgatgtttattttattttgtaaaaaagagaaaaatgtactgtgtacttgtgtatacactgaacaacctctagctgtctctccgaatgaacacacctgctctggatccagtgctgttgtcttcctgggcactgggccgtagcaggccttgtgtgtgtttcctagcagtcttttcttcccctccctcctcttcttcctcaaaggaaacgaaaggcctccctgggcctgggctgttcctgtcacagtgtggctgacctctagctccacagcccttgttagctcgcatgctggttcctctgaccctgcgttccatgtgcttgtggcgtcctctcattctttctaggttcctgcttactgctgtgggagagagtaactgtaaacagctttaatgaaatcatacttataaaaactattttcttatactccactttatgcttttggtattgtcgatctttaaaaattaaatggtctttgataatggatcgatttttgtattgccttattaagaccaaatacttcttgtcatcccattctttatcctctcctttaatggaattgctgtctttaattaaaactttgtaaacactggcttgttttaatcatcctgtaacttaggctgtggtcagctacaagcgcagatgtgtaatcctgttactcattgccagctgagtcttgagactcgggtggggtacttaacacaatgcatcgtacacgctctgctcgctcgctcgtcagcagagtggtcttggaggtgaaagccctcgtgtctagcatcagtgtgtgtgtgtgactctgttcagtacggccgtttccgagatgggattcttttatatgtgtatgtgtgaagtactgttggcatttaggcatttcttttctatacacttaggaaatactgaagaccaatcagaccattaatggacacttagtgcaactttttataatgagaataatgctataaagtaagaccaaaaccggtgtcatcactgaaattaacaattttcaatatgttcatattttaatttacaatgggaaaaaatgtgttccacaactggaaactcacagtactgtgtaaactgtgtaagattttaaatgtgatgttattttgactgttctcaattttagagtcacattttattctgatcagaatttttatcaagatgttgaagttttgttgttttgaaactagtttgtcataacatattgtgcataatcacagtatttattttgtagggcttgtggatgtgtagacttatgtttactgctaagggaacaattatttataaaaaaaatattaaatccagtattagctgcctatttcagacacttaacacctgcagagatctgtgttacatttaccacactgaagtttttttaaagaatcaccctcattgttgaaagtaaatgtactcttaggtgggttattagtgtccaataagcatgtgattatattaaggtggtggtagcgggaagataatcttgattccattgggaatcttaggttttcgtaaatttattgggaaaatagtttttcctgtactgctgatgtttctttttggtaaacagtatctttctaaaagaaaaagcatgaaggagaattgaggtgtgtatacatttccccagatgaccagcattgtattcgtgaatactgtgtatctggaatgagcagtgtgcaagctgttcatttttcaatctgaagtaaaatactttcaagaacttttagtttgcctgctcatttgttctgtacattgtatcttttgtatctgactcccatctgtcttgaatttcaatactttgggtgaagatttttgtagctgtctttgaaacgtatcttaaccattctggttggtcctttggtacccatggatctctggtattcatgggtattcatagaggggagtttgtttataaacattgcctccttgtggtgatgtttatctggtggtcacacttgtgtatctgccctaaggagcaattaactactactatgtagccgcagtgctggcagcctggagagggagccacaggaaggaacctccatctgaaagaaagtttctctttgctggagttacagtgtgccctggatggtcgtccctactcttcagctgcttttgtttgaggattctacacttagttttcaagtctatcattctatagaatcttcaacttttaaaatcatttttaggagattacttgtatatgtgagtatctgcatggctttatgtgcaccctatatatgtgcagaagcccagagagaccaaaagaacatggtgaatgccctggagttagagtggcagctgtttgtaccaccttgtgggtgctaggagctgagcatggtttccttagtagagcagccagcactcttgaatgctgggttattactgcagccctaggtttttggccttcatgtatgccctctccggtcttcaggcagctgaccacattatatatttgtcccgtttggagaacattttagtttggattacattgggagcctctctcacagttaggttgttgaattttcccggatattcatgtataatgctcatggatcataggaaggtgatgtctctctgtgggtggagttagggtttgtctactgggaggatgttaggacaggctgttgtccagctggcctcaaacttgaggtcatcttgccccaccctccccagtgccagcactaactgtgccctgcttgtgaagggcgtctgcaatggtgtcttgcttcggaatcttcagtcacctgtgttcttctcatcccctcctgcggcagtgagtatgtatggtgtacagtggcccctgggttagtgcttgaaaggcaagagagtcagaaagaaaaggtgaaaatgggcactgtggaatcctgatgccgtggcctgtcctgtgcttgtttgagtgaccttcctgataaccagggagaggctcaaagaatgttctctggaagttaccaccgtgatgagtcctgcgttctttttttgcagtcccagagtttggctggtgagcagttaagaactgctctgttcccttcatcctatttgcttgaggttttgtattgcccagaaacaaagaatattcacagagaattggctctaatacaattaactttaagaagtaattgttaagctattagataaacccagttatcgttgatagatgctgaaatgttacttggcaatctccaagcccatgaaacagttgttgaggcgagctcatctgtgggtctctagccctagctgttctgggactcagagatccacctgcctctccttcccacgtgctaggtaaaagggcgagctacaatatctggcttgaaaccatcttaatgagaaagcagcatccgccggaagcagttagtgagccaaggcttgtgtcagggttgctctttaagctcggcctgttacagttgtaatttctatgaggtagcagttcatctagtggggtgctgagaaggtgcggggcgcctgggaacagggctccttaagagtattgtcattttgtctcttcggaacttcaagagctccagagtgatttcctgctcctgtatcaaattgcctgtaggtagaataagtggaaaagagccctctcagtatttcacatagctcagacctgggagcttctctgtggaagtcagctttaagacagtctggtcaagccgggcggtggtggtacacgcctttaatcccagcactcgggaggcagagacaggcggatttctgagttcgaggccagcctggtctacaaagtgagttccagaacagccagggctatacagagaaaccctgtctcgaaacgccaaaaaaaaaaaaaagacagtctggtcagttaaccgattgcttagtttactctaatcagaggcttgttttgagtaagtatttgacctactaaaggtttgcccttaatccctggtccaaaagaggcaaccgagagaggggcagcagagggggcctcagctggctgtcctgggagtgtgaggcctaagaatgtcctcaactttgtggggatggaacaagaaatcatgtattgtagtgaatctgtttgatagttttacatttcaattgggttcttttttttctttttttaaatagggaaatgggtttatctgtagtctgagccagactgacattcctgtcccttgtcactccctcagctgtgtgttcctgcagcgtccctgatggagagggcctctgttacggagtctcgaggaactttacattaaaagtgctttggggatggtggggctcagagtggctgttcctgggttggggtgggagcttggagaagcactacagccagtacccattggggtgtggagctcgcctcagtacccagacttgagtcatcattctcattcttggactggagcgcaaactcattttcctctttccctgggttccatgccatttacagctgtacagtttagcctcttagattttcactatgaaacttggtcgctaggtttagtctctggctttgtttgtttgtttgtttgtttgttttcgagacagggtttctctgtgtagccctggctgtcctggcactcactttgtagaccaggctggcctcgaactcagaaatccgcctgcctctgcctcccaagtgctgggattaaaggcatgcgccaccacggccggctctagtctctggcttttaagattccctgttacattacactgaggtttccaaatctttgaaagttcagcaatcctgtgactctccacacttcgcattgctagggagcgctgctgcttccatgtgtatcgttaaaggggggaaggaacagtagcgaccggtgctggttttggacacagtggggaagaccactgaggtcaacactcctctctggtagcacatcctatagacttgcttataagtcgggcgacgtccacttgcttgtgtctaaccagctctctgtttattttctttgatagcattgccttcagtgttaagcaacgcagacgctcatgaggtgctggaggtctgagccctcaactctccagtcttgtctagtttccgctgcagaggcactaaaggaatttaccagaaagagatttgatacaaatggtttatgaaatctcgacatttcctgaggccatgtgactagccaccagtgacgaaaacagtgaatttcacacccggaagcttttttttttttttttttttttttttaagctcacagtgtcttcaaagatgtcagttgtttgccttgaaagtttataaattgctcttctatgcacacacaccccatcccacggggctcattattcacagtctgcagttcaataaaggctttgtgctttcatttatcttaagaactgtgggtatgagctttgtaaaaccggaatagctacttaaagaaaacttctaaatacggcagcatttagacagtggacatttccttgctgctgacggcaaaactcctttgttcttaacaaatgctgccagggggagacattccaccacacccaggacgaagctggaaacctttgggtatttgtagtagtggcccagctctttggttgggttgggttggttttggttggttggtttgagataggaactcatgtagccctaactgattaagaacccatttcccaagtactgggatcaaaggcatgccccaccatgcccagttttatcttgctccttaaacttaacagctgtaaggaactgcattactctgctgtaggtttggtggagcaaggctcggagcagtgaggaaaagggctgtggatggggctggatgatggacgccttgtccagcatgctggaggtccagggtccgaacctcagtactactggatggagggaaggtccgaaatggtggtctgagaggcagggttattggctggttttaggattgtgcaagggagtggctaggttgtagtcctttgcctgcgaccccactgagaaagccaagctgattggtgtcaagtggccccgctgtggatagactggccaggagacgccagctgtgcctgcagactcctgctcacttcttgagagctccggagaaacaagaacgcttttcggtagtatctgaacaaattcatagtaaatgacaggatgcgctcattataacacagggtagttccaccagtctacctagacactgaatttgtgcatgtgtgctccattgtgaagaaatccaggtaaatatctaaatagttttgattttttttcctttgactcccgagtcctgcttagtcatcctagagctacattttaatactgtcagtagcctaagctaatttttgtgcatattcccatatcaacatgttggggtgtgggagtgcctctatcacagttggtcatacagtaccacagctctcctgtggtctgcacatgtgcagaagtagtccttactgtatattgtactggccggtggcagttgctttggtaaatcattgaggtaaatgccctgacactaagacaccagtggacttccatgcagtgcccagagctctcagcataccttaaacacagactttagaaagttgatagaatgacactcctgagccagggttttggtttttttcttgttttcaaaaagatttattttatgtatattagtatactgtcactctcttcagacacaccagaagagggcatcagatcccattacttgtgaaccaccatgtggttgctgggaactgaatgcaagagcagtcagtgcgcttaaccactgagccaactctccagcccttgaaccaagttttctaagaaagtaaaaatcccctttttttacccacaagatctttctatgtacactaggatgactttgaactctggtctttctgccttgtttcctcatgtcaggattataagtgtgtaccacaccggcttcaggattactttcttagccaaagttgttttgggaagtttcttgtctttgttgtttgttgttgttgttgttgttgttgtaaggccaggatcttaagtagcccagactagcttcaaacatggtatatatccaaagatgatcttgtatttttggttcccttggctgcccctcaaatgctgggatgcaccaccacatcccgataacttgttgctagtaatcaaagccaggcccttgtgcatagtaggcagacacgccacagctgagctaagtccccagcctgtcttttggttcttctccttaaatgtcacagtgcagcagagtcatcccgaacagcactccactccctttgccattttccacttttaaggaaaggagccttgctttgggcaacactggggaggggggaaggccaattctttgatcattttctaccatctgcctgttaacactccaccttttaaaccaggtggagtgtcaatcccagcactcgggagacggtggtggtgcacgcctttaatcccagcactcgggaggtagaggcaggcgaatttctgagttcgaggccagcctggtctacagagtgagtttcaggacagccaggacagccagggctatacagagaaaccctgtctcaaaaaaacaaaacaaaacaaaaaaaagcactccaccttttgttgttttgtagctctgcctgtcccagaactcaccatgtagaccaggctggctttgaacttacatttcaggtttggggtaaggaggaagggctccccaccagaacaactggatcccagttatttgaagtagacagggccagagctgctgtgtggtttttgaggctaaattggggggagggggcggggaccaaaagccatctggtggtgaggaattccacagtcttctggtgcacaacagtgtttgaaagctgttctcctcaggccacattcttgagtcttgcggcttgagtctttgctggcattccatagtgagccagtctgggttgaccagcttaactaagagatgcaagatttttggcttttaattgggaacattttgccttttaagtaaaatgttttaaattccttgtttgtctaagaagaccattttaaaaccaaggaactagggatctgaaataacccacctgtgtaaaacacacactctgtgtgtgtgtgtgtgtgtgtgtgtgtgtgtgtgtgtgtgtgtgtgtgtgtgtgtgtgtgtgtgtctgtgtctgtgtctgtgtctgtctgtgtgacttaatttcattttatattgtgtgtacatttaaagcctgtaacatttaaagcatttaaaaccttttggaagttgtgggattcagaggaactgcccaaaggatggatacaagtagatggtgccttttctttcttttgtttcttttaaaaaataaaggatgtattttcgtttttctgtgtgagctttggctggtttctgtatgtactgtgctcatgcaatgctcaccgcggccagaagagggcatcagatcccctggacctggagtgactgctgtgagccatctatcttgagttaggaatccaggtccccttcaagagctgtaagcactcttaaccgctgaggcatctcttcaacccctagaaagatgtcttaatgtttaatgttaacaataaaagagaaggaggagctgattaaaagctgaagtggcctcttgaaatggaatatccattttcagaagattgaccactcagtttcagcttcgtacctccagcttgcacttagggc

SEQ ID NO: 33962 - DNA, 1121 bp, Mus musculus
gcattctggtaaatggagttgaaaactgtgtatattggtgggtagtctcaaaacagcagagaaaatgtctgatctacacttgtcacttttttccatctctggcttatgtttgaaacggacatgtcataaacagagttttagctttaccactgactcttagatgctagacaaagatctccacctttctagtgtattttctcttgttaaccacagactacaagtaaataggtctgctgtctagtgtccgtttataggatcagattggctgcagggacagagttctaaggaatggggctcatagcagcagcaaagctttgaatttgcaatcaagcattttttgatgcaaatcttttgggacaaggctcaggaagtttaaagtctagaaatgaggtatgatgtttcagtttttctgtgtgcactttatttattttggagtcagggtcagcctagcttggtctcaaacttctaacctcctgtttcggtctccggagagtttcaattacagatgtgcacgactatctccagctgtttctgtgggaaagcctgtgtagacaggcttggacaactttgtagcacttgccttttctccagtcttctgagctgactgcagagcttcaagaacaatccacttggcaggaacatgtgttcaggactctggcctgtgaactgagcccctcaacaaatgccaaattgttcttatgcaaatgagtcaaggcaaaagccagcttcgtgagatgggtgtcttactgtgcttagctccagagcattccgagagatgaccaaacaccccactcctttttggaaatgacttcactgccacagaacgcactacatcatggtcttcttagctagcagtcaccaaggaacctccagagtctacaaatgatataagtgccgcagacagggtgctaaccagcaggtttacccgggactttagtccaaggctgagtagtcagggacgcagaggggagagataggaactgtttgcttgtgctgtctcctgtggagtttcatcagcccaggaaagaaaggctgattttagtttgcacaaaggaatctagtagtggccagggcttcccagcaaggcatctctggggagttagtaaagctcctggtgatgc

SEQ ID NO: 33963 - DNA, 1237 bp, Mus musculus
ctgtcttgaaaacaaccaaaagaaagaaaaagaaaaaaaaagatgactacaggaaccacttcgggaccttgagtgtttccccctgtttttcccagctgaacaagtgaccaataacctcaaagaactcacacagcaagtgactccaggtgatgttgtaagcatacacggagtgcgaaaagcaatggggatttctgttccttcccccatcgtgggaaacagcttcgtagatttgacaggaggtaggtgccctgtttctgtgggtgagacttttgtgaataaaagggaaatggacccttttccttaagatgacattgaacactcttgtctggtttgatttgttttatttaatttttgagattagcatacaaagtaatgggttttatcttggcatcttttagttttctttccatcttgtttaaagaatgaatagatttgatacgtttgtcaaagctgctgtgatgacttaatgccaggcttctccttggctgtgagtgtggcatgaagggctggcagcagtggttctcctggatgctagcacagtgggacgaaatgctgagtgctgtcttcttccttcagagtgtgaagaacctaaggagaccagcactgctgagtgtgggcctgacgcgagctgaactagcctggtatttgattctattatgtacatagtttttcattctgaacttggaggtgcttttcagaagatattaactatttgtaaattgtgttttaattaagctttgggacagttccttttaatgttccaaagattggccttgtattaggaaataaagctgaacctgggactgtgaggctcgctggtgtgtcagctgaattaccctttgccttgctcggccttggttctgaggatggacacctaggacacacaccagcctttctcatggtcatctttcaaaggagcagtcctcaaattaattccccaagttttcatatttaccactcttactagaacaattataagcagctagttataagctctgccctaccagagctcatctgagtgacattcagaaagtagccttatgagatggcctttcagactgccactaatgatggtctgactttttattattatttttattattatattgttgaatgtgtattatgtacatacatacatacatgcatgtagcccctcccccttttggggtttttttgtttggtttagttttgtttttttgttgtttttttgagatagggtttctctgtgtagccctga

SEQ ID NO: 33964 - DNA, 1117 bp, Mus musculus
gcaggacttggacatggtaagcacactgctcaagaaacaggcagtttataaatggctttgaagtgctagacattcactgtttgagaccagggattagccagtatgacagctgaactccattccccggaaaggacagcctgctgtgggtggagaacaatgaaaggaaagaaataagtcagctatcaggatccaagggagttagaacgtggccgttctctactaattttggtaagactcggaattcctgagctgaggatgaagctggctgacaggatggagaatgtgcatgagagccatgcactgggagtcgcagaaaggaaagccttccctgttgcatcttttatcaatatttgtgaactctctagtccagttcaagactgtttataatctagaatcattcaaatgagactagaaccaagaaatgtttcctgctgatgtagaggaattctggtgtctagaatgttctatgacaaaattagaggagtcttaagaagtcatctgttttttctttttaatttttagatttttttttatttatatgaatgtttcgcctgtctgcatgcatgtataccacacacatacctgttggatcttctggaactgcagttgcagatggttgtgagctgctgagtaagggctagtgattagacctaaggcctctgaggagcaagtgctcttaggcagccctggaagtcataactgttcatggtgaccatgaccccagtgccttagccccctgtcggtacctgcacaactggtgaaggttccctgggtgtcatagcaagcctggtcagtggcttctgcttcaaaatcctgccacacgaactacttatcaaacctaaaaagtactttttcatctgttcagaattaaatgtacttgacccttccactcagctaattagaattaatagttaactaaagtcaaattgctttgatttggtgatgatagtaacatatttaaaatatgatctttctgtcctttgaactagcagtttctcttctcaaatatatcctacaaagtaacacaagagttacacatgtaaaaaaatatatggcttacatgttttagaaattggaaatgctctaaatcagagtataaaccttcaaaaaagaaata

SEQ ID NO: 33965 - DNA, 1132 bp, Mus musculus
atttaataagaagcattttgcactctaggaagtatgtttgtgttgattttttaagaagtctaaatggatttattaatatctgacactttaagttaactgcattgatgatacgatatttttggaagcatacaattttaattgtgacgtctaaaacctcttttagtccattgaggatgtaaataaatatttcttcttatggaccagggatatgaaatcattttccttttgtagctaatgattgccttgagaaagacataatatgattttattaagagtctgcctttactccaattgttgaaggtgtgctgagtttaattgttaattttcctatatagtgctgatttcctgcatgtctgtactttgctgagtttctgtgttcctgcagcagtggtcagaacatgctgaaattcctttcatggtgttattttttatttgttctagttttgagataaatgagtgactctgtcataaaatgtccatttttgatttgttcttgaagaattagggtacaaaacaagtatcgtagtcatagtaacaactgttactgaacaggtcttctgtaggggctcctaagtatgagacaacatgcagtggtttctgaaatgactgagcgataagtaaattatatattctttttttaaaagatttattttatttatatgagtacactgtagctgtcttcagacacaccagaagagggcatcagatcttattacagatggttgtgagccaccatgtggttgctgggaattgaactcaggacctttggaagggcagtcagtgctcttaactgctgagctatctctctagccccaaattatatattcttatacagacccacagtccagagaaagtgaagctggctcagagttagcaccaacatttccctgaaaaaatgtgttaggtgtttaaaaatctcatcgtaaataaattattttatttttagtttaagtgaatttctcttaatttaaataagactaatatttttgtttgactgaagacccttgtactctctggtgtcagtttggtgtcacttgaaacaatgacaaccacgtcagcatgttactgcaatgtcagtgatggtttcaaaggagaaaatggatgtcatcttaggactgcttgtgtgtgtata

SEQ ID NO: 33966 - DNA, 1124 bp, Mus musculus
gctctgggcattggccctcttgtcaaaggtgtcagagcatggcttcctgtgaggggctttcccttgctcctgtgtgagaatctgtgcgttgtcttactggatgggggacctggatggagatgttaggggagatagcttagtcttgttctaaactctagacttgctaaaaagggttctcttgagtccaaatgcagtgccagagggtgagaagcagaattggccagtagtgaacagtggtattgtgggtgataagccctttctggtggccttaaatagcagtgctagtccttgagtgccacagggtcccctacctccgtcctggcagtgctgatgggtttgtttcagcatattttggttctcattctcatttagggaaaagggctgttgatgaagggattatcctcccaggcaccaggggcctcagcacagttccctgtgcttttaaacactgttgactttcattagttattctaaagggatttatattggagatacaactccctttggtttcatattatgaaatagctttgtactgtggaatgctaactctggaaagtctccctcataccagaaccaaacattcatttcttttatatatatatatatattatctccctggtactctccagggaggtggttattatcaagctgacccaaaggagtgcagtatgtgttctagttccttttctggtaccttgttcaacattcttttttcctgaagaacatccttttgtttatgaaaacgtgaatagcatcatgtaaaacaatcccttgctatcagaatgctccagtttggccttaattttgtaaaccttggagaggagtggagcgcggctgtgagaagagatgtaccatgtactctttctgtatcattaaagtgcagtttttatgcttctctctccttgatttcttcaggggaagggtcttggagttaggggaacacaggaactggttcttgacaacttctcaagtgcttaaatcagaaagcccctgagaaacgctagctacagttgtcttcctcaagcttccaggcccacggtgtgtctagggagtgtttcgggatctagtcattagactctgcccactctggtgctggagatggctcatggccagcagtctcgaag

SEQ ID NO: 33967 - DNA, 1725 bp, Mus musculus
ccgtccagcttttggaaccagtatacagcagcactgtccaacgggctggccatgaaggccaacgagatctctgtcattcagaacggcggcatccctccaattcctggaagcctgggcagtgggagcagctcacctatcagtgggctgactgggaacgtggaaaaactgggcaattcggaacccagtgctcctctggctggcctggagaaaatggcgagcagcgagaacggaaccaacttccgtttcacccgcttcgtggaggacagcaaagagatcgtcacaagctaaagctgccagagtgcttcctctcagaatgtcgcccgaggttgcctcctgcccctccccccgccctttaccttctggcccctgggactatgaactacactatgaagacattcttttgtatgttgttcaacctctagagttctaagaaagcttatttattagtgctataaccttgctttgcaaacagagtgcaggcattaactttggtcttctgtattttggactaaatactaatggactagagtgctcctagcttgctgtaacatttatggcaatcgcaagttgccctgctaggcggtcttaatccggcattaacttattttctatatccagtttaatatgaatctggtgttgatgcaatgcctccgtgatacgttagatctctaataaagtctgtatataaatgtacactttgatcctgctggaaaattttatcagcgaacacattgtctaatctttccaaacagatttaagggaaggactttaagtacaggctgaacatttggaaggcttagggtttgttgttgttgttgtttgtttgtttgtttgttttggttttggtttcattttgattctaaacttcaacctgctttttttttggttttgttttagagagttaaccatttccgttttgaactatttgtattgtgctttttacttgagtcgtcttcaatgttaatacgtttctgtacagtaataagcacgcagaattctttagaggaaaaaaaaaccacaagtgttgttttggtagttgaaactgagacgtagcattttggccttgtagggtatattcacagtagaaaacgtgtgctggaatttcacaatgctgctaacgatagcatcttgaacgaccttcagtggagaaatgtagatgctcttctatatacaataagaaatatcactttcattaaaatgtacatatgttccttacaagagcaaatgcctcttgatcaagagcaggtatagtgttggtttattttgtattaggtatggaaggaaaaaaatggactgttacatgcactttcttggaaagttgaaggggggggttccaatttctttaacatttaatacttactaacaacagagatactgtaattttactcaagtaatcaaatacattttttttgcaacagataaaacaacatattgtgtctgtgtttgtagagtgcatttctatttagccagggccctaaaggtagtttaacatttccctaggtagctgtaaattctgactgtgagctagtatctctaaataagaaaaaattgtaaaaggcataacagaattgggcatgcatgggcctgccttttgttttggtttgggttttttttttcatttggttttttgtttttattttgttgtttgtttttttgtttgcttgtttttgagatctggcgacctaactatttccactatatccatttcttgttttagagtgtata

SEQ ID NO: 33968 - DNA, 1632 bp, Mus musculus
gtgggaacaggttctctactaagggcaatctgaaagtccacttccagcgccacaaagagaagtacccccacatccagatgaacccctaccctgtaccggagcacttggacaatgtccccacgagcaccggcatcccctacggcatgtccatccctccagagaagccagttaccagctggctagacaccaagccagtcctgcccactctgaccacttccgtcggcctaccattgcctccaactctcccaagcctcacgcccttcatcaagacggaagagccagcccccatccctattagccattctgctgccagtccccaaggctcagtcaaaagtgactccggggcccctgatttggccacaagaaacccaagtggcgtccctgaggaagtggaagggtctgctgtgccaccctttggtggcaagggtgaagagagtaacatggcaagctccgccgtcccgacagcgggcaacagtactctgaactccccagtggctgacggtggtccaggagggaccaccttcaccaaccctctgttgcccctcatgtctgagcagttcaaggccaagtttccttttgggggactcttagattcggcccaggcctcagagacatccaagctgcagcaactggtagaaaacattgacaagaaggccacggatcccaatgagtgtatcatctgccaccgggttctcagctgtcagagcgccttgaaaatgcactaccggacacacactggggagaggcccttcaagtgtaagatctgcggccgggctttcaccacgaaagggaacctcaagacccactacagcgtccatcgggctatgcctccactcagagtccagcattcctgccccatctgtcagaagaagttcacaaacgcagtggtcctccagcagcatattcgtatgcacatgggaggccagatccccaacaccccagtccctgacaactaccctgagtccatggagtctgacacaggctcctttgatgagaaaaatttcgacgacttagacaacttctcagatgagaatatggaagagtgtcctgagggcagcatcccagacacacccaagtcagcggacgcttcccaagatagcctgtcatcttcgcctctgcccctcgagatgtcgagcatcgctgctctggaaaatcagatgaagatgatcaatgctggcctggcggagcagctgcaggccagcctgaagtctgtggagaacggatccatggaaggggatgtgctgaccaacgactcttcctcagtgggtggcgacatggagagccagagtgcaggcagcccagccatctcagagtctacctcttccatgcaggctctgtccccgtccaacagcacccaagaattccacaagtcacccggcatggaggaaaagccacagcgagtggggccaggcgagttcgccaatggtctatctcccaccccagtgaacggaggtgctttggacttgacttctagtcatgcagagaaaatcatcaaagaagattctctgggaatcctctttcctttcagagaccggggtaaatttaaaaacactgcttgcgacatttgtggcaagacctttgcttgtcagagtgccttggacattcactacagaagtcataccaaagagagac

SEQ ID NO: 33969 - DNA, 1153 bp, Mus musculus
tgactcatggcagaggtgtgatctggaggtttttttttttttttccatgttgggaacaatctaatggaggggacagatttgctaggctcaggactgtggccgctttgtggtttttctgtgtggtctgtaaatgcctttgatttcgacctgatgaaacggtcgagagcttagagtaaagctaagcctgccccagtgaattaaactgtctttgaacctctgaagcctgatgagttgatggctggtgccagctgtcagtctgtgtgaccccagcccccaccgggctccctgtagtcaggacaagcagaaggttccagttaaagttttttcactccgacgagtgtaaagcgggatatgtgttgaaaggagccaggatttggaaaaaggaagtccgcattaaaacctgtattctgccattagcaaagggattttgcctgagtgtttttcatctgctagaacagtctctgtggttctgtgtggactgaaggacttcatctgtgtacttacctgcccagcaagtgtgacatcaccaggctgtcaccccccatccccaccccaggggcaggccattggcatcgttaagtgaactgaaggcagaggaaggaagggggatctacttgtgcacaccacgaaggcttacatttggaagatctttaaaggcctgggttgttaaatgtttgggcctcaaagtggagctactgggaggtggtgggacctttaagaggtggggcctaggggaaaatgtacaggccagtggtgcatggtcttaaaggggcataagtcaggtctggcttgttccattctttctggctatgaagccggcagtttgctttgcacatgccccactatggcacctgacagaccagtgagcaagggtctagtgagaagacttagtggctaagagtagttactatttatgtcgagggaacctgagttcagttgccagagcccacactgaatagcatataactgccgctaactccagggaatccaacctttcctggtctcctaaggcacttgtatatgctccctctccctccttccccaaaccctaaaataaatctttttttttttttttaaagaagcccaaataaactctttcactagcaagtttattttcccaggtattgctatggtgagcggaagctgtcacatg

SEQ ID NO: 33970 - DNA, 1139 bp, Mus musculus
ctattcaggttcaagatagacaaaatgctgaaggtttgaacttcggtaaacctacctctctatgttcgttcaaagctgcttagtgttttcaaatccagtgtgggtgagacttaccatgcatcctttagtggaccaaaatctcctgaatttgaggttccatataggaacactgtcaacctggtttgtacataaccagaatcggttgcggtatacatgatgaactggttaattttttaattaaaatgttatatacatctctttatgggagagggggtatgtgatggtcagagaacaacttgcagaattcagttctgtcttttcaacatgtggattctggtggccaaagtagggcctcaagcactcttgccaactgagtcaacacggaagccaatattttaaagggtcttccccatgctaaccaggcactaccgagagctacatcttctacctaagcaatctcattctttaaatgagagaactcatgacctccagaatagatggttctcctagctgagatactgatggagctgggagaaaaaggtgccagaaaggttacaattacagctgtgcttactctaaaggatacttagtaacgagaacctcactgaaggagaattaagatgcgcagtcacgcccttggaactctcaactccctacattgcttatttgtattgtgttctattttgcgaacttaatttgagtcaaatttaaggccagtaccatttatctggcattgcaaaagttactccatatagatgaaaattttcagctacttgaaaaggaaaactttccttcccatgatctgatggaaaactcatggtctcttgaacacagctttctggtaattatgtatagctagtaattaagaaacatcaataattatcaacattactgtgctcacaatctgtgagtgccctcaaaaatgtgtagaatttattcccgtaataaaagcccccacgatccctatggctgtttttctatgtctccatcacagtaaggctgacactttgcaatgctttttaccaaacaagttccttttggtgttttttggttttgctttttttttttttttttaatttacttttttggtgttttgatgatatgtgaacttaaagttcaaatttaaaaaaaactcacta

SEQ ID NO: 33971 - DNA, 2438 bp, Mus musculus
tctcaaacacacaccattttggagggcagtgcctagataacctactcactgcatggaggtgctgggactgtgagacattttaccctggagtgtgacatatatatatatatattttttttccaagtaaagggatgtgcacttttacctgtaaatgaatagttgtgccccccacaggagcctgttttgttctgtacagaatattaataacctgtttgcaatgacttgtcacacacaaactactctgtgtacgttttcttgataaaggcttagtgaatacttactactaagtttaaaatacttttgttgttattttcctaggattctgatgcttcatgacatgccatcatgtagagcaataatgaacactggcctattttggactagccgacaaccctcagaaatgataccgtaataacctaccgcagggaagctgagcatactctatttggagtggacaactcaaattgtcacgggagtttcaaaatgacagacccaatgatggacttttttgatgatgctaatctctttggcgagactttagaaggcttgtcggatgatacatttgtacagcccggacctgtctcactggttgatgaactgaacttgggtgcagagtttgagcctttgcacatagactcactaaaccatgttcaaggtactccaacacaccagaagatggcagattttgaacagttaagtcagtttgactcgatgaagtttcatccagttaaccaatctttcggcagcccagttgaacacgtgttatctccacactctcaatttaattgctctccaattcatcccccaaaccagcccaatggcttgtttcaagatgtagcagatggcagtccaatgtggggtcaccagacagctactggcctcgctaatcaaaatggatccccctttcaccaaccaggacattcacactctctgcatcaaaacaaaagctttgtggcgcaccctgactttgccttatttcaggccagtgaacatcaaacacagtgttcttcccttcactcacaacaaagcagaagtaaccttaacccagggcaaaactctcttggccaggctaaaaattttctagacgctaatgtttccggcgcacacagagttaacgttaaccacctcgccactgccccctcctcacagcagactcttccagtgcagttttctccgactgcaaaccctcctgcacacttcctcaagtgcagcagtcaccaggaaggcaactataacagaccttctccaagtatgacttcctgctccgtgagtaactcgcaacagttcccttcacactattccttctccagtggtcacgtgtcaccaagcagtctcctgcagtcatctgcaggtctcgctcccggtcatacaaatcaggctttatctgattttgctggaagtaactccttttctcctcataggggaatgaagcaagaacccactcagcatctcctgaaccccactccatcactgaattcaaataattttcaaattttgcattcgtcacatcctcagggtaattatagcaactcaaaattatcgcccgtgcacatgaacttcccagatcctgttgacgcaggacctccagtgggtcatttcaatgaccacgcggaaactaatggtttctcatctttagaagagaatttacttcatcacgtagactctcatgcagaaccatttgcaggacttgaccctgaagacctcctgcaggagggtctcctcccccaatttgacgaatcaccatttggacaagataattcaaatcatgttttagatcatgacctggatcgccagttcacttcgcatcttgtatcgaggccttctgacatggctcaaactcagctgcaatatcaggctcggggctggccttccccactgtctaccaaccatcaacatttacatagcagaaatcatctatgtttacagcggcaggtatgtagccctctgtttttactttggcagtgcaagtgtgggtcagctactatgcagttcattttaaatgagacctttcaagagttcttaaagatcaaagttgtactgagcgtgcctatttcgacaggtttgtcttgctgttgactcttactgaaaagcaattctttttattttggagctgtgagatttaatatgtcttactgcttttgtgtttactttattataagactgtcttgttaaaattaaaccttagtatcaataagtaagtaggaaacaacagtttggagatattttagtatgactctgataggcatagaattgatgtacaagcccaaacagacttatcagtaacctaacatctccttgatccctgggtaaagtacacaggaggaaactcagaaaacaggtcctatggagctcacctctgtgggcttatcacctctgtgctcttggctttcagctgcctgaggcagggttgcaagtttaggttggtttgggtactttag

SEQ ID NO: 33972 - DNA, 1149 bp, Mus musculus
tctacagtggcacattttgcaggactacttatttatgtctttgcatgtctgtgtctctaatagacacacacccctggacggcagagaccatgctctgtttcttttgtatcccatcttctcacactgtcctgagataatggaagggatttaataaatgcttcctgaatattcgacattccttattctggccttttcactcttaaaatcagacacttacaaggcagtatcttcatttgaagctataaaaatctttagtgttcctttactggattatagtaaaataatttgagcttactctgcatttcaacaactttttatgtttttataaatgaaagttttttcattggatctttgcttatttatggatatttatcttttaaaactagtattctgaaaagcccgatgtgtgtatggataatatatttatttatttcagacgaaactgcattttagcagatgaaatgggtcttggcaaaaccattcagtcgattacattcctctacgaaatcctgctgacgggtataagaggacctttcctgattattgcaccgctttctaccattgcaaactgggaaagagaattccgaacatggactgatattaatgttgtcgtttatcacgggagcctgattagcagacagatgatacagcaatatgagatgtacttcagggactctcaggtgtgctgttactgattttgtttcctttttaaagactatggctgaatgcgactgtgttacatgtcaacaatttgcaattttttattcagattttaattacatacttgaggctcatttgtatttatattgtgctaagatttagtagctgaaaagcagcaactagagccagtttaacatttctagtttactatagcacagaatattgattataaaaatgtgtaagtttagtatagtctatggttcctaactaaatttatttatattaattaattaattaattaattaattaattaattaattaattaattaattttgagacagggtttctctatgtagccctggctgtcctggaactcactctgtttggcctcaaacttagaaatctacctgcctctgcctttcaagcgctgggattaaaggcgtgtgccaccactgcctggcctatttttattttttaacttctcttaaa

SEQ ID NO: 33973 - DNA, 1162 bp, Mus musculus
ggtgacaccacactgagcacctacactttttatgtaggtgctgggaattgagcagaggttctttctgaagcttacagaaacagccctctaccaaccaagttccccttccagcctcataggcagtgttattgaacagctatataatatatttctagtaatgaatgttttaagtgtctgtgtatgtaaaaatatcaatgaaaaatagcttataacccgttctatttttatgccataataaaaaaagtggacttaagccgggcgtggtggcgcacgcctttgatcccagcactcgggaggcagaggcaggcggatttctgagttcgaggccagcctggtctacaaagtgagctccaggacagccagggctatagagagaaaccctgtctcaaaaaaacaaaacaaaaaaaaaagtggacttaaggcattctcactgcattgtttggtaccttctaggggcgcatcatccgaggagcgtaccggttccaagccatcatcactacctttgaaatgattcttgggggctgtggagaacttaatgcaattgactggcgatgtgtgattattgatgaagcacacaggttaaaaaataaaaattgtaaactcctggagggtttgaaactcatgaatctggtaagtaacttaaagtatcattttgacttagttttctagctaggtagaaaaggacatggcgattcaaaactaatgctaaaatgttgttttgaatttttatagaactggtattttaaatgctatcttgctaattgagatattttgcttatttggccttaattagcatttgttgtaaagctgtaccactttctaagataagatttaattatttataaaattaaaagaagagggcctgagagatgctgcaacaggtaagaaagagcactctgctcttgcagaggagctgttcggttagcagctcccacatgggctcacagccatcaccaactctagttcgggggcctcctacctcctattgtagcctctgtagtactagagctgcatttggtacacatacactcaggcaaatgctcacacataaagtcaaaatcaatacaggagacctgtagatatgaaccattgaaaagaaaataaggccacaacatttcaaaccttaaattcctttataaaaagccatttctcatgctacatc

SEQ ID NO: 33974 - DNA, 1210 bp, Mus musculus
ttttaaatggttgctttgtataaggactgtagagacttgtacaagactccagcgtgtcctctgcagacactgctgtagtaactgagaggattcatgggggacactcacagcttcctgtgtagtcctgtcaaagttatcattaagtgacatcagcagcctagggatgtgagtggtgtctcattttgcagattttctattttgtttgtttttgcagcagtgtaaatcaaatcggtgtttctgtccacacaaatcagtgtgcaagtgttcgaccctcgtgcctcagtccccaggttccaaaatggggttttagcaatagaaatatgcacatctaggaatgcagacatttgtatctttatgttaccatgagtttcaaatgtagaaaatatttatgatgctgttgctttttaattttatagcaatacagggatgctgactttgccatatcttctttttcactatactcaacatttaaacttcctgcttttcatttaaatagatatttatatgagcgaattgatggtagagtcagaggaaatcttcgacaagcagccatagatcgatttagtaaacctgattcagatcgattcgttttcctcctgtgtacccgagctggtggtctgggcatcaacctaactgcagcagatacatgcattatttttgattctgattggaatcctcaaaatgacctccaggtaataaatttcttggttaacaaggaaggtaatttttttaaaaatccatgttactttttttttggtgatcctcatatttttatatagacagatcaatgtgtttctctaagaaacacctgtgtataatgaaattattttaattgtcatttaatgataataaaatacaccttttagtgttccttactaacttatgaaaatatgtaataattaaatacagtatttgtcttctttaaaatatggggtaggccatgtgtgagtgtgcatgcttcttaacccagctcttctgaggttgaagcagggagatttctgagcttgaggctggcttgatctatatagccaattccaggccagtcaaagccatggagtgagactttgcctcaaaataaaacaaaacaaaacaaaaaaaaccctaaatcccacagtaatataataaaataatacacgggggaaagtaaaatatgggcatgatcccctagctcagtgaaaggattccctctaagagtgatgtcctaggcttg

SEQ ID NO: 33975 - DNA, 1110 bp, Mus musculus
tcctttttgtttgtttctttgagacagggtctttctacacaactctggctgacctggaacttactaactagctcaggctgacctaaaacagagaaatctgcctgcctctgccttctgagtgctgagattaaagacatgagacatcacaccaggttaattctaccataatttcttaatgctcctgtagtattttagaaattatgcctttgtctcatgcagtttcctgctttaaaaaaaagataatatccttgtttattgcaagctttcaagttaacccacaatagtaacttgcttatttttgctcctaaactctagcccatgttggcattaaaaaccttttgccttaacaaatgatgttgtctttcaggtcactgtattggagcacggcttaagtacttgtacatatgccagattcagattctgtgaacagtaaatgaaaagagagaatcgcttatttacaaatgttttactttttcaatgtctaagtatttttacaacttctttctatatttcaggcaagttttgtagcatctgggaaccggacagatatttccttagatgatcccaacttctggcaaaaatgggctaaaaaagcagaactagatatagacaccatcagtggcagagtaagtatttatgaaggcgacatcaggctggttactgtgtgtagcagatgtacatatgagtttgcatttctgtcatttggaaagtcaaccaaacgttaaaagatgctgagaaaaatgcaccttaaaattattcaaacacaaatcatttaaaaagaaaaaaaagaaacatgggggaaatttgacaattctttcttacaaatttcaattactacatgtagaagatatgagggaaatgtaaagtcacccctaatccacgatgataataattatagcaggtaaatcctttaaggaatttaaaaattaatgggttgtttagaaaaaaaatgggaccggcgaaatggctcagtgtttgagaacactggctgctctcccaaaggtcctgagttcaattcccagtaagcacatagtggttcacaaccatctacaatgggattagactcctcctcctggcatcatgcaggtgtacatgcagacatagcactca

SEQ ID NO: 33976 - DNA, 1190 bp, Mus musculus
ggttttgagagttgtggttgatttcgttttctggaaagctgatcaagtgtggcgcatgtggtcaacctgaacagtgatggtcttttattctttgaagaaattcatataaaactctcaaggacataaagatgaccttagctgtcttaaggctaaaccattccctgttattaataaagcaaattctggagagcaagagaacaaatacatgtctcatatctagtgaaccaacagtaacggagggggtagcttacagcatcagaggacaccaaagtgagtattgtctctatttgtgaaattgacttaatttttataaagccatcttgaattgtgtttgagttgtaattgtcttagcactattacggttaatgtactaaagacccctgtgttacctacagagactccagaaagtctccagcaaccttctgcattcgaaacatctttcaaataatagctttttataacaaggtatttctgatttcaattgtacttttcatctttacaggcctctccgctcctgtgcccaggggccgaaaggggaagaaagtaaagactcagacaagctcctttgatatccagaaagcagagtggctgcggaaatataacccagagcagctcctgcaagacgagggctacaagaaacatgtaaagcaccactgcaacaagtaggtcgtggggggcagctttgagacactcatgttcctgcgtgtgccggtgctaaccgagtctagtgagagcacagtctaagcttttacctccatgtggtgtcttcacgtagtcatgaaatgtcttatgtagttctatcagcaataaaattaatctccagataaacttgtcccttcctgggcatttaataatgaccattgtaaagatcttttagtatcttctgtgtagcatcagtgatggcagtcacttgatcatacttaatcattattattaaaagactctgtatgagcaaggggtagtgcacacacctgttctctgtctgctggggaaggcaatggcaggagacgtcacccatgagttcatagtttcagaccagacaaagctgcatagcaaatcctctcaaacaagcagacagacaaaacacaccagaaagttaacaaaagtctatagataatcccccaccttgactggtttttccctttagtgacttaacatctttgtgtctcctgtagttggttggttggttg

SEQ ID NO: 33977 - DNA, 1147 bp, Mus musculus
gtgggtgatgggaaccaaacctaggtcttcagcaaggtcagcggtgctctcagttgttgaaccatctccagctctggtttcattgttgttgctgtggcatttttttttaagatttgattttttaatgatgtgtgttcacatgcgtccaatgcacaagtcattaaaaagagaatgttggatcacctggagctgaaattaaaggctgtggttagcagcgtaacatgggtcctgggaactgaacctgggtcttttacatgcgcaggaactctctgaaccactgggccctccctctatttttctttgtaacagatacattaaaaaatttgtgatattgtttgaccgtgtaatatttagtgactatttcaagacagcatatttagcatgtattacttaaatataatgttcctttaatcccagaatatcagtattgtgcatataaggaacccttgtgttttcacaacttttttctgtcctctgaatcattataactggcggtccttccaggttatgaaaagtacaacacgatcagagcagacccagctttgtgcttcttggaaagagtgggcaagcctgacgacaaggctgtcgctgctgagcagagagccaatgactacatggatgggtatgtgtgggtcacacttggctccatgggcttgctttccctgtctgtggggttcatctttgtctttagatttgtttactgtttgttttatgcaattttcctgcatgtatgtatagataacatttgcatgcctagtgctcctaaagtcagaaaagggctttggatctcctgggactggagttatagagagttgagaaccagttttgtgggtgtcacgaatcaaacctgggttccctacaagagcagcaagtgctctaatccactaaacttactttacaactcaaggtttatctgtgttggggggggatggggggtgttagcaagaccacgtgcattgagtgcataggacgactgcaggtgttattttcagctcttgccaaccttttttttttgggagagagaggccttttttcagggagtgggcaaatctggtaaatgaacaagctccaggaaccccccatctgtaccttcctaccattgggctcataagtgtgtaccaaatcgcactactttttctgcagtgct

SEQ ID NO: 33978 - DNA, 1156 bp, Mus musculus
gggggtgagatgtgtgtgcatcggagaacagcttgcgaaagcctcttttcatttttcaccatctgcatcctatagcagacttggtggcaaacagtgctttatctactgagccatcttgctggcacattgattattttcttgatcactaaagtctgtctttctgccctcctaaaattctttctatagcacatacaataatagcatttcatactgcaaatctgtttaaaaacactttatcattttctttaaggacagggtcatataattttgtattctgtgcatattttcttatttagtaaacatgcagaagccagttggcagtgactgaaggcacagacagtatatatcaattaagttatggatggataagtcaactagaattttaaaattatttcaaggatcaaatctggctttgatcctgtaagtcattcagtactataagcattttaaattatgttacagccattattttcaccattaataaatattttagtgatgtgtgcatgtattttttaatctcaatctgattcattatagatggacaaggagagaagaagctgacttttatcgagttgtgtctacatttggagtagtttttgacccagacagagggcagtttgattggacaaaattcagagctctggctaggctacacaagaaaactgataacagcttggagaagtatttgtgtgcattcatgtccatgtgccggagggtttgccgtcttccttccaaagaaggtatgtgtaaggtttcccctgtagaaatcaaagaaacaataataatacatttaagaaattctaactttttagaactgtaaataaattatactgatagactcctgtcccttggccctattgctgcagtgagataaagagtaaagacacccaccaaagattaagaaaacaacttgtttaattctagcatcaggaggcagaggcaggtgatctttgagttcaaggccagtttggtctacatagtaagtttcaggcccgtcagggctatggagaagaggccctgtctctaacaaaaaccaaaaagaaagtgaattgtactgtttcaagaaaacactactcccttgtagccatccactgcctctggctcttacagtctttcaagtctctaaatcgttacagcatgtaaccccaactcggag

SEQ ID NO: 33979 - DNA, 1707 bp, Mus musculus
aacctaagttaccttatgcgttatgaaatttgcataaggtaacaggttacaaagacattttgtttctaataaacagatttcatttgtttattgggtatcactagatgtatttacaagtaaggttagaaaagttcttaaaaacaaattcctatttatggcaatatacttctgaaatgatcatgttactcattttaaaatatagatattttgtctcatgattttagtaattttaaaaacaatttctacatttacggtcctagaaattatagtgatactgtgtagaggcttttaaagttatcgcgtgttaaatcttccataaagcatttttgagattaacattttggtccttgtttcaatatagaattggtcgatccaaatatttttattcaaccaatcacagaggaacgtgcttctagaactttatatcgcattgaacttctaagaaaagtacgggagcaggcccttcgtcacccacagttgtttgaacgcttgaagctttgccatccaaatccagacttacctatctggtgggagtgtggctctcatgatagggatttgctcattggtgctgccaaacatggggtcagccggaccgactaccacattctccgtgatcctgaactctcgtttatggcagctcagaggaactacaatcagagtaaggcggctcactcaaggacttctgccccacttttacagcaataccaagtagcactttctgcttctcctcttacctctttgcctagactgctaggtgctaaaggtactcttctagaggatatgaaagttaagagtgaaagcctcacagaagagccccagtcctctgaagaagaatctatgtcttctatggaaacaaggacacgagttaaatctgagcctgtaagtccaaagaacggtgttttatcacaggctactggagaccagaagtctggtgggaaaagtgaaacagacagacgcatggttgcagccagaacagagcccctaactccaaacccagcttctaagaaaccgagagtccacaaaagaggatcccagtccagctctgattctgactctgactctgcgcgctcatcgtgttcttccagatcctcttcctcctcctcctcctcctcctcctgctcacactctcggtcaggctctagctcttcgtcatcctcatcttgttcttcggcatcttcctcctcctcctcatcttcctcctcctcctcctcatcttcttcatcatcatcagaagaaagtgacagtgaagaagatgtccagaagcgaggtacatgcacacatttgttatctttatgaccgcttttcaagtgaaaatgtagagaacttgatttacataactgaagcatgcttaactttgtaagcttaaactttatgcttataaattgtcttagaaaagcataattgaggaggaaactggagttccttacataatcctgttctgtagattagttgaacaggggagtctgaagttttgcgtaacggcttgccttctttatgactgccttaaatttgctgctttccccagaacaagtttattatgagcaaataatgtttacagcaaccaccaggaaccttagattaaatagacaaacaagagtaccatactccatactgccgcctacagtctgtagaaggacgcacaggaagagcttacgcccctcagcagagtagcctcaggtggcttttttctggggtgcctttgcaaca

SEQ ID NO: 33980 - DNA, 1203 bp, Mus musculus
atgaggttgagaatttagaaatggacgagcctgttctctttctatattcctacgtgttacttttgtaccctgcatctgtaaaggcagctccactaatagagcaccgtgctaacatgcacagagcctcaggtttaaccaaccattgtggttcacatttatattccatttctataattcaagcaagtgggaggtcccttggactgtttagtgacttcaaggacagcctacaatgcgtaagacttcgttgaaggaataaaatattaaaatagtaaatatatctttgtggtataatgcttttgaacttcaccaaagggaatttgtacttaaataatgtacagaattataatacatatgagaatatataagcatactacacacactgttatacctggcttaaaccatcaaagctcttaggttatttggtctgcaaaggtctggcctaagtactaaagagtaccttgatgttccctgcttttctaggaccgggtaatgatcaaccgcctggacagtatttgtcagacagttctgaaagggaagtggccgtcagctagaagacattatgatgctaacacggtggcgtccttctataccaccaaactgctggatagccccggagcagctacagaacgcggcgagcccagcgtccccacacccccagccgttgctgtcagagaagagcacgagcagtcagcacagatgtcaaaggtgaagaagcatgtacgagaaaaggagtttacagtgaaaatcaaagacgtatgtgcatttttattgccctagggcctggttgcgattgcggtgtgcagcatgcttttctgcagtggctgcctgctctcactcttccttccttccttccttcctcccttccttcacatccttgtctcagggtactgcagtgcttccttcctgtagctaggctgttcagggtgagcatcccattaaagcgctcatcactaagtaggcctctctcctgagaatggttctgcacaaggtgtttcctgaagcgtgtgactatttctgttctggcattttaaaatatttatgtggtatatcaatgtacgtactttctcaaacacttaatgtgtcccattattaggaatgcttttttaatatgatctttgaagtttaattatttgttatcaaaaatatgggtgagctttagtgtggaagacagacatgtaacactggccctttaaggctaggaag

SEQ ID NO: 33981 - DNA, 1151 bp, Mus musculus
attttattttcactggcatcagtttggtcttctgtggattcattaaccattctgtgtaattttctacttactgaccctgcagttgaaaggctggggatataacttggtggctaaagcatttgccatgtgagcctgaagatcggcctcagggtgctcagtacttcataagggctgtaatcccagtgcttgttagccagcaacagggcatccttggggcaagctggcgagctagacgagccagatcaatgaggtctagattcagtgagagaccctgcctcattaaataaagtggagaagtggagagcaattgaggaagacacccaatgacaggcaatttctgtccttcaaatatacatgcagatgtttgtgcacacgagtgcactcatatctaccatacacacacacacacacacacacacacactcatacgctcccctgacccctgcaagaacatcccgtgtgagtgtttctattcgtgaagtatccgtctcccaaatcattcttcttaacgtgttagctctatggttaaagagctctctttcgcactaaaatatgaggacaaatggagaccagctgtgggctctcttgcccacccaacgtgagtttactgttctcatccttaacccgaaagcttctctagaagatacagtcagtataaatgaggtcgtgtgaagggttcagtggctttgcagctgaagattgtccagttgtcacctataagtaattctttgatgaataatactacacatagtgtacagtaactacatataaaatactgtatgttatatagcaatgtagtttatgtagctgttactattatgcttctttattataccagtgctttttatattaacaatataaatataagggctgaaggggtggatcagtggataagaatggatacagctcttgcagaggacctgggttcagttcctagcacccacttcaggcagccacagatgtctcacctctagccccaaggcttcagtgccctcctccgaactccacaagcacctgcacttatgtatacacatacacacatacataatttcaaattaataaaatcttaagcaatataacaacagtgatatgcatattatgtgataccaattataacgctagttttaaaactacataaaactatgttaaag

SEQ ID NO: 33982 - DNA, 1097 bp, Mus musculus
ttatagtacactttgataattataaatgtgaaatctggatctgccttccttcttgggcttgtcagaaattagttaccattaacatttctgagccttgtcattgtgtgtgagatgaagtgagaggagcaggatgtgacacctctgtgaggagttaaataaaacaggatgccgagtggccagtaaagagttgactacatgtgaggtaaggtgattcacaccagaatcccagaacacagatggagaaagcaggaggattgggatgggagccagtgggagccaccgagtgacagagatctagattaccagtccccaagtctttaaactgagaaacgggcatgtttttaatccaagaacttcttagtttgatgtataaaagaactaacttcaaatccatttagagaagttgtgttgtttaagttttcagccactgttttgcatttctaattgattaggtacttccattcagccaaccctcggtgccaacggagcgatactcgacagccagcctatagtgaagaaaaggcggggaaggaggaggaatgtagaaggtgctgacatcctctttttgaacagaaataagccacctaatcatgtaagtaaatctattgtaaagttatttaaccttaagcctgaaattcaatcttaataagtacacacttattgttttatatttttaataaaataaataataaggaaattagtcttccatactcttaaattggatcttaataatatttggcactggcagagagagttataaaaactttaacttaaaaaggcttggcaggggctggcgagatggctcagtggttaagagcacagactgctcttctgaaggtcccaggttcaaattccagcaaccacatggtggctcacaaccatccataacaaaatccgatgccctcttcaggagtatctgaggatagctacagtgtacttacatataattaattaattaatttttaaaaaagaggcttggcagaattttatacaatgctttcttcttcttcaaaaagaaagtgactgttgaatctggacatgagagagtacttgtgtgaccccggtatgcaggaggcagaggcacaaggatcactgcc

SEQ ID NO: 33983 - DNA, 1163 bp, Mus musculus
gagagtgtcatccctgaccacgaatctcatacccaaggagctacagcatgaactatggaggatgctgcttgttgcttcagtccttgcttactaacttacttggaggctcatgctcggccagctttttctatagttcagggtctcctggctagggagtagtcccacctacagtgggcaaggcacatctacgttaattagcaatcaagacggtccttccatggacatgccctttaagtcagtctgatctaggcagttcttcaataaagtttccaattctaggttgcatctgccaagttggcagttacaaataaccagaggacaaaagctaatgtgtttatttagtatttcggtagcccagttagattggagtgaccctttttaaatataattacgcatattgttgcagattgctcaaaaatacatattttaaagaaattctatatcagaaatcaaataaacaacttcatacttaatagtgttaacggtctaactacctttgtttgtttgcttacaggttggaggcgcatttgctcctcctttgaaagacttatgtagattcctgaaagaaaattcagaatatggagtggctcctgaatggggagatgttgttaaacagtctgtgagtatctcacaaatacgtcatgttagagagtaaaccatttgattctgccttagattaagctctcttgccaggataagaattccatgaacaccgacaatagctttcagttctcagtcttgatttttcagagtgtgtaattgatgataggatagcattcagaccaggaatgcttccctttttattgcaaacattgtttggatactgctacaaagaataatcaaataggtatgcaaagaaactcatataaaaatagtcaccatggaagggtctctgtagatagctcagactggctttgaactccaattctgcctcagctccctgtgcactggagttatactactttggtaactttctatatattggaattctgtacaactatttaaaaatgatgtcttagaaaattatctggaatcaagaggaaaaatgttggcaacacacaagtatcttcgtagttcagatcttgggctgttagagcctaactacataataaatattctaaatatttattatttctataggtagtcaaatggaaaaggcaagt

SEQ ID NO: 33984 - DNA, 1684 bp, Mus musculus
acaattagaacagacttagacattctaaggagaggtaaatcttagcattttcctcgtgtctcaatcatgctaaagtttgcaaggtggtaaatttgggaggagtaccccagttctttcctatgggaaaactgacttccagtatgtttcaacagagctgttgttgtcctggactaagcgattgtactgggtttcccaagacctttaccagtaaattatgtttctgtatgtaaaaacgtaacccattattagacaatgttatatgtatttaccaaattatgtaagttccattgggattgtattattaatttttgtattttctcaaaatagtactttgaattgatagttctttatgcaatgtcttagcaatagtcactgtaatgcccatccaggagcagtgggtagtaatccttcatcatgaaaatgatatactacatatttactgtgttccctttgcagtattgcacttttgtttaactagaacatacctgtgagatagccaaagtttttcagaccgttaccttggtttgcagtggagtgtttcaataccacccgcagcccactcttcctctaggcctgcccataggacctttattcctctttcccaattaaaagaaaatgaggttaaaaagaaaaccttagatcttgtcattaaaatctaatttatagcaaaatctatgagataaagtattttcctaattatggtctaataaatttggataacatcctagtgattctttctatatataagttagttaccgttttcaaagcataaggctaatattaactttaaacattctcttgggtttcaagacatgcctttgtagattgattgggggaaggtggtccaggaatcagctaagaaaaccatgcagatctggaaatacaaagttaagggttataggaagcaagtcaatgcagtcccacttactcaagctgcagctgaaaggctatcccagtacgtgttggtagttcctgagagagttatagctggtgttgccttgtggtctaccccttgtttcaggcctcatgactcagtcttagtccaagttttcttttggacatttgcaatatttaccagttgtgttttgtgtagtctaaatttgctttctgtagttgagcaaacgtcttaaaaagtcatttgtaatttattaaattactttctatgatgttctatagagcaaatggaagtttaattattttttattaaacatattctttgactacccatgatgtcagcctccctccgtacctgacactactttttcacttgagtcttaatataatttatctcactcaagttataaaggaaaccatagctataaatcttcaacagcactgcgtactttagaagaaatgcggatgttggtcttggtgtagtttttcactgggtatttgtcacctaggctggcctcaaactcggggctcagtgatacttaagggattgaagttttctatatttatatataattgccttttaaatgccaggtttttgttttcagttcattgatggttcactgatattgatgtctgcataaataggaaatagctcttttggagtgttgactattaaagcccatatagatatgccttatagataaagcagcctccaccttatgccaagcactgtgtttcctttcttccccttcggtccctaaaacttccaagacgactaaaaagacaagcc

SEQ ID NO: 33985 - DNA, 1124 bp, Mus musculus
ctgtataattttttaagtgttgttttttttgttttgttttgttttttaatttgaacgtaaggctcatttgcagaacagagttctgatgtttttcagatattcccccaagcttttatttttccaacagcctttagtcacattactaattcaattgataatttatatagttctttctctatgtgaggcaggatgttacagctcagtcggtcctcctgagcatgggttacaggttgaggaagcgtgtccctttctgtttgtcctggggatgttgcatatccatctctgacttcatctctcttcatcttttgaggcatatgtaaattagttacacatgcccaccatgtgctgagcagactaacatttctgtttccgtgtactgtatgttggcgagttggtgctgaccattgtctccatcttgtgattttatacaccacaggcctgtccgaggactgtcaccccaaggactctaaagcgtcctccgacccgccgtgtgtcattgagaagctgtgctccttacacgacggtctagtgttggaggccaaggggataaaggaacacttctggaaaccctatattaggaaactgtttgagaaaaaggttcgtaagtaatgacatacggacgttttctgggtaaagactcggtcgcacgtaacccaagaacctttcttttcatcgtagcttctcaaggggaaggaagaaaatcttactggcttcctggagcccggaaactttggagagagtttgtgagtacttacgctgcacacctgctaggatggtttggttgcttgcttgctttctggggttttttttttgtttttgtttgtttggttttggttttggtttttggttttttggttttttggttttgttttgttttttggtttttgtttttgttttgaggcagggtttctatttgtagccttggctattctggaatttgttctgtagaccaggctggcctccaactcagagattccccctgcctctgcctccccatgcccggcttgctctgatactttaacttagctgtgaggagacctcgcgctcagtgtttgtactgtttgtacgttggatggttttaatgctttatggtagaactcatagaagccatcacagttctggaa

SEQ ID NO: 33986 - DNA, 1928 bp, Mus musculus
gcctttgagaggcacaggcaggcccgcatttaaggctaagcctggtctaaagggcaagttccaggacagccagggctacacagagaaaccctaaaaattgtttcttaagttttattagaattaccttagttattgaaaaatgaatgctgtacatgtttagaaaactataaactttttaatcttttttgccctttaagcttttctccgtggaacccttctgtacatgatgaggccagagaaaagatgctgactcagaaggtaagtacatggccgcctttgacagggctgccctggaggccaccgtccatacagcttggggaaaccagtcatggctctcagcttgctcatcagtccttttttttttttttttttttaatgtctgtttttgattgtgcccagaagaagcctgatgaacagcacaataaaagtgttcatgttgctggcctgtcatgggtaaagcctggctcagtacaacctttcagtaaagaagagaaaacagtagcaacctaagagatggtggatctggtgcaccgtgcactttcctgctggactctggcctagttaaagctgactaatggcaaaggactgcctgaagagtaaacttcgtgaaccgtgactggctatcagtgttgtgtatgcgtaggttctaacagcaggttatggagacctctcattaagtagagttacttctgtcggaagtgtcagggtggatctagttcagtactccaaattattggggaccttgaggcttaagtatttttctgaatatgttagaggtaagttgtgtttacttaaactaacagaacagagagactgtaatgagtacaatgagtaccatgtaatagtttggagttggtagtttcagctgtacatatgttaggccatgaagaagggtgtagaggacagactccgagtgcagcactttcaagtagaagcctggcttcccagcttcagcctgctgacttgctgtaaacatctatctcagaagcattaggaacgtaggcagaaccaggatgcttcatcatagggttttttttttttaattttttttttaaggcaaattactgtatttttatggcaggaagaagaaaaaagtgttcaaacggtttctgatgaagtcaggtatttaaatggtgaatgactgatgtgttagtggagatgaaataaaccaataaatgattgattgtcatttatgcaggaaagtaatgctccttttcaatataactaaacagagactaatttataagtgctttattgaaaaatacacatattttcatataaaattacagtagcggtactaaggttttctaagtactctgcacagcactactctgtggtgggggggggagtgccaggcttgtaggtcctcagctgggtgctgtagagcagcatgaagttacctagtaacttggtttatcatgatccaatttacaattgaattttttccttaggattattaatccaacttaaaaaaacgacaataatgattaataaagatatgcgtagataatcaatagctgttaaataattttctaatttgtataaatggtactatgtactaataaaaacctcacttctccaacctatttttttaacttccaggaataccctcaaagatagtttctttgggataactacttccaaaaggaaggggtcaaaacttttcaaatactctcaattcaacttgacttaaaaatctttacttagctaaaagatccctatgtaatgccactaccacaaatggaagttttttacatgtggccagaacatgtagctatatcagcagtcttttaagaaaagcattaaaagaaattattagctgtttagcctaaggcttgtacctaccaaagttcacaccatagaaagtgccatcataaatatacagcaaaccctgggtcacaatgctatgcatcttacagccataaagt

SEQ ID NO: 33987 - DNA, 1126 bp, Mus musculus
cctcagaagatgccctacttgaaagaggagccctatttcggcatggggaagatggcggtgagctggcatcacgatgagaacctggtggacaggtcagccgtggcagtgtacagctatagctgcgaaggtacagtctgctctgggggaaagcatgctcgatggcagtgtggccagagcctctgaggctctgaggatgagtaagcacactcgtgtctgtgtgttgggtgtcctttcctttcctggccggtctcaccagtatatctgcagagcacccctctcccccatctaaatcctctctggctcattgttccatcgtgcgcagaatacttctgcatgtaagcaccgctgtcgttttgtcttcctgatgcccaggagagcagcagttgttggatccgtgcatctgtaaagctcagggtagactcttcagtcaccacgattagtttgccgagaaagagccagggaaacaggagtctgtcaagtcgtcctcagttctcacaggtgcacattcttaacttgccaaaatgctttattgggcctgacatcaccatctcgattgtcgttatttgtcaggtatggacttgttcttggcttcctgtcatttttataagaccctgcttggcagaagcagttaaatgcctcctgtaggcagacaggccagtctccttgcctcttctaaggttccgacgccttggagcagagagctggagcttgccgacttggctgaccttgccgtcttttcctgctctcgtttctgtgtgtctagggtcccaagagtgtctcagaccttttttattacctgattattagacaaagtaataaggtattagaacttcctgtgcaaaccgagagtgctaagtcctttgaaagaactcactagcacttttaaggtcagtgtttcctggcagttccagttgctttgtctgatttctgttgttgttacttgttttctgtttgcttgaatgactgtattggaaaaattatttaagaccaaaaaaaaaaatctgtctcatggtactctttaaatgttttcatttttctggtcttgaatttgtcctcaggataattagtatcttttctaaatttaccctgggctttcagtccaaaacaaagaatgagatgaatggtt

SEQ ID NO: 33988 - DNA, 1198 bp, Mus musculus
gtcaccagctgagaaccttaatggctgtgtaggatcctctataactaattacatattgtgtgcttatgtggctaagatgatcaccacttctcccatcccttgggtaagttctttatttccagtgtcaatgtcatggccttcttagcttttcctgagggtgtttaattactcattatgacttgccattgcacatagtgagtggatgctgcctatacttcaggatctgagtatttgttccacgtgcctaaaagatttagcctgacctggattgccatcctagcaggccctcaactctgagacttccattttcttggctttcagaatgctctggagatcccagggtgtgctgggagctgcttaggtcaagcttttctcgcctgcctctctcaccctctgacgattaagttgccaaaggagacttgagcggggaagccattgtccttgttggtctatcacaaggacattataaccgccaccttcttgttctgctccacaggtggagtttgagtggctgaggcagttctggtttcaaggcaatcgatacaaactttgcaccgattggtggtgtgagcccatgactcacctggaggggctgtggaagaagatggagagcatggtaagtgcgtgaggtctgagcacgtcctctggggcaccacactgtgctgatcctaagccgtctgatttccacaggcaaatgtatacgtcgtccaagtaaacgcccgtgctaggttataatgggagcagcctgcaattctgtttcaggaaacatttctgatattcttcacagagggcgccctgctagacatgagccgggacacagcgtgcggacaggttaatagcagcacccagcattcacttgtggttttatgttccagccaccattcaaagggttttccttatcaagattataaatccttgcaacaattgatgtggacagcatggtgagccctaacttataaatgtgaaagcttaggtatagagaagctagatactcatccagggccactaaatagatggctgagatgagaggccaggctgcagagcacacctgattttactcaccatagcctagaggtttagcaaagagagaaatgtggatgtccctatgtatcactatggctaaaataaaaccatgttgtggggcctaaaaaaaaaaaaagaaaagaaaagtcatggtctggcaagatggggcagagtt

SEQ ID NO: 33989 - DNA, 1170 bp, Mus musculus
agctggtactatcctagaccctggggcaacagtgatgagtaacccttgattagaaatgggttatgtaacacagaacaaccaatactcagaaagagattgagtcacgatttcatggagatccaggtcccagggagaaaagacggggatcctgcttaggtgctctcgagtgactcacagttaagtcgtcctctgaggattgcccttcctctgccacactgtgctggctgctcgtgggcaaataaactgggtgtccttgagaacaagtaagaaggaaagaaaatcatgtatggtgtaggtccttgaatagaatcttgcaagagattcctcattctcaattttgaatgtggggcaaagtaggttttttttctagagcaaattgtatgattatgtcatagtggttgtctgtgtagactctgaggtttgactcttggctccacttccataactctagggaaggtacaactgaaaatcataagtagacaagttacttaactccctgtgaacctcacttctccccctttgtaatctgcctagggataatggtggaacctgtttcatagggttgatttaagtaattataaaacacctaggacaagtacctgacacacacggagtattctgtaaaatcatccttatcataggtcaggtggtagtttgaatgcgagcagccctcacaggctcatgtgtttgaatgtctccttcccagttggtggattgttcaggaaggattagggggtgtggcttctagggggcgtggccttgttagagaaggtgtggtagatcaggacgtttcaaaagcccatgccaggctcagtctctatgccttcttctgaaggatcaaacgtcagctctgagttactgcaccagcactgtgtctgcctgcctgttgctatgcttcccgccgtgttgatcatggagtcaccctctgaaaccataaacaagtctccagttaaatgctctctcttattaattaatttccttggccaagttgtcttctcacagcaatagaacagtgcccggacggaccaaaagaacaaagtcaagaatgcactctttcacactgccctctcctttggcagagtgtccaaatgtgaagccccacactgataatggaggcccgttagtgctgagtgaggtgtagagaggaaacaacctgcgctagtccttctc

SEQ ID NO: 33990 - DNA, 1203 bp, Mus musculus
aaagtaaaggttatcaatgctttgtcacataggttaaaaggttccacatacacacacacacacaccacacacacacacacacacacacacacacacacacacacacacacacacaccatcagtaagaaagggagggatgggttaagttcactaagcctgcctgttctctgagaaatatcaagtcaaagtgatttttaaatccaaagttcctagacgtaagggtgacctcgaaggacaaaagccttggcttgggagtagaggtctatacaaataactggtgttcctcaggccactgccacagggaagcttcccggccaccagactcatacagctagaatcttaggccttggatgctagttacggtccttctcagagtgctgcagtaacacacagcctgtgctgtgaggttgagtaaactgtgtctctgccctccggatgctgtggtgtttgaagatgtttggcccagagagtggcactgttaggaggtgtggccttgttggagttaagtatgtcactgtaggggaagtcaatgagatccgcctcctaaccatatgggagccagtcttctcctagcagccttcagatgaagaggtagaactctgagctcctcctgcaccatgcctgcctgcacactgtcatgctcctgtcttgataatggactctgagcctctgaacctgtaagccagccccaattaaatgttgtctttatatgagttgccttggtcgtggtgtctgttcacagcagtaaaacccaaactaagacagaggcttaacatctgaagcaccgctaatcagttttcattagacccgataaacagtcaagtattctgcctgggttatgatctcatttgatcccagataataatagtgctaactaagcacagaggccaggctgtttctgagtgcttatgagtccactcttcagctgcaggtatttttattagccctaattttaagaagggaaactagagaccacagccacagagacattaaataacttccccagggcacaaggcttctaggcagaagagctaggattccaaagcttgccctttggacttctcattactgccatcagaaccatctcatagccttgtgacacagattgccgacccttgtgggaatgctgtggggactgatttctaaggcatttgagatggtaccaatgcccaatgctgtggtaagtgtaaggagaacaatgga

SEQ ID NO: 33991 - DNA, 1138 bp, Mus musculus
gtttctggggcagcctcagatgtcccaggggaagttgccatctgtcctttatattaacagaatcttctgtacagtctacctgacatgcttgtcccagagatagatgttgttaattaaaggacggcatttgtcctttatctgaaataaatctctcttgccggaagaactattctctgaatctcaggaagcaggtaggagcgttcgccccatgtcctagcctgactaaagtcctaggccatgtccctgagtggtcactacttttgacttgtaggttagaagcatattttttgttgttgtagttactgctttttttcttatttctctattagcttattacttaaaattattgctttttataggagcttatggagatgaacatgacacataccattaactagtgagtctgtctgtgtgtgtgtgtgtgtgtgtgtgtgtgtgtgtgtgtgtgtgtgtacacgcatctgtgttaggtacggggatggggcgctgtgtttgggtctcagacattctcccccacactggacctgcacacagtagctttgacagcactttttgcagcctctcttccttgcaggtgcacagcctctgttcgtaatatcccttccacccctaaggaaagaacgatacaaatgtctgtccccagtaaagagccagggctctcccacacatgaggtggacttcacagaaaagacagcatcttccttaacctgcctgatctttgtcttcagaaacaaagaaaatgcagccagggaaacaggactgtgatttggcatctaaagtgtgttggcctttgtggctctattaatcccagagactgccagagtccagctttgtagaaatgagaaggcagcatctgctaaggaatgagggtggctgagctgtgctaatggtgacaggaaggactttagagtcacctgtgtggtggaggacaacagtggtcactttgcccttactcctttggtggcttgtggtggttcctttgcatagctacgagacagtggctgacaaacaggctacagaaggaaggcttgcttccagctcgtgagggtttgagctcttctttttttttcttttttttttttttagatttatttatttattatatgtaagtacatagtagctgtcttcagatactttt

SEQ ID NO: 33992 - DNA, 1153 bp, Mus musculus
cctggcccctggaaagcagctgaagcagtgggcagctggtatatcttcaatcttgcataccaacatctttctctgattcacagatttcctttatccccagcacttcctctggtatgtgcatctctgacagtaagcgatatctcttcttggatttgggcgttttgaaactgtgggtcctgggtgagaagggggagggagaaggggatggctggttactggactatttccaaaaggacttctcccccttcccccatttctgtctcacccacctctgactcccaagatccactgacctctgtgtccatgaaggagtgacattggagtaattgtgagtggcactatgaactctttgactttttaaatgatacacaatctgagaggaaaaaacattaatgtctgtccagttgtaattccgtgactaggtccataggataagatgctgtggaaactctcagtgagaggagaaatgtctttgggaggttcctgatgactttcactcacaaagcatagctctttccggtgtacagtgcggcatgaggctttggagagaggcagccgagagtcacggagtacaactggatatgagccatcagaggcccattcctgacagtctgatgggtctcagagtgccagaccatacccataatttattttcctaaataactgtaaccgaaaagattttccacgcactaagaagggtatttgaaggtcggatgtaagtgagagcccaaagtgactcggagcctgtctactttcatcattgtgggcctgttggcgctctggtacgaattgagtcctctctggcatgccagtatttcatggaaagcacagttgtctttgctggtcaccacatgctctggcttgcaggagcccccaggccttcagtaaagtgttggatctgttctagaggcaagtgaattattctatgagacaaacttggggaacaaccccccccctttgaccctgtgcatgtggaaatttcaattgaacaggtttctgctagggacagcagcttggctttgggtggcagctgcatctcttaacagttcctatgttattgcatctggatttactgcctaattctcaaaacaagccatgaagtaggcagcagttacagtccctacttggacttcatgacctgcctcctatgtta

SEQ ID NO: 33993 - DNA, 2318 bp, Mus musculus
gtagactcctctcaacccagtggttataggacctgggttccaattcaaaacagctagagaacaaagcccacagattctgaagtgttgaaacgttactgtgttttagtctgacttggtgttaaattagagcacccctccctccccccaaatattcttcactcaccaccccccacacacacctggagcccttttgtctcccaaggcagcagtagagatgggctaagcctgtgacaagcctcacctgctctcctctttggctggccacctcaaagacccggaagtaggcctggccatagggtgacagaactagagacatccatcccagcttctcaccgtggcttctagtggttagaccatccaagatggcagccagtgtctcaccgcggctgcacagatataaattcagctcagttgtcattaaaactccattcttcagttgccctggcgcatgctgatgactgctgatttagacgacacatacagatgtttatgtgttccacatctgtgagcgagccttccttctcccagccttctgtagtggctaaaacatggaggaaaacagtgaaaggcagtcaccactgtcacctctttcctcctctgagagggaaggggccatgagccctgtgcactgcacacaggaagaggaaggagctacaaggagacagccaaaccctgtctttgcggggcttccctgatccagtgacagagaccagccctgggaccactgttctgtggagctagtgtttctcctagaattccccactcatagatactgacaggtcgtatgggggcttgaagcacccagttcccaaccccgtgatgtcagagcgtcagagagagcatggactccgatttcaaagtgccaggagtaagacccaccgcagcactcactccatgacctttgcatgtccttgggtctcagttttctcatctgtatgattttgggaggtacccaaaatgccaactcctaatgtgaaaatgacgtgatatgacagagctacagatctagagtaatttctagcataccgctgaatatccgatatgttccagtgtcgttacgtgagctgacctggaagaggccgtcttcctcccccccccccccccgggtctgcagtcctttgccgtcttgtgtctcgtggcccacatctttccctagtgacctgaggccttttggtggctgaaaggttgacaacagttagcccatgattctcttgtattggccgagacctgcaattggaaggacacaacatagttgtggtttttgctgcatccaggattccagttaaggtgccttcctgcctagaatccaccatagaagctgcactccaccagccccaagggcttcctggtgcagggacccaaggctctcagaccttgatttgttcccctttgtctctgagccaggacttcctcatcagtagagagtgaggtacattctcacggggtaaaatggaacaacctaagtaacggtataggtggcttcatatgtcacaggctggcccgtctccccatccccagccatctggctctgtggtttattaggccccgtgatatttctttgttctatttaattgggtgccagaattaaaaattgagagattccacataaaataaaaatgtctgcattctctttagaagccagaatacctgtgagcccctgggtctccataatcgcatggcggtggcttggcaatgcctgtgacctttgtgctctgctgtgaccctgttgctccctgtcaccattttgtaaacctgcgtccgtcccagcagcactttctagagctgcttgctcgcatccttggtagaaagcagtagcgttgagtgctcagtccctgctcctcccattggtctaagttcatggtctgcttgtattgctgtgctgtgtgcatttgttcatacacaataaagaattaaacgatgagaagcctaagagcgtccgtgcttttctccttacatgccagtgtggggctggccttgctgggtgggtgaaggtggttctcaaattgtccagttgtacttacccacattcctctgggcctttcatgactgacagcaggttgcagatcacttgagaaaagtgctctaaaagatgcattacactgggcgtaggagggactcacggccttcctctctccagactctagcagtgtatcttcctttctcggggactctatggagccctaggttcgatagatcctaccgccaatccctgtctgccagggtacagagtgaacgcttagggatttatactgtcatggccaggaaacccagactgagacaagatcacagtagatgcctgtgcatggaatggaagcaac

SEQ ID NO: 33994 - DNA, 1181 bp, Mus musculus
tagtgccttggaagtggagaaaaagttactcaagacagctttccagccggtgccaaggcggtaagagactccgaatttgggaagcatagtgggagacccttcgggaggaataagaaaaacacagagccagtggcgggagccctttgccccctgggaaggtagcaaagtagctggcaaactattgctaaaggacccaaaaaatccactcttctgtcacttcttgtggacccatagacacggttccattctcggctggagcacctcaggcctgtggtacagagctaggggaagtctggcccttacaagaggcctgtggcgcagaaggcctctgcgtaatgtccacttccttccaagcccggtcttgacttctgatctctttagctcagcttttagttaatactcccacagctaaacaccggctttataggggatcccctatctaagcagtctccccaactctaaagctcactgtctctgcttccgttctcttccaggccacagaaccatctggacgctgctctggtcttatcagctctctcctcgtcttaacttttcaaccatttttaaatcgttgtactaattgtaaaaaacaaaacaaaacaaaatcgctctgtatagtgacgagttgcaagcatgtctgtgtatgattaccttaaaagaaacactaaacaacaacaacaacaacaacaacaacaggaaaggacaaaagaaagaaagaaagccagtccccccaccttggccctcccccaagtcaccccacatttagattgtgaggttccttcgttgtgttgatttcggggggggggggagtggggttacggagagaacaagcctgtctgactctttttgtatatacgggaaaatgtacatacgtgtgaaccaaattgtacaagaaagtatctattttttggctaaataaatgagctgttgccacttttgactataaccggcaggtctgccacatggaccggtttgctgcatggttctttggtgtttttggtgtttcttcccccccacccccggccgttgtttaaagaatctacaggaaaagatgagctgggtctgaggacagcaatggcagaagtcgttcgggcttaggtagccaggcttagaagcctctccaagaaggggtgatgagagtcgctgggcgaccgagaaaaaagggcaaagaccaaggagaa

SEQ ID NO: 33995 - DNA, 1199 bp, Mus musculus
tgtcaactctcacaaagggctaaaaagcatgctttttcacagatgggacttgaagcagatgcccctttctctcgccctcataccacatgcagccatcattgggaaaaggcaagaggatgctgactggcctactcaaaagcaacagcactctcagcacaagggaaaaaccaatatgtgccacttctagaacttttagctctaccctggagttgtcctcccccaaacctccttcctattaagcaagtcttgatgcctgtcttatttctctcttgaattccacctcatgtccctgctttggcactcaggatatagcctattcctcgtggcagcccatgagttcggccatgccatggggctggaacactctcaggaccctggagctctgatggccccgatctacacctacaccaagaacttccgattatcccatgatgacatcaaggggatccaggagctctatggtaagccgcagcttgtgggactctgaggggagaggtgtcttcgaggatcccacagcctgggtgggaagacgcaggagtggaaaatgccagacctcatctagttagaatggccagggacatcatcaggggacatggctcgtgcctggtcctcaggctttagagtaatgctccaaagggcttctgagacagctctgtcctttctagactctagttatccatgcctctcttggttcccatttccatgtgctaggtatatgaactgaggctaagaaaggcgtttagcccaatatcaactaggtttcagcagccaggtagggtttaggatccagaagagggagctgcctacagggcagaattttctctggcgtgaaatgggtgttactagttcttgtaagatgctcatgtttcattttgccatagaaacataataactgcttcctgccaccaatgatggcctattgtctgcgctttcagtgaggttagaggctaaaaagcagccagtcaatttcttaaaaaaagaaatcaattatataatagtcctagtggttcctggaccaagcgcgtggtgaaagtgaaacctggatggggaagctcacggactctgaacttgggaaagaatcagagatgcagacattgatgggtgacattgcagtcccgctaaggctacatgccagctggaatgatgcaactgttcgcctccctagactccactgttgcgcagcctgaggagtacaaaag

SEQ ID NO: 33996 - DNA, 2368 bp, Mus musculus
ttcttcctcgcttcctctccttttatagttttgggttgagtacagggttttacacacactgagcaagcgccctgctgctgagctgcactgtacccgagccatgggcaaggctcttctcatcacaggatgggcttgagtgacagctttgtgaagatgcctgtggagaaggggaaactgtcttcccgtttcccatctttctctctcttgtggctttatttcttataggcggttcttaaacaaaagttctgaagatgatggggcctcagagagactcctcccttctgaaggcacatcctctgaccccgtgaccctgcgccgaaggatgctggcagccgctgctgagcggagacttcagaggcaacggacaacctagtgcttcctcaccttcctcagcctcctgcccagctctacctaccggaagaggcctgtcccagttctgcctgctgtgtggagacctgcgactgcattgctgctgcataaagcatgtggtctttagtgtgtggacagctgacaaatttaatcctttgtaatactttctttgtgacatttctcttccccttagaaacattgcacattttaactctaggcatggcctcttctggtgttgactggacttgttgggagtaggggacgagcaaaaagaagtgggcactggggcgctcgcctgcctgcagcagctagtttgaatttctgttttgatataaaccacagcagatgttgagtattttagcaccacagctggaaggaagcacggatcttggggagggtgcataacagcagtcagaaggtgcgcagcaggagcctgaccaccactatggcaaagtagcctacgattaaatgctgtgcttagggaggaggccagtcccacaggcgcctggacctctagaccagcaggacatggtgtagaaagaactggtttggtacctggagtagaaagaggaagctcagggctgcagaatgaggaggcccttttctgcccttaacattcaggaccaatctgagcccagtccccagctggcttcacttccgtcactctggtgctctcgcatcacagaagcttgcccccatggctgccgcctcttcctttcctttggttatgactttaattccttggtcaacccaattaggctatgctaaacatatgggtttgatccttggaaaaaggcatggggcctgcccagcaagggcaggggtgtttggaggacactgctgaagaaacacctttcgtatctttgtccctggagcccttgagttccctgcttttgttcctgtgggtctcattaaacggaaacagaggatgttgaataatccacatgcctcaagcagactcggtcccagatcggctcaaattctccacgtatttaaggatttgaaacatgcaatcataggatacatagttttatgtcccattggattaaggttttttttttttaatgtttcaaaacatagttttatggtagtccttttgggaaaaatccagtattatctaaaattattggcaaagttaaatgtattttacatacctggaagtttttagactgttgataagtaactgagaaaggataacaggcgcctaggtgaagataatttatttcaataaatctttcaaaagccttaccttgaactgctgttagttaaattcctgtgggtttttgttttgttttactttgttttgctgagagcgtagcaatttgtttttattgtaaagcaacaataataaaaaggaaaatctcttgtagtgtggtgtgggggcagtggagtcccacgctgctctgtgtgtgccgtttgggttggggtttataatgctgttcaactgggaggggcgtggtttataatgctgttcaactgggagggcgtggtcgctcctgtgttttacttggaggaggaagcactgagcttgtctttgacacctttccaggctgcacatgaaaataaaggggaagctaagtccactgttcttccatttcagatgtcggaaggtgggaaccgcttgcagtccgtttcggagggtctacaacattgtagaatattgaacagatgtaaatggaagtgccttaacatggcttaagatgtccaaggagagacgccccaagtctatgcttggtttgctccctctgtagatgggttgggtcaaagggaagctggtgatgaagtaatctgaagagtcaagggttctgggtgcagtagaaggcttcatcatttcttggggacactggacaagtgctaagtgaaggcaccagctccaagaggcttctgggtcattttggaactattctgtagtcctcttttccttattggccatatttaatttttgtcttcttggatccttaattttttctttaagctttggcacttttatgtagcagag

SEQ ID NO: 33997 - DNA, 1184 bp, Mus musculus
gacttagagttgtgtcagatagaagtgggtgtttgccatgtaggatggacctcatcattgcaaagggcattcctaggaggtgggcaggcatggctgctttattgctgtcagctggaaaaggctcagcacaagctgatctcctgggttaggaagatattcctcagaaactgggggtgataaacttgaccaatttactttccatcttgttttttagaaatctgctttttaattagactaagaagtatttctcttttgcagtctcttcttgtgaccgtgagaacagctcatgtgattttaaggtgagtagaaatgttggagaggtgaccgacagttgcttgttcagttggctttgagatgtaatagttttaaacatatgacagtgtaactgaactataccatatttaagttaaaggaaaatatataacaatgtgactaaactataccatgtttaagttaaatttacttgtagtagtcagctaacatgctgttctcttttctgtctatattgtagatatgtaattcacctctgggacctcaaccacgaagggacgtgggaaggaaagggaacctatgtgtattacaccgactttgtcatggagctcgctctcctgtccctggacctcatgcaccacatccacatgctggtgagtcccccacacccacatgctggtgagtcccccacacccacatgctggtgagtcccccacgcccacatgctggtgagtaccccacgcccacatgctggtgagtcccccacgcccacatgctggtgagtcccccatgcccacatgctggtgagtcccccacacccacatgctggtgagtcccccacacccacatgctggtgagtcccccacacccacatgctggtgagtcccccacgcccacatgctggtgagtcccccacacccacatgctggtgagtcccccatacccacatgctggtgagtcccccacacccacatgctggtgagtcccccacacccacatgctggtgagtcccccacacccacatgcttcgggtggtggtgcccagcgcaggaggtaagtgctgtggtaggacatgccattaaactgctgaccagtcaatagagcatcctcagagcatgggaaaggggccttccctgcagtgtctgtggctttcctactcaacacatgctctttagtggtaatgggaaggaagg

SEQ ID NO: 33998 - DNA, 1238 bp, Mus musculus
acctgactctgtccttcagcactgactggggttgcagacaagtgtgcttctccactggctttcttgggtgtgggcttccaaactcaggtcttcagtgcttgataaatactgtacccactgagccacctccgcagccctacttttatagtttttgattatttagaaagtttaatcttttctattatttattaagtcaggatacagaagtcttaaaaataatactgataaccttggtgaacatgtaaaatataatatacttttacttctttgtacttaaggatactaagcaactgcttttttgttttttgtttttgttttgttttgtttttgtttgtttgttttgtttttttgaaacagggtttctctgtgtagccctggctgtcctggaactcactttgtagaccaggctggcctcaaactcagaaatccgcctgcctctgcctcctgagtgctgggattaaaggcatgtgccaccaaagcaactgctttttaatggttaaaattttataactgtttcagattgcaagtttcagttcacaatcactttgtcttacctctactcattatgagataactgttttctttgccttctgtacagagtgctctgtaaccttgcttttgttctattaacatcaatgaagtccacttggtatgctgcgactcacctttacaaacttttttccttttagcatctcaaagacaagttttggaattttattttctacaagttcattttcatttttggagtgctgaatgtccagactgtggaggaagtggtgatgtggtgcctctggtttgctggacttgtcttcctgcatctgatggttcagctctgcaaagacagatttgaatacgtgagtttttagccagcctctttccttgctcattcacatgtgtgtgccaagtttaatgtgagacacagtgtgagaaagtcacagggttgcatgctaaggcctgctagctcagctgtcaccgcctgcagtggtaagatgcctgttttccagggagctcccttgcccccattccccaagccctatagccactcctagccttggcttaggtcagagtgtgaaggagccttgatgtataccctgtgtacatcctgagctcttctggagagttccccatttttcttctcttgccctgactggtggagcttttctttctcactggtatgtacttttcttcttggagtcaagactgagtgagctgcctctgcttccagtctggctgtaaga

SEQ ID NO: 33999 - DNA, 1223 bp, Mus musculus
ctaaattcctgtcctctgaagagcagccagcagtctgtgctcttaaggctgagcctggtccataaaatgttagtctagtggccattatctctcaagggcaccttacatggttcctgcatgatgagctgtcccaagctgtggctttcatcagctcagctctcctcttggcttatccatttaacttgctgttctgcaatccaagctggctacacgtttatgacagtgacttatttttgtgttctcagctccccaaacttaaaaagcttttactggtttagtgtttgggttgctggctgctggagaggattttcagttttctatgaaagaagcttagcttttgtagtttaagattagattttccaacacattccacttgttttctatctcttgcttgggttaaactggactcacttgagtttgcctctgtttaaatacaagctgtaattcatctggagccattaaattcactttactattaactcatataacacacatggctatgaggggggaaaaaaaacccaaccaaatatatcaagattaagccagttaagtgcactttgtattctagtgagggattaaggctagagctaagttggaagaaatgcaggcattatactgttccattgagagaagagcagcgtgttgagaaagcaaagctttggctagggatgctgctgttcagtgggaaagcgtttgcctaggaaggtttgggttcagtccatgtgtcctccaaacagagaagttggtaattatgttcatatatagtatacaagcaccatttatagttgtgactttgagaatttgaacctggtttgtttataggaatgtataaagaaactggagttttgggttatgtttttatatttgtaaagcaaaagtttgatcaaaatgatcattgttctttttaaaagttttatttcactgttatttcaataaaaatatttaaaactgaatgactaattgtttgggatattggtggagggttgctcaacttcgtagaccagtagtgatcccacaaagacaagtttccttgtctgtggtaaggtccattgtgtaagggaccactttggcatagtgatggtttggactatcgatcaatgttatccatctcccccccctccccccttgagataggctctctatgttactctgtagacaaggctgaccttgaattcagaggtctgcctgcctccatctcccagatgcttcgattaaaggtgtaa

SEQ ID NO: 34000 - DNA, 1458 bp, Mus musculus
cagggcaaaggtgctgtatcgtgtgcacatgaacatgtgcacagagcaaaggtgctgtatcgtgtgcacatgaacatgtgcacagggtaaaggtgctgtatcgtgtgcacgtgaacatgtgtgtgcacagggcaaaggtgctatatcgtgtgcacatgaacatgtgtgtgcacagggcaaaggtgctgtatcgtgtgcacatgaacatgtgcacagggcaaaggtgctgtatcgtgtgcacatgaacatgtgtgtgcacagagcaaaggtgctgtatcgtgtgcacatgaacatgtgcacagggcaaaggacatgtaagaactgtttatgccttcaaggaactttgtgattcataattaacctaatttacactcttaatgtgtctcagggtaagtactcagctgcacttctgcagtgggaccagtgaggtcaatgttcattgtagtatagaaatgtttaacatgtcggaaggggagagatggccaggtgaaggtggaaactataactaatactgtttttaataaaagttttctgtttttttaaatgcaggttcaattttatatacaactgaattcctgtatgcagaagtaaaagaagccgtctctatgagcacagcttacacgtgtagaagagtaactgtagaacaagttttggttttctcttgttccctaaattgccaccaccttcctgtttgaagagtaaaatgaatatgaccgagatagtggtggaaacatgtggcagtgttcattagcttttggttctactcatacttttttttgtacattaaagaaagtgaatttcttatttgtatttttttttaagtttctcattaaactctgaaaagtcttagagccgaggatccttttttccctgctttagactggggaatgttaaaacatgatcatggatgagataaggtgagattgtgggccctttgctccagtagtgttggaagcatatggtcctaggctgttacaggtgtttgtaatgaggactttcctttactctggggaactaaatttctctgattaagttcaaggtacagtgtgtaccaaactacactctgttacaaagaattcccaatatattacctgacgagtatattttataaaactctctaggccttacttcacaagtcaagacattaaacatttgggagtacattaaaaataggtaagctgaaaaccattggaattggtataaaaagaagtccatctagaactcattgcagtattttcatataatggcatagtgattgtttgcactgctgtggattgcttcttactgagtgagccatgacaaaattacatgagtttttaaactctcaaattatagagttacagttatgggaatctgaggtgttgtatacgtaatgataaacatgattttagtaagcagcaaagcttttcaaaagtattttagagtaggctgggtatggcggtacatacgtagaacccc

SEQ ID NO: 34001 - DNA, 1194 bp, Mus musculus
aagcagaatatggaatgaaccgagcagcagtcagcgcccgggtcggaggtggctgcgatcctccccacacctcttgctgccgcgcctccctacagcaccccattaccatggctgaacggtgtccggcagctccaggcctcagccacctgcttcctcaggatttcttcagtgacagcgtccgaaaactctgccgatacctgcttctttcccttcttcattggccgcgctgggccaggatccgccggccgcttcccgttcatcttctcacggtgcacagacccacgccaaggaagtcaggacgctacttccctccagaaactacagttcccgaaaaccctctttccttatttcaccagcattacccaatggaaaggcagtaaagcacagggaggcgggatctccacaaaaataaccaatgggagatcaacatattgcgtcacgccgccagcaattggtcaaatggtcgcagtggcctgcctcccaacttcctgcctccggagcgtattcacttccggcgtgtgttccgcgcctcttgctctcgactgttaatggcgggtggtggctgctgagcgggacgcagataaccgctgcccgccccgcggacgtctccccgggcccccgctttctgcacgtccccggcgtcggagctgttcagcatgtctgtggtgccgcccaatcgctcgcagacgggctggccccggggggtcaaccagttcggcaacaagtacatccagcagaccaagcccctcaccctggagcgcaccattaatctgtaagtgcggcgcggcctcggccgttgatgctctcccagtgcgcgctcctccctcacgccggatgcgggttgtcccttccgggatgcgcgctttctttcctagacctgtttctcgaccccgacttggcagttttcctattttaaaagcgaggttcgtttccccctttcccttcattcagccatggttagaacctgcgtttgctttgaattcataatgtgtgtatcctttcaatccgttgctggttgtttcatcgcacatgtatttgtgtttatttgaacaattctcagttttgtagggtgtacatttcttttacagtaacttttccagattaacctctgacatcctagtttttttttttccccctttaaatgttgggtagtgttccatccagtggccacattttattaattttcgcgctgtt

SEQ ID NO: 34002 - DNA, 3763 bp, Mus musculus
ccctgggttgcagaaaaaaatgttttcccccattgcaattctcttcgttctgtagtaactgccttggcgactttctaactttggtgattttttttttaatttatggtgtatatacaaaatttagcagggtcacttttttttggcttagagtttggtttggtttggtttggtttcttttgacagggttgtactatgtagcccaggctagctctgaagtactgattctgccacctcaacctcctaagtgctggaattgcaggcatgagccactgcaccagttcctgcatgtgcagtccgtggaattgagcatactgaagtgctccaaagcacccgtcactgccatctggaaaacacccagacctcataggaagtggaaatggttttctgtcttcccataggggagtgctactgcccttctttgatgactgttcgcctcatgagtgaatcgtgcagtgggtctcgcttcctgattggcttgtttcacttagcacagcgtcctcaaggcctatcagtgtttttcttcttcactcctaagtagttgtagaaacttgctgagcccgagagctgtgacacacggtgctcccactgtgggctgagctccaccctgactctgaggatagggtaccctcggggaggtagtgttgctcttttggaagaggtctgcctgaaacctaacatagctccaggaattccatagctgcttactgccctatgtatttcctctcgtctactgccttccagacctggcatcgtggcttctctgagtctagcctcccagtgactatgcgttcctaaatgctggaaggccgggtgtggaacttgctgcctttcccttccttttgaaagacccccgtgctaaaaggcagtgtcaggaggagaagttcaggaggagaagccctccttttgtctctggtctttcccctgaactgctccatggggctgtggcacagctcttcccattgtgggggtgtgcatgatggctgagagatgtcctcacaccaccccacaccacatctatttgctgctttcttggttcctgactatccttgcaggtttcagtgtggactttacttatcggtaggaaaaacgctggacctttaagtatcttattcacacttctctgacgtcctaaaagtccatccaaatgcattctgtcttttacattggctttcaatttgttttgtttacccagtcagtaaaacacactttaacattcatatcctagtagatacttacaagttttatatgttttggtattaatcataaaacaaagtaatttttaaataatgacatgagaatatccagacctaaactgaggggacatactttaatcccagcttttggaaggtagaggcaagaggattaagagttcaagactatcctcagccacacagcgagtttaaggccagcctgggcagcagtacaccttgcctcaaaaacaaagatggagccaggagtgggaagcacgcatctttattctagcactcaggaggcagaggcaggcagatgtgtgaattcaaggccagcctggtctacaaagagagtttcaggacagtcagagctatatagtgaaaccctgattcaaaaattaaaaacaaaagactctccagacctagtttgagagttgtcttcccacgccaggcagtgaccaatgacaggctgttgcccacgcatactgttgtagactccaccgcactttaatccagagtagtgctcaagttggactacgcatactttgttgctaacggttacttttgaagcttgccttttctgaactgctgcagactaaaggcaggcccactcccccacccatcccaccctcactccccaccccccattgaagtgcctgagtgggaagaactctgaagggtccctctgtctttgcagagcctcctggtctgcaagaacaatagaacctacaggttgcctttctgctctagtgagcagctgcgtttttcagttgccatgtgccgcattgttgatgtatgggtgagacagatggtgtatgacagtgagcccgtacgtctacagtggagctgaaagatgcctgaattccaaatcactcaaagtcaccgagaggctagggagaacaggcagctgtgcacacaactgtcactcacaggccaccaccttatgtgttcactcacatgacctgctcagagtgtgtgctgttaaagcgctaactcccatgtgcagacaacacaggtggaaagcagtgagaatgaagacaatcaataagtgtatgggcctgtgtgtgtgtgtgtgtgtgttagtattaacagaaaattcagaaaggttaaaaatgaaaataactcaaaatatttttgtacagctatacaatataaagttataagtcaaagtttaaaataaagttctattgcataagctaaggctattgaagatggagtatttttaacgtgtcgtccatgttggaaggcagaaaagcttccacttagtctgtccaagaatactgtcacgtttgcacaagtgatcttgcctcagtttgcaattgcttcattcttgatcctgattgcttgctgctttgggcatggggcaagagagtcaaatgtgggctctcaatacctcttgttggtaaaagctatgctgctttctgtgtgaccaatggcatgtctctcttaataatgagcctctaattctttcttgttttcttattgattggtgttttcgagaagggtctatgtataccctagctctctaattgctaagattctagagtaccacggtgtccagctgtgaacttccagttctcataactccttttcctaaaggtgatattccctccaaagataacaatacataaacaatgcatgttcattgttgggaatttaaaagtgtggaaaaacacataggtcagctgaaaccccttgccaccaccctttgacaactgtgtgctgccgtaagcgtgtcagcatggccaccctgccctgtattaggaagcatggctcctctctgccctctcttccctctctcctgttgggtaaatacaaggttgtaaggcactttgtcaggctgggctcagagggagccactaaggccgccgctgcagacaagaatgaaaacagttttcagtggctccttaagaataaaaaggagcagccagagatgcgtttggagatctgtattccagctaatgctaccccaactgatagactgcctttagatttgttttcccttaatataaatgtttacacatacatttgagtgataaaaaaaaatggatgtctgtattttttgttttccccacaaaataaaagtgtttgtgcatttctgctatggtggtaatttataaacaacaacaaggaagaccagtgccttttatttttaatgaaaaagtaggtactccattttaaatttcagtaacaatttcggggggaataaattcatacactaactttatgtacaaaaacaagttaaattctgaaatggtgatatattttaagatacaaatcagcaacaccactgatatcaatgaaggaggctttcagccggagtgctttgtccttagctgtatcagttagcatggtttcatccttagcagctggatgcccaggctgtgatcgggagccagccaggctccgtgtctagaccttttgcaggggcttccttcctctttccctgtctcctatgaaggagcagtgcccactcgcatgattctgaagagggtgttgatgttgttgcttcgaatcgcatcccgacaagcactgatcacctggttctttggctttccaactgtgtgagaaaa

SEQ ID NO: 34003 - DNA, 1420 bp, Mus musculus
gagctagacaggctttttggcccctcctttagtaattactttaagggtacgaccggctaccccttccgaatgaattctgaagcactcctgctcctttaaactagtccttgagatagtggctcgcctacccgggtgatttgcctcaccttcctaggagaacagcgttcaggtactcccgggtcccactcaaccgcgctcactgactgccttctacttttagatggatcctgctcctgcgctggcgcctgcaaatgcaaacaatgcaaatgtacttcctgcaagaaaagtaagttggatcttctctgccatttccccgtcactctcctggggtccctagcccgccgcgccgcgccttccctcccgggagcgttcaggtggtgtgcctctgacaaggtttctcgctcacgttcaactcttctctccccacaggctgctgctcctgctgccccgtgggctgtgcgaagtgctcccagggctgcatctgcaaagaggcttccgacaagtgcagctgctgtgcctgaaggggggcggaggggtccccacatctgtgtaaatagaccatgtagaagcctagccttttttgtacaaccctgactcgttctccacaactttttctataaagcatgtaactgacaataaaagccgttgacttgattaattcagcttgtctctgtgcattggttaagggctggcagaggcgttgagatgggactgcagcagctgaatttgagctagtcggattatatttctctggactttgaccgcctagaaagtggtcatgcagaagcatgcattggtcacagaaatgggccattcctactgggcgtgtgtgtgtgtgtgtgtgtgtgtgtgtgtgtgtgtgtgtgtgtgtgtgtattggggattaaaccgaaagcttcctgcttactaaacccaggtgctctaatgcgccacatccctacccctaattattttcggtttttaggcttaaagtatgaaatacctgtaaataaaaatgggagtgagtcagatatgacgtctcccacgagtaataaccccaacacttgagagcctgaggcagaaggaccactaactctgaagccagcttggtctcaaattttggtgacctttggttttgaggccagatcttaactgtgtaacctaagctgtccttgagcttctgccttagacttataaattctgggcttacagactaaaatccatttttaaaaattcagtaacatgggctggcaaggtggctcgggttaagagcgctggctgctcttccagaagtcatgaggtcaattcccagaaaccacatggtggttcacaaccttccataatgagatctgacgccctcttctggtgtgtctgaagtcagctacagtgtacttaaaataataaatcttagccgggcgtggtggcgcacacctttaatccc

SEQ ID NO: 34004 - DNA, 2211 bp, Mus musculus
tctaatgcagtccccacctaaaatgatctctctggagggagggtaccttggtttttaaaaccagcctggagtagagcagatgggttaaggtgagtgacccctcagccctggacattcttagatgagccccctcaggagtagagaataatgttgagatgagttctgttggctaaaataatcaaggctagtctttataaaactgtctcctcttctcctagcttcgatccagagagagacctgggcggagctggtcgctgctcaggaactccaggaaaggagaagctgaggttaccacgctgcgaatgggtttacggagatagctggctttccggggtgagttctcgtaaactccagagcagcgataggccgtaatatcggggaaagcactatagggacatgatgttccacacgtcacatgggtcgtcctatccgagccagtcgtgccaaaggggcggtcccgctgtgcacactggcgctccagggagctctgcactccgcccgaaaagtgcgctcggctctgccaaggacgcggggcgcgtgactatgcgtgggctggagcaaccgcctgctgggtgcaaaccctttgcgcccggactcgtccaacgactataaagagggcaggctgtcctctaagcgtcaccacgacttcaacgtcctgagtaccttctcctcacttactccgtagctccagcttcaccagatctcggaatggaccccaactgctcctgctccaccggtaagactcccgatccttggtctttagaataccaagttgggaccgcagagcggaatccccgagttgtagaggcttggcgggaataggcacctttagttggcgattcattccggttctttctagaatccgctcttgcaaaagccttcattagttacgagtattgtcgaacgggtcctttggcggggttggggctaggatttagacgcgcaaatgtccggttcctgatcacccagttagtggggacatctgggttgagtcccaggcattactaaacttactgtgaattgcttgaattaagaaagaggtgaaggacctttatgtcttgggactcaaagacataatccctgacttaacctgtgaggagaaaagtggggctaggctccctgcagctccgaggaggacttagtgaactgagccgggactcgtggtgttggccactgctgtaatgctgcctccctcatgctgtcttctttctcctccccaggcggctcctgcacttgcaccagctcctgcgcctgcaagaactgcaagtgcacctcctgcaagaagagtgagttgggacaccttgggtggcggctaaggctaggggcggggaactcctacaaaactggctctgagaaatgtcctttgcttcccggaggccattgtattgtctcggggacagaactatacagagaactatttaaaaaaaccgaggtcttctctgttggggacaggaagcagaggtcttcagccaggctgacctcttcctcctcctttctaggctgctgctcctgctgtcccgtgggctgctccaaatgtgcccagggctgtgtctgcaaaggcgccgcggacaagtgcacgtgctgtgcctgatgtgacgaacagcgctgccaccacgtgtaaatagtatcggaccaacccagcgtcttcctatacagttccaccctgtttactaaacccccgttttctaccgagtacgtgaataataaaagcctgtttgagtctaactctggttttcttggtgtggtttggcaataagaaactggggtgacttgatagtctggggatctggttttggaccccctcgtgcctttacctcccgcctctggccctcacagaggggtaatgtctttgggtaaagccaagctatcccataagcttcctcatggaaaacagctgtgtgcctggtcaggtcttgtgttaggggaagggagggagggagggtggtcctggaagacttgatgtcccatcctggaagcacagaaaatcttatcatttatattctctttggattctggtttcctctcacattgttgggtataaggaggtgggtatgaaaattaacatagggtgtctcgtatgctaggcagggactaacactgaactagattccagaggggctttcttggctgttttgacacaagttgcttaccttgtcctagaactcattctgcagtccagtctgaccttgagtttttgattctcctgcctca

SEQ ID NO: 34005 - DNA, 1102 bp, Mus musculus
tggtctagaagcaagcggcggtgccagggtttcaaacgtacccagccattgctccttggtaactctgttttggagaagtacagctgccaagcctctaaggggataggaacacaatgtcttcccagggcctgacaaccagtcatttaacgtgcagccttttctttttcaagtcctgtgtgaaaggtcatcctcaattaccctctaccctgtgcagaacagggtgattgtagacctctgtgagataagattacggtaaattgaatgcttttggcgtgggtatttttagaacggcttgcttagtttcagaaggttcggtacaccattgtgaaaaaacctggcaagttgttgagaacatgggctgtggagccaggctgcctagctagctagacccactcccccacttaggatgtcaagtagcctgtcttggggacatgtcttaggatgacatgtggccaagtcccatgtctcatcatggggagcacacggggctgccatgaacctgaatgtgtctagaacagtccctggcacatatcagggactcaggactctctccctctcatccagccatggtgtgtggcagtcagcaggcaatctataagtgtgctctaagttaaatgagcatgtatcggatactgtctgccagtcacatactaatcaggtccaaccccactcagcttccaagaggagaggaaatataaatataacagaccccctgatagaagtcttcaaggctctgtttcctccagaacaacccagtcctaaaagatgaggacaaggggctgtgaggtcaaagagatgcagacacatctagaattaacgagtgacaattactgggggaatttacggacagaagtgtggacccaggcaccagaatgtccaatttggcatcccacattttgactcagttgggagtttaaaggcttgaacaaaagtgacttgacactactggaaggtagctggcttatcttaagatgatcatgaagagccgggtgcatcctgccagtctgactgcaaagtctcataaatgactccaccttatcaactcatggtttgctaagaaattgtgcagtgaccactaactagggttactccaggatagtca

SEQ ID NO: 34006 - DNA, 1147 bp, Mus musculus
aatccttttagaatatgtttggtatgctaaatgataacagatacatcacccagagcagccattgtacattctagcctctctccacccctgcaaatgctctcaacacggaaatatcagaacagatagttttacacaggtgtttctgggtggtttcattctgggaaagaatagtaattattaggtgagatttcccaagacacagcaatatagcatcccatgttggataaatgtgtatattttggagaagcattccttcatgatgctcacaggtcctttactagtgtgcattagctcctcttgtttctgacaaggactgcagcttttcagtaacatcccagttcagagtcaaagttttgaggctcctgagaggtctttggggaagagagagaaaaggttagctgtcaaattagacctgactctctgaaggtaccttctcccagaagcacctgccagtctgcctgctgtgtctctctgcagagggatcggaggaaggaatgttgttcctcttgcagtgtttacttagcttggatgtcaggtgaaatgtgtttatgtattatttgtgtaatctgaaaagtaatgaagtgagaagggcccctgcttgatgcgcagttagttcagtctacagggtaaaatcctcagcaggactgatggcaggcacggctgccttctctagtgtgcaagaaatgttccaaagacattacgtgaccagttaggaaattccagtttcattagtgacatcgctggcagcagtacttaatcctagaaatagagacattcatttgatttagatctgaagacatttagaaagggtttttgttgttgttgttcactcttgaatttcttaccaaaattgattgtcctgttataaaagaccaatgaaattaaattaggattcttgaatgcctccaaaccttattaatacatttaccttgtagagtgtgtttctgaaattggcagtctctaaatattgtgccatactgagactaaatgtgcagccagccaaaacaatttaggtgacatgccacagcacaaagtgtgtgcatatgtgtttatgaggacgacatcccagtgttgggagccagcctgaggggtacctctcacttggctggacagtgggagcttactgctgagcaaaaagaattttcaa

SEQ ID NO: 34007 - DNA, 1139 bp, Mus musculus
tcagctttccttctactaccatgtgggtctcagagatttaactcaggttgtcaggcctggcggccacactgagttctcaggccgggcccagagatgctttctaggggtaatattccaactctgtagcaaacactgccctgacaaaggagaagacagctgtgccctccccgagtccgtgagccgtggcctgggaccattcagtcctctgacctggatttatcagagcctgcctgtgcttctatagtgtgccgtcttcccttttgttcctggcctctgtcctctactatcttgcgccatgtttttcaggtgtttgtaaggctgggctcgtggtcagctttaatgtgctggccacaggtggagacctagccttatggacgattaggcactccgaggaagggaaggctaacataggcctctactgcctcttgctggcttcagaatgacttctgatctctaaggaagtgagagtatctcgtgctggttacttttgtttccttctttcagatctatatctataacgagaagattgtgagtggacacctacagcctaacctggtggacctgtgtgcctctgtcgcagagctggatgacaaggtagtgcccagacctaacctgggtagaaacccacattccgtgttcaaatggcgtcagcgccttactgactaggctgcagtatgctaagagagactgttttaagagttagcatttttttcccaatgttttttataaattggagtgattgtttttgtggtggctttttaaaaatacatccaagggtatgggggacttttgggagagcattggaaatgtaaatgaggaaaatacataattaaaaaaaaatcctcaaaagttctggctgggattagtcagtggtcagaggtcctgagctctgtttggcttcttgaccattttctctcctcaggtatcagcatgctctttaaggatgcagagggcggagttggtgctatctccttgaacttaacttacgccttcctcaccctcttacttccctggcagctttctcctttaggaagagcagcagtgggtggataggggtgggtgcattagaaggtgctggagggaaggcagaaggaagggaaggccagtacaggagcagaaacactcatacacaggtttgt

SEQ ID NO: 34008 - DNA, 1251 bp, Mus musculus
agacggctttctgggctctggcaagtcagcctgacctaattggcaagctcagaacagaaagggatactgtatcaaaacccaccacccacccgaagagtggcatgagaggtcgacctctgccctctaccctctgctgcacacacatgtgcatgctgataaacgtcaacagcaagacatttagggaaggacctgcttgagggatgttggagggaatattgagccctagaatccccagtcttcctaatgaggtcttagacctgtagaaggccgatgggcgaaaggatgtagtgctagcaattagaagtcaggtgagagtggtgggtgagcagagaggccctgtgctcaggatgatggagagcttccagactgttatgggcatgcttgcacttcacctttcaggatctttgctgagtctttctctctctgtgtcttcagattgtctccagctacagaaaacaaactccgacttcactaccgcagagccctcaggaacaacacagacccctacaagagagctgtgtactgtattattgggagatgcgatatcaccgacaatcagagtgaagtagccgacaagactgaggactacctatggttaaaagtaggcacagtgtcctttggctgctcaagtccgccatgctcaacgctcgtaatgcatgaagtttgtgtagtactcaggacagggacagtggattttgtatcaaatccactttattttttttattgtgtaattcccaactaataactacacagtcagctttctttttcttctttccttccctcctcttcccccacttccctttccctttgctttgctagggacggaatttagggcatcagtcatgctctactaaaatacagcccagccccaagaaccacagtgtgtcatgtagccccagctcacagcatcaagcttagctgctgggcagctacagctctgcgtgtgggtgacggtgtagtctgtaccaatgtgcttgtttcctttgggcatttagttgaaccaggtgtgttttgatgatgacggcaccagctcaccacaagacaggctcactctctcacagttccagaagcagctgctagaagactatggtaagatcctggacagtcaccatctcctttgggggggtatatggcttaccattttcaatcaggtacagaccattatgcgttaagaaatatgcatcacttggatacttgagagactgaagcaggaatatcctgagttcaaggccaacctaggaaacagtaaaa

SEQ ID NO: 34009 - DNA, 1173 bp, Mus musculus
taactgaaggccccttctctgacgctggccaagggaagtgtttgaactatggaaggtcaattgcagatgtgctatagaattggagaggtacctcctgcagccaagggctcatccccagggcttgtcagcctgctaggctttatccggacctgacttcaggataggtgttcctctagaccctaatcattttctcgttgtgtctttgcctatagggaggtatggacccagaaatggaagaccccaaccgcctccccccagaccgcgaagtgctggaccctgagcacaccagcccctcgtttatgagcacagcatggctagtcttcaagactttctttgcctctcttcttccagaaggcccaccagccctagccaactgatggcccttgtgctctgtcgctggtggctttgacagctcggactggatcgtctggctccggctccttttcctcccctggcgtggactcgacagagtcattgaaaacccacaggatgacatgtgcttctgtgccaagcaaaagcacaaactaagacatgaagccgtggtacaaactgaacagggcccctcatgtcgttattctgaagagctttaatgtatactgtatgtagtttcataggcactgtaagcagaaggcccagggtcgcatgttctgcctgagcacctccccagatgtgtgtgcatgtgtgctgtacatggaagtcatagacgtgtgtgcatgtgtgctctacatggaagtcatagatgcagaaacggttctgctggttcgatttgattcctgttggaatgttcaaattacactaagtgtactactttatataatcagtgaattgctagacatgttagcaggacttttctaggagagacttatgtataattgctttttaaaatgcagtgctttcctttaaaccgagggtggcgacttggcagaggtaaaacctttgccgagttttctgttcaataaagttttgctatgaatgactgtagcagagactcccattgtcctggcaagcttgctgtgtcttttgtcactggagaatcaacagttgagctgctgattcttaagtaacccaaatgcttctttcctaaaggactgtttgtgccagcaagggacaaggctgctgcagaggctcttggtaaccagggctgtgcctctgtgtggcctcatttcccaccta

SEQ ID NO: 34010 - DNA, 1233 bp, Mus musculus
ctgcccgtcggctgctgtgtgcatcggcatcctccctggcttgggcgcctactctgggagcagtgactccgaatccagttcagacagtgaaggcaccatcaatgctacagggaagatcgtctcctccatcttccgaaccaacaccttcctcgaggcaccctagctcctgatattaccacagggagcatctcagagggttggatgccagttctgcctcggcatcacctccctcagaaaacttactcacctgcttcctgtgcacatgtgacattttaacctaactcagaaatgtgtctcagtccacttgtggctcaaactcggcttgatttctctttatactcctgtgcagatgaccaaacctgtcccattgatatgaggagtcggggttcaggcttgtctcagaaatgtcacggacagtgcaaggacaggcagcagctggcctgccagggtttggtgtaccttgttgctgtcttgtttatctccttacctagcagcacaggaagcaagggcagcgttagcttcatatgttgttgtagatgaatgggtttcttggttctaccatgttgtgtgtgggcatagagaaaggggctgaccagctggtgacatggagctgtcccctagaactaacccttcctgggtgttgtgtgacttaagtaaaaatctcaagcctcacccacaaggctgtgagccaacgacagcccttgagcagagactcttccatgtcctcccctctccatccagcctgaggaggtaggaaggagctgaccacgagaacatgaccatcctctgcccaccttctctctctgaaaaaatgttttgattttgtttttgaaataaaagatttagtttaagattctaaacgttagagaagcaaacttactgaatcatagccagaaactataactgctgatagctatgctaaagagatgagtaatgcctagcagtttctggaatcctcagactgcaaactagtgggacatgcctgcctgttatgcctgcactctactccaccgaagcactgctgtttgcacatacagttgtagcttctgactgcgaagctgcttttagccagtctgaggtgctgctcagtgcttttcctttctccagtgtgccttcccccccagccccctcaacacacacacaacagcgcctgggccatgagcagccaaaagcagcaggctctggcctgtttctgtctcatggaggatgaagggagggaagggggaggaggga

SEQ ID NO: 34011 - DNA, 1105 bp, Mus musculus
aaccatttgcaagggaactgtagaatgacagtaactcccataataaattctggcctactttgtgctatacccagtgtgtcccacagtggttgtggttgtgggtcacctctcaagggtactctgtggagtgggcaccctgtcccttcagcagtgtggaggcttctgttgtgctcgtcctttattggaagggtgcagtgggtgacacaggtgggtgggactattctacttgattgaaatggccagaatgccctttcaattttagtatttgccattttaaaaacaatgtctgagtcagtaatgtatgtatataattatttagaaaagggatgttcagtacactgagctgtggccccaagaaagcccaggagtctttattctttgcctcttgcctactgtcctagtttgcttctctgtctgtctggttcccaaccaaggcagcttggaggaggaaaaggtttgtcttctacttgcagttctaagtccattactgtaggaagtcagggcaggaactcaggaggagctgtggaggagcgctgcttactggctttgctttttgtttttaacagattagaagagctctttacatcttaaaagttgttagctttgtgatgattgttgggcgtattcttcaccactgcctcccctgcactgtagccgatgtctcccagacactgctcactttgccttttgagatatggagcacacttacctccagcagtttctcccttccctgctagagaggagcagacccccttagctgaaatctgtgtcttagacaaccaatggccttagcatctcagtagctctggattcagtgtcccttcctcattctcttgagtatctgcacacgtgtggtttggtttgtagaaggcagtccgcaaaaggaacgtccttcggtccgggcagtgacttccgacctctgagcttgggcatcactttgtacagcatcttctggtgcagatttgggttagtgttttatactctagcctgaattcttacaacttacttgactcccctcatcagtaagcagggagaacacccacatacaagttgttacagtgatcaaatgaggctggaaacattcagagggaggaaagaatggagc

SEQ ID NO: 34012 - DNA, 1175 bp, Mus musculus
tgggctgaacgtcaggtgggcctggctcttctgcttccactctttacactcgtgtcttgttgtcctagatctgccacctccctccttcatagacgggacttgactgctaaagcgccttgagtacctgagagtctccattagaatctgctttggaagcaagaacaggtaaatcaaggcagtgagatggcagctgaaagaaggtggcaaatcttatagctgtgaagcaggatgtgagctgagaacaggtgtggagcccagaaggcccatttgtctagagtgctgcgacagggaaatagcttccgtgtgacatgctgtggaacgcaatgtcagagtgatcctagaatctctcagtgactgtggatagcacagatgtgtgctgtctgataagccagaataaaccccacgtctccagtgccgaacataggtgtgcactatcacaccggtgtatgtggtgcagggatgctaggcaagcattgtaccagccgagctacatccctaccctgctcctaaggatttgaattgtagttctcctttgattttttttttttttttttttctgtagactgtaccattatggatggagaggacgatagtaaccttgtcatcaaaaagaggtttgtgtctgaggcagagctagatgagcggcgcaaaaggaggcaagaagaatgggagaaagtgcgaaaaccagaagacccaaaaggtacgtagatagacctagagttggacatcattcatttaacctttttctaaaaaacaataatttgtttttatatgtattggtgttttgcctgcatgtgtgtctgtatgagggtgtcagatgccctagaactggagttaaagacagttgtgggccaccatgtggttgctgggaattgaactcaaatcctctggaagagcagcaagtacccttaaccactgaaccagcgctccagcccctcatttaactctttaatcttcgcaaaaactctgccaagaaggtgataactgtcctcactagaggctcccagggtgaagtaagctatatgaattctccacagcagaaccagtactccgtatttaccctcctccccccaccatagcgcctgccaggagattctgctagttgcttgcttgctacaagtggaggggcagtttgaactgagatgctgctaataggtttgaactggctgcccatc

SEQ ID NO: 34013 - DNA, 1178 bp, Mus musculus
aagcagtcaactgtcaaaagaaaatgggctggcttatttctgctaccctataaagcgtatagcacagacatgtgattccttgagtgtatctctacaggtagggtctgattttagaagggtacggtggccagccagatgttaacgtagtctgccatcacataattcaactccataggaaaacagagcccattaatctgcatcacagcactagttacaagttccgtgcactaagctttcagttctaggatgatgatcactttgtaagttgggcacttttagaccttgcacaatctgctatgagacaccctgttttgtctccccagcctggaaaggaaatactgactccagtagaaacacagtactgcagtgtgtaacaggttaccctgccttgaagcataagatctttgttttttggctgttaaatgagtttgtaagccatggctctttttggagacagaagtctcactgtataataaaccaggttggcctcaaacttttcaatccttgaaacttgcttaagtttaaacagagtgatttttatttctaaaaaatccatattgaagaatgttgaatgtttctttttaaaaaaaaaaaagaatgttgggctgagtatgtagttcagcaatagagcatttacctagcttgtgagttactctaggtttgaccatcagcactgggggggggggggggagtatttggtttcatagttgaactcatttttcagataccttgaaacagctggacaaggaaagaaaagctcattttaatcagtcagtgtgtctgtctgtctcttaccctccacccctcacagcatctcacagtagccttgactgtcctagaattcgtcatgcagagagtgctgacctagaacttagagagatccttctgcctctgccctctgagtgcatgctggtactgaaggtgtgcgccaccacgcctggtgtatttaatcttcctagagttgaacataggaaggacaaaataggccttccatgtaaatcctctcagtcctgtgtcggtcctgatgcttagatccccctaatcctgggcttcttgtctgcttgtattttatctttatttattgtagcgaacaaaggggggaagtatagacttatgaaaatttggctaagcaataagaattaaaagtcagtgtaatttaaatcccataattctgtagt

SEQ ID NO: 34014 - DNA, 1510 bp, Mus musculus
acctgcggcactaggtcccaccttcgcacaaccggtgtgattgacatgagttcaccagaccagcaggctccgagaaacatgggctaatgatgacaggtgtatcctgcaaagaccctctgtgccacagccctttgttcatgtgaagtattgataagtcctggaaaacacgactgaccttgctggcccttgtccagaaactccttcccctagtccgctaccctcatgttccctgctccaggtgcttctgagtggctcctcaggcacaggcccgggttggccacctcacctgggggctgtcctccagcaacatggtagtgtagtgtgtcaacagtgtggagaccacactgttgtgagcccttcatcctgcaggctttagtgagtctatgttctcccagttttcacctgggtccccttcaggcctcagcctcaatggggcttttgtttgggcatgttgatctagggagttacagaccagctgtctgtcctggtttctgaatctcctgcgattacagcttgattggctgtggggatccaccgagagagctgccctctacccacaagtgaagaagaactcccgaccttacattagcaatccttttaccagtgagtgagtcctgctggtcttgatgtagccctactgttctctatgactctaagcattatttttaagaaacttatttttatagatgaaaactcaggctaacctagtgagtatgatcttggaatgcccatgatcaaccacttaaagatcaaagtattatatgctgtgtgcttcgtagctgtgagtgttgcgagtgcgaatgtgctttccgacgggttctccttgctgggcaccagaacaaagaggctgtgtgctagaagtggaccgcggctctgtcaggacagcatgcgaggtgtgcttgtgcatgcttgtgtgcagtccttcgtgtaggccagtgagctgggggggttattgggggtagggactctgctgtttgttttcatacaatctctcctgctaagttgatgctcccctgatccagctcagcctgggggtgggggtgggggcaggacacagatttctggtcctctgtcatctttggtggactgccaccaaacagaaagcatgtgtatcacatctctagaaagaagacgaaaacagttcaaaccctaatgcgtacttttgactttaacttttatagtaaacagactccgtgctgactttccatgtgaccattagactttaagggatataagctaagctccgtgtttttttctgtagctgtgtgtcatttagtacttttgtaaaatgagtaaaatttgaggtgtttggcaagaataatcacttgatgtgcattgtccattttaatgtatctactgacctccggttattgttgctttggtcttttgagatcaaaggccctctctgtaactgtcaactctcagtgaccttccccttcctgcccctcctataatcagggctgcagtcagatgctgaaagcactcagtaaggtttgctgctcagcctgcc

SEQ ID NO: 34015 - DNA, 1231 bp, Mus musculus
gtcacgaaataactgaaagcgagacggcgcggggatagggggcatctgacctgcatactattgtgtgtcaggcactgtgtgggcactgaagacacggccaaaacccggatcagaccgtgtcgctgcgggattcatctaagctagagtctgaaacaaaccagtaaccctgcaaatgggtcgctgaggttttgatcacctttaggcaaggggaccaggattttatgacgtcaaccgggtcagggtagcaaaggctaagcaccgttagctgccgcgaatatacggacctgattgccacgtaccataaagacacgaaggtggggatgcaaaaaaaaaaaaaaaaaaaaaaagcaaggatgctggcagatccgcaggaaacaaggatgaagggcacagtttctgcattcatttaaaagaaactgcaggtctggcgccttctgagttttctagcgagtggcgagtgccacctgccggtcattcgtagtattacatagggtgcttgctccgcccagtgcaaaaaatcccagaagctacttcattacgcatgcgcacattgagaggcttacaaagaggactgactaggcgctctgtttccagttgtcaggatggccgagcggtctaaggcgctgcgttcaggtcgcagtctcccctggaggcgtgggttcgaatcccacttctgacaagttgctcttttcttcataattcaatttatacataaagtgaattaggtaataattatcgactcttcataatatactcctcttcgtcgttttaaatgctattgtatactttttaaaactatcttcttactacctatttctttgatttgaaactgtaaaaagaattccaggagcgggggagggagagaatgattattcccactctggtgtctcaagcgcaggtctagttttcaaatttgcttttaatttttagagagaattactggagggggaaaaaaaaaaacaggaattctgtcagaagtgggattcgaacccacgcctccaggggagactgcgacctgaacgcagcgccttagaccgctcggccatcctgacatgagagttggtccttttcatgttcattttagttattggcactctgtaacaccaccgctgccacgccaccaccactaccctaccccaccatcaccccggtcgcacagacacatgcttgcttggcatctacagccagcgtttctcctgctttgtgcaatgcaatgtctacagtccagtct

SEQ ID NO: 34016 - DNA, 1216 bp, Mus musculus
ttatttgatataaacatttttgcattctgtttctatcggcctgcgttgtctaaaccaatggcttagacagttcctcactggtggtgacccctgaccataaaattagttttgttgctacttcataactgtaattttgctgctgttatggatcgtaatgtatgaattctgatatgcaggtggtcttaggcgacccctatgaaagggacatttgacctccaagacatcacaacccatgggtgagaacctctgatctaaatctccagcagagtgtcctatcatctgccccagtgtaaactcatggaaaatggtgtgtgtgtgtgtgtgtgtgtgtgtgtgtgtgtgtgtgtgtgtgtgtgtgaagagcttgggttctagatctgagtaaaggctatatcaaacatctagaacccaaggactccccaggaagtagcatggagtaagctgactcagcttttagaacttggaagcctaattgttcttcagctccactgaaacacactgcttgtgcataatacttacacacatatggatgtgcaaacatgctccatctcgccaagaatgaagggcagacggagctcagggatacagtggtgtgcatgagtttgtgctcagcacaacccctaaaaaaaaaagaactagccaaagctagcacaaagcctaaccaactccttgccccatcacctcctggccatgagtcactccacattgtgggaaaggaagcttgggctgcaggtctgagctgggtcatcaagaccagtcctagtagttcctggcctcactgaattacagtgctgtcttctctcccccaagaagtaggctatgaaagtcacaggtcagggctggggagacagttgagtagctaaagtatttgccacaccagcttgaggacttgggtttgattccccagaacctatgtaaaaaaacatgcatggtagtgtgtgtttgtaatcccacactggaggagcagaggtaggggctcactggccagtcaggagtgaccaatcactgagctccagatcccagggaagagactctgtctcaaaaaacaaggtgggtggttcctgaggaactatactacgattgatctctgctacccgcagactccttcgccctcctccattcctcagtagacctaagaatagctcagctgtgtccccccttcctaagtccctggtgcccactcctgcatgggtctctggcagatatcttcctggag

SEQ ID NO: 34017 - DNA, 1465 bp, Mus musculus
acagtggctatcagtttttattttggctgaccttgctgtgatctcctgtagcagaggctgcctgagctacctctcctccgtcccatgggcttccacataactcaggcaggccataaacctgcctcagcctcccaagtacgtcagtacagctgtgttaccaactctcgtggctggcgcccgtactgactgacgtttcatagaacaagagacccgtgggtgtacgcaggtgccctttccctttggcccttagcctctctgtgtgactgttgtttctccacagtgctacctgggtgacgctttccgctgtgccaactgcccctacctcgggatgccagccttcaagcctggcgagcaggtgctcctgagcaatagcaatctccaggatgcctaggagggacctcaagcccacacacctcctcctccagcaactcctgtcctcagctcctcccacggcctcctcccacctctggattcaggcgctctgaaaacactcacagggagaggcttgcagccgagcgagcgagcgaagctgctgtgggcagtggggtggggtgctgctgtgtcttgaaagaccaaggattgaggggacctgtctcttagtgttaggggaagagggtggatgcgcctaaggaactctgctcctggtgttacagtgctgtccctctccacccttgagtatttatgctgagtaagctccaggctccgctcagtgatgctgccacctgctggacttcctcaggatgtagttcttggagccatgggttagctgtcaaagggcctcaggggcaccaaagaagtcactcccccagttgtgatccatcttgtgtccctctgcctttctcacctcaccccgttttactgtagtgttgtatctgtgtcctgttgtcatttctgttaaatggtattaaacttttgtgtttttatgtctcccttttactgtgagtgtgtctttgtgtctgtgtgtggtagtgaagggttgtctgtcacccatccacattcagcttggactatgaaaattgtttttgaagaagtcatcgtcacacaggagtggggccagaactgcccactagctaggactaggatctgtcttcacctcctgtaggagccaggtggagaatgcaggttagggcaggctggaccagcagcaggaagtatcagagcaggaggccctcttcagtctccctcctgcctctgcccacatccctgttatccatcatgcctgctgttacctgtccttgttacttgatctgcttagctagcttctgctgctatgggtgtggtgaaaagccctttgagaagcagaatttctgttgaccccagtgacccttgccttgtgttacctcccctccaattacagcaaaccctgaaaacctctggtgtttctcttctgagtggaagaggctttgctaagtgaaagggttttacagatggacccacagtccctgctgattaaagttaattagac

SEQ ID NO: 34018 - DNA, 1156 bp, Mus musculus
tggttttgttttaaattatatttctttacttcttgtgtgtatgtatctagtgtgtgcacatgtatagaagtcatctgtccatgtgggtctcaggcattgaattcaggtgtcctgcttgctgtggcaaccttgggccttttctctgatgagccatctttatgtccccttttgttttggtttggttttctttaatttagagtcgttatagagccagggccagacaagactgccctgaaacttgtcctgctgactctaccttctaaatactagaattgcaggcatgtgccaccatgcccacagctttcagtgcctgttcctttgacatgaaaaaaaaataataacagtctattctttaaatacttactaagcaatgatgtgtagcaggcactgtgctagagatggtgacagtgaacacatgagagttcctcctcttggtctcggtccaataatatttttctttaaacttaaggatttgtttttattttgtgtgtgtgtttttgcccacatgtatgtatatgcaccatgtatgtacctgtgcctaaggaggccagagggggtgttgaatctcatgggacagatggccaaggtggttgtgagctgccaagtaggtgttaagatcagtgagcattctttttttttttcccttaagatttatttatttattttatgtatgtgagtacactgtagctgtcttcagacacatcagaggagggcactggatccctcacaacacatggttgggagccaccatgaggtggctaggaattgaactcaggacctctagaggagcagtgtgtgcccatgagagaacactttcaagtatgtgttcgtctaacctagtgtatttcacttatcagattgacacccagttccgtcagctttcctgtgaatgccttccttttgttctttacatctgaacacacttcttttatgtatacttgcaatgttttccttatctgttcacctgctaatgggcagaggagacaggatctatgccttgactgttgagagcagtatagcaaaaaacacgaatgtacaagcgtctttgtaaatgatgacttagcctccttaaagcacacaccaaggtgtgctatagctagacctgacagtagttctttttcagtttgttgtgaacctcaatactgatgtccacagt

SEQ ID NO: 34019 - DNA, 1645 bp, Mus musculus
tgacaccaaccaatatagctttggagggttaaacagaagctgaataaaactgaccttggtttatcctcagtatcttctcgaatgccccagctcttccctgttgtcatcaagaagcaattgctagagtagggtgaggcagggcagggcacacctgtattccatcactcattatgctaaggtggaaggataaaaagttccaggccagcttggccaaatggcaagctctccccaacccctaaagaagactgcctctgcctctgggcccccagtatgcttcagtctgtgtcctagctatacctgctgaacaccttgaacaccccagggtttcccattgtagtcttggagataaggcaggcctcaccactctctttaattctgttcctgtgttagctcaagaacctgacgggtctaaaccagcgtcggtgagagaagggaaccatgtgcctgggaggagcagcagtagatatgaagggctttgacaagatgggccacccattgaacaggatgttaatgagaacacactgaagaacttggagtcgtatgacagccacaaggctggaaatcacaatgcacttgctgccgttctgacctgggactgggccacttcttcagttcctaatgccaggcctggcctcctgatgccttttgcattgcagctgtgtgtttgaaaactgagactcacatccaaggtttcaaaccacaaaaccttggcatgactctgccatggtgtcacaggcatcttgatcatgtcttgaccatagaattgctctctaggagctgggcatggtgacctacgtctgtattctcagcactcaggagactgctacagcaggattgagagatcagaggcaggcttgtctttgtagagaattacaagcctgcttgagctacagagtgtgatcctgtcaaaatcccctgagaaatattcttaggggctcacaaccaaggtccggaggcaacacatagtgggagctcttccccagcacagggcagacagtgctcacaaacatttgccactggccattgtctctggatcccctcagaaagctgcctcccctaggcaggtgccttttggacagttgtgctgagcctggcatcacagacaccagcatgcacttcaggatcattagtgtatttagaatctgtaaaaataataaatatgtttgaaacaatttcttgttgttttgtctatgtgtggacgcctgacttgccagcaaggaagacgccacaacaggattcttctgcacacgtttattgggagagcttgatagagaaggcgaaagaccctgagccccagaactggcgctgcttgtataggcgtaggagtggcgtgtgtatacctgattggttgtgctttcagtacctcatttacattccccgggatgggctgtgacgtggcacgaaacccttatgcacatgcgcacattggttgtttacccgaacttaacagcggtagccagtgccatcttgtaatggcgtatgtggcttcccacatctatgtccatctagacaatgtcgagtatctaagtatcctcacacctacggggccaccatgacagccttgcatctttgggcacagtcaaatgagagtaatcccaggccatgcacttcttgtctgctcctagtctctgactacttgcaggca

SEQ ID NO: 34020 - DNA, 1166 bp, Mus musculus
ggagaccccgtgcccgctgagctgcaggtgcctcttgagtacatctcctttgtgggttgcagcatctccatcgtggcctcgctgctcaccatactgctgtacgctcagtccaggtaacgttttgtatgctcattgccttgccccactgctgatctgggtcttccctcttgccccagtgtctgcttccacgccccgggcaggtgggtgtgactctgaggaataggccgccagaagtaagccagactaacactgtggcagccattaggtcccttcccatttgcctcagtttccccatcgttgtgagccgggccatggtactatctgggtgatgtcctacccacaggaagcaaagcgattccaccacacgtatccacatgaacctgaatggctctgttctgctcctgaacgtcaccttccttctgagctcccagatgaccctgcccaccatgcccaggcccgtctgcaaggtgctggctgctgtcctacactacgcactgctcagcagccttacctggatggccatcgaaggcttcaacctctaccttttcctggggcgtgtctacaacgcctacattcgccgatacttgctcaagctctgcatgctgggctggggtaagggacacctatctcactggtctctggaacttccagggtacaaggtgctgaccccaagtcctcctgcctttcacgatgaccatttctaactccatctccatcaatgacattggctcccgcatcacctccacccccagcaccatcattgcttctgccgtcatggtcatgtctactacttcagctttcaacactgccattgccccaagtcccctgtccccactatcaccaccatcgtgtcccccctctgctacccatgactgctttactcccatttctacccaccccatctcaaccatccccatcaccttcctcaccttcactacatcccaccatcctctccgcaccatctttaccacatcagcaccatcacagacccctccatcactgcttcagcccatctccatttcctttcaagtttcccaaccaatgccacctcctgttagctccttaccacatctcaggtcaccattaccaccaccaccaccacctcggctgccactcagcctggcatctcattaacaccttagaggggagcctcttctgagacaaac

SEQ ID NO: 34021 - DNA, 1124 bp, Mus musculus
ctaaaatcttgtggttaggcatttcatcttgtcccctgtgaggcatgtgaaccgaggccaacaccaaccccctgatatgccacagtgtactgagtcattccgagtggctccagagccctgagtatatgactggacgccgccgcccccaccccctccaccccttggagcagagggactctgagaggggaacagagccagacgggatcttgccatctgataacccatgtgcctcactgcccacaggcttcctcatcttcctgtggtactggtccatgcggttccaggcccaaggcggcccctcccctctgaagaacaactcagacagcgccaaactccccatcagctccggcagcacctcctccagccgcatctaagccaccgccacacctcccctccgggaggacacatgcatggcgtccgctcacgatgtctgtggcccagtgctgtgcccacccagcctttgttggttagtggcatactagagaaggccctggtccttgaaggcgtagggctgttgctctggtaggtagatacctagcttgccttggggacgactctggtcctcaaagggctcagaagcacactgccattctgtttgtggggccgtttcagtctggagctaaggccttgtctttctggccacctctgggtccagctgttgctgctgggtgttgagacctgcagacccaagctggggttagatctcgaaggaggctgacacatccggcctgagacacagctaactgtcttgacttgctgctctgtctctgtggtcaccatgcagatcccgagggtggcactgggggtaaatgttctgggagaaggtttggaggcagagcaccttaggagctgagcatctcccccagcctttctgcaaaccctcctcttcattccccatccccaacccctcctctgtgttcccctaaccctccacctgaagcctggggtcctagaccaatgctgtgatttggggtggtagttcccagcagtttcctggtgccagctatcaacttctgtctgttgtgtgggctttggcctctgactcagggcaggtttctgtctgagccctctctccaagctgcctcacctttgctcgcacctcagagggacctccatctctcctg

SEQ ID NO: 34022 - DNA, 1177 bp, Mus musculus
ccttcccttgcctgccttgggcaagagtcagaaagctttactaaatccctggaaagggacagagggcctggccctagaggctcctagcatgtgctcctgacttgaggcccacactgtgtatataggagccctcaccttggtggggctcctctggtacctgattctacccaccttccacaaagcagtccagacatccccggtggaaaagggggcctggcccctcactgggtccaaagggggtggtggcagctgggccaatccctccccaagtgagacatctatcactttgatttcagcctgacagctggggctgcagtctccaggtaagtgggggtcagcggcctggggctgcccacctgctgcctgctgttggttcagggctctgccagggctcttgtacagagccagtcctgccttctgctgccctgtccatgtgcttctgctggcctcctgcatctgctaagggcaagcctcctgaggccagaggctgagcgctccttttctactttttctacagggaagttgaggccagtgcctgtgtgaagatgtgccacgctgccaggccctgtggcctggcgacctgctgtaacacccacctaccatgaatgcaggagatggaggctctcccgccctgcctctcctcagagatgagaaacatgttcagaaggaagcgagtctctgtgtggctctgggcacccaagcatggggcttctggaagggcagggatggcactctgcctggtggtaggcttgggagtctagccgttgctgggagggtgggctctctccccacctggcccttgggctggactgttctctactagttgagaagacttgaggaaccagctggggggttagggagagcaagagcatctctatctaccctcctgaggaggggagccctcacagggcatgtatataatgttctaggtgtatatagaagtcctcaccctgtcagaggtctgggctatatttatggctggcagaggccagtgtggaagggctgggttctgttcatctgcctgacaccaggcactctccctgcccactgattctcaacatgttcctctccccaaatcctatttaagaacttttggaagcttagccatttttacttattaaaatgaatgtctttttacacaagtgcaatctgaatcgtcagtactgggagaccctat

SEQ ID NO: 34023 - DNA, 1214 bp, Mus musculus
gacagtgagaggtgtggattgcagcacaggcctccgcaccacgggtgagagatgcacagtggccattctggtcaagccctccatcagtatctttggggcagcgctgacccaccctctgctctgcctgcagggaagctgaacctggtggacctggctggttcagagcgtgtgggcaagtcgggggctgagggcaaccgcctgcgagaggcacagcacatcaacaggtcactatccgccctgggggacgtcattgctgccctgcgttctcgacaaggccatgtgcccttccgcaattccaaactcacctacctgctgcaggactcactcagtggtgacagcaagacccttatggtggtacaggtgagggcctgaggttcagcaagagcctccccaggctgctggctccccctacccccacatagacccctaccaacatccccttttagtacacaagttcctccccatgttcactgcccacagtgggctcccctgaccagaaacaccctctggtggccatgctgctacctcctgtgctgtaccatgagctctctgtcccctaggtgtccccagtggagaagaacaccagcgagactctgtactccctcagatttgctgagagggttcgctctgtggagttgggccctgggtcccgccgcacagagctgggttcctggtcaagccaggagcacctggaggtactgggggatggatggggtgggggaggaggggagaggcttccatgagtgagactcaggctggtaccgagtagggaaagggcagacaggctggtgtagtgagagtagaagctgccacaaaggtgggtgaggccagagctcaggcgtgcttctgctttcttgagacggtctcactatgtagcgctgaccggcctagagcttgctttggagaccaggctagcctcaaactcaggagacctgactgctgagattaagggtgtatgcccgtgaccccttcagccatctttgtcttggagaccagcagttgcccatggtagatgcattttaaattgtagacaatgtttaattcctgtcccgtgacttctcagggcggcagggtcattagtcccctctgtagatgaacaaacactgtcagagaagggaagcagagtggttggagatgaatgagctggggcagccttggctcccacacccactggcatctctgctcacagtgggagccggcttgccagacaccac

SEQ ID NO: 34024 - DNA, 1147 bp, Mus musculus
agatggttctcatggatggagcattagctgggaggttgctgatgctagagctgtggggccccatatgccagcagcactggaacccgtggtccctgccccatgtctccccaggtgttccaggaggtgcaggccctcattacctcctgcatcgatggcttcaatgtctgtatctttgcttacggccagacaggtgccggcaagacatatacaatggaggtaggtgtttgcccagtgtgtgtgtgtgtgtgtgtgtgtgtgtgtgtgtgtgtgtgtgtgtgggcacttagggaacctagcttccttccatgaaatttgggtttccatagtgtatgctttgagtctcataaccacctcgtgctgctgttcttggcattggctcccagggaccaagtcttcacacgctaagttctccccaggagagtgctccattggctcccgtgtctcaggaggtagggcaggctgtcagaggccaggcctttatccttgcatagattccctgagctttcctgtgttctcctcgactctgctcaaggattcccaggatatggggatgaatgaggactggtatcagctcccagcaaggccctgggccatgggagagactggatacctgcacgactacagttgtgggaagctgggctctcagagaagggctttatccagggtgtgtgcccagagccagccttgtaaggctacttgagcagaagaattttgttttgctattgttttgagacatggtctccaatgtagccctggctgtcctagaactcgctgttagtcaggctgaccttgaactcagagatccacctgcctctgcctccagactgcttggattaaagatatatgttaacactcccagcccagagttgaagaatctgactacagagagaaatagaacattttagccctatggagtattgctttgttagtagttttctgactcactaggggctgcagtggactccccacataggactgggtgggaaggggcttgtcacttcctgctggtcaggccactgggcatcccctgttgtgactgtcccctaacacccctctccctaacccccataccctcagttctggttagcagggcagggcaggtgggctagaaaggggaaggctttatttagctctgtcttgggctgga

SEQ ID NO: 34025 - DNA, 1185 bp, Mus musculus
caaaggaggcatcatggtcattgtcctggtcagatagactcaatgtgtaccctcctagtcctgggagtgccatcctcaggtggggagctgtctgccaaggtgttacggcagatgacactgcaggggtgttgccctaagactgttgtgtgaaggcaggatgggctgcattgaggcttgttgtgaacaggctgctcacgtgttgatgactcctgacccacagagcctgcagggatagcacaaactttatttggggaaacttagaatcttttttttaaacgggtatggaaactgactatggtgggactgaagagtatgaattactgtcctctttctgtgagatgttgctctggcttccctgggtcccaggcagggctctttgtccacacctccttggtgaagacaccgctgggtcctgggaccagcgtgcttgccatcccagggcaggggtgtctcctcagcacagtccccttcacgagaggattctggttgtgtcatcagcaggccctgcgggacaaggggtgcgagagcaagagtcaggggacgaaagaagacgagctcccgaagaggcaggcgccggcccccaggcgggaccgggaggccccagaagctggtggtaccatgaatgtagaaaatacaggtaaaagaggtcagccccactgtgacacactctggctgagctagtgcaggagggagacctctgtcccacagctggaagtggctcagccagactggccacctgacatgaacttgagactctgtccagcctcttccagatccacggacaaccatgtgtctgtcccagggccacacccagtgataagagactttggccactggaggttgggttggatttcccttcttttttgtcttttcccagtacctacctaaagcagggcgcaagagcagcctcccagacgccaccgggtcccttcgccaccgggtccctttggcagaggcctggccgtgttctggtcagaggatccagaggtcagggatttgtttcccctccccccagactgagacacctaagcctgcagttccattatcctctgaccgctgtggcacctagagctagctggttttatttagaaggttctccgggctcctttgcaggttctgggttttcggcagtaagtactggccaatgaacacagggagagaacaccttacggagcctcaggacaa

SEQ ID NO: 34026 - DNA, 1119 bp, Mus musculus
tcagaattgcccagtgtactggactgcttttgtttgtggtgctctgggtctgactccccttaacatagctgtcatctccctgttgctggctgaaggaaatcgtggatgagtttgaagactctgagatgctgttacgtgtgctggccaaccaggtccgctgcaagtccgggaacaaattcttctccatgcctttgaagtgagccttgtcccgtgcctctccacaagccgactgagatggaggaacttgctgccatctgtgggatgccccagccaggagtcctaatcccacacttagtactgatctagtgggctgctcactctctcctggtccttaggttggtaggctgctactgtaatgtgctcatttccagaaatcaccagtagagggcagcccggacctctaattcttcctccactttcttaggaaagtcaaatgagcctggctggggagcccacccacgctcagtccccaccgaggtctctccactgcagtaatctatattgatgcccttggccgtcaaccacttttttagatccctgtgttctgacccacctgtgtcagactggggcttccgttgtctgtcagcctctctttaatctcctttatttatcacctcgtcccttcatcccgtcctgtgccaggagaggtcatttcagggccagggcacagggtgctaatttgtggtcagcagcagttttcttcattccttcctcccacttacccagccaggtgcctggggagagcccagcagatgcttcattttggcttggctatggctgctggccaggcctccaacacccatgacccctactttccccatcagctttcccagagatgcaaagaggcatcttccctccagccagagcacccctgcccctgttgctgagcatttttcaaagtgggggtgggaagtggggagagggccagggaggcattggagaatttattttccatcaagctcctaccagggcaaagagccaaacctttctagttgtcatggggatttctagtgatggatgaagaaatatttttttacagttttaaattatgttcaacaaataaaatctgcctttttaatgtggtgtcttattttaaactacttctactttaaaaggtga

SEQ ID NO: 34027 - DNA, 1123 bp, Mus musculus
tgcagtccttgtcccaactcttaatgacatggggcagacacacccactagggtaccagaggtccctgggcagtgtgtgtgattgtggatgctcagcaggtcacagaccaagcttatgggcttcctcccttccagattcctgtccccacacaacactactaggctcaggccagcagctcaccccacacagagtctgtggaacccccaaaggaatccactaaggcctgggaagtctgtcctaagggtgaaaggggccctcccttcctcttctcatcctggagtcagcaggaggcttctgtgggaaatggtactgtacagctgtggctctgtctcctctgcctccctaaagccttgagcagtaaagggctgccagccaggatcctctgggtcaccgccgctttccaagtggtggattcttatagcctggcactagaggtgacagatcggaggggcatgtcctgcagcactctagatgtcccctctgcagaacctgagagtcagcaaggggtggggcgtccacccccccactccccatcgtttagttctgtagataatcagcactgattaaatgtccagccagcgagcgtggctgcacttgtacgctcagacccaagcatgccgcaaggaagacctgcttggcagggtcggggccaagcgaggatgccgaggaataccctcctcccagtttggtaggacctttgggatggagtccaggaaggtcagggaagagtgggggggggggggcagtaggagtctggttgggctgaggtttactgggtttacttaacatttggtagtgataagaggagaggacagcccagcttcccaaatgactccacatctggcggtctggaagaaccagacaaggccgcccaatcgtcccacccacctggattggattttgggcagcctgagaggtggcttgaacaagaactcagggatgggtctggagagaattgtgtaacggggccactttacctccagaatcttccctccatgttcagagaataaaatgcactggaacctgctgccttgtctacaggggcagaaaatcccaccacagggcccaggatggcaggaactggggtgctgggggcctgggtgtggctggtgaactggggtgc

SEQ ID NO: 34028 - DNA, 1101 bp, Mus musculus
ccgctaaagctcaatgtggctctcattagggaggtcaaaagcaaagcttaactgtggggttttgaaagaaatagcacccaaaaaatctaatcaatagctacaaaagtccgaagattaaagatcaacaggtccatttggggagggaatatttaatattgaatgattgtttctgttttagtatctttgagcgtttagtgtgaagaaataggaaatcattctatggtctgagagcctgcaaactgtgtcatatgtcatagcagctgctgttgtcttgacaacaaataatataaacttgctccttccgggccatctgtcaccagttgtgacctgtctctggcctgtttattctccctggggtttggcattgggaatcaggctgtggaggctcaggatctggtcttaacagctatcctgagcttgagaacatggaactagtgtggccctcctctgggtgttgcaggtactagatgacaaaaacgttcgtcgaaggtttcgagcaagtaactaccagagtaccactcgagtcaagcccttcatctgtaccatgcccatgcggctggatgatggctggaaccagattcagttcaacttgtcagatttcacccggcgggcatatggcacgaactacatcgagaccctgagagtgcaggtactgcaccttccacacagggagtcccatactgggggctttaggacactctggttggctaactggctggcttatggcccatggagcagaacaatgtgaggcttctagccaaagtccccaaggtattgttcaggaggttttggcctcaaaaaaggtccagaaagtaatctgaggtctactcaaacgtaaggtaaattctacaagcaacctcccacccccagcaaaggtttttttagatttgtgtatgtgaatgttttgcctacaagtacatctgtgtaccatgttcgtgtctggtgctttagaaggccagaaaaagttattggataccaaaaaactctccacaggagttagggatggatgtgagctactgtgtgggtcctgggaactgaacctggatcctttacaaaagcaacaagtgctttgaccactgaagcaactctccagtcctttga

SEQ ID NO: 34029 - DNA, 1114 bp, Mus musculus
ggaataaactcaaggaacacacacacacacttcctttgaaacaaggtctctgtgtagcccaggctgcattgtaattcacagcagtctcctaccttagcttagatgagaagtgtacatcaacaggtgacgcttgggaatactgctctcaccctttttagtgacgtgtgtctgtgtgtgtgtgtgtgtctctctctgtgtgtgtgtgtctgtgtgtgtgtgtttgagacagggtctttctccatagccttggctgtgttgtaacttactagaccaggctagcctcgaactcacagtgatccaccagtctctgcctctggagtgctgggatcaaaggcatgcaccatcttgcccagctgacactagattattaatctttgaggacaaagaagctatgttgtagtaactttggagttttggcttctttgagaaacacagaaatattatgtggatgtgtgttcattttaatctcaggtctgggataggatgctgcttcagattgtccacagcagttgactgatttgtctagtgctctagcaggactgtgatttttgccagctgcagtttctgcaactgtgtaatgtttggaattctgagttcagaggatatataaatactaggaccctgaaaggtggactgttggtgggttgttggaaggtttgttgattgtggttttttaagtagtcatttgtgaagaagaagcaagaaataagatatcccgatggcgaagatcaaactggtcacaaggcactgatgctcctaatcagcaagtattagtctcctgataacatctcccctttccaacctctgactttattcagatcgattgatctccttctttctctcctatttagtgttagggagttgtagggtagaaaaagggggtgaagaagggtggaagaaagaagaacccacagagtagcagaagacagctacactatgtatgtatgtttgtgaatgagacacttattacttaacgctgttgttgatgtgctgtggggttgagtaatatactctgtatgaactttgctgttgacagagtagagagtaaatgttagatgaatctgaaacagggaggagtttattccaaacggcgggtacagggatactcccttat

SEQ ID NO: 34030 - DNA, 1796 bp, Mus musculus
ggtttgtacttgatcttaggctgacctttcccaaactgcagtgttagtggacctttcctgcctgtctcacatctcccttggtatatatgtaacatgtatgcccggcacagcttgctccagcctcctggagattttccctgggttttaaagagtgtgtatgagtagtggtgaggctaggaaatttacccatccagtatcctttttatattctttttaaactcatctcataattctcgtttgtttcattaccttattagaggtcaaaagtgcctatgacaaggacttaattatttcctaatgaaaagcaaaaaaaaaaaaaaagaccccacaaaaacctgtggggaacagggtagtgttgcactgtcatctcaggtatgcctgtgttgaagagtgcacctggtgtaataagaagccgctccaggcccaagttcctatcagtttctctccttggtatccacagggagtgcgaccgcaaggttgcctggactaaaagccatgctgagaatgagaagtgtgttggtgacagtttgtccttttcaggtgccagtcagctgacctgctcccgtccttgtaggtggctgggtagaagccaggcctggtggaccttaccctaatgtccatgcttcgggcacatgggttccctggttgaaagggagaaggtactctcagtccaactactgagagaaaggagctaggagtccctgaagcttagagaaggtggctggctgttgggagcaggtgaaaagatcctgtaaggacagtgttgtaaaggtgggccttaagagctcatacttctaaggatgaaactaggggacactaagttcctgttgcaaatgcctggagaggacactgcccctggctggggtcctgtggcccttgaaaggtagttgccaagcgcctcagggaaacaatctaggtctccaggagctaatgtgtcagcagagctacttgggggacaggaaggatagaaagagtttatatgtgcattgagataaatgtaggagccagttaactttctgttaacaccagttaagattcccagacaccacagggaagggagtttctaggtaagagctggggagaggtggttgcagaatgccagcccttctgaaagcaaaagcaagcaggtgtcttgagcacacaagaacctgaatttgtcagggagcttaataaattaaaactgaagtgggttctgtctttaaaaaataagcccaagggaggtggccaagagtgcttgcttttgctatggcggtcttggttgtagaacctggcaaggatggattatacagcagacgcatactttgtgtcaaccaatgtgctacaaatgtgacacttgaccctgaactgcatgtattggggatttttaaaagaaaaaacaaactttgaatcaataaattaacagttttttccacttggtggctcttcttgatgtaaatggtgaattggggacagaatcttgttatccagtggcaagtttggataatcttcaagaaccaaggagccttctgtttgcaggggaaaaaacactgcctgtgttgtggtctttttccaaaggaacactacaaacccagttcctccgtgtagccctggatgactgatgtggtgccgtgtcaaatcccattttcctaaataaagtttctgttgacaattcctggccttcccaactaggagacaaaccgttgcttcggaccttaacttgcattcaggggatggggatgggccataaacttggaacttcaaagacctgtggtggctgaggctgtcactctggtgtggagatttccttaggagtgaga

SEQ ID NO: 34031 - DNA, 1302 bp, Mus musculus
atgtgtgaaactacaccctgctttgagggagaaaaaaataaggaattatttcctgatcctgccttgatgcctggtttttgtgtgacctgagtcccacataaacgtgcatgtagaagaagaaaggcagattggcctcagtgctggtgctgatgtggggaacctgtgctttcttgcagacccggtggtgaaggagcagtcccagccttgtgctgagaacaccgtgctttccagtggtctcaccgcagcacgatgaagcctggggaatcgacggtaatgcggcactgatgcttgccaataaaaccaaccaaccaaacaaaaacttgaaggaaactacagtgtgataaaaagaaattctaatcattccttctaaaggcaaagaagagtaaagacctaaagtctgtcaaaagcaagaaactccccagtactagtctgcagggagctggctgtgcagtgtggcagagcgcatagttcaggatctgagggactctccctttggaatgcatgggagatgagaagctcggagttgttgtacacgtacctgcgtttaacaggataccactgttgaattaatccgttcggtcaacaagctctgaatatctgacttcctatctattccattgtggtctgattttctgtgagaattcaggctcaagttttagcaaaagtcagcagtctattctgacacaccagcctcatttacaaaaaaaaaaaaggattaaaacagtgacagtattttttttaagctcttttacaaattcatgtgttatgtatttttttatgacatgagctctccaggaaatgtacctcgttcctgcagtttgcttctaagtgtattcattgggaagcaaaccgccgttgctctcgccacgtcctctttggtgtcagaagatggcactgtaactctcgagatgccaagaacaggtcccaggctcgttagatgttccatgctgtgtgcatgacttggggctcacctttattgatttgcctaactattgaatcttgttgccttttttttttcctctctctctctctctttagctttttttccccctggccttgtaagaacctcacagtttctcagcacatctttgtgagggcgctacttcaatgctccactttaaaacaaagactatttttgttcactaccatagctatagctggaaagttagtcttcaggcaggtcaaagagggaggaaaacagttctattaggatttatttaggaaagacctcacgggtgtaaaaaggccgaccaccatcttccctcccctaaccctgtgacaaacaagtctggctgcagtcag

SEQ ID NO: 34032 - DNA, 1099 bp, Mus musculus
gacaaaatccagtttctttcccttttctaacaccagtattgatgttggttggttggttggttggttggttggttggttggttggttgggttagctggctggctgaagcaaggtctcacttgccgtgtagaccagagctggtcttcaactcacagagatctacctcctttagcctcctaaatgctaagactcctacttatcaatagaaaatggaaaataagccaggagtggacatggatatctctaatgacaacatcagggaggctgaggcaggaggatcattgagtttgaatccagcctggcaatcatgagatcccatggaagcagagagacaaaatcataatgttccaggggaaatgtttacttggttaaagcatggacttagtatttaacacgctggcttatctgtaagcatgttttacctgtgtgcatgcatttgtaccatgtatgtattgctgtctgcagagccagaataggggtcctttgaaactggagttagagatggttaagagccaccatgtggttgtcagaaattgaactcagaagctctggaagagcaatctgtgctcttaaaaccacagagccattctccaaagccctaaatatacctatttggatgacaaatcctggaaaactatgtttttaaataagaaatgtatagcttattttctgaagtaagttttacaataattattaaggcatactgaattttcaggtatagtgtagatttgtatggtttagagatttatttgtttgttcatttgtttgacatggtcttgctgcatagccctttctggcctcaacctgagtgctaggattatagatgtacaccaccatgcccagcttcagtcttcagtgcagtatgcaaaaggaaatacttggctggtggtcttcacacattgtcatatgaaaccatttgtttctaaagccaactctcttaaatctacctaagcatcgttgattgcttagtcaccaccaggctgtacttactcacagttgaaaagactgggccataagagtgatccaggaagattgaaccgactcccgctcagatgtagaagttttaaacagactctgtttgtccagtgattgagccgttt

SEQ ID NO: 34033 - DNA, 1125 bp, Mus musculus
ctagccctaagagatacacttggggccctccaactctggctgtcacagccagtgttagcttaataaccagttagagcagtgtgcagtgcttctgcctggagggagccatacatgtccttcagtgttgcctggagctcatgttaacagccgtgagtgatgggggagtgtgttccatatgtaagtagcatggaggcagaaacaaggttgagttctgatgatctggagagagtaaaagaccagggtaacttaaagggaaaaactcggaaacattccaagtgctccagaaatgacctcatctgcagttcttgaagtgtagtcttccatgggtacactcctactctatgtgatcaagtacctgttatagatacgtgctgtggcctcaccacaggcatgggcatgtccaagggcatctttcatggtctgtttcctcttgtctttcttatagctccgactgattgattggggtctggcagagttctatcatcctgctcaggagtacaatgttcgagtggcctcgaggtacttcaagggaccagagctccttgtggactatcaggtgagcgtgtcagtgaagctgctctgctctgcattaattttatattttcttagggattttcctggtttgctatgtagtcgatggattcatacaaaacccagttattattctactctataaagctttttctcaactacattaaattttttttcattatgtatgtataagcttacttgtaccacagcccacgtgtgagggttagaggggtttgttctctccaccatgttggttcttggcataaggattaggttgttggggttggcagccttggatacttagtctaccagctgagcctcttgctgccctttttttttttttaaggaaagaatgacttttagttataacttcagaaaggctaagaatggaacttgcctgataagtataagaccctagtgccttagaaatacgggccaatcttcaggagtcagatgagtactagaaactccatcagtacaaagagtttctagccatctttgactgatcgaccgtccttactgccttcagatgtatgattatagcttggacatgtggagcttgggctgcatgttagcgagcatgatattccgaaa

SEQ ID NO: 34034 - DNA, 1227 bp, Mus musculus
ggatctctgaatgatcagtaatgaaaggttccatgagtgtgttaccttgtggtcatgcttgacactgcagtctttttatttttttaatgccctattttatacatctttttttaaaaaatcaaatattgcctgtgattttttttttttccaacctggaattgtttggagaacatagcatagatttttggaaagtctcttgacatctccaaaattctcacttttcttgtttcttgtacgaaatgttttattcccctaacactactccaaattccctggagtagttctccaggtgtgctgtgtcggggttgggctcagcttgctgtgcagtagaatatgtgcacagctcaacaacagacctcacagcagtgtggctgtggttattgaaattgaagtatttcctgtcccagaactccttcctttccccatctctactgaaggtagaaatgttggactccttatctttgctattccaggtcaggcagtgaactcctgggtgtccataatgtaagcgcaaaatttgcaggggaaggccaatgtttagaatatcagaacacagtcagactaaattaacttctgctttctgaaatctgtttcagcaactctaccagatcctgactgactttgatatccggttttatatgtatgaactacttaaagtaagtggcgtttgttgatggtgctttccccctcaggcttgtatttttgagaggatgttaaaaaatacagagagaattcaagcagaatatttcttaatagagaacttagtgagacttaagttctgatgagaatcctgttgtgagacctcacagattttcaatcaaacttggaaatttggccaaacaaggagtgcagggccgttatacaaagttcacaacccctcgtgtatgtctcttattggcagttggagttttttttctttgccaggtaattaatcttagttttatgatttagttttagttttatcttagttcttagttttctctatgacaagtgacctcagactttttttttaaatgccttttcaattgcttataatttgatgagatggcctggtaacttttttttttttttttttttaagagtcagggctgcctgactgagacaagatagtctgggttgggctcattcatgtgcctgtgtgatgtgggctggggttgctggaatagttgaggtcctgccttccaagtaacagtaagagaatgggaacctcagcctgcagcctgccaa

SEQ ID NO: 34035 - DNA, 1146 bp, Mus musculus
actctgctctatgcttcgcaacctaccccctgttatgtatattgaatatagcataaaatttaagcaatgcaaccatttataagcgtgcagtttgtggcattaaatgaattgataatgctgttaggaccactataaccatctatctgcatagttttttttatcttgtaaaactaaaactatacccattaaatgatggttccccagtcttctattccccagctcctagcagccaccatttgttgtttgactgtcaggtatcgcataagtgaaatcataaatctggcttatgactggtgtatttgacttaacctgctgcctatatgcatacgatacagtttagtttttgctaggcaagcctgtaatgtcagcacttcagagttgagatagagggaaataccctaagttcaaggcaaatctaggcattagtgtaagaccctgtttcaaagaaaactaaaaaggaaagaataatttctttccttttggagaataaaagtaatgatgggctttggttttgggttttttgtttgttttgtttttcgagacagagtttctctgtatagccctggttggcctggaactcattctgtagaccagactggcttcgaactcagaaatctgcctgcctctgcctcccaagtgctgggattaaaggtgtgcgccaccatgcccggcagtaatgggcttttatatatccgttcatcagtagccaacactaagctgcttccatgtcgtcaccgtgtgacctgagctgctttgaagacgggcatacaaattcctctttgagcctatgctttgcagcttttgggtatcttcagaagtgcaattggtggcttatatggtaatttatctctctctataaatggcatctcttaagttgcccaggctggtcttgagctgatgatttgcctcagccttctgagtgcttcgattgtaggcctgtgccaccattcctgactgcttggcttctcctaagatgttttcacaggagctgatccattttataatgtccacagcaggatgtgaggagtcttctttgtatcctcagcagcatgttttctgttttaatgatgttttcttttttgagactaaatctcaccagctagctagcccaggctggccttagacatgtaaattttccttgtacag

SEQ ID NO: 34036 - DNA, 1167 bp, Mus musculus
aaccgactcaaaaaaaaaaaaaaccaacaaaacaagatatttaaaaattgttagacctgtgtcaccatgcctggtttatttcattattaaattttattcttttgctattatgtgcgtgtaggtacatacatgccacattagtgtggaggccagaggacggctttgtgatgctggttctacctttacatggattctggggattgaagtcaagctgtcataaagcttgtgtgacagtgctcactcactgagctgtcacctgtcccttggtattctttcttaccatgattaatgtgcactttttttttttttttttttttttggtttttcgagacagggtttctctgtatagtatagccctgggtgtcctggaactcactttgtagaccaggctggccttgaactcagaaatccacttgcctctgcctcctgagtgctgggattaaaggcgtgagtcaccatgcacagcaatttgcacctttttaaaataacaataaaaaaccttttattggggactggagagatggctcagcggttaagaacactaactgttcttccggaggtcctgagttcaattcccggtacctctcaaccttctgtagtgaatctgacaccctcttttggtgtatctaaagacagtgacactgtactcacagaaaataatgggttttttttaaagtctttatcataaaactcctcatcactgaaaatacctcgcagcaagcatcatttttaacagggtctaatattccactatgggaaggcaccctaattcttttatatgaccccttagcctggaggatataagttgttttatactcccaggcttgaaaaggatggtgttcatgacgagtttctttggaaggatggtgactaaatctgagaggggctgttaggaaactaactttgtgagttcagatgctgactgccttcttgaggtggtggtcttggtttcttcatctgcagaaaaggaagtcctcaagttcaaggccagcctggtctacagagtgagttccaggacagccaaagctacacagagaaaccctgtctcaaaaaaaaagaaagaaagaaagaaagaaagaaagaaagaaagaaagaaagaaagaaagaaagaaagaaagagctaaaaaagaaaagaaaagaaagaaaggaagaaaggaaggaaggaag

SEQ ID NO: 34037 - DNA, 1861 bp, Mus musculus
atgatgcccgcttacctgcccccaggtcccactgccatctctgcaccggctcatcttccctttagttttatttttgtgagagtgaaggggaggaaatggggttacttctcttttatttaaaaagaaatgaggggatccaccttgggacagcacagcacaacagtcttagatggtgtgaggggctcgccttacacactcctgtctcactcagtgtggcccctcccctctgcccagctggggcgtggccaggatagttagatacagtactgaagaaagcccagcccagcccctggatctggcagatgtgaggtttgaagatggtgggtagtgagctaaagctctgatgtgagtgggagtcagaccagtgggcagccttggaccttaagagtgtccctttcctgtaacccttgcatcaagcacacctattctaatagtagaagtgacagtcatgaggatggtagccacaagagggcgctctagacagacagccattttcctggtgctctctgggcaggacaggtggtgtaaggccagccaggctgaagaatatggagaaccctgacatgggggcaggaacccccataccctgccaccacagggccttgtcccaccctgaggcaaaggtcacctggtctcttgtccctgttggcagaggttaaaatgttgattgctgtgtatgctgtgtgtagcccctgagaacttcatgattacccatccctttggaagctggcaggtactgtaggtccctcttgtcccagatttcaccaagtatttgtcacagtgccctggtcaacttgggccagtgtgtcacagacaatacttgagaagtgagcttgttagaaagacacagatgggaagatacaatgacctctgcttgctggaggggctggagattgcctggcccttgggtgggaaatgggccatcctcaaacaaaggttccatgcctcctacagcccacaactatgcccgccatctcaccaagtaggcgctcacagcctggccattggtttcatctgctctcatccccagagaggagagaaagcactaagtgtgtatatggggagtggggatgatgtatgtggtattgtatgggtgttctgaggcaagaggacacccacatccatttatctgtggcacatgccgcccctttctgtaactgtaagccatttctagactgctctggagtccagtggagtgtttcctatccccggttcagttcactcacgtgcttccgtgaatactgaatgtgactgtttagaggtggtagaactaatcccttactgtagatagcactccaagtattggacatctttttgctgtgttcttaagatatctataaatacctatacattatatatatatatatatgtatgtatatcaggtcctccttcctgtatgtggtttcccattggtagttgtcttctctttggtcaagatgaacttttaatggagttcattattttcctctctgtacaaagttaagagcctaattttgtgtattctgtttggtggctgataaagagactttgagattacaaaatgcaaaacaaaaatccttgatatagaaagttaactgtgcagaaaaactaataaagaaattaagtctacgtgtgtcgtgtttcctatcacagggaaggctcaactgtttaggctgcctggctgccccagggcgctgatagttggaggatagtgcctgttagacacatttggttgggggagggttgagcaatctttctgtagcccaggctggtcttgaatactcagcaatcctacttcagcgtcatgggtgttagaattatgtaggccaccctgcttaattttttttttcctcttagggtgataagagattgaaccagggtg

SEQ ID NO: 34038 - DNA, 1310 bp, Mus musculus
tcatgtaggaaaaatttcacctattttcatatgctaaattctgagtgcattcagggaaaggggcaatgaaggcatagttgtgaatttgtttttaatgtattaactaactcttctatacccctttttagggttctcttggaacggttgattgtaaataggccacatccttggggtcttcttatcaccttcattgagctgattaaaaacccagcatttaagttctggaaccatgaatttgtacactgtgccccagagattgaaaagtgagttaaaatgttaattaccaagcagggagacagaaaagaatgtgtctaatttgggtctgtgagttaaaagggcagttatagctaattcagattaagagatctttaggcttaaagtttgttgtgaagttaattggtgcttgtctccacttcttaggttatttcagtctgttgcacagtgctgcatgggacagaagcaggctcagcaagtgatggaggggaccggtgccagttagatgaactgtgtatatcccttgcagatgcatcagccttggtccgctgaaccaagttcataaactgaagattcctcctgactttcctagccctttggttctcaggggtctgccccaccaactgctggggttgatctcctgtctatgtgggcaagttccaaagtttaaatgcattttttttttgactcttggccaaaatttagaagatgctgtgaatatcattttgaacttgtgtaaatatatgaaagagaaaacttttgtctgaaacttcttgggtttgtgtaaagtgtgtacgtatgtaaactaccttgtaacaggcagttgatggcatgctcttgtctcaagcatagcagcatgtcttccgacatccatgacattccaaagattagcaaatactgaattcatgcaatttttttttaaaacgtagctaaggaagcttacaaagccacataagttataagtgtagactagatagaccagggggttctgcttgcctctggaaaggtagttgacctgctttggtggtcctaagggagaacatacccaaagaggaacatctctggcctgcgattctgcttcaccttgtttaggctgtacagcctagttaaacaacaaaagtcaaaaagactactacagctgctgctttttataaggatcaggatcgtaaatgttccgtgaacagctaggcccgtgttatattttgtagcctttgtagtttctgggccttaatcagctttcatgtatgtgtgaagacggtaaacattaaagtcatgacatgcatatgagtccactgtgcctttctcagtagcagcag

SEQ ID NO: 34039 - DNA, 1155 bp, Mus musculus
tgttagagctcaacatgatgaaatgtggagagacgtccaggtttctatacctttagaaaagccagtggcctttattgagaatatagaagtttggtccagtaacaaatttaaaaaacaaaacaagacagaaaatctaatttcccttttgctggctgccagcatagaaatttgtgtctaaacagcatgtatcctttcctttattgtttgtagtgcttacagagttcagggtaaataagccactgctggtagtgcaggcctgactgagtgaggaggtaagaacatcacatggaacttgtaagttcaaagccagtttttggacagcttagtgagactttgtgcaaagttttggtttttttgtttgttttgtttttgttttcttaaaagcctgactataatattcaagtgttaagtactcagcatttgggagggcctaggttcaatccaagacacaggtaaaagtgacaagtggcttatctgtgtggttgatgggatgtaatctgtatgttctgtataggttctcggtatagtagtgggagttctcctacaggatcatgatgttcggcagagtgaatttcagcaacttccgtaccataggatttttatcatgctgctgttggagctcaatgcacccgagcatgtgttggaaaccattaatttccagactcttactgctttctggtgagtgttgtgtatagtagagatttctatttgttattttatacagggtctcatagctcaggtttgatctcaaaagttcctgtattgttgaggctggccttgaactcccaattcgagcgtccaagagttggaattgcaggcacacaccccaacacccaacttaatggttgatttttgtaggtgtcagaggttgtgctgggatcacaggcagtactttgctgaaatttcagggctgttggttaagtgaggtaaaagtcaggtagaactttgatgttttgatgtgtttcattgtaaagtctacatgtgtttactatatttcaatttgtggttctgaatttttttttttttcagcaatacattccacatcttgagacctactaaagctcctggctttgtatatgcttggctcgaattgatttcccatcggatctttattgcaagaatgctggcacatacgccacagcagaaggtgtggct

SEQ ID NO: 34040 - DNA, 1340 bp, Mus musculus
tgcctattttttttcaaacaatactattttgtttttgtttgcagttgtctttttattattgtttttacttatgtgtgtactccaactcacgttattgatttttcttttaatatttatttatctatctatctatttatttattgtatatgtgtatgaagagggcatttgatcccattacagatggttgtgagctaccatgtggttgctgggatttgaaatcagaacctttaaaagagcattcagtgctcttaaccgctgagccatctctccagctcccgcagttgtctttttaagacatctttgtatagaacacatagctaatatggttaatacggttaaaatgctgtttttttgggggggcctcgaaagacttgactgctcttgcagaggaccctgattcaaatcccagtattcacatggcagctcacaactgtctataactcccaagatctgacactctcacatagacatacatgcagacaaaacaccaatgcaaataaaaagagagattaagaaaaatgcccttttttaggtgcctaattgaatgtcgagatgaatataaatataatgtggaggctgtggaattgttaattcgaaatcatttggttaacatgcagcagtatgatcttcatcttgctcaggtatggaagaaatttaacttgattgaattaaaggattcaggaagtgcttttgttttttaattattactctcttgaatttgctgtgttgccagtcgatggagaatggcttgaactatatggccgtggcgtttgctatgcaactggtaaaaattctgctggtggatgaaaggagtgttgcccatattactgaggcagatctgttccataccattgaaaccctcatgagaattaatgctcattccagaggcaatgctccagaagggtaagaatgaagtgctctgctctcctgtacactcagcagtctcttaagagcttcagaaattagatacacactagcataactcgtgactttgtgactttcttaacctataacataattttaggttgggccaatattgtccttaaagtatgaactcgtaatccactgctgccttcctgattcaggagagctgcacatacagtgactgctgagtggcagcagaagtcaccgtgaacactggctctgttaggctgggataaacctcagggagtgaagtgctttcagggtccttgggaagcccaagtcctcagccgccagtgtactgatacaaacttgtaatgccagtgctaagttaggcacaggtggcatagcctaatcagctatggtgaggtcctggtgagagacttcctcagaaaacaaagtggatgaatcctgctgaa

SEQ ID NO: 34041 - DNA, 1099 bp, Mus musculus
gtagctgtacagatggttgcgagccaccatgttgtttctggaatttgaactcaggaccttcagaagagcagtcgggttttttaaccactgaaccatctctccagcctgtgtgcaaatgttaaaatcaagaaattaaatgctagtatcctcatctaattcttttaaacttcaagttgttgcttcaagttgttggagtaatgctcttttagaatcatacatttcatgtagtggttctttgaaataaccccctgaatttcctcatttgttctgggattcacccagggccttggatgtggtaactgaatgctctgctgctgagctacactcagatttttatagtacttccacttactccagagtatggatatgattttgtgtatgcattcatgaagtgtgtatgtgtgcatgtgtggtagacaaaagactgttctcacttttcacctttttttgaaacccagtctcttcatttttcactcctgtgtgccccaggctagctgtcctgtgcgcttccatgaatactccttcatccattttccaacttactgttagaacaataggattacaggcacatgccatcacacccatccttactttcttctagagatgtgaactcaggtctgcatggttgcagggtaagcccttgacccactgagctatctttccaggccagtagcaggtttttgataggaaaagcacatggccatgtgtggcagcacatgccttaatccagtcagtactcagaaggccgaagcaggcagatctctgagttacactctagtctggactacaaagctggatccaggacagccagggctacacagagaaagaaaccctgtttcggaggaagagaaaaggggaagcacagaagtgatgtgtttttattttccagttatggtttaaaatttggtggaagtattgtatttgaaccttgacacacgttaagttgcagaaggctttctggatggtacacgtgcagtcttttccattgttgatattatgctctctgatcacttagttgtgttggtgatggccaggccttttcaacaggtctgtcctggctgtgaattacccccacataataatactaagactgaagaac

SEQ ID NO: 34042 - DNA, 1155 bp, Mus musculus
tgcatgcatgtataagccacatgtgtgcctgaggcagcagatctggaaatggagttatgactattgtgaagctacacagtgggggtgctgggaaccatagcccagggactctgcaagagcagcgagtgcttttcaccagccagccgtctgctgatactgccttcctaacggataatttagctataactttaacttagaaagtcatatgtctataagcaagtactatttgtttaatgagcttgttaaaattgaaggggattaaacagataaaaacagatcacaggttatactgacttcttttcttcctaggttctgtttcctggggctttgttagttttatgtgaactctgtggtttctgtagcattgaaggagtaccagagtcagatgtgacttgtgccttgtttcctccttccagatccctttatttcaagctcatcctcagctgaagcagtgtgtgcggcaagcaattgaaagagctgtccaggagcttgtccatcctgtggtggatcgctcaattaagattgctatgactacgtgcgaacagatagtcagaaaggactttgccctggattctgaggagtctcgaatgagaatagcagctcatcacatgatgcggaacttgacagctggaatggctatgattacttgcagggaacctttactgatgagcatatccaccaacctcaaaaacagctttgcctcagccctgcgtgtaagcagactgttttgtgtactataaaatgtattactggtctgtaagagcttgggcctgtgctgtgtgtgtgtgtgtgtgtgtgtgtgtgtgtgtgtgtgtgtgtgtgtgtgtgtgtgtgtgtgagagagagagagagaatttgaatgaatgtgaatgaatgaatgagaatgagttagggcaaactccttagcactgaaggatacttccagcctctggcgtcttttagattctaagttgtgttaaggcaaagtgttgcgtttgcttcttttttatgtagttctgtgctcagtgttacttgtcagatactcagcagtacccaagagaagaggactttttttttttttttttttagtttggagccagcatctcaaacatagatgaatttagattacagcagttggactaatagtttataatatatagttactttacttttatc

SEQ ID NO: 34043 - DNA, 1142 bp, Mus musculus
gctcacacaataccaaaagatcagagctttattcttgtgcacatagagctagttgaacaatcttccttagttggtcctagattattacacattaagttaggtgaagaggctgagtggatcagctttccactccgttttgtgtttttctggaatgggttgtatctaagaatggggcttttgtcactgtcatgtttatttacttgttggaataatacagagtaaaggtttgatttaggctgccttaatatcatagctcttctttaggtttttagaccaccaaacccctggacaatggcaattatgaatgtattggctgagctgcatcaggagcatgacttaaaggtaaaagagctgcctctctcagaggattctgggccttcagatgatttaatgtaaagatagaccagtacagggggtaggcagtggtcattgcaccagtggattgaattgtaggatatattatggacagagctcaaattttctcttattctaattaaatactggaatcatgcagttaaacctgaagtttgagattgaggtgctctgtaagaaccttgcattagacatcaatgagctcaaacctggaaacctgctgaaagataaagatcgtctgaagaacttagatgagcaactctctgctccaaagaaagatgtcaagcagcccgaagagcttcctgccatcacaacaacaagtaagtgcacaagttcatcagatccttctcagatgacaccactcctcataagccacctagcaaccaccccacactgtgagccatctgattatcaagtgtgagcagcatctaaggataggcttactagatcgtctcactatctcttaagataattttaagcaattatgagtagatgagttgttcttatatcatagcctggctagcttatcttgcaaaacatttaagtatcacagtacttgaatgacataatagtatacattatttcttaaaatccagggtttgccagatcagtcatgcctacaaggacaatcttatctgcatcaagacaagaggtttagaggtacagggctctaatcttaagaaactaaaggcaagaggattgtgcatttgaggacaacttaagctacatgagtttgaaccagcctgggaccctgtttaaaaatcattcca

SEQ ID NO: 34044 - DNA, 1299 bp, Mus musculus
aggggcggttttcaaactcagaatatcagaatgttagtttggtaactgtcacttttacttgcccaatcatcttactggaccaagaatctaatcatttagacataaccctatgtaagtatagtccctctttaaaataggtttttctgtgataaggaacaatactcagtatttttgtggcatggcatcttgttgacttgtgtctatgcatgtgtgagttgtgtctatgcatgtgtgagtgcgtgtgtgaccacttctttcttatctttggagactaggtacaagttctcaggtctctatccttgtttttaataaatggtcttacagaaaaactcattctgctggttgaatgtcaagatatctcgatttcagtcctatttgaaatagctttttgttctgggatcctatgtggtataaggccaaactcttatacttgttccataaagttcaactattttatttctaatctaccatttatttttaaatatgaagctttgtaaagaaacagtgcaaaccggatggagatggggtctttcatttctgagtaacttggggctggcttaggaactagcactatatttaaacctatgtatgggaaatttccccattcttggttacgctgtagtgcaaaaagaattcctggctccttgtagcacagctgactgatgccattttgctgttgctttatggagttaagggacatgactgtacagcttgcgttatcttttctaggaaggagttctgtagtctttggaatttcctacgtactctgaggcaaacaacaaccattcatttgtttgctttctctgtcatgctgggattcagattcagggtcttagacatggtagatcagtattccacctcgtgagctctttaaaacctgtttcaaaggtagtatcgacagtttgctaatgcatgcagtaagataccaatgggatacacgggataggtctgctttgggtaggtgctcagaattgatttcttttagagaggccagggaaactctcaaatacgaaattgagaatttcttttatatgcttattcacttatttataaattctgtattatcgcaggtgctgctgacttctgataaagctgcggccaatttctcagatcgttctttgctgaagaacttgggacattggttaggaatgatcacattagctaaaaataaacccatcttacacacagtgagttttaagatggatatatgttttgaacttggctataagaaatgttttaattgtcactgggattttatgtctttgaccatgtttgaattcttatttctgtgctcgtggt

SEQ ID NO: 34045 - DNA, 1068 bp, Mus musculus
aagtaggtctttttgctttccgaggatctgttggtataaatatgtagtagagaatttgtacattattttattggaagcataaagatcagcatttctccctatatttcccagagagcactatgcaatataataattcagtaatgggtttaatggtcttaccagtgtagtcataccatgtttatttttcatgctaatggaaatctataatctttttaaaatgttttatttattgtctttatatcttattgtctagtttgtatgtctgtgtgctatgatgtgtatggaggtcagaggtgataagcagtcctctccttctgacgtgcaggtcccagggattgaacgtaggctgggttatgaggcaacacttgccagcacttctgttttctaggattttccaatgaaacacctcggcttctttaacagtgcatattattacttctagccttctataaatacaacaaatatcgatacattgcttgtggccacagatcaaactgagaggattgtggagcccccagaaaatattcaagagaaaattgcttttattttcaacaatctctcccagtcaaatatgacacagaaggtaagcatgatgtaatgacatgaaatgccctctccttctccttgatgaatggcgggattggttttttgttttgttttgaatccagtaagtcaggaagctgccgtgagcatcaggagtctgagactagctttttctgtcacagtggtaacagaccctttctaaaattaaaagcccacaaactcagtcgaaaaggtatgattttagctgggtgtggtggcacatgacttcaaaaatttttttaaagattatttttataggaattaaacagtatccttagttacagtattgttttgcagtgagttgtagccttttgaaatagtgttatgctctcctgagaagggaagtgttattttttttccttctttgctttgagacaaggactcattaactagcctggaccagcctggagctcactgttaacccggatggcctctagattctgtctgcctcccaagtgctggggttaaaagtacataccaccatgc

SEQ ID NO: 34046 - DNA, 1092 bp, Mus musculus
tatgcccccccccccccaaagttaaaaccatattagtctttctagctttctgggggaattgaaagactatgacttaacaattaactgatagccttttcctccccaacagccgacttgtctcaggtgtggccagaggcaaatcagcactttagtaaagaaattgatgatgaagcaaacagttatttccagcgaatatataatcacccaccacatccaaccatgtctgttgatgaggtgagtgtctaggatccctaatttcttgtgtctttatagactcgaaataaggagactttgaaggtttttagaaagtctcttaaaatgttgtaatcttttgaaattttaatgtttgtgttaagctcttttttgtattggtaaatgcttttcgtagcaagtcttataaggcatataaggaaaattctcggtaaagttacttgtatgtatgtatgtattgtgtttatcttgcttttctaggtattagaaatgctacagagatttaaagactctacaataaaaagggaacgagaagtatttaactgtatgctgaggaacttgtttgaagaataccggtttttccctcagtaccctgataaagaattacatataacagcttgcttgtttggtggcataattgaaaaaggactggtcacttacatggcattgggtctggccctgcgatatgttcttgaagccttacggaagccttttggatccaaaatgtattattttggtattgctgcactagatagatttaaaaataggtgagtagttacactgacacttctttctctcttgttccccaacctgcagtgagatttggtattttcccttttcagccttctttggtaatatcttttttgtggagcagtagtgtatattacacacaatgcatacatttcaacattaaatatatactgacctatacaactaagtccactgtttgggcaaagtaaactggttttctgtttatttttatttgtttgtttgttttaagcagagatattgactttgtttaatttgaattacataattttaagttacttttaaaattttgattggctctctcccagtctggcctggaaatcccaattctcc

SEQ ID NO: 34047 - DNA, 1228 bp, Mus musculus
aaatagagtactcccttaaaaaactgaccaagcaaagagtagattttttttttaatagacatgtttttaggacaggaattagaaagtagtacaaagaaatggctattactggactttgcacgtttctctttaggccctgtcgatgctgctgaacggcactccatttgcttttgtcattgaccttgctgcactcgcttcacggcgggaatacctcaaacttgacaagtggctaacagataagataagagagcatggggtaagcagtgtgcaggaaatgttcatttctttccaaaactggtatctaaactgtcttagaaaaaaaataatataaaaaggatgttagggaattaaactcatgacctggtacatgctaggcaatatccccaccctcaaaagtaccccttttaagatgatatctaaaatgttggtctttgtagatggtagttaattgtgtttagaaagtttttaaaatagatgtaaaatacactgaagtcttttctttttttaggagccttttatacaagcatgtatgacttttttaaagagaaggtgcccttctattttgggtggacttgccccagagaaagatcagcccaaaagtgctcaacttcccgctgaaactctggcaacaatgttggcttgtctgcaggcttgtgcagggtaagaagaatatgcttggggctacttggaaattgcgttattaccgagacactcaggaggtagacactgatggatcattatgaattttgaggccagtttattttagtcttgattgaattcatgacctgccaggtatgtggaaaggcactgtcttaatcaagacaaccaatcaaaaattatgtctaatcaccattggtccaaaagtgacattgtgagaccaagggcaggtggccacccaaggagagtagtgagacctagtcttgaaagaaaagaaaatcttatggtttttaatcccagggcattacagtgttaacagtgtgttgtagcaccactcttgaatgagaatgttggctttctttgacctatcttctttaaaaaagccatgttatatgggtttatttatagattaattcttctgtgaaattacataaatgacttcttattgctataccatcctgtcttaattaaatcacccttttgataaacactgaaattgcagctaattaggtgccttccaactttttttttttaagttccttgaatttttatgagactttcgaggtcattt

SEQ ID NO: 34048 - DNA, 1147 bp, Mus musculus
ttgatagaactttatcatatgaagtatgtcttattaatatatttatttaggatatttagcttttgtgaaatctcatttgttttttcattccattcataaaaatcttggtagtaaagaaccaatgattattcaaattacttattggttgttagtttcatttcttttaaaattaatctataggcatagcagcatgcccccttccaacatacccaatgcattctgaaaccaaggactttacacatttaggcaagtgttttcctcccttgctgtagcccctgaagcatgtagttttaaaaatccacagcagccacttaagaatattctctaataccaaggcttggtagaaatgtgatgtgggtagttaaattctgtagtggatgtcacctcgtctggagtgaatttgaaggctagagatatagctcattatcaaagtgcttttaaggacatggatttagtgcccagtattcagggaaaacaagggatttttaaagatatagttaatattgtcagtgatctcaagcatttcctcttcgtttttcttaggaaaagcttggatttgattgaatctctgctgaggcttgcagaggttgggcagtatgagcaagtgaaacaactcttcagcttccctatcaaacactgtccagacatgttggtattggccttacttcaaatcaacacttcctggcacaccctacgccatgaactcatctctactttgatgccaattttccttggaaaccatcctaactctgccattattttgcactatgcatggcatgggcaggtaagacaaataagcagttcttcatttcagttattgacagtcttaaatcttggagtttcctgtttctagtgatggtgtagcagttaaagactgcttgctgctctttcagaggacctgggctcagttcccagcatccacgcagcagctaacaaccatccataacacaagttctcgggcagccagcatcctcttctgacctccagtggtattaggcatacacatgatgcccaaaacatctaacaatcacataagataaatttaaaaccgaaaaatatcagtgttctaatagaccgatttattatcatcaaacatgtttttaatcttagatcctattgtcatttctatgtagatattaaaatttag

SEQ ID NO: 34049 - DNA, 1158 bp, Mus musculus
tgttttgtttttcaagacagggtttctctgtgtagccctgactgtcctagaactcactctgtagaccaggctggccttgaactcagaagtccgcctgcctctgcctcccgagtgctgggattaaaggcgtgcgccaccactccctggtggtggcggttatctttttatgtagttcttgacctcacagagacctgcctcctgagtgtcctgccacacccagccctaaactgcttggttttgagaatgagcttgcagaattgggattgaagagattttagaggaaataacaggagagatttccatttatgtgttgctgaacattgcacccaaggcctcgggtatcatatggagtatgatgtgctgcattcttagcctcgagattgttgtttttagttgcttaatagttgcattctctctctctctctccagattttccccaagagcgctgtcctgtggtgcttgcaccacttttataccctgaaaaacgggacattctaatggacaggattttgcctgattctggaggggtagctaaaaccatgatggagagctcgctagctgacttcatgcaggaagtgggctatggcttttgtgcaaggttggtaggaagacataccagattctaaaatttaggaaccatggtcttggtttagtcactgggatagtcctattttatcatcatgcacatactttactattttaaattaaatttctagaagtaacatgaaaaggatgggtacattttcaagggttttcaagtattgagtaaagagattcacttctatatgcgctatttgttttgatgttggtaagagaactcagctgagaaaggtgttgtgtttcatctttggaacacatttgatgggaggagagagtagacttgagccaagttgtcctgatatccacacaaaacagtatgcatgcttatgtgtatgctccagtgcgcgcgcacaggctgtaattttaaaaatgaagttaattaatactaaaaatggaagttacttttttataaagttttatttattattataaataagtacactgtagctgttttctgtcacaccagaagagggtgtcagatctcattatgggtggttgtttttaagctaatgattcatgtttctagttgcataaaagtaaaacaaaacattaaatttc

SEQ ID NO: 34050 - DNA, 1208 bp, Mus musculus
tggagttcttccttggctttcaattagccatttaaattcctacaagatgcaacctgaagtataactgtgggattgtacagttgtgtgggagtcaagtgaggcagtggagtcttgggaatgagtgtatcctgtgggaaggcactaaagggaggggagtttgctcacaccctcaggctgagtcggaagcagtctcagacacagccctgactcggtgtactcctggtgctctgcagttgttagatgatattgataaaatagagatctcaaacgtttccgattgttttactatttactaaatttaaactcttggaagatttgtctttggaagatttagagatggcatttttatcttcactggtcaagacatcataattatttttaaaagtgtccttaacattttaaatgaaagttatttaacctttcccccacaactgaattctggaattttgtatttatacaggtgccatgtttcagaacagagtaagacacttggtaaagaagaactgaagacatttacagataacagagatagcctaattacaaagaaagcattaacctgcctctgaggtgactaaaggggaataatggtgattttgcgccgggctcggccgcctgcttccgccccaaccagcaatgaatcttgactcgctctcgctggccttgtctcaaatcagctacctggtggacaatttaaccaagaaaaactaccgagccagccagcaggaaatacagcatgtgagtactccttcagagtgtaacagcagtgaggcaaaacaaagagccggctgataccaagttggcaatttatgttactaggttgtgtgacaggtcatgacttctgcttctttgtgttattttgctttagaactgtacataaaagaccttatatcagtctatgggtacgttcacagcttttaatttttctattgaacaaatatgaagccaagtatgcatttaattctagcacttggaaggcagaggcaggtgaatctctgtgcatttgatgccagtctggtcagcatactgagttcttggccagcgagccaaggctccataaagaaaaatctgtctgagaaacaaacattaatagcaaaaaactcagtaaagaaacatgatctcactgggttcagtctagttccacctttttcctcttcagcattaagagggaatggctcagtggataaagtacttgtgttcaagcgtgaaga

SEQ ID NO: 34051 - DNA, 2042 bp, Mus musculus
tccttgggaagcctggctcgccttgcctccagaagtaagatgactgattatcttggctgctacagatatgagcctgaagaattaggggaaaaaaatgactgaagcattctcttgtcctctgccctacagctggtgggcactggtcagttacggagtccttctggtcacattgggagccttcatcttcggccagaccacagccaatgccatttttgtggatctcttggcctgaactctgcttccccagaaacatgaggaccgagcatcgctcagagctgtggagctgcccaagtcccacgtcccattccagccagtgagatgacatgtggactcctttccccatggacagtcatgagacaatcagccgcagatctgtggacggctcccgcccagctgccttgcatcctgaccccacgttctcatggatggaggtcccatatcacaggagcttcttcccctttgctcggatctccacttcaagcctttgggacttgaggatggagagggtcagtgggtctcagaagagagagtctattctgacttccctctggaaaaagaacaacaacaaaaaaatgcatctgcagagggctggcgtcctccgcggagcgtggcaggactgtgctcagtacctcggggttttgtgcctgcccatgtctctcagaagccagtgacaacttctcctgggacctggcaacttccaaaggagctgctgacatcatataaatgtccaaattcccctcttggtcccctatgagtctctggtagcttcgcaagtctttgggctccctactgtgactttgtccaaacaaagtggtccatgttgggtttgcttctgctgtgttcccggacatcaccaagtctaatgtttacaaagccagcctggcttcggagctaggggctgccatgccacggtgctctgagcactcctccgttagctctttatgcatgggcagagggtctgttgtctttttcagattccagataagcccgtcttttcagaggtttagggtaggatcttttagaccatccttccaggcagggatgctcaaggtccgggtgaagttctgcctcactcctccaagcctgtcctctctcttctcccgctaaacccagccccagaacccagaaggagttagactggggaccctggatgtttcccttcctgtttccatctttacccatccccacatggccatccctctcccccaaccctatctcttctctttcttcatttgtgggttttgttatttggtgggggggggggggggtgtggcgccagaccctgtcacaccagcttgcctggctccacacgtctgtcaagcctggcctccatgcctgggaatcctgctgaatcatacccaccccaggtgaggtcagcatagacacttctctcttgactgccttagcttcgaacctacccctgctcacttttgtaagtcccaagtacagaattggtctttataaatctattctgtctaaaacacttatcctaggagtgaaagggacccttcccagcagactaccccctgcccccaacacaggtcagtcctgttgaggcaggaggcttagcatccagacttgctgaattgttgttctcccatccatccctggtacttctggtcccgctacactgttttcccctagccccccaacccccataagcctccaagtgctgcctttcacagtgaccaatcacagagctgggcatggcttagagacgtgctagctgggacagttggctagaaccaggcttcagcttgtcctcaggacccccttcctccgtcccctttgccctctgtatccagtttcttgctggttcttttctactcaagcacacttggagacgtgaggatgattaataaagggacttacactgctaaactgtgtctcctttatcttctgctttggacagagtctaggccataaatgtgtaggtgatactctgactatccacaaccaggaatggcaccagtgggctctctcaccagagcaggagtcttcaggaggctctggacgctctttttctgttccctctcctgaat

SEQ ID NO: 34052 - DNA, 1193 bp, Mus musculus
cctcttctggtatgtctgaagacagctacagtgtacttatataaatataataaataaataaatcttaaaaaaaaaaacaagagggagagggagggagggaactggaggatggctcaatgcttacaaatgcttgctgttcaatcctaaagaccagggttcagatccagcacccatgtaacaaaccaggcatcctgcaaactcctgtaactccagcttcaagagatcttctgtattcttctggcctccacacatgcacctatacagtgcatgtaacactcacacaggcgcgtgcgcgcacacacacacacacacaaataggaaggttttggtacttggaagtataatttaatagcaaaccctgtgcttgtcatgtgtgaagacctgggttcaataccctagtattgcttccccaaattatgggggtttaatgtacatttatgcaatgggtaacctgaattacttatataattcatgtagtagtgaaaggctttagaagaaaaagtgggagtcccacgcccctaattgggcatatccctaatctcggtacttggaagcctgagacgagaatacttgtagagtacgaggccagcctgagctacatgagttcaagctagcctaggctatatagtgaaaccttttctcaaacaaaacgttggggtgagtttcttctcttacagcccctctccgcttacccttctcctaagacatctctgttttccctgtgggctgtaatctaaactggttttgtgcttgtatgtatcttgactacacagagctatgcagtgtagacagacataggggtttgcgtgtgattttgttgtttgaggtaggaaggttgccgggagtttaaagccagcctggacttcagagggagaccttggcttaaacatttaccacatataagtcatcggatgagggaaaagcacattgcttctatatatgtatgtttccctgaataatagttgagggaaagggggtgggttcatattttaagaaaaattattccagagctgggaatgtagttcaatgggctagtgcttgcctacaacatacaagaccctgggttcaatccctaccatgacagaaaggggagagagatagaggaagaggagagagagagaaacatatctctttttttcgttttttcgaaacagggtttctctctgtagccctggctgtcctggaactcactc

SEQ ID NO: 34053 - DNA, 1953 bp, Mus musculus
cctctgcaagagcagtcagtgctcttaacctctgagccatctctccagcccccaggagtcggttttctccttctaccatctaagttttgataataaacttgggtcatcgggcgtgataacaagcaccttgacttgctgagccatctcacacaccccagttcctactttaaaactttaaaatagctttttattctcttactcttaaaaaaataaaaatccacacactaaattctatcttaaagtgaaaaaataaaaaatttaagaagttggctattgggtgccctgtcaaagctggaatataatatcctcaccagaagtggttgtctagctcttttctttctgcaggtagagcggctgaccaaggagttctcggtctacatgacaaaggatggccgaatctccgtggcaggggtcacctctggcaatgtgggctaccttgcccatgccattcaccaggtcaccaagtaattcccaggtgcaaaggaacagagaccactttcccgacagcctttgcgctcgtgagcgtcacgtgcagggtgagggagggtgggtggtggtgaatagatccggtttccaaccacggtgcataactcagcgactgaactcgctcctcggaagagaggtagggcagaggcttcctcggctggtatctggaacttcgtcggctctaaaccaaactccctcatccttttgtctccagcttttctgaaagtttacacacgcaagaaaaatcacagcaccaaacacctgtcagccatggcactggaataggtcagacgctttacctaaagcctcaggtggtatcaggggctcccccgtggaccccagtagagcctcccctaatagaggctataagagaaaaataactagttctgtcattaacagttgtcctcaagttcgtcctcttggtgtggagcaaactgtgtcagcagaccacattacagaaattatgctttacaaaaaccaacaggtctgttgccacttcaacagggacagtagaagatgtagtgtcgtgtccgcctgccccttgtcattgctgttctagagcctagagtctcatcccgttctactgcaaacatccgcctcagcctatggggggagttacataagaatggagagcataggttttctgctcctgcatagcctcctctctcatcaaagagccgtggagagagagagaccctgcccttgatttcagagtcctcttcagtcattgattgattggctcctactgggatggggcctctgcccagctggacctcttcatccatcctggctgcacagcctgtctcttcacatgagtcagacgtgcagggtaggatcagaaggagatactctggggtttgtgtgctgccagcccggctcagactccgcccttgggaaagataaccaccatctgctctaatcatgtagacgtactgccgcctggtttctctgttacaataaaattactatagacccagccactgtctgcttttctacttactgagaggaaggggtaagagtggatatatatattccagaagtctgaagtcacggccagctgactgtaaaccaaattgtatcaactaccggaagtgcatcttgctcttcatcctgcctttcagctggttctgggccataagtgtaattcctcagacatcaggagactggagttatctcccaaaggagcctatggaaggatagaggggtagacgtgactccagctgtctagcggaattgaattcatagctaaataaaaggtgacaggaaccagatctaggacaatcatgggctaccagcccccatcctcggtgtggaagattagtaagggagaggctggcactgtgacatcaatatgctaggctggagccatccgttttagtaaaatcctaatttgggagaggtgagctatgattcgggactttattccaagacctgaggatgttacctttgcccacccactcccatctt

SEQ ID NO: 34054 - DNA, 1198 bp, Mus musculus
tatggtttcagagggtaagtccctgacagcagagtgactccgtggtgaagaatacctgagagctcacaactcaatctgcaagtgagaggcagagaaacacacttcctccaacaaggccacgcctcctaacccttcccaaacagttccaccagctgggatggagtagtcgaacatatgagcctgtggacattctcatccaaaccactttactaataatccacatataaggaaacctcaaaataaatacaattttatttcacaaaaatgatattaaaatataaactagtaaaagttatttctgttctatgatacaaaatgtcaactattccacttatccttaaacagtaacttcatatggaatattaggcttgccaagtggccagtcccggctgagcaggaagaccatgaaggcccaggagttcataggcagcccaaatagcaacgtggcctctgacatttacttcagaaaccgtttattgtcatttcagtaggacgagggcagaagaaaaaactaagacttatgttttcttgtctaggcagaggcccagattgctgcaaaaaatttggacaaagaatacctgcccattgggggactggctgaattctgtaaggcttctgcagaactggccctgggcgagaacaatgaagtgttgaaaagcggccgggtaagccagcgggtcgggcttgagcttgatacgagaaatgttaactcagttaatatgtgtgtaatggtgaccacgcttactgataggaagtttaacgatatcgattatcttgaagatttgacagaatttgaccgataaccttggccctgcttggtggtggtgttgatgactttcgtgttttttataccgcattttgttacaaatgcctccctgggcctataattagtccccacaatcatgtgttaagcttccagcttagacgggagaagcagccatgagtatgggggcagggctggtatggctgtcctctgctgccctgtcccagggcatggacagagaggccgtgatcctaaaataaagacactgactgtgggttactttctttttgtaagaaaaagggaagatgtggcttaatggacatactttcaaatttatttttctgcctaagatttaaaagcatgaagtattaatatctcactagtggaatactagcctcgaatgtgtaaaagccctaggttcagtcctcagcacta

SEQ ID NO: 34055 - DNA, 1196 bp, Mus musculus
agcttaaaagtctaatttattggttaaacacaaggaaacactagtagccataacttaatagaccagatcaccttaaataaaatactcttataaaaacttatagtaatgtgatatctctctcttctttctgcatgtgttaatattttattacagtatgctgaatgtactcatttaatgaagcacttaaaatttctctttggcataattaaatgccagtatcactattctttcaatttgtgtccagtattaagtaaataaaatctccttaaacacaagcatcatgttactaggacaaggttttttaacgaccaagtagctaatggacaggttgtatgtatccacactctagaaacttggaacaaagaaaaaaatccataatctgattgagacagaggagatagtgtgagatttcaccacaatttcaaaacagcaagaagtttaaacttaagaattattcgggcatcgcgcgagggacgccgccacctcctcccacatagcagccctgtcctcccgctcagtcgcgcaggttgaacccaccaaagcgatggttatggagaagcctagtcccctgctggtcaggcgggagtttgtgcgacagtactacaccctgctgaaccaggccctggacatgctgcacagattttatggaaagaactcttcctatgcccacgggggcttggattccaacgggaagccagcagatgcagtctacgggaagaaggaaatccacaggaaagtgatgtcacaaaacttcaccaactgccacaccaagatctgccacgtggatgctcacgcaactctgaatgacggggtggttgtccaagtgatggggctactgtccaacaacaaccaggctctgcggaggttcatgcagacctttgtccttgctcctgagggctctgctgccaacaaattctatgttcacaacgacatcttcagataccaagatgaggtcttcggtggctttgtcacagagcctcaaaaggaatccgaggaagaagtagaagaacctgaagaaagacagcagacaccagaggtggtgcctgatgattctggaactttctatgatcagactgtcagcaatgacttggaggagcatttagaggagcctgtagtggaaccagaaccggagccagagccggagccagagccggaacctgtgtccaacattcaagaggacaagcctgaggctgcat

SEQ ID NO: 34056 - DNA, 1826 bp, Mus musculus
aaaataccagcatctgcaccattctcattaattaacaattcttgaggtaattttgtgtaaaataaaatgaaataaatgatatcatatcactgtatttctaaaataacacccaaaggcacttattttattattttggttctatgtcgtgctttgtttgtttggttggttggttaattggttgtttttttccagacaggatttctctgtgtagccctgtctctcctaacactctctctgtagatcaggcttaccttgaatttacagtttgccttccgggcattcacacacacacacacacacacacacacacacacacacacacacacactcacacactcacacagtctctcagctgatgttatactttaaaaaattcactttagaggcctctgcggcgcggtcctcggagcggcgcggttctcggagccacgcgtctgtcttcctccgtggtcatggcggactacctgattagcggaggcacctcttacgtgccggacgacgggctcacagcgcagcagctcttcaactgcggggacggcctcacctacaatgattttctcattcttcctgggtatatcgacttcactgcagatcaggtggacttgacgtctgctctaactaagaagattacactaaagaccccattggtttcctcacccatggacactgtcacagaggctggaatggccatcgcgatggcgcttacaggaggtattggttttatccaccacaactgcacacctgaattccaggccaatgaagttcggaaagtgaagaaatacgaacagggattcatcactgaccccgtggtccttagccccaaggatcgtgtacgcgatgtttttgaggccaaagccaggcatggcttctgtggtatccccatcacagatacaggccggatggggagtcgattggtgggcatcatctcctcaagggacattgatttcctcaaggaggaagagcatgaccggttcttggaagagatcatgactaagagggaagatttggtggtcgcccctgccggcgtcactctgaaagaggcaaatgagattctgcagcgaagtaaaaagggaaagttgcccattgtgaatgaaaatgatgagctggtagccatcattgcccggacagacctaaagaagaatcgtgattaccccctggcctccaaagatgccaagaagcaactgctgtgtggggcagccattggcactcatgaggatgacaagtataggctggacttactggcccttgctggtgtggatgtagtggttttggactcttcccagggaaactccatcttccaaatcaatatgatcaaatacatcaaggagaagtaccccagtctgcaggtcattggaggcaatgtagtcactgctgcgcaagccaagaacctcatagatgcaggtgtagatgctttgcgagtcggcatgggaagtggttccatctgcatcacccaggaagtgttggcctgtgggcggccccaagccacagcagtgtacaaggtctctgagtatgcccgtcgctttggtgttcctgttattgctgatggaggaatccaaaatgtgggtcatattgccaaagctttggcttttggggcttccacagtcatgatgggctccctcctggctgccaccactgaggcccctggcgagtacttcttctcagatgggatccggctgaagaaataccgaggtatgggttctcttgatgccatggacaaacatctcagcagccagaaccgatacttcagtgaagctgacaaaatcaaagtggcccaaggagtttcaggggcagtgcaggacaaggggtctatccacaagttcgttcct

SEQ ID NO: 34057 - DNA, 1208 bp, Mus musculus
ttatgtttgcttaaatagcaaaaatcaacactaaatgtctaaaggaatttgtaatttgagacctagtatttttacacaataaacctgctaaaacaggctttaaaagacagcaaaataagccatatgtagtggtgttaagactgtaatcccagcactcaggaagctgagacaggagaattgccgggagtacaaagtcaaccggagctaaataatatcagccaccaggactacataacgaaagattgccacagaggaaaggaaggaagaaaaagccagcaatcaaccatcatgtgtttctgtagaatcagatgtaataggaaacatagtttcagattgcttctgacaaagtctgtgccacattcctcacagcaggtgttactctttaagaccatgatagtggagtaagggaaagagtgagatgtagcgctctggatgcttaaaaagtaagtgcttggatttaaccctaaagtggtttgaaattgggaagaagtgtgacaggatacagttgggctaattatgcaatatttcatctgtttaattttctaactctgtattgttcctaaagacggatgaatgagtctctgtggtgttgcctgctcattgtgcatacccttggtagacatttctcatagtgtgtacttaaaaagtgcctgacattgatttgtgttgatttctaagtccatgtaataaatgatacatgttttctaaaaaaaaaaaaaaaaatggacacattttaaaattaggtatatgacaaatctagactttctagacgtgatatttgtatgtgaaagggagggaagaccattactttagaagtttataaccaccctttcagtttttaacttatatgaatatgggtggttagaaaaattttgtactatagagtaaaatagaaaaatgcattatttagaaaataaaatatctagcctcagcttggaaagtaatgtaactactaatacatgtaattttcatagtttaattgattaattaattgtaggaagcaggtgctgctgcaggccccgtgaaacccacttgtttactgccttgcccgagcatgcacagtgaggctgcatgcgtgggctgtctgccaggctggactgttcctcgtgatctggacttgtcagcctatctgtgaatgacctgagctcatgcctgaagtgtgtgtgaattctgattggatgaggtgggtggagctagatgaggtcagt

SEQ ID NO: 34058 - DNA, 1148 bp, Mus musculus
tgaaatccataaaaactgaatgtatttctatacctttattttataataattttaattcatcaatgcatgcctctctaggatggcaaatggagacagaatatattctgtttctaaaaccaggttagtaggcagaagaggcagtcctagtagcttcaggatagctttatgccctgattgcagcagccccacagaacagcagagaccaccaggagttcaagtcacatgcaaatacaaagattctttattcaagcttgagctcagaccctccaacctcttcaactgcagtggatgggtgtagaagacccacaaactgctaaagctttgcctttttatcatagtttcagcatggtcagggaccttacaacttagcagttacaggattggttaaagtttgagaaattagctgggaggtggtggcacacgcctttaatcccagcactgggaaggcagaggcagccggatttctgagttcgaggccagcctggtctacaaagttagttccaggacagccagggctatacagagaaaccctgtctcaagaaaaccaaaaaaaaaaaaaaaaaaaaaaaaaaaaaaaaaaaaaatttttttttttttgagaaattacatcctggtgcattcctgttgactagcagtgatttttagcttgttatatacaattgtggctaacttgagcaatctattttgagatacctgggacattaggtattttccccctaagagctgattggctgtcactaagggtagactagcttttattaggaattgagattgttgctagggggtctcttggttcctgaaacaaggtgttgttgttgttttgttttttgtttgttttgttttgttttgttttgtttttcagtttctgagttcagcctgagaacaagttcacataagatggagtctgaatacaaaatggtgttcataagtgttaggctgggcccttcagatagtccaacagtccttacaagcttcaaatccagttgcaccttattttttgtaagtagtcactcttcctatgggatatcaatgtagataaatcccttttgccattctttgttactcagagggaaattgctggctatcagcttgaaggaagaatctactgttaggagctgaggtagccatggattttagaagatagctct

SEQ ID NO: 34059 - DNA, 1798 bp, Mus musculus
gtggacagccatgctaggttcttgtttgcaagcacaaaatagcaataataatagtgtctgagtttggtgccggcccagagtggttgtaccagcttgcaatcccaccagcaatggaggagtgttcctttctccccatcctcaccagcatcaatgtcccctgagtttttgatcttagccattctgacttgtgtgagggggaatatcagggttgttttgatttgcattttctgatgactaaagatgttggctgctctctcgccaggcgtcctcgttggagtgacatcgtctttaaaccccgcgtggcaatccctgacgcaccgccgtgatgcccagggaagacagggcgacctggaagtccaactacttcctcaagatcatccaacttttggatgattacccaaaatgcttcattgtgggagcagacaacgtgggctccaagcagatgcagcagatccgcatgtccctccgagggaaggccgtggtgctgatgggcaagaacaccatgatgcgcaaggccatcaggggccacctggagaacaacccagctctggagaaactgctgcctcacatccgggggaacgtgggcttcgtgttcaccaaggaggacctcactgagattcgggacatgctgttggccaataaggtgccagctgctgctcgggctggtgccatcgccccgtgtgaggtcactgtgccagctcagaacactggtctggggcccgagaagacctccttcttccaggctttgggcatcaccacgaaaatctccagtggcaccattgaaattctgagtgatgtgcagctgataaagactggagacaaggtgagagccagcgaggccacactgctgaacatgctgaacatctcccccttctccttcggcctgatcatccagcaggtgtttgacaacggcagcatttataacccggaagtgctcgacatcacagagcaggccctgcactctcgctttctggagggtgtccgcaacgtggccagtgtgtgtctgcagatcgggtacccgactgttgcctcggtgccacactccatcatcaatgggtacaagcgcgtcctggcattgtctgtggagactgagtacaccttcccacttgctgaaaaggtcaaggccttcctggctgatccatctgcatttgcggctgctgcccctgcagctgctgccaccactgctgcccctgcggctgctgcagcccctgccaaagctgaagcaaaggaagagtcggaggaatcagatgaggatatgggattcggtctcttcgactaatccgtcaaagcaaccaagtcagcctgcttaatttgagaaagatggaaataaaggcttacttctcttaaaaaaaaaaaaaaaaaaaaaaaaaaaaaaaaaaaaaaagatgttggccatttctttaggtgcttctcagccatttagtattcctcagttgggaattcttatttagctctgtaccccatttttaatagggttatttagttttctggagtgtaacttcttgaattctttgtatatattagatattagccctgtatcagatttaggattggtaaagatcttttcccaatctgttcattgcctttttgtcttattgacagtatcctttgccttagagaagccttgcaattttatgaggtcccgtttgttgattctctattacagcacaagccattggtgttctgtccaggaattttcctctgtgcccatatgtttgaggctcttctccaccttttctctataagtttcagtgtatctggttttatggaggtacttgatccacttggacttgagctt

SEQ ID NO: 34060 - DNA, 2534 bp, Mus musculus
gtgccgcttgcttaggtttggagcattgtacgtgagccttcaccgtctccatttcctgaggagatggcttcactttcttgggtggagaaaacatggcaagacatgcagttgttggggacatgtggtgtgttcgtggagacatggggttgacaccctctggcacttggtagtcttgatggatattaacttgtcttcggagaaagtgtattttggccctgttgatctcgactgaatgccaggtaccagtcttctctaccttccctgccaaaggctcagagggtaagactgcagtcaagaaaacctaaagatatgtattggctcctagaaagggcaaacacagtgaggtagtgaattcttttcagagaagttctgcttaaggagatagccatgtaatgcagattgcttttgtctacagacaaagcaagaatgcagtaagctgcctacatccttcttagcaatatgctaaaacagcagtgtgggcagagcctgggcatagcagagccagcaaggatggactaccctctgagcactctctgagaacttctcactgagagggaccctagggcccttctaggactcttggcaggaagacttacgggcagacctggtatgccttgtcctccaccctggctggatgcttctggagagaatttcatgattcagttgaaaacatttctttttctttcaagtttcctttatctttgaagtttttctattggttcagtcagtcttagaagaaatgaaggcctaactctcttgtccctgcatgtatgtgaattcttgctgtgaatgagtcttggctagccttgtttgtgaccttgtggatttgcatgtactgtttggaggagatctcttgcctatctaagaggtggcctgaggattcgtccccgcccatgtcagagtctctgtgggtcagtcggaggagcgtggagacttgtgtccatccttgtagtgatggaggtggtgccagtgatgacagcatctgtgttcagagcacacaaaagtcccatgcttagtgtgctcctgccgaactgtctttttctgaagatgtcctctacatagcaatagtgacattaaacaggtaacagcaggggttgggggggtggggcgcatacactttctatgtagagaattgttgactgatcctcatgagctgaaaaaaaaaaaagctgcttctagtgtgtgaggtttccgggtaccttttagttcctcataaagttgcagactctgaggtgcctcttgctgtctgcttttgtcagcaccagccccatagtagggctagctaggcacagagtctagtttggtggacacatgaaatttgcatgaccgaggcctgggggtggtgggggaggctccagcggcagcagtgggttggcatagatagcgtttgatatgttcataacccctgctgacctggaagcgtgtccttaacctccccctcttcagaagagtgaggtctttcgtgctcctgaaaggactagagcaggtgacaggctgcctcaggtgatgctgacgtagcagaccccttttctgggcttcgttagcttttctgactccttaaaacctattgtttctctcttctcagcagacatctttaaaataaccagttctgtctggttgagaaaatttggaatgtctgacctatcaatgtttatgtagacatcgtctctgaaagacaatagcatcagtgttagatctagaattttcttccaaaagataatgttctatttgatttcatgctggtcagtatagcattggatataagttcttaggctttgggactccccccccactccattctagtttcctcctaagagtaaaggggtggagggacccaagcccattgagttcaaagccatctcacagaatcaaatttagaccataggttcttgaacagtgtattgtgtcattagtttacctcatctccctctttattctgatactctaagtcaagtgagcctttggttagtggttagtatcacttggactgtggcgagctagcagaacttgtttggctgtgattatggtaagaacgtgtctgaagccacttcaggggtaaaaggtttgttttctttcataattgcatctggtacccagcaggaagtacctggcccctccttgttcgtcagaatagctacccaaggaatctgcctggagaaaggtcagtgaaggaagactcgtggtcaccccagcccagggcagggcagggcgggcctgcccgatgctgccggacgactcatggtcaccccagcccagggcagggcagggcgggcctgcccgatgctgccggacgctgccttcctccactaaccgggcgttgcttcagttctttcagaactgatttagcaagttccagaaccctgtcccctttccatggcactgaagggtacagtgattcagggcttaaagaattggctaggtcaaggggcagagagggcaagagcaaggcgtattgtaacccaggcctacctgttccaactctttcataacttgtttatgaaaaacaattgttttcattcatatataacttattt

SEQ ID NO: 34061 - DNA, 1114 bp, Mus musculus
atatatatacacacacacacacacacacacacacacacacacacatatatatgtgtatatatgtgatttataaaatttctcccactctggagccaagccacctgtgatttcaaggccagcctggtctacagagcaaattctgagacagctaaggctacacagagaaaaaagccaaaaagccaaaaaaaaaaaaaaagtctgtagttttatcgtttgccctgtggatttctttgtgtagaagcttcgctttaatatagtgctaattctctatgttaacgtgtgtttgctgaactctttggtggcatatcaaagaaccattagcaagtcccgtatcgcgaagcttctgccgcccctcctcctaaggcttgcccctcagcacttctgcattcttgcctattttgtttactggttgaaaccaattatgaggaaaagaatgttgactgttgcctctctgcttgtgataagtttttgcttcgtgtgtttagaggctctgttagtagttgtatgcacgtttgggattgctctgttgggccttttgtgtaatgtaaattcccttttcttcatggcagctttcagggtgaggttttctttgtctgacgttaagagtcactgcagctttctgaggactctcgtctgtataaatgctaacatctggtctgtttattgttgtaaacaccacagtttcgtagttcccttttgctttccgcagaaaccgtgtcatagggagctaaaattctgtacttacctatcaggcatattttaaagaagaaggttatgaattactgggtgtttttatttgtatttattgtgggtgttttttttttttttagatttatttattttattatatgtaagtaccatagctgtcttcagacacttcagaagaaggcatcagatctcattacggatggttgtgagccaccatgtggttgctgggaattgaactcaggaccttcagaagagcagttagtgctcttaaccactgagccatctcgccagccccttgttttttgttttttgagacaggtttactaagtagccctgactggcctagaactcgtgtgtagaccaggctggcctcaggcttatggctttctgtctgtctctgcctccc

SEQ ID NO: 34062 - DNA, 1962 bp, Mus musculus
ataagaccaggatttttctgattcggcacatgctgtcagtttttgggggtaggggagatgaactttaaaacaatacatatacttctttggcttgtccgagtgtgagatgcacatttaggaggctccatgtcaggccccttcttagggatgtcccttggactcttgggctgcgattctcttgtgggaagcaagtgcagctggccttgtagagtggagaaaggaggcccactttctatcagggtggagcaaaggagactaggaaggcattgttcagatggatggttagtttgaccagttgcgtgttagcaaattcacttgttcttgggaagcaggttaagtagctgacagtccaggaaagagaaaggttccggagggacgagagaagtgctggtggggaagccgaaggttgagggaggtggaggaaggaagcgagtgagcgggcaggcagtgttagtaagtacaagctcggtagaaaccagatagcaacagttaagacctaacaattagaaacatttccaaactaagcactaaacagaatgggagctgggcttgttctaaatgatctttaagttatgggaaatgtgttttatgtagggtgctgagtaaggtgggctgactcagggctggtgaagaccacagctgcccccgggacccacatgcttgacccaggccatgtcccttgtccttggagagatgtcgggctctatgcagatgtaacctggggcaggcagtcgctgtgcgttatgttcaaagtcagcagatacaaaactagatattttaaatagttcctgttttgtgttgtttaattatttttttaactaccacaggctggccaactaatagaaaaagggtgattgatttctcattttgtaccatgttggcaatgttctagggaaagtgtgggggaagtatttaatgtcgttacactctggttatttggcttgtgccaggtcctgccttagagcctgtggtaaccctccctgatacagaaaggttctttctgtagctccctggtcggatcattgctgtcagaccgacaggtgggtgctttccatggagagtggaagtggtaggcttgtgctttccatgaaacgtagcacttcttctcttaaggaggtgcaagtcttctgtgtcttccatcaggggcatgttcatgaacactgtcatgtcacaccaccatgctgaagataacttctgtggatttgaaatggcactttgagtttctgtgtgacacagcacatgtaaatgcaagcactaccatgactttaatgtataaaatctttgttatccaaaccaaggggaaaaccacagttcacttccgtggagtttactctttttttatatgaatgtttgttactgtgtctcggcatagtgttcctaatgttgttacatacatgccagatttgactaaccactaatgtagttgcgtaagttaacatctagttacatgacaaggctgctcaactgtcgagtggctttgtaaaggtctgaacactgttaaggggaaagctgagtgcttgcttgcctctctaacaacaaaaagatgtgtcttgtgccggttgtactattgaaatatattttttccttttttaattcagttttttttgttgttgttattttggttttgttttgttttgttttttaaacatgcattgtggcttcaaatgaccaggttgtccaggcgatgacagcaaactggctggagtggaaaccatgatggagggtcaactgatctccgtagcagccagggcaaagtgaatgacctcagaaactaggaattcttgcaaagacactgcctaatagtgtgattttgaaaccttgatacaaaagttaaagtgtatcactggaacgggtaggcactttttgtgttgatgtcaagtgtgctctaaccaactgaggaaatgctgaggtcggagtgggagggaggcttggagaccattgtgttattcctttgatacttgg

SEQ ID NO: 34063 - DNA, 1193 bp, Mus musculus
tgtgtagcactggctatcctggaactctttctatagaccaggctagccttgaactcaaagatctgtctgcctctgcctcctgactgttgagattaaaactgcccagatctgataatatattctttttgtttgtttgtttgcctgtttgttttcaagacagagtttctctgtgtagccctggctgttctggaactcactctgtagaccaggctggccttgaactcagaaatctacctgcctctgcctcccaagagctaggattaaaggcgtgcaccaccactgcccagcctgataatatattcttatgaagcgaggttttataaatttttgtgatttaaaaagtaagaaccacataaaatttcaatgtggaaaaggaaatgagtatgataatatctagctttattacaaaattaagaagttgtgctgtcacaggtgctgttctatttgctgtaaagaaacaccaggaccaaggtaaccattatgaaagaaaggatttaattgaggacttgtccatgatcattatggcaggaagcatggcggtctgcaagcatggtgctgaagcaatagctgagaactttacatccttatccacgggaagcaggcagagagaaagagtcagacatacagagacaaagagagacaaaaacaaaagactgtgcctagcttgaccttttgaaaccacaaatcccactgtcagtgatacacctcctccagcaaggctacacttcctaatccttcccaaacagctctactaactgaagaccaggcattcaaacatatgaacctatggggagtcttctcatttaaaccactatatgtgtcatcactaatacatgtacactatgtctgacatttcttgattcactggtctatctgaatataagatacaggaatggaggaagagagaagagactagggagatagctaaattgctaaagtacttgcttagcaagcatgtagaacttatttccatctcagcagccatgtaaaaagctgacacatagttggggttttgttgttgttgttgttgtttaatttaactttattttttacttattcactttacatcctgttcactgtctcccgccgggtcacccctcccactatctttcattcttccccccaccccttctcttctgagctgctgtcgtccccccccccccccgggtatcccctcgccctggcacttcaag

SEQ ID NO: 34064 - DNA, 1140 bp, Mus musculus
gctgtcactaagttaaaatccctagacctgagtaagacttactgaacttcaatttgtgatagattttagtttagcagattctgatattttcaaatgttggtttatgtttgttctgtagttttataccttactgttttaaactggattaagtaagagataacgatcagtttgaattactttttcccctgagacctggcgcctatgcagccctggcagtcttagcactcactacgtaatacagagcattcacaaacacagagatctgcctgcctttgcctcctgagttaaaggtgtgcactattgtgcccagcccacatatttattttaatggaaatgtatatattatatatatatatatatatatatatacacacacacacacttttttttaggagtatctaactatcaagttgaagaagatatagggaagttgaagtcctgtcttactggcttccttcaggaatatgggctgtctgtaatggtgaaagacgattatgtccatgaattgtgagtattctttagagcatataaagataatactcactgggagagactgtgatgagactaataaaactgtaaacccccatcctttctgtagttgccggtacggagctgctgagccacacaccattgctgcgttcctgggaggtgagttttgtagatgaaatgacttatttgttatcatacagttactatttgttgtaattagtgtaattagtgctttgccctccacactgctctccttgcccgccagctcccgtgccatcagagcgagcgactctggagtctttagtccttctgaagaccttcttccgatcatgagcctcacttagctctctgggtacaaggacacataggccttcctcctcttcctccccttcctcctccccctcgaatcctcctgccccatcagttctaggaaacaaaggctaacttgactaaaaggccctacgtcccttcttttcctgagacatgccctaggtctttgcacctcagggcccagtgaaaacctgccatttctttcataaaactccctttatcactttgctctagtttagttagacactgtaactgtaccatagattggaccttataaacatcagaaatgtatttcttacgggtttcaaagattcagatgcc

SEQ ID NO: 34065 - DNA, 1195 bp, Mus musculus
ttcagttgtcacaaccttcctgaagtctttactgtttccaggcagcaattctgcatttcttcgagtggtaagatgtcgatctttagctgaagagtatggcttggatacagtcaacaaagatgaaattagtaagtataacaaccagatgctaagttaaaagatactaataaaatgtgtataatagtgctgaataaatggtgctataaaaataatgtgaatatttcatagattacctgaatgattttaatttacatatattattcagaaataaatacataaaaatgtgtttagattactgactgcattgtgtgctatatagaactaacattatcatgtttctaccttggtagagactccagctaggagtctataagaccccttgtgttacaccttaatgtatttatttcttatttataattttatactttattttaataaaatatttaatattttttgctaatattattttgtatcctgaaacttgagtatgaattcagccttttgttgcttgtgtatgttatctagttttactgattttttttttttcctttcagtttctagcatggacaatccggataatgagatagtcctgtacctgatgttgcgggctgttgatcgatttcataaacagcatggcagatacccaggtaagaacagcagttgatttaccagatacaaagaagatcttttggcttttttgttgttttaagacaggatcttacttattagcttgggctggccttgaatttgtgatcttcctcaatcagtctccaaagtattgaatttacaggcatgagccatcagattcactcattaaagtcttaaataaatgcttgacttgatgccaggtgtagtggcacttgcttttaatcccagcactagaggcagagctgggccaagtctacagagtgagttccaggacagccagggctatgtagagagaatatgtctcaaaaaagaccaaccaaccacacaggaaaacccacttgacctgaattttagtattctgtggatattagaggaactattatttgatttttttttaaaaaagattgtttgtgtattttatatacatatttttatatacatacatacatacatacatacatacatacatacatacacacacacacacacacacacacatgccagaggagggactctgatcctattacatggtcgtgagccaccatgt

SEQ ID NO: 34066 - DNA, 2981 bp, Mus musculus
gtgattttttttttttttttttttttttttttgtcctgtgtgtgctggtcagctcttctgtgtagcaggcagaataaagactaaaattggcttaggctcacgtagcccatgtcctttataagactgttaaattgtgtcatcccgtgcttttaaaggataaatttaatcatgagtctaagaataaagaacttcaggatctcctgagacccagttgcagattttacagatgcgattattcagaactctgttatgcccaaagtctaggcgctagtgtcttgttttttgttgttgttgttgttgttttttagttagggaagcctaggtttacaaagcaatcttcagaatcttcagggcacttttctatatgtgtgtgtgtgtgtgtgtgtgtgtgtgtgtgtgtgtgtgtgtgtgtcggaaatgaccttgacaacattttgtactgtttgcgttttttaacgctggttaagtttattttaaaactgaaccctccagctctcaaggaggactgccagaagcacgtttgggacctgggtgaggaagagaggagctaggccctgggccagctgaatttaattgtgcagctattgttcgcctccgttgagcctcacctctgaaccttcgaggcatccgtcctgggaggtgatttctgtctaatccctaactcctgacacttttgctgagtaagccgttcccccctcccccacctcccccaggcttagccacaggctactcataattttaggttccttttgattatagccccaactcttgtttccccgtgacacaaccctacctctgctattctgtctgcctagcctcatcccgacgttactggaaaatcttccccgttctatcatccagaggttggaagaaagaaggtgatatggttgggtggcagttgacgacatgtaggcaggacttcttcagtggtttgtggagttcagcctagatctagagaagtgaaagtaaggctttctctctgcatcttggaagggaggagggaggcttatcagatgggccacgcgcccctgcctgttgaattgccgtcactccgcctcggggaccatatttagtgtgagaggtaaaagctaaaaatcatctggccatagtcttcatgggtcactggtgtttgaaaacgaatccgcacgaatccggtttagaggataagttttctcctctgtcaggtggctgtggcattgaacttcaggaaatgtgtccctaaacacatgtggttctttttgggcagttttaatttcctgcccttgtcagcacttcagccatcgtcggcaaggctcttgtttccactgtatcatccacacactaggtttggcccccttggctttgcaggtagacattttgttgagtttagatggggctagcaaaatgactcagtgggtaaaggctgccagtctcaaaaccctgagttccatccaggggacccccgtgatgaaaggcttgagttgaaagttgacctccgaccttcatgtgtgcaccgtggcatgtgaactcacacaaaataaataagaaaaaaaaaaaaaaaatcagagccgggcagtgttggtgcttgcctttagtgccagcattcgggaagctgaggcaggtagatctctgagttcgagaccagcctggtctagagagttccaggacagctgggactacacagagaaaccctgtcttgacccccacccccaccaaaaacaaaatcaggattgcttttgtatatttcctagtgtatctgtttagtgatttttttttttaaacaaaaagacaagaaacagaactcttgggtccttttgttctgaacctgatctcttagatttttactcaaaagtaaaatgtaggcagtccccctgaggagcagcccctctgcccccacacttgggtgggtttactctctgtggctcctttctgagaggaccacgcttatgctctcaggtgtggcctaccttctgagtgcctctttttcttaaccttcatctttacgcctatcctacataataacccccaactctgccgcctcaaaataaagtagaaaatgaaaattttgggtgtggtggcgcaggctttaattgtagcacttgcgtgaccgagggaagaacaccagaagttcaaagagatacgtgagacccttgtacaaaaaaatagtgtgtccccagctaggcactaaggctacacagagagaccttgcctcaggaaacaaaacaaaacaaaaaaacccataacccctaaacatgagtcattattagtctagatttatggcttgttatttgaatggaagacactattgaacatttttttttctttgctctttgctttcggtactagctaaagccaggagtatccttggagccttaactggtgttcggtgtctgagctctgttttggaggctggcacgggtcataaaaggttctgaatccagtaactaatcctggagttgataggacacagacctcccttctgtgtctcctcactgtctaatagatgtccctgctctccagctgaaatattgagagagcagaaagggcaatttatagtctctctttctctctccctctgaactcagcccctctgtgcctgctccagtgcgtgttgtcttctggtcccttgccagtgtcttgctggctacgggtcttggcagcggctcccttgaagcaagtgagcctaagctttgggccactgaaattaggaaggagatccatggtccctgtcacttcttccaaagcgcttctcctccctctcatatcgagattccagttattagacttttacattttaaataatgagactgaccgtttagtattgcagatgtaatttttgaaagaagtatgtcttggtgcttaaagtgacgcttatgatttggggtaagagacagatggcaatgatatcatttagatctttgttttatgtgtaaacagtgccgtgctgttgatttccaaagttaataaagctgtaggaaagactagttttgaatgtatattag

SEQ ID NO: 34067 - DNA, 1203 bp, Mus musculus
ttgatttgttaattttctttggtctagaattagatttaataatctacctttttttcttatcattcctatatcccttttttttccttttcatcctttctctccccttttattccttctctccctacataagaaatccctgacgctaacctcctataccttatttcctccctaatcaagaccatttagcagtttgcaacatacttcccttttaatggtgacaaacccatcaaacaaccaaaacccatccaacctgcctttggggattgtagctagaaactgttctttcctaaaacggggttggcatagtaggtgacagacagttgggctgaaggtgtcactgctgtgtccaaattgcttattcttagaacaagcagcctcaagaccctcaaagaaggaaatattgtacaagctagcaaatgagaagttgatcagatctcctcatacttttcttctgacacctaaatttcaggacccaagtttacttagctattgaaagggggggtgcagttaaaagaagtgtgaggttaggatcttactctgtggtcacactagtgcacataaagctttaggtttgctccctagtaacaaaatcagttctctctccgcccctccccttcctctgttctctcctctctgcccatttactgaacgaaacagtacttaaaccatcttatgttctgcactacaaagatctggggctttgtctatgaaggaagattagcagttcttaccactatattgaatgttgttttgctttgcaaacccctttgagaatcaaatggaagcaataatattctctagggaaaaaaatcttctgtggattcacaagtaaatgattacctagaattttacaaagtgtttggtcttactgaaatgtatctatataaattcaaaccttcttctgggttttctgaaagctaatccctaaatttagaagacagaggcaggtagatctctgagtttgaagccagcctaatctatttacaagttccaggccagccagagctacatgtgagaccccgtctcagtaaaacaaaatgaatctcttatctaggtatggtagtagacctgaagtcactgaactccagaggctgagacaggaaacttgattttgaggttagcctggccactagcaagtagtgagtaccaggcctgttaggcctgtatagttagaccttgtctgaaaaagattaaaggcagtgt

SEQ ID NO: 34068 - DNA, 1189 bp, Mus musculus
agagtaacaaaagaataggatttgcccaactctcatgagaagagaggaaagggaagctacttgaggagtaatgcagagaaaaaagaaaaaggacagttttgccaggacaattatagagagaaaacaagctagacacagatgaagacaggagccagaaggtcaggacatactgccaaaagttagtatgaagccaaggagagcaattcaggagaagctgagagaagccagtttgaatcagtcagcttgaagagaagtttgagcaggaagagctaagttgaactagccagccagagatcagaaagatctgcaaataggtgagattattcagcagcaaaagcagcaaatctcaggctagaagcttctaggactagcctagttaatagacaggcagtaagcctccgagacaacagttgtaacaggagaaaaaagttacacacacaaacacacatatgtatatgtttatatatatcctaaggaaaacttcatgtctggtttttactggttctcaccagtcttttttatgttttttaggtatacttgaaggctcccatgattctgaatggagtgtgtgttatatggaagggctggattgatctccacagattggatggtatgggttgcctggagtttgatgaggagcgagcccaggtagggtgatttcagtctttgctgggaatatagtccctaaacttgtctttggggaactactttgactcgtctttagagtagtatgtatagggctcgtgagatgatttaacaggtaaaagtcacctgagggcctgagattgattcccaggacccacactgatctccgtacacatgctgtgtaactggtgtgcacccatacacatgtatacacccataaaataataaacaaaatgtagtgaacacccccctccctaccacctttcaaattttatttttattttatgtctattggcgttttgcctgcatgtaagtctgagggtgtcagaaatcctggaacttgggttacagacaggtgtgagtttccaggtgggtgctaggaattgaacctaggtcctctggaaggcaaccagtgctcttaactgctgagccatttctccagccctttaaaatatttttaaagagtagtagtaggattagttttgctccgatgaagcaccatgaccaaaacttgggaaggaaagggcccatctccactaccatc

SEQ ID NO: 34069 - DNA, 1170 bp, Mus musculus
gtaagggagcatttaaggttaggagtcattgtgatcacattgtgctttagctatacacacacacacggatcgcaggggcagctctgaggtgccagaacagaatggaacaggggcggtgtttgggggacttaaaataatcgagtttacagctctttgggttccaagttagaaaagtgtttatagaaatgaagattccaaaaatataagcagcaaataggtagagtgctactttagtttacagaggtaagaagggttacaaagatggttcagattcctgttagaatgaggaggcacatgtcggtaatcccagtgctggagaagttaaggcaggaggattatgtttcagaccagccaaggctataacgagaccctcactccaaaataaaagtacctctgaaattagtgcgggatggaggggattgattaatactgatattttaagaattactcttcggttggattctttccaaaaaatccccaaattcaattttttttttttacataaatcaaaataattatttcatgtaccctgacagcaggaagatgcattagcacaacaggcctttgaagaggctcgaagaagaactcgagaatttgaggatagagacaggtctcaccgggaggaaatggaggtgagagtttcacagctgctggcagtaactggttagtactttccccaaactctcaggctgtgtttttgatgtttgtgcataatgtttttaattggtttaactttgtcttttattttttaaaattgtatattcttgcttgaattgattttatgcaattgtctataaaatgtaattattctaatttaaaggttgcatttattctcatttattggtcttcacaaaaaaagtcttactatatatacaaaataaggtatatttttcttttaattcattgattgaaatatctttgttccacctcttcctacctccactttctaagtactaggatacaggtgtgagccatcacacacctacatataaaatgtgtctcttgttaatatagagcatgatcaaaacatgtaaacattgctaaaatgctgaagagatggctcagcattaaaggccaggcttataaccagtaatataaaacattacaaaaaaatccttaaaggcaagtactattttctacttctttatgaatatttaccttgatgttgaa

SEQ ID NO: 34070 - DNA, 2171 bp, Mus musculus
tggcattattttagttgtatcgaaagtatatactttcttcattttaacttaaaagctcatgtcatttagaaacaagataagaaattaaaatttgtatcagggttgcttaacattcttttatactttcagacgagttggttatacagctttcctccttagataagggttcttggtttttgtttgttttctctacatcatttcgtgtttttgtattctgcaccattttacaaatgaagatgtgtttgcagttattttttccagctataaacctagaatagagctgtctgccacagcctcctaaaacaaacgtttacagttgttaaagccacagtatcctttcaaatgctgatagtcaccctatcccctttagacaaaaattcacattagtattaaattttgtctcagaccctgtttcaaggtatatcttgtaatcatgagtttgggtagagatgctcttcacaggtgagaatgctctacagaaatgcccaaagaagccacagactggcttctgttttattcagggattttttttttaatcagtcagaaaaaggatactggaacttgttgtatgtaacagcatattaaactggaggcagtgataaatcagctacacaggtaaattgtgttaaaataatgtttaagatagctgctttcatgtgtattttgtattttgtattgcatgcttttgtagaaacaaaattgggtgatgaagatgagtcttagaaaatgttcatctgggcagaagatgcatttctcccattgattccgggcaaaacattcacagatatagatgatggtattttacaaaaggactattaatagtgccttttgagatgaatcaatgtaacgatatttttaaaacaggcttagtgtcaaattgcaattttttaaatataaaactggaaaaagtgctaagtcattggcacatgcttacaatactttccgtggtcgtattcattaaatgttactacatttctgaatttttgcaaaaatgtattttatcataaaatggcattattttagaaaattttaaaaactgacatggtcaattcagaaaagtctgaataaggtcattgcatttaaaaagcatataaagatacttgattgtggaagtgtgtctttcattgtatataggtcttataattcataaacaagtaccctgtatctcaaaataaaaatatttgttatatatttgaagtcgtgcatgataaggattgtgtttgaattattataaacaataatgtgttacagaagctgatgctgaccttgtgttactgagcactatgaatgaatttgcttggtatttggtgttgtacagctcacatgtttacactctcagtgccctgatgcctctcgggagttacctttttaaagtgatcctttcttttttaaaataacatctcggtggtacattttctctgttgcttctcgccaagagcttccagtccggcagtcagtaagatcacatggtgttaatgtggccgtccctctgtaaatagcaaatgttccttactggttctgcactgcttctgtctgtcttaatgctggcgttaagatcataaactccttttcttcggtagtgcaggctttgaaaattaagttattgatgcaatttcatatttttcataatctgtatttaaaatgacatcattgcatcattttttaaagattcatctccattaaaacttgccttaagcttccagattgctttgccgttagctttactgtatatttgtatgttttatttactttcacattaaaattctgtgtactgaaaacaaagtcatgactctttattgatatgtgatgatttctgtcttactagcttcaagtctttgatcctttataacagtttttttaaggacagcaacaacagtgccatctagtggtcatatcttctaactcctttaaatcaatgtacagtaacttcccattacatgatgtggttttcaaaaagtctgaagttgagtgtggatataggaagtaggggcaggaggatcaagagttcaaggtcattcttggcgagttcaaggccatcctgggctgttctcaataaccaaaataggctagagagatgactctgaagttaagagctttagttattgctgaaggttatagtaggaacaggagtgtgattcccagcacacagaatagtcggctcacactcacct

SEQ ID NO: 34071 - DNA, 1198 bp, Mus musculus
cactcaaggcactcacggcttctacctgacacttctggcttgtgggaaataaatggatgctaggtgccttctgtgcccctgcccagtacatctgtgtgtactgttagcatttataggcagggtcttatggtctggtgcatgtgtgtaacctaggccagcctcaaactcaaaacaatcctcatctctcagcctcctccttctgcgattacaagtatgagtctctgtgtccgaccagaaacttttatcgcttatagcaatagttagtagtctttttagacctgaaagccatgtgcttttctgttgggcttcagtgtctgagttgggccttcctcccagtgaatgttgtgaaagatcccaagctaggactttgggcaggtaacatgggcttctgccttttctgggatgctgagtagagatgtaagagtggttaggcctcccgagaaacgggtttatctttgtctgtcttctttctagttaccaccgctgtgagttcaagatcccactggccataaagaaaggtgagtcgagagtcccctcaggttaaagggacatgcagttacctgcctgtatgaagaaagtagagggggactgtagagatggctcagcggttaagagccgactgctcttctgaaggtcatgagttcaaatcccagcaaccacatggtggctcacaaccatctgtaatgagagctgatgccctcttctagggtatctgaagacagctacagtgtacttacatataataataaataagaaaaaaaagaaaggaagaaagaggagaagccagccaagtgtagtgcttgggctggcagtgtccttgctcactgtcttctccctagagccttagagccttatctcctctgggatgatcctttgttctcctgtgactggcactattggctagtggacagaggagtttcctgtctgcagattaacacccagtgtgccttacacatcctttgtgcccatggccaactagtgtagctcacaccaagattggcctccctttgcctttctacgttcttccaaacaacctgcctttgctccctgtgtactccagccatagcacaaagagtggctattctggattctgcctgtggctggacctacaggccagctcaacccagcctgcaccatcttctctttccagaaaatgcaggtggtcagactgaaatatgcacaacctacagcaaggtaa

SEQ ID NO: 34072 - DNA, 2291 bp, Mus musculus
cagtaagcagtacagcagggagcgggcacctcagagcaagtgtggccacacttgggtgtgctgatccttgaaccccatgtgcatgagaggccctgggcaccccactggtttgagagaagccttgggaaccccccgccttaatctggatgccatacttcagcaggctttcgtagttgtagagactagatatgatacgcgggtttataaaagccatgtgtcctgtgaacaacaggcaggccttgagcagaagtaagccccactgacaggaggttggtgattgaggaaatgcagggcccgggcctgtgtgaagtgcgctgtgtgtgcaccctctagcccacccagtccttccctcgtgatctgctgttctcttcttacaccaggtcatgcagaacaaccacattgcctcagtgaccctgtatggcccccccaggcctggtgcccacctgagaacagcagagctgccctaaggacatcactgttttccctgtccatggaactgtgcgtcacatccagctcagtgggtctctgtgccaccctgtgtgtttgcttggacaccttggcagtgttgaagggccctgggactcagaagggtttggaagtaggatttgggctgagtcctctgccgtgggacggaggacccagatactctgtcctaagcctgctgttgccaggagagaacacagtgtgcaaaaagaagcacaaacttagagccatgatgagggctctcataactaacatgtaataaaggacacgtcagcccctgccctgctcacatagggaagacaggactctttctctagctaagaaaatattcccaggatgagaacaggctcctgcttttggcccgacattgccacgtggcccctaaggtgagcagagcaggtagcatgtcggtagtacttggttgcaatatttgcactccatccactttagtgacttgatgagctggctgtggctggtgtggcccactgcccttccctgcttctcctgtgagtgctccttgccgtgcccaggtggcacctaagtggatgaaatcgtttcctaccaggtatgtaccaggcctggttcccactgctgctctgggagccagcctttaaggtcacctgtgtctcttggtccaacctggctgacagggctgcatgtctccatcttgtttgcctcttttatttaatgccaaagtgttagccaaagacaccttcctccttttgttacattacagcattctgttatgcactgtgggccagctccttgccctagttctgggcactggcctggcctggcctggctacttggtttgaggcctagaggctcaaggaacactaggctgcttggtttcttacatgggtcttgctaatgggaagtagcatatatgtgctttaaaatagtaatccttttgaaaagaattgagaagagaaacatataattttatcccatttttaatattttggtctagcaacttgtgatacatagatgacaattttgtgagtttttcaaatgtgtgtacagatttttgtaaataatgacttttgtaattaactcatgtacagcctcatcttgtatagttcatgatgaatgtgcaggggacctgccccagctgtctgtatggttcctgggcctacagccaggcctgtgtggcactcccatgactgatttgacaggtgtcttcccatttggaccttcgtctggccagagaccctgcacatcccactgtcagggtagccaggactcttcccatcctcgtgatcagaggagacttcctcgtcccccttccaataaagcacctatgcccacagtgacagcgtgccatgtgctgccactgggctgtttgtactaaaatgtgagctgttgatttccttgaagctggagttgaagaatatgagcaatcttatagtggaggaatcttaggactccttccgggagggggatgggtcacccttcagaagtacactggcatggttttgtgtgtgtgtgtatagtgggcaagacggtgacacatgatggccccgccccacatgctacaggcaaacctcgacctgaagggcttagttagctctaacaccagacctcaaagggaacagataagatatggccactgggaatccaatgagagaaggaaggaagctagtaactatacgaaaatgcctgccaggtccacgagggctgaggcctggctatgggtatatccacttgtgtttgtttcatcccagccctagctctctcagtgagtgatctggagaaaagtcatgtacaccataaacccacatggaaaacccctttgggttctttcatgt

SEQ ID NO: 34073 - DNA, 2235 bp, Mus musculus
acgtttgcgcgctcggtgggtctcaagtggcgcagggtggggcgctcgctgcagcgtaactgtcgggcactgagagatcctgccctcgactcgctggcctacgagtatgagcgtgatgggctatacgagcaggccttccagctgctgcgccgtttcatgcaagccgagggccgccgtgccacactgcagcgcctggtggaggcgctggaggagaacgaactcactagtctagcagaggatctgttgggccaggcggagccggatggcggcctggcctaagtctagtactgtggggaagggcggccaaccagcagttcagtgtttgaaacccacgggtggctgttggggtatttttttaccgctgatgttgctactgctgaccactttccatctactggacttggagagcatacgcacgccccacctagctgagctgctggagtgcaactaactgcccctccccccgccccccaggagccaggcaagcagcgcaggggtaaatcactgatgatcatacaaaaagaggacttgctgcaaagaccctctaagtacccggaccttctgaaacctagctcaaggtgctacaaaaactgtcgggagcaggatgcacgattttccccgcccttggcatatactcatcgtgggaccgaagcaccttgtctgcagcgataataaaatgtaactcttttacagacttgcggagatgctgaggtctagacctggttggggttagtcaccttcagtggaatagtgagccaggtagagtagggagtggagagacaggcagggttcgggtagggccttgaggaaggtgagaggaaggggttgctacctgtcctgttagtgaaggataaccgggggtttggtgaaccatcatatacattaggtttggtttttgtttttgtgtgtgtgtgatctaagtatgtgcttaaaacatctaccgtgtacctgaattagaaaattaaaatttcagccaggtggtggtgcacgcctttaatcctatttagcactggaggcagagtcaggtggatctctgtttgttacaggccagcctggtctacagagtgtgcctttaatgctatctagcattggaggcagagtcaggtggatctgtttgttacaggccagcctagtctacagagtgtgctccaagacagccaagctctcctccacccccaccccccaccccttttctgttgagatcttcacccttgtttccacggagactgacacctataagattcagactttttacataccatgcggtattcaggatgttgaggcaggaggattgcttcaatttggaagtcagcatgagctacatattgagacacccccacccccacacaaaaacaaaagcaaacagacaatctgggtttccccacttcccctgccccaggatttccaacttacattgttactaaattcaaccttcaaagtttatttgaggtggggggcttggccaatgaacttacttctgtatcacacatactcagaaaccctagttttctgattgatttttgtggcagtgcggatataaccaaggccctgaggaaaggtctaccactgagctacatcctggctcttgcttttttgtttttttgaggcaatctcactgtgtagctcaggctggctttgaactcatgactctccatccagatgcttctgactcccgagtgctgggactatagatgtgtgcaccaaatgtgctagaaagtcatctaccgacctggtggtggcggtggcggcacatctatgatcccagcacttacttggcaggtggttccctatgaggccagcctgagctaattagtgagtcccaggttagcctggctagggttctgcttcaggcccttgtacccacatgaacacacacacaattaaaaaatcttcaggggttggagagatgtttctttctttttttttttctttctttttcttctgtcttttaagacagggtttctctgtgtagctctggctgtcctggacctcactttgtagaccaggttggcctcaaactcagaaatccgcctgcctctgccccccccccgccccccccccccccgagtgctgggattaaaggcacgcacgccaccacgcccggctttttcttctgttttgttttgtttttcgagacagggtttttctgtgcagtcctggctgtcctggaactcactctgtagaccagaccggccttgaactcagaaatctgcctgcttctgcctcccaagtgct

SEQ ID NO: 34074 - DNA, 1099 bp, Mus musculus
ggcatcggttcccattacaaatggtcgtgagccatcatgtggatgctgagaattcaggacctctgaagagcagtcagtgctcttatctgctgagggaaggattcctaaggggacagtgagaaaccagttccctccatcttgtctgttctattaacctcacttctccaactccgcgaactccaaggcggctatttcccctatttgcccagtactagtgaatttacatatcgattactctgccatctccagctctaccgcacttgtgctgacaggcctggtggatagtaccccgacacacaccagtacagttccaaatcttctcctaccccttgggatgggatcacatccatgggatagaagggtaggaaagtgaactagatgtttcatgaatcacgagctacttcttagacgtccttgcttgttttatacctcggtagctgaagagttacatcgtgatgtttttgccttactttttactaaagacatttatgggctggggtggggctcagtggctgagaactaccgtacacctggctcagggttcaatcccaagtacggaagtcactggagccctgccctgtagaacttcctggtgttcttgctcttggttcctgagggctgaggttacagataggatgccatcacctcaagttctctccttttcttttttggctttttgagccaggatcttactctgtagaccaggctgccccctcaaactcagagatttgactgcctctgcctcccgaatactgggattaaaggaatatttcatttacaatccacctcctctgctttttttttttttcctttttgagacagggtttgtctgtgtagccctggctgtcctggaactcactctgtagaccaggctagcctcaaactcagaaacccaccttcctctgcctcccaagtgctgggattaaagaaggtgtgtgccaccaccgcccagcgactctttctttctttctttctttctttctttctttctttctttctttctttccttccttccttccttccttccttccttcctttctctctctctctctctctctctctctctctctctctctctctctctctttctttctttcat

SEQ ID NO: 34075 - DNA, 2288 bp, Mus musculus
gccaggcactttgattagctctgaggctcagtttgcttcctataggtctcctatgaagacgtggaacaactgcggccctacggggtgctagacaataccagagtgccccacttcatgaaggacttggaacgttaccggcagcagctggaacacatcatgaccaccaaccggctggatgaagcggagctgggccgcctgctgcctgactgatgttgactaagggttatagacagacgctcttgacagaggtcacagatcggaatatgaagttctttatggttccatagcctaggtgtttcttgggggcatttgggaggccaggagcatcgtgggcagatgagaagcaacgttagaaggtttttgtccttgctacccttcctggggcctgtgaactgcagcagcatgtcacataaactcctgagcaggggagatgggagggcgatgagatgggagctgagtgtgaatagaaatgtgggttggtttgggaatagaaacttgttcctgcatgagatggctttgggtgtctggtaccactccttcccttccccctacctggccgattggtgctccttctacactcatacctctacctctcactggggccagcaggagttgggaacccctctgaggtgatttgcctgagcatggggttccggctgtcactcaggctcagagacccagctgggctgggctttgcctttcagcattctgtctgtctcactggtcatgcattgttccatagtcgccctcatggggtcatttcatgcctccaggcggggcccggaagtagtagtagtagtagtagtagtagtagtagtagtagtagtagtagttccatgtaggggcaggatcctttggaaaagtaccgtatgttcctagaccccttccttccttccttccttccttccttctttccttccttccttccttccttccttccttccttccttccttccctctccctctctccctcttccttccttccttcctccctctctccctcttccttccttccttccttccttccttccttccttccttcctccctccctccctctccctctctctctctctcttccttccttccttccttccttccttccttccttccttcttttctttcaaagacttatttattttatgtatacgagtacactgtagctgtcttcagacacactagaagagggcatcagattccattacagatggttgtgagccgccatgtggttgctgggagtagaactcaggacctctgggaaagcagtcagtgctcttaaccactgagccatctctccagccccctagaccccctttcttatcactcacacagacacactgtgtcttgtgtcttgtgagtccagcacctggtcccaccctcagtccccatgttagtcttggttgtgcctgtctttaaccacagcctcacagctggtctctggcagtggttaggacaggcgggagcaaccacaatcaaacctacagggcaggccctagggtttgttatcccacgttcaggccaggattagtacagagctggttaaggctttcatttcacttcagattcagcggtgggagagtgagctagtactgtcctaaccctggcttttcagttaatgtttccatctgtgaagcttggaaacacagctgggaagtttgtattcatttacttagtagatatgtgcagagctccttgtgtatgtctgtgactggttagaccccacgcccctcactgagctcccagttcagaggaaagccagacaattaaacagcagttacaatgatgtgtgtggcttctgtctactcaagtttcctctcaggtcctccctgcaagactgtgagcgccaagacttctctccatgtgtggatggacatcccccttcacttgcttggtacaccaagccgagtgatttccatggattagaagtgttgcccactcggcctcccaaatggcccctgaggggaataaagtgggtgagggagggtcagatttgggggcctgcatctgagatctccagaattacagcttgggctctttgggaagtggaatgtttttgaggggatgggggtattttcacacaagcctgctcaggtcagtgggattcagacccacgctcaccctcagttcttgagcaaagagccagacttgtggagagtcaggaacagactgaccctcctgagtttattcatttggcagtaggtgtctcggtgcatcgatggggtcaagctctggcaggtttccaggtcttatccagcacaaataggattggacagctaaggattctggcctt

SEQ ID NO: 34076 - DNA, 1661 bp, Mus musculus
tcttctctttcagttctggatctccccaaagagctgtcagaaatcttcgaccccacgagaggtaggcggtgttcctccttttgattggatgcagggcataaggagcatagtttgagttctgggttcccttctaagggtatctgctgggtatcccagaaaaagggtgaggttcctaatgggcctgtgtgggggtctcattcctgggctttggtgggtggaggcgcaagagccagaatctgaatgaattgtgttcattcccagagtgcatgagctccgagctgctggaagaactgatgtcttcagaaggtgggtagcccaggaagataagggtagctgtgagcaagggggtgggtgactgctgggggtcttggcctaagacctcagcctaatgctttctgcagtgtttgcccccctcctccgactttctccacctcccggagaccacgattacatctacaacctggacgagagtgaaggtgtctgtgatctctttgatgttcctgttctcaaactctgactgacagggacatgtcctgtgcagctgcaacccagactgtctgggcctggagccaactagggactgccccccacccccaccctaaccccaagagcccaactcttggcttactcagccttttctggtcgctcagttcgggctgtgctctcctgtcttgcactggcacttgtgactgtgctagcatagctgggcagagagcttagccctctctacatggagccttccccagccaggctcagctgcccctcagtggcacctctgccttgttcctaccagtcactatgaaggaggttcagagagagggtggtgctgggtggttgcctaccatcacctttcctttcccacctgctcaccctgcagcctctggacatctcggatgctccctgagagtcctgggatctctgggcagtcatggtggagggggttaataaggaattgctgtgtctagctaggagtctgggagggttggtacctaagaatggctccagctcctgcccacccacccccatctcccttcacttccacttattcacttaccctcatttagagccattgcagagatttagaaagatttacagtaacgaatgaattcctatataaagattatttttatacttttttcaacaaaaggaaatgtaatatttgtacagcattcaagtgaataaagacatgcctaaggctatctctgatctggttctttggggcccctacctgggacgctggattgttgctgagactgggtgggtcaccttactggaatgggaggtgtggctgctgtgtaggaagcctgctgccacagcctctacctgctgcaccttggtgtggggcggggccaggcaggcctctacggggcggagcagggcagggcaggcggggtcttaccctcctacccctgagattaacccggaactaacaggctcctttgggaaggcctcggagcccgatcaggagtgggaacctgggctgtgagtgcaggctacaagtcctagaccctagaccgggtgcactctcggcgggaggtggcacattagtgccaagtgccagcggccaccgcggctggactatggcgcccccgcggaatgtggtgaagattgctgttcagatgtctgacgccatcccacagcttatccagctagaccaggtc

SEQ ID NO: 34077 - DNA, 1661 bp, Mus musculus; identical to SEQ ID NO: 34076

SEQ ID NO: 34078 - DNA, 1133 bp, Mus musculus
ataacagttagcgtggtacggtgtgttcagtgccatatcaatgaaagtgtgaaacccagacaaggacaccaagacgagaccatgcagtggcatcagggcaggcctgagagataggatgggaacacaagttactctttctagaacgggcattaaggtatggaaattccacataactggattaagttttttgtgtgggatgtggtaggagaagagtcaagaatgtggtcaagatggcaaggtggcagatgtgccaggcagcagagagagcttgggctttcttccagttactgctgtggggccgtaaagaaatggtaagacagggctggagagatggctcagcagttaagagcactaactacacttccagaggttctgagttcaattcccagcaaccacatggtggctcacaaccatctgtaatgggagccgatgccctctgtgtctgaagagaggacagtgtattcacatacataaaataataaatatttgaaaaaagaaaaggtaagacaggcaaggacagtgtgaaacagttcttagaactccatactccagaatgggttagagggtaagatggaggttggggaggcagcccagccaggagggcaacacaaacatctgtggtatttgaaagcaatagcttgtgttaatttttatttaattagttttgatttagttatagtgaagttaagggtttttttgtttttttttttgttttttttttttttgtctcattagctatttgtgttctttatccacttaactggtagggtcttagtaatttgcttgtatgaaccttttatatatgaaaaataaactctttagctgggcagtgatggtgcatgcctttagtcccagcagtcaggaagcagaggaaggcagatctctgagttcaaggccagcctggtctgcagagtaagttcctggatagccagggctgcacagaaaaaaaatcctgtcacaaacaaacaaacaaacaaacaaacaaacagaagaacaaaacaaaagatttattctctatatattggttaaaatacattcctatttgctctttcattttatttgtagatagcagtgtttacatatgaggtacaatattaagcttctgtgttcgttcatcattggttacttaaaga

SEQ ID NO: 34079 - DNA, 1103 bp, Mus musculus
catcactagatttgggcagccagccttctttgagtatgtatgggcttactccagtgggaggatggcgtaggtctgggtctcccctgctgacaactcacccagtctccctccttagctcccgaggactcagaggtctcatcccagtgcccatcagccagtggctctagtgattctgacagcagctgtgtgtcagggcagaccatgggcagaggccttgaggatttgtcctgtgtgagtgccatcttttgccttatgcccatcagtccttcccaaaactaccctgggctatagctgccttttctttaggggagttggaaatgggtgggtcagagccattccccagaggactccatgtccacccctagaaccagagaggcaaaacattgactttgcttaacttggcaccataggtttgagtccggcctgaagatgaacagcactcagtaactccaaggaataccaggcctttgaatgtgctataatcagagcaccctcatacccaataggaatatccttgttgattatcctttctgatgtctgtagccatcaaccgacagccctagggcctctccaagggcatctggctgcagagactagttacacaccttgggtcccaggacccttctgtcccctctccaactacctccccaattgtgagttaaggacatgatagggcagaggggagtatttctagactgcaggctggtagagtagtgtggagctctcggaagtcatgaaggacacaagtggattcccagcggctgttcctcaacccttgggtaacactaatctctccaaacacagggcctagcctggccctatagcccccttattcttgaattccttggcaaacccatcgccaacctcttgtttttggggcccccttggtcattttgacttgatgcttttggttagagttgtctactggtttcactggcagtgacactctgttttctcagagaagaaatctaggcatttttcttgttatttacttttttatttgtttataataaaaaataagtgatttgcaccgttgactgggcatatgcattctgggggtttccacagaaaatgagccttgggcaactggtctgtgttggtcg

SEQ ID NO: 34080 - DNA, 2064 bp, Mus musculus
cctaaacctggctacagagaggggtgggactatgtgttctcaagcagagagtgggtcagatagctgggttttctcacgcagctagaatgcaccaagctactgctccttggatgattaactgttgaaattagtagatgttcggtagaggggaagttggcatagaatgagctggcccatccctaccatgaaaggttttgagaggggagatcagctgactgggtttctaaccagtctcccagcactgcaatcctggctctaagcaagcactgtcctctctacaggcctacttggagtccttctacaagttctgtactctgttgggtgggaccacagctgatgccatgtgtcctatcctagaggtgagtgcctccccacctctctgccttttgttcccattgagccttactagggggaactctgccaactgactagcgtggtctccctcatcttccctctctcctcacctatgcactggccctgcagtttgaagcagaccgccgcgctttcatcatcaccatcaactctttcggcacagagctgtccaaggaggaccgtgccaagctcttcccgcactgtggccggctctaccctgagggcttggctcagctggcgcgggctgatgactatgaacaggtcaagaatgtagctgattactacccggtgagtgccctagctgacaagattaggtggccatgtgggcagcccagcacccagcactcatacctgtgctcttcctcttcccggccaggaatacaaactgctttttgagggtgcaggtagcaatcctggagacaagaccctggaggaccggttttttgaacatgaggtaagaacagggtcttgtagagccgaccccgtatagggaaggttgtgacttaggccacagcgcctgttcatcacacctgtgtctgtccacaggtgaagctaaacaagctggccttcctgaaccagttccattttggtgtcttttatgcctttgtgaagcttaaggaacaggaatgtcgcaacatcgtatggattgctgagtgcattgcccagcgccatcgcgccaagatcgacaactacatccccatcttttagcattctaacttaaggttcccaagtgcactgtgtgtgtgtctgtgtgctgtggtgaagcccagggctcacttgtctgacctggtgaggtgtagcattgtcctgggattgtttgcccagcttccatgaccccttctgggactactcttaggcctaaaaaggggttaggcacctctcccctgatcaagaatggaccaagattccctccagagcagagaggcccccagccctatgtttacagccactgacatgtctaagaaacttgtatgactttcatgtccctccttagcctaaggacccctgggacagtgtccataggtcatccccagaacctgtgggaagagtagagaatatgtattcttggggtattgggaaagcagctttgtagccttctccctccgctctgcccctctgagacaataaaattgccctctttaaaaaccctgctgtctgtctgctccctcctttgtgtccttatacctttcctcggctctcaactttgttcattactataccttgatgagtctctcctgcagtcagcagccacagggccagggaagtccctggaggatggctctttctgctgggagctcaggtaggaagataggctggggtgggggttgttagagaataattatatcttggctctagaagtcccacacttccctaactgcttcactaagccctgtaactccctgaaattagccattaccttcatctcagtatgaagaaactcagacctagggacaagatttgcctgaggtcagcagatacgtaccacggagtgtctggggaacatcctcagctcccctgatgagtcccaagatctcccaagaaatacccaatctctgtcatatcgccataccctgtcacccaggcaaccaggcagtcacctcctccaaacactatctctcccattctagtagaaataaaatgtatctttattttaaaatgccaacaaccaggcaggtacaacatacagcttcc

SEQ ID NO: 34081 - DNA, 1101 bp, Mus musculus
ttgggtcatgtattccagatcttgagccagccctattcttctttcttcttccttctttcttcttctttcttcttctttctttttatttcttctttcttctttcttccttcttccttcttcctttttccttcttccttcttccttcttcttccttcttccttttctttcttctttcttctctttcttctctttcttctttcttctttctcctttcttctttcttctttcttctttcttctttcttctttcttctttcttccttcttccttcttccttcttccttcttctttcttccttcttccttcttccttcttccttcttccttcttccttcttccttcttccttcttccttcttccttcttccttcttccttcttccttcttcttcttcttcttcttcttcttcttcttcttcttcttcttcttctttttggtttttcaagacagtgtttctctgtatagccctggctgtcctggaactcactctgtagaccaggctggcctcaaactcggaaatccgcctgcctctgtctcctgagtgctgggattaaaggcgtgggccaccacacctggcccgccctattcttctaactccaataaatagtagagttgtgctggtgtgtttgcattctcacctacaggtggtaacatggaggacatgctatcagcctggaggaaggatttctatggaccatgaaaagcaggatcagggaattatttggagagctaaatagggcagctcgatccatggctggagtggtggagactattgggctgagagtgttcattaggaagctttgtatggcaccctttctgatgaaaaaagatggtgtatagtacgttgtgctgatatctttctgtatactattacttcaatttaatgtttgtgtgggttccctgagagtgggagtgggcgcacaatgcatatgctggtcaggagccaagagcctggatatacagatgtactataaaatactcaaggccaagttgcaggacaagatttaaactcacatttttatggctccaaagctcagatttttctcattttgagccaggcaagattgtaggtacatacctgtaatcctagcacttatagacaat

SEQ ID NO: 34082 - DNA, 1195 bp, Mus musculus
ccatgatctgctgcataggaccctgaggcttccaggtcacatgtggcagctcattcattttctccacccactaaatttcaaactatgttccacatggccagacctggtgggaacagagagtaggaaggtcttcccgtcattgccaagacagtttgcttctcacgtctttatagtggcttccatcatgtggatctaacttttgtttcattttgttagagagagaaaatgagaatgtgtgtctctgtgtgtgtctctctgtgtgagtgtgtgtaggagtgtctatgcatgtatgttgaggtattcatggagtgcagaggagtcaggtcccccagcagctggagttatagtaacatccacatgatgtggatgctggaaacctaacttttctgtaagatcagcaatgtttttaactgtcgagccattgaatctaccttttaaattatgaaggagctgggcgtggtggtgcacacctttaatcccagcacttgggaggcagaggcaggaggatttctgagtttgaggccatcctagtctacaaagtgaattccaggacagccaaggctatacagagagaccctgtctcgaaacaaaacaacaacaacaaaccaacaaaaaaaatgaaggtccctaagcacgaaagcactgccctgccagagtccagccaggaccacagtgctgaccacatttagcctagcatctgactgctgccccacaaaggtctcactctccttgagtggctatgtaactgggggtaagcttgagctagggtgagagaagggtactgaacaggaccagtctggatagttactgctgcatgttgctgtcttcttgcctggtctaagtctgttggctctgcaagacatatatatggtgtgaatcaactctgcccctggcctgggctattctctgcaggttccatgagctatagggagtggagtttcttactgaaggtaacatgtcttcatattcttgaatgatgcttgatcctttgagcctattcataaagctgaggtcaaagcaatattgatttatttattaattataattattaattattaatattttaattaataatgattaattattaattattaattttttctgagacaaggtttctctgtgtaaccctggtgtcctggaactaacacactctgtagaccaggctggcctcaaactcacagagatctgcctgcct

SEQ ID NO: 34083 - DNA, 1237 bp, Mus musculus
ggagtctgggttatttttaaaaaattgtttaaagggaactcgttagggaggatccagtggggttccaaggggggataatggcggatatgatcaagacatattgcatatgtgtatggaattctcaaaaaagaaaaattctactaaaaaacaaaaggctgggttggccagatggctcagaggttaggagttttttgtttttatttttgtttttgccaacttgacacaaactagagttacctgagaaaagaaacctcagttaagaaaatgccttcaggggctggagagaaggctcagtggttaagagcactgactgctcttctagaggttctgagttcaaatcccagcaaccacaaggtggctcaccaccatctgtattgggatctggtgtcttcttctggctggcaggcagaacactatttacataagtcttaaaaaaaaaaaaaaccaccacagcaacaaaacaccatcaacaacaatgaaacaaaacaaaaggcttattttgcttacagttttaaggctgaagaagtcatgtggcaaaccacagtcctggcaagagtccagtggcacctctccaataggcagcagagagagagagagagagagagagagagagagagagagagagagagagagctgggtggagccaggctcttgctccttttataagaaccctttggcaagagcttacagggttttcctcagtgacccaagggctaactaggtccttttctttcttcttccttcttcttcttcctcctcttcttctttttttttttttggtttccaagatagggtttctctgtatagccctggctgtcctggaactcactttgtagaccaggcagtgaccaggctggccttgaactcagaaatctgcttgcctctgcctcccttcttgatgacaagaaatccaagccacatttaggggcacactggaaggcgaaggggactggattaaaggtgtgggccaccacaaccggctcttttattttatttttttaaagatttatttattttatgtatatgagcacactgtagctgtcttcaaccagaagagggcattggatcccattacagatggttttgagccaccatgtggttgctgggaattgaactcaggacctctggaagagcagtcagtgctcttaaccactcagccatctctcctgcccccaactaggttctccttaaaggttctaccacctctcagtactgccctttgggggttagcctttaa

SEQ ID NO: 34084 - DNA, 1249 bp, Mus musculus
ggacctgggggcccaggattaggaggccgcggcggcttccgcggaggattcggcagcggtcttaggggccgtggtcgtggcggaggccgtggccgtggtcgaggccgcggggctcgtggaggtaaagctgaagacaaggagtggatccccgtcaccaagctgggccgcctggttaaggacatgaagatcaagtccttggaggagatctacctgttctccctgcccattaaggagtctgagatcattgatttcttcctgggtgcgtccctaaaggatgaggttctgaaaatcatgccagtgcagaagcagactcgggctggccagcggaccaggttcaaggctttcgtcgctattggggactacaatggtcacgttggtcttggtgttaagtgctccaaggaggttgccactgccatccgaggggccatcatcttggccaagctttccatcgtccctgtgcggagaggctactggaggaacaagattggcaagccccacactgttccatgcaaggtgacaggccactgtggctctgtgctggtgcttctcatccctgcccccagaggcactggcattgtctctgctcctgtgcccaagaagctcctgatgatggccggtatagacgactgctacacttcagccagaggctgcactgccaccctgggcaactttgctaaggccacctttgatgccatctccaagacttacagctacctgacccccgacctctggaaagagactgtcttcaccaagtctccttatcaggaattcacagatcatcttgtgaaaacccacaccagagtctctgttcagaggacccaggctccagctgtggctaccacataagggtttttatatgagaaaaataaaagaattaagtctgctgataaaaaaaaaaaaaagaaaaaaaaaaaaaagaaaagcgtcctcctccaagggagttgcccacatgaaaaactaggtagagctttccatcaggagggcctccgtgtccctgtgcaggttgaagttaacacagacttcagaactccctgggttcaggatttccatgtgcacctacccacatattttaattgcgaatcaaaaggtcccactctttccctatcataaatatggatttacgtgtgggagggagactttcaagatgaaaactggcctcctctgatggtctgctgtgctgcactgagtcctggaactggagccacttggccttctgacatgaagggtttgtgtgtgtgtgtgtgtgtgt

SEQ ID NO: 34085 - DNA, 1148 bp, Mus musculus
gacacagctagacttggttcacaaaaccacagactccgccccttctgagttgcccagcatcacacatactacgacaagctctgcatatagtgctgtaagccttgtcaacagtgttccaagcctaacttccaccactataggttctgcccacacaaccacgccctctcccctcacctccacaggctctgttcccaatgcaacagactcaacccaggctaccccaagccctactcacagtaccccaagccctacccatactactatacgcctcacccacaccactgtaagccctacacatagctccccgagccccatacacactaccccgagccccacccataccactgtaagtcccacctgcactactccaagctccggccacagtaccactagtcccactcaagaagccaagatgtcaactcataccaccggtgctgtgggcccggtccagaccactacaagtcccatttccacaactgaaagcccctccccttctacagacgtggctataatctccagctcctctgcagaatccaccggcccaggcactgaacctctgccctgtagtcacccagcctcccctccctacactaaagcagaccccacagcttcctgcacctcttaccagagtcttgcttcctctggttcaaaacccctcacaagccctgccccggattccccagaacaaatccctaagagcccaagttcctctccctcatctagtgcccctgaaccccaacattcagaacataacctggccgcagttgctcaagccccagtccctgaggcaacgggaggagctggggacagaaggcttgaagaagctcttgggaccctaatgtctgcccttgatgactatcgtggtcagttccctgagctgcagggcctggagcaggaggtgactcggctggagagtctgctcatggtaaggaggctagactgggctgggctgaggccgcacagggacagctgccaaccagtgccagtagctctgaccctctttacaatcccagcagagacaaggcctgactcgaagccgggcttccagtcttagcatcactgtggagcatgccctggagagcttcagcttcctcaatgatgatgaagatgaagacaacgatggtcccggggacaggtgaggcagccag

SEQ ID NO: 34086 - DNA, 1200 bp, Mus musculus
ccgtcaagaccccgactctcccggaggccccggccactgggctctcattcctggaacagattttaccgattcagatttgagagtcgcacccgatccctcctccatttacgacttcctaggttccagtcccaagccctgcgtcctttacagcccacgtttcatagaccatcccgcctgcaatcctactggcgcccatctcgggcccaccagtccctttggtcctagcagaggtagcaaaaagtagaccgactataaagacccatatttctcattgctggttatggcctcgttctcccctaagtcccctgtgaacttacctcgtgtctgtgtcttcctgttgttcttccattctgggtgggagaagcttaataaaaataaaatctgatgaccagaaggtgatgtgtgctcttaggtggggcgttgattccatttttttctctcaggcacacaagcagcccagaggttgtggcagaggacagactagactcatcaaatggccagtctctaagcacagggtgttcagccctggatgctaccttggtccagcacctgtaccactgcagccgcctcctgctggtgaggggataatgtcctccccacccccagccacttaccccaaggagccctgaactccaatccaaccctcgaaacctctcagttctatactgcaatgccccagggtcctggcatttggtgcctattggatgtaatacctcctatactcttcctgctttggcctctcccaatgcatgctgggacctgtactctcctgacccccatcctccccaaccctcgccatgaagcctaaactacttggcaacccttgtcctctagaaactgggcacatttggacccctgcgctgccaggaggcctgggccctggaacggctgctgcgggaagcgcgtgtattccaggaagtgtgtgaacgcagcaagctatgggggaactctgccacatctgcccaggaaggtaaaggccgtgtgggcctgggctttgatgtacgtctggacccgcctgctccccctgcctggttcgctcggttgctgatacttcttcccgtccttcacagtggtacagttctccgcctctcggcccggcttcctgaccttttgggaccagtgtacagagggactcagccccttcatctgctctgtggagcgggtgctcctcaccttctgcagccagtacggtgcccgtct

SEQ ID NO: 34087 - DNA, 1115 bp, Mus musculus
gcccttcgcagcttggagggaaaatgagcgagctaaggaaatcagggcaactaggcggagacccgatcgcccagaagccgccagcctccgcccagggaagccccaccccaatgggaaccaggccgcctccgcgccgccggcagagcccacgcgcgacccggcgagggcgcgggagggcgcgtgcggcgtgacgccgcgcctcgcggcgcatccccgtgacgccatcgcgccggcttttgaaagttggcgcccggggccgcctcccatgctgccctgcgccaacccctcccctcacctttcctcccccgccctcgtcgccgccggccggccccccccacccgactcttcccttatcagcacccgcggccccggcagcgccgacgcaggcgcactgcaccgcgccgccgccattttgtgtccgagcctgtggagcgattaaaccgtgcgcggagctgcttctttggcggcagcggcgaccagcagcagccggtgcgggcgcgcggagccggccggggacgccaggtggccggagcggtggagcggcggcggagcgggcgccgcggggggtgtggcgcgaaggtaaagggggcccggggtggaggaggtttcgcgggccgcctctaggtgtcacgatggggccgctccggtcggcgctggctgcagcccggcgccagcgccagcgccgccgccggggggtgtttgtctccctctaccgtccctgctgcggcgcggccgccgccattgcccggcgccgccgccagggcctggccaaccccctccacgcccgcccgcccgcccgctaagcttccctcctcccaacatggtaggcctctggcggcggtggcgacagaggcctgcgcgctcggcgactccattttccttcctttgtctctaccctcgaggccggcttttggcccggctgatcttcgggccacggcccgccctctgcccctcccgcgacggataccccttaccgagtctggaccctctgaggctcggttgccgccgcttgcttcgcctaggggttctgaaccctcggccggccgcttagccaggtcccggaaccgtgtgggtgtcgggtcccgaccgacgcgcctcagactccccatcttcaa

SEQ ID NO: 34088 - DNA, 1105 bp, Mus musculus
aaataagatgacttgagtaggctgagagtaaaaaggcatttccttgcgtggattgaaatctgtatttcatcctatccctaattaatctgactcggctctctctgttgattagccaagtcaacactaaccagctattctgaaactcccccaagtttctgtgtgactacaggcactgagctcaaacccttccccagccccaaccccagccccccatacacccatgtgcacggggcccagccttcttactggtgcttcctcgctcctttcctctttctgtttcctcccccatccctgatgactacagatgctgtgcatctttcctgaatggatgggaggaacatgttgagtacagttagcagaattttgagactttatggattccttaaagtttgtttttgttcagttaaagagaactttgagtctgaactttgttcttttagtagtgtgaaacaaggtttcttccttttgtcagaacacaatggcaagacatgcagataactgtgctggtccagatggcgtagagggggaaaatggaggggagacaaagaagagcaaacgaggaagaaaaagaaagatgcgatctaaaaaagaagactcctctgacagtggtaagtgggtcattgttgatttggttagaggtgacacatcagagacccagttttcagtaaatctgtgtaaggtagtagaggcaagaaggcccctctcctttatgcttggaatctttctaaagccaggtgctactcacggagggggaagccggaagagcaaagcagagttcccatgccagactctccttagcaagtgcaaggctagccttggcatctgaaatgtcagatgagcccccgaagttagaagtgatgacataagcatgaggttgcagagctgtgtagtttgctgcagtgctccctgctgctgtagactctgcattgtcttctctttccctgctacctaccatgcccttcattatgttcatgttctctctctgaagaaactactgacagcctctactagatctgtactgttctttcttctgacttcaccgctggtttcactcataggtcttacagataacgtagcactagaacactggaggcaatctggactc

SEQ ID NO: 34089 - DNA, 1117 bp, Mus musculus
gctgtctgtatggtttgaaactcagcttttttgtttgttggttggttttgttttttaatacaagatttctctgtgtagtccttaagctctgagatccacctgtctctgactcttgaatgctagaattaaagcattaattctatcaccatgtggcattcttattcttagactcagtatacttttatatgagtactcagtattcttacactaagcagctcacatgaaatgtggaagtaggtatttttctttttgatacaggctctctcttcttagccatggctgtcctgtaactcatgttagccttgaacacacagtgatctgcctgcctctgccccccaactgctctacccccccccccccccccccccgtgcccaacctttccttaagggaatataaaacagtgttttcagaacatttaactctctgcttgctttctcttttaccactcactctgcttgacccactacctgtgctttgatttcttgagaagaaaatgctgagccggatctcgatgacaatgaggaggaggaggagcctgctgtagaaattgaacctgagccagagcctcagccccagcctccgcctccacctcagcctgtggccccggcccccccacctgccaagaagagaagggggcgacctcctggaagaaccaaccagcccaaacagaaccagcgtaagttgcctgccctggctcagtgagcatctcatgtgaggaagcagactgtgtttgtgaagatgggcactgagctttgagaacaagtgaaggtcaccacacaggcacagatgctcaggaagccctgttttgtttgtttggtttggtttggttttttggttttttggttttttaaggaagtttttttgtttttgttttgttttttgattttggttttttgtttttttactgagaaacatctgaggcagtctctaaaagcctgttacaaatgaaaaagtctagaggagaagggtactaatgtcctgcaagatgggtgtgctgttattttgggagcgattataaaacaaccaaggtcacagtcacatggcagagctgacatggttataagtagaaaagagccaggctttcagggaatgaagggctgaagcaacgaatagact

SEQ ID NO: 34090 - DNA, 2145 bp, Mus musculus
gttttgtttctgctgacttgggcatcactgctgaggctttcttgttgctgcatcccattcattgtcagcatcgggaacaatgcctgtgctcgctgggggctttaatgtacgtaccctttgttttgttcctgcccttctttgccagcaacagccatcattcaggtcgaagatcagaatacaggtgcaattgagaacattatagttgaagtcaaaaaggagccagatgccgagcctgcggagggggaagaagaggaggctcaggcagccaccacagacgcccccaacggagacctcacgcctgagatgatcctcagcatgatggaccggtgatgctggggccttgctcggcaccaggactattgggctgtgtttaaacggcccaaatcttaatttttctcttttttttctttggctttgggaacggcataattttacaccattttaccaaacatactgagaacgaaaacttcaaggatgatgttagaaaaatgtgatttaactagaacttgtttgatgttagcaaatcatggaatgttctaagtctctgagggtttactgtgaagtgttgaggacagtgttgatgcctaactagttttcttagatggaaacagagacattgagccctctctcttgatcgtaaaccactccagaacggccacgggtttcccagagttctatggtcttcccaagagaatttttaattgtaaatgcagacttgggaaggacttggacttttaacctggttttgcttttgcttttcctgactccctttgctcagagtcagttgcacaccagtaggatggcatgctacgatcagtttctgtcctgaaagctttgcctctttcttggcaaagtttctggtatggtcaagcttgtaaataaccttttttacattttaatcttttccattaattaagaggttgaaaagaagtacagtgtaagaaaacccagcattttaattatttgcaaattaaggtgccacagacacagacttagtggtatgtaaatgttgactcggatcacaatcatgtagcagagggcactgggcctgttgcctgccagtcatggacacccatgtgaaaaatcctgatttccagctcatggagccagcgtttgaaccttgaacaaataaatttcatttatgattttctcatcaacattttctttgctctgtttgtagctgaatgttacatttttttaaaaatctctgttcaagccagaagagttgattatgagtggccacagcaaccctggcaagctgggccaaaaaatttcagtaggtcagtaatttaaacttcacatctggaaaaaaaattattaataatgtgaaacaaaccaacttaaaaagtgattcttgcacatgaattgtcacatattatatgtgttttttaaagagcctcagtctgactgatttcaaacactttttttctcctgtgtattgcttttaagagagccatcagttagctatcagaatctaggttgatgcatttttgtacttagctgtactgtgtgatatttttcattattttaggatgccaacatgagacctgtaataaaatatgtaatggggttgaaggctggggaggaggatctactgctgtacagctaataaatcataacggattaacaggcattctgaagactccgtcttttgggactcctatttgtccaggtcccatgggggcctgtgcacagctgtcttctgcaacagacaggagagagatggtcctagcaggtgatgggctgtggaatgcagcccacttcaagttgtgtcccacaagggtgtgggagtagggaagtgcgtggctatgtagcccctgcttccgtgatagacctgaagtcttgctgctcttgtacagcaagtgtcaccagagatgctgatgggagagagcctgtgctcttgagatctgcttaaggaaggcttagggtccatctctgttcttagccaggcccaggggagtagagagaagcttggttcaaccttggagagataaagagcattggtaatggtaaaagggcctgagagcaagctcaggtagtaattcttgttccttagctgtgtgcatatgtaacagaaagtccctttaacagaacagctagctttcacctgcatcgtcagcatgggtattcaaattaccttaaaac

SEQ ID NO: 34091 - DNA, 1129 bp, Mus musculus
caaaatgaaaatgacagcacggacaacttaataaatgtttgttccctcattctgccttcggattggtcgagtcctttttgggacgctcgaaccatagcgtaatgacgtaagaacagagaaagccctctctgcctccgtctccgtttcctaggaaacgtagactccacgtttctcggtgtcgcgtcccccttgacgtcatggtttgggtgggagggcggggcgagtgctaccgccaggggcggggcggctcgggccagcgggccgggctgtgcacctgcgcctcggcgggctgctgtggggcactgtcccccgcccgccaggccctgcaatggccaggccgcagaggactccggcgcgcagtcccgatagcatcgtcgaggtgaagagcaaagtaagggcttctctggtctcggctctagccactgcgctagggctcctaattccctttctctcccttattagttccttggctctccatcacctctttctgtcctccatcctccgtcctattctgcttttctgtctgcctcccctcatcgcatcctccctcccactacggacttccagagtccctctgtggcctgggtatgtggagagcaagggaaagaccttggacagtgtcccttgtactggagctgaggtttaagcctaaggctgcagctgttccagcaacctttccctctcctgacagcctcagtgctgtggtgagaaaggggcttgggatgtcctgacactccgttccctttccctcccgcctccagtttgacgccgagttccgacgctttgcactaccccgcacttcggtgagaggctttcaggagttctcgcgattgctgtgtgtggtacaccagatccctggcctggacgtcctgcttggctatacggatgctcacggtgacttgctgcccctcaccaacgatgacagtttgcaccgggccctggccagcgggcccccacctctgcgcctcttggttcagaaacggggtgaggatggggtacagtgggcagctttcttgggttagggtgataggacaggtatatcagggtagatcatacccagggcccccaggctttatgttctgtagcctctgcccttggtctgacctccaagtagcaggaaaacagttga

SEQ ID NO: 34092 - DNA, 3089 bp, Mus musculus
ccaactcattaaaaaagaatcatctcttgtcacttcaatcaagtgatttgtttattttaggctccccttttgttgagcctcaggttcagctgctgcccaggaaatatgggttttggggaaggctgtttggtgggcaaggtcagactaagctgttttgcagcatcccaagaggtgtgggtctctaggccccctataggtaaacaaaagaactgcaggttcagggattcagggaagtgaggtgggccaggggcacacagcaaagcaagggaacacagggtccgtagccagcatgctgtctaccactctaccctgcctctcactgcctgccttgcccctctctcccatctcaatgcctgccttcccttgttaagatggccaaataattcattactctcagttgattgcctggaaactacctgccttcatcccaagagctgctgtgtgccaggctgccaagaggaagccattcccaagacagaggcccttaaggacagggctcttttcttcctgccagagtcttcaccatcactgcccaaccctgatgggattgatgctttctgtggagaagttggtacctcatggagactgattcttggatcactggtcccagagtggatggaacccttgacttcctgatccggatttccctacagcttaaggaaggctgctccctacagcgtggccccagcgactcttaggaaggggggactccatgggccttacatatgtcccaccagctgtttcacaggatcctcacagctggcgggacaacagcaacaacaaaacccactatcccagggctgagatgctgccaggacatgagtaggccatctgtggaggggactgtctaccaaggaagaggagggtctatacagaggacacctaggagggccaggattttacctgcttcacagggtgagtgaaaagcctaggcaacctctgcaaagattagggtcaactgtggcaaagccacaagtgagtttccagtctccaagtgcatctgggcaggggaagcttttgttctgctggtggacacagaaatcaatggcagagctcgagatgttctgtgcccaccagtcctcacaaggcccacagctggacaaaattgaattagaccatctgtcagtgaggaagtagggccttgactgagatcctccaaaattttgctttagggtctaatcctacaggctactatgttttcctggttcctgtcagggccttagtttacagctcctcaggaggtcttgtcctatgtaaaggaaatttcatcctgtccaaggctgggacacccaagctccaagctcaggttggaaatatcaggctgttaacaatggatgggccttacatttggaaatgaaaaccagaggcatttgcagagcagtggaacttagagaacctctccaccagtcctctccttttacagtgaaagaaacaggtccaggaaattaagtgatttgaccaaagccacacagcaaatagtggcagaaccaggactaactactcctgtgggttagacaagtcctgtcgtgacctaaagcaaaatggcaaatgagctttgtaaggggttaggttggcgtgagttcagcagtgcctgagcagctggcacctttcgtggtgtgacgggtagggatgggtgctgagacgtggattgcggagtggctgagagggccttggacggcttgggactgctgtgtgctgcacgggattgtatgtccacctggctcacactcagtacccatggccacctccccatttaattctgtgccttatctcactgtttcagctgagtccaagttgtttactctgttcctctccagagaggctttctgtcctagttggacagctcactttggggacataagcctttgttccacaagctgtggggagggccaaaatcaagctgctggagccagtaattagtccagtcctgctgccagaggagacctgtatgcacccccaattccactagcccatttccaggaatctggagtgaggagcagttcctggaagcaacttagcaaagagctggacctgaccctggtgtgcaaaaggaggacctggccgggttgggtttgtccagtcctgaggtagcagcatttcctagctcactttccctaggaggcacagatggcagctccttgcagagcaagggccaagttggcggatgactcagagtccctctcccccaatcccttcctctgagggtctgtggctaggtgcagactgggtgcagaacatcacaaactaaagaagtaaggactgcctggctacccagcaccttcccagtccttaagcacaaagatgaggcagaggactgttggggctgaacgttcctttggttgctcacaactcaggtatgcatgtcattcggcagctggacagcaaagccctacttcaccaccaatcacaggcatttggacctgtggccagatggtggcttctggctgtcccagtgcccacctctttgcatcggttccctccattatcaactacagctgaaactggcatcctccacagtgtgcacactggctctgcctttgtccttgcaagttgatattcggcattagcatgaaacttgtggtgtgagagggttgacagaattccaacacaaacatcctagtaaattgtacttgagatgaaaagattcctgttgtattttgacagaattatttttattaaaatacacatccatgagcaattgtgtctgttgttcagaatcttactggagttggggttgggaggccctacctcttggtacctcggggacttttgaaatgtcaactttcaactttacaagactccaaaagggacagggacttgagctgttctcgattgaaattgttctcagacatggaaaaaacaaactcaacttcagaaatgtgggctattgctgggcgtgatggcgcatgcctttgatcccagcactcgggaggcagaggcaggcgtatttctgagttcgaggccagcctggtctacagagtgagttccaggacagccagggctacacagagaaaccctgtctcaaaaacaaaaacaaaaaaaaaaaacaaaaaaaaaaaaacaaaaaacaaaacaaaaaaagaaatgtg

SEQ ID NO: 34093 - DNA, 1111 bp, Mus musculus
tttctctgcagcaagtggagaattatcctccagcacacatgactcactcccagctgaacagccacccccgtcacctggagttgcagtgtaagaaaccccagttgttgggaagagggtgccctgaagtgggcattgtgcgctttcaagtcctcatagctatacggatgattgtcaagcacagcagctccagcctgtctgccgtcctggtgcctgacccaagatgtgtagaagagcttaggtgagggggaagctcctaggccagtatctaatcataggtggcttcctggaggacatttgtcggcttgggacaggcagtggtggattcctaaggggagagactgtccagtttgagacctgagggttgtttgtttgtttgtttttgtttttgttttatttttcgagacaattatatactctgtatactcagaaatccgcctgcctctgcctcccgagtgctgagattaaaggcatttgccaccacgcccggcgagacctgaggtttaacaagcttgagcaggtgccaacataaatgttgaggcttgactagagcattggatctatattggaggatcagggtcacagggaagggccaagctgtttctggttgtagttgtcagtcaacagcctcctctttctccttctcctcctcctgtttttgttttttggtgttttgttttgttttgttttgagacagggtttctctgtgtagccttggctgtcctggaactcactctgtagaccaggctggcctcgaactcagattcacctgcccctgattcctcagtgctggaattaaaggtgttgtaaccccaccccaccccggtgacccgactcatccccgttggatttccagttcaagttaattaatttgcaacggtcacagtttcagcagagccagcaggacttgtcttcacataggggcctccccaaactgcagttcaatcacctgtctgctcctgtcctcagcctatcttcagagcccctggagtctgtgacagctaagtgcccatccaggacccaaactgcaggtcctaggcgccgccaagacccccacaaggctggactgagcccctatgtgaagttcttcagcttctgtactaagatgcccgtg

SEQ ID NO: 34094 - DNA, 1354 bp, Mus musculus
tcgagtttgcagctgctgaaggggcagccgccgctgccgccgcctcagagctagaggctgctacggctgggctggaggccgctgagtgcactctgggccctcagctggtggtggtaggggaagagggcttccctgacactggctctgaccactcgtactccttgtcctcgggtaccacggaggaggagctcctgcgcaagctgaacgagcagcgggacatcttggccctgatggaagtgaagatgaaggagatgaagggtagcatccgccatctgcgtctcaccgaggccaagctccgtgaagaacttcgagagaaggatcgtctgcttgccatggctgtcatccgtaagaagcacggcatgtgaatggttccccccagaaacctgcagaattcgtgactccttccagcccaaggaatcctcaggcaaatgttgtactccccagtattcctgttgacagtgccgaggtttaggacagcgggactccagttggtcagttggcaccttctttcgtctcctcgtgaagtaagagttggggacttcagaatctggtgacaccagcagttatgactttgtctctcactccccagtttatgttgcagattctggttatacacaggcttcagaaccactgaacttggaacttaccctggagggggtgcagatggaactcttaagggactgtgggtttgaggaaaccacttcttcaggttggccagcaatcagagacagctttgctgtgtgtagtgataagagatctcagtaacatcgtttctcctttccatgctacccggttcaggtgcagtctgtgattctgatggggactagctgatctgtgcctctgtctcttaggacctctctacccagaaggtcatttatgagagggctctgggtgacttgctgatggagatccagctcaccagggacttaggtttatctcgttatgtttgctactggttacaaattctattttctgtacaattagactgaagttttcactgtttggcaaaacaaattaaacaaaaaagtaaggtttttatttgggtttcgactttttttttttaattaaagctaagtgtccttgaaatgtggggatatagataggtattggcctatttgaaagaacaggctagcccagaaagtagagatgctttaaacaactggacccggtttctccataaagcacatagatcttcataaagtcccttgttcaggtcactccgaagagtttggaagctgcacgaaaggccttggtttgtccatcattgtttctctggattgttgtgtatgtgtacatacatcaatgtgtgtaggaagggggtgcctgccagaggttctatacagccctttctttt

SEQ ID NO: 34095 - DNA, 1103 bp, Mus musculus
gctctgtctgataccacctgtggcctctgctctgtagatttgggtctagtagcagggtagatattctgtagcagctagaaaggccttagcaaatatggcttcccatatttataccctctgggttgaagtcctaaatgtaggggcctgctctatacccaaaataagtgacatgcagatgcccacattccccaagcaaagcgagagatgctgtgctgcctgcttgggatatcagagccaggcgccattaggtggagtataaattccacactggaaggaagcagtgtgaaggagtgctctaactctcccctcaagacctgtgcagggcatttacacaccatcttcctactttccacataccccatacactcttcaaatcccaggaaatcttaactagtatggcagtttctgccctgtttcttagtctgggcacaggtcttgctcagtaccgatatagcttttcatccttgagacctctggatagtataaagctactaaaatagcaactgcaagctagaaccaagcccaggatttggggtttaggattggctaggcacacctgaacatgcccttctccctgctctcctgcattgtgaggggagagtaaagatttccacatactccacaggttgcctggttagaccagcatagtcctggacgctacacagaaggttccagtgggattgatctctagctgctgtgtattgggggaagtaggggtgggagagaggtagatgccagctgcctcttaatccaccctgtataaaatctgcaatacagcttcttccatgtacctgtgcctgaaatgtctgcaataaagaggtgtttgtaaactatggtctctttattcctaacgtgaagttaccgtgtgggacaaggggttactggggacagttggtaacaatgacagttttgggggtagaaactatctcccttgcccttgcatctcctggggctaatgacctcgaagatgtcttggtcttgcttactcctaagcgggggaacagacccttaccagttcaccttatttaaggtctgaaaagttactacctgagtggtaaagttggctttgttgtaccattatccagttcatcagaatggcctag

SEQ ID NO: 34096 - DNA, 1220 bp, Mus musculus
gagatgcagatgtagtcagattctagggcacagtagaggtttcaggcttccctgacatctcccagggttgggggagctggtgaggagaagcagactcggtaggcgctgtggtgatagtaggaggcaggcaaggacagggctcctgctgctgctgcccggggctgggtgctggctcacaatcctctgcttctcttattccagctgccaacaatggctcagcaatggtccgtgtgatcagtgtcagcacttcggagcggaccctgctcaaaggtttcacaggcagtgtggctgatcttgcttttgcacacctcaactctccacagctcgcctgcctggatgaggctggcaatctttttgtgtggcgcttggctcttgttaagggtaaaattcagtatccattcccaggccaggggactaaaacggcagagttgggtctagggccggggctgggctgctaagggttacatcatcatcatctatctattgagccttaactccctactcagagaagagattttagtccatatccggcagccagagggtacagcgctgaaccacttccgaaggatcatctggtgccctttcatccccgaggagagtgaggactgttgtgaggagagcagcccgacagtggccctgctgcatgaggatcgggtgagagcactggctctggagaaggaaggctcagagctgcctgctgaaagtgcacatggactaaatccctccctgttccctaggctgaggtgtgggacttggatatgcttcgctccagccacaacacctggcctgtggatgtcagccaaatcaagcaaggctttattgtggtgaaaggccatagcacggtaggtctgcaatgggtctcttctctgccttgcccctcatccgtgctcttcagctactccccatttccacagctgcccagggggctttaccagtatgctgctcgtggggatgttgaagacaaattggctgtcacttgtacagttcattcctaatctagctctgctctgcgagtctggttttctctgtagtgcctgccctccacagtcagcacacaggagcgtgaggccactgttggtcagctcagttcgctaccatcttcatttaggaagggctcattcttacctctggtcaggaggcaaagcaaagctttttgggttctttgcagtgcctaagtgaaggagccctctcccctgatgggactgtcctggctaccgcaa

SEQ ID NO: 34097 - DNA, 1099 bp, Mus musculus
cattgccatctctcgtgagctgtggccctactttccaactgcatctctctttcctgctacattatggccgtcactgcagatcccagtgacttgtttttgcgccccttagcccctgttacttaagcctttgtctttgcccttctcaggtatccactgctgcctctgcactgtccttggatttgcaggaagtggagccattagggctaccccaggcctccccaagtcgaacccgttctcctgatgtgatctcctcagcatccactgccctgtcccaggacattcctgaaatcgcatctgaggccctgtcccgtggctttggctcctctgttcctgagggcctcattgagccagacagcatggcctcagctgcctcagcactacacctactctctcctcggcccaggcaaggccctgagcttggctctcagctgggtctggatggaggccctggagatggggataggcatagtaccccttccctgctggaagcagccctgacccaggaagttgcaacccctgacagtcaagtctggcctacggcacctgacattactcgtgagacctgtagcacactgacagaaaggtgagaagcttagaaggggaaaattatgcttggggtgggagggacattaggattagccactcctgagccagtgtatttccttagccccaggaatggcctccaggaaaagcacaaaagtctggctttccacaggccaccttatcacttgctgcagcaacgtgacagtcaggacacaagtgctgagcaaaggtgagcgccacctgggtctatgtgctcctctgtgaaggagagccattagtagggggacagcaggtgagcaggctcttccccttccacagtgaccatgatgatgaggttgccagccttgcctctgcctcaggaggttttggcagcaaaattcctactccacggctgccttccaaggattggaagacgaagggatcccctcggacgtcacctaagctcaagagaaaaagcaagaaggatgatgggtaggaggataggaggcttctgggaccagggccaggggtggtctcctaagctgcctgatgtgacctgcaatgcttttttgcctat

SEQ ID NO: 34098 - DNA, 1862 bp, Mus musculus
ggctgagccaccagctatgacatggacacactagtgtctcatctggacactttctgccatgtcacctgggcctaataccttctctatagctagacctcatgcccagcagtatgtagggtatgtctggacccagctcctctctgtacctttagtagcccctacctcctatcacaggcctggcctgttaggatggaatggtggcaggactgagtctccactgatctctttaatttttgccactttcttggaccaagcggggctactgtgttgggtagaagggtcctatggctcaggactctttacccattccttttataacccccttccctccacagagctttgtctagctcccacatcctctgccatgccaatccttaagattatgctccagtgggaggtctggcttgtgccgtagctaactcgcctcattagtcctttagtcctttagctccagttagtctccagcaaccctctctcccccagccaagatctgtctgtcttcatggtgccaccggggacaccttctagtccccagacttgccaggacctctggctgtagagactgtggcatggcccttgacctcaggctccagcctctctatgagaggaatcctgtctgtcaccctccgtgcctttgcagagcccactgtcgcctgtctctccaccaggaggacgccatttcattccccagctgcctccttcccaacagtgaggggttaagggagctccgtgctgctacctgggggtggatgtgcctgaggaaggtcctcctcagaacctcctcatcaacctttgttctgtcctttgctgtactgccctttgctgcttccttctggagctgcctggccctcctttatagctccattgcgccacctcgtgtctggtctgggtataggtggccaggggagggggtggtgacggatgcacaaccttgcaaacccacagccctctaaacggactaggaaagaaaggcgttgctgaattgggggagagtcctgggctgctcaactcctcttctgctcagtttctccaaacctcaccctggaacttagccgtactgtgttacctgcctctgaaccctgggtgccttgggtgctgaccttgctgtaagagctggccttgccctatttgccctgtgcccgtttcttttcatagcattaactttccaggctggccccaccgagtctcaggctgggaggtagggtagggttacaggggcagctttcccaagggactgagccacaacagtccctatagctgtcgtgggctctctaccactgttaggctggaatgcaacctccctccatctgtagctgctctcagtgggtaggaaggggccaggcagagcctagcttgggccttggctagattaagagcctgtcagcaggaagagtctagctccactcagctcctctcaggaggcagccttgggcgaggcgctcttttctacatatgccacctccactgggaaactaaaccaaagagaccactctgtgccaagtcaactgtgccttctatatgctctcttcacacacccctccccctgggtaggaggcagtggagagccaaagcctcagagttcccccacctaccagttccccaggaatccctgggggtgtgaaccaatggggatttattttttctcttgcccaaagtaggtctggttgtgaggataagacagagggagtttagtgtccgggcctttgataggtccaccaggccttcatgccatggaccatggatggagactgcagttatttatttgtgtactctgtaaatgtatcttctgtatccaataaacaggctgccctccctcagggaaggctgccattttttctgaccacgctgactgtgccatggga

SEQ ID NO: 34099 - DNA, 1177 bp, Mus musculus
acaggctggcagtcagcggtgcccctcctccctagacactgtgcgctgcaccacagctgcccacctggccctgctggtgccaaagaacatagctttctaccccagcaaccacgagcgctacctggatggccatatcgacgtgtggtggatcgtgcatgatggaggcatgcttatgctgctgccctttctgctgcgccagcataaggtatgccagctggctgggtgtgggcaagggcagctgggctctcgggaagcccggcatgacccagctgctcacacgaccctcggccacaggtttggaagaagtgccggatgcgcattttcaccgtggcccagatggatgacaacagcatccagatgaagaaggatctggccatcttcctgtatcacctccgcctggaagctgaagtggaggtggtagagatggtgagctgtctttggcctgctctgtccccgaggaaccccccttgcattcccccccaccaatcatgcatcctgatactcatccccctccccccaccagcacaacagtgacatctctgcctatacctatgagcggacactgatgatggagcagcggtctcagatgctgcggcagatgaggttgaccaaaactgagcgggatcgagaggtaaatggccatcttggcttgggcttgggtaagggccacatcatgcctttgtctggtggatataacaatgaatgattcaggactaggcttggtggcccatatctataatcccagtactcagtaggcggaggcaggtggattcctttgagttcaaggctagcctagtctacagagtgagttccaggccagccaaaggacctgtctcaaaaaaacaagacaaaaccaaacaaacaaaaaggtaggcatggtggtccgtgcctataattccattgcttaggagcctgaagcaagaggccagcctgtctttaacaaagaactgcatctgtttgcctgaatcagaaaggtcttagaggcaggatagtcctattgggccaagcaggcccccattttcccagggtaccaaggatatctcctctggttgtcctcaggcccagctggtaaaggacaggcactcggctcttaggctggagagcctctactccgacgaggaggaagagtctgtggcaggggccgacaagatccagatgacgtggaccagagacaagt

SEQ ID NO: 34100 - DNA, 1192 bp, Mus musculus
ttttgtttgttttgttttgttttgagacagggtttctctgtatagccctggctgtcctggaactcactctgtagaccaggctggcctccaactcagaaatccacctgcctctgcctcccaagtgctaggattaaaaaccactgcctggctggaaaggtttttttttttgttttgttttgttttttaaagatttatttatttatttgttatatgtaagtacaccatagctgtcttcagacccaccagaagagggtatcagatctcattacgggtggttgtgagccaccatatggttgctgggatttgaacttcggacctttggaagagcagtcgggtgctcttacccactgagccatctcaccagccccctggaaaggttttttaaagcaggttactctatgctagaatataacccctttatggaatagtctcctatttataggttcttctttttcaacattgtattttgtttggttggggtttgtttgtttgcttgtttccggtcttttgtgataaatgatgtcactacgtagccctggctagcctaaaactatgtagcccaggctggctctgaacttgaagcgatcctgcttctgcctccaaagtgctgggattacaggctcgtgctgctgcagcagcctttttaaaattttatttattttttcctctccttgccactattgccatgaacagtctggaacacccttgatgttccctttaggggaatccaagaggtggagttacaacatacaagaaattgaccccattggcgattttcagtgtctatcaggatttaacagcagtgatggatcggtcttgtctccgtattcttaccactttggggcccaggactgactgccagttttctagaagtgcgtgattctaatagaaagaagcaaagactcaggcaggctcatgctgagcctcagggacaagaaaacagtcaggacagattctgcgctggtctattaaagagaaaagcaggctgcgcttttgggtggtcgcggaggtttgttacaagggagatctcactgaagagttagtcttgacctgtgtgcactctctccattatagctggtggctcgtacttcatgatttcccgctctttgggaccagaattcggaggtgctgtgggcctgtgcttctacctggggacgacatttgcagcagccatgtatatcctaggggccat

SEQ ID NO: 34101 - DNA, 1157 bp, Mus musculus
atgaagttctaaaaaaataacgcctgtagtgcccgtttctaggtgaatacgtggttttcctaaaatggtcagagtgatagttgttaggacccctcacattctgattcctgatgggtgtgtggtgtgaacagacaattgcttcataatcctttctacatggttaaggaaatgccagctcctgggagccttagctctcttgttgctatactgttgccatactgtggtcaggccatcctcttcaatggtaagaccttctgtgtgcttttccttagggaggaatgggagccgctctgctgtcagaccctgacaagatcgagaaggtgagtgactgtagggtcctccaatgtgctgtgacttagagttctctaaaatgtctctcccccttagtccagttttactgaagtctgcctagattctctatttggggtccagagaaaatgtctttaaatttatttattcttttgtgttatgggtggtttgcctgcctacgtgtttgcaccaagtatacacaatggctgaagagatcattggatacctgggagatggaattacaggcggatgtgagctacccgctgtgggtgctgggaaccgaatcccaaccctctgcgtagatcattttcttgcatatcagaatctctccagccctgacctggaaattaaaaaaaaattttttttttgatatgcagcgagatttaggaactcttcagttagccttcagggctctagagttctgtaacagtctatagatagggtcatgtcacctaagagccacagggcctgaaaactcctgaatattgctactttcccttctggaatcatctgagagcagagggcagatgactctgggtcagagcaagttccggagtctgtgtgtagatgggtagccctttcctagggggctggacgagagtggcagggtatccctgcatatggatcgtgtgggtagtgtataccacaggtcacttcccatcccttgctccccaacctttctttttgatatggggtcttgctatataattctgtctagcctggcacttgctatgtagtctagattggccttggacaatgaacaatcctcctgcctcagcctcttgagtgctgagattctagttttgtgccataatgccctttgagagcagcccaggccaggattactt

SEQ ID NO: 34102 - DNA, 1559 bp, Mus musculus
ttttgtgtgtatgcaagagagtacacagaaatataccttctataaaaaacattcattattctcagattataatttttggaaatgtagaagtaaagaaaaagaaggtcgcataattacatatttccttatgtaacatatattcatatctgcaaaaaatgaataaatgtatttttaaaaagtcaacctttgttgttgttgagctatggtttgaccaaatagtgaaagctggcttaaaactcactatgtaggcattgaactcttagtaatccttctgcctgcgtgttgttaacatttaacagacaagaatcactgtgcccagctcttttgtgaagctaatgacatgcattttgatgtccaaatgtttttcctcaggattgtttctactgtttcatctaataatttatacacttgaattttctaatttcttcttttattgacctttttggttgtgatttttttcttttctttttttttcatagatcttgaaccagatgattgtgcatccatttacatctttaatgtagatccacctccatctactttaaactcatcccttggcttaccacatcatggactgctgcagtctcactcttctgttttgtcaccatcatttcagctccaaggttacaaaaattatgaaggaactggtgatatttctgaatctaaatatagtccattaggtggtcctaaaccctttgagtgcccaagtattcaaatcacatccatttctcctaactgtcatcaaggaacagatgctcatgaagatgacctacatataaatgacccagaaagggaatatttggaaaggccttctagagatcatctctatcttccacttgagccatcctaccgggaatcttccctcagtcctagtcctgccagcagcatttcttctaggagctggttctcagatgcatcttcttgtgaatctctctcccacatttatgatgatgtggactcagagttgaatgaagctgctgcacgattcactcttggttcacctctgacttctccaggtggctctccaggaggttgccctggagaagagtcctggcatcaacagtatggatctggacactccttgtcacctaggcaatctccttgccactctcctagatctagtatcactgatgagaattggctgagccccagaccagcctcaggaccctcatcaaggcccacttctccctgtggtaaacgacggcactccagtgctgaagtatgttatgctggttccctttcaccccatcactcgcctgttccatcccctggtcactctcctagaggaagtgtaacagaagatacctggctcactgctcctgtccacactggatcaggcctcagccctgcaccgtttccatttcagtactgtgtagagactgacatccctttgaaaacaaggaagacttctgaagatcaagctgccatactaccaggaaaattagagatctgttcagatgatcaagggaacttatccccttcccgggagacatcagtagatgatggccttggatctcagtatcctttaaagaaagattcatctggtgaccaatttcttt

SEQ ID NO: 34103 - DNA, 1119 bp, Mus musculus
gttaaattaaaaaaacaaaatattaagtaaatgtatgggagccaatgcattagttagaaacattaatttctctttttcagatttttttgcatttgtactctaaaataatttcatttcaactcaatataactctgtttctaaacattttagcttttttaataagaattattaccaatgttttgatttttttaaagatttatttattatttattttatatataagtacactgtagctgtcttcagacacaccaggagagagggagtcagatgccattacagatggttgtaagccaccatgtggttgctgggatttgaactcagaaccttcggaagagcagtcagtgctcttaaccgctgagccatctctccagccccctagtgttttgatttttaaaagcctaaattaattaattccaatgtttattttatagtatggacatatcttgaatgtgtgaaatattttaaaataatattttgtttttcttaactactaaaaacagctcagcgatctgctcaagaactccctcatattgagaagtacagtatcaacagttgctctgtcaatggaggccacgaaatgattgtgactggatctaattttcttccagaatccaaaataatttttcttgaaaaaggacaaggtaaataatataaaatacaaattaactcagtataagtgattaaagaaggaaataaattaagtagatatttcagttatattaatcaccaaatagtcttcataaaattataggcatcctgtaagcaactgggttttattgaaaacttacagttactaaattcacatgtatgtgttaaattctctttaatggcatattaaaagtaattcacccagcatttctactacatgatgttcactcaggaaacctgggacatatgtccacacagaggccgagacacagatgcctatggcagcgttgttcataacagctccaaaggaaagaacaaaatccttactgactgatgagcagacaaaagcaatatgctgtgtccacagtaccctagtttcttctctcttgctttgataaaatacccagacatttaggtaacaaaaggagtttggtttatagttccaggtttcagctctgtgggaagtaaagg

SEQ ID NO: 34104 - DNA, 1104 bp, Mus musculus
aagggaggcctatgactatataacaccctgttctgctgtggaggacatttcagagcactgctaatttgaccatttcctaaggaacattttgttgtcattactgttttgttttggcagctgcagatactgctggtgttttttacttgtgttgtgctggcacagacaaattcaggtgttgggagttaagagttgtgagctgctaaactgggccagatgctatgacctacataatctgttggtactggtagtaaagactgttgactttttgggcttttagttcatttcattctttgaagggaagaaaatggctagacatagtatcacacacctttcaggaagaggctggtagatatctgaattcaaggccagcctggtctacaaagtgaaaccccgtctcaataaatttaatacaaggagctgggcatggttgtacacacctttagctctagcattcaagagtcaggaggatctctgagttcaggccagcttagagagagttctaagacatggagggatgcatagagaacctgtctcaaaataccaaaaacaaagaagaaaatggtacagtagggaactaaatatctcttttaccatctgaaaatggcagaaacatgtaaagcatcgtatataattgatgaactatgatacaaataagtgaatgaacacatacattcaaatgaagtgaaaattgaagttgcttctggatatgatggcacctgcttgtaatcccaggagggagggagagaaggggtaaagagaagagacgagggagagagagttttgaatacatatgtataggcagagagagagagagagagagagagagagagagagagagagagaggatatgaatttagttcttcactctccaccttattattttaagataagtctttcaagctaggcagacagctaacaagcctcagagatcatcctatgactcagatcagcttgcttctgcctctcaagtcagaaatagtttttttttctttttctttgactttttttttaattttatgtacattggtattgtgcctgcctgtatgtcaatgtgacatacatccaagggatgccagattccctggaactggagttacagtcagt

SEQ ID NO: 34105 - DNA, 3141 bp, Mus musculus
ccattacttttaaagtccaaactgaagttaggtggggaaaagggagttcttgagccccttgaggagtgatgcttccatcttagtgccagtctgctctgcagcaagccatcggaaggaagtgtcttaagagaagaaaagaaaacctcatacgatattcctttgaagttgctaatactcttctttttcttttttagtgaacgagattattgggagagacatgtcccagatttctgtttcccaagccacggaggtgatgagagacactcctctcccgggtccggcgtctccagatctgatgacctctcacagtgctcagtgagccttttgcccaccacggactgctcagcctgcttctctcccggaacttaaggtccagccagacttcaggatctgttgcaggagttggactcactgtgggaaaagcagcgttccctctccttaagccacaggcagattgtgtaaaacaggaacagcagcggctgtttcagctgtgggaaacgagctttgcttttatatatatatatatatatatatatatatatttaaataggatacttttatatgatgggtgctttgagtgtgaatgcagcaggctctatctcagaggtgctgctcttgcaggtgacctggttgcatagctaggattagtaatttgtactgctttctggtcatttgaagagccctttagttttgatgatatttttaaaatagaactttttgataaaaaaaaaaaaccttccagatgcagacaaaaaaaattatcctaagcccacacttacacctcagaaacttagcatgcatcctgaaatgaagcctttcatagactcatagggaataaagccaaatgtagctcttactctttataaaataaagtgttaggtaaattgagaagaccattccatcattgaagtgttgggatatgaatacattccagagcatagccttttgtaattttaggtagttatcagtttctccactagctccatgttctagctttttcctccccacaggaccttgggtaaaatggtcatttgtaaggtgaatttcaaagggagggttttagcttaggtagttattttctacctaacttttcaagtaggagcctctgcctttagtcagtagtctttgaagcaagtatcctgatagtttaaggctttgcaattttaactccttgaggccaggccagaagtgttaggagctaagtatgaatgaactgtgtaataagagaggcagagaaaatgcaggactccagttgagaaggcttaatctcctgtttacagcccacaatgattctgtcccatggtgtcctggctatatgacctaaaaaccagcctttcctccacaaggctttgagacacatccagagatgaggtggtatcagacctgtccttccacaccaaagacatggtggtgctgctgctgctgcttctgctggtgaagtctgtgtccaaggcaggggccagcagaaactccagcctgctgtctaccaaaggactgttcccagaccctgtctttacccttcccttttaaagtccctgaattttacagtctgctttcaaatgaaatattgtactttaattcattcaggaagcaaattgagtgcctataagtgagacactgtgctgcactggctgaagacttaatgctgttactctaggtagttggatcccttgatggtggggactgtctttactaaagctacatcaggcctactaagcaggagctggcctgttgcctaccacccctagtaagcagggtaggagcaacagattcaagatgagagaagtatgtgtttgtttttaacatgatgctagttagagaacagtcttatcagcaaattactctggccactcttggagctagatattttccaaattttctctgaaggtgagttttatatcaataagtatgaatagagatttactttaggggtcccatggttggtagcccacagcttcttctaaagggcattggcctctcaggtgaacttgcagagacttggccaaatttgcttcctctttcccctggggcagttgcctcatatggggtcattacaagaccccttgggggtgctgctttgctgccttcaagaataaaagcctctatgatccagagttgctatgcaccaaattttgatgccttttaaataccttgatgcctatagcattagaaatgctttcctatttaaaacaggttagattttaaaatagagctttgtattgtgtaatggttttatatattagctttgtataagctttcatgtaagagtcatattttttggctttgtagataaagacttaaatttttgtgcaaaatagtggtggtaaagcacacatcattggactatgcaagttgatttctaggagcagcactgagcagctggccattgctagcacacaccctttccctcacctgtactagagcttggcttgaggaaggaatgaaggagcagccttctgtttactagaaaaatgtttgggttcacacgtggtgctgctgccctgggtacagcccaccaacacccagggccagccagtatcaccagacctctgctggacctagtcaagaagcccagttaacatgtagagcatgggctcaagatgaaaccttgtgtttatagaacggatgtttaggtgaagaaattggttcttggttatgtttacagcacttgggattgtgttttcttgtacattttgtattttaaaaatcttttataggagtgcagtgctcctatacaaagggaagatgagccagcagtccaggctcctcctcagttacagtgctgacataataaacagtgacagatcaacagtctccttgaaatctgagtttttctccacctggggctggtgtggagccctctgggccaaaggctctgtggctttttaaaagtccgcttgaccaggaacctgagttctgcaccctttaatcagtgcaaaggacatgccatggtgtttgctggcttttggacaactggtcttccaagtgttgcaagaaaaagttggcaaagtcccctttaacctgagtttacatgtgttacctgccctctggtattctctgaggatattgcagcagcacagtcgttacaaaacataacttggggttttgtttatggtagagggctatacagccttggctaga

SEQ ID NO: 34106 - DNA, 1929 bp, Mus musculus
tgcttctggaaccttgatgtcctccgccaggcagggctgctggatggctggaccacggagcttttcttggcctctgactctttcacggtctacaagcttggcagagtttgtgaccatcattcaagtcccaggaggcatctgcctcggaggaatgctatttctcaacctttcttctgtagaatggccatgaagaaggaagaagtgagtgtggacatttgaaggagactgctgctgctgctgctgctgaattgtgacctcacgctggctctggaggctggcttgtttggcccctcaccccagtccctaacttggaccgtgcaatcctcttagctctctggtctttctactctagctcactgggccctaaccttcccttttgagggatgttagttactgagctgatgtcctgccatgaaagattccacagagatccccgggtgaccttcccacgcactggcctcaggttgcccactacactggccacaggtggctagagctgctggcttccctgtgacctcgctggtggacattctgagtgtggggtctcctggaggcagtcgggtaagcccctgcaggcaggccagttgctcgtattgtctccgtgatccctccaggctgggttctttacagtctgctcctacctctcatttagcagcatcctagttctggactggacagcagaggacctctcaattcttgggggccatgtcctaagattcctgatgtcccagcttgtgacggaggtcccggtactgaagctggctctgttggttctgggacctgtagtttaaggggaggggatggggcttctttgaaggttcctagaaagaaagtgagctcaagggaacagccacggttgcttagagcttcccatgagtcaccttcttgagaactctaccatcatggtgcaccccgctgtggggtatttctactatccacttgggctggcacagggttgagaggtggtagagttcctgcccaacactaccaccaggcagctgaatgggttttggtttgcaggaaaacagtccagagctttgaaaaggctcctaagagagctaggaacttagagtcccagcttgggggtggggggggattgtttgtttgccccagggatgccacatggtctctgtgtgacagcagggatggggaatctgggactgccttagggacagtgtacctgactatgggcttgggtacagcttttaagttggggtctcaaaaccacttagaagctggaccacactgccttcccatatcgtttctgatgctggacttcccttgttaagcacattcctatcatctgtccctcacctgagtgttgggacccccccacttggggccctgagcaaactgtacctcgattttggcaataaaagtattctggatgttgtaaggtgccttgtcctgctctgagcacgagaggagggaaccatggtgtctgaaggtgctgtagaggtgggcgcttggtctgtaactttactggggcctcagcattacccctccgccttcgctttacccttttgtcctcttctctggaatcgatagaattgatttctccactgggaccaagaaacagacccagaagccaggcatggtggtgcacgcctttaatcccagcactcgggaggcagaggcaggtggatttctgagttcgaggccagcctgatctacaaaatgagttccaggacagccagagctatacagagaaaccctgtcttgaaaaccctgcccgcccccccccccaaaaaaaagaaacagacccaaaattgtgtctcttggagttgggctcctgtcttcatcctgcttctccccagtcagcagtgtaatgcctagcttctccagtgcttgtctgtatgcaccaggccttttgccctctacactttgaatttaaagttcattttaggaggtcaccttttccagattcag

SEQ ID NO: 34107 - DNA, 1101 bp, Mus musculus
tcattttcctctgccccaagacaagggcttcttacgtaacaagttagtatgtagtataagttagtcttgagcatagaccctcttgcctcagcttccctgaaggccttttttttttctttttttaaatcctgtgttgatacatgagggtgaaaagacaggtgggtaaattatctattttttagtttaagcaggtcttagcttgtcttagaaagctcgtttctgaaaccctatctactaggattctttcatataagaagacaagtagttacccctctctcaagagtgagtatggatccattttgctcatctccctttcaaaagctccaggccactgtgatggttccggaggcagttcccccatgtgtatgccaggtagctgggcttcaggcctaacgaactctaagtcaacagtgtaactcccattgtggttggtatgttgagggcctccctgtcagccatcagaaaggaaacagaatcctaccttgttaagcacagtgcttgcaacaagcgggagcactaactataggcagagccggagatgttgccttgaaggttactgagccactgaaaaccagagctaatctggtaaagctatttcagctctgacagactgctggatgtggcgtctcctggtgtggctggaaggaatgatcctcgttcctcttccccacctctctgtccctccacagtgcaccatgacacttatctacctcgtggtgaaggacgtcttcctgctcatcaactacttcagcttcagctactggttcttcgtgggcttgtctgttgttggacagctctaccttcgctggaaagagcctgactggcctcgacctctcaaggtcagcaccccctcctctccctcctcctcctcctctttcttcttcttccttggaactaaccatgtggccaaggagagcttaacacgcacatttcatgcatacatactagcaggagggaggggtcctcttctcttttaaagatttatttatttttatgtgtattggtgttctgcctgcatgtctgtgcaaggatggcagatgagctgctgtgggtggtgggaattgaacttgagtcctctggaagagccatctctccagcccc

SEQ ID NO: 34108 - DNA, 2122 bp, Mus musculus
gcatcacagatattctttcagccttctgctattgagatcgtaactgcagcgagtgtgtttgctaagtcctgtgcttcttatcttcatacagctactgtcaccagagtcacccagaagctttgcttttgcgtcttgactgagctagatgtaactgaagagaaaaatgttgagaggaaaactgactagaagccagagatgacattccctgaagcccaaaaggctgtggtcgcagccaccaaagaccagttccctaaaccttctgaattaaaggagcctcttggcccacattctgtaagggggctcagggccaatgctctctcattggtaagctatgggaagataccaattaggccagcctgaagatggggacttcagtgggaggggaggttgggcagggcattgatttagttttacttctgatgagtagatgcagccctgaaggaatattagactgacagctctggctcttgattcacagctctttgtagtttaaaccaggagtctacagtggggctccttcatgggaagttttcctctgaccctctgaccaagtccagctacttgatttttagaggtctgaaatgctaccatttcttcctatggctcaaaattcttccttgaggagagcgttgtgttcccctttttgtttgttgggtggcatgaacagcaaggtgctgtgtaactgacatgggatcaatgtgtgcctccttcctgaattccacaagaggaacaacactccctccctccccggaacttcaggctcaagcagacagtgagcttaatgggaagcagactgttgaggatctaggcatgaaagtcctctaactcgtggatccgaatgttgctgtgtctttgggatcttattgtgtatagagtgtccctctccttgaggaggggctgcctgtctgactttgcttaggtcacattagcagtatggtcaggattctcaggcaaggaggtgagcttctggcttttcaaggaattcgactgggccacttgattgtgcccttcctagctgaatccatggtgctgtggagcccttgaaacaagggctgagagaaaaacctcactactccagctgagtggagcgtctctactacctggacaagccacaactgtcaccaaatttcaactcctgtatgtcattatttattgatatttaatccaggataccagttgtaacaaaccattagtgatcatttctctataggatgcaataagtgaattgtgtttttatcttagctggcctggttgcacacatctgtaatctgaacttggtatggtgaggcataaggagtttgaatttgaggctaatttaggctacataatttccaggtagccactctggaaagatcagacaagatcttgtctcacaatatacctgttatactttaatatacagataagtcacatgttattatcatctggctcagatccagcaaggacagatgagcaacttcatgagtcataatactgctattttgaaggacaatcctttgttttattaagactgtagatctttgttctacttgacataaaataaatctttggatttttggtatgaactgcaagaggcctggaatgttctacataaggtgttatgcaaaattcaggtagataacctgatttatcagttgtcactggactcctggattcaagtcaaatagtttgttatctttaagagcctgtgcaagattggctatgtatggactcacaaaagcccactctgctggaagtggtcactaattttctgaaagcaccaagctttgtttacatgcttgggtcatgggacagtatacccgcttgccttctcttgtccaagggctgggcaggtgagattgaagtctcagaaaatgcttggtacttgtgcatctgtcttctccctatgaagatcgatgaagactgtgggagaaaacagcttccaccccagcctcgctcctggtaaacggtagaaactaattctggtgatcggactaggctgccagttaaagccaaagcaataggcgtgaatctctgtgagcagtgtgtctacacaagattgtagaactcttttgatgcccttagacattgccaccttggacacagaagaacctgctatgctgtcttggcatccttcaaggac

SEQ ID NO: 34109 - DNA, 1107 bp, Mus musculus
aagtgtccgtgcattacactagcacttggaagattaagacaagattgcaacttacatttaactccctcccccacaaatgctggttgtggtggctcatgcctttaattccagcactagggaggcagaggtaggtggatcccttctgaggcagcctcatctacacagagactgtatcatcccctccccaaacaaaaaccgttgaagtttctcagttgccctaatcatatttcaagtgctcagaagccacacaggtgtaccgtggatacacagaacatgctgtgggaagttttattggacaatactacatctagggctaaggcagctgagatgctgagttctggtgacagtgtcctattgatgacagttggccttccatgtacgggccctgcatttactaatctacattttggggcaatgtgcctattctaaatatggaaagatttactctcattctccaaagagttgtggtataataatttagtgtttacattagatttttataatctgaagaggcatagactttgtagacataccgtgtcatcttatgtaagggacttggacacatggtggtttttggcagccctagaaccatataacaagggtgatgtatgtaatgccttgggtgagtgctataaacagttgacatggcccataatgtttaaagttaattttgaaacatgtagttcaccaacctctcctttttctatgaggaaaacacctaaaataatcagatctaaaaaagaactgcttgcttctgtgtaaaaagttaagtttttattaaagatcatcacattcatacatactgttccttggtaccactgccaaaggtgatagcagtctttataaccattatcagagtctaaagggggcgggggggggggggggggaaagacatgaccgccctgaggcgggggagtcactgttgtccttgcagagatcatctccatcactgggagcgggctctccctcctcccaccagcttctttagccctgagcatataagtaaaatgacagaaaaaccaccagggatggaggttttacatcattttattttccagagtgtaagatcactttttaaaaatagaatgcccaggctgtttagtctaa

SEQ ID NO: 34110 - DNA, 1684 bp, Mus musculus
cagagcagtgagctctagacagatcttgaaacaatacgggaaggagaggatttttaaaaaaaagaaaaaaggtggggctcagcagttaggaacactgactgcttttccagaggtcctgagttcaattcctagcaaccacatggtggctcacaaccatctgtaatgggatccaatgccctcctctggtgtgtctgaagacagtgacagtgtatagtgtacttacctaaaagaaatttaaaaaaaaaaaaaaaaaaaaaagcctctaacccctgatcatttggctgctaagcctgataacccaagtttgattctcctaatacccacataacgggagaactgactctaagttctttatcgtaaattttctttatgagcaagtattttataatggaaaatacaatcttttatctccctgaaggctctgatgaatacaacagcctcagcgaggaggaaagaagctgcgagcgactgatgtggagcaaataccctttggatgtacaaaaggagtttgactatgacagcccccatggtctggattcagattgatggtttgctggtatttgtgagattcttccatgggcctttaaggctctgactacagagtcatcatcttaggattcctaactgaacatgtggaaagaaaagcctttaccccagcacagtgaggacttccttgtaagtgataagtgacgccaaacacgctgggtcatgtctgtaattccagcattggagagtttgggagccaagaagagcactgagaatacaaggccagcctttagactaaacagcctgggcattctatttttaaaaagtgatcttacactctggaaaataaaatgatgtaaaacctccatccctggtggtttttctgtcattttacttatatgctcagggctaaagaagctggtgggaggagggagagcccgctcccagtgatggagatgatctctgcaaggacaacagtgactcccccgcctcagggcggtcatgtctttcccccccccccccccccgccccctttagactctgataatggttataaagactgctatcacctttggcagtggtaccaaggaacagtatgtatgaatgtgatgatctttaataaaaacttaactttttacacagaagcaagcagttcttttttagatctgattattttaggtgttttcctcatagaaaaaggagaggttggtgaactacatgtttcaaaattaactttaaacattatgggccatgtcaactgtttatagcactcacccaaggcattacatacatcacccttgttatatggttctagggctgccaaaaaccaccatgtgtccaagtcccttacataagatgacacggtatgtctacaaagtctatgcctcttcagattataaaaatctaatgtaaacactaaattattataccacaactctttggagaatgagagtaaatctttccatatttagaataggcacattgccccaaaatgtagattagtaaatgcagggcccgtacatggaaggccaactgtcatcaataggacactgtcaccagaactcagcatctcagctgccttagccctagatgtagtattgtccaataaaacttcccacagcatgttctgtgtatccacggtacacctgtgtggcttctgagcacttgaaatatgattagggcaactgagaaacttcaa

SEQ ID NO: 34111 - DNA, 1194 bp, Mus musculus
aataaactgtttctgtgttctttaaagaaaccaaaattccagacttgtcactacaaagggaacttgcggcaagtgttcttcctctgagctagattcctaatgtggtattttccttttcttaatcttcacaaatactatgaattagatacttttatcgccattttgttttttttttcagaaagtttttattagcaagcattggctattcaaagtaatagtttttattagattttgtatgtctatactcactcctgttgaacctttaaaaaaaaaagccttatttattttatgtatgtaagtacactgtagctgtacagatggagctcactctgtagaccaggctggcctcaaagtcagaaatccgcctgcctctgcctcctgagtgctgggattaaaggcggctgtctctaccttttctaatgggaaaaccagagccttcatgtggttgttgggaattgaattttaggacttctgatcactcaaccctgctcactccattcagcccacttgcttcggtcagcccagctccggcccaaagatttatttattattatacataagtacactgtagctgtcttcagatgggccagaagagggcatcagatctcattacaggtaattgtgagccaccatgtggttgctgggatttgaacttaggaccttcaagaagagcagtcagtgctcttacccactgagccatttcgcttgcccccctgttgaaactttcttaatgaaccctgattctttttcttttattgctatgctctttgagtgtgtgtgttcccattaatttacttgaggttgcttatagaagtatgggtgaggaggctttagctgtgttacctggcatttatttctatgcctgtatttggttttttttttttgttgttgttatgcctgattttttttttttcttgagactatgtagaccaggctggcgttgaactcaacagagatctgcctgctgcctaaagtactgagattaaaagcttgcaccaggggggctggtgagatggctcagcaggtaagagcacccgattgttcttccaaaggtcctgagttcaaatcccagcaaccacatggtggctcacaaccatccgtaatgagatctgactccctcttctggtgtgtctgaagacagctacagtgtacttacatataataaataaataaatcttaaaaaaaaaaaaaaaa

SEQ ID NO: 34112 - DNA, 1142 bp, Mus musculus
ctcggtaaaggtgaggttgagagaagttgctgcatcccagtgagagaggagatggagatggagatggagcgtaagaggatcagccgaggagactgaggagagccaacaggaaagttaggatggaaagaaaagagaagctcagggaagggaggaacgcaggaaagggtcgggctgctcagaagccctgaatgctgatgcccatcagcaacagcagtgggcaggtgtgacgtgggggagctcctttggggagtggactggagagatggatggttctacacatttacacagtgggcagcgcaactcgctccatccgcactctgggcattctcatacacgtatgattaaaaagaaactattttgccaggcaatggtgacacatgcctttaattccagcagttggaaggcagaggcaggaggatttctgagttcagggccaggctggtctacagagtgagttccaggacagccagggctacacagagaaaccctgtctcggaaaaaaaaaaagagagagaaaaaagaaaaaaatctaaaatattttttgagatttcatctattattggcttttttttttttttgagacagaagaaggtgtcagaacctccggctagtagagttagacagttgtgagccacagtgttggtgctcagaatcaaaccctgatcctctggaagtgcagccaatcctcttaactgctgagccatctctagcacctaaaatcttttttaaaaagtaggtagggcagatgggggcacagctcagttggtaaaggggttataggtccttagttcggtttttagaatgccctgcattttgttttgttttgttttgtttttttgagatggagtctctttagcactggctgtcacgagatacacaatgttgaccagactggccttgacctgagggagccactttgttcagcttacccagtcctggattaaaggcttgtgacaccacatcctgcatgacccacattccttaaatgtattgatatgtgtgtagatgtgtatgtatgtatgtatgtgcctgatgtccaccaaggccagaagaggtcatcagatttcccggaaccagaattacagatgcttgtaaaccaccatttgtgtgctgggaatcaaacccaggtcctgtgcaagagc

SEQ ID NO: 34113 - DNA, 1196 bp, Mus musculus
tgtgacattcagctgaaccaggtgtcgcctgctgacttcactgtcctcagtgatgtgctgccaatgttcaggtactgcagaccctccctgggtggctgttctttgagacatttgatcggatgtcttcttttatggaacagaaacctagctgagtcctttccacatcagtaccattgttgggcaggtctctgtggaagcttaacagaggagtgtgtgtgagttaaattatgcttaagttcccaaatattcttccacagcgtggacttcagcaagcaagtcagcagctcggcagcgtgccatagcaggcagtttgtacctttggcgtctggccaagcacaggtggttctgtcctggtgggacattgaaatggaccctgagggcaagatcaagtgcaccatggcacccttttgggcacagacagatccgcaggagcttcaggtaagaggcaggagctgagcacattccatgtaagtcagggaacttttgtttctttttacccctagatcactgtatcagtcaaaggcaaagaagaaattgtcttttgggaagacagacatgcacacatgcaaggactagggaccgggaatgtactcagtgatcgagcactttcatagcatgcgcgattccctgcgctacatagtgagcacagctgactatgtagcagtgatgaaaaacggtggcctgctctccaagatgagtctgaacatactgagatatttgcatctctcaattactacaaagaaaaatgataagaaataaaatcagcacagcctgccagtgtgtcgtaaggtcgacctctcctctctggatggctgacaccagtggccgcagtgagcaacaaagtcttagtgaattagttccttcattctccttgtcctggcatagttgcacacctcctcaccttctgctgtggtccagggggctcagtcaactgggagtggagaactacaacctcactgcctctgattcagaatccaccttctccagctcagggtaaatgagccgaggaatatgaactagaaaatggaaatactagtcaacatgtaaattttcacctttaaactgctatgcaataaaacaacataaatgaactcaaatgaaatactatattttacctattagtaaataaaaatcagaaagtttggtgacacagtccaacttggatggaagtgacagatgttagggccctgggtact

SEQ ID NO: 34114 - DNA, 1099 bp, Mus musculus
gatagttggctctgggctgctgggttggaagcattgctgtcacagcttggtgaaagctggctctctgctcctcatttcagtggcgggaccactggatgcagtgtgtgtacttcctgccgcaggaggagcctgttgtgcagggctcaccccggtgcctggtagcccaccatgatgactactgtgtgtggtacagccttcagagaaccaggtatgcctgcttgttgttggggtggaggactagctctcagagactgcattgatgtaaactgtctatggacagaccttgcagagatttgaatgggcagatttatagcagaacaaaatgaaataagtaagggccggtaagatggtcctgtgggtgaaggggcttgtagccaaatctgaatccccagaatccatagtgccggaggagaagctgttccaaaagttgtcctctgacttctacagttgtgttacggtactccccagccccacacacaaaataaaaaatatttacaaagcaaaagtctgtggcagggtatatcagtgtgtttgtgtttgtgtagaaactgctatagattgataagatctattcaaaacaaatctagaaaaataaagactcacagggctctgtaacctgtactgtgctggtgtccagactcacctagggtctcggagagacctgtgcatgtatctcccagggtctaggctgagttctggtgttattccctgtgctgtgtcctcgtgatctctggtttccagtttggaatttttttttttaagatttatttatttattttatgtgtatgagtatattgtagctgtcttcagatgcattggaagagggcatcagatcccattatagatggttgtgagtcaccacgttgttgggaatgatggttgctgggaattgaacttaggacctctggaagagcagtcagtgctcttaactgctgagccatctctccagcccctccagtgtggagtatttatcacttatgtttggcttttcatctccctgctcagccctgatgagaacgacagcgcctaccaagtgcgacctgtgtgtgactgtcaggctcacttgctctggaaccggcctcggtttggagaaatcaat

SEQ ID NO: 34115 - DNA, 1291 bp, Mus musculus
gccctcggtcagtcagctatgttgtggagtttcaccccctcactggagacatcaccatggagtttaggcttgcagacaccttgagctgatctcttattgagaaataaaatggccagcaggctgcagactctgaatggcttgtggctcaatggggaagcaaggccgaggaacttacctccttgtgtgcacctacttgacatctgcacagcatcaggtgtggcaggcagcataggctggcgagtgactgaagagttgtgaattagcagggagaacagtttgtgacactgaggatctagaaagccctgaggcagtactgcttcctgttctgcctggagaactgaggggcagctttcattaggaccaatgcaggactgccagcttagctggacctacctggcctatctgctttcaaggaagttccaggtctcccagggaaaatggcctcccagggagttccctggggcgtcgtgaccctgttagggtctggtttgagaggactatgataccccaagcagctttaccaagccacattcgtaaacatttgggtcttgtgtcctcagtgcacactagcaggtggattgctaagccctgagacccaaatgccaggctgtggttcacaaggccgtcatccagcagttcctgtgggacagcactgggaagaaaactaggagagtagccgcctcctgtctctctgtctgtctgatggacggacggcccctgctctgatggcctaatcttgctgaagcagaaagtgcagattcccagtcggccacagccttgtcccacctctgcccacccatgcatgcacttgctaatgaccactcagttctgaaacaatccgggagggaccgagtagtagaaccaaggtggcagacctgggctgtgcgctcagtcatttcccaaagtccctaggctgggatcagctctggaagtcagcaggctctccccagtttgtcctgaaaataaggctagaacaagacgccgagcttgagcctcctcacgggtttattttctcctcagtctccgtcttcctttcagcaccataaagggaaaatccacctcttttcgactttttttttaaatcaggcatagagattgttttttcttctagggaagaattgtctggatatatacttgataatgttttaccaaaaccttgggtgtcttaccatataaaacccctagtgtcccataggatacaatacagaaaaaaaatacagaaattaaaaaagtttcttctttgtcttttaaaacagtatttctaaatctgagcaagttaatacaatagtta

SEQ ID NO: 34116 - DNA, 1192 bp, Mus musculus
ataaatctttaaaaaacaaaaacaaaagaattttaaaaataattacgtttatgtgtctaggaagaaaaatgtcgatgtggagatgtggagatgtggaggtgggggtgggtatagaggctcggcaggtgtactgatttgtcaaaacccaggtcgctggcaagggtctccatccaatcaatgctgaccgctgctctctgcttccctagaacctgaaggctgccaacactgaccctactgccccgccctacgactccctgctggtttttgactacgagggcagcggctctgatgccgcctccctgagctccctcaccacctccgcctccgaccaggatcaggactacaactaccttaacgagtggggaagtcgattcaagaaactggcggacatgtatggtggcggtgaggatgactaggctgtccctgccaagctgtccaggcaagaactacagacgggtcacagcagcatctcaagggagcctggctcccgctccagccaggactctgaagtttgcccagaagtggcctgcgtggcacgctgcatctgaccagaaggctggactgtgagcctttccgatggaaggatgtgactctgacgacaacactgatccccacctcagccatggctgagcccctctcagagcgggaatgtctaaaggtctcccgcctgccacacagcactcagctctgccctctcagggcttgaacttgctccgatgccctcggtgactttccccacttggaatggctccctctctttagaaagaggcccctaactaaggccctgtttttctttaatgcagttttcaaaaagaggctggggtgggtggggcagggtgcggacatcagtgtcccctcaggccctccagaagagaagcctacagggcactggccctggtacatttctctgacatttcttgaggcctcacattggggaggggtcactgccttttttttttttttaatactgagtatatctaagttgtctcgtatttttttattttccctgttatgtgctgtagatggagagtgatgacaatcgtgtaaatgtactagaatttttttattaaaatgaacttttttttttcccagaggtgctaggggagtggatttaaaaagactttttaacctagttctcagaagtgtttggcttggtgggttttagattttttacaagatttgcagacgccct

SEQ ID NO: 34117 - DNA, 1478 bp, Mus musculus
aaaactgaaaactggctaggcctgatggcacatgcctttaattcgagcagaggcaagcagatctctgagagtttaataagccatcctggtcttgaactctagcaagttccagggcagccagggttagttagtgataccctgtcttaaaacaaaacaaaacaagatcccaacaaaacacacacacacaaaagataaataaatgtaattaattaaaaccccaaagaaccttttccgggctggtgagatggctcagtgggtaagagcacccgactgctcttccgaaggtccacagttcaaatcccagcaaccacatggtggctcacagccatctgtaacaagatctgacgccctcttctggagtgtctgaagacagctacagtgtacttacatataatcaataaatagatctttaaaaaaaaaaaaaaagcccaaagaaccttttcctcagctgccgccaaggtgctcggtccttccgaggaagctaaggccgcgttggggtgaggccctcacttcatccggcgactagcaccgtgccggcagtctacagcatggcttctgtctccgagctcgcttgcatctactccgccctcatcctgcacggcgacgaggtgacggtcacggaggataagatcaatgccctcattaaagcagctggtgtcagcgtcgaacctttctggcctggcttgtttgccaaggctctggccaatgtcaacattgggagcctcatctgcaatgtaggggctggtgggcccgctccagcagctggagctgcgcctgctggtggtgctgctctgtccactgccgctgccccagctgaggagaagaaagtggaggcaaagaaggaagagtccgaggagtctgaagatgacatgggcttcggtctttttgactaaactgcttttgttaagttggccaataaagagctgaacctgtaaaaaaaaaacaaaaaaaacaaaaaaaaaaaaaaaacaaagaacaagccaggcgtggtggtgcacacctttaatcacagcacagcactcaggaggcagagacaggcagatttctgatttcgaggccaacctggtctacaaagtgagttccaggacacccagagctacacagagaaaccctgtctctaaaaaaaaaaaaacaaaaaacaaaaaaaaaaccaaaacaaacaaaaaaacccaaaacaaaccaagacaaaaaaaaaaaaaaacccaaagaacagaacactcacataataaataactgtaataaataatctaaataaaagcaataacaaactataaacatgaacacagaacaagattcaagggtgcccttctccagtctgaaggtggcacctccatcacccaggactctcctctcattctctgctagtgtctgagaagtcatggaatccttccaagcagccctgaatccatttctgttcttgccccttgcaatagtttgtatatgcttgggccagggagtgacactatgagaaggtgtgt

SEQ ID NO: 34118 - DNA, 1221 bp, Mus musculus
tcggagaaatagctcagtcagtaaaggccaatggcggcaatgcaatcccaagaccctcttggtggaagaagagaattgactcttgaaggctgtcgtcttatctccacaatcggtctgtggcacgtgcgtttgcgagcacaggatcgcgctctcgcccgcgcacgcacccctccccccatgttaaaatgtcatttaaaatccctaagcaaacaaactcatccaaccaaagaaaataaaaacataagaaacaaaacggaaacctagatgatgaataaagtcctttgtaactccatgtctccgtgggtcagagcacagctaggctaggattcgaacgaccgtggaataggaagctgggaagtcttctaaggccggccccatgccaccaactacagacaggggtggaggaagttgagggccctgcagttccttggctgccacctgcaggtgcgtccccagccaatcagcggcgccgggggcggtgcctgcgggctcacctggcggccgcagcctctgcgctgctcactggtgtgggagccgcggcgcactactgagttcccaagaacttctgctagactcctgcccggcctaacccggccctgcccgaccgcacccgagctcagtgtttgctcggcgtctgccgggtccgccatgggagcccggtgccgcagcttttccgcgctcctgctcctgctgcaggtatgtggagggtcctgactcgtgccccatgatccgcttcgctgtgtttttctgccggctgtggtcccgcttcccttcttccaagaaagttgggatccggagggccagatcgccctgggcgctgcgcggtgcggggctgagtgcggtggagtgggagggaggtccaggcgggcgcggagtggtcgcctctggcgcaggttcccaggtgggggcgcgccacgctgccggctcccgggtccccgggttgagcagggtccctgtttgagacagaggaggcgtggagcaggatgggggcctgcctgtagaaggtggggtgctgaagtagcgcggacgatccgagataagggaagggattttagtattataaaagcacctgtcctgttagggagggaccgtagattggggtacccgagaggagtctgcgggtgtgcgttgagaccgttcgcggtcgaaggaaagtggtgtccggaagagtcaaggcgtctccagtgagatgcaaatggagctaggagaggaaggtggact

SEQ ID NO: 34119 - DNA, 1173 bp, Mus musculus
ccagctgactctgacattccttgctggtgagttcctgctcatttcagttctagccctggagcagcagtcagtattaaagcaaacacttattctgtgtgtcacagtgccaaggggaactatcactattctgatagtatgttaacttacttgtgggttttgtttattactgtttgtttccgagacagaaatctgccttccaagtgctgggtgcaatcttaccagagccttaccccatagcttctaggtatgcactatatagttcattgtcttgaaacctgatgtagcttcctcaaaagtcactatggaaatggactgacacaagccaccggccagtgggagaatggggtttgaagcttagcgactgtaagttcatcatgtaatgtaggagggggaagtgtggtgttagtaatacctatagtcttagttcttgtggagttgaggcaggaaaatcccttgagcctaagtgaagatgaggtaacatagcaggaccctgtgtctgtgtgtgtgtgtgtgtgtgtgtgtgtgtgtgtgtgtgtgtgtgtgtgtgactgactgagatagtctcaatatatgtagccttgtctgccctggaactcttctcatggccttgaactcctagagatctttttgcctctgtttctgcttctgccttccatgtgctgggactaaaggcatatgccaccatgccaggtcccaggtccctgtctcttttaaaaaataaagcagaaagaaacaccatacttggggctggagagatggctcagcggttaagagcactgactgttcttatgaaggtcctgagttcaaatcccaacaaccacatgatggcttacaaccatctgtaacgaaatctgatgctctcttctggagtgtctgaagacacactacagtgtacttacatataataaataaataaataaataaataaataaataaatattaaaaaaaaagaaacaccacacttaaactgatgccttacaagaacttcgtacgtgttttgtacctgttactgtgcagctgtggtcgggacaagggttatcagagagagatctatctggtagagtttgagctctagatgtcagtggatgtggcatgtcacgggcttcggctttgtgccttcctactttgcagctgggtgtaattttctgcattcacctggtgtttcttgcagca

SEQ ID NO: 34120 - DNA, 1297 bp, Mus musculus
actcagacatgatgtagacaaaacagcagtgcacataaaaaaaataaaaaataaataaatatatctttttaaattggcatcctgcctgcatgtatgactctacaccagtagagatcatcagaggtcatggtggttatgagtcaccatgtggatgctaggaatagaacaaaggacctgtagaagagcaggcaatggtagtaacctctgagccacctctccagccatatatatatatatatatatatatatatatatatatatatatatatataattttttttaaatgtcaacttgttcttggggagaaatttcttacctagatgatacttgttctgataataactatagggagcaaagctcacttctgagacttggttgcaatgtgaacttagggaggagggagataatctgtaggtgccaaatatagaaaaatctcaggaaaatattagactgaaatagccagagggaaaatgaccccaactgaaatttgtgtattatgtgataaatgggctggctggctggtggttgtctctagctttgagacttcatcatgagttcattaagcagcaacacacaatgtggaaaattctcacatgaaggtgtcatagtagaaagagtggaggctagatggagccattctagccagactcgccaccctggatcttcttccaagtaaccctcacttgactctcttgcagctctattctcatgccgtgtcatcaaatggggaagcggtggaggatcccatggagatagtgatcacagtgacagatcagaatgacaacaggccagagtttacccagccggtctttgagggattcgttgcagaaggcgctgttccaggtaaattagtctcaaggaactgagtacccagaaagacatttgggttctttagaccttgaaggatgggattagagatcgtgtcactgaagttccgacctgctctttgaaagccaccctgagggatgaggtggaggcatgagggagcaaatataaaattctacctgtagaaacatatatgagcttggtggtgcatgtatataactccagctctaagggatgtgatgccctcttctggcctttaagggcatctactactactactactactactactactatctacaagtgtacatactactactactactactactactactactaagggatgtgatgccctcttctggcctttaagggcatctactactactactactactactactactatctacaagtgtacatactactactactactactaataataataataataataataatagaagga

SEQ ID NO: 34121 - DNA, 2646 bp, Mus musculus
gtatgtactcgctatgtagatcaggctggtcttgaagtatgtagcagaggaggactttaaattcctgattcccccaacttcagaattaacatttaacaatagcagtttgtcatctgtccttcgaggattttctgggctgaactgtaacctacgtgttttagtatgacgactctcgttgctcttaccctctgtccagcctggccttgggactttgccttctgtgctggtgtgtgtgtgtgtgtgtgtgtgtgtgtgtgtaccttgaaggggttaactactccttggttagtttttcatgtttggggtgttgcttgcctctgatgcatactgataagtacggtgctcttccttttagaacctgaaggcagccgacagcgaccccacggcacccccttacgactctctgttggtgttcgattacgagggcagtggttctgaagccgctagcctgagctcactgaactcctctgagtcggatcaggaccaggactacgattatctgaacgagtggggcaaccgattcaagaagctggcggacatgtacggcggtggtgaggacgactaggggactagcaagtctcccccgtgtggcaccatgggagatgcagaataattatatcagtggtctttcagctccttccctgagtgtgtagaagagagactgatctgagaagtgtgcagattgcatagtggtctcactctccctactggactgtctgtgttaggatggttttcactgattgttgaaatctttttttattttttatttttacagtgctgagatataaactgtgcctttttttgtttgtttgtttctgtttttgttcttttgagctatgatctgccccagacacaacagccccaagcccctcacacctcactaattttttacattgtgtacttgccctcaattaccatgtttgctgtattctaatagtcactcatgttcctgaattctgttgccctgcccaggtgatattctaggatgcagaaatgcctgggcccttttatggtgagagacaggtatcttggtgtgggtgcaactgcgctggatagtgtgtgtgttcccaagatctttcgtggtattccctctccacctccagagaactcatttacagtggcattccttgttcggctatgtgtctggggcagaacaaaaaaaagggaccactatgcatgctgcacacgtctcagattcttaggtacacacctgattcttaggtgcatgccatagtgggatatgttgctttgatcagaacctgcagggaggttttcgggcaccacttaagtttcttggcgtttctttcaaaccaaaactaaagaatggttgttctctgagagagactggagtgccaccaccaaagacagaggagagaaaaggagagaaaccaaacttggggacagcaacatcagcgaacccggctagttggcacaccgatggtgagggtacacaggcggtgagacctatcccacaagatttctggaagactaggcttatctcaaccaatgttttctggctggaatctttgtccatgtattcctgaagcccaggaaatgcacccctccaatgcctgctcttgatggtagctacagaaaatgctggccgatttaaacccaagttgcccagttctgagtagaaaactgagactatgctgtgtgtggcggcgcgcacctttaagcccagcactcaggaggcagaggcagtcagatctccctgagttcgaggccaacctggtatatatagtatagtaagcgaattctaggacagccagggctacacagagaaaccctgtctctgcaaaccaaaagagaaaactgagaatattacaaattgtgcattttctcaggaagcaggaagagaacattctaacgggaaaaaggagacaagacctttgagagttttcattcaaaatgcaaatctcagctttttgataaccactggaaagaattttattgaaagttctgtacttacctaactttggaagaaaatgatgaccacaatcaactgtgagaactgttgatttctctgtagtttaatcatgtaatgttgctagagtgacctttgtatgtagtttgagtgtatgtgtgtgggtgctgataattttgtattttgtggggggtggaaaaggtaagccattgaaaccgttctctaagatgcatttttatgaattttattaaagagttttgttaaactgttgtgaggctcacttgatttgactctgccaggattcctagaccaaaggacagaggtgaactcagatcatgggagcttccagctgatgtgtcttctccatgctttgggggtcctgcatggggaggaaatgcttccacggggtcactgctcagagccccatccatgtgatgtgtggtgggagcaataagtaccaaggccactggggcatgggggacctgcgagcttcaaggctgtcggcagacattttccaacagtaatggaggcagcgattctgtgcagaggaagactggcctcccccgagcgacgtttgtcagtgcctttccgctgccccctccctgctccgtgatagtacagattgaacctaggacctttcgtgtgctaggtgagtgttctgcctttgagaaacacccccagcttctttgtgctttgtactctttcataaattataacga

SEQ ID NO: 34122 - DNA, 1133 bp, Mus musculus
acaggggtgcacatacaaatgagtcaatgtcgttttaacagttagagaaagtccatagcattttgcctgcatgtatgtctgtgcaccacatgcatgcagtgcctgagaaggccagaagagggcatcagatcccaggaattggcattaggaatggttggtagccaccaagtgattgttggaacaaccttggttctctgcgaaagcagcaagttctcttttccactgagccttatctctagccctaattttagattttggtgacaaagttatgctatagagcaacagagcacagaatggctttgcgctgaagacaaaagtgctctgtcttagaactcatttttcctgaacaagagtaacatcagtagcgtcagaggttctgtgaatatcacatgtaagtggcatgtcatacagtggtgacactcatcttctggttctacctgcactatattactaataaaaccttgctttattagtgtcttctattcagaaaagtaatgagtggggttaattttatttattttccaagagattccagagagtgacatggtgccaggagctattttggtgactgaagaggaacttagtcggtgtgttgaagatgtgtttaaggttagtaattcaggtcgctgatgctgctagttaatgttcatacttgacggccttttgtttttggaggctctggactttgaacacaggccttctgctggcaagcactgtaccactgaactgtgtctgtagctttgcctcataaccagtacttccaggatttgaatgaataggggctagatggctcagcgggtgagagcacagaggacctgggtccgttctcagcacccacatcaggtgcctctcaactgcctccctccagtcccgggggatctcatgcctctgggctactcaggcacctgtacctgcacacacccacatatgcaggtgtgcacacaaatacacataattaaagaaggaaagaagatagtgggtctgactagctggccctggaggtagacgcctgtaatccctatgctcaggaggatcattgtaaagccaaagccagcctgtttgctatagtgagttctagcttctagggcttcacagtgagtactggctgtcaccatctcctttcccttccctac

SEQ ID NO: 34123 - DNA, 1187 bp, Mus musculus
tccatcctttcctgggtcactatgaagacactgtgtaaactggagtccctagaaaggtccctgacaaattataagctcaataactcagagcagtcattagtatggctgctaatggtgaagaaagacactcagccctgtagttaagactaaatgtccagcctaaaaataaaaataaaatctttttaaaaagtaaaaaaaaaattaagttctcatagcaccgttccatcctcatcaaagactgacgggggagcatgggcctaccccagccccttctagtgagtggggtggcttctagagccaagggttaagctacccctgggtgacctccagggcactgtactctgaaatttgtaagatgcatgcttccctgtcgagtgtcagcagccagtggccgggcagcattgggatcaagtggaacctgacggtcatcgtgtcttccccccccccccccccccccccgcatagcttgctagcttcatggaataagatgacaagctcattcattcataactgcttcatctaccaggtcactttgccaagagatcttgttatggattctggtgaagctggaaaggaagaaggcaatcgccagcctgaaaggattttcggggttggacaaaaccgtgcccactctccaccctcagtgtcagtttagagccgctacgcacggtggcatcgtgattaccgccaaagaggccattaggtgagcttaccaacccccgattgtcacgcctgacagaagtttttatacgacactgttctgtgagtcagccgctaaggggcgctgatggaaaggaaaccagaaacaggcagccaaggcgcttgctatttataatctttaaagaaaccagagccttaaatgatcctctgggtgttattccaagatgccagctaatagtaggtgtggtttgctggcgcctcccggctctacaccgcagcaagcccagctactgcccagtgttcgccagtgactcagagcacagggcagcacatgttcaccgcagctcccgagcagtcagtccagtctgtctctgactcaaagagcaggatgcatgtgtgccttattacgattattactgtatttgtcttgtctgtgtctgtgcattgcttgcatgcctgatggagcagagggtatccagtccctgggaactgtgtggatattgggaatcaaacccagatcctccact

SEQ ID NO: 34124 - DNA, 1131 bp, Mus musculus
gcatatgtacacatgcatggggaagccagaagttctctagctgaacctgaagccccctgatttgactaatctgattggttagctcaccccagggattctctgtctgtcgcttaagtgctgacatgacaggtggctgccatatccacccagattttatgtgggatctggggttcaaactctggtcctcgcgcttgcatggcgaacgagtgtcttacctcccgagcaatttccttagcctgcactgtaggactttaaggacagttttgttgttcagtaatgaatgtgataaatacatgaatgatattctttagcaaactcttatagccagacaatttatccagctatgatagatctgcttagatgccctcgaagtcacttcccttgaacattctgcatttcaggggttcaagtgatccctctcagtgtcaaaagaatctttggctgcagtggtgttttcgggagaatgatggtattgaattcagggccccttgcatgctacagaggcacactaccagccaggcagtggcgcacacctttaatcccagcacttagaaggcagaggcacgtggatctctgagttcgaggccagcctggtctacagagcaagttccaggacagccagagctatacacagagaaaccctgtctcaaaaaatcaaaaacaaacaaacaaagcaaaggcatactaccactgagcttcacgcttaggcccaaaatgcctttggataaaacaattataacaaactgaaaggaaggaaggaaggagggagggagggagggagggagggagggagggaggaaggaaggaaggaaggaaggaaggaaggaaggaaggaaggaaggaaggagagaaacccataccctgagccaggcataggaggtgaaagtgtgctgtgtgtaaggaagggaatgtaggcactgacatgcccagacaaaccatacccttcccaccccctctcttttttcatttctttcaaagcaccaaagggagtgaaggcaaaaggtggggggggggggcagtggagtataaaaagatgacaagatttttacagagtttcaaactgagcagaagtacaagccttgacttgctaggcaccaacctttgtcttaggctccaatttctacctcaagt

SEQ ID NO: 34125 - DNA, 1238 bp, Mus musculus
aagagctatggcaaaggtaggaagcacaactgtgctttgggctgaagtccacagaacgattccactcatcaaaccctagaatggtaaaatccggaggatccctggtggtcccttgctgctgtgccaattccagccatgacttatagggatctagcctgtactgcagatgtccatagctcatagattacagaatgtccatggcaatacctgagagccctggctaggattagcaaatccagagatctgggttcccagtcaccatcttccacttacaatcctaatagagacagccttggcctgcagtgttacaggtaggtttaagtgtgggctgctgagatgacttagagtcaagatgccttaccaccaaggctgatggcctgagttaataccgaggatgaaggtgagagaaaggacagaattgactcctacacttgtcctttgatacacacacacacaagaatgtaaaaataaataaataaatctttgtatccatcccatcacaggatatctaggttatttgtctccccatcctaaataatgagttctttctttctgttttgaaccccagggattgcccttctttcagatgtgtaccctgaagaaatcttggttgatctgttggccaaatatgacagtgggaaagacaagcacactcctgagaccagaatgaaggttggcgaggtcctgatgcgagttgtcagagcactgggtgagttttgtttgtttactccatttctctgacactgagcagtgtagtactgctctgtctatgtactgaaggctcgttctagcagacgaggggatcagaggggatgatgactgtttagggattcaacacatgctcagccaaacctatgtgaagagctctttccccatggctgcttagtttccctctcccagagctgtgctttgctggggtccgtgtgagtggggtgggctctcggaatgcaggctagctgacctgagatacactgttcaggcagtactcaagcaggccgacctccacatcacaacctgctgtctcagccgctagagcgctgggagtatgggtgcccccagcttggaggccaatgtataatggacctgaaaagagactttacacccgagagcagcaagcacaccagggtgagatccaagcaggccgggaatggagaactggcgaggactgtctgccgtgtatgtatggtcgcaaccaatttcccaaccagtcctttaagcaagttgtcagaggtgtggtg

SEQ ID NO: 34126 - DNA, 1099 bp, Mus musculus
tggtgcacgcctttaattgtagcaccaaggggcagaggcaggtggatctctgagttccaggctagcctggtctgcagagcagccaaggccacacagagaaaccctgtctcaaaacaatacaatgcaatacaatacaagagaaaagaaaaagaaaggtttgctgttttctgtcttagttaagatccacagggctgggatgtagctcagcggtctagcacctgcccagcactcagcacaggaaaagccctagactcaatcaccaaccactcaagaaacaacttaggctaggcttagtgtcagatatttaaaatccagcatttaggaagcaaggccggtggatcatgagtttaaggatagcctgggctacagagcaagagcctacctcaagcacaacacaacttgtgaagcttttggcaaatatatcatggtccccgtgttgttcttgttgctgttttttttttccttttggggccaggggttgatttacatgttctagtctgcactaaactatgtccctactcaatatcactattcatataaattgctaataactgggaagatggggtgaggggaatatcgggactctatattaaaatcttctataagcctaaaattaattaacaataaaagtcggtttaaaggctggacacatggctcagtagttaagatcatgcgctgttcttgcatagggcccaagtttcatttccagtacccatattagtcagcaccctgcttcctgtaactccagcttcagccagtaggatatatatctgacctcaggcacacacagatacacatctacacacaaataaataataaaatatatttaatattaagttacagctttgtaaggagaaatctaagctcagtgtgttggtttaccctcgtaatcccaaaacttggaagctagaagcaggagggacaggggttaaagttcattgtctgctacagaacaggagctcctgggccgcatgcattcaatgaagcggatctctgagactctagctgtggagtgtagcttacttggaaacctcatacttcgtggttaaaggccctgattttgacccctaaggcccaaaaagaaaaaattctgttagtt

SEQ ID NO: 34127 - DNA, 1166 bp, Mus musculus
tctgtcacatgaacagagaaaacaaatgagaaacccaaggagatatacatatgtatagtatgtatgtatgtatgtatgtatgtatgtatatagtgtgtgtatatatgaagtatgtatgtgtgtagtatgtatgcatgtagtatgaatgtatgtatgtccatatatatacatgttgtatgtatgtacgtagtaaacaagatcctggtgcaaattctggtttttgtgaaaatccctagacctctgtaaccctcttttcacgtctgttggatctgtctgacacagaagtgcccaagggaggtggctcggcatgtatgagcccctctgactctcaaggttgtcatctaagagcagtgatgatggtggtcaccagtggccattacagtgctgtgctgggcttctgctgccatcgtcaccactgcacaacctgctaaactctctggcccacttattggttattttgctctagggttgtatttttcttgttttagtttcttttgtgattagattctttttattccttcatttctttttttgtggcagaatctcctgtagcccaagctagcctcgaacttgccgtgtatccaaggatgaccttgaactcctgatctctgccttcacctctcatgctgggatggcaggtgtgcactgtcatgtttagtttatatggtgctgggcatagaatcccaggctgttggctcacgtgctagccaggtactggacccactgagctacatccccagtcctttctttatttcccctcacccctgccaaggctaatcaaactcaagatctaacaaatactagggaagcattcggccactgagatgtcataatcccaaccccttacagtgactagggaagcactccaccactgagatatcatagtcccaactccttgcagtgactttaaaaaaatctactaaagataattttatagactgatcagattatatccatatggaaggatatgtaattaacttgatatctataattttacaattaagtttattgtagctgatgcataagaacacaaaagcacatgtactaatggaatgacttgtactgttttatacattcataaaaacacttttggctcagaccaagtacagtatcatgcatggatgtgtacaataactttaggtacctcacatttcattgtgccaggc

SEQ ID NO: 34128 - DNA, 1997 bp, Mus musculus
gaaggcaggggaaaccaagcagccaaagcagtggtcacacacctcccagcaggtgtctccaccgcctccttggtgcagacctgaggtctgctataacctgaaggtagctatacggtgctggcaccacttgggtgttcagggctacctttctagagcgtccatttggtcactctgcatctggcccaaagcttgtgcagtgagaagggtgaaccccatctaactacacccttcatcgtcccagcctttagaggaggcctgtgtataactgtggagcattttcttccggctggagaagccgccccacccccctggtcccaccttgatatcctgtcatagggagatgattctgcctgtgatgagggacaggcagagctatcatctgggtgtgcagctgtggggaggggaaggaagcattgctgcttaaactacacaatacgagagaataaaagaataaaattaccttggctggaatgatcagccaatgtgaatgctgtcaccgagctggttgacttttgcagaagaagagtaagccctgtctgtcctctggggccttttttctttttattgctcctctgtttttacttgagctgccattcagtcttctgcacctctcagggtgatgctgtgacagtggagtggtctgagaaaggcaggcagggcttatgtggcacaggagtggcctgccaccagctcactgaaacaacttcagatttagcactgtgttcatccgctcttggatttatgtattttggtattttcattgcaaaagacaagaaagggttaaaagaagaagaagaaggaagaggaggaggaggagactggggagatatggagataccttagtccctgaagtacttatgcaaacttgaggacctgcgctccatcctctgcatccaggtaaaaacactgcttgaggtggcatgtgcctgcaggcctaaggagcaggggagggtgcagggacaggtgcatcctggaggctcacaggctagccagtctagttaattagtctgtgagctctcagccaccaagagaccccacccccatccctttctctctctctctaaaaaaaaaaaaaaaaaagggcagcgcctcctgggaaacagcacccaacgttgacctttggcctacacacacacagacacacacacacacacacacttacatgctcgtacagtgtctgttcaactcatgagcccacatgaacatacgcatacatgaacatatatacacaggcacagtgtgtgtgcaacttcgtccacatggaacggaaaggaaaaggaagcaactggctgcttccgataagcccgctctgtagcctacgcctttataagatgaatgcggtgttcatcgatccccagcatcacagagataagtataggactctatctcgggactttatctatctccactttctggggtatcctgatctaaaggaagcagaactgtgacagtgcaggagactatggagtgacattcaggtgttctcgcctgttgggagcaagccagattacacagccttctcagcttagccttcccagtaggcatcgccagaaaggtgccaatcactgatacaaaccacaggcagtgtgtcaagcaaaggatcaaacaaggctgccgtccgtggcagcacgtacctctgatcccagcactcatgaggcagagacaggtggacttctgagttcgaggccagcctgacctacagagtgagttccaggacagccagggctacacagagcttgaatgttttgaaggaatatttctattcagctagggtagcagtattagtttatattttttaaatcaagagtgcctataaagtcagggttggagctgcttaagcgagtgttacttagcctttagaatacatccaacccaaggctggagagatggctcagcagtagagtacacactgatcttgccgaggacccaaacttggttcccagcccacatgagatactcacaatggcccgtggctctggctccagccgattgacacc

SEQ ID NO: 34129 - DNA, 1205 bp, Mus musculus
gcctctcacatatggctctcatcctgcttgctatttcaatctcttcagagccgcgcatgtcgcttagttgttgttttctggtggggagagcagcagttacctcttcattttcatgggtaaattcccatgtgaccatggtagagaatagacgcttacaaggctttcaaggctgttccctacatgcatggacgtaacaacagcctctggccacactgttcatcgtccaggactggtcaggacttcggcagctggttagttagcatctgtaactttctcgacaatcattcccaaaggaaagctttctggagttgcccaaatgaaccttcagatccatgttggtcatctttgagagcatccattctcagtggcttctccaaggaattctacggctagaatagtagatgcacctccatttgctgcttcagtccagaaaccaaagtaggagctggaaccggtccaacagtcttcagtcctcttacagccctcactggctgccgatttccttgtttctcttgaggaacgaggagaagcttttacactcttttgaagtcaagaccagattgctttggcattgaagcgtgggctcgtgactaagcctttgactttgtgggctacttacaatttccctgaacatttgttctctgagggaccagctaaccctcagaagcaactgggttggagagcagtgtacataggtgcttcctacaaaagaatgaagtgcactccaaaccaccaatgggccatcccttgtatttcccttcctcgtatgaacaaaaggggttttccaggtgtagctaacagttgccacagcacacaaacctcaagttgctaggaaaactgctggctggtgtgaggcccaactcatggtggctgaggagcagcagccgtttgtgacaggcagttgctctggggccttctgttaagaagtgaactatttgagcactacagtggagacaatccagtcaacttcggggctcagactaagggcttgtttttcttcagcttttacttgaaggttacaggacaatggactctggatgaaaactggttgtctaccgtcagctctctgccttgcactgtggtcaactctcctcagattaaagatgcaggtacagtagtgagcttacaacatttgacctcgactggatttcctaatttattttataagcagcaaaactaaactgggtctacagctatatccctgt

SEQ ID NO: 34130 - DNA, 1557 bp, Mus musculus
gccccatgggggtaaatgctggagtctttccaagggggacaggatcaggaggactgaacccaaatgccttctctcagtcttctggcacattggcctcaaatccaggcacctttcagaggtctgctggcctccagggctcaaatcaagcagttttcccaagagcctctgggccactaggccccaacccagctaactttccaagggccactggcctgcagggtccaagtccagctgccttcccaaggtctgctggtccattaggcccaggtcaagttgctttccccaggtcagctgcggggcacctgggctcttctccagcaggccctgtgggtatcaacccagctccttttgcaagaccaacggggaccctgggccttaacccagcttcctttccaaggatgaatggccctgtaggtaagactttggtcccatttcctagggtaggcagcctccctggctcaaatccagctgctttccccaggccagggggtccaatggctgcaatgtacccaaatggaatgttacccccttaaataccatttttcttccagggccacttttgttatttaagcactgtggttctgagctggggctgtctcttagataaaagagtagatatggaagtacagtctgaagaacatagctggggctcgagttcaaatgaaccttctttttcctctgcttttttcttgactaaaggcaaaatgttatttgtgagccatggactatggcagatggggtgatcctggcctcaaggaaaaggctctctggccttccggaagcctctgtgcttttgtcccacagctttctgccccttgtttcttactagttccttgaactgttctcgtggacttttcctcagggatacattggcctgcaggtcctagttccccactcaccgctggagaattggctcgcttgctgtctagtgacgctgcattggtgagcgggccatgcttcggtaactctgacccggctccctggacctagtcatgttctactgccagacctttccctgggggcttgaacacagaatgggaggtggacacccacgccacagacccaccacatttctgcttgactgggcctgcggctcctttcttctgggacttagaggtggacagatttaagcttcctccgatcagccagctccctcctcactggtcctcccaatcaaagaacctcaaaacttaaactgcgatggatgggaagtgggggggctggggggggggtggagggatgaaagggaaatcactgtgctgtgttcagcttgatgtgaaggatggttggttttcctccattgtatcttttcttactgtttctttaataaatgggtgagagggctgctgctgtcgctccattttgttctgtttactctctgcttgttttttttaaaatgacaacaaccctgtttattacctgccgtccaacatgcttgtatttgaggatacaagctttggttagccttcactcattcttccgattctattttgtagaataatttgaggagtgtgagattctgacgtctacaatagaaaataagccatcttgcatgtg

SEQ ID NO: 34131 - DNA, 1226 bp, Mus musculus
actgtcctcgggtttgttgctccaggttagccagtctgtagagctagctgcttgctgtccccaccttctggagtagcagaggaatggagccgttgggaatctgctagagtcctaaaagtagaaatgctgtttacgtggggctgcaaagaatgaaagggcacaagggtggattgccaatgtggttttttaacagtgatagagccagaccaggggctggaggtgccagcattgctgcaagagcagctttaaaaggcccctgaaaggaacggccttgccctcaaccttaggcatctccttctgttctgccaaagggaatccctgtgctgatcgtgggccatcatatcctgtatgggaaaaccatccacctggagaaaccttttgcagtccttgtcaaacacactcctgggaagcaggactgtgatgagcccggtcgagggactggcacccagtacttggtgacagcactcatcaaaaacaagatccttttcaaaactcgccccaagcctattatcaccaacgtccccaagaaagtatgaaagaaccccggattttccctagagagcgaccaactccttggactcgtgctccattgccacctcgaggacggctggacggagggcctgttatgaacgcaggccacccaatgggtgtgaactcagatcctttccttatggcagcaggttctcttggtggaaacctggctccatttccaaggaatgcagctccttttcagaatccatcaggctctttggcgtcaaacccagcacactttgctgctggtgctcgcgacccaggcatgacttctttcccaagagggatgaatcccactggcacaggtgcagtttccttcccaaggccaggaggcctgttgggaccaggaccaggaccaggtttaaaccctagaacaggggctcttccaggcccagggcctatgtctaaccccagattaggagggcttcctggacctggtcctatggccaacccaagggcaggcggacttctgggagcaagtcctgaccctagaagtggtggccccatggtccctggatgtggacccaacatgagggcaggtgttttgtcctctgggactggtcctcccaatcctaggccagttggcctgggtcctggaccaagtccaaatctgagatcaagctttttaggtacaaacccggcccctaggtcgggtatgtttccaggcccaggcctgggtcccaacccacgagcat

SEQ ID NO: 34132 - DNA, 1134 bp, Mus musculus
agtcttggttccactgcaacccttcaggctttggagttttcctttgcctcctgtctcagaaagccactgcggttgcagatgctagtgctgtatgtttagtgtcttcatgggcactggagagtggagctcaggtgttcatactcgcatgtctgagccatcttcctggatccaggacgtagagtattatcttcttccccatgtttagaatatgatgttcacagatgtgaattctttattgctttttttaggccactttttttttgcagcttacacatcatacacagtatcagtcaacaaaagcttatttgaaagaacttggtctgtgcagccttggccttttacaatctttatgaattataatcaaagttagactgtcaaatgctgaattgcttacttcccaatctaaaatattagctattctcaataggagtctaaagtcttgcatgagttatatttagtcatcacactagtgagtcatcatctaggtgtcagcgacctagtcatttagtgacctgagcgtgatcatacagtagctttccaccttacaagctggaaccggaactcagccttttgaatttggattgattcactttggagatgctctggcagcaggactcagtgcttttgatccagtgtatgagattaaaacagagggattggaaattcaaagatggacctggtctcaaaagttaagttctgcaaagggtcttataagcacaaagatctttgccttttctcggtagggccacagcctctttgggtacagagactcactagctcacagatctagtgttggtgcccttgtgctgatgtgaacagcacttacacatgttcctggctgcacgctctcctgattcctcttcattcttgctgatacctggttctgtcctttaggaagggaaaattaagtagtgacttttaagtaactagatgggctagtttcttgtctttgctctctatactctagttgagtgtgtaccacatatgaatacatgatttttatttgtatatgacccagtagcctcaaatgcaaaataggaataaatggttatcattagagttgctgtgttggttgagataccatgtacacatgtgcatagcatgtagtccatagtaaacatttaaaatatgtta

SEQ ID NO: 34133 - DNA, 1140 bp, Mus musculus
gagctggttgtcaggatgggatgagataatccagtaagcagtccaaagagtatggagatgaaatcttttggtattggtaacactgtgctgctttctaatcaaggcaaatcttagtcctagaaactggtcgattcttagtgttagcatgaagtgagactgaagactcagaaattgatgccacacagaattttcattgtaacatttttgttatttgttactattaccagaatttggcttcttaaacagcattggaaattcacacaagtgcttcagatattggaatctttgcattgatttagcagatgaatagcccgaaaactgagaaatcttgacatttgatactagcagcctaatattatgtttaaattttttttctacttggaaacatgttctcagattgtaggtgttctgcttgtacgaggcttcacctctttttaagtttccctcacacccacctttgttgttggagacagggtcttcctgagttgtcctgcctcagcctgaagggcagggattacagatgcatagcaccacacctggcttttgagaccctttgaataaaatgtatgctaattgggacacgtggtcatactcctgttacctctgtcggttgtgctctcaaatcaatatgtaagctagccccatggacagttttctggtgacctcaaggagcaagaacaggagtaatagatgctacaggaaatctcaagccctgagatacacacacacacacacacacacacacacacacacacacacacacagagagatcacataggtataatcatatggatatacaggtgtctctaagctagactgacacatttccttttatatccgtgtaagtcacctaatttgatttagcataaaacattttacagggttgatggggtacagcaacagaatggccaggctgtaagccacacagttactgtttccaaggcattgctaggtgtttgccaggatcaatagaaataactcaggcaaggcttcctgcagctgtatataaagatgtatgttttcagttgaacctgcatgggtaggtttgcaagtgctaccccaaatcagaggtcaggtgtctgcttttcttagttcattgtgaattcttattctgatagtctgtccaggaagcagagaatt

SEQ ID NO: 34134 - DNA, 1212 bp, Mus musculus
gagctattactctgttttaagacagagaaactgtctcaaaaaacaagcaataaaaaataaatattagatactttgtatccaactggacactagcccaacttttttatgcatggggactgccacagcctgctcccacctcccaccctcttcaggtgtcctacctctgcttcctgaggactgagattagagttatataagccaccacacctgctgagtcaatcttgaatctcctcattctcaaatattatttgatcgtctgctacattagttctagtctaaaagagagaaatgtataacatgtaatgttaagtaactaatatttgaagctgaaagaaagaaagtgtctaatagacacagccgtttgatagtgacaagctactagttatttgtggggaaatacttttgagtgccagtgactgaggcattcatagcaagttgggaagatatgctgctttgtggttttgaactcacggcaggttgtgaaatgatggtacttctgtagtttttcccaggtcatgagtctcggggtaccgaagccctgtgttgggcaggaggacagcggctctttagtgctggactgaacggagaaatccttgagtatgacctacaggcactaaacatcaagtacactttggatgcctttggaggacccatctggagtatgaccgccagccccagtggctctcaacttttggtcagtaagctagtattgataatacaaaatacagtagtcttgatggtcagtcccttccccgtctcacaagctgttttggtttgttttgattttaggcaagtgatagctttagagaagaaacgcttgtgcatgggggtattagttctgtataaaggctcatttagtctgttttctactcgtctctaatcaggttggttgtgaagatggctccgtgaaactatttgaagtcaccccagaaaaaatccagtttgcaagaaattttgatcggcaaaaaagtaaggcttgttttgggttcgggcaatgaacagcttcaacaagaggttgtctgtttgtgtcaccaaagggacaggatattttcctgtggctataggatatgctgtgtagattttctctgagcacaaggggagttctagaaggcatcccattaggtatcccattaggtagcatagttgtgaaattcaaagtagaaagctagtgttcctgtgaaaatgagtgtattgtttatcacctgcatttta

SEQ ID NO: 34135 - DNA, 1202 bp, Mus musculus
ggcaagtgttctgtctctccagccccactgttagtgacatccggcaagtgttctgcgcccttcctgtccttctgtttattttcttgttgtttctattagtctccttggcttttctcagtagaggagactttcttcccatgccatgtgtgctgtttgcgcctgtcaccatagtggggctcttgagtatggccttccctgcagagaggtatcttggtggcctatctggggacttgtgaagtcataagcttatacttttttttttcttgagtgacttgaaatcaatcagttgggtttttgggggggggtcggtgggggggtcctagagatcaaccaaccctgagcgttccatgttctgccactgagctgcactctcagactcccccattctgtccccgtgagtcctgtaagtacaggcccagctgtcagtgttctgaggaggagaaatctggtgttgtcggcattcaagttagcagtttcactggaccgttttccttccagacacctctgtcccagcctcagttcccaacgctttttatgtaagaaagtcttctctggagatagagtttagttaatatccggcagcttactcaggagattgctacctcgaggtccagcagcctctagatgaccttttgaccagtccctcctgtgggtgtcaagaataagtcaagtggcttcttggctttccttaaggctaacctgcatcttggtttcaaggtcctgcttggttgccaccctgagtctttgacactgtcttcttttctccctgtcctataaacagagtgtggggagagttcagggtgtgatgtgtacatgcagtacatgatgtgtacatgcagggtgtgatgtgtacatgcagggtgtgatgtgtacatgcagtgtgccagcttttaagtgaacagggatccttccatgccagtgccccagaaggaatgccagtccttttgctctctctttctccctcccttttttcctccctcctgcgaacttcaccccttccttttcaggatcccattttggaattttaaaacagttcgacccagctaccattttactccctaactatatgttcaggcatctaactccatgtatgcttgcctgtgcagttttgaaaaactaaaactaaacgtgtgcctttcttacttttcagggagcataattcgtaagatggttttagataggcaacacctgggagtgactaa

SEQ ID NO: 34136 - DNA, 1170 bp, Mus musculus
gtaagaacaagccatacccaaagtctcgtttctgccgtggtgtccctgatgctaagatccgaatctttgatttgggatggaagaaagcgaaagttgatgaattcccactttgtggccatatggtgtcagatgaatatgagcaactctcttctgaagcactggaggctgcccgtatttgtgccaacaaatacatggtaaagagttgtggcaaggatggctttcatatccgagtgaggctccaccctttccatgtcatccgtatcaacatgatgttgtcttgtgctgggtccaacaggctccagacagggatgagtggtgccgttgggaagccccagggcacagtggccagggttcacattggccaggtcatcacgtctatccgagccaagttgcagaataaggaacatgtgattgaggctctgcgcagagccaagttcaagttccctggccaccagaagattcacatctcaaagaagtggggctttaccaagtttaatgcagatgaatttgaagacatggttgttgagaagtggctcattcctgatggctgtggtgtcaaatatatccccaaccgtggtcctctggacaagtggagagccctgcattcctgaaggcttcaatagttctctcctataccctaccaaattgttcaataataaatctcacatcaagttcaaaaaaaaaaagaatgtggcagccagaggccacctcttgagagttggttctccttccaccatgtgtgtctcagggattgggttcataattgagtttgtcagccagcaactttaccctctgaaccaccttgccagccctttaaaagtaatagtaccggctggccttgaatttgccagaccgctgattatggccttgaacctgtcttaacctcccagtgctagggttacaagcacaggaatgtgcctcgccacctagtggtgcctatggggtttctattagtgttgttggggatgttggttggtgcactaagtacactccctgagagatcaggtgttagaggagtggttccctggctagtggtgctgataggaagggatcatgagagtggcaagttcttctatacgttgttgtgatgaagtaggtcacagggccatacctaagacatacttgcctttctccctctgtctctgcttcttggtgaccatgaggtgagca

SEQ ID NO: 34137 - DNA, 1153 bp, Mus musculus
gtacatgaaagaaagaaaggaaaggagagagagaattacagtgacaactcatgtttcttctccacagactatggacctgcattcttgtccaaagccgattgtatttgtattgcacacgttcttatccgccaaagtcactcgcatgggactgcttgtgtgagcagcaagagtgaagaaagagctttgactgtcacaagaagtatttccacctcaaaagatgaaaagaaagaaaaagcaacaacaaagaagcacaaacagaagcccttgctcctgcctccatcacagtgccttcctgaggacctgcagaccactgctggaccacaacagggttttaggaagggccgacctttcccacacagccttggtcagaaattctagaactgttataagctccaaatgaaagctattgatttaccgtcttatttcataatgtgatctcaagtaatcaggtttcttttccctgttatgaagtctggcactttgggtttctctttggacataaacagatagccaaaaggggctcttcttttctttgtgtaggaatcatttgggtatagccttgagctcttcctgggatgactgtcgctctccggtgctagtgtgcagctgccgtccctcaggcacatcccacacaggtccttgcaccacagtgaccccgccctgtcccaccctccccacctctatctggcaccagctctgccacccataagtgctgcctttaggactcagaacttgcacagtctggttgcctttgccttcactccccttttttgtggtgtccaagttgaaaagcaagttggaaatgctgcccggaaagaggagtgttgctttctttagtttatattgagtttatatttggtaggagccaggggatggtctacagtttattttgaaagatcctcatcttacgctaagccatttcttattgcttaccaaatgtgcctttgggtagggtcagtggagctttattagtgactgtgggatgaccgggtctcactgctgttcctgggatcccagctggctttcaggagttgtccttgaggtcagttccttagtggcatcttttggtggtggttttgtgggtcacgttagctttgtagcacagatgccgttttgagtgacacagagcacgggggctaggagaggtcctggc

SEQ ID NO: 34138 - DNA, 1147 bp, Mus musculus
cacagctcccgaatctgaacaaaaaggaaatattaatatctgatatcttctagaggttttctaacctctctgaaaacatgtctagaaacagctctcatgttctagatttctctggagtgctacacagggatatggctcttcaaatggggtagagggtgaaagggaagaaaacataagtatttgtgcagagcctgagctgccttgattggcagggtagccagaggaaagagcagacgccaagcagaggtgtcaccctgctgtcctccgctgtcagtgagtcaggcctcctgctctgcagtcagactaacagtacccagaggctggggagaaagtcttaaccctgagataggttccatccctgatacatcttcaactcaaaagaaaaagaagaaatgtcccagctctgagtgcagaaagcagagctatagcagtaagagagctctggctcctgccccactgagctgcgggtgtgaaaggcggagacaccagggagactgacaggagcctctgccccctgttccttagaagagctgtaagtgggtaagctgtgctcttcttctggctgaggcctgtggcccacagggtttttaatactgtcatttgaggcttataaaatgaaggcttatgggtgattttgttgtcattaggagcaccaagagcaaggtcctaagctgcttgttccagaagctgtagcagccccaacccccgcaggtggtcagttaggaattttaaaccacaagtggaatgctttttgtgagtgtgggacaccttgatacaaacctatattatcaattttgtactcaaaagccaaaatatagcaaactattttcaaatgataactaaaaatgggcatctttgataattcacctctttttatagaatcagctatattgtctttaatttttcatcttgaacattattggggatgttgtgggctcctgggtgtgagtgggcaggaaactgtggagcgcctcctgttggatgggccacttcctaggcatctgtgcattccacacagtcccaggtcatcctgcagatgagagctctcctccccataagaaagaggactaaaggaagctcatgttaccaacaagccttgcctagaaattggtatcaaatattttatataaagaaatgcttgtgtgta

SEQ ID NO: 34139 - DNA, 1210 bp, Mus musculus
tttcctaacttattctcctggacagaacggtagcaaagttttgttcagctgaataaatgcactcagctaataaaccaaaatttattctttcaaaataagaaattatctgttatcaccaaaaaataaaattaaaataaacaaattaagctatgtggaatctgaacacgattaccccactccccagaaaggttttactatgagtggttttgatgaacaaaaatgtgtggggaaaattactgatttcttaaactcttgtaagaaacgcaagagtcttctagtttaatttaaatgcatgtggctttgtttgttttcaaaaccttggaagaacctacccatgtgtttaatgcaaatcactgtcaaagctgctagccttccttaaaagccctggctgctggaagaggtgagcagtcctgaagtgttcggaagagtgggagactccgtcactctctcttcttttgtatcttttcttggacacctactcagaccgtattttattattcccactggttcatgctattgattgtacacgatacttaaatgtgcaaatattctgcttccatccccacgtggctgctggcagctctcggtgccaagaatggactggctccttagaatgctgggctcagtgggtaagagggctgctgctgtcatgaggactgccgagcagatctcagcacccaagtccagggggctgaaggaatgaagaaatggaaggagggagggagggagggagggagggagggagggagggagggagggagggaaggaaggaaggaaggaaggaaggaaggaaggaaggaaggaaggaaggaaggaaggaaggaaactaactcctaatctctaatgagaagatcaaatacaaggttacttagatcttaaaagcacattgctctggacaaattttaatgtgtactactacagtggtagtctgagtttactttggaagctattccaggtttgtcaggcaccaggactacacagtaagattctgtctcagaacaacaaaatcctagtacttgggagctacaggcaaagaatccaagattagctgtactcaatccaaggccagctggactacatctgatcctgcctcagtacaatagaaaaaaattgaggtcatatacactttagttgaatccatgcccttgttttaattacttagtaatctagaatgattttgactctacacacaattcttacaagtcgatac

SEQ ID NO: 34140 - DNA, 1276 bp, Mus musculus
gaagccagaggaagcttcagagcccctgggactgacgtcagagagggttacaagacactatgctggggccaggaactaaaacccaggtcctctgcaggcgcagccagtgctcctaagcactgcacatcttcccagccacggcacgtgacgtacagtccagctcttgagaggtctgggaggcaagggagatggggagttgaaagtcatcctcagctatgtagagtttgagatcagcctggggtcatgcaggaaactcagctcaaaaaaagtttgtgtgaatttaatataatacataaatatgactgttgcaaattactctttgcccaattagttagatacatatgtttaaatctaccatattgtgagacacattggcttaagtgcttagtcttatcagggaggcagaggcagatctcaaggccagccaggtttacagtgagttctaggctagccaaggctacacagtgagaccctgtctttttttttttctaaagcaagcacaaacaaaagctatgcagttaaaccctataatagatgttcccttactccatgataggactgggatcccgggttagacttctcacctcagccttgcgctgactttgcctccatatccttgtgacagtgctcatcccagttaatgctctaccctcagggcctcgtggctctgtcacccttccgaagccacagaggactgtagatacccaaaagattctctgggaatgtaaacatttgaaactttcgggctagttcatggtgtatccctacatttcacccaacaggcattttgtggtagaagcttctgcatcaagccgactgagtgatcaggggcctacaagatgtctcagcaggcagaggcactcacagccagggttacaacctgaactcagtgttggaagcagagaactgtctcccaacagttaccctctgaccagcctcaggccagagcccccccccacacacacacacacacacgtgtgtggcagggagtcacttggtagtggatccaattaacttagaatcttttattgcccaggcacaccacgtcctctctttattaactagtctgtttctcttttcttttatgtatgtagttgttttacctgcatggatgtgtgctacatctgttcagtgcttgtagaggtcagaagaagggtccagatacctggaacaggagttacaggtggttctgggctgccgtgtgggtgctggcagagcagcctgtgttcttgcttgttacgccatctttccagccaccacttagcatttgtcccag

SEQ ID NO: 34141 - DNA, 1669 bp, Mus musculus
gaaggcatattcaggctctgcccgtggcaacatgagaagatcacctaaacatgttaaggaagttggagttttcattatatatcattttttaatgaaaacttagactttagtttgtgaagggaaatattataggtccctcaataagataaatcacaaagtgaaaatttaatctttatcgccaacagtagattaataggggaaaaagcctttttcttttttctttttcatttttatatgtgtgaatacactgtcactgtcttcagacacaccagaagagtgcatcaggtcatgttatagatgtttgtgagccaccatgtggttgctgggaattgaactcaggacctctggaagaacagtcagtgctcttaaccactgagccatttctccagcccttttattcttttaaatagacagcaaagtttatttttgaacattgctgacctattcatttccagactggagggtagttttgtgtttttatttttctgttttttgaaacagagtgtctgtgctatcctggaatagctttatagaccaggctggcctcaaactctctagagatctatctgcctctgcctgggatcaaagatgtgtgtcaccaccactggttgcatcttattttcttaaggtccttatacacatcatagctggaccgtttctccattaacaagcaaccacattgcattaaaaattagcaagagtccaggtgtggcaaggtcactcagtggttggagctcttggctgctcttttagaggctcgattttaatttccaacacccacatgtcggctcacagtcctctataattgtcctatgggattcaatgtccttttctggtgtgcagctatacatgcagacaaagcactcatatacacacactacataaataagtcctgaaaattagcatttttctgcttactcaagaacccgttggcgttcaaactcagtggaaagagacctagagaaagtgagccagggttggctgaattttccagtagtgacgcctctttcaatccttcttgctttttattacctgtgaggtcagcttttcaaacttgtttaatccctccctgaaagtactctctgagctggggatggcgggaagaggagttgcatggctctctccccttgttggcaaatgtattggagtcactgggtcacgccttgcgtgtcttgttctctaaacctgccctttgcagtcaggtgctaataactgcgtttttatcaaaaccagcagatattattgctgcacacctagtcctataggaccaaagaagggctttccttctgtggagtcctcggttaacagtgggtattttcacatctttttgctggtgttttctgaatcagtgggattggggagagagaaaagctgaggtctgcggaatcacggcctcccaaatcctcacttagcaccccaggcactgggttcagctctcctccctcggttgggatgccacccgtattgtcagtcgcctggtgaggtaagttgcagtccccggagccccaataatccctcttcctagtgccagatctgaagtcttacaaagcataacctattttttttcttctgtgtaccctctgctaatccccacgtgtatgtattctttcttgcactactcatttttgttaagtgtaaagacttagaaagctagctcaagtaaggctgg

SEQ ID NO: 34142 - DNA, 2201 bp, Mus musculus
ctggaaaggatgaagtttcagtcagcagctcggagactgacttcttggctcctttcacagttctcaaagatacagctgtttcaatatagtttttgttttgttttgtttccttataaatgaatgtctgttctttcaattccagggttttggggtggcagcaaagtctacccaagactgccgaaaagtggaccccatggcaattgtggtgttccaccaagcagacattggggagtacgtacgccatgaagagacactgacttaggacggtcattccaagaacattttgctgtgtgagaggacttagctttgtttcctgtgtgcggccatcagattaaatctggacaacactgagatacgcaacttgggttcttatcaacagaaatggcgtgaaaacagggtctctggccctctagagtcaaaagcaggtggatcacaagtataaggccagctcaggctacttggagagttcaaggctagcctgggctacatagtgagccttgtctcaaaaatctaaaacagacaaaccagaacctgagagtgttttgtgtgagtaaatagagtgtttctgttttgtgtctgcgtcgtctttgtttggatcagaagacttgctctgagtgatggtttctaagttacttcactgaggacaggagccatcttactgttatctgtgataacactgttttccaggctcatgatagcacagtggactttctattgtgtgttaatgttaaaggtagaaacggccatatgagcctctggttttacatatggaatttaataaattttaatggttttatatttgttatttcatatgtgtgagtgttttgttggcatgtacgtatgtgcactgcttatgtgcctggtgcctaaggaagtcaaggtgatttcagacctggaactagagttactggttgtgagccaccgtataggtgccagaaattaaactcaggtcctctgcagggacagcagtggtcttaaccactaagctatcctaataaatttaataggtgcattttggctatttttcttggtgttaagtggggtatagcgtggaagcgtctgtattcaagcctcagttctgccccttgccagctgtggtggtggacaagttctctgcttagagaggcttcattttcttcctttgttaaaagaaaaaacccatgaccctgccgtatggtggtgcatatctttagttacagcacgggggcttgagggtgaggcaaaggcagatggagctctataggttcaaggccagcctggtctacataaggagatcctggccagtcttaaacccaaaacccacaaaactgaaaaaacacctccagtcatcagtgtaacagtgatattcagaattaaaaatagcagttgtaggggctggtgagatggctcagtgggtaagagcacccgactgctcttccaaaggtccggagttcaaaccccagcaaccacatggtggctcacaaccatccgtaacaagatctgactccctcttctggagtgtctgaagacagctacagtgtacttacttacatataataaataaataaaaaatagcagttgtaaagcatcctgcatgggatagagttatcctgtctcaaaacaggaaattgttcgtgcgtgtctgtgtgagtatatcctgcttgggtagcggtatcctcagagggcagaaaacacttgggattccttggagcctgaggtaaggacagttgtgagctggccattgttggtgttgggaaccaaacttcagtcctctaaaagagaatgttctttctgaactgctgagccatcttccctgtctgtgttaaaatgattttgttacttttttttttttttaattgaaacaagttctgactatgtatctctgcttagaatgtacccaggctggcctcaaactcaaggatccattgattctgaagtgctgagattaaatgggtatactaccataccaggctcaattcccccacctcccttttttttttgtttttgtttgttttttttgtttgttttgtttttgtttgttcttttgagacagggtttctctgtagccctgactgtcctggaactcattctgtagaccaggctggcctcaaactcagagatctgtttgcctccaaaatactggccttaaaaaatgtgccccaccatgcctaacttcagaacaatttctttttctttttttttgagacagggtttctctgtat

SEQ ID NO: 34143 - DNA, 1159 bp, Mus musculus
cccactggggatactgactatcctgtgtgtgctttctcagcagacagcctcagaaccctccagccaccatcgggatcaggactctgaaggcagctttcaaagctctgtctactgcacaagactcagaggccgcttttgcaaaactggaccagaaagatctggtacttgctaatctggcatccccatcatcaccagcccacaaacacaagagacccaggaaagatgaacatgaaagcgcagctcctgctgagggtgagggaggctcagaccggcagcccaggaacagtcccatgacaataagcagattgctgttggaggaggacagccagagtactgagcccagcccaggcctcaactcctcccacaaggccatgtcagcatccaagcccagagctctcaaccaaccccacccgggggagaagaagcccaagtatgaagaccttctttgtaggagtttgggggctggttggcgggcctggttgggcctggttttacttccatgaatgacgtaatcttcagctaagctactctccaccaaggcttgctcagactgctaggatgagactggagcagggagtgacaatgtgacagtccctgccagctcctgaggctgctgtaggctgcagggcactgccctagggcatgagtaagcaggaaagggttctgagccgtctgcctgttggtctgagtgcctcaaggacgaaatatcagccttacttgtacaatttgtctgaagttgggcctcattatacttgatatttatgaaagaccagtgagcacttagctttatacctttgagcatttgagacccagcaaattcagcaaagatctcccaatcttccatgttctgctagctgctgtaggacagtggttagaatatgttaattaagtttatcaccatcatgactcccagcctgggttttgagtcccgctgccctttgtaccctgtgtggaccccactccaggcactggtttgcttgtgctctcagaacatactgtttgtttctcccgctgtgcacctcctctcagtcccccatggcctgccacccccctcccccatttggtgcttccaaggggagaggaacctaggtgtgtgcacttctatactagcttacggagtctgcagtgctcgctctgtgccatggtggtagccctatcg

SEQ ID NO: 34144 - DNA, 1423 bp, Mus musculus
agaatcctgctcccgccgcatatttgcggcagagttgaggagttggtcacaccaaaacctgttttatcgtctctgttcataatgactcaaaaaccgtgacctaccaaatgttcttgagtggataaatgaataaactgtaatatatcccaaacaatacagtagtgctccgcagcaagaaaatggaaccctggcagcacaggactcaatgatctcgcattgtgcggcctgaaagaagcatccagaacacagctgatgctagggcgccgcctgctggcgaatgtctgtgacctcagctctgggaggctgaggcaggagaatttgagttttatgtgatgataaaacctaaaaaagcgcttcttcttcttcggaaaacaccaaatggcggatgacgccggtgtagcgggagggcccggaggacccgggggcccaggattaggaggccgcagcggcttccgcacaggattcggcagcggtcttaggggccgcggtcgtggccgaggccgtggccgtggtcgaggctgcggggctcgtggaggtaaagctgaagacaaggagtggatccccgtcaccaagctgggctgcctggttaaggacatgaagatcaagtccttggaggagatctacctgttctccttgcccattaaggagtctgagatcattgacttcttcctgggtgcgtccctaaaggatgaggttctgaaaatcatgccagtgcagaagcagactcgggctggccagcggaccaggttcaaggctttcgtcgctattggggactacaatggtcacgttggtcttggtgttaagtgctccaaggaggttgccactgccatccgaggggtcatcatcttggccaagctttccatcgtccctgtgcggagaggctactgggggaacaagattggcaagccccacacttttccatgcaaggtgacaggccgctgtggctctgtgctggtgcgtctcatccctgcccccagaggcactggcattgtctctgctcctgtgcccaagaagctcctgatgatggccggtatagatgactgctacacttcagccagaggctgcactgccaccctgggcaactttgctaaggccacctttgatgccatctccaagacttacagctacctgacccctgacctctggaaagagactgtcttcaccaagtttccttatcaggaattcactgatcatcttgtggaaacccacaccagagtctctgttcagagaacccaggctccagctgtggctaccacataagggtttttatacaagaaaaataaaagaattaagtctgctttaaaaaaaaaaaaaaactaaaaaagcaagaaatagtgccacttatacactaaaagacacaaaatagcaaaaagaagggtttgggaagtgagcattgaggatattagttttgtattcttgcaga

SEQ ID NO: 34145 - DNA, 1195 bp, Mus musculus
gatacataaagaacttgtatgcatgtatgtttgtatatatgtccaaacctgtgcacctccctcttccctgagacaatagtctcattctgtagcccatgcactgaggttacagtgtgagctatcacactgagctaaagtgcttttgttggttgtcttggttggttggttagttgttgctgtggttgtttgaaactattgaggccctggcctggaacttactagatagaccttgaacccagagatccacctgctatgattcaaggctaccatgtttggctaataataattcatttagggattggtcaagtttttaagtttagggtgtgtgtgtgtgtgtgtgtgtgtgtgcgcgcgcgattgtacattcatgttttgattacacatatgtctatgtgagggtatcagatcccctggaactggagttacagatggttgtgtgctgccatgtgggtgctgggaactgaatccaggtcctctggaagagtaactagtactttaacccttcagccctgagattatttcatttttatgtgtatcagtgttttgccttatgagccgtgtgcatgcctggtttccaccaaggtgagaagatcattagagcctctggacctggagttatagctgtgagctacccaccatgtgggtgctgtgaattgaacctgagttctctgcaaaatcagcacgtgttcttaaccactgagctatcttctagccctaggatttagcaacattttaaacagtgaaactttattatcttgttttgctataggatattctatagcctatgctctttgttgagctgataagtagctgagagatggcccttgaaccaccagtcctcctccttccacttcccatacggctaagccatgttttgttgttttactgtgggggctggaaaggaggctcggtgcttatgagcagttgctgctctagcagaggttctgagttcagctgccgctatagctccagtcatagatgatccaacaacatccttttttttggtctccacagggcacatacatatatgtaggaaaacacacacacacagagacacaattaaaagttaaaacatctttaattaaaaatctaagccagggggctggtgaaatggcttagtggttaagagcactgattgctcttctgaaggtcctgagttcaaatcccagcaaccacatggtggctcacaaccgta

SEQ ID NO: 34146 - DNA, 1158 bp, Mus musculus
tattccagtctttggaatgctgagtgactggtgctttgaaacagttaaaggtgaaatagatgcctaggaatagcatggaggggctggcagtaattactgtcatattagaagacagtagctttgcctgaaggaaggtagcgaatgcaggctctatgtagtgtcatcagtccccagggatcccctgaaatcttgaatttgactcatcacttatcattcttgtttttccaaggatgataaaaacaacaacaaagcaaaaaccaaacactccctacacccacagtccacttgttacctaggtggtaggtagacatatatacagaaggcattctgtgttccctcagtgttcatgtgggttgacctagagaagacttgaaataaggtgagaaaaaggtcagaccctggccctatgcaggcaaggtggcagggtgactcaatcagtgttttttttttttttttttcttcatttgtttattcattttgtgtgtggtcataggcctgtgtgcctacttgtgtgcatttacgcacctatgagaacagagtgagtgctcccaatctccctatgcctaaggtatcatgctctgatctcagtcacacagaagacaactgtggtcctgttcctaagagtttatagtctaatgggaaagaaagacattcaatcaaaaccacaattgtaggttctagatggctcagctggtagagcatttgttcaagtctgactccctgggacctgcataagggggaaggtgaacctcctccacagtgttgttcttggcatgtgctttggcatgtgtgaggtctggtgaccttgccagcttacaccctttggcatcaggctagtttcctaggcaacacccctgtcttcccaggttcactcttatccccaagccaaaggcatcatttcctcctgtgacccactagttctgttatctttctctgccttgccatactttgatctttgtatttggctttagtgatagtctgtgtttggctagagattgctctttatcgtccagcctagttctgcagcttcctcaagctaatgactctcattccattttccaagtcaggtgggcttcaggagagctccattgtcacatttttactgcatcggtatggaatttccatccacagagaacttgaatcattttttcccagcta

SEQ ID NO: 34147 - DNA, 1109 bp, Mus musculus
ttcaattcaagaggctgcttgcttggcagcgtgtgccttctgttgccctgaaatccagggtgtgtatataattaactcttctatactgctcgctcgctctgttaagttactaaggagatggaatgactctttaaacgtttgtgaccactgacggttggttttccctctccctcctcttacctcactcagtcttgaatcctcttgtgacattaaggtaaaatttgagctaatatgatcttaattgaacatttctagagaacgccaccctgagtccaagctttcacaggcgaccttgaacctagtggccctcaccagtttcccaaggcgatcatgaacgcactcatatgttaaagcaagagaaagacactggtcagttacggtctctagaactctatcagttgtttcttgttggttttcttattgttgatacaggaggcacaacgtttgtgcggaatccactgcagtgtttcagaaattctgttccttgcaccagtgttcttttcctgggcttgcactaattctgtttagaatctctggagtcgagctagctttgcagtttgtttgtttttttttttagataatttatttaattttattttctgtacattggtgtgaacgggagctacagacagttgagggctgccatgaaggtgcagagaaaggaaccctggtcctctggaagagtagccagtgctcttaaccagtgagccacttgttcagcctcctgggtttgcactttaaagagcacaggtgataggaaggaaggcaggcagcacaccctgtgctgaccgacgtgcctgtctgcctgccactgcagataaaacccggggacactgaatttgctcctgtgcaagcattgctgccttctgtaagccaagcaattagagactgatcagctgaaataaaatgattggccctggattttccccccctgcaagaagtatagaaaagcctcctcggagcaccaagtagcatggtgacttagatgtggaaatgtagtatagccccatccaggttagggagggacggagagctgtgctttcaagcctgtttttctccagttacttgttccccagggacccgtctccattaggatccttctggctgtt

SEQ ID NO: 34148 - DNA, 1115 bp, Mus musculus
ttcatttttgtgggatagagttctcatcttctccttcccttcccttctctgcaccacttctccccctcaggcagcctctgccttcttcccagagaaagtcagtgttccagacctgggtctgctgtgtctgctgaggatgacctcgaacttcagccctcctgccttcccttctggagctctgggttataggcataggccaccgtgcccagtcttcatttccctcttcttttagaaacagcttttcatgttccagctaataagtggtaatggtcaccattgtttcacagtagactgataatatcccagttgatggcagcacatagtacaatataaaatttttgaagatttttaatttgtcgatctgacaagtttatttttctctgtagctttggctggcttagaactaagatcagccagcctctgcctcccaagtgctgaggtagaaggtgtgccatgacacctgctttagtcggtaataactaattagaattaaaaataattctactctttgggatatgctgatgccatatggtcagactgttgtcttcaaaaataaaaaaataataaaaagagacttggtaggtggggtaagagagtcagtacttgaagaccaccttagctataccatggtctacatgagaacctgcttcagaaaaataaaaaacagttctttgctgtacctgtcttaactacctaacttcctggagtttgcaatggtcaatagtaactgccgctgatcaagacttctctctggtaatgtgattttccagacagctatggtctttgggaattaagcataaaatgtcctggccagtctctcttgaaaaacaaaatgctgttctctgagcagtgtcaggcattaatgtctcaccaagttctagaaacaaagtgagcgtgagaagccgggcagtgctctcccacacttcccagctggaattgctcgctcacatgtttcggtccaaatagggatgctcacctcgggagggagggcttttcctcgagacacaatctcatgcagccaggctggcctcaagctcaccacttcatgaatgctgaccttttggttctcctttcaccacctccgaagctctggggtcacttgtgtgggcagccat

SEQ ID NO: 34149 - DNA, 4146 bp, Mus musculus
ttccctccttggaacctgccagttgttttctttccccttggagccaagatggttgaccagatatctatcctccttcagtgtacgaccagagtctttcatccgccagagcctgacgcccaaagcacctgctcactctgtgtccttgccagggtttctctcattggttcccactccttcctttcatttcaaaagttgatgccaatgacttagagttcctatgttgtagtgacatggcctttggggacagtacatgatttctcataatttgaattcatagtagatatagttaagggaacagcagtcaggttatgaatcttttcccatttttctttttaagtaaatttatttttttaattctgatttaattttgtcattcatcataagggatttaattcatgaagttgtgtgtatcttatttcaaacacagctgccagatgatcttatttatgattgttagaagtaaggggccagcaagatggctcagtggataaaagcaattgccgcgaagcctgatgacctgtgtctgagtcactgcactcacaggatagaaagaaccgattcccaaaagttgtcctctgacttccacatgtgtgctatggtctttgcacacacacgcacacacacacaccccagatgttatttttaaaaatgaagtacagcaacagtggctatctacccctgccccctccagacagtgtagctgatggctcctcctgtctctaagtcccgcctcttttcccaaaatacttcacaaagtgtgcatccctttgatttcttaggaatctaagagctgaagaaggactgacttcagagtaatctcttttacaaagagaaccaaacactacttacaggagagcagtttaaaaagggaccaacatgcgctctctggtctgacactggtttctaaccatcttccaccctggctgtctttaccagtgaaagatgtgtgtgtgtgcttaccttctatacacttctctccggtccgtggggcttcacaaaggcctttctgctgtttttctttaccgattagcaaatttctgattccttgtcttaaagtacaagactcaagtttgaacttatgtttatctcagtaaaataacttagatgtaaatgtcattgtccggcatgccccttcagattgggagaccatgccaagagacttcggttttcatctgggttttacctccatggcgccaacttttggttttgtcctactttctattgagggtaatgataaatctggaagctttctttcctcttggatatgaatttcactggaaagtaggcagtcatttaaaattccttctctcgttggtccaggcattttcctggcacctctgactgtattctctctccctgtggcagtgcctgacagtacccagctgtttcttagtttctatgatctttcttcacatctttgttcattaccagtcagcttctgggctggtgtcacatccagcaggaaaccatgggattccagcaggaccagagatgttgggaagtgtcctcctgcctcccttccagcttgccaggggcttgacaggacaggaaactgcacagtaaaccagtctgcccgtgtaaactattttttaaaaagttcagtccaggactcgtatcctgtgatttagcagttgaatgaattcagaattcatcaaaataacattaaccttttccttacacacttgaatatgatattttagagtgatttctaggtgacttttatgtcagagatgaagacttaatcaaccattcgtctttagaaacgtctgtaatattgtgtcatagattgacagcgtaattagtctgtaacaaaagcggcatgcggcgcgcatctccaggtaaaggcagggaaggttgtgtgcagggagcccgggacctgcatgctgggatagcgaagtcacatggagtatgctgggtagaagggaagaacaaaggaacattgagtgcaggacaggagcgtcccagctaactccaaacttgatgggacacctagtgaaaaacatctggcttgtaggaaatgttaaagaactgcattttcggctgggcatggtggtgcacaccattaatcccgatgtaggagagacagaggctgcagaatctctgagttgaggccagtctggtccacatagtaagttccaggacagtcaggctacatagagagaccatgtcacaaccactccaccaaataaaagaactgtattcttaagtagaatcggtgttttgatatttctacagtaaacatcaataccaaaagccgttttttctatttcacatttgtgtctttcccagcttcttatagctgagctttttctcccgagagccagaaggaaaagattttcatacttttgtctttgcgatccatgaaatccgtcaatacccagggcttcttttgaactactgataatgtaatgtcattttatattatataaaaaggatgcttttttttttttaaatctttaatcccagcacttgggaggcagaagcagacagttctcttgggttgtaggtcagcctggtctacagagcaagctccaagccagccaaagctacataatgagattctgttcaggtctacttgttgtaatcctgttgcctacataaacagctaggggaaaggtaggttttaggtgatcgtttgtcaaggctttccgtaaacggcaaagcaacacaacatgtgcacaggtgtacttttaaaagtctaaacttgtcaaagaagcctggacatttgagggtcatgaaaaaacattaagaccaagaggaggcagttcctatccactgacagcacctcctgacctgtgggcgtgggcaggtttgattgtttattcttgaggtgaccagctgctgccacatatacaggtaatggcaggtgaacatgagagatttgtgctacccagataaaatgtgttaacacccattctctaaaagtttctacccagccctgggagctggttttcatcactgagtgatgtacagaaagcaatagcacacagtgtatggacttacttaagcagagacaagtctgtccagagctgtcacttgagctggctggctcttccagcagttgccatcggggctcacggtgtagggtttgtgctcattaagtgctgatggcaagcagtggaaagtgatttacaagcaaggtgtgtcatcacatgcagcactcatgcttctgtctccagtgatgcccgtccggctgaagtcgacctgagatgactgaagcaaggatcgtaaatgttcattgcctcctaccccaagggaagtggactcagacatgtcttgtctcaacgagaaaccgaagggttgaagctgtgagattcagttgccaaatatcccaaaagtaacggggagctccgtcacatttggccagctttgggatttgtgggagtggtctaggagggaggctgaagaagcaggggtgtgccagtcacctgccttacacccagtgtcctactcatgaatggcaggggccactccttgcccacgcctgcctcgtctaatcagctgcttgggcagacgctcctttcggttatttggcttgtcttttcctgcaccctcaactgagtggctaatactacattccttttgtgaattcaacgatggggtttgtttacctatttggtttcagcttattttgaacaaagatctttgtctctttctactggaatgtgcacacagtgaatgtttgttagaactacacaataaagatactgttttccttttcttgtcctgactacggttgctttttttttttttttttttttataagacttttgtttttaaggaaagggtactgtgctgcttaggtgttgtggatgaagacagttggggtgcacaatgttcttcggtgcctctgctaacatttcgtataacctaagatagggtgcgcggtggctccctagggttctttgttggaagtggatttctcatttgatagttgagagatatagccatcctggtttggccctgttaggggatatgaagtgggaagcagaaaacagcttggagttctctttctaccagtaaagaaaagccaacatgaggtaatgttttattgtccgcagtgctgggcttcagttgattgttttccttggaactagctaaactgttggggaaatttatacacagaggttgaggttctagtgactg

SEQ ID NO: 34150 - DNA, 1148 bp, Mus musculus
aaaatctatcaattataacaaaagtaaaataacgctatttgggcattttttcaaaaattatatttctaggctttatattgcttaaagcatttatattctaaaacttaaccaaattccaattattcttttggggaaagcaatcagttcacaaatcacattttcattgggactgctagccagcctaggtgaaaacacgtctagtgtacttactcttggattatacactgcagatgcttcttcagctccctcctcttcctccatgggcggtgcttgcagctcctttaccacctcttccagccctaccatttattctacctcagtcaccgacagcaaggctatgcaagtggagagctgctcctcagccgtgggggtaagtaacagaggggtaagtgaaaagcagttaaccggtaacacagttcagcagcatccatcaaccccgaagaggcacacagttttgtacatctcaccaccacctgaggacttgctggataacagtcggatgtcctgccaggatgaggggtgtggattggaatctgagcagagctgcagtatgtggatggaggattccccctccaacttcagtaacatgagcaccagttcctacaatgataacactgaggtacctcgtaaatcacgaaaacgaaatccaaagcagaggccgggggtcaaacgacgagattgtgaagaatctaatatggatatatttgatgccgacagtgccaaagcacctcactatgtgctttctcagcttaccacggacaacaaaggcaactcaaaagctggaaatgggttggtatccacattttttaaagttctatcaccattatgcaaaacaaaaaagtaaatcattcccaaattttcttaattctcagctcaagtttgcatataaagtaaaaaaatgctaattttatccttgaagtacatgatattttaacttaaaataatcaaattttactagaaaaataatataaaatagcagtagattatagcaaaggaattttatgcatatggttaggcatagaggaaaagataatctgttttgaaataacttaaacttcaaatgaacttatattttaaaagtatttttaaaatatctttacctgcagaagtaaggagcaatataataatgctatagctaaaacacctta

SEQ ID NO: 34151 - DNA, 1227 bp, Mus musculus
tccccacgctgcagtgactgtttacatgtcagtcagctcagtgctttacagttgaagtggtcacttacatgatggttcccacagccttgggctccacagggtcatagcattgatttaaaaggaagagttaactgtgttgcatctacagagagcaaaattacacactccagaacttgcatttgtagcattagttgtagagttttgggtgtccttaccacccgtgggatgcctgcttctcactaccacctacatctggacacgtgcttatgtctcatttatctttggcatgtgggaagtgtcaatgcagcgttagcccatcatgtatgcagcttctatatgttgacatgctttggtttcctgttcaattcttttactttctaagcttttaaaaattagccagttcatggttgttgcctttttccttacttttcctttcagtttttctccccctatcctccacatgtgttgaactgtgtggagcttggtgttggtttagtttatatggccagatcctgctttgggactcttcctttgttatttgactgtggttcttgtcatctgtttcttctctttgtccttctccctctgccctggcccttcctttccctctctgagaggcattggattacgttttcagtagtacaggcttcttgccaatatgaagggaactttccagaaagagacctactctggtcatttaattttgaaaacagttttcaatcgttcaagttttggatggtttatatctaatgtgtgtttcatttttttggaaagctatattttatatttaggaaatggtatactattttgctatttgtactaagtgagtacattggcataaatatagaaatttatatatatatatatatatacatatataaactattcttttttgccacacatttttgtggtaaatttgtgagtttgtctgatgttctaccacaacgtggcgtctgataacagtgaggggggtttgttatgtctttcttgagtatttaagcaccttttgaagcaaatggcctgtttatctgtagccattccatcaggcagttcctcgatgttattagggagctgaagggcgactgactgtgtgtttgctggatcttcactcagtgagatgttaaagcgcaaggaaattcatttgaggcagtgtgtcaaatggtgtttgacaagaatgagccactctgtctttgttcactatatatttaatattttattattgttgtt

SEQ ID NO: 34152 - DNA, 1207 bp, Mus musculus
ttatttataaagacactaaaaaaaaaccatgtttgtaattttaataacatttccccatcttttaatatccagagctactttataaattctctaaaccaaaagtatttcctcaagatctcctttctccccccagttcctatagggaaaaatcacccaacatagttcgggttacaagaagggtcagccacacaattcagtgcttcagttttaaaagtaaaacagacagacactagagtgttgtccagagcatcatagaaagcagacctagcagatttaggaaaaacagaagtcaaagtttaataccacatttacttctgagttttctgaattactttgtgagatcatgtagaagactcaggaaatctgtttcttcaccaagatcaagttagaatgtttgacactgccatgctggggatgacgtggcagcaggaagcctggctcgtgtggtggcttctggtcgttctggactagcagcttatccttataaaatgctgattggcaatgccaagtcaccgggaccaatttctgttttataatgtttaagtttagaacagaacatcacctgaactgtagtgctttgagaggatggaggtggaaacccccattttcagtctcatcacttctgtggttatttatacaagggctgtgctgtgctaccatattcctgctcgaatatgatggagtttgtttattttctcgcattgttaaatgttccttgcccctaaaggtccatgttaagaacaatgttctgaatatatgatttggttacaaaaagtatgtcttcttattgaagagttagctcagtggttgatatttgtgctaagatgcagcttcccagttactgttacaagttacagctgccaatgggaagactcaataagccagcaaaggccttgaaaatcatgatttattaaatttatatctggcagaaggacctaaataaactgtgaactacattgtattcctttgttacatttggctcttgctttcagcaattcacagaaatgcttggagctctctctctctctctctctctctctctctctctctctctctctctctctctctctgtctctcccctcccttcctctctccctttccctctccctctctgtccccctccctctctccctccctctacatcctttccttcctctctccctttccctctccctttccctctctctctccctctctccctccctct

SEQ ID NO: 34153 - DNA, 4360 bp, Mus musculus
agaaattgtgcatctgtcccttcagaattaaagggacaattccttttgaccttttgagtgtttgtttttattttttcagcaaggttgcagtatcctgcccaagtcctgggcctgctggtatgaagcaccttaccgggaccccttttttaaaccagtataaatgcttgttttgggaaaatgaaatctgtcagcaaataagaaccaaaactgaataattctttttttttaattattattatttttgtattttttctgtacattgacactgtcttcagacaccagaggagggcattggatcccattacaaatggttttgagccagcaagtggttgctgggaattgaactcaggacctctgggaaagcaatcagttctcttaaccactgtgccatctcttcggctcctgaataattcttaaattcagcagagttatacttactcacaggggttagcctgagaatttttcattttcctagtaaaattttttgttatccctatttcctgattgttaattagttgaaagttatgggagaacttgtggctttactttgcatctctagcacaggctctatctctaaccaaaatgaccactttatatctgggtcctttgggttacctggaggggctcagtgaaagagaaaaactaattcaatagacatacgagaaaaataacccaggccttgaggagtggctcagaggtagagagtttatgtagcatgcgcaaggccctgaatttggtccccagcaccaccaaaagggagagagagatcttgggtacacgtgctagcaagaggattagcactcacccattcatcacacatactgagagctttcccattctgcctacttttgtcactagagctaaactgaaggtgacattcatgatgcaggagattgactctcttcagtatatgtaaattatcccaataccctaattactttctaactgtctgtctattttcatgccatgctaagcctcatattaataaagttctgtttttactgctcttgctcttcaggcaattttttacattaatattttatatgtagattaaatgttatggaaaagtgcctttttaccatgccagtgcccccttctttagtatatgtgctgccaaagcaagcaccgtgcccccttcttaaaaacttcaccttccactattgccaaaattctgtgaacaactggttttatcaggtcccaacttgtactttttccatgtgaccattattttctccatttcttggtcaccataggagataaccttgtcagttcctttgacttaaaaataatagagaaagtgctttggcagaattgcttgggaaagtaagtgcacactgttcaggcttgtgtgaatctaatttcctcatcccaacaaattatagatggctatcacctgaataagaacaaaaataaacatttggctgtctgtgagacttcatgcacaaaaatgtgtgttaaatgttataaaggcactactcaacagcctcttctcagatcctaattagctgggggtgggggggaacagtcactaaaacttaggttttgtaaggcctggaggtaacattgggtttttttccttaattaaatgtgacaaagtagtttatttcttatctatctgaacttcagttaattgactttagaaaacttaatgtcagaaaaaacttagaagtcatttgagtggggggggggggagagctaaagtaatgttttagtctcagatacagttgggttgagtgtcctggttttgtccattttgtttctgatccaactctttatggtggtgcttgaagaaagagacatcagcatcaaattcaggacagtagtaacttaaactccacaacaaaggtgtgttccccatgcaagtatgattgtaactgttggtggactgaagatagcatagttatgcagtatttgtaatactctattgtgcactttaatcattccaaaaaaagccaagaatacatcttaactattcagaatactgcatatttattttggatatatggcttggtgtgttaggttcctgcttaattaaagtaacttacaataagtttgaaattactattttctaaaggacttaagaccttgaaatgtagctgtagggaaatgactatattttgcagaccattttagaaatagtaaaatttgactggctgatgagtatgtcggagagctacttagaaccattccccttccttcgtgtcccttatataagaatgctatagtgtatagtttctacccctgtggtttatgcaaaccagtatggtcctctgcccagcagctagctgatgcagtatgagcagggaactagttaaaggtgcacattcttgggcagtagcccaggcatactgaattagatctgaagtggggcccagcagtctgtctaacccaagtccccagtgagtccagtgcatccttagtttcagagccactctaacggatgagttctatctagtgaaagccagagaatttcttcccacttttaagagataattatttcttctttgtgtatattcagccttacctggttatctgtgatcatttctcaacaataataatttattctcagtactgcctaagaaatgcatgtgttttatgtatatacagtgtagttattgataattcatttaacttagtttggcatttccctaccactgactaaaaagtttacattaactgactgatttcaatatataggtgcaatgttctgtatttctttaattgttgtgacacttacttagctaaaataattgatgggtgctacagtctcctgtttatgcataacatgggtacattgtgggcagtgtaatacaagctttctctttgttgcctcttaatttaccagcaggccatggttttgctcttggctagaccagctctcagaacagaattgccattccataccatttttcttgtatctgagatctcagatagatggctagccaggccaacatagcaccttatttaatttcttctcttaatagattcttttcaagtagcttacttggcatttgaacagtgcagtcaagtgatggttctccttggaactcacacttcaggtgaagtacttaacaaaatgataagacagtgcattttataatttgggtatcccctttctcagttgtgtgcatcttaataaatacaagctaagcaggtttatttttttcctttagaattcagcacttccatcatccttccactgtttacaaatcgctgatgagttaactcatgatagagagattcacttttcagaataaaactaactgaatacttgctttctgagaatcactgcttctgtaccacactagcagtgctaagtggcttactctacaaactggtgctggaaagtaagtaggcaagctgttgggatgctgtagagaccccctcccttccccttctgtcactggatacagagcattctacacaatttatttaaccaaggtttgtaacacctcctttaaagatcctgcattcaacccatgtcacccctacctgctctctcacattggtccttccctttcccaggaacccaccccagcagtaataatatgcatggtttgtaggggtggcctattgttactattttagctagtgagcctcaggaaagcttacactcacacataaccccagacgcttgcaagtgagttgagaatcaaacttctgtgacctggctggagttagagttcagcgacagagcctttgtacacacaaggcccaaggtaggtgtaatccctggtaccaaagagagacagacagacagacagagctgtcctgtatcgaagtgatcacaatttcactcattagagaccttctgcagtgcaattgaactaaccccttctctctaatgaatgtatctgttcaccttgttccctctaaggataagctccaagtgattgctgctttcctggcaacttgactgagtttcactctcttcttttacttcctgttttaatgagtaacttggaatatttcattaacatgttctcaagtgatttagctgccattctgccattttgagttttgtttaattttatctgcttgagcacactgatcaaccactgacctgccttcttgcattgtcctgcagtgacgtaagagtgacattgtgtatacggcttcatagttggaatttcagagcactgacaccagatattctcagtttgttctctgggggaatttcatttgcatctatgtttttagctatctgtgataacttgttaaatattaaaaagatattttgcttctattggaacatttgtatactcgcaattatatttctgtaaacagctgcagtcaaaaataaaacattgaaagttttcattttgcagtgggtggcaatcttttttcctcagactttgtg

SEQ ID NO: 34154 - DNA, 1177 bp, Mus musculus
tcatctgcctgctagttgtctctgagtaactattgaaagatcttaagatggaggtccagttcctgactggaccaaactgaggagagctagtgttcattgtaggtagatacttacctgactggaagctatgagtatacccagactcagggcagctaggtctggggtgtgtgcaggatgtttcttgttttgttcatcctctgtgtagtagcttgaccccagttttttctatgccccatcagtagaacaagggaacacaaatcaataatgtaaagatgttgtagctaatgtctcatataaaatgttttgagagactatgggcttcccacctgcacaacatgcagagcattgccattcagcacacccaccccactctgctttttatttcacaagacattagaaagggcagggaagccctgccgcgaagccagggtgggtgaatcggaggccgccgatttaaagaatcctaacttgtgcatttgactcaatctgtccatgttgcattttgtatccaacagtggagaacacacaactgaccctgaacctgcagacagagaacaaaggcagtgttgtctcgggaggagagctgacaattttcctggatgggccaactgttgatctgggaagtgtgcctaatggcagtgcagtgacagacggtgagttgccgccctgctccccaggctgtgccaggataggctgtgccaggatagggcgggtgggcagccatgctaggggcttggttctctgctaggcatcttggttagagactctttagcggccctgccttagtgttagccctgcctcctcttagtctcccagatgaaaacatgacatggttctcaaggaccaagataaatgtcacagctctgtgtgtgattgtttgaactgaagcagagaaaagcatctcttcacccaatatgggccttggaaattaacccctctaacaaacgtgcttctagttaaatcccctggggagcttgcgtgtactcttttgagatggagttggctgggtagggattgtggaaacaagaaccagcaaagcaggacagtgcctcctgctctgtcccacctgagggttgggagtcttgctagtttgttccattcgatctagtctgaaattagtcacttctggatctagcaggaaattatttcatggagtctaaggtctgaactgggttgc

SEQ ID NO: 34155 - DNA, 1170 bp, Mus musculus
ggcatctccaggatgtactactttggggctagatctcaatgcagacagctgctcctggcagtaatttaagaggttctgtcaactcccctagagtatcagtgagctcctggtacattccagagccaagaggctccctctcctagcaggaacattggttataaaagcctatggattcttgactttagctaggaaatcctcatgcacacagatgacttggctggctctctggcccccagtgcaaggttactggcacctcagagattagcaggtcaagcatgagagcagaacttgggatcccgacgtgaacggggagagcgcatcaagctaagcggagctaagtctgcgctccgcctacaacgctggagcctggactctgcattcccgctcctgcctacagcactggagcctggagtctggacctgggtggttttagctgtgcacaggcggtcagtgcagctccatcaactgcacttccttctggagccatcttgctaaatgacagtcgccatggggagagctgtggaaactggaagatagtccacaggggtgaagtgtgtgagcatgtgaggtgagacaggcgaggaggcctgctctggtcagtgctgtttgtgtgacgtcagaaaagcagacatgctccgcgagtgagggagaacagttttggctgggcgtggcagcacttgcctgtacttgctgcacagtgagactggggtaggaagggcgaatgcaagagttggaagatgaccctgtgacgagaacacagtgtctggggttctgggttgaggtctcagggctgtagcaggggcttcttcctccagaatggagtggagtggaaaagcaaggccagaagagagaccttgcaatgctgagcctgctggtcttcatttgccgtgaggtctcaggcgctgatatactcctccaaggagcccccatggctgtccctaactacggtttcagggggacacatcctggacagccttaacatgtgacagatgtgacaaatgtttacaagtctgttggcccctaaactctggtgccgctatgttcacaaacggctcccattccacgacaaagctgttctttgaaggctgccggtgggtacgtaggcctccacactgtagctacaagcaaagcaaaatggacggcggctcagaccactgcacagatcttcct

SEQ ID NO: 34156 - DNA, 1198 bp, Mus musculus
tctaatgctgatgtataacccccaccccactcaggttctttaggcctcttggtctagtccattaaaccttacctgggtgtctgaggtccagcagttaaaaggcatgatgtcccgggctccatctttggttttaggctgctgactgactggcgattcacccgaggcgtggaagagcagaccaaagctttcctggatggcttcaatgaggttgcccctctggagtggttgagatattttgatgagaaagagctggaggtgggtgccaaagattgggagtccttgacctcagtgcttctagggtgccccagctccacgatacatacctacagaactcgcacaccaagtcccacattttggcaagctaaatgcagcaggatgggaactgttacctgggtcctcagcccaaatttccctatgcttagaggtcagggcccttaaatgtcctggcacaatagcaggttgagaaagtttgggagtctgatggtgagagaggcagctcttcatgggcacaaggcggtgccgtggggagggcgtgatgtgggcttgctgacgcgtcccttcctgcagctcatgctctgcggcatgcaggagatagacatgagcgactggcagaagaacgccatctatcggcactacaccaagagcagcaagcagatccagtggttctggcaggtgcgtctggggtcccagctcccctgctaggcttggggcaagagtcttgcaggtatggttatcagttacccacaggacatgagacctatctagaccccaaactcaaggcccttcatctttgacacattcctctcctccccagcttggagaagtctggaataaacctctggacaaaatagaggtggttgtgacgatattgtcaccagcttgtgtgacagaggttgtcagtagttggtctggacctgattgctgggagccaaggggtcctgtgtccaggaagttcagctgcagttggctgtctggtctcctccagtcagatggggtgagaaaaaggtctaggaaaatgcagtgagctcaccatccttttgaatgacctggttcctttttttacagctgttaacaaggagagcatgcatggaaaacagctacagatatcctgtggggcgtgtgtgtgtgtgtatgtgtgtgtgtgtgtgtaggtaaaagttttgtaggtaaaacttttgagaagaagctgggcagtggt

SEQ ID NO: 34157 - DNA, 2300 bp, Mus musculus
gggggatttgctgagctcatcggtgcgtttccttctgcccttctggggccctccctgggggagggacagcatggggcaagtgcagctggagctgggagggaaagagctgtggcacttggttactttgggaaagaccatctgtgttgacacaaagtacacgttgccttgaatgacagggagcaatggcccgcagaagttctgcatcgacagagttggcaaggaaacctggctgcccaggagccatacgtggtgagtttgccgggagctggcaggctggagctgtaggctggtgggggcagggcaccagagccctggcctcctcccggggctactcctctctctctgtcacagcttcaaccgtctggacctgcctccctataagagctacgagcagctgaaagagaagctgctgtacgccatcgaggagactgaggggttcggacaggagtagctgaggctgctgtctcacaccctctagcacatgtagtcctgagtccttcctgccggagatgccaccggttgcacagccctcaagaggcccctttggatagtggccctgcacgagactgtgccttgatcatttcggtgactgaagagtctgaccccagaggccttggggaccctttcttctctctgatgatggcagtctggaataaagcactgtcacctttgactctattacctgttgcaaagccagagggctgcccttctctgcaaaactgccccttccactaggactgagtctgggtgtgtgtgagagtgtgagggaacatgccctgccttagagggctgccactgaagctgggcctcatatgttccatgaggagctaggcctcgtggaatggctggctgactaaacccagaaagccaaggctctgccagtggaagagacttcacttttgtagaccttccctgaagtccatggaacagacctaagggaacaactgagcatcaaaaccggctttgctttacttcctggcaggctgcagccaaggggactgagcagcaggcacccaatgccaccagctcgtctcttcctagcaagcaaagggttaaagaagccaccacctgggtgtcagtgggaaggagacagcagagctcaggctttgccctttgacagaaacctaaagacacatccacatccatgcatagggctgttgcttgttgtgttgtaggcatgctcttctcaccttctgtcaaggacctggtgccctgggtggtggagggctcagccctcttgattcagtagcttcccaagcagctgctcctctcaggagcctgcttaacacttgcgccagctcagaggcctgcctctatggtccagtgcatccccgctgtgctcagatgctgacgagactcctttgctagactcccctagttagggcctctgcagcttatggtggcttaaaatggagagagcatcttgcctggccgagtgtttgtgctatgtgagcatgaggctttatttgactgtggaagaagacactaagagccagcagaagggcctgagctgcctcattagcctggcttcatttggggagctcctgacagtgtcccgagtaggtgcccagcccctcttgggtaccagagtggttatagcgacacactcctcatccaggcttcccaagatacactagctctgggacaccccaggcatgctctcaaactagtcatggggccttctgaggacagttccatcctacctttgtccttccctggtacagcctgtgaccctggcacactgcacatgctgatctgagtggctctgctcactgtcgcacaccccttcctctcccatgcagtcacctcaggactcccgacatacatcacaaaggctgcttcatggctgggtgtgggaccagatgccagcaaggatggaagcatcaggctcacaggtgtgtgtgtgtgtgtgcacgcgttcgcacatgcgtgagtgtgtagcagaagtgtgtacagagaggcccgtgctagctagcaccaagttggttgacagattgttttgtgatgcttgccctgcctcggtattgccagtttcttgtgcaataaagaatcagcagccatgggtggtgtcagtgtagctgtttatacacattctgttgcaggaagagtcttccattcccacaggtcctctagaatctccagaccaagagaatctccacaacaatagtgctccagccttgctgcctttgcgagtttgagtaccagtaaccaaggtagcctgacttctggaatagatggtagtccttctagctgaggcgagtgacctctggtcacggtgtcatactctctctacaccggtt

SEQ ID NO: 34158 - DNA, 1452 bp, Mus musculus
tgcctttcttatgggctgttgcagagacatcaaggacactacagtggggactctctcccagcggatcacaaaccaggtccatggcttgaagggactgaactccaagctcctggatatcaggagctacctggagaaggtagccagcggcaagctgcccatcaaccaccagatcatataccagctgcaggacgtcttcaacctgctgccggacgccagcctgcaggagtttgtcaaggccttctacctgaagaccaatgaccagatggtggtggtgtacctggcctcgctgatccgctctgtggtcgccttgcataacctcatcaacaacaagattgccaaccgggatgccgagaagaaggagggacaggaaaaggaggagagcaagaaggagagaaaagacgacaaagagaaggagaagagcgacgcagcgaagaaagaagagaaaaaggagaaaaagtaaatggtgtagcttttttaattagtaaattaaaatcttataaccataactccgtgtgccactaggagggtcctttgtcacattcagtgcttgtggacaagcgctctgccctggtcacccttgctgtggcattgtggagatgagtggacaaaaggacggatctcagccctacgatacagcttcagttgcatgagttgggggtgtggtggctcaggtgtccgacttcatgaggagaacaacctagccttgggcactcttccttttatccttgaaagggattttttttcctatcttacaagatccatgggatctgttggttgtaattttcataattgctaaatggaattcatggatcccatacaatgccgcccaacacttgagcttggacccttgtgaacttttgagaccacaccaccttttggacctgtaactagcattcttagggcttggggtccaaggccatgtattgtttaccttcaaagatacaattaaatggcttggtttttatgtctgtgtcctagtggtttgtgttattttaagaagcaagggaaatgatcttcagttgttgctgcagggagtcctgagaacacggggcagtaggttaacagttagctaggaatgggatgctgagagatgggccagccccagtgagtgtggacaggaattggacataggctaatcacccagctctcaattcccttttgctttgttttgggcttttttggtttttgttttgttttgtttttgagacaaagtttcactgtgtagccctggttatcctcccaagttatcctccaccaccataactcagcttgtcaggtccttccttgaacacctgctacatccttgagaattctcaagtgtacccttgggttaaaatgttgacaaattttaaagtgctataacaaaaagtcaactaaatcttggtcaaatgaatgggattaagcctcaaagagatcagaaggataaatgacccatagattaccaaagggcca

SEQ ID NO: 34159 - DNA, 1128 bp, Mus musculus
aaactctcagctactggtgttaatatcatggaaagacctgtcacatcaggctttgttctgatacttttaggtctcaggtccgaaaagagggaacctgcaactaaaacacagaattcatcactgggccttacaaaggccccacccactcacttcctaaacttcacttttctggcccttatcatcctaatccacggccagctctagagtccgtcatctacttacctttctggttcctcacccactgctttattctcccatttgatgattgattgattgattgattgattgactgattgattgattttatgtatgtgagtacactgtcactgtcttcagtcacaccagaagagggcatcagattccattacagatggttgtgagccaccatgtggttgctgggaattgaactcaggacctctggaaagagcagtcagtgctcttatccactgagccatctctccagcctttattctcccatttgatgcctcttagatactgtgatctctgagaccttatttaggtgtttcaagacactgtaccataaaccacacacctggttctaattcaagccccaaggctaaggctctggacaagaagtgatcttttttttttaaatatgtatttcatgtatgtgtgtgtttgtatgtctctgtgtctgtatgtgagtatctgtgcatacgtgcaggtgcctatgtatattagaagggagtagagatcacctgaagctagagctacaggcagttttgatccactccatgtgggttctagaagccaaacttgagtctcctataagagcagtattatgcagctcttcaccactgagccatctctcaatctttactttactttaagacagggtcttactatgtagcacggacaggcatgaaacttgctgtgttgaccaggctgccctcaaacttgtaacagttctcttgtctacaccacctccaggctgggattataggtgtgtgccatcgcatttagcaaaaggtaatcttaaaatgtatgaaagggggctggacctgatggttcaatcgttaagagcactggcagttcttccagaggaccggggttcaattcccagcacccacagggcagctcacgactctctgtaactatagttctaag

SEQ ID NO: 34160 - DNA, 1194 bp, Mus musculus
tgtctaacatgcaactttaattcagaaagaaaaattggaatgactaaaaccaaaaaagccaaatttctccaaaattaaaaacaccaagccacaaacccaagagccatcaaagatgacaagcagaaacctcctcaaaaaacaatgaacaaaacactttcttgtccagctgttagaaaataacagtgtcttaaagagatattatctgtagagaaagtttaaaaaagatcagtgtaacaatttataatttaaaaccaaaaaaaaaaaaaaaagaacctggaatcttcacaggcctggtggctttggctaattataaactgagacaggaaggtcatgagttcaaggccagtgtgggctccagagtgagctcctgtttcaaaaagagaaaaattagttgtaaacttcatctcaccgactcatgatgttgtggttcggtatttccagagagcatttttccagatagaggataaatattaaggaaactgctcccatcctctggtggggttttgtttgtttatagttcctgaatcttttttttttttttttgaactatcactatgtagcctaggctagccttgaactcacaatctcccccttgccttagtctcacagacactgggactacagacatggaacaacaggcttgggtgtcttggctaacattaccatcttatggtgcagaaggagagacaaacattcattaagcactccccacccaggagactttactttgtacctgacagaatgggtaattgttttttaaaaacacagtcttaaatttcaacatatttttaaactaactccatgaagattttcattcttacattctctaccttttgttttgtagaaacagatattaagataagcacttgtagggccaactctaccctcagcaaagtagcaccactgatcctccccacctaccgagttttacagattgtaatctccaacacgttatctcgctttctgcaatttcgtgagtactttgtctttccctccacagattttcaattattcacaataaagtctttgacatatgcccacattgaatcggccttcatgcttatgattcatgtggtggtttgaataagaattgttcccataggcacaggtacttgagtgctttatcattgaggaagtggcaatacttgagaaggattaggaggtgtggccttgctggaggaggtgtggccttgc

SEQ ID NO: 34161 - DNA, 1189 bp, Mus musculus
aaatcagatcaagttagcagtgaagatttactatctcctgaccttagcatcgtcaatgtccccctatctgttttaagagaggtagctagatgttacctaataggacgaagtctatccaaatgccctgctccctctagcatgttaagagcccaggcggctactttattgtcaggacttccctggcacattctttcagccctctcctccaggaaatacagcagttgctaccctaccaccagatggcatacttcatctgcaggatagccgctctcattggctgaaccacaagccagcacaagccactgccccctgatgttgaagggatggtaatacaaaagatggcgcttcctttcttacttccatctcccaaaacaaaagtcaagcccccaatcgtgagcgtctgcctcaaaaaaccactttgtgttgggactacaaggaccctgaatgcatagaccaaccttaagtataccaccaacaagctcattttgaaagtgcacccccactccctcaatgggcttgccatttttttagcaagcacaaaattggcttctatctgcactaagtatgggcaggggctgtaactcagttgggagaatgctcgcctcacatacacaaagctgcgattctgtgccccagcctcgtaagccaggcatggtggttcatgcccctagagccctagggcatcagatgttcaaggtcatgttcagatacacagcaagtttaaggccaccctgggctataggagaccctgactcaagatttttcttaaaagaagaaatagaagctgttacacaggagctgttgacaaagatttggcaacagggtaattaaggcaggatgccaagcttcaagacttggcccataaatttctccttgactactaaataaatgtcttattttcagagtctggagtaaaacccaaatatttgaatatgaagtatgtcatggtttgtatatgcttggcccatggagtggcaatatttggagatgtagccttgttggagtaggtgtgtcactctgggagtgggatttaatacctagtccttgttgcctggaagtcagtattctgctagcagccttcagacaacattcagaaatctcagcccctcctgcaccatgcctgcctggatgctgccatgctccctccttaatgataatggactgaacctctgaacctataagccagtct

SEQ ID NO: 34162 - DNA, 1134 bp, Mus musculus
gtagcttccaaagacagacccgacatattcagcagactggagattcctggctgccagctcagttcttttatgaggtgtctagagtcagctccccagagaggaggaggctaagatgaggtcacctggtcctgcaggtcagcaggggaggttctgccctggggctgtgtgcccagtccttggataatgcggtattttcgctttaatgcatctgaaatgtggattatactattaattactgcaggacaaaacaggattagtgcagctgctccgctctcctctctgcacttttacacttcccctttgctagggaccagccaaaagggcagttggttttcctgtggtctctcttttgtcttagccgcagggggtgctgaacctctggggctcagaagacagagaatgtgagcgaggccgccaggcttgcaggggccaggggtggggtggtttccttccctatagctggggcttttttttttttttttctatgttctgagggtgtctggagggtggcctggcctctgtaggaagagttgttacagtctctgagctgtcaggtttctgcagctggagtcgtggtgccacagagtgttgttctgtgtgtggaagcccacaggcatccagtgggttgagactttcttatgtagtgagaacttagagaaaggagacttgtgggatggctcacgggggtaggggtggggtgaggggggagagcttggtccatctcaatccatactcacacacacacacacacacacacacacacacacaccacacagacacatatacagagacacagacatacacacacagacatacacagatacacagacagacacacacagatacacagacagacacagatacacatccagacagacacagagacaaatagacacacacacagattcatatatacagacacacagagagacacagagccacacagacacacacacatatagacacagagacagacacacagacacacactttctttttatttttaaaaagtgtaatgggaaggccttgacttaggctgcttgtctctagccagtgtgtgagggtggagactagcggcctgcaatgaggtaatgccctttgtattttgagaagctctaaatccccaagcttggc

SEQ ID NO: 34163 - DNA, 1149 bp, Mus musculus
tacccactgactgcaggcgaaactttttaaggagatgcgtcaatagcactgtcctgaaaaatgcaggctcacaccccaccccaaacagacctgtcagatacacatcatctctggggaccctgaattaaagtttgagatgctgtttcacgacatcttcaccagacgaccagcctgtctgtttctgtattgccagggcaggaaggctgcatgtgtcctcctgcctgggtccctagcagatgcagagaagaaggaatagactgggaagggggtgggggtgcgctgacgtgaagcaatctcttcatcctgcccagtctggcagctcatgggcctcggggcatccactactctcccacccagcgagcttgctctgtttatcagccagtcaataagaaaaaggtagttcttacttaaggaggcagaagtcaactcggcaggtcgatcagcgctctgtctgtaaacatggtttcccgtaaaatcaatgctcttcagttacagagggcggcctgggaaccaagtgggtccccacactttcacaggaagccctgccactcagcattcacaaacctctcctcagccccctaagccctcccctccagccctgaccccatcccacagacactccagtctggctcacccggaactctcaacccttcctgcaggccaattcttggtcccctggctactcccgcaggttccctttaaatggcctcaataactacactccaatgctacttgtttaggaattcagttcagattttataaaagcacatctttccgatgacaaaattcaagggtagacacggaagcgatccatcaggcgtttgtgcgcacgcactgttgctcccttctttgctctgcggagcatttaaatctgccattgaaaagtactcagtgcacaggaattccggcaccttaggaatcccccaatacaaaggggggggggtattgtgtgagaatatcaaggttccctgttttaaggcccactgcagttttggaaatatcaatctcttttaaaaagattgctttgcaaggatagaatgctactaccaggtctgccacactcgcctgggcaactatctccctctttaaagtgagagggtgtttgttgtaaggaaagttcagttttattccatgaaggaggcagggggg

SEQ ID NO: 34164 - DNA, 2399 bp, Mus musculus
ccccccatgcccccccccagtgcaattgatctgctacagatggcttcatgtaagttatctgtattggggggggggtgggcgggtcattccatgacctcactgggtactggaaagatgctaagcctcttccactgtggctccctgcccagcctgtctcaaagccctgatggcatggagtgaaaattccagtggatcgaactgtagagtgacagacagtgtgaagtctaaggggcttatccctgaccgcttccctgtttcccactcaacgcatggacccggctgtgtcgtccatggtgcctcttgccctctctgtaccgcaccgtgcaggggccatgttccccagtctgccctctgccctgcaagctttgtgtcgtgggtgtggacagaagctttcttagagcaccccacgcggggactttagcctcagccctcctaacctctttcctttctctctctctttcccctctctccctcctccccaccccccctcgcctccgcccttcaggtccgatccgtactgggtgcaatgaaagctccaagcaggccttaccatggaaggctgtgactcgcccgtcgtctcggggaaggacaatgggtgcgggatccctcagcaccggcaatggactgaactcaacagcgcccacctccccgacaaacccagtagcatggagcagcccacaggcgagagccatgggcccctggacagcctgagggcccccttcaatgagcgcctggcggacagcagcacctccgctgggccgcccgccgagcccgccagcaaggaggtcagctgcaacgagtgctcagcctccttttccagcctccagacctacatggagcatcactgccctggcacgcatcccccgccggccctgcgagaggagagcgccagcgacaccagcgaggagggcgaggaggagagcgatgtggagaacctggccggggagatcgtctaccagccagacggctccgcgtacattgttgagagcctgagccagctggcccagagcggggccgcgtgtggcagcagcagcggcagcggggctgtcccctcgctcttcctgaactctctcccaggggtgggggggaaacaaggggacccttcgtgtgctgcacccgtgtacccgcagatcatcaacactttccacatagcctcatccttcgggaaatggtttgaaggctcagacccggccttcccgaatacctcagccctggcggggctcagccctgtcctgcacagcttccgcgtttttgacgtgcgacacaaaagcaacaaggattacctgaacagcgatggttctgccaaaagctcctgcgtatccaaagatgttcccaacaatgtggacctgtccaaattcgatggctttgtgctctacggcaagaggaaacccattttgatgtgtttcctgtgcaaactctcctttgggtatgtgcgttcatttgtgacccacgcggtgcacgaccatcgaatgaccctgagcgaagaggagcggaaacttcttagcaataagaacatctccgctatcatccaagggattggcaaagacaaggaaccccttgtaagttttctggaaccaaaaaacaaaaactttcaacaccctttagtttccacagctaacctcataggccccggacacagtttttatggtaaatttagtggcattcgcatggaaggggaggaggccctcccagccgtagccgctgctggccctgagcagccccaggctggtctcttgacccccagcaccctcttgaaccttggcgggcttaccagctcggtcctgaagacccccattacctcagtccccctggggcctctggcttctagtcctaccaaatcctcagagggcaaggactctggggcagctgaaggagataagcaagaatcggggggtcatcaggactgcttctccgagaaagtagagccagccgaggaagaggaggcagaagaggaggaagaggaggaggaagaggcggaggaggaggaggaagaggaggaggaagaagaggaagaggaagaggagggctgcaaaggactctttccaaatgacctggaggaggagctggaggacaggccctccgaggagtctggggcccccgcaggtggtagcagcaaaaaggaccttgctctctcaaaccaaagcatttctaactcccccttaatgcctaatgtgctccagaccctgtcgaggggcccagcttctactacttctaactctgcttctaactttgttgtctttgatggtgcgaacaggaggagtcgtttaagctttaacagtgagggcgtcagggccaacgtggcagagggcaggaggctggacttcgctgacgaaagtgccaataaagacagtgccacagcaccagaaccaaatgaaagcacagagggcgatgatgggggc

SEQ ID NO: 34165 - DNA, 1099 bp, Mus musculus
gaggaatgccacggagccattcctgaaggtgtcttcagatagcatataacagggccctggctgttcagagcgactcctcattctcaggacagaggttgtcggagggagggaggaaaagagggagggaggaagagagggagggagaaggggcgggacgggaagcatgaaggcagtgctttctctgcagtgggaagattgattggaacagaaatgttggaggctgtgtctcctgcaggtttcctgggcgaggctaggggtgtccttgctgatcgaaatcatggatggacctgacttgggtggcctgagctgcctggaagtcagctggtccacagctgggctgctggcatcggggcctggctacagaaggccttgttatcttcgggtctcgaccccttgttagtcctgtgtgagcctggaacgatgatggtacccgtctggtctagcagtggttttgccttgtcggggtcgtccgtggtgtctgcggcaccaaggtcctgactgtcttgtccctgggccctctttctgtctccctgctaagctctccatggcgacttgagtattagggcaccctctgggtgtgatccatctccgcctcctgctttctgtgtctctccccagggctgttcttcatgaaacccaaggcttcttaataccatctctcacctgtcttcatctctgacatctccctgcatccgactcctcagcttagaatgtagcctggaaagaactctaaatggccccagctcctagcaaccaccccctctgccccaatttcttcccttcccttgaactggcatagcaacctacctgagctcctggctttgtagcttatcgtgctggaatgaggtgagcgtggtgcgcggatggagaccttacagagtgggcttggcgcggatggagaccttacagaggcttctttagccacgcctttaccctctcattctcctcagagattcagtcttatcctgactctcgggcagcacccctcacaggattctgcagcgtgtgtcgaaaggctcatcaggatgcagcctccttaaaccctgctggcccggattgctcccttcccaaagctgctgtatcccctccgtactgtctt

SEQ ID NO: 34166 - DNA, 1192 bp, Mus musculus
agatctgaagacttccttggaacacataagaccagagagctttgtgccatactctgctgttttctctggccctttccttaatcaagaatgtagactgggattttggaggtctaggtttttgggtttactggggggagctatgtcttctagtcacttgtttaaggttcttttgagagaaggatgctggcacccctcctggatatctggaaagaatgtttccaccacacctgtctgccttgtgtgaggacaaatttaatatatttcaaaagaaaaaaaatctagccccaggcagctttttttttttcctgtttgtttctttagggggagggataaaaaactgaaaagcagcaacagcagcagcagcaagctgtggtctgaccagccagcagaagagagattatctctaaaggatatgaaaggtttaatcattttaattttgtttttattaaagttcatcataacttcttcccctcccccagcatgccctggtagaacaaaaggaggtaatataaatatacaggaacatccccccccccccccaagtatttggctaataaaagagctcctttgggtggtaccctgaggagaggaagcagcttcatggctaaggaccgtaggctgaccggggcaggctggacacagccctagcttgtctgaccagtgtccagtccacctctagcagtcatgggaggatcatagcttctgtctactggaagcaaaacctctaggtgttggctcactttctcttgatttttaaaggaagtccagcttctcaaaacacctgttgctgaagacattgaaatttctgcccctcgccagcctctcccacctctgttgttctggtgaaatatttaaacccggatcaacatgctttagacagcaatgctgggacaaaggcagtcttcagtttttaggcagacagacagacagacagcatgaagctttcagacacacacaaaaaattctggcttatcttcccactgtgacagaaaaattaagctgattttcaacgttaactcagctgtcagtgatcactggatgcagatgaactggccacactggttctgagaagagtcccttcctcccgtgctgcctcggaacccccacacagggcatttcctcacctgagaacaatagagttgccttgaacattctgttcttgccacttgaggtaacttggatggtttagata

SEQ ID NO: 34167 - DNA, 1207 bp, Mus musculus
gaaggcggagcaaggcggtgaaagcctggagaagctggagtgtgactcctgcggcaagctcttctccaacatcttgattctgaagagccaccaggagcacgtgcatcagaactacttccccttcaaacagctggagaggtttgccaagcaatacagagagcactatgataaactgtaccccctgaggccccagaccccggagccacccccaccccctcctccgcctcccccgcctccgcttcctaccgcacctccccagccagcttccgcgccagccatccccgcgtcggctccacccatcacttcgcccaccatcgcccccgcccaaccctccgtgcctctcacccagctctccatgccaatggagctgcccatcttctcgccactgatgatgcagacaatgccactgcagactctgccagctcagctgccccctcagctcggccccgtggagccgctgcctgccgatctggcccagctctaccaacaccagctcaaccccaccttgctccagcaacagaacaagaggcctcgcaccaggatcacggatgaccagctccgagtgctcaggcagtacttcgacattaacaactcccccagtgaggagcagatcaaagagatggcggacaagtcgggcctgccccagaaagtgatcaagcactggttcagaaacactctattcaaggagcggcaacggaacaaggactccccgtacaacttcagcaaccctcccatcaccagtctggaggaactcaagatcgactcccggcccccttcccccgaaccccagaagcaggagtactgggggagcaagcggtcctcgagaacaaggtttaccgactaccagctccgagtcctgcaagacttctttgatgccaatgcttacccaaaggatgatgaatttgagcagctttctaacttactgaaccttccaacccgtgtcatagtggtgtggtttcagaacgcccgacagaaagccaggaagaattacgagaatcagggggagggcaaagacggagagcggcgcgagcttaccaacgatcgctacattcggacgagcaacttgaattaccagtgcaaaaagtgcagcctcgtgtttcagcgcatctttgacctcatcaaacaccagaagaagctgtgctacaaggatgaggatgaggaggggcaggatgacagccaaaacgaggactccatggatgccatggag

SEQ ID NO: 34168 - DNA, 1107 bp, Mus musculus
ccgattcctcaggcatttctcttccgatgtctgcctttcctctttgttgttgacttggctgaacggtgtgttgttgttgttgtttttttaagttaattataaacgaagttgagtagcaaataagccagtagcttgccctctcaaaaaaaaattaatgaaaaaacaaaaatagcccacacaagtgccttctgctgcaacagatgcccacatcacccttggcatgggcaacggacaaacagtttgggtggttgatgattttctctgactgtcgctgtatctgttgtttgttttccttgtttctttttgatttttcaagatgtccaggaccccggcctctgcttggaacggaatggtgtcatggcggagacaacggcctttgtcttgctgggtgtgaaaacatccgccgtgctggctcttccactgcggcagaatcaagtttaaatgaaaaaagtgattaaagtcagctttgtgcttctttggtgtggaagaccccaaaaccccaagtagccgattcccagggtccaaggaagggctcatagttggagcagcctgggctgtaatcctggcacttgcgccttgcgttgctgcttgctgttcgctcctgggggtctggataatctcccttggctttaccgcactgtctggcccgcatacagggcccggtaacatatacccgctgctgctatcacacgaaactgtggcgttgcccctgaatggatggcaccgtgccaactcttctgccatccgcccttgcagcttttttttcttttctcccgccctccccttcttctcctcctcccgtcgacttgacgttaattaacacacgggttaattgattttaaaagccgaagaattacagttaacttttcccacagggtacagacgccagccgcttggcacactctgccttccgcactggtgcagggggggcagggaaagcccgcagcaaaactagcaactgctgagggaacgttgtctgcttattggagtagagcgatagaagtcagcgtggcactgcctcatcctgtacagtatatggagccattatagattttgtcaaataatcaaacacaaccccgtctttcctcttcccaactagacaacccc

SEQ ID NO: 34169 - DNA, 1174 bp, Mus musculus
tggcgaagatttagtggcatgaggtaaatggggcactgtagcgccataggtagacagagagccgtgtctgaggtccgagccatgtagccttttcctgattgcttctgccatttgcactggaggctatggtctgcttaagcctgacgccagcctcaaggatttgagtccttgtctctgaagcaaggagcccagggataccagctctaattttaagggcctcagcaatcaggctcaccctgaggttggctttgctgagtccagtgctgcagctcagacaggatgaagctgtgtgtcgtctgggggctgctgacctatggcgcccttgttccctctgctgtgttcagaccccgcaggaagattacgtggaggccgcggtgaagcagtccttgcaggtacacctgtctggggcccctggggacatcctgatcttcatgccaggccaagaggacattgaggtgcgtgcttcagtcaccactgggttggatgggaaccctccacctgagggttaggggctctggggtctcatgactccttctgtgccgcaggtgacatctgaccagatcgtggagcacctggaggagctggagaacgcgcctgcgctggcggtactgcccatctactcccagctgccgtctgacctgcaggccaagatcttccagaaggtgcactgcttcgctatgcctgtctcttggtgtccctcaaaggcgcaagaggggggatatttctttcctagaagaacaggtgtgaactgggcttttcttgcctgttcagtctctccctccccaaaacttacctttccttctgatgtcctgattggccctaggctccagatggtgtccggaagtgcatcgtcgctaccaacattgctgagacgtctctgactgttgatggcatcatgtttgtcatcgactctggctactgcaagttaaaggtgaggggcgatgcaggaggcgaggggtgatgcaggaggctggattccaaagcttcacccaaagtgaactcagcatagagacactcagtgcatgagagtggtggaggtgttaggccaacattcagtgagcactgacctttccagcctatccttgtggtagcttgatggtatagatatttaagcagttctgtagtggtcccagagctggtgtggatggagagacctctgaggctttcttgagtc

SEQ ID NO: 34170 - DNA, 1201 bp, Mus musculus
gaccgcaagagagacagaggtaacgtgcctggcacccctcctggggtccgttagcatcgaaccagcaagcctttctcttcctgtcacaaggacttttacagtaatagtcattaattggacaacttggtttgtatagtgtgtgccccggtggttttgaccctttgagactaggattaggaagaagtttaaggaacgatacctctcttgtaggacagcaactttgcttgagtgtgtggatcttgttttattgtgaaaattggtgataaaggaaatgatgggtgatccattgaagaagccagtatttacactagctctgatgagggtagaggacagtgttatgggacaagtgaggcggggtccagcactggcctcgcttagaatcagatctgctatacacagaactctccatgctgggcatctaactgtccactgaggtgtgagtgtgtgagtctcagcccatggattatgggcgagtcagtggggaggcctgcgctttctgcccagtgctggggtgtgtggtggtgttagtgaatggtgttaagcctatgcgactcttacagcagatgagcgggacagaagtaggcacagcagcagatcagaccgagacggaggctccgagcgcagcagcagaagaaatgaacctgagagtcctcgacatcggcccaaaggtattctcatctgtcctctgctggtagggctcaggtgcagaaaggcagagtaagaggtagtccgctttgttcccaggccgtgagtcaagttctaatcccaagatgtggtggatcaagaaggatttgttgaaagggaactattggttttaagatcaaagagagaaattgattctttcagtgttgttttaaacagtgaaagccagactattatgttcggtctctttaaatatttatttgtcgcagtgtcttatctgtaacaagtaagtacaaggttgtgaacaggggatcagatcaactctgatcaaaaggctcacctgctgaggacacttgctgccaagccttctgatctgagttggtttaccaggatccacacgatggaaggagaaccaactcttgagaattgtcatctgacctctgcatgcacgcacacagacacacacagttagataaatagaggtaattaagaatcagttgggaaagtaggtgtagtggcttatgcctataatcccagtacattggaagctgaggcagga

SEQ ID NO: 34171 - DNA, 1125 bp, Mus musculus
aagtggatataacatgaatatatttgatttgagaatctgatttctcagcttttctcaggaaaaacaggaaaacaataggatcgtgattcaaatcccggttcactgaaaacatctgtctaaacaggaaagcttggggtaatgagtgtatagaaggaatcataaaacctgcctgcctgccatctgggaagcctctctggacatcagagtcttccagtaaaagttaagaaaaactggcttttggctggaatagctgtggtaggttttgtgcaaggtttctatatgtaaccttgtgaggtgttctttttaacaaatggtcatacacacacacacacacacacacacacacacacacacacagacttcggcttgttcattgttgctactagccctttaaccagtgactcacccccttgtgaagctacaaccataacagtatagcaaatagctgttgcatcctttctcgggaagaaaaccaccgactaacctatgtaatcagaagcctttgagtcatgggtgtgttggctagttttatggcaacctttgacagacattgtagttctctgagaggagagaaccccaatcgagaaatggctgcataatattgggctgtaggcaaacctatactgtagtgctttcataactagtggttgacgtgggagggcccagtttgtgggtggtgccacctgggcaggtggcctgggttctacaagaaagcagactgagcagagctgtgaggagcaagctggtaagcagcattccaccagggcctctgcaccagctcctgcctccctccctaagataacgggccatcaaagtgagcaactgtccaagtgttgccagttccatcaatttcctggtcacacaaccctttcaatgctaggagccaaatagtcataaaattcatagttgaagttttcccctcactttatttaattttgcataaagttatagtaacggtactggatgactgtgtgtgtgtgtgtgtgtgtgtgtgtgtgtgtgtgaagttctttgccctttctgtaacatgggcagacagggttgtgtgcgggtgagggaagagtgaaccttagaggtttgttaactgtaaacagaactaatgcaatgctttctggcatgcctttg

SEQ ID NO: 34172 - DNA, 2073 bp, Mus musculus
gcctccttatccactcgcttccacctccctagtgctggcatttaccaccgtgtgcagttgtatgcagtgctggggatcaaactaagctttgtgtatgctgggcaaatactctgagctacacccctggcctctcctgcattttaattcattaatttatttatttagccctctgccaaaagggattgtggggtgtttggtactggttttgtcacagaaggctgagtcattcctctgccacttgtaagattgtgctctttgacctgatttaattaggacccaagccagaagctcctgcaaagcccccttccagacctgtggataattacaacacctttgtactgccagagttgccatcggtgccagacacacttccaactgcatctgctggagccagcacctcagcatcagaagacatagactttgatgatctttcccggagatttgaggaactgaaaaagaaaacataggtctcttaaaccaggcagcatccacattctggaagttgatagtgaacagttctccgtgtaacagtgactctccatgaaattccgtttcctctgttaaccgtcactgagcactcttcctcggggctctctgctgctctaccaattgtgttgctttccacttcttcagtgattcttcagtgatcctgagagactaacagctggagactctagctggagcagttggctcctattggctgtgtttgcctgtctgtcttcctgtcacgtggatccttggttctttcccggccattccattcccagggagtgagaagtattgtgggtagagttgccaaagatggctggaccatggaagagagtaccctatgatgggtttcaaccttgactcgtaaatacttccctctgcatgggggtgatcgtagagagaatcaaggctaccatgtgttttctcatgagtcagaagatggctcaggaagccactgtcacggttcctggaggctgggccctctcattgacatgtacactactcctcgctgcagggcactgttccacctggatccagttgcaaagtttggaaaagttctcttagttttactggattctcagggagccctctgtggccttttcctttattttgagtgctgtttcctttttaggaaagaacagcactgtggaaatttgcttttccccatagcatgttaggaaggaagtacaggtcgttacctaagctagcgtgggcttccagttgccttaatagaagtactcaagtctcttgggtagagatctggaagcctgcaggagaggaggggtacttgttttcattggaaaacttttatgattaagggactctttacaaactggcatcttaagttttagtgccatgtcgctgtagtctgctgctttcctgggtggatgaacctctttattatggtaacttctgtgctgctttgcccctagccaaggctctccttccccaagaggttagctttggcattggaagatgagatttttgcttacctgtagtatttctgtacatacctgtttccagcaacttcagtgtcaatgtttttgatttatttgtgtcttatagctctagctgctaataaagatcccatgtcctgctttctctagtgttggtcaaatgagtgaatttggattttagtggacaatagttacccaggtgacccacgttagtgtacaaggcagatccagccttcactttcctctcaccactgcaggtgtcaggggctgttggcagctcatttccatcctttgattggaggtcagatggcatcaatgaatttgctctgctgctccatttagtaagctgcaggtgtgctcaccctttgggcatgagtggtggcattctgttacctgttggttggcagtgtagtggtgctgtgttcttagggtatcatccttaatactctgctgatacccaccagcaagaatatggagacaagtggactttgattctccactaacacaaagtgtgataatagagtgaaaggtaagctatgctgggcagtgatgaaagcaatgagagttcatcttaagacaccaaggtcgccgggggcgtggtggtgcacacctttaatcccagcactcg

SEQ ID NO: 34173 - DNA, 1657 bp, Mus musculus
ctgctttctgtcagaatcaaccaccgaccttgtgctgcattggagatcacatcctttccctgtgttgcccccatttctctgctgcttctctggcttgtttcctacagcgggggcctgtgggattgagtcttgaggaattctctcagatgagagccataggagatggcctcatctcctgactgtttcatgaacaactcattcctaggtgttatttgcatgtgtgggtttctcacaaggctccctcccttcctcagaaggttcatcacggaatttcctgacatgcactgtagatgctacaaacatgtctacccagggtaccactgagctacgtcttcctcatggggcagacgtgattggctcacagttgaagtcaaatcactgcttgggctgcttgtagcggaatccttggaaaacagttgttgagggccttgacagatcgggccagcgctgacctctgtgctctgcttcctttctttatccctgtttgtaaacacggcgcctcccttaatgtggcaccatgcagatgtgacttgatttggctgagagctacctttcctgaagtatgcaccctagaaaagaattgtgtgctaatgcttgtcagagctgtggcagtacttaactctgaggatgtaggagacgtgactggcttttagagtgagcatttcagtggttagctatcagcttttgaagtctgggcagttgacaaagaccagcctggtcctagttaatggtagaatactcccaaaacttggagaaagaactgctctctgaagctatcagaaatacctatgccagtatagaaggggaacttggtgaaggatggtgctcatccttatgatgatggataagggggaggggtttgggtcctcacactgagagcttatacccagttggagcccaagaagagctagactgaccctgtaaacttagggttccatttggtcttaacactatgggctttgtttgctctgtgctgctgtgccactgctgttgtctgctcattgtcctgcctgttgctcattatagcccctgtccttcatgtgtctggccatgtagactctcaggcatcctgtccatttttaacctgtgttctgccagtatgactgtgtagctcagtcatattgaacagggaggtggggatgctgttgatgggctgttaaatcggaaaggatgtggcttcagtgccctcaggaacccttaggctccaaaaatttgcctgcctttgagagaacaacaaacaggtcttttctctctcctttatggtacttctcagaacaagagaaactgagttagggcttgagtcagcatcccagtgcttttgtctagcttggttctggggttgagaaagtgaagtttggctgcaatagctcctcaagttgggtttcattttatttttaccagtgggtatcataggcattttaagagaacagaatggtagcataatttaaccctgcactgagcaggaacattgaagagttgggtggtcgcactggtgttagctgaagatgggaaagactcaagccattggggtaaagataaccagattgatccaattggccatgggagcttaggccatagtcttggaagtgagcaggacaaagaccatgttttagagatgtgataacttcctaggactaagtttactaaactacactga

SEQ ID NO: 34174 - DNA, 1154 bp, Mus musculus
gtgagtgcagtcaacatactctagagttggagctatctgatgtgtgcgttgggaaccaagctgatgtccttaacttacaatgcctgagccataggaatgcaaaccaatgtaccaatgtacaaatgcacagtgctcttccctctctgctcaccttttctttctttcttttttttgttttttgtttttttttttgtagttggagtgcctcaagctaatcgcctcacaaaaattcacagacaaacgcattggctatttaggagcaatgctattattagatgaaagacaagatgtgcatcttctcatgaccaactgtatcaagaagtaagtcttgcatgccccttctcctccccctcataacaactgttctggtcttttcagggtatctggtgggagtaagagtagctacttaatgattttatacttattgtccagaatatattttgagtgacttttgattgtggttaatagtttaaagatactaagcaaaagaaaaccaaagcattgctgtgcatctttgggcacagtacataattaacaattagataagtatttgctattcttagaaaagagaagaaagccttggtgaaatctggattttcatattttatctttctagtatgttggataccatgaataatgaaatattgcctttattagtaccaatctatattctgagtatggggctgaaattttagtagtatggaattgtactcaattcctaagaaaatattagatttatttcattattttgtgtgtgtatgtgatctcctgtatgtgaggggagcatggccagtgtgtgtgtgtgtggtgtgtgtgtgtgtaaagacagccttgtggagttggtcttcgccttccactgttatatgattttcagggattgaatgcaggtcatgaggctcgtgtggtgtgtgctttacttactaagccatctcactagccctgaaaatgtttgcgacagggtcttgctagtgttcctcaggccagcctggatcgctggagcacgacttggtcacttaagtctccagtgtcctcactgatgcagtagttgttgtatttactcacgtgtggaataaccaaggaacacctgctgtgtggagaagcgagagactctaggagggagttagctgttttctctagtgcccttcctacagtag

SEQ ID NO: 34175 - DNA, 2625 bp, Mus musculus
aagagtgccgagtgttttttagaaaagaccccaatattaccaaatctttatgttgaattgttggaatgaggtgaaggtgattgtctgtggtacacgttgaatgtactatgtatgttcaggtattcaggcatcatgtccagtttactgcaggagaaagtaaaagtgggcccccttgcttgtaaagcgtttgcagttgttactgtattatgcagtaagacgacactttggcttcagttttaactcttgatacaaatctccctttctccctgctccatttcaccacgcctttacttaaattcttcagtgtcttgtcaaacctagctctgtatcagatgctagactattcctaacattgacaaactggagttgaactaaaggctccaaaagggaaagtttctggtcttaatagtcctgtaagagcaagatttactgaaatttacttgactgggtaaatggacatctgagttacaaacaggatatttctcctgtgttcagcaaaacaggtgtggacaagtgcagactttagacagccgctctgcctgatcagtgggagccgttaggatttcctgcagacggatttcattggatgcatagttaatgctgtgaaacgtgataggattaatgctgtattggtggatttcttgaatagaattttgtcttaacattccttttttgtgtggaggctttattttctccatttgtagctaaccagctcaggttttttggttgctttttgttgttgttgttgttgaactgagttgaatctgaagaaatctgctcaagaccaagtgctagccgatggagctggaaagatctcctctgtggacaaagcctcagcccgggtgatgagtttggaggtagcatttacaatcatccatggctttatcgagaaggaaaaaaaaaatcatggccttaacacaaagggtgctgtgtagatatggagttcatttgggagacgacctgaacaccatactgacggactagcagccagatgcctgcctaggatgctgacggttgtgaagactgtcccctgtgattggatctttgaaagcttcagcgtgccttcttagtttctaggagcattagttctcttctcactcggccttgcagcttaaaggaggaatctcttcgtttctgtgactacgcgcgcacatttcagtcattcctttcccacacgtgacccttcaagaggaaacagatttggatgtatatgacaacctcggagcctttgtgaagagagtgatttctgtgacttttgaataaagccaaggtgataagcagtgagccccacttattgacagttttatacgcacttgtacctcattagcatcgccttcctcgaggagtagtttttatgtcatccttctttcccatcccagagtcaccctaagggagagttcctctaagtaatctcagacaactgtacacgcttctcccacaatgctttggtgctgttaccttgagatggtttagggagtcatggaggttttctgctgtgtatgttatcatctgttaaacttcgaggtgttttggttttttttttggttgttgttttttggttttttcatttaaagcaacattcctcagtgtaacagtacaggtattccttgcttggttcctggtgtggctcttaacctttgtttgtttccctcacatatgaaaacagacttttaaaactgtccagcactaatagtttgaaattttccatctcccatatgacaccttgcttttcatttctgcgcccttttagagaatgttggaagttagggaataccgcttttgtggttcaactttattttcttctacattggaatatatttcggccgtgaaaacttggggaaggaggagtttgaatgtgtatttttcttttcctactgaatgtattttaactacagagccctaaactgagagagaacaacaacaacaacaaaaaatgcatattcacaaactttgtggttgggagggcatttgtcagtctgggtgtgggggaagggagaactgcacaggaagttctgaagtttaaaatacttctgaccagctttggctcgggagggtggggctgtttgtggaactgaaagtgaaaacccttttcaagcaatagcagagagtgggtcccatggacaaggttccagtcccagaacctggaactcttaaacagaagaaaaagctgaagcggcttgaagcagcttgagcagttgcttcttgctcctggcttcaagacagagcattggagactttctccccttaaagacctgcatttgcgctttgtgtgttttgtttttattttatttgggggacctcatgggaaagggcttctgcactccttcctttgtgaaccccactgtgttcttgtatcatcgtccttctccttttactatgttgtaagttacggttttcattaggccccatcacatcttctttactgtaaaattattaaaaggctgtttccaagtggggcagctaatgaagttctaattattgcagacatatttttgagatgtaaaacactttaaagtgaaatgataagtctcttggaggcgagtgaggaataacatggatgtaaacatttacatgggatgcattcggattctgctgtgtgtattgtcttttggttgaaacaaatta

SEQ ID NO: 34176 - DNA, 1156 bp, Mus musculus
cagagcccggcttttgatacccagtactgcatcatcttgggattctcaacagacctggatggccatggtaggcaggggtacactgtaccttgatggggagaatgacttctttgttccccacagggagattagccccttgtgggtcacacctcacttcaaatgtttctgtctcatagtaaggcaggttctttacacggtctagctcagtgctgaagcctggacccaagacagaggggaaaagaaaaatgtttttcgtgagcaaggaaaacagcacatagaagctgctatgccctctgcaataggctgaccaaggtatggcagaacagcctagaaacccctttagctgagtgcagaagctgcagggatgtcaggggggtaggcgcctgtcacgggccctggaaagatgggacatgcgagtggctcctggtacctgtttcgtgaaggacctgtttctctgcgtggaaggacacagggaagtggctggtgttggtgatcttgacgatgtgggttctgacgtcaccaagtacaatgtagccgaagtccaggatgtactctggcagctggactctgaaacagtcagggggatgtcctagtcactggtcactttcaagcccagaaggccgctcttcacgaaggaagagagtgtatgttctcttctgggtgcaacttttgtgtgtgtgtgtgtgtgtgtgtgtgtgtgtttggtggaggacagctaaggaccactagataaagactagacactccgtgcatccttcacaagtccacatgtgtgttttggtcattatccagtgacatgttcagtatgagatggggcctgcctactggctgtggtgttctggctttaagagccagagttgcctgactggcttgacgctagggagtgactgctaatgtgaggcacgtggcttccagtcccaggggatcaatcaggatctcaggagacacaaagaactgcttgctccaacacactccagaacaaaggcaacaccgatgcaagagggcctcacttggtgagttttcggcaactccgctgactgaagtagatgtcctcggtgttattggagatgcttctctggtgttccagggcatagtcttggactatgagtcgctctacttccatctggacatgagcacttatctgaagcgagaggga

SEQ ID NO: 34177 - DNA, 1098 bp, Mus musculus
catttgttggacatctgatatttccacttgttctacgagctttgagtgcacaatatcacttaataccaatcaatcctaagggatactgtcaccccatcttacagctaggaagaccaaggcctggggagtcccatcacagtatagtagtctcagaagcaagtgaaacaaccacagatgtcatggtctcagtcaaccttccaccaccttagcacagtcacattgccctttcaaattaaactgcacctcaaaggatcctgttacccctgaacactctctctctctctctctctctctctctctctctctctctctctctctctctctctctccctctctctctctctctctctctctctctctctccttataatcacatgcccattcctgttcatctccaggtataagtcatccttgttccctggcaacatggagacactgacgatcctgaatgattctccaatggtggtagaggcatacttctgtttccagcatgacataaaagcaagcacctactttctagagccggtcaacatgactctgaaacccaatgaaaagcaggtacaatcaaaggcatggggggggggggggcgggggaggattctatcaggggcaaggagagtcaagccctgacatccccatgtaaatggaccttcctttataactctctcaccaggcactaaacgtatgggcctaccctactgcagttggtatctttgaagacagcattgtctgctgcatcaaagagaacccagagccagccatctttaagttaagctgccaaggaattcgcccagaaattgaggtggagcccaggcagttacattttgaccgactcttgcttcataggtaagagttccagataactcagggacaggaggggagatttgagagcatttaggtctgaggttatcagctggtcttgagttactttagattttctgggcttgctgttgtctgtctgactgtctgtttggtgtacatcactgggaacggaactcaactcagagccttgtgcatgctaggcaagtaactctgccactcagctgccatgcctcccccagcccatagtttgtcttttcattaaatcaagaaaagaaa

SEQ ID NO: 34178 - DNA, 1193 bp, Mus musculus
gttagttagttagttagttagttagttaattaaaagggctccagtggctcctacagcagaactatccttagtatctccttgtaaaccaagttccaggttgtgccttgtgccatctgggcctgtgggttggctgtgtagtgaggtagcagctgagagaactggtgctgggcagaatggccacctggacctggatgagggtgagacctctgctctgtgccacatctgtatccacgtgtagaaagggcagtgtagcagtgacacctgtgtacatggaaaagcattttcacacaaagactgcctgatgtcaagaacataccagctgtcctttgtttatggccactgagaaagaaatggaggacgcggcagagaaaatgcccacagtggcagaaggcaggagttaagaagactggtcttcaggcaggagccagagctgccctcatttcctctccttgctcaccagccttgtcctctgtgtgctgcctctgtcttcaacaccaaggcactccctcagcccaggcccagggtatctcccatctctccctgcctcaggcccctactttgtgacctgcatccatctgtattctgagggatatctttatataagagataaggtactaccttatctgggacagtaacgcaaacctagctgaatcagacacctatgcagcctctgaaagtatagccaccaaaaccaagtacctcacaaactccctgagcacactccggatccattttacccctaggcccctgtgctggctgctttatgtcaacttgacattttgcaagtaggaacctcgcttgagaaaatgccccctgccaggttggcaagcctgtggtgcattttcctgactggtgattgatgtgggagggcccagctcaccgggggcagtgccactcatgagctggtacttctaggtggtataagaagcagattaaaccaggaacaagccagtaagtggttctcctccatggcctccacatcccagcctctgggtaggttcctgctttcagttcctgccctgaattccctggttagtaactacaagctgtaggaaaaaattaaccgtttcctgcctgcgctgtttatggtcatggcagtagaaactccagctgagacagcctctcagcatggagctccacaggcaggctgaattccacaccagcaagtatcctttccttcattccagtctcct

SEQ ID NO: 34179 - DNA, 1160 bp, Mus musculus
atctcctggacactctgagctttggtgtgcgcctcactacacacaaaggcattttcccatccaccctccgttagcaaagccctaatccactctttctctctagctcatcctatttatagctcacgtgctggcacgtgcagcgccaactggggaatctgttactctgcaagcccccagccctcattataaggaagcagctgagcctggggaaggtaggcttaacccagcagcaggttcagggacgtcaggctgaggggctgctaggtacgtcagtcaaatggatgggtaggaggaaattggggcataaaaatggctaaaattctctgagagaagggccccaggcctggctgcctgtggaggagcaactgcttagctcgtaggcagctgtgtctccgcctagcagtgcttggtccaggtgcttccagtgctttcgcagctcggctgaggaagggatctgggctagtgtgttctagagcaggcccaggattcctgacccctgacttctgccctgctgcagatctacgcctgcaactgctggacgtgaagaacaacccatacctgatcaaggccctgtacggcctgctcatgctgttgccccagagcagtgccttccagctgctctctcaccggctccagtgtgtgcccaaccctgagctgctgcagactgagtgagtgctgggcctcaggcactgccctccaggcccgttccatgggagatccagggccctactttacctctctgtcgtttaaccttgttcactccacaagttctttctcttatcttcaaatccacagcagatcccaaaatggaggttctgggagtgtttaaagggcagaaatatataggcatgttttcccaagcaggctgggggagcttagagagaccaggcctaagtgtgagatcttttccccagcagaagtccctggagagaggagctctagggatgacaagtaagtcgggagcccagacagccagatagagcccagagttgggcacctcacaggcttagatgccttgctattccattctatgagatgctcaaacttggccctctgagagctcccacatcatcaggacctgcccaccatcattccaaaggattaggaaacaagaatatacctgctctactccaccaggaacctgctctcaggaagagcat

SEQ ID NO: 34180 - DNA, 1124 bp, Mus musculus
gtagactcaggttcccaaagctgcatctgggagtagttgtgccctgctcctagcctgaaattcaacaggccacagcagtgccttcaggcttaaagccattggtttttctcacttggccaacctcactggggaaggtgccatcgtgggagctctagacagagcagccaagtgtaccaggccctgggctgcctgctcgaggagtggtagagctgtatgtagctacccatctcatacctgagctggggctggacacaggcaagtttctgtcatgtcacagcgggagggaaccttatactcggggacgtgacatgtctcctgtggcaacctcttacagactaggatggaggtttgtgtgtaaggtcagatgtctaggccaggtctgctatcctatttcctctgcttcagtcagcctcttcacccacccagaggccccagggagtccgctcagccgagttggtcacagccttcatgaaaccctttgccagggctctaagccagtgaggcagaatggagtgtggggaacagaataaggacagttaggaatgggactggaccctgggtggcaagctaaacccagctgatgagaggctacaggattggtccgtcaattggaaggagtgtaggtgggtcagcatgtcctgtggtaagacaagctcttctctgggagcaggtagtgatcacaggccttgggacccaaggcctgccaagttataggtccaacagagagacttcaccgatcccagctgtctgcagtctcagccataccacagagaaaaggctgggctaccgcctcccccttctccccagaccctgttccaggccccagctgccttcctggctggctgctggccctggctctcaccctaaagggagccactggtaaacaggaagtgctcccccatgcaacgctccgggcgccatcaacagcccacaggccgacagacatccaagcagcgggttggctgttcccaccagctgcaggaaagggggtggacatgggaccctaagcactatgggtctggctgctgggaagatgtcttgggcagggacccacaggtgcccagagactgaaccccaccagcacctaccatgatgcagacactgactctgacttctgtccatct

SEQ ID NO: 34181 - DNA, 1145 bp, Mus musculus
atccctgaactgcttggatggagctatcactgctgcccgccagattctggcctcgcaagccagaggctcctcactggtgtgcaccccctgagccccagtgacagaggggcctttcctagtcatgtgcagtaaggctaagggtgcttgccacaccccgcaggactggaccaaggctggtccccacgaacaaccctcagccaccaccctgcagcggaggaaggatcgtgtggaacacctccgagacactgagccaggccctactggtggaggcactgtgggctccagtggagaggaggtgccacgaacccggatgtctcctgccaccatagcagccaaagtaagtggaccgctccctggctattccccacccccgtcttcactccagggtcaatgccaggcctcccagcagctggccttcggggcctactccgtccacccttatggaactatctagagtcccagaagagggtagacatggagagtgaggctttttagcccaccattttccctatcctcagcatggtgaggaggtatcccctgctgccagcgacctagccatggtgctgacccgcggactgagcctggaacaccagaagagcagccgagactcgctgcagtattccagtggctacagcacacagaccaccacaccttcctgctccgaggacaccatcccctcccaaggtgggcctggagggagggatgccacaggctgggtgtgtttgctaggccttcacagccccgggacccgccccaccacggcagcggggaggagggccataactaagagacttacttccctctctgtctcccttgagtaggtatggggttcagggacaaacttggccctgggctcaccaccccctgtgtgtctccaggctcagactacgactgctactctgtgaatggggatgcagacagtgaaggcccccctgagttcgacaaatcatctaccattcctcgaaacagcaacatagcccagaactaccgccgcctgatccagaccaagcgcccagcctccaccgccgggctgcccacggcagggctgcccacagccatggggctgccctccggtgcacctcccggtgtggccaccatccgccgcacaccctctaccaagcccactgtgcgccgcgccctctcca

SEQ ID NO: 34182 - DNA, 2370 bp, Mus musculus
gtggccggtgcccacgccctgggtgagggccagttccccttccctaccgccctgtcagccactccttcggaggaaacgcccactccaccccctgctgccaccagtgaccccccggccgaagacatgctggtggccattcgtcgcggggtccggctgcgcaggaccgtcaccaacgacaggtcggcgccccgcatcttatgatggtgccgcccacccctccccgtctgggcctggcacaaggaggtgaccggatctgtgagcagcggccagccactctgagtggcggcccagccagaagacagaaagcaaagcgtcaggagtgaggcacagccactttacggaaagacaaccaggctggatcccagcatctcgcgggaagcgacttccctcacacacctcgccaggacagagcctgttttatactttccttacctactcaaacctcctcttccttcctccaggccctgctacatccaaaccccagagcccataaccaagggctgggcctgctacatggggccctacctggcctggggtccacaactctcttcctctggcccggctgtcctccggggccatatgcccagctctttccttgaatgctggctccctcttctccctgcctggaccctgtcccatttcctcttgcctttgccctgcctctcccaggctcctctctttggggcacagggtggtcacggaggggccaggtacccaatcagctgaggatctttgtgtgactgggtttagggacagtcaggcattgggaagccaggcttgctcatgggaaagagccctggagggagggaacgtaggggccttgtctcaggggaccctccagttccctgtgaagagtaactagtggggtgaggcaaggcagacagggaatgagtccagaggtaccaggtgttttggatgccctgttcttgtctggacactttggagcttttactctaggggcgccttcgggttacagtgtcacctgttgctggagataagggctggagcattagatggtgtgggggttattttatgactgtaataaaatggagctgaccctagacaaagaactatgtggggcaagctggtggtacagggtgtacgtctgagtgcctgagagaggggtgtgggagccctcagtgggctcgaggccagagaagggtagaatcactccccccaaaccgggggaagctgctcttctcgccagtgtctgaagtgtcggtagaataaggctggtgagggtaggccagggactctggccagtctgttgagatctgagcaagctgcaggcccggcttggagcaagtattagaaggttggtttgactttctgttgccagaggcaacaccatcccaagaaagtctatgcctacaggcctagctggggctggcagcagggaccagaggaagagtgggtcctgcctccctgtcagcccaagtctgagcaagactaagcacgtaagtgtaagccagaggagagattcgggaggtagagcaggcagcagactccaaggtagcattctgcccgacccccacagggagtccagagagcgtaccttggtcttgaaggaatggagttggggctgacctgggcccaaggtcatgggtgctccagtgcagggcagcccagtaggtctggtaaagcagggattcctgtatgtggatggagttaccacagggctccccgaggctgcttagcgagttatctccagggtctgagacctggcccaccaaactcagttgtcaccagagccccgagtatagagtccaggaaaacaaatggccagatgtggaaccctgaggcatattttggctgcatcttccccaaaagagctgtcaaggctgatggaaagggatgcaggatgtcaagtgggcagatgtggtccctatacccagggtgtggttgggtcctagagaagggggtccaagaggatgggctcactgccatctgaggactccaggccctgatgggaagggaggccagggacttcccaggaagaggatggggtggcatgcccacccccagttttagccttcccctcccccccagggctgtacatattccatccccttgtctgacccacaagtatcctcctccaccaaccaccacttcctctagtgctcacctctctcataggcccgccctcgggatccgagccaaccatcctgcatcacagactggtttgggggcttcttcacgtacattttattttattttatttcatttcatttgtacagcaaaacattcttttcaaatgtgtcttttgactgaagtaacttttctggtgctgttaacttgtattttttttttttaatttattttgccgcccctccttgttcctactcaccctcccctaacccccagccccag

SEQ ID NO: 34183 - DNA, 1810 bp, Mus musculus
cagagtcccttgtctataccactttatctggaggaattggcatccttgtccctttcacgtctcacgaggtcgagtcaccacattgcccttacctcatctttcctcacattgtttcttggtgttgaatctgcttcagatggcaagcctttgcttacagttaggaggttctagaacttgtttaaagtaacagttaaggtgcctagaaaacagaatcctgcgttcttttaggaaggtcttttatactatggtatagatacagggttgtattatgaccccaaagcatcagagtagcagtccacaaactcagaatgatggtctagatagctgtctggtgggacaattgcccagcaagaatgggtggcttggagttgggcacgatgccacgtacccataatcccaatactaagtgggctgtgtcaaggggatttcaagtttaaggccagactgggctgtgtaatggagaccccagctcttaaaaactagatgccttatctgtactctgttctggaaatcacttctttcttagagatagaatgtctttcttccattaggaccatgacttcttccagcatgttgaaatgcacctgcggtctgagcatccccctctttgtggacgggaccacctgagctttcgttcttactatttccctgttaaggtaagttggaaaaaggaatcctgtgcccattcacaggccttctctgttggcctttgtttctgagattcagatagttctcaagggacctggtgattcatctgtgacatttacataacctgtctttaaagatgaaaacagggttgggttttattcagtgaatcaatctctctctctctctctctctctctccctctctctctctctctctctcccccctcacacacaccagcccttagtggggtgtcaccttagacccctttttctttggacatcttaactttgttctcttccctctcttccatgtcttagaatgtgattgatggagacctttgtgagcagttcaactccatggaacccaacaagcagaagaacgtctctgaggagctggaccgaaccccacctgaagtgtccaagaagcttgaggacattaggacccgctatgccttctgaacccgtctttatctggggccttgccagagagcccctcttttgttcccattgccagtgtctggcttttgccacacagcagaagtgatgtggtatttaagactgcattgttaaagccagtagctctgcaccctcaactctcccctttgaatgactggttccctacagttgacactgaagtctgctccttgaacatagtgtgtggccctgagcttcggtgtggaacacagttttccttattcccaaagccacccctgcattgtgtaatttctggctcttgtctacttttgtacacattcttaattttcattgttttcctgtaaatacagttttgtacaatgttgctttgagagatgaagggaggcaagcaaaggtgcagccaggctgattgcagtgtggctcagttctgccctcggaaccctcctgaatatataaaactagtttttaaggtgtcctgcgtgtgtagtttttgttgttttgttttatagtcttttcctgggagtgataattctggagaaaggcttgaggcctaattagaacaataactggatcttttacttctttgctcttgtgtggacatcatggctctagtgttttcttagtgtgtcttggttctttgctgtggagatagaacatgagttcactgaccatgtaaatgtaaccccactattcatggatattaaagagggtgttttccctttccctca

SEQ ID NO: 34184 - DNA, 1168 bp, Mus musculus
cagccttgaatcagtcatcccttggaaccgtgttcctttagggaaaatgaggcttagaggtaccatagtcagtacatcccagcctttaattgtttgttttctttgttttgttttttgcggaggtctgcttttaaattataaaaagtacttaacttaaatgatttgggggggatggggaggtgagatggggtttcttgacccctggctgtcctggaactagctctccaaacagaccggcctcaaactcagagattttcctgcctctgtttcttgagtgttggcttaaaagacatgcacaatccccacctggcttaaatgaaatatttcttaatgtacaggaaatgtatgtataatgagaagtgggttttgccagtagatgcttagtaactaggagagaatgagtgaattcctgattgttgggcgctgtgacctgttttatgttgttttcgccaccaagtcatatctttgtcttctactaaagtagccaaaggaaaatctaacataaaagttcccatcataaaaaggaggctttacctgttccatcttttccactagaacggtgtactgctgaggactgtcctagaccctgttactggggacctgtctgacacccgcactaggtatctggggtcccgtcctgtgaaactcttccgggtccggatgcaaggccaggaggctgtaagtagtcaaaagacatttggatgttggtaccactgtgaacttctgactaattcactttgtaggttgatgttcgtttcacttacataggaaattctgggttctttggagttttctaagagatggtccatgagatggcactgggcattatgaggttataggaagcttgaatattgatctttgagtctatttaggcctagctatctgagatggaaaaggattatagtgatctcatgagtctacctaataggaatgagagcctattcttcgcagttcagagttaacactgccactgccgtgctagttcttaaacgttaccttattcacatctacagctgtccaaccttggaatagagtctctaatttatacccaagggaaagtcggtccagaggaatgtgattgataaagcttgctttttctttttctttttacttatttttttcctttctttatacaataagccgtgtactgcctgtttgggctcccttt

SEQ ID NO: 34185 - DNA, 1179 bp, Mus musculus
gggatgtttaaggatgttgatctgtggctactatgtgtttcttcctcaaaagacttgaatcccttttgtagtgttttagattctatctatgttgttcatgttttgcttgcatgtttgtatcaggaagtatccaagccaacatgtagatcctgggagagcaacaagttctttaaaccactggagccttgccttcagtttaaaatcctaagactggtgattaaaaaggaattttacttattatagggcctaatatgactttcttactttgaccattatccactttgacagaaataaacaagagctccccaaaacttactctgagatttagatttaataagcatctactgtctcagttttcttttggggtttccattttcctcaacaaagatcctccttcaatcctagcagatttctgtgagtatgtgttttccagaattgtctcttacagcaatttttcctccccacttctgttccttaggactgtttacagcctctgagtatgcaggctctcccagcccagcctgagtctctatgtattgtggaaatgggtgggactgagaaacaagatgagctgggtgagagaggctctattggcttcctgtacctgaacattggactacaggtaagatgtccaggggctcacattggtgtaaggccttctttggtatctatcagcctgttctttatccagtctaagcattttctttgcctgtagttctagatagtcgccttgggaaactcatcatctagtgctgtcagagactgatttttctcaacacttagaacatgttaggcaggcctggaaatagcacacacaaagcgtcttcatagctggtaaaaagtgctttgtgataggtgttttggtttggaattaaatgagtcttcagtagtgacctatagttcccatagtattctagtcttttaaagtgaattcctcccagttcataattgaccatgttagctctagtgtgtagaagcctgggtgtttttgtagccaaaggagatgagttttatcatggtacaaaaagcaggaatctagtgtaaactagcatcggtgctctcacggtgctatgtgccttacttcctgaatcaggacctgcaaagacttaagttagatggcagacttgtgctttttcagttttagtttcatactttaaaatgcttgagcatgagacacac

SEQ ID NO: 34186 - DNA, 1223 bp, Mus musculus
ggaaactcagttccaatctccagcacatcataagccaggcatggtggcacacctatgtatagttctagtgctaaggaaagtagagtcagaagttcaaagtcatctttggctgtatattgagtttgagtccagcctgggctacataataccccatcagtcagtcagcaattggcacaaatagatttgctctagtttttcacacagttacttaaggttttcttatatgttttattattattattttatttttatcgtctcttttccaaatacctgaaggaaatactagtcttcagacatttatactcagcgtgtttgggcatttacttgtaggttgctaggacagccaatcgtcttttgaacattctgttttgtgtgtgcatgtgtgtagtgactgcacatagaagtgttgtgaaaggtttctaaaactgttgtgtctcaactgcctttctaatgctagtaaatttgaatttttcctaacagctcctctgttttcttttttccagatgagtttgatgcctacatcattgtgtctttcgtgaatgccacacttgtgctatctatcggagagactgtggaagaagtgactgactctggcttcttgggcaccactccaaccttgtcctgctccttgttaggagatgatgcactggtgcaggtgagcgtgcacctcctcagcgtgccttggccgtccgtcctttgcccatcctttgcccatccttctcttgttttgtggtgtgcttgaattcatgtttcttcattctcaccttccagaaaacctgaggggagggtctaatgtcttatcaacataaaaaggggtactgagaattcatccctttcaggctttgaataactcggcagttaggaaaatttgaagcctaacatttcctccctgttggtcattccctatcactgcttttctcatctttatcattaacatgtgggcttgggacctttctcaactgaggtggcaaagcatgaacatttcaaaaacaagcagtgcctcatttgtgtggtcccagtgtgccagtgtgagggccattctgggtgacaatcagattgctagttagatgttcttctttgactgacttctaggtgtatccagatggcatccgacacatacgagcagataaaagagttaatgagtggaagactcccggcaagaaaacgattgtgaagtgtgcagtgaaccagcgacaagtggtgatcgccctgactgggggaga

SEQ ID NO: 34187 - DNA, 1405 bp, Mus musculus
tctacagtatatttggaaaccccaaatgataatgacttgagtttattcactctttctataatatgtagttaagtagtactgtgcattaagctgtctactctgtctctgggccatttaacagtacttaacaaatctatcttagagcagttttatattaacagaaaaagtttaaagataataaatacggaggttgtgtctaatgtactactgactgtccttaaggaatatcagagtagggctggagagatgactcagcagttaagagtaccggctgctcttccaaaagtcccaagtttaattcccagcaatcacatggtggctcccaaccatcttcagtgggatctgttgttgccctcttctggtgtgtctgaagacagctatggtggattcactcatatacataaaataatgaatatcaacgtgtagttaaacaacaaaaagcacttgtaaggtggttgtcagcccaggggtagagcagtatgctccctaacatgtgtaaaaagatgtgcttttgtcttacggaatttagagaaagcaatggtgttctactgtagctctgtcatttccaatggtgttttttgtttgtttgtttgtttgttttttaatttttaaggatataggcattcgaaaaatgtataggtttggctataaaacctgtatccttctgtgtgttccaggactttttcctgaagtctctcatggggacttcagtctgaattttaggttctttttcaataagtggtccagttccttttctatattgtagagtatgaggcctttgcctttggggtattactacctcacttagcctggaagtcatgctcactggatctgtggcttgcctcctcttctgttaggtgtcggaaatggctgtttctgagctccctggtaaccccaatgctgtctggacagtccgtcggcacattgaaggtaagtgtcccttttcttatagtcaagatggggcctgggagccattgccaagaaacttagaaactgcattcctactatgtctgtattgtttcatctagtgccatatgccaggaacttctggcacaacaccacattttttgaggtttctcctgatcagggtaccctggtttactgctgctttttctgaaagtggatagagagggtataaattgactgttagttgcataaacatttcagaattcttgagctgcctgtgtgatctataaatctctgctttcatctgtgtatgttctaagcgaaagttgttgtttcctcattgcacttgaactatgttttcattgtgctaaaaaatcacaatgaaagtcaagattataaaccctgtcagtcagtcagttctgcttactcatcagaaaagcctagattgagtggagtcagtttaagagtgtgaagaaaagaagttgtgaaggaggtggag

SEQ ID NO: 34188 - DNA, 1085 bp, Mus musculus
ttgtgctatttatggattgtatacaggggaagtgtggtgggtgtcaggcatcaatgtcaggtcttcctcaatgtctcctcaccttattttctgaaatagactcttacaggaacctgaaatgtactgattctgtgttggctggctagccagtaagctccagggatctgggattgtcttcccatctctgggattagtatgagtacggctgcatcctggtttatacgtgggtattggggctctgagtgtaggtccccatgctggtgtgtcaagcactcttccaactgagctatccccagcccatactctgctctacctgccatttgttctccctttgaagtttatatagctaactgctgtcacattgtttccaagcatactgaaatctgtgttcaaattgtttctgtataacctgtgccaaagaaaacctcttgctttttcccagttacttgtatcaaattgcccatctcggagatgatgatgaagaacctgagttttcgtctgccatgcctctagaagaaggagacacattcttctttcagccgagaccactcaaaaatctcgtgctggtggatgaactggacagcctctctcctattctgttttgccaggtgtggctttattcaaccacctctgtactatgccagcctactgttactaaatctgaaatgtaatgatttaaagttttcctcaaactgagatgcagtctgaaaacaacttacctgtgaaatcatcactgtggaaacctggtagttacagaagttcagggactaaaacctgtcagtttatgaggagtgtttattttgaagcaagtcagtcttactctgtatagctcaaatctagtcttgaactcactctcctcctgcctgagctttctgactgctgggattagaggtgtaagctgccacgtgtggctgagtggtgaggtttgagttcaagactcctgatgcattacctaagagttgttggctcactgcatcatatgcatgtatgtggatatgtaactaatcatattctattaacaatggggctgataggtttttgaaagtactggttaggtagagtaaatgactcttggaaaatctgaa

SEQ ID NO: 34189 - DNA, 1182 bp, Mus musculus
accaagcaacaggaaattgttgtttcccgtgggaagattttggagttactacgcccagaccctaacactggcaaagtacataccctcctcactgttgaagtatttggtgttatccggtcacttatggcgtttaggctaacaggtggcaccaaagactacattgtagttggcagtgactcaggccggattgttatcttggaataccagccatcaaagaatatgtttgagaaaattcaccaagaaacttttggcaaaagcggatgtcgccgtattgttcctggccagttcttagctgtggatcccaaaggaagagctgttatgattagtgagtgtcttcctttactttctttgctctgagtgctcagtgtggtgtgacatgctgtgatcttggcgatgtgctagttatcacttactcgccagcatttggcattacatttatatttactaagttgaaacgaagtcatatggtaaactatttatttgaaagaatttattttatctgcagcgaaggctacagtgaagtgatctcagttgtgtagtttggttgctttcttcagcctgaagtgatgattcacaatcatgtctcttctctgaagaattcatggagattctgtgtatctgatcaggcctctagagggcaagccacctttgaccagggacagaaccactgggaccaattcaaagaggagttaacagactgggtattttctcatctcttaaagtccagggcaccttaaaaatttcttaaaagttagaggggtattaagatatttgttaggggggattataatgatttttgttgtctgctaacagtagagggcagtgtatttgtacagttagtggtgactgttaatgattttttttcttttggttttgttaccatttatttgtgaaattaaaaatgaacgataagtaaaaactgccatacaattttttttgttttgttctctttttttctttcttagtttatctcatcttcaatagatgattaatgatcttatttaaaagaataaatatttaggtttctgtcttttcatgaaatctgctactttatctcctttaacaacaggtgcaattgagaagcagaaattggtatatatcttgaacagagacgctgcagcccgacttaccatttcctctcccctggaggcccacaaagcgaacactctggtgtatcacgtg

SEQ ID NO: 34190 - DNA, 1180 bp, Mus musculus
gcccgcagactggtgcgacagaccgagaagtgcgctgaagctttccgccaaggtgagcttgtttatcggttcagaggtaactcttgcctcaggccagacacaaccccacacattaggtccttggggatctccttgtgttttctccttgtggagccctatctcagtatagaacttgtctcatgggaatagccctctgatcctagttaccaggaaacaggaggaagaggctctgccctgactgagttgcagggaagtgggggctgcttaagccccaatgatgaggctatagaacactggctgggcaccatgctggctgctccgtgctgtgcccgcaaccttgtgcagttgaagtcatgccttttgacactcccttccttccctctgcaaaagttaccaccggagaatctggcccaggcaaaccatcccctctcctaaccccaggaaacctgcctctgctgggacagtacctgacctcatactgggagcagaagaagcttatggccccaggctgcgagccgctggccgtgcagcgaatgatggatgtcctggccccgtatgcgtatggccaaagcctggcaggggcaggtggtgggggctttctctatctattgaccaaggaaccccggcagaaagagactctggaagctgtcctggccaaggctgaggtatgtgctggtataatggttggaagttggttggagtgaaataacccaactgtggcccaccaaatcatggtcctcctggccccgtatcagtccaaaaggcctgggaatgtttaagctctcaacaccttctgtcccacccagggccttggcaactacagtgtccacctggtggaagtggatcctcagggcctgagcctgcagctgctgggacacgacacccgtctttgtggggccgggccctctgaagtgggcaccacctagagctgcagctgcgcgtcccttcagtggggctcactttgttatcccttacctacctcttcaagtctgctgctaaggaaggaagcaagacttggacagaagaggcagtgtttgcaaacagtactgtgcttcatggtgggcagtggctgagacttggcctctatctcatctggattaagggaggtcttagtcacagtgtctcatgtgcactctacaaattccatggcccagtgtaggcctcctagggccctgcaaag

SEQ ID NO: 34191 - DNA, 1224 bp, Mus musculus
tgaagatggtcgtgaacacctgattctcttgcctctgccgcaggggttctagggtcactggtgtgcaccctgatgccgagctgtgcacttgatcttgtggacattctttaaattcatcttcatttctgaaatgctttcatctgcccagtccttggcatatagtaggtgctcaggaaagttgaagcagagattttgttgttggtttgtttgtttgttttttctccagatagggtttctccgtgtagccctggctgtcctagaacttgttctgtagaccaggctggcctcgaactgggagaaccatgtgcttctgcctgctggattaaaggtgtgagccaccactttccagctttgtttttatttttattttttaaaaagtaattaagcttttttcaagggtggttttcacgtgagtcttgattttgtctttatatgcgagggaactcctgggaactgggcctgactttgtagatcctccttttcttggcgggtaccgggcgtgcggtcccgcttcctgtaatgtacggaggtagaagaaagggctctggccctctcggcgttatgtcttcggtgcttgcggcctcctgttctcgggttctatcctcagacgccggaacacttaaaaaaaaaaaaaagtaattaattggagatggtgcatgtagggcggtgtgtgtgtgtgtgtgtgtgtgtgtgtgtgtgtgtgtgtgttgacccatgtgtggaggtcagaggagaactttcgggagttagtttttcccttctactacatgggttctggaaatcatagttaggtggtcaggtttggttgcaagcccctttgtccaccaagccttcttgcctgtctttgctttcatttctgaaatggtatcttaccatgtagccctggttggccgtatcgtgtagtccgatgcagcttggaactttcagtgatcctcctgtatctatctcctgattgctggggttacaggtttgtaccactgcgcctggccaagtagggaggctcaggattaaaggtctagggttggattctttgtactttgcagatcttgaaatcacctggagagttggttaagacacatacctgttccatgttgtcagaggtttttgtttttgttttgtttttttttgattcagttggtctgaatttgtatctctcatcagctcctcagggctaacattttgaaagacaccatcttgagccattatagttgcctggttagctaa

SEQ ID NO: 34192 - DNA, 1556 bp, Mus musculus
gttgctaatgcttgggctgcaggccttgttgcccactggctggctccctctgttttgaccaatcctcaaccttgaataaatgagaggaaaaggcagttcatagaggtcaggagagacattgctatagctcacctgcctctcatagaaccagtagagacactctgttctccattcacccccactcaacaaccacccaccccccaccccaccccacccccgcttccctggtgtaatgccttggttatgtctttattcttcagattggcagaaaaaatggaagtcagcaaatctcagactcgagggtcatagacaatcccattgaagatggaggtgtctttcctcctgtacatctagtctgtgcctggctccattgtttgttccaatccatgggacttcatgccacgtaacaacttagaaaggaagttatgaccaagcaaaaactctgaattatgctatgagcagacttatgggttacttcatacattgtatgaataaggtttataaatcagtggtaacacgtcattcttagaaactttaattatgagaaattttgctaatcatgatttgttatttgtatttttctgcttactagactaatatatgctcattaaaaatgtgtataagaatgtttgtgtacacttgaggcaccatagctaccagcctactcggcatgtccctctctcttccacaagtgtgaacacttcacactagtttgtaagctgatggttcacttgtatgcccatctccctctggaaagtagctgtcaccctcatgtgtagccaccctggcccaggtttcctcagtggtaggtgttgagggtttctagcatgttgttacctacagtgacagtgactggctcagtccctgtcttggaccacagggggtagaattcttgggtcagagttggaacatttgaagtcataattcaccaactctgtagtattctcctactttttttgttgtttgagataagttctcactgtgtagccctaattgtctttgaactcggaaatctgcctgcctctgcctcctaaatgcttggattaaatgggtttatattatcaaattttaaaaaattatgtatagtgtttgtactggctgtatgcatgctaaaagagggcattagatttcattacagatggctatgaatccatgtggttgctgagaattgaactcaggactctgggtcagagcagcccatgcttttaacctctgagccatctctgcagcctttatattatcagtttttaaaactttgccaatctaggagctggagagaagactcaatagtcaggagcacttgctgcccttataaaggacctttgtttgagtcccagtgcccacatcatgtcaggtcattcacaactgcctggtacttcctttgcttcagaggaagctggtacctctgctgtccttgggcacctggcagtcatgtatactccactcccagagatgtaagttactttcaatcccagtgctctggtgacaagatcagtagttcctgaatatccggagttatattaagagaacatggctcaaaaacagaattaaaacca

SEQ ID NO: 34193 - DNA, 1167 bp, Mus musculus
ctgggactcaaacaaaggtcctttataagggcagcaagtgctcctgactattgagtcttctctccagctcctagattggcaaagttttaaaaactgataatataaaggctgcagagatggctcagaggttaaaagcatgggctgctctgacccagagtcctgagttcaattctcagcaaccacatggattcatagccatctgtaatgaaatctaatgccctcttttagcatgcatacagccagtacaaacactatacataattttttaaaatttgataatataaacccatttaatccaagcatttaggaggcagaggcaggcagatttccgagttcaaagacaattagggctacacagtgagaacttatctcaaacaacaaaaaaagtaggagaatactacagagttggtgaattatgacttcaaatgttccaactctgacccaagaattctaccccctgtggtccaagacagggactgagccagtcactgtcactgtaggtaacaacatgctagaaaccctcaacacctaccactgaggaaacctgggccagggtggctacacatgagggtgacagctactttccagagggagatgggcatacaagtgaaccatcagcttacaaactagtgtgaagtgttcacacttgtggaagagagagggacatgccgagtaggctggtagctatggtgcctcaagtgtacacaaacattcttatacacatttttaatgagcatatattagtctagtaagcagaaaaatacaaataacaaatcatgattagcaaaatttctcataattaaagtttctaagaatgacgtgttaccactgatttataaaccttattcatacaatgtatgaagtaacccataagtctgctcatagcataattcagagtttttgcttggtcataacttcctttctaagttgttacgtggcatgaagtcccatggattggaacaaacaatggagccaggcacagactagatgtacaggaggaaagacacctccatcttcaatgggattgtctatgaccctcgagtctgagatttgctgacttccattttttctgccaatctgaagaataaagacataaccaaggcattacaccagggaagcgggggtggggtggggtggggggtgggtggttgttgagtgggggtgaat

SEQ ID NO: 34194 - DNA, 2226 bp, Mus musculus
aaatgtatgtgaacacacttgggccagagattgatgttgggtatcttgctgtgccgtttcctgcctctcactgaactcacatcttacctttggttagactggctgccgagcaagctggggatccagatcccactccccatttccatacactagggttgcagacacacgccaccatgctcagcctgggttgttgtatacttacagatctggcatgcaaaagactgaaccagtggaactccttgggttggtgaatactgactaggtagtgactgtttttaacaagcacgtcagaggctacctttattacccaattgagaataccaaagggttttgttttgaaaattagctgtgtatgagcacctacatatgccagaagagtttacttctcagattccttcatcttttaaacatttaatattttaaaatttactatttttatcttatttagtatgaaatttttattgtatatgtttcacagtatatgttttgcctacattagaggccagaagagggcagccaataagatcccatagaaatagaattacaaacaattgtgagctgccacatgggtgctgagaatctaaccaacttcttttttttcttttttctttttggttttttcgagacagggtttctctgtatagccctgggtgtcctggaactcactttgtagaccaggctggtatcgaactcagaaatccacctgcctctgcctccccagtgctgggattaaaggcgtgcaccaccatgcctggctacagctagtgctctttaactactgagccatctctagtccttttgtctttctttctttctttttttcccacccacccaccccccattctttctttctttttttattgcatatatctctatgtgtgcatgagtacaaattgcacagaggctagagtataacttgcgggagtcagttcccctattctatctctggattccatttgacagatcaaacttggatcactaggcttggtagcagatggttttactcatagacatattgctagtcttccctcccccaacccccttttaaagtctcactccgtagctcaggctgacctggaactcactgtagcccaggatagtatgctcaaggcaattattttattacagctttctgagtattgtggttacaggtttgagacatcatgccctgctatcagcttttctgtgaaagctgagcatagtaggaaatactgcgatcccagcactcaaggcagaggcagaggtaaagtggtcaggaatgcaaggtgaccctcagcaacatagtgagttcaagtcaaactgggttatgtcaactctttcctttaacaacaacaacaacaacaaaatttaaagccacctggcctgacagatggctctttgggtaaaaaccattgctgtgcaagctgacaaccttagttcaatcttagaacaactcttgaaaatgtaacttccacatgagcacgggacacagcaggtgaaacctgtactcacagatacatcatgcacatctgcacagtaataatagttaaatactctgtgaatataggggtagtagagaacttataagtgtaatactaattgatatttgttaagtagttacttgaaaactagttgccaggactgcatctcagttgctatagtgttggccccgcatgcaggaagccctgagtacagtccctataatgcgtgaagtgtgctggcacacttgggagtatgccaagtcagggtgtgaggtctaccaagtttcagaacagtctcggcttcatagagagacctcatctctcagaaagaaaaacagtttcacaaaatatagatgatcagaattaaggataactttggatacctgagacactggcaaaaaaaaaaacctctgaaaattccatttttctaaagaaattctacattgcaacagtataacaagcagtgtttatttggggcctggagaggtggcactgactgctcttccagaggtcctgagttcaattctcagcaaccacatggtggctcacagccatctgtaactagatctgataccctcttctggtgtttctggagatagcaaaagtgtactcgtatacataaaaataaatcctttaaaaaaaaagcagtgtttattttagaaatttcctttataacttatttcatggtatgaatttatcacttttgctgcatccatggaacacttgtcatccagatctgtctgaacacataggtgggcctgctgaa

SEQ ID NO: 34195 - DNA, 5582 bp, Mus musculus
ttgcgtgtcctcggtagttcatggtgagatgtcctcccgtcttctctttccccctcagataagaagatagaaagactggacacagatgatttggacgagattgagaaaatcgccaactgaggcgctcgcttctccatgggctggcgccaccctcagcgctccctgcctgggagtctagtgctttcatggcataggcctgacgggcccctcagagaccacgggctgagtagagactacctacctcattcggaattacgtttggacttgacaaatttgtgcaaatgatgagggatggtagaaatgtgtttacacaactttggaagattaggcatgaatacacagaaatttaccttttcaagtcccatcttttttttttggacagtattttcccatcacactgatctagataatatgcctaggattcctcatgacaaaccttagctgtttgtgacttggagtttgcaggccagcctcgtggaagtgacagcacagaacagagagcacgtagaggcagagtcctcagggaggaggaggatataagccagtcgtgtgtcaggaagatggcacaaggcactggagttggcctgtggactgctgcttaggacttggttggtgtgtaatggctaagctgtgtgttacctgacccctgctgacattctttccaggaaaagatttgccatgttggaccaaaatgcctttggggcctctccttaagctttgtggctcaggaacatgggcaaatctagttattggtgagttcttggctcatacttcagcaagacctgtggagaagttgtcctggaggattagtggtgcctctggcttccggtaacacctggatcatgggtacttgaaccatagtttttacatctgtaacatcacttggactgttagtagtcccaggcaaataacagggtactgaggtttgggttctaagtgagtactgtagcttaaagtttctgatgggctggcagccttgatcagagcaggctaggcatggtcagcagttgccaaaattccttgctttgtttgcagttcctgaaagattagtcctgtcagagctggggagtgactgcagatattgggcaacgtggctctaaagggattctgatggtctgtgttcacagtgagtgtgatgagggacaggacggaccacagccgtttgtctgtccacaatgagtaatcaacaagtacttgctgctttctcccttagcatccatcattaggacagtaaaagcacacaataaacagagaacttctcacactggctaggccatagatactacagagtgacagcaatgtggagggattgagaagcatcctcttcagttctttgacttggacatggggtgagtcttctctctagggcttgttttgttagttttgttgcatgtatgtgttgtgctgggactcaaagccttgcgttctgctacctaagcacggttactctgaactattatttccagccatgatagaggcttgttgtggtgagaagtatagacctgtgttcccatatcttaaggccagttccgtcccctgggaaaggagagtgccatggctaccacctggtggtggttcaatgtcacagagaaatcaacaggtgcttgttctccactctccagtgggtatttgaatagaattctctgtgggctcctggccaactttgatctattttaggagtcttaaaaggaaagaataaactttttctcccaaaatactgtggatcaaacttgaaataagtgaaaacaagaactgtagttagagaagtgtatgactcttccctgagtctgagaaggagactgggcaaggcgagcagcagcccctccagtggcttctggtgggagtgtagatcaacactcctaacctagtgtcctgcacctcggagaatactggatgggtttcatggtgtctgtgaagttatatacattagtttaaggtttaaaaacttcttaggaagactcccaaaagattttccaccttttaaaaaggtgagtcctacattgtgaatggctctggcatgtcactagtgtcatgtggaccatactctttcccagcccacactcactcctgccaccatctatcccccaggggcagattagcactgtctggagccttaagaatgtattgagcttacagagccttgatcccagggatttgactgttatgtatctatggagtgagaaactgagctcttggacgaaggagctcagggaaagaaagaagggagaagctcagggaaagacatatttttgtgtaatgaaaagttttgtgatgctcattatccacaaacatatttatattggaattttattccttgacctcaaacttaagtttctgcctcagtttcctgggtgctagaattgtaggtgtgtactatcatgccagactgtggtatttttgttctgagtatcatttattggttatatgcatgcataagatctgataagttgttgagacatagtcttttagggatttggggtttttgtttttttgagacagggtttctttgtgtatccctggctgtcctggaatttgctctatagtagatcaggctggctttgaactccaagatccacctgcctttagctcctgagtgctgggattaaaggtgtgcactaccacaccccgcacgatatagtttttgctggtgttaattatgaattgttcatgttactaagacagtaatgcttataagaagcaagtagtatcttgtggttggtgatatattaagtaaagttaataccaccttcagctagtattagtctatgtcaggtggtactgttcgaacgtgagcaacgagggcatctccatagaaccaggattctgctcacttgccaggcattcacaaacacacatgcatacgcacacacacaaatacacacaccattccactttagtaaaacaggatgatttaggtcacagcatgtaaggtcagtctgtgggtgcatcctccaggagtgatggtatataccagtcagtccctgcattagcaacggtgatagtccatacctgtagtccctgcataccaagagcgatagtccatacctgtagtccctgcataccaagagtgatagtccatacctgtaaccccagcgttagcaaagctgaggccagagggatttgagttgaaagtaaacccaggcctacataggtcctgtttcaaaaaacaaacaaataaaacaaaacaaaaaacaatctcaacatggtagttcatgcctataatcttggcatttgtgatataaaagcaggaagttcaggagttcaaagctaacctaggcaataagaggctgggtcagggcatagcacctggagatagatctttcctatttcttacagaatcagtgtccgagactggtatagagttccagaggccagagaatgttgaataaaggagtggggtttgtgtgtgaggaagcaggctcgtgacaagatttgcaaggaaaggactcatcctcaggtacaaagagaagttgaggctagcctggcctacagcaagccctgtctcagaaaggaaaagagtagaaagtattgggtacagtggtccttttttataattgcagcactcaggaggctgagacagtattgctgagttcaaagccagcctgggttacttagaaacaggccagccttagctgtgttagtcaagatgacaagggtgacagagatcccctgggaacacagctcaggtggccctgtgtgggaaagtcagggttcacaggataaaatgctgctgctgctgctgctgttcagtttttattgtgcttggtgtagggtctcactgtttaacacagactggcctggaaatcaaagcaattctacctcagcctcctgagtgctgggattctaagcaggagccactatgacctggcaactaaattttgactgtctcacagtccagtgtcctgctgtgacggagtagccagggctgagtagtctgaggacaggtgagcctgcaggcctggagggagacatcaacatgagagcattagcagcaggatgagggattctgaaatcagcgtagcaaaattggctttctgttgttggaggagggaactggactgcctgcctcctctgcccacaccactcgaggtaatgctgaaggcttcatggactctcaagtttctcttgatcctcttttagagacactagactcatagaaattcattgcaagtttacatggctttgcttctgtgcttgagagtaaatatcctgtgctttgttgcgtggctgttatggtgtcttctataaaggaccctggtgcacggaattaactcaagaaacgtatgctgaggcacatacactgcttttcttacccttagctgagatagggctttcccagaacagcttggaaccctagtgtgaagatgcagacccatgcttttcttggcctccagactgtcttggctttagaatccgatggggcaggggagtggctgttcttgtcgtagtttcagtcatgaagtggggaatgactagaaggtggaggaaggtgtggtggcacacagctgtaatcttaacacttgcagggctgatggttgaaactttagagtactgttagggctacagaggtctagactgtgtagtgagatcatgtctcttcaaaatgaaaagattaggtcaagctttaccgtgatgcctgacatgcctgctgtccaaatgaaccatgtctcccctctgccttagctccagttaatggacagagggacgagggtgagagagcagatctttgtctttttgagcggctagcttttgccaacgtaagaaatagctttccctacaagactgctgttgctcagtatgtttttcccattccaattcttcaacttaagaacagcctactgagtgtaagttattgtaatattccctgagggcatgcctctcctgcttttttgtttgtttatttgtttgtttctttcttttggtttgggttttgtatgtgtgtatgtgtttagttcattttgctatctgacagcagtagctgctaagtatgcgtagaaattatcaagatatggctagtgagatgactggttattgcagtccagttcctaaaggtaggagaaaactagctagcctcagggagttgtccttagacctcagtagtggggcaatggtgcatagtcacacacaaattttattttttaagacttgctcgtctttttaaataaatatatttttaaaaatgtgtatgggtattttgtctgcattaactttgtccagtgtctttgagtttccattgctgtgaagaaacaattgaccaaagcaactcatttaattggggctggctcatagtttcaggggttcagtccattatcatcatggtgtgaagcatggcagcatccaggcagacacagtgctggagttgatgagagttctgcatcttgatctgaaggcagcctgtaaaagattgtcttctacaggcagccaggaggagggtctcatccgcactgggtggagcctgagcacgggaggcctcaaagcccacctacacagtggcacacctcctaacagaactactccctaaaccaagtattcaaacatgggtctatggggccaaagcttattcaaagcaccacacacagtgt

SEQ ID NO: 34196 - DNA, 1068 bp, Mus musculus
aacaacaaaaaccaaaccaaaccaaaaacaaaaacaaaaaaagaaaaagaaaacttatttggtagttgtgtagttaggattctattgctgtgatgagacactatgaccatggcaactcttctgaaggaaaacatttacttggggctggcttattatagtttagatgttcagaccattattattgtgacatgaagcatggcagcatgcaggcagtcatggagagggggctgataagaattctacatccaggtcagcacgcaacaggaagagaaagagagacacagagagattgagacagacagacagacagagagacacactgggtctgggttgagcttcttagatttcagagcctactcccagtgatacatttcctccaccaaggccataccttctaataatgccactccctgtgggactatgggagctattttcattcagaccacaatgatagtgatatttctaaacattttctttttcatgcagcccacagaacttaattgcccagtctcagtctggtacgggtaaaacagctgcctttgttttggctgtgctcagccaagtagagcctgcaaacaagtttgcccaggtaaggactttaggaatcagggtttgctactaacatacagcctaaaggggtcatagttcctggactaaaaactgtgggtaaaccaggcagtggtggcgcacgcctttaatcccagcactctggaggcagaggcgggtggatttctgaatttgaggccaccctggtctacagagtgagttccaggactgcacagagaaaccctgtctcaaacaaacaaggggctggcgagatggctcagtggttaagagcagtgactgctcttccgaaggtccggagttcaaatcccagcaaccacatggtggctcacaaccatctgtaacgaaatctgatgccctcttctggagtgtctgaggacagctacagtgtacttacatataaatctcatgtaaataaatcttaacaaacaaacaaaccaaaagctgtgggtagtcaaggtatttacacttgtaatcccaataaagggtaggcagaagcaggag

SEQ ID NO: 34197 - DNA, 1144 bp, Mus musculus
cttgttaactgtcaactattagggctttgccaatagaacccaaaatgtctgcctcctgaagccaatagtcaaccctgtcacgtgacactccatgtcctagctttcttgagcattgcatcagccgagcccaggagccttcccagaaaccggcttgttagctcattcgcgctccgaatgattggcatgccagtggaccaatcatatcagaggatgacaaggcgtagcgggtcacttttcatcagagcgctctgattggatggtgaggtacggctctggcaccggttgtggcgggtgagtatagcttcttgtgcgcatctgagggagcaggtaactgccggcgagtggcggtgggctccgggcaaggaaggacctggggacccggaccctcgggaaaaaaagcaagtgagccccgagagctctacgagaagagccggcgcttggagggggaggggcagctgcagcgggctgccgggcggtcccgcccctggcctgggtcaggacccggtctccgcaggagccggatctcgagagtagcttttgctattccctcggagcactgagagtggtgtggtttctggtggacttgcagaggaccaagaccttgggaagatcgcggttgctcttcagtcgccacccagagctaagggtttgtctcctctaattttaatctcttagggggttagggaaccaggcctgaagagcagggtgactaagataaatggagtctctctaagaggcatcttcattcattctttattaggttctcacaccttaccccagactggcctgaactcaactctgtaacccgggctggccttgaactcgcggcagttctcctgcctcagcatttcaagtgctggaattacaggcgtgagccagcactccagactcgcttctttctgttgctgttttgagacagggtttcactatgtagaccaggctggtctcgactcacagagatcttcaagagtggtgggaccaaaggcgtgtgctacgaccctcggcccgattcgattcttaaaaacagaatagttgataccttcaggttcacccgaacaaatatattcagcaattttttcaaacagtctaagtttcctggtgtgctttggagtatgttagtgcagagcatgctatttacagatta

SEQ ID NO: 34198 - DNA, 1106 bp, Mus musculus
ttttttttttccacgaaatgttttgcctctttttgattggggggtgggggtggggtcttggcatgtgagtgtaatgcccacagaggacaagagagggcgctggaacccctgggaaatgataggtatttgtgagtagccagaaaatggatacccaggtcctctgcaagaatgacaagtgtgctctaacctctgagctatctctctagttctggttatttccctttattggagtgaagtgtttgcagagaaagattaaagaactcactcacagtgctcagattaggaaacagaagtttaccaggagaccctttatccttcagttctaaaagccttacttacctccattcacacctgttcctctcagcagcgccctgggagggcttggcgggaaggaaagggtctgtctatgtcgttctgacacagttcctttgtgtgtactgcacaggtgacaccgcttggctcctctatgatacttatggattcccagtggacctcactggattgattgctgaagagaagggcctggtggtagatatgaatggctttgaggaagagaggagactggcccaggtaaggagtgtgaggagtgactcgtaagcacctgtcttcccttctcactctctcaccccatccttgggaccacttctctttctgaagaagaaacaacccctatttctcttaccaccaaccacaaaaaggaaagaaagaaagaatatgcggaatgagatgaagggcagcaccaggcaactggattcccttcctttaaggtctcccccactcccagagcagtgacgcacggctggaggcatctttcctggatggtttacaaatgtgttaaagcatttttagttttcacaactaggggctgatgtttcccgttatcttattggtagagcctcaagatgccactcagtgtcctggcatgaaagaagacagcccccaaagcaaaggctggtctagccccaaatgccaggagtataaagattaaagacattattcttagttttttcttggccacagtttttgccaaggctcagttctctcttcatctagactgacataattaaggctttttttctctcctgttttgacagctgaagtcacag

SEQ ID NO: 34199 - DNA, 2092 bp, Mus musculus
tgtgctagttcttttataaagtctaatgggctggttttcaaaatacaaatagacaactaggacctgaatattgaaaaatagaatttagcaaaaagcaactaagaatatgtgattggagccatgtatggtgttgtgtgattttaatctcaacacgtaggatgcagaggcaggtggatctctgtgagttggaagttatccttctatacagagaattccaagccatcaagggctacttgccatgaccctgtctccaaaagaaatcaaaacaaaaaaaaaaacccaaaaaacaaaaaagactacgtgagctgggctggggctgggagctctgtggaggagtgcttgggtaacgtgtgagggtctagattcaatctttagtctcagcacagacatgggactgtatatcaccagtcactgacctgtctccccctatctctgcatctgttgatcagtgtttgagtgtacagtggctaccgtgcttgctctgcgtcgggaaaagatgtttgtggacgaggtggtcactggccaggagtgtggagtggtgctggacaagacctgtttctatgcggagcaaggagggcagatctacgatgaaggctacttggtgaaggtcgacgacagcagtgaggacgtaagtaaggccaagctctctcctgttagccgtggaaggcaagcaggggctgggcgccttctctttcaccttcacattctgagccttggggacagatgtttttattttattctttggttggtatttcttctgtagccaagagggctgcttcttatacctgttgctgtctcaggtcttaggtcctaagggatctttgcagccagggtgcagaggctaacccttacttcctatgcttccgtatgcataaggacaaggactctgtctcacttgctgagtggtatcctttgttgggcttttgaggcagagtcttacacttacagcccaggtcagtcttgaactcccagtaagcctgcctcagcccttcctgtgttgggagtagaggtagggcttcaccatgcctggcagagatcattcttgaaggacaaacattctgagaaaacttagcttctagtgtggccactgctggctgttgggtctcctttagcaacggattcctgcagataggataggatccatttcatgggacttttaagatggcgcttgctgaggaagcagctcacttttagagcactccctggagttcgtccccacactgtataaacctgggagtgggctgtgagcatgtgacccctgcgcctgagagagaagacactgttaagaggcgcgtccaccctaggctgcccagtccatcacagggccgtgtgtgcatcatctgaccgtaggggtgtatacgcgcatgaagagagaattgatagatttggaaattttacttacttgttggtggctatccttgaccctgcagaaaaccgagtttacagtgaagaacgctcaggtccgaggcgggtacgtgctgcacataggaacgatatatggtaacctgaaagtgggggatcaagtccggctgtttattgatgaggtaagttgcatatgttggtccacatttgatgtatatttacttacttagtgagacaatctcttgagcactttgtagttaaagctgccttagggtcatcctgttgtcctagtctcccagatgctagagtcatgtgcctggacccccctggcccagctccccatttgatcttagttttaattatttttaataattttttaaattcatttttggcttcttttcaagacagaggctatctgtagagccatggctttcctgtaattcactttgtagaccaggctggcttcgaactcctagagatctgcctgcctctgcctctgcctctgagtactgggattacaggcgagcaccaccatgcccgcctgtttttaatatctggtctctgtgcacatgtgaaagcacacatgtggaggctcaggccaacctgaaaggagtcagctcttaccaagtgggtcccaggtattgaactcagattgtcaagtttggtggcaagcgcctttgcccactgagaccttttgttggcacctcgtaagtgacactgttagcaaagt

SEQ ID NO: 34200 - DNA, 1335 bp, Mus musculus
tctgtctatcatttgtcgcctcctgcggcacctttacccctcgggctttcttttggtgaaagacttcactcctggctaatgcctggctttgctctctgtcctcactttggcagtagccatagctgctctcctgtgccagctatagtgttagtctgtggtagcatcacacatgatacaaatggatgttgggggcgcctgccattcccccctcaatcccattctgactaccattttcccctcctatctcctagaatgcagccaaccggggactgaaagccagcgagtgggtccagcaggtttcaggcctgatggatggtaaaggcggtggcaaggacatgtccgcccaggccacaggcaagaacgtgggctgccttcaggaagcactgcagctggctacctcctttgcccagctccgtctgggagatgtgaagaactgatgggagggaagccctctcgggaaagcaactcgccatcaaccagacatgtccgaaggcgggaattcagccaggagctctcctcccgccacgaagacattggagtcatgggacctctcagcagccctgtccgtcctgatccagcggtaatgggaacacgcctggagctgtcctgtgattcattgcccccctccattactgctctgagcccattcatgtcagcaccatctgtctaaaatcactacccaggaatgctttttaacgtcatgatcacatctagatgaggtcactctgccagcctgaggctttaggtctgcagaggaaggaagccttttctctgcagaaaataaaaaggaccatgtgcaatacttggtgatgtcatgcgctctgcttcttgtcctgaggtgagccctggctcctgtatatctgttacggttccagcctgtttctggttgatggtatcaccgaatagactcccagactcctgaaagttcaggaaattcaatagaagggtggaggaaaataattctgagttgcttccagtggagaaccactgttcttagtctcttaggacaacctccaccatgcctgtccacatgcctgtttgaggctgctgatatgaggtcagacaactgatataggcagtatgaacatgtaggtgtgtcctactaactgccccacccctactgctttaacctaaagtaggttcaagaccctggcccagccctaaaatgcaatttgtatgaatctacaaacagcagggtctggaagcagagatactgtctgcttatgacagttcctcagagtgttagaaatatctagttgtacaaagagagataccgtccatttattaaacaagtgttgaagcagccagaggactaattgcacgagtaaacaaaaa

SEQ ID NO: 34201 - DNA, 1238 bp, Mus musculus
gggctgtggtcgagctctgaaaagtgaaaaggtgccaggcacttaagggcggtctcaccccttttcatacggagggatgaattatctatgcagacagttgcatgaatggctggtgcgaatacacaaaacattaggtcctgcctgggatgaggctggtgagcacgttgagttggagtctagtctaaacaaagaaacaattccctagtgctgcagtcttacgtgcccagctctaaggcgactccgtgggctaagtgaaggataggatgcccatctgcccttacagcctgcagggtccccacaattgggaagagatttccggccacctctgcttcctggcttctggcggtctgggtgggcggttgaggacactcagggctgcttcggattccggccggtaggaagatgaaaaagccggcaggcgcaggaggtcaaagcggagagggcacgcatttctcctcaacaacttaggtcagatacgaacgatgttgtatccatccagagctccaggtgcaggatttcaggaataacgatgcttcgtgagctagaccctcagagactgaactcagccaggaaaggccacttttacagtaaggcattggtggttcagtggtagaattctcgcctgccacgcgggaggcccgggttcggttcccggccaatgcatatatctcttttcttaatggctttctcaagtagtcagaaaagaacacaaagaactaaaaaacttcaacggacagaataacacttgtgtgtctgcagcctcgactagaagagggagcccctccctgcattgaatcgagtgcattgatcatcatcccccctcccccgcccctccccgtccttggcttttcctttttcctccaagaggcgcaatctcttgctaacagtaccagggctaacagctgcagtctatctaaaatcttgagttcccccacacagaaagtaatggaagaagaaaattaaagaagttcaaagaaaatttaagaaagaagagagaaaaggagagagagaaattaaaagaaagtaagagagaaacccaaaacacaccattttgtaggtgtctctataggcaaaaaccaaactgcctcccagagctccactttggaaggaaccagtggggaccatgttaacaacacacaaggtcgatggcttctgtgccttttagcagagaagtctagtgtccttggctccaggaattgaattcaagttgtcaatcttggtggcaggcacgctaaccc

SEQ ID NO: 34202 - DNA, 4106 bp, Mus musculus
tgacaacagatttcatcaaccgaggagaatatgaaattgacattgcaggacatcggtttcaggccaaggccaagctctaccctgtcacctcttttttcactcacaagcgtagaaaggacgatgtggagctgagcgactttcatgggaagtaacgcaagacactcccttcccacattcttgccatgaggagcatcgttctcagagccgagtttccctccgtcctggtctcctcactgaaggtacctttgtccttgcctaggttcaatttgacctaaactttttccttgaaaacctttcttgtcttcccattttctcccatttgctgttacccctcctaataatccaggctcttctcatccctccagcaggctcacatacccacaatggcgggcagaacccacttgtggagtggtattagggtgacagactgattttaaattcagtgttaggcaagttggtattatttaagtcttagggtaaatatccatttcccttcggcttagattcttaccaagtaacctcctagtttcggtagatgattttgtgtctgatgcagccctgggaataacttgtgtcttaaccaggcagataattctgttccactgtgctgaggttgccacctgatacctcgtaaccatctacctcaccaataagagcgattgtgtggacactgtctgctctgtggaagggggaatagttacctggcacccagtatcctccaactttgtccttacatgtttgtgccagggcaccctacctgcattttcttcattttctgctatcttttatcatgatgttggtttttagctgagtaaacaggtatgccagtatttgaaaggaaagacaaaccatgctgccttttctgttgcttttcccagtaggagcagtgtgaactcagatgctgagttcctactattagaggaggagtgctgcttttcttttagctaatcatattttggctatcccttattgatttcttcagatgacttctagactcatctgtgccttgtgtagcctgcctacaacctcaacatccattcttagccttttagaagaggaagaggggatcaggcgggttgttttggatgattaagtaaaccatgctggtcatactgcatttcagagccccaggctttgtgtccctagcatgaacaaagccagacagatgaccactgagaactgtaagtacagtgcaggccagagactgcttcccatcctttctttccaggctccccaccaaatgcaccacacatttcagtggcactgttgtttttgtgaaaattggagctagcctcaaatttgtgatcctcttgcttattagtctcttgagtactgagatttcgggtgtggtgacagtttttttgaagttgaaacttggatgtcatggctgttctatataccatcaacactgattttgtttgctctcatatacaaactgtcccagtcttggagaacttttaattctctcagcactcaagatgaagaggcaggcagggtctttgtgagttcaaggccagcctggtccacagaatagagtgagttccaagagagccagggctacacagagaatcctgtttcataaaaccagaaagtggggggagggagtgaaggagagggcgagggcgagctcaggcaagagagctagctggccataacacatgccagcctttaattcagttaaagtaattctcagtacccgggaagcattggttttgctaaactgatatcaatagaaatcctttcatttctttagagcagctcaaatttctagtgtcttctttgacatttctgtagaactttatccactcagacttttctttcttccttccttccttaacacatttcttgctgttttttccagctaggccattcctacttggctttcaagattttaaatgattaaaaggacacacaattagaatttgatgtgaggggaattagtattttgggaaaaatacctatttaatgagatgagaggaactgtttctccactagagagctgagcagggcagcagtagcagtaagctcctgaggagacagaacaggctcttaactgacctatgggggtggaatacagatgcacagctccaggtattgtgtgccctctctctctctgatagatatggctgttggctgtaacattccacagtctgtgtaatgaacgtttatttggtattgaatacaaaatacatttttgaactatgcattacttgtaaaaaaaaaaaaaagtagcaatcagcaggtttgctctttaaatatggaagttagtacttaagttccaaatcagaaaaacttccaaaccaatatagtttacaattgggtataccaccatcacagtatattattcagaaacaaatgtcatcaagagtattttcagcagttttttattttcttctgcacttgttaatcactagctaattaactattaagttggagggaaacagcagcttcctagtaagttttcagctagaagttctggccgatgctgccatcagcagagcttacacaccgtgcttgtcttgctgcagttttttctatgcttgatggcacaagtaccttagatagtcgagggggctgcttacctagaatatctgatccaccagtgtggtagagctgggcttctcaggagtagatgcaagttgttagcagaaatggtagctctagagcaacccctgaccctttcacaggtctcctaaataattggaaagcacagatatttacattatgattcataatagtaacaaaatcacagttactaagtagcagtgaccctacattggggtcactgcaaatgtgaggaactgtattaaagggtcactgcatcaggaaggttgagaaccactgctctagaggcgtgaatgaaaatctaggacgactaaggaggaacaatcactgtacctcctgagctgtgtgacacttccagttcagggacagtgaggctatcttggcttgccttgtataacacactggggagccggttagctttaagggattgtaaacacttcagttttaggtgacagattctctggaataatgttaccacatctacttcctagaagtgagggggttccatgttctcttctttgattatagaagcaattaaatctctttgaacaaggtaacaaagtatatagaaaacctagaattggaagttttctgtgatactccatgaaggctcttttctcttagccagatgcaaagcctatttctcagcactaccacagttatttgaaatatgctcaagcttgtaacagagttcccttccatgacataggtactgaacttgcaaaaaggaacaaagaggaatggcttgaatagtcttaattgtgagactacctcactgcatttctagttcttctgtgggttcctacagatcatattagtcctgcacacaggatcatttagcacaattgtaaaccctagcttcagtctggtcaccaagagcccatttatgcagccgtggactatatagccacttcagcttggcacttgttgtggaagtacattagctctggcctgtctcctctatattgtgttcaagaaaagtaaccaaacatgaaaaacaaatttgtagatttcagtattaactgatctgttttgggatgtgggtgacagctttgattttcaggttaccttatgaacacatttgctagcatgggaaaagttcttcactgtccttggagagaactgtatgccttacagtattggtactagccctggagacagacctggatgagcagttccatcatcctgtttgcaggggtgaactacaaatttcatctttgtatcttttggttaacttcttggctaaggtaacagatttatatttaggacaatgaagtcacttttccattttctgcatcccaacacccccagctcacatgttgataagcagcatagtatcaacacagtacactttccttctactggaggatgctcctcctgcccttacgtctgtaggcacacagcttgaggagcagtaggtgagcgggtgaggatgatgcctgagttcggctgtggctgagctgtgggcggcttggcagcacctccctttcttttggcctccaaggtgctgatctgtaagcccccatgttcgtcagcatggg

SEQ ID NO: 34203 - DNA, 4661 bp, Mus musculus
agtgaattccaggcagccagaactacataaagagactccatctcaaaaaaccaaagtattttttaaaattaaaaatatttctaatttaaactaaagaaaaaaagatagttgaactagtaggtgtccaagggacaagttagacatggccctgctacccacccagcttaccctcagaggatcatattgctgtctcctttcaggtggctccagcagatggcttctctgatcttgccatgcaagtgatgacatctccctcaaagaactacatcctgtctgtgatcagcgggagcatctgcatactcttcctgattggcctgatgtgtggacggatcaccaagagagtgacacgagagctgaaggacaggtagaggcgcaggcctgaccaccaaggagccaccgcccgggcccgcctgtacagccgtcctgtatagtgtaccctctcactgcgccctctaacggtggcactgacacccacagtagagcagcatcaggtgcccactgcatcttcccatccagacttggccatgtcctcggtgtcctcctcctcctcctcctcccagctgcccttgcagcgtcggcagctggctgctttggtggtagcttttgttggcgaaggtttacctgcctgtagacaattctgtcatacctacagaactgctggtacttccagaccgactcacctgacctgcaactcaaatttttaaaaaaaaaaaacaaaaaaacaaaagacaaaaaaattttaaaaaggaaaaagtgtatatagtagaacttctccttcagtcttgactcaaacagtaggattattctttcatgtaaatgcagcaggtgtcagcaggacttggaggagcgatgcatatcccgtgcctgatcattgacatgtctgtttcctctcccagaagcaactttggcccacatcaaggcagggacttcagcaagtagtggggacactaagcagcctgctctagggcctgtttgcttctactgcagtgtgatgccttctaccctctaccccagacgagccactgcgacccacagtctcatagcaacaggcatttctgtgtcgcccacttcagtgcagatgtgagcctctctgtgtcagtggaagcggactagggagggagcagagtctgaagcaggcctgggtgcacagccagcaggggcccagccatcctcttcctccaagatgggatagagctgcctcatcttgatgaaccctcataaatgtggggttccctggaagttctctacctcgacaagaagtagttactaagttggggtgtagggcttctaagatgagggtgggggtggcagggcaggaaggaacaggtgtaggacttgcttcacttagtttgctgaacaatagtacaggccagaagagatggcttctgaagatttagcgtgatctcgggtgcgtggctggcattgaagcctgactttctgtgcatgccaggcagacttcctgactgacaggcagacttcctgaccaacaagctcctttgtgcctctaaatgaagggatgtggaaagtgattgcattaaaagatggaggattttcttcgttcttttttccctcctttctgttcatttgctgcgtgtacccactccagtaggcactggctcagtgttacattttggtgatctgacaaccttccatagtctgagctttacaggagcaggatccccagccatcttccctcactcctccagtgtgaagatgacagggccggagcataggagggaggagcccaggcactgcagttcccctttggcgagtttgggccatggtgtcacagtggctgtacagagggtggcatgtacagtaggagatatatttatataatatatattttattaacctgttagatgtccacagagtattataaatcatgtgcctagaactgtccacacagacccaggccccctcggtgccgccctgctcctgcctcccatatgcacctacagctgctgccgcactggagccatgtgtcttcctgagatgcgttctgtgcaggctctgtcagttgctccaaatcactctgtgtctcacctgactgacattcatttgaatactgtggttttcttttctgctgccttttctggtggcagtgagttccagggctagctgtgtatcccctgcatagggtaatagaagtcaccaggggaaaatttgcaaagcttcctgggcccctacttactgcttctagagtcttcctgattctcagcagctgtcctgggattcttgagtttgatgagacttaaaactcctgctctgtaagcaacctcctccactgctagctggctgagccaatctaaaggtccctccctccctcccccgagagtctccgtgtcacattgatgttccacagttagacgggggtagaatcatagctctgatcctgtggctcccttccggtatgtgcttagcatatgatgtgtgtctcagcactgctgcttctgcactgacaggaatccacactgcctgcagcagatttggaggtttggtgggtttggtgaatttgattcttaaactatttgccattagacatggtcagaatagaaaaaaaaaatagctactagtgttttaaattgcttagtacaaggaagtgaccatattccttggagtagttcttatgacttgatggtcctaggcctggtcttaagcaggtttttctaggctatgtctaaggggcccagtgctgtctattctgtagctcattgggcttagtagggtgggctctgtgccctcataagtcagtcatgggtataaattagatagacatgaacttgccaagaaccccaacctggccgggcagtggtggcacatgcctttaatcccaggacttgggaggcagaggtaggcgaattactgagttcaagaccagcctggtctacagagtgagttccaggacagccagggttacagagaaaccctgtcttgaaaaaaaaaaaaacaaaacaaaacaaaacaaaacacagacctacagtgcgagccaaagtctgagcctcacccttcactgtcctgctttcattgcctaagaatagcagttagggggtgtaggccaaggctcaggcactgctaagtcactgtgggctagcttgccagctcatgccagtgtcttggggaccactggtggtaggtacatttccctttggtatttcaaaaagccggggcctgggccagggacagggcatctgtggaccaggtcagaaatctgtcaatgagccaagaaccagacaaactaaacttcttttctgatggggctgcttctagtgaagggactccaggagcaagacatttcttttaacccggtccctggacttgactgttgtcgctgctcttgggggtattttagcagtctgaccctgggaaagccttaactctctgcattcccagagaacttctggccaccatttccagtcctggttctgtggatcaagccagcttgctgagccatgcatccttaataggcaagggcactccagagccactgatgaggtgacatctagtgatcaggtgataacaaaagagttcagtacaggtaccatgactaccacctcctgttcttagataggagcatgcagtccactgtcccagacgagttggcagaaagttatccaactttttatgtcttcctgttgaaatcagctgatggaagatgctctgcttctcagacactaggacgagggtggagttgtgtgattagtatcctcggccttcctagagagcatccactcttgtgcatcagtgtgacttccagaacccccgcctcccttagaggctatggtaccgtttctggactttctggaaagaaacctcccttccattcttttttccctaccccaaaacaaaacaagctttttccacttgcccccagttcagtatctcagaagtcaactggcccagtctggtatcctgcagcctaacacagggccagagaaccaaaagaaggtgtggctttttgaatcccatgcttcttggaagtttgtgtttcttcttgtgagtgtgaaaattcaacacagctccgaacacccccttgagttttttgctctttgggcacacttagtagttctgaagagtgtgaccttcagggcccaggtctcctgacccatctctgccccacttggcttcagttcccaaggggctgtacctgacctctcgcctccccttccctccaggtagctttggtttgccatctgtttagctccacttctccctggcctctccactacggaggcctggatcacctgttatagtaaccaagtctaaagccaaatttcccttcttgctacccagacctcaaacaacagtgagttgtaaagcaaccaagattaaacctcagggtgacacactcccctgagcagacagtgagactgctgtggcggcttagaggctgcttgtcacccagaacacaaagatacggttgtctgtgcagacaggtggtgacaaggggttttctctgacatcttcacctgggcactgagcaccaggcactggagagcttccaaggtgaggaggtgcgcagacagaccgtgtctctatgtcacgtttcaccttctcccagctcacactgacatgagaacctcagagcgtggggtccttacaggaacaggtcccaggtcacttggcagcacggtcgtggccgagcgcttcctgatggctac

SEQ ID NO: 34204 - DNA, 1195 bp, Mus musculus
ctgtcctgccactcgaactatagaccaggctggcctcgaacttgatggagatcctcctgcatgttttctaagtgctaggattaaaggcctgtgtcaccactgcctgccctaggtgtttattttatatgatgtgtttacctttttattgttgttattgatatgacagtgatctcaaattttagagaaatagactgaagtatttactgagctatgcttcaaatatcagcagaagacactgagttaaaacacatttagttgcaggatcaccaaagctctggagaacagaagtggcctgtacactattctctactcttgcatatgttggaatgttttcatactaaataaaaataaagctgctacataggtcttacatatgcagagtttgaagtccaaaatggctttaaactggtagaagaaataattactgacaagatcagttaatttgtgtgattctcaatcatgtcaccctggggaatgcgtattgaaatgattttagaagcctgtcgtcaaaacacttcttcattacaatctacctctttaatgaccaggattctctcatgtctgatggagcatttatacacagagaagatggtggaagactgtgaacaccggctcttagagctacagtattttatctctcgggattggaagtgagtattttaaaaatagtggaaggcactgcctcattctgttcccttgtgtggtcaatatcaaaagaatgggtgtgtgtatggggaagaagttaatagtttatcagtgtgtacatatgcatgctatgtgtctgtttgcctcagcgagcagttgagagtcagagaacaactttatagagtctgttctcttgcctccactcttaaataggttctgagaatcaaactagggtcaccaggcttaaaccataaagtgctttatccactgaaccatctcagcagtccacatgaggtttaaacccagggctttatactgtagagtgtacactcctctactaagctgtgtccccacaccccacttttatagtttatgataataagtaacaaattaacacattctttttaaattcttggatagctaactatctccaaccctcagaaaacctattcttactgctcctagagcagtatctaaaagcagagtcaacccactaccagcctgtaccaagcatccctgttcaccactactttggatgctggactcaaaa

SEQ ID NO: 34205 - DNA, 1216 bp, Mus musculus
ttagtatatttgaaccctccaaaaacctatgtgatgtcctagcaacagttagctactaatttactgcctgatttcactttcccagtgatttactccttactctttccatactagagtcagatttttttattatcattttattttcatttattatttttcatatatgaatgttttgcctgcatatatgtagatacactgtgtgtgtgtcagcagaagttggagagggcttcatagagcacccttggaactgtcattgtagatggctgtgagccaccatgtaagtgatgagaatggagcctgggtcctctgaagagatgcaagagctcttaactgctgagtcatatctccagaccttagagccagattcaaaacaaacgtacagataggtgttttggtaaaaagtgcaacttgcttggttctgagtttctgcttttcagagatagctgagccacagtaagtctcagggtagacttaaggtttcgttccttatcctctttcctcagtgtagagaagcactaactacacgccagaagctcattgcccaggattataaagtcagttactcattagccaaatcctgtaagagtgacttgaaaaaataccggtgcaatgtggaaaaccttcctcggtcccgggaagccaggctctcctaccttctgatgtgcctggagtcagcagtgcacagaggtgatgttctttttccttttctcctttcactccttcttcagttcacattccaaagcttcttgtacctgtaattagtagttttcttctgcattttttgaaccttttgatttttagaatgactactggaacagtctttagaagaatgggagaacattaatgtcacatgagtttttggtcagagtgatgtgacttcaaatcctgggtctattactaaagtaactgggtaactttttttgtttggacttgaggactgagtggggtggttgctgctttttatgttctccctgttcacatttatagctccaagacatggggagccatcatgaattttggaagaatagtcttttccacaaactttagctgtatagggcaataacgattgttctcagtttatttactgccccgatagctttcgtattgctatgtagcatgaatgtgaccatgagttcaatcccctgcatcagaaaaaggacttgctttggcagaacatttgtattatggttgataagatctatagtgcacaaccctg

SEQ ID NO: 34206 - DNA, 1099 bp, Mus musculus
taacattcatcgaattgtcgcctgcttctctaggtaagaaatacaggtcagacacaaaatgaggctctcagataccggaatacattcggttttgaagttcatctacacacaacaaagtttttaacccttcctcctccacccaccgtgagtcaccgaactggcgaaatattccaccggccatcttagttgtgtcagtccaaattcacttctcttttttctcttccgtgtcaacaatcgagagatttataccacggtgcccctacgcaggttttctcagcagctccaacagttcctccgggaaggctatccactttcccgccagccgggtccagggcgtgggcccttccttcgcagcgcaacctccgctgcttttcactccgccgcggactcccgagtctaccgcccgctggggaggagccacgccagcccacgcccgcggctccgccccctcatttaaatacacgtcgccggcgggtgcgtcgagctcgccgcgaacccaagatggcggtgtgtggacgtgtacgggggatgttccgcttgtcggcggcgttgccgctgctgctgctcgcggcagcaggggcccagaatggtcacggtcagggccagggtccggggaccaactttgggcccttcccagggcaaggtggaggcggcagcccggccggccaacagccgcctcagcagcctcagttatcgcagcagcagcagcagccgccgcctcagcagcagcagcagcaacagcagcagtcgcttttcgcggcgggcgggctcccggcccggcggggcggagcggggcccggtgggactggcggaggctggaagctggcggaggaagagtcctgccgggaggacgtgacccgtgtgtgccccaaacacacctggagcaacaacctggcggtgctcgagtgcctgcaggacgtgagggaggtgaggaggtgggacgagcctggggaggagggccgagcctggtgcgggccggagggtgtcgccggcctggaagccgcggatgccgggctgcagcagcagcttccctctgctcttttccttcagggctgtgctcgcgcctctctctttcctgcccctcactcccgggtgcgtt

SEQ ID NO: 34207 - DNA, 1923 bp, Mus musculus
atcaaatgagtacccttgggaatcttgcctggaaatttttttacttaaattctatacagtcctctcaacttgctatttagaatatgagtatgcaccaagcattttggggttgtgataaccaaccaaccaacctaaattgtcttgtcagttaggctaattggcttaaaagtggtacatgaaaggtctgccttgcttcttggatgcaaaagatacaggagagagtcttccactaagcataaagggcaccattaatatcttgtgtggaatttgacctatttccaagtctgaatgctcataacctttcagtgacttgatttctcccatacccctgcactgctgtctgcccccagtgtctggtacttctgtgagatatgctttgtggcaacaagttacatcccaggtatccatgcctactagaatgttgataagtccaatggtggaattggctgactagctagccatatgtaaaggcatagctttaagctttgtgcagtaagttcattgcattgtgagaggtgaggaaagggaagaggtgtttgggcaattgttaaagacttgaaattttctagttagcttgagatactcaggagcctggcttttactcgaactcaccccccaaagtcaatgctgaaggatagataattcccaagtaaaaacttcccctcctgttctacttttttctgaaaatgaagtggttattctcaggaagttaatagtggctagagatctgtaggtgacagaaaggaagacactcagaaacttccattcttgtggtcccaaattgtccagcatttagaggtatgctcaggttatatttgtctgctttgccttaggctactccactaagccactgcccctaagacaccttgtctcaaggcataggcaacatgtctgattctctcagatgttctttgatgaagcactatcttttttaaataaaagttctttcatgcctatcaaactcagctattttggggacctgtactgccagcaagggattattaagggaaaattgttaattttcccagaattccaagttgtggctttatctgcttaatgaaacctatttgaagatgtgtaatttgttttgtttttaaaacttaaagtaagctttaaaaatgtcagcttccagacagttgaggtaatacatgcctttggtcccagcacgctgaaggcagaaactggtagatccctatgagttcaaggccaccctcactacaaagtaggttttggacagccaaaagctataacacggagaaaaaggggggggggggggcaaaagaaaaatgttagcttccacagcgtagaggaaagtcgccttctctccctttcttcccccaggtgcttttgatagagtgatgcttaagagtagctgcctgggcctggagcttcgatttcaggataggattcaaattaaatagaattcaactaactaaagcagatggccacaataaaagctgtgcgtgtcaggttagtctggggcagggttaggatatgacttgccttgaaggacatttaaggctgactggggatttgctaccacagaagctaagctaaataccaagccttgccgtggcaatttgcatttccacaataaatttggattggggtgggggagtgccaggacctcaacctggttaaggtttttgctctaccactgagctgtattagaagcccaaatctgtgatttggaagcagattcacagtatggaccgattgaccaaagacaaccttattgcaagaaacttcatctctaaacctgggctctagtcttagcaccagcaagatctgttttgttttaaaatcttgtcatagggcattgggatttctgaatatctgctgtcctgtgtgtgtttcaatgttttaatgttaacaaaataaagaatttgtaaggtgtcttcccagtgtcttccgcctgtttac

SEQ ID NO: 34208 - DNA, 1231 bp, Mus musculus
ggaagtgggaagagagagcactcacacaaagaaggagaagtgacttgggagagaccacagtgtctgtgttatatgggaaaaagcctctgggggaggggaaggcaagcccctgggctgcaagttcagagtggagggtgggaacatgctgggagaaccaggtagggactgagggatgctaagagaacctgggggccaggtctactttgatgtgttaaatgtgcaactcagccacttgtcctgggtttgaatcccggctctgttgaaagtaggtgcagaatattatatgtatttcctttttatttctcttacagacctggctcgttgctttttagagggtgcaggaggatacttatctttctgtttgacttctgttgagttgggaatgtggcccaggtcctctggtcatgaggtctggaacagcccaagtgttgtatttggaatgtatgtcatgatttcctttttttgccttcagatgtcctctggtatccctgtcatatttacccaaagctgcagtggctgcatttccttatggtggggtgctggctggaacattggagaatgcctccttctgggagctaaaatcagacttttctcataagcctcatgtgctgtccttggagccagggggctttgtagactttcagacagagagcagcacccgacactgtcttgtgacttacagacctggtgagttctgaaagttcttatgggcctgctattttgggggtggggggtggggggtggggaggaggtacaggtaagaagaaaccaggtggctttggtcagcttctctaaggctgacaggctgtgctgcagttcttggtactacagtgaagatggtggctcccatttctttcacagagagtgcctccctaccctgtatatttgacagctttcctgccatgtgtttctggaagtgaattaagcactctagaatctgctgtatctaacaacagtgacaggatgaggtggtctacccttgagtccatctcatcaccttagtccacttcaccctcacttcacctaagaaaagtccccagctgcaaacagcccgatatcagatcagtgttttagttactccatatttaagtccaacaaagttaagatggacagcatggttttgtggaactatctaggcagctcaactctactgcctccaaatccatggatagaactccgagcagctattgatttacaggtttgttttgttcccacttaaagaaaagaatcg

SEQ ID NO: 34209 - DNA, 1554 bp, Mus musculus
gttgcagtttcagacacaccagaagagggcatgggatcccattacagatggttgcgagccaccgtgtggttgctgggaattgaactcaggatttctggaagagcagtcagtgctcttaactgctgagccatctccccagccccagtagatacgtttttgcgttacgtggttgaccagggagaaagaaaatgcatgaggatgagagagaaggaagaaatgactgatctgccagagcctgacagggtcctgagaggagtcggtatccttacccagccagactcagtctgcttttattagaactaatgtctcctcttgctttgcccctgtccacccatttgcagagtttggtgtgtactgcagtcactgtcggagcgaggtccgtggcacccagtgcgccatctgcaaaggcttcaccttccagtgtgccatctgccatgtggccgtgcggggttcatccaacttctgcctgacctgtgggcatggtggccacacgagccacatgatggagtggtttcggacccaggaggtatgtcccacggggtgtggctgccactgcctgctggagagcaccttctgaacttaaaggacagtggcacttccggaaatcccagaggactccataagtgctggagaaggctctctgctgctgctggtggaaagtcctagaaccagggccatcctcgtgatttaggatggagagtatcctctcacagactgtcacagcatccgctcgtgatcctgtgtgttcccttctccttggctgccgggcacggatggtgctggaagaagggagggggacgcacagagctgaccctcctgtactgtctgttgagtccacagtggatgttttcatgaggaaaagcacctgtttccagagccatcagagctagcatcagccttcaagattctgtccttgaaccaggaatggaccctccagatgccagtacaaaggcacacagcagctgcaaaacagactcctgagccagaagacgctggctcttagtgccatccacaagtgagctatggtatctgtgacttagaagttggcaccttgatgatggccttataaaatacaatactaaagtgtaatatatgatggacatatattcagcattctttttcttggtacagggctggaactcagcgccttgcacatactggtgagcagccataccactgagttacattccagccccataagaaacttaagatgtatatgttttctgtttctcttcatctgctttcctttaactaatagaagtttgtacttgtgtgtgtgtgtgtgtgtgtgtgtgtgtgtgtgtgtgtgtgtgtgtgagtgagtgagtgagtgagagagagagagagagagagagagagagggagagagagaggatgaataaggaaagtgaccgtcttagtgactcattttgcattgtacttctggttgaagggaactgttttggaccggactagaattagtctcatgacttgtaaaggaaatgccatttgactttgatcatctgacagaggaaacggaatctgacattaaggttctctctagccgcaagagtc

SEQ ID NO: 34210 - DNA, 1193 bp, Mus musculus
caaccggtgagggtcagttttctctttccactaaatgggctctagggatcaaatcatgattgtcaggcttggcagtaactatcagccaccactgaacgacctgtactcagaccactcacatactcagacctgtgggtgtgtagttttcgactaattaagcatttctgtgctgctctgtaggatagccatatactaagttatccctgcagccggccatgcatcgcatgctcctgtggctacttctgtcttgtctcagttaacactgcctggctccagcccactctgacatgtccttcccttatgtgagcggccccaactggataaaaggatagtagttctggagtatggacatagttcttcttcaagaaattggggcctgtaggagactggaggcttaccccataataacaggtcaaggctcccctgccccacccctccccctttgaagaatcaagaggtgtggataattatgatgaacaattcataggtgtttcagctaacctacttcacttacttgtctggaacccaggtggcccacatttagtaggtcccaagacatattgattagtatgggaagtcgattcagtggacacttagagcattggttgaaacgcctggatttaggcgtagacagattcctgaaagagtgattatacagaactcaggagtggaaacgtgagtggtgtggctcctgaccacttacgggcattcacagaaactgcagttctaggttgcagtgttaagtaagtctgtgcatctgcatctgtgtctcctcgctgtaccttactcacttcagactggatagcagagctcagcattagctaataagacaagaaagactgacggctgtgagactaaatccacagcaagtaattaactaggagtagcttgcctagggccatattgaggcagaacacacagtaccttagttttctgatgtcaaactgcaagccccttttagttgctccttatgcctcccctgttgataactgtgtggctcccttgcttaatcaagtgtctttggtgacctcttttaacttttggaaataaaataggacattgctccgataactggttgtctttttgaagatgccagatggggcgacactctgtgactttttgtttcccacgacatttctcattcctcacagccacttcctgaggcagctctgggagctgaaacatgcgcccat

SEQ ID NO: 34211 - DNA, 1229 bp, Mus musculus
gagttatccaagcatttggcttagcctcatatttcatttgctgtgttccatagaggctgtgtgtaatagacatcatatgatatttgacaaaattttccccagatgagtttgagctttccataatttttttttaaagataggttctaagctgggcagtggtgccacacatttaatcctggcactcagaaggcagaggcaggtggatctctgagttcgaggccagcctgctctacagagtgagtttgaggacagccagggctacacagaaagaccctgtctcgtaaacttaaaacaaaacaaaaaaaggataggttcttcctgtgtagccatggctatcctggcctgtaatttgagatgtcgaccaggctagcctcaaaggtgtggcaattctcttgcctctgctttctcagtgctggcattacaggcccgagccaccatgcctggtgtctatcatgtagcttgatttagttaggaacagttccagctttggtttggtttcggctgattccacatggagtaagcccagcttccccttcctggctgcagcctttcagcaacgggctagtgaccgtgatggttccccagctgcggagggagaacagcctgctcctgtggaacgcgtctgacttgaacgctccagttcacacctttgtgggtcatgatgacgtggtgctggagttccagtggaggaggcagaaggaaggtgagtgagtagggagggctgtgctctgattttctcctgagctctgctggacatctctgccagtcatgttgtcatagtgaactagcagaccagggctggctctagggactggaatggaaggcaggcagggagggagggctgtgttgaattagagatgaataaacagagtgtgcaacattttccctctccctagttctgttctccaacttccattgtgtctctcttgcttggaagagatccgctccaggaagaggttgaagaggtggtttttattttggtttgtttttttaatcatttcaagggccaaagactttagaatcttccagagccaagccataacaatagcaatttttaaaaaaagatttatttattaatttattttatgtatgtatacgagtacactgtagctatctttagacacaccagaagagggcatcagatcccattacagatggctgtgaggcaccatgtggttgctgggaattgaactcaggacctctggaagagcagtcactgctcttaactg

SEQ ID NO: 34212 - DNA, 1184 bp, Mus musculus
gggagtggagaactgactcctgaaagttgtcctctcactgccgcaggggcaccatagcatgcgctctgctatcctcagcacacaaacaaatgaatgtaaaagttataaattttaaaattgttttagggttagagatgtagctaatgggagtgcttgcctagcatgcttgatgttttcattgggttgtttgtattttacgtattgcgtatgtaatccacctgtctttaccttagcactgggattactaagcatgagctacaatggctgttaagaaagcaaaaaaggcctagaggtccaaggtttgatttccagcacctgccatagcacatgtgtggtcagatgacaacttttaggggtcagctctgtcctttcatggtgagatctggggaactaactcaggtctttgggtttgccccacgaacactgtcaatatttggtttttgagtttaatgaagtgtttttctgctcttggtgggcttagcttgggggtgggtagtaggaccgtggaaatccagtggccttcagagtcactttggtctcacaatcacaaaggacggtgaccgaggccactagcagggcaagcaagccgagatcccctgatagtaacagcttccacagcaggtaggagtctcagaaatgactcgctggctggctttctgctcttttatgtgttgggtctcattgctttagcctgtatattgtatataaattagctgttgatttgggatgagtctgggaacacaggcacacacacacactagtgcacttttgtatgatatgagtgtgggtatctgtgtgtgtgtgtgtgtgtgtgtgtgtgtgtgtgtgtgtgtgtgtgtgtatatatgcatggagagagagaccagtgtcagctttgggctttagtccttaggaaccattcattcacctgtctgtctttacgtccttggcgctgggattataagcatgtactacgattaaaaaaaaaaagggaccagaggattcaggtttgatttccaacaccatatgacagctcacaaatgtctatagcttccagagcgtccaataacttctggcttccttcagtactgggcacacatgtagtacacagacatacaaataggcaaatacacataaaataaaataataataaaaaatgtgtgtgtgtgtgtgtgtgtgtgtgtgagagagagagagagagagag

SEQ ID NO: 34213 - DNA, 1176 bp, Mus musculus
ggtaagatttcttaagtctgtctcttaatagaaacttcattatccttgttctattgtcaggttctctgatagagttatgaacttacaactgagttccaatatctcacactctccagatatgaaggcttagtgttctccccaccatcttactcccacccagtcacgggagtagggagtcccactgagtgatgggaatacaagaaaagttagagtcatcctttgggtgtctttaaagtgtacgtggcaggctcttgttaacattataggtaatatttgtatatatttacttatttttagtatatagaaccacctgtgctttttgcaagactctgggcctattgaatgctcctggcatcctgcagttcacctcatactgcctctgaattcccaaatggcttttattggggtgggtgtaccagtctgactgtgagctgcctgtgctgttcagcagaggtgagcattcatttgtgtcagtgttagaacaggccgtggaattttctggggcatccttttctcttgttcttggctgcaaggagagacgctgctgtttcgctgctgtctcggctgtggagccttggagttaggtctgagcagcttttgctcttgtgtaagattccaaaggtggggctttcagtgtttgactgactgcgggcctggaaactggtacagtgttagtacttgggttttcaaggtgctttggtgactcctcacaagcagagagctgtcattaaagaaataagtcaaagctgtgggcttgtgctgtgttccaaagtagaatactgagggcttccagttttaggtcctctgctgagtaactttgaccttggacaagacacagcacttttctctaggctcatctttgttattttaaaaatagatgtggtaatcctccgcggtggcagcttgtaacggttgttctctaaaccccaggagaggatattctgcaattgcgcttggcttccgtgcttctgtgtccctgtgccttcctcatggctgtgaccctcgaatactgagctccttaggacagaaatgctagctcttactttcttcacatagatagctcctttgaaccctttaggactcaacagagatttttttcctcagtgggcactcttaacatctgactttcttttttttttttttttttttttttgcatgttttataagcatttatct

SEQ ID NO: 34214 - DNA, 1199 bp, Mus musculus
ctgataactgacacttaacagctgcgtagtagatgcagcatgactgtactggacagagtgattcctctctcaagcaggatggagcgagatttcatcgtactgctcagaaagttatgcagtttaacatgtatgatttgggccctggtgagatgctctagaggttaagagagcccttgctgctcttgcagagaaccaaacatcagttcccagcacccatatcaagcctgtaaccccagcttcaagtgacccagcacactctgctggcctctgcaggcacatcttaagactgtcccttcttcccatctctgaagaaaccattctagcgtaaatgaagttaatcctggcttagtggaatttagagcttttagtacatatctcttgtctcaggatttctattgctgtgataaaaacaccaggatcaaaagcaacctggaagaaaaggagctgtaaattccacaccacactccatcactaaggaaagtctgggcaggaacctgatggcaggagctgatggccaaggccttgaagtaatgctgctttctggcttatgtctcgtggtttgctcagcctgctttcttataacactcaggaccaccagctgcaggggaggtgtctcccacagtgggctggggcctcctacatcaattattaatcaagacagtacagacttgcctgactagtcttgtggaggcatttctcaagtgtgattccctcttaaataactctagcttgtgtcaagttgacttaaacctagccagtatatatccattctattttcctacctgtgcctccatcactaacttatatgacttaggtgatatcgtcttggggtagaacagggccctgtctcttctgaagaacttggtatcctttttaggctgctgttctgtgcatagggcaagtcctgtcctcagactgtaaggtcttctctgatagactctgggcttgatgacagacactgatttctccctctgtgagagaggcttctctttgttctgtaggaacccagaaaacattcttaagtacagtgctcccccagccacccactcacacttcaaactcaaaagctcagaaagcaacaagctgaaggaggaactctgtctggagctccctgtctgactaaaggatgttcacccagtagacaggagattaccagaggctcctttcttggggtctgagtgattaactcacagggaaag

SEQ ID NO: 34215 - DNA, 1195 bp, Mus musculus
aattgcccaggccgtgtttaccaatatagggtgtgaactaaggcggcattatttctcgtttcctccaagtcctgtgacaacgttgaatgctttgctaactctcgtttactttctccttgtaagatgttttctctccttgtgtgctagtgcagacctttaatcccaacattgaggaggcagaggccctgagtttgaggcctgcctgggctacagagtgaaaccctgtctcaaaacaaacagaaaacccatccttttacggtgtagtttcattcctggctgaacagaatcatccttttgtggacagaagggaagtggtttggatagagtgagagcatcctgagtagtcacctgaacaccagcctggctcaccggctggtttgcccaaacctgacttaccctggggttggagccatgccgggaggcctctcctgccaggttgtactaacactgtttttgtctttatccaggtacattgagcggaaagcttttctggatcgagtggaccacaggcagtttgaaattgagcgagatctcaggctgagcaaaatgaaaccttgacattctgggaaggattcctagcagctgaatcctattgacaatgtgagctcctctgagtgtctgtgaaatacttccagtgttcctcatcatgtttccagcaagtccctttttctacgttgcagtttgtttaatgtatgttaatttcacctggcttcattcattttcctttttaaaatttgtcttttaaataaacaaacagaaccctctgtgaggttggtgagagtaagggtgccgtgctccttccctgtgctctgcctctaaggctgaaggccagcaggcccagccaccacatctcagacctgtctgtgatggtcacaagcctctttaaagtcagcctttcctggagactcctcgggggcttcctggggtggcagctaacactgagtctctgggcatttgttctcaatgcattcagctcctctcttgtgtgagattcgtaaggtggggacattgggataaattaacgctaagtggctttttgtcttttcctattcccctttctccttaaaaaaacagtctacttcagatatattttctacctcagtagttcttcaggttttggtcaagggacattctttccagtaatgctgcacacacctagaatcccagtgcaaatggaagactggcaaagaactgc

SEQ ID NO: 34216 - DNA, 1212 bp, Mus musculus
gttaactgcaccttgaccctatgccggatgctgtgttggctgtttgcatggacagttcctcgccatccatgagtaagcattcagtgtaggttgagaaatcaaggcacatgcacttgaacagctagccttgagtcattggggcagagctggaattcgagcttgtgcctgtgtgtgatttcagagccttacctgaagccctccattttcctccctccctgcaagcagggacctgccacccagtacaagggggtctgaaggggtgagggctcctgtcagcggtgcagctaagcaggcatggatgttaggcaggaaaggcgtattaggataatgccctgtctatagttgctacacagcaaagaacataccctaggtataagcatggtttctgttgagacaaatggcttcaacctgggaccctcatgtacacatcaacaacagcacacacggccagtgcagaaaccagagttctcatagtcccttttcttccacaggataaaaagagcaagtggtatgagcagcctcttagggaaaattggagccaaaaaacagaagatgagcacccttgagaaatccaaactggactgggagagcttcaaggaagaagaggggattggtgaagaactggccatccataaccgagggaaagaagggtaagaagggggtctgtcctccgcagcctcagagctctgcagcggcttgtttcaaactgtttaagcaaatagggcttcccgtgcttcagttactggtgaagctctgctctaagcggaggcagatcccatccctgagcagcagtgttcccaggacggttagtgaattacagcttcagtgaactgtaagttgcctggtttattcacaagacggggtctggctcaccgtgattggcttgttctaatctgaatcacttggccgtcagataatgtggtctagttcaagtgccaggacactgtcacattatcatgaatggtgtggtgctagtttgttccattgtgttactgtagtcctgtgcgtggtaggactgtttgctgcatgcagcctgtatgacacataagaggccattgctataccatttcccatccactccagaatacagaggatattccataagccaaaaatgatcattcctgttagtgtttattttgttttgttttccctgtggggtttttgagaaaggatctcactctataacctagtctagcctcacaatcatggcaa

SEQ ID NO: 34217 - DNA, 1161 bp, Mus musculus
ctcttgctcatgcgggcccaaacctcagagttcttcatcctctctgccccactttgcacccagtccaataagttcttttaattttgtcattttaaaaatcattttatttatttacattccagatattgccccccttcccagtccccctcccactgttcttcatcccattccccatcctctttgcctctgagaaggtgcctccctcagccccaggcaccccccttccctggggcctcaagtctctacatgattaggtacatcttctccaattgaggccagaccaggcagtcctccgatatatatgtgttggggcccttggaccagcccatgtatgctctttggttggtgggttagtctctgggagctcccagggatccaggttagttgatactgttgccatatatatccctatagggttgccatcctcttcagtgctttcaatccttctcctaactcttccataggggtccccgacctcagtccaatggttggctgtatctgcatctgtctcagtcagctgctggtagggccttctcagaggacagccatgttaggctctgatctgcaagcacaacatagcatcagtaacagtgtcaggctttgatgccctcctcccccacaaggagatggatcccaatttgtcccagtcactagacagcctttcctttgctttctgctccatttttgtccctgcgtttcttttagtcaggaacaattctgggtcagaaattttgacagtgggttagtagctccgtctttccacttgggccctgtctagtggaggtagtctcttcaggttccctctccccactgttggggattcggctaaggtcacctccattgagccctgggagtctctcacatcccaggtctccccacctcacccccagaagctgcatattccagtcattctcctggccctctggccttctctcctgtttccacccccatccctttccactccccctctccatccccacccaggctctctctaagtgagaccgaagcatcctcatctgggctttcttcctcctcgaacgtcttacggtctgtggattgtaccgtgggtattctgtactttttggctaatagccactgctcagtgagtatgtaccatacatgtccttttgggtctgggttagctcactcaagatgatacat

SEQ ID NO: 34218 - DNA, 1159 bp, Mus musculus
ccctgagttaactatgtagaccaggctagtgccaaacttatcaaaatctatctatctcttcctcttgagtgttgggattaaaggtgtgggttaccatacctggcaaacaggaaagttttattttttacatttctcccattaaaaatccaccagatttcctattaaactgtgtaggtaaatttccatctctagcctggctctgaataatggtgttaaagtggtgtacattgtaagtgagggtacacttacctagcagaattgatgacaacggtatattcaagtcatttatttatgtgagaaatggttccagggagacccagagagtggggtgaaaggaagagaggcctctctcagatactgctaactaactgccttttttgttacatatcagtggtattgattgtcctgaagactggctaagcagactctttctaaacaaatctgggctgactggatatcatcagcataggacagtctctttaaattgaagaggattcctcccaaacctgagctgtacagtcctggcatagccaagggtcaacatggaggctctgctgacaaaagggctgagaagggtgactacaggaggagggagccatcctcaggctgcacggaagagctcctggggtagagggcagctggggaaaggtgctgtcactggcagctattctagtgactttcttacacagggggaaaatgagctctgactgtgaaagctatagtggaatatactagagtatagaatatctaagtgtctgagtaaaagcgcaggagtatgggacatttaaaatctcaagtggcccttcagggcagtctgcttgtttttctgacctgtgtcagaaaactgcttggaatgccaaaggaagtcatctgctttggtgattgaaagtagacggtttttatccttgaaaacttgagaatctgcaacagatcccacatgtatggaaggtcttttcgagggaagaattttcaggagtcatctaatatataagagaaaagtaatacagtaaaatgtttgcttcccccaacccctttgggaatggcttcagtttatagaaactgttttccttttctctaaacagatttcagcaacacaggaaaaccagagcagacgagtaaaacatcctgtcgcacgtccttcagtaacaaatatggacag

SEQ ID NO: 34219 - DNA, 2186 bp, Mus musculus
tctggttaaatagtagccaggaggggctggcaagatcattcagcatgaaaggtagttctcagggtccacgtgttagatggtgagaaccaactcctgccgtcgcctctgctctctacatgctgttcacgtcacacataaataaaatttctttttaaatatccaagactctctgtgggcacttgcacccatatgcacataacttcctgtcctccacgtacacatgattttaaaatttgataaaacagccaagcagatcaatttgcccagtaatggcatcaggggaaactgcagggatggctccaaaaataattggctctttccttttgaccaccacttgtcaaaactgtagtgacgatcagatttggtgggcaactaaaatgcaaataaatggctcttcctatcccccagcaaaaagagcaaatctttcttccaaggaaagatttccattttcagtctgagagactttgaatttggaaaacatccttcagctggagaaactggaatattgtaccgggccttgtgggcgcggatggcatcactggaaggatgtgggatgtaattttacacactaagcacataggtgaataggtggttggctgttcccctaaacaataactcgtgaacgtattcatccatgaatatttgtgtttctaatcaagacacacaagttcgggtgtttttgtttctgtatgtttcaacggctctaaaaacaaacacttgaacttgaaatgtatcttcaaattacttagtgttttatctatcccaatatgtgtgaagcattctttttttgggggtgtgtgtgtgtggtttttctggtttttttttttttttttttttttttttggagacaggtttctctgtgtgaaaactttggctgtcctggacccactttgtggatcaggctggcctcgaactcacacagaagatccacctgcctctgcctcccaagtgctgagactaaacacatgcaccaccaagccgagctgtgtgaagtattcttttgtggataaatgtacatagagtctatagactgagctctgtggcttgaaatgttttcaggaagaaaccatttgaatgataaagagtgtgttccacttggacgctgtttctgctgtctctcttgctcttcttgtttcaaactcgagttgtttgccacagtttattttgaacacatcaccttgaggaatttcctcccagtaaggactttcttggaccatgattcctgcatctgagtctcccttctcatcctaagttctgagatagagaggcaacctccaaccaaaagctgatttcttgatgccttagtgggattttgaggttaaaattaagttcctgtgtaaaagcgtaatgcttatgagcaagatgcttctctgggctgcacacttcctttgcagcaagatttcacttaggaaatgcaggaagtggcgagccagcagttcatgcaagtaatagtgtccatccttcctgcgtcctttaggtttttaaattgtatgttggcttttgattccaatgtcttttatgactgccctggtttcctgtaagttattgtgacagccgggacatgccaaccttccctgaggaactctttcctggaatgtgaagccctggtgccattaatggtccacgcgcagaaggttttgtgaacttgtatttctttcttgtgtactgtgtagggctggttatgaccaaaatcagtttaactttttatattaggttattgcacttaactgctatagtcaaaatgatcaaatctttgtacattagagatttatttaaatattatttttctactgacatttctaatgctagtataaatgtttattatcaataaagaattactttaaattctttgcgttgggaaccttgatttgtttgtttgtttttagatttcatttgatgcaatgtcttgctatgtatccttggctagcctccatctcttcatgaagcccaggctggccttgaatttgtggcagtcttcctttctctgcctctgaggtaccaggattgcaggcgtgccaccacactcggctctgcagttgctttttcttttttctcccgactcccaccccccacccccccacctagtactacaatactactgttaccaccaccacctcttccttctcctcctcttcctcttcatcctccttttccttctcttcctcctcttttttttttttgtttgt

SEQ ID NO: 34220 - DNA, 1191 bp, Mus musculus
tccaaactttgtctctgtaacgccttccatgggtgattgttgagcgtggtggcgcacgcctttaatcccagcattcgggaggcagaaccaggtggatttctgagtttgaggccagcctggtctacaaagtgagttccaggacagccagggctatacacagaaaccctatctcggaaaaaaaaaatttctgggactgactggatgacaaaggaaatctttttagcagctgtctttaatctcttttaaaagaacctcggggaaaacttttaaagtctccctccctggtcagtactgaacagaagggaaaatatctgttctgtctgtccaggctctattgtctggcatctgtcacccagggactttttatctatctatctatctacctatctattttttatggactattttttgtttgtttttgtttgttgttttttgttgttttttttttttttttttgagacagggtttctccctatagccctggctgtcctggaactggactattggtttaaagggtgacataattgtaaatctcgaaagagaaagaaatggaactttgtcttttccttcgggctcagtccagggaacattttctccttccccggggttgcttagagcagccatgatgagaagagcagggacttctcgttgggggatgagttctacctccctctgtgcggtttgcttagatggcacggggtcccccaattgcctcacacaggggccaacctcaacagcgacagcgagcaggagccaagcaacaaaagaagcaagcactcctgctcctgaggtgggactggtggaggtttgggacgaatttctctgggtgatctggcagagccaaaaggtttgggtccccaacaggagaggacaaaggacttaagctgggttgggggagggtctcacactggacaatacaggtaaacaaaactgacagaaacacatagaaacacacacacacatacacacacatacacacgaaaggaaggaaggaagaaaaaacggtggctaccataccttcatacataaacagagggatccagtgacatttcgcatggcatggatccagccacatacctgttctttcgagtccaaacagccacatacctgttctttcgagtcgccttaaaggaactcactttgtagaccacttagctccacaggtggcagaccaggcaactttctaatttc

SEQ ID NO: 34221 - DNA, 2579 bp, Mus musculus
cccaagtaggaacagatgtgggcctcacaagataggaaattgctgcagcccaacacaaatgactgccgttcccacagcaaagaaaaatcaatttcctgtgcctatttctttctaagcaattcttctgaggcagaattaaccatatttatatcttaataatctctggtcatccattttatctgaagagtatttgaaatattctttctatttcccatctgacctgagctccggggtaacggcgtcttacgtgtagctgttgcctccttccgggtaacggcgtcttacgtgtgtagtctccttagcgccttgtacttaccagccagggttctgggagatgatcaagttcgcctggatccagtatgtcagcatcctgctgatcttcctctgggtgtttgaaagaatcaaaatcttcgtgtttcagaaccaagtagtgacctctatccctgtagccgtgccccagggagagatacggaaagagcacttatcctgagaagataccccgtcaggagcccgagggaccgcggctacctcattcctgtcttctgagacctgccatcttacaacatttctgcgaagagcccaccggacactttcaggcctgcatgtttcacttcagagacaacggtttttccagggctggactgcacaaaatccacgccttcaaagcaccgagggaacccacaaacactagtttgtggaaaggtctcagggtggccggaggctgtgattttcgttttgttttgttttgtttctggttttgctttgctttgctttgctttggccttgaatttcagggagacaattactgtgagttcatacatctttgaaagagccccacctccggtcaagcgaagagtcttttgagctgggacgccctgcgcactcctatctcctatcataagctagccgctttcttagcctccccaggggctctcacaagaaacacgcaagccccgagtacattctactcctaggtatctacacagtgcccattcagaactttgatttccagaactgaagcctcttaactggagaccgaaagggggcaggccaggacctaaatacaagcggctcagaaccgcgtgcttgctggcgggtaacttaagggcaggaggaccagacacctgccctcaggctaataggtgggggtctgtcatcagctcagctgaacggccctctgttcctggtgcggctggctctgtgccctgtttcttgccctctgtctgtgcccctgggatggcggctggagtcagaagcgcctgcttcattcagtccgtccgcctaccccctccctgcaccaggggaggatggtgggcttctaacaactggttctttctccctggctctcacccaacagcctggccactcctccttgatggccttccccctttctgaaaggatgtgggtgacagaggggttgttgttggcattggcttccactgcctgacaaccgcagggtttatttggaggctgagctgaaaactcagttgttttgcagttcccttgattaaggaacagagtacttaacagaggggaggctctgggggaaggcatgaggagggtgaggaaagaggctgagcagagcatctaagccagcctggccattaaaggagtgacaagaagcctagccagatagccctgtaatctatagaggtatgtatctacaaagacatctactctgcatccaaaactgttatttggccccgttccttcccctagcaagtgtgctctcctaaaaaactctgccacatcattagccctgccctgaaaggacttccctaccccatcccccatgcctccaggtctaaccacaaacactcctcaccacgtgcctcagtttaccttggagacatccttctgtcaggctgagcaaagtaagaattttgaaaataaagctattttgagtattcagggagaaaaactctctggtactagtttctccgacttaacacagctgattatgtgcctgagtggggtttttttttttttctgaagatatacatgaaaaaaatggtctctgatttcaatttcaaaaaggttatgagatgtggctcagttggaagagcgcttgcctggcacacttggagccctgtgttccatccccagctacacataaacctttatggtggtgcaagcctataaccccggtgcattgtgggtggaggcaggagcagagaaattcaggatcatccttgagttagagcccagccggggacacttgagaccctatctcaataaaataaggaaatggggttggggcatgatcagaagtatattgtatggaaaaaagatagcaagacacagaaagatgaccaaagatactttgcattaaattaaactatcctgtgcaaaaattgtactgagaactcaatgatgttttataactttctaattaaaatattccaaaagaacgtttcccttggcttctgaacggcagggaccctgggtgtgtgtggggtggtgacggtggagaatagggagagaagagcttccccgtggttctgactgactgactttaatagccgtcctctgccagtgccctgcctaaagacgctggcgcttttgttaggtctttggca

SEQ ID NO: 34222 - DNA, 1146 bp, Mus musculus
ggctgtcctggaactcagtctgtagaccaggctggccttgaactcacaaatccgcctatctctgcctcccaggtgctgggattaaaggcgagcgccaccacgcccggcttaaaaagttaaacttttgaagtaccttataacccaacatttaatagataactaaaatctacccatatatataaaatttatatgtgcatgcatgtgcgtgtgaagtgtgtagtatatgcacacatatgcatacaggtgtgcacgtgcacagtgaccagaggaagatgctgggtgtcctgctgtatcactctctaccttactcccctgagacagggtgtttgtttagttttttaagatttatttattttattttatgtaatttagtacactatcgctgttgctgtcttcagatctcattacagatggttgtgagccaccatatgcttgctgggacttgaactcaggacctctggaaaagcagtgctcttaacggctgagccatctctccagcctctgagacagggattctttctgaacctagataaaggcagtggtcagaaaaccctgagatcctctgaacttgtggcccttctgtcccagcttcattaatagctgtcattacaggcacataccactgtgccttgctggacaccttcacatggtatgtattttagtatcatcgtcgtcgtcgtcattattattgtttttagacagtcctatatagcccccgactgccttggacttctggttctctgcctctacttcctgtatgctgtattctctgcctctacttcctgtatgccgggattcaaagcactgaccaccacacttggtttaaatggtgctaaggattgaacccagagcttcatgcatgcttatcaaataccctagcatctaatcaaaatctctagcccgctggttatcattttttcaaagagtagatttttatgatatgtaaaatgtgtctccacaggagagtagtgtgtgatacaagcaatggtagtaaaaattcctgttgacttactatgtcttatctatgttcccctatctacttgtacacacaagaagttctttattgtcaagtagcatatttaaagtcctttctacagtatttggcctgtgacaaacagcaaatattagctactaattttgaaaaca

SEQ ID NO: 34223 - DNA, 1816 bp, Mus musculus
ttgataccaggactcaattctcactcattttttttttttttttctctttcaagcctaactatgggacagctttacgagaaggaaaaagatgaagatggattcttgtatgtggcctacagcggagagaacacttttggcttctgaggcccttgctgggctaggtgcgcccttcctgcttgtgtctcttgtaaataactggctgttctcagttactctgccagagcctccacacagacctactagtgcatttgtaactggatttatttcttaatatattggaaggttttgtttccttagattagtaaattatcatacagagttttattttcagttttctttttgtgcactgtcctcatggctatttgctccagggaacctgtcctctgggaatcatatttaatgaagatatttccgtaatgaagggaggtaggtgtggtggtaaagggaaaaggaggggctgatgcatagttctggattatgttgaaagtgttagatggctaagtattaaaagcacccagattaaatccttagcaatcagaacacttgcttcactagattttgccaactgcaaatcatgttggactgagctaatctattcttctttctgagactattaaggtaaataattaacaataaagcctccttataaaggcatcacggtgtgaccatgtccgtcattcacctccacgagtcaggagtggctcctgcctgtcaggcttggagaagggcttgcaggggagagagaggcctagcctaggatgggaagtgctggttgatatcaaaaggggattggtttttcagtggtcaatacagtcaacaggttcagatttcaggactgtaaaaaggtgtatactgcaaagtctcgcttttaccactttttctgatctctgctgcttatggaaaattgtatgggtttcttctcagtatttgagtagcaaaattttaagtatgaatatactttttaaaaattatttattggtgttttgcctgcacgtgtgtctgtgtgggtgcggtctggatttggagctagacagttgtgaactgctatgtgggtgctgggaattgaacccaggtcctgtggaaaagcagccagtactagtaattgaagagctatctctctagctccatgtatacatttttttgtttacatatgtaaggcatgtgtgtatgttagtaaagcagagggggttgaagagatggctcagcagttaagggcaatgggtcctgagcttaattcccagcaaccacatggtggctcacaaccgtatataatgtgatctgatgccctttccctgtgtgcaggtgtatatgcagatagggcattcatacagataaaaataaatctttctttaaaaaaataaaacatgtacttacacactggattttgttttgagacagggtttcactgtatagttcaggctgggctccaacttgttatctgccttggtttggctttcattaagtctttacttacattctagcctgatatacacacgtcctttatatgtgctgtgttcttttgagacagggtctctctatgtagtcctagctgtcctagagcttgtaatgaatcaggctggccttgaactcagatcctcccgagtgctggagtcaaaggtaggcaccaccatgcctggtacaaacccttgttctttaaggttctcgccagtccctttaatctctcatgacaatagatgcttgttaggacacaaaagcatcttcaagaaagtggctttacatcttccacagatggactgtgtttggtgactggtgactgtagccttacatcagtcatcaggataaggaaaccaataga

SEQ ID NO: 34224 - DNA, 1188 bp, Mus musculus
gaattctgggaacttttcagagagtatataaatgctagggcctcaagaggcaaggttggtggtcggtggtcatctagggggttggttgcagtttgctagttgtgctcaaagaagaaacaaaagaaaaaaaattagattcaaagatctctctccccatctattcttctttccctcctatccagtgataacatttaggcgaggcgacatacgtctttagtcccagtgctcaaggaggcagaggcatttggaccttcgtgagcttcgaggccagcctagtttacgtagtgagttccaggacagccagtatacatctgagaccctgtcttaaaaagcatacaaacagagcttggagagatggctcatcagttaagagcactgaatgcttttccagaggtcctggattcaattcccagcaaccacaggtggcttgtaaccatctgtaatgggatctaatgccttcttctggtgtgactgaggacagcgacagagttctcatatacataaaataaataaataaatctttaagaaagtaagcaaacaaaaaagcattgtgcatttaaacaagcagtactgttctctgttagaaaggacttgaagttacattaagttcaaggctaacctggctatgtgagatccagtctcaaaaaaaaaaaaagactagttagtgttcagatacatgctacagcatccatgtgagtgagccattaagtatcaagctaagtgaagtaacacacacgtttgactccgttgctgtgaaataaccacaaaaggcgagtcgttcctggcactggaaagggcatggagtgtggtgttggctgctaatagttgtaaagtttctgagatctgaagttcccatctgtgcactggatttgcgtcatgtgagcacctggcttgttcagaagaggaaaaatacaacttttatagtgtagggttattttagtttgggttgtttgaaggatttcctagaaagcctgtgtgaacaaggtgtagtttaagtttctcaaaatgagagtaaaattttagatttctgacccccaccgatgggcattaacttcgtttgtagctatgcctcagaccggtaggatgggatcttttaagccataaaattcttgctggggatgggggtgcgttgctcagttggtaaactgcttgctggcaggcataagtaaggctctctggttgatcctc

SEQ ID NO: 34225 - DNA, 1194 bp, Mus musculus
gggtcacttgtaaaacaaaaaaatacatgtggctcatttacaccaaaagcatcccttgtgcttgcagaggccagaagagatgtcagatcccctaaaacaagctacacatggctatgagccaccatgtatctgctgggaaccacatctcggccctctgcaagaacaagtgctcttaatggctgagccatctctagcaccgggaactcaattttacgttcttttggcatgggaccctagcaggttctgtgtccttgtctggatgcgtacttctagattttgtaacatcaggcaacagcaaaagtaggatagtggggagaaaaatccatagtgccctgttattgaaaggcggggtcttactacatagtctggttgtcctggaacttaaccatatggagaccaggctggccttgaagtcgggtcgcagaggtctgcctgcccccgcctcctgagttccactgagcccggctcctggtgcttctgaacctcggcagatgctctgctcttctcaggaagtgcttctctttcctcttctctaggaagtacttctgtttcctgccatgaagccagaggacaagaaggaaactgcagcgaccactgaaaccccagagagcacagaggccagcccctctgtctagaaggcacatgcaactatggtgtctgcatctcagcagatctggtctgagggagcgattcctgtgtggcgccgtccatctggccactgcagtccaacctccacaagagagaagaactaaagaagttctttttattcctcgttaccaaataaatcatttctctctttacccatgcagtgttactttttctcccccgggctgctggtctgatgagtggtctaattagagctctgtcattgtattctttttaagatttatttttattatcaattgtgtgtgtgtgtgtgtgtgtgtgtgtgtgcatttagagtgcaggtgccctgaggccagagatgttgggtcccttagagccagagttacaggcactgtaagctgcccagcacggaggctgaaaaacgaaggtcagccccatgggagcagggtgtgctcttaactcctaagccaacttctcggccccacctgcagtcagaatctctaataaatgtatattaatgtctgtctattcagtatgagccattgtgctgaaatactggaaacaaccagagaacaaaagtcaagtcac

SEQ ID NO: 34226 - DNA, 1236 bp, Mus musculus
gagtctcaaatccccaagcagatttaagaagacagagactgtctttttaaaaattactgtacattatttgtataaaataatgagggctgcctggctcccttaacttttgtgacaagatctcactgttcaggcttggttggcctagagttagttatttaaaccaggctatcctacagctcttggcaatcctttgtctcagccctcctagtaatttgaactacagatatgtaccatcacattctacttaaaatgggtttcatcctgaggtctctggaaatcattttccagcaagttcatcagaaattgtcctgggcacctctggtgccccttctgaaagttagagtctgttcatatggacactgagattgcctagaactgtgggttgagccctttttggtctcatatcagacatgtacattatgattcataacatcaaaataacagttatgaagaaacgctggaaccgttttgtggttgggtcacggcattaggaagggtgaggaccgctgactagatcccagactagatgatttggatccttttgaacatttcactcttattttctctaggccaaggctgccggtgatgacgaggccatgttcatagacgagaacttctgtactgccctggaatacgggctgcctcccacagcgggctggggcatgggcattgatcggctcaccatgtttctcaccgattccaacaatatcaaggtatgtacgcaggggccgcccagctcctgcttccccagactccactgtgctggggacagcgtagaggacctgggaaagaaagcagaggctcaagaggttccactttacgggaggagactggcgagcgtgtggctctgcgggattttagtctttcctgcttgagacaggagggggtactaatggtttgcttttcttcagtgtccagggaaacgctgagccctcactacatggtttgccttaaatcagtccgttctgtgaggtgtgaagacgggttttactggtgttgttacttgttgtgagacaggatctcatgtagcctgggctctcttggaaggccatcagtagtttatagtgactttgatataactcatattcctgcctctacctccagaacacagggattatgttggtggaggcctaggaggaaattcacttttggtttgttttgttttggtttgttttttttttgtttgtttgtttttccacatagggtttctctttgtagccctggctgctctggaac

SEQ ID NO: 34227 - DNA, 1105 bp, Mus musculus
agactatcatgacctcatggagatcacagagaagatgctgtcaggtgagtcctgctgccttcagctcatactcgggtggaagacggccgtgctgcctgtagaggagaacttctgttctccgtccttgagagggctgctttcttcccagggatggtgaagagcattacaggcagttacaagatcacctaccacccagatgggccggaaggccaagcctacgaggtcgacttcaccccacccttccgaagaatcagcatggtagaagagcttgagaaagccctaggtgtgaagctgccagaaaccagtctctttgaaactgaaggtaacatacaatactccaccatgtggcctgccttcttggtcagctccagatttatttgggttaaagctaaaatgtcccacctgttgtatttatagacattttacacagtgatgttccctgtcctaactcacacatttctgtcacagaaactcggaaaattcttgatgatatttgtgttgcaaaagctgttgaatgccccccacctcggaccacagccaggctccttgataaggcaagagaccatacttgtgctcgtccagtgcttaccagcaccctgatccctagggcatggatcccccgggagactcctcccctgcagcttcgcagggaagccttacagaggaacgggagaattcaaactctgaattggattgggaaatgtagctcggtgatagagtactcacttagcaaaccaaggccagggaaggggtggctcaatccccatccccagatcccatttgcctaactgggccgccttgtccagccgcagtgggagaggatgcacctagccctgcagagacagacgtgatgtgccaaggttggggtgatcccaggggacttccaccctctcagaggagaggaggaggggcactgcggaggagaccaggagtggggacacagtgatcaggatgaaaagtgaataaaataaattaatgagggaaaaagaaatataagcaaaagggagctttgaaatgtaatatttctcttctgccaaatagtgcatattatgttactcaaaactctgtcctttgaaaaagctacaaggtgaactcatctgtatga

SEQ ID NO: 34228 - DNA, 1224 bp, Mus musculus
acaatgaaagtctgtccttccttaaagtacagtaaacataaaggaaaccctccagcagttgtccccaaagcaggggctctgcgggaaggtttcctgagtgagacaggggtctggctctgcgggaagatttcctgaggaaggcaggggtctggctctgcgggaaggtttcctgaggaaggcaggggtctgtattctgagggaaggtttcctgaggaaggcaggggtctgtattcatttgtagagctatgcattcagttacctttcctttcacccaggaattacaaatcagaggaggaatttgttcatatcaataacaaactgcgccggggagacataattggagttgagggcaatcccgggaaaaccaagaagggcgagctgagcatcatcccccaggagatcacgctgctgtccccctgcttgcacatgctgcctcatcttcactttggcctcaaagacaaggtaagccccacagctgatctcggatgcgcgcctcctcctgtagccatcacagaaagcaccggtttctaaccgctcgctgcttttgctttaggaaacacggtatcgtcaaagatacttggacttgatcctgaacgactttgtgaggcagaaatttatcgtccgctctaagatcatcacatacataagaagtttcttggatgagctgggcttcctagaggtgacgagggcgaaggggtctttacctggaacggcgccgttttggctgtgcttgtctctcacggtcccgtctttcctttacacagcataccctgccagggtccgtcatgcccgagcagtgtctcttctacctgtttagtgctcatggggcaggctttctaaagaatgcaccatccctgtgctaatgatgccactttcagtgacgctggagggtctgtagcattaaaaatctctttagaagccaggtagcgtggcaccctttagtccaagcacttaggaggtataggcaggcaggtatatgcacacatggatactctaaatgcacatgtattctctctacatatggagtgcacatgtaaatgtttcggcagagttttattttttggtttaaatacaaattgtagtcatgctatgtgcactcttaataaacctgctcttttttatgtgtacattgcgtgctggtgcatgtgtctgtgtgcatgtgcaaaggatggggaggatgcccagcgtcttctataactcttagcctctttcttctttacgaca

SEQ ID NO: 34229 - DNA, 1620 bp, Mus musculus
aaaaataacatgcgtgtactcatcacctaggtaaacttgccaactttattgatcatattaaatatcttaagcaagtagttcaagacccattactcagcaagtcagggggaggggaggggaggataatgatgtcctcccaaaaggtctctgtcgctgcacagctgagggaaggatcttctcggtcacttcacagccagcctacatcactacttttgggtttctcggggctcttgagcacggctttccccggttttgtccgatttggtttgacttttagtaatgacagtttctcttcctcattggggtcaaggaagtggagtccagcctagaaactactggaaattgcagttccttggaaagaaaatatctctcatggtaaattcactagaagagcattcttgttttaattatagaaaatttctaaccattctaaagtagagaaaatagtgtgaccaaggaccctgaccctgcttcaacgggtgttcaatctttgtccttgtatctgtctccacctccccttcctgcacacccagcccgtcactacatggccaaacaggggaggtggcatcttgccagacctgttcactcagattccaaaacaatgaatgtgaccttcaagagcaagacccacagtttccctgggcacctgaaacacctgcctggtgcttggcactcagtgacctttccttttccttttccttttccttttcctttttttttttcttcttttttgtgggtgaatattgaaatcattttaacagaatttgtcttaaattggagtcacatgtcgggtgtcagttttcaaagaatagaaatcagacaagttgcattttatgacccacgcggtacagtgccgcagagatgtaaacatttagcttcaacctttcaaattcctcagtttaagtaatcagggacttcattggcccgggaggaaggcagaagacgaatcaggtcacatttcttcgccactgactggccataggggggatgctctgcagccccagtggccttctggtaggggcttgcggttttcagcagatgctgttccacatctgcaatctccatgctaggtcatcacaggagacagactgcacgagcgtggaccaggggtggccagtggtgtgttactaacaggcagagagagaagaattgaatccaaaacctgaccaaatctaggtatatccatgcagattgtagattttttttaaaaataagaggtggagaaatttaaatttcagttgataaaattgtttatcaaaattgttcataagaggtgggccctaggagttttgtttttattattgaatatcaagattgaaacgagaaaggcggggatgtacctggcaagggcagctctagaatggcctgaggtaagcacactgataattatgaagaggggccttggatttgtgggaggggagcaaagtggaggccttcgtgatgtattattttatttatctcttagaaaattggtagtgatacgtaatttacaatgtaagaggtcaaggggaaactgagcagcagcccgagggaccaatgctaacacccagattttaagttatgccagtacctggagcccccgtataatgggaaatgtgcactggagtattcaggactagt

SEQ ID NO: 34230 - DNA, 1111 bp, Mus musculus
gtgtgtgtatgtgtgtgtgtgtatgtgtgtgtgtgtatgtgtgtgtatgtgtgtgtgtgtgtatgtccgtgtgtatatatatatgctcagattattttctagctctgtgtgtgtgtgtgtgtatgtgtgtgtgtgtgtatgtgtgtgtatgtatgtgtgtgtgtgtatgtgtgtgtgtatgtatgtccgtgtgtatatatatatgctcagattattttctagctctgtgtgtgtgtgtgtatgtgtgtgtgtgtgtgtgtgtgtgtatgtgtgtgcatgtatgtgtgtgtgtgtgtatgtctgtgtgtgtatatatatatgctcagattattttctagctgttctcaccaggaagataagaaggagggcctaggatagactgctacaattgctggatttgtaagttctggaaacacccatcacagagtagaatatgggggcctcattaaaccaagggtctagtcatggttggtagtgaagcatctggcggtggcctgaactctcttggactgggccttcttcatctttgaaatagctgtctcggttgggacggctttctcacatcttgccgttggccttctctgtcagcagggctctgctgtgcatctaaagtaagatagtttctctatcttgtcactaaagccactaacactccaatgcacagtctcgccctctgaaaatatctcctgacctgtcccagtcccctggggcacagagccacctctggttgagcaccgctcagtctcgtcagtgctgtctactgtccactgacatgtcccttcgtgacccacacattgccaccagcgttgtttctaatgtggactttttcttctcaccacagggttcgagactgccaagtcctttgccctccatggcgcgcatgtgatcctggcctgtaggaacctgagcagagccagcgaggccgtgtcccgcatcctggaggagtgggtaagcgctctgctgctttgtttcctatctgtcaaatccaaacgtaccccgggctgagtgcacagaggtttcaacgctgcatgtatagttcgctgctcttggaataacatctttgctttctgagtcatcttcacgctgtttactgtgtgaaggggagggtgag

SEQ ID NO: 34231 - DNA, 1163 bp, Mus musculus
gcctgcctgcctgcctgcctgcctgcctatctacctacatgcatcagtattttgactgtgaatgtctgtgtgagggtgtcagatcccctggaactagagctataggcaggtgtgagttgccatgtgggtgctgggaactgaacctgagtcctctggaggagcagtcagtgctcttaaccaccgtatgtgcctatctgtgtgtgtgtgtgtgtgtgtgtgtgtgtgtgtgtgtgtgtgcatgtggatgcacttgtttatatgtgtgagtgcaggtgcacgcgtgccatggtacgtacgtagaggtcagaagacagtcgtgggtattggagcttgcctttcacttgttggagaaggagtatcttatttgccacaatgtgagcctgggtagctggctcaggagcttctgtctctaatgctcagtggaattctggaactgcccatgcttccatatctgctctcttgtgggttctcagtatcccccctcagaacttcatggcagcagggaaagccctttaacccccgagccatctctggttctcttgtaggggagagtgaccttgaacttctgccccctgctttgccctctcatgcatttagatcactgccttgcatcatctcatctagtttttcgggcactaggattgaacctaggccttccttcatacaagccggcaagcactctctcagcggagccacacactcctcgtcttgacgaggcttgttaaagaactcagcctgatactgtactctgagtcagtgtctcatgatgggaaacgtgtcagtaacaagagggtacctgtggttacctaggaaggaacttccctagctctttgtaatccgatgtcattgataactgggtcaaaggagactgcatcttcctttccgccccctcccttccttgttaagtgctatgtagtgtatttaccggtctgcctaagttgcccatttgacctttcttgtcacaggcccaggaaagactctttatcagttaataaattattcatcccctcgtagacataattggttgctaaaatattccgagttttctctgtcttcagaatgtctgaaaaattgtgcctggtccttctcctccaacttttccatctcatttctcattctgaaaattctgcgttgacttactcttgactgtatccaccattctt

SEQ ID NO: 34232 - DNA, 1149 bp, Mus musculus
cttctggtgtgaagaagaggctgtccctccaattatgcctcatccttctgtcttctttcccttcccgagacagagctacttacctttcttctgttcagtgcatctgaagattgcccatgttgaattataaggtgttgggacatggctgaaatcacaagccttcaatcataacaaagaattctgcaccttagtcataactacaacatgaattaggttagttgttgaaatgtttttttgtttgtttggttggtttttgtttttgtttttttgtttttttttttgatcaaatttttgtttggggaacatattggtcacaagacatagttcaacttctaacatttgaaacatgcagccttattgggaaagaaatttcactgagctcaaaatacaagaaggttgaatgttataccttgtctgtagtagtgccctgtcctgttctccatctctgtagtatatcctgttttaaaaaggacccaaactatcagtatgtgtgccattcattggactgcccctgttttgtcctgagcacatttattgcatttctcactgaattgctgaaatacatcagatgatccaggaacaagcatctcaacttgagcaattctaagtgatgttgagagtgccagtagaaggaaggtggcaggtgggatggctgtgccagaaaactgcttgccctgtaatctcgagggaagcagagtttggatcccccagttttcctataaaatctggggctgatggcgtgcgtttgtaacttctgtgctaatggtagtagtgaggtcgtggggcatagataggtcctcagaactttgagccagccagtctagcagaatcaccgagctccaggtttatcaagagaacctgtctcagaaagtgagatggagagtgactgacggagactctgtatgttaacttttggcctttacatgcctgtccccatcccccagtagtgtcagggaaaaaaaaagaaagaagtagaacacatgccaacacatgtacaagttgtccatcgtgcacagaagtgtttcaaattgtgctaagaggcagtagaggggcctggggaaatctgcttgtgtgcatgctcatgtgcacgcatgctgggtcttgaggccagagaaacctaaaggggggcggccgctaaagtttggagtc

SEQ ID NO: 34233 - DNA, 1162 bp, Mus musculus
cattggcctaacgtaattttggtaactctgtctgcttctgccttgggtagaaataattcacatttcactctccattttctttaatgggctaaacagtcagtctgtaatacctgtattttatgagacataattctggatattgtttctttagcatttgggtaagacaaacctgagagagaccagccatttacctcaagcaattgtaaagttatttgtaaaatgatatgctgtctttctttccttctttctctcttttttttcaaaccagttactttataaagttacattccctggcaaatgttaacacaacttctctgtgtgtgggctaaataaatattgggcaacactgaccgagcacagcctttgggtaaataattctctctccacacatctccctcccagtttataatgaggagttttctttctggccccaccaaatgccgcattccattttaaatgagacgcaaacctataggtgaatgagaagtttgaggaggcttattgaagaggtgtgaatgggcgggattacattctcttgcctccctctctgccagctgactagtctcccatctctaggacacatatgtcctagagacccgtgacaggagagatgtaaggcagacacttctcagaatgcccaggaggactgagagtctcagagcagtccacccctctgtgcaatcacaggagacatacttaggtttgaacttgaagaacactgactctgggccaatctgtactgtacagtctgatttcctgtgttgatcacgccccagcaagggccttgttttggctctgcacattgtggagggattctcagatggttgggatgtctcctgcactgggtattggtctctgccctctccttttccgtctgtagtgtgcaggtgtctacacccagtgacactacagagtcctcaaggtaacgagccgacagtggtcatcttcatttccttgcctgttactgtgacagaaatactctgacagggtcaacccagtggactgtgggtttgttggacttggagtttgagggacaatcggttcctcgtggcagggaagctgaggtagcaagcagccagtctgggtagggcttctcagcttagttcatgtaatcatgataattttccacaggcatacccaaaggcccatctcctatgtgact

SEQ ID NO: 34234 - DNA, 1152 bp, Mus musculus
tgtatgtgtgtgtgtgtgtgtgtgtgtgtgtgtgtgtgtgtgtttgtgttgcacatttaattcacatttgcaaattggtttctgtttttaactgaagtcactttctcagcagaaccgaagtgatgatgtcacttgtcatctcaatagtatttgatctgaaacattaaaatcgtcaagttcattttattactgagcacttttgaggaatgtaggtacatttattagttcatagaaggaccctcagattaaagtcatgttggcttgaacattttcttttgcctgtcttgaggcctctgatgttcgagatgctatgctttaagttttcttttcaagaatttttgcctaacgtgtatgttggaatagtgtggcagtttctctctggagtgggagggcaggatttcttaggtcttctgccactgagatgctgtctttctcctaagcacaggtgtgtccaattcattgtcctcgggctgcatgcgcccctggacagcctagaatgccaccctacacaaaattgtaaagtacgtcaaacaacatgaattttgtcattgttgttattgtctgtttgacagttagattgcatggttctctcgagcttgagctttgtaggtgacagtgtggcctagcccagcataaacaggtgggtcatgcctacagagtagtgcctagagtggaggtccctgacaaagactgggattcctaaggacagtttatttaaccatgatacctgctgtgctcagatccccgacctgggctgtgtgtttatatcctccgtgtgggactgatggcagagcaagatgtgtgtgtgtgtgtgtgtgtgtgtgtgtgtgtgtgtgtgtgtggtcctgacggcactaggaagttcatgctattactcagcttcaagtatggggatctctgtgtctggttctcagctctccagtcttctagagaggcctggtggcgattcggagcttccagggagggtgggataggaaacactttgtgaaaatttagtaggtccagaactgagaagaggggcgctgacaatgaacagacttcagcccttgggctaaagcagattgtttggttcttgttcttgttttttctcttcctcctcctcctcttcttcttccacctctttctccttctcttcttcctcttcttcttcct

SEQ ID NO: 34235 - DNA, 1173 bp, Mus musculus
agtgacccaggtaatagtgttccatatgtaggctggtgttaacgccctctttgtacatgatgctaggagtctccgttccctactgggacagcatcatctttgctcacatcaccggactaagcacctcaggaaagatcttggacaggcaaacccatggcttcccccatccacagtgttctcccggtagctcaccccatgctctgggtctttcgagatgtttctggggctagaaagaaatcccggtgtgattgtcaactgcttgatgaattggtctcaccagtgatccgcaaagaaagggccactttctaagcgacactacagggagagccttcctgctcacatgcttccgatacctgttctcaggtctgtccctagaagcagagctccacgctgctcccctgtgttctgggtggacttgccttcctaaggggaaggaagacagaggccacagagcagaattcccgacaagaatgtggcttccactgaaggttggcttcagtctgaccccaacaggagctcctggagggccaagtgatgctacccaaattggccctgcctgagacaaggctttaactgacggcagtccgtgattggagaacatctgccagggaaggcgggctatgtgggagaagtccctggggaatagggggaggtggcagattagaagcatgtgatcataattcatcaatagctggtgtctcctgggctgggtagctctgctcagagaaagggtctggggcaagaaggcggtactacagcagagtgctcaccttcagatggcagtactacagagtgctcaccttcatccagaagctcctctcaaacaagtcctccatgcagagaggaacagagcattcatgaaatgctctgaagtcaggtcttgcacccatgcattctacaggatcccccttctttgaccccagcacaggtgtgcaagctgacatcaggctcttcccgctgaaatcttctcaggctcactttctgcagtctgacctgtttcctcccgtggtgatcctcaagttaagttttgtttagtgaaacgcaaggctattcaggatgctgggctaacatcttcccgttgtaattgagtaaatatattatacacagctgggtaggtggtttccgtgctggcctggctgctatggtttcaagatggacaccatcttctttaaa

SEQ ID NO: 34236 - DNA, 1136 bp, Mus musculus
taaagtccttagtttatgttaaagttcacctcctgtgttgtacttactgtgagattaacccatacatgaagtcatcactccactcccatgcgtacagcagtttctccacttcaaaactctcttttggaagtgtgcttaaaactaggctaagcttcagagatggcagtcaggacaatgtctgctatatcagtgagaggaacagagttcagttcccagaacccacattttaaaaacaaacaaacaaacaaacaaacaacaacaacaaaagccaggtgtcctgtcttgtggctaataatcccagttctgcggaggcagagacaggccaaccagcccacctatgccaggcagtgagttccaggctagtgaaataatgtctctcaatacatcaagatagatgggcaactaaggaaacccaggggcacatgtgcaccccacaaagtgtacatgtatttgctcatgctcttgtgtgcatctacacacacacacacacacacacacacacacacagacactcacaactatctacttatgtcaccctctgccctggccatgctcaggggactaagaatatcttggcttgaccaccccagtgctaagaatgaggcagccccgggcatccgggttgctctagtaattgcagcaattgaatctgggagtcattgagcgacagtgtttcccttgcttcatattgctggtgtaaggactacagcctccatgcctcagcagtagctggggtaggcatctcctccttttccagcaggtcctctctctcctccctcttatcttttgttgggaacaactgttttttcttgagatgcctcacagagtattgcggcggataactcagcagccacgtagatcacaacagcattttcttccttggcttcattatgagcatttgttgttgttgttgttgttgttgttttcttcttgttttacttgtttgctctgcttcaaggcaaacctctctgactggcttcagagttgccatggagctgaggatgcgcctggagtactcacatgcctgcctccacctccctgtgctgggattacagaagtggcccaccacacccggttcattccgttctttttaacatcacgcacagctgttcttattaaaagtgacagaccccgag

SEQ ID NO: 34237 - DNA, 1748 bp, Mus musculus
ttcctggcggatggatgatgggaggctaacaaaacacagaagtgactttttgtaaaatagaagaatcagccatccagtggcttagactgtctacccacagtgtggccacgagaacatatgagaattaatcagagggtacctgggttctcggttccacatgaccagccccagctctagtcagcccagccatgcgttctttcctaataaatttttcattctagaatattccatcttttccgctcttatccactctgctctccccggaagcattccaggtctctcagattagaacaagggttttgtcacatgatgtcataaaaaaaaaaaaaaagaaattcaggaagtacccggagcccctcaaaagcacaggctccactctgactaaagggccagggtccaaacagttctagttcccaacctttccacagctgtgacctcagaagagagtccctgtgtgctttcatttgatattcaaacatggcaacactgtacgtcattgtaaaggaaagaatgctgtgtgcttatgcaggagggtcagtagtgggctctttgccgctagtctccctgaggtggggaaggattgcagttcagagtgtgtaagaaatggtgaggccaggtctcacagcctcagcgtatccagggtagctagggtcagagccaaaagcccccaggcacttggctccaagccacagcaatggattccctcagaaaagcatgtttggaaggaagattattcattttgagatctggagagctctagaactgttagggaatattctagagttaggcgactctagaaataccagctcccctctgtcctaactcatgagcaagtttcctaccttcattaagactctcgtgaaataccaggacttgtgcccaccttatggacttatggactgcactgaggaaatgaagggcagcaagcatttatagatacttgataaccatcactgccctgttgtgagaatctggccttgtgaaggtttcatgtcagctgcatatggaaactcgctgtgttatcttcggtccacatcactgtgattaacctagatggcatggtggcaaactctgttccatggcagagtaagcgtgggacagctgtttcttctatggtggaaacagaacttgactggaagtagggatgggctgtaatcccttccccagggctccaaaacctaccatcaagtgccacaagccagggatggactgttgagacacctcacagccaagccacaacacttgatgggcagttgctgtgccttttctccatacatcacagcttcaactcagttttgtgggtgtgtgattgataaatacaaccccgtctctttttggtataaacacatacggtgaatggtttgccctgatgaacatatttgctgactcccttggttattgatgtgtgtgtgtgtgtgtgtgtgtgtgtgtgtgtgtgtgtgtgtgcgcgtgtgtatgtgtatgttatacatatgtatatgtttgttttgtgtatgtatatgtgtatacatgtatatatatccatgtttgtttattatgtgtatgtgcgtgcatgtttgtctatatgtgtttgtgtattgtgttgtatgtctatgttggtatatatacagatacatgtatacacacagatatatgtatctgtgtgtgtacatgtatgtatgtgtatgtgtgagtatgtatatgtgtgtgtgtgtgtgtgtgtgtattcatgttaagaacttaaaatctattctcacccatttccactt

SEQ ID NO: 34238 - DNA, 1167 bp, Mus musculus
agtatcgacgcttggctcctgtgtgggccttgtgtcactgatcccccatgttgattctcagcagctataataaaagacggagctaatgaaattagcgtgtttgagatctcaccgttaacccgataagggtttgcgaagatgttcaaaagaaaacaactacagcatccttccttgcttcgggaggattatgttctccagtaagctttcttcctctctctccttttgttccaaggcccaggaaaaagctggcaggactcttctgcttgcaagggatacacccattctcctgggctccctgattcgaagtcactggtgcaggatacctgggcgtgtctccttttccctcccttcaccagggcagggagaggttcccttgggttcatctttggcccccaggatgatggaggcctttttagatccaaagccaaaacaaacaaacaaaacccatcagaaactgaactccagctctacctgaccactgcaggtttcccacgtgtaattgaattgttaattcattgtagcagagggtcccctgagagttgtggctgattaagaagttctgggagacaataccatcaccttgcctttactaggactgactgtaccaagcatctttccagcatctgactgcttctcaggtctccaaggtagatgggagaggggggtggagtgtgtttatctccatttggttaagatgggagtcagatggagcagaaagggctgtgcatggaccttgaacctgaaggaggctccaggttctgactggatcccgggaggcctttctgtgtgccgtgaaacagagaagacattgggcacctggaggttgtcagaggtgaaggcgaggctcaaacctgggccacctggcacaacttgaactgttcatttgctccaaattgtgccaccacagtggcctttcatgatggtccagatcacagacaacagttgtcaaggatgctgtgtatttcaggaaggagttgaagctttgtgggggcagagtgccctttcatccctaattgcaagggatgtctcagaggaccaaccacaccccttccttttgatgatgacctttcaacaggatttgctttggggagtgcttatctctctgcccatttgcgagtgagtctttagtgtgtttaacttcgagttttggggagctgtgtaaagcag

SEQ ID NO: 34239 - DNA, 1193 bp, Mus musculus
gaaaatgtttttcttgcaccgtaacattcatgcagtaccaactgctggcagcctccccggcatgtaaggaaatattgttgtaaggcttttatgttccatacttcaatcagcccggagccagcagcatccccacagaaggaccctctgcaggccatttgcagcattttgctacaattaaactcctctggttttagccctcaggcaatttagtacctttttacatatgcacattatgaacttttgaccaggttctcgcagtcatatattagagctctgctcttggaagcgggcttaacaagttcctctgagtattgggcttggagtcagttgtggaaaaggtaattgaagcagcttgcagtgagggccattcaggatctcagagatgatcctaaatctctctctctctctctctctctctctctctctctctctctctctctctctcttctcttgctctctcctctccccctctcacccttccttgtttcctctggaagctggtagcaagagctttcaaagtccgtgattgatcttttattcagtagctaacgagggctgtgattctattagcgtgctacaaggcaggagaacagtgatttaatgaagtgtctagtgagccggccatagatttatcctgttgtcgctaatttgcggcgcagtggcaagcataaaggaaacggtgctcacagccactattaggcaggtatttcccttagtaaattgttgtaaggtcaggtacagttatctgagccaaagcaatgcctcccctcttcagtgtctgcagatgacagccgccgtgctgagcgctcactgaagtggaactgggagatcagaggtccgtctctaagtcgcccttagcggaggcaggagcagatgaactgccaagaaggagtaatagagtcataattggtgattagaactgggaaaggtgtgataacatcttaatacaaactggcgtgtgttatagttactgtcagttgttgtaaactcgccccgccacccaggactagttctgttccccttgattagctctgagaaatgaggcagagggcactggaaggaccatactgatggcatcccggccagctgtgactgcttccttgggtcttgtccccaaccccagggtttttcttggctacctatgcctgtccccacccaggatgctaccacagtatcctttgcctaccaccttg

SEQ ID NO: 34240 - DNA, 1239 bp, Mus musculus
ttcctgcccttccccgggactgtcctctgttcagatgcctgtgtcctggtttgccaagaatacactccggtaaacacagtgaatgtccctggtattaccaaatccaggtaaaaataagacaggtggtgtggatttgcccatgtaacctgagaatcggtttttgtcttttatttcaagacctgtctcccattatcacggaggatggaaagtctgcttaaattataagctagctaattgcttcctcagttgaagacctaaatgagttttaaagcgaaatgcatatctccaagggctaagtagccagcacacaataggcaattgagatagcaaagactaatttagaaaagtctttgctctctccctccccgctccagtaccatgcctctacttctccctcctctttccttccattgtccctccatccctttttcttcatctccctcccctttttttctcttctgtccctccgccccctttcattcaccctccctccttcccttttccctttcttccttctcagccccatttccctactttgactcctgtttcctctcctctcctgcccctcccctccctctgtttccttcttcacttgcttccttcttctttctctcccccctcccccaccgacccccttccatttaaccatttggaatgcagcagagttgtatctgtgggtttctgctcctaattaaataaatcatttatgcatttaacacaatcttgagttactaggtgatcatctgaggcactcagaagtctaagagcccttgaaagccatatccaagcatagatattccatagcacgtcttacaatctaaatattgcttttagtgtaatcgaagcagctagagcagtcccagcagttgatggactatttttcaaattgatttcaaaaatgtatttaaggggatgatcttctagtctagattacctattgatttttaatatgaaaagctcattatgtaagcagtaactgcatataaaaacctcgcaaacctttgcataaatcctttaattgaatttccagagcctgtggttctccttttttttttaattaaatctatttctttttttaagtgttactgtgtaatttgcatgctgtgaagaggccctgtcccagataaagtgccattgatccttattaaacctcacctctgggcttgcttaaaactaactggaaaaattaaagggttcatgccgcactgcacttacagcgcctctgatgggattatggga

SEQ ID NO: 34241 - DNA, 1127 bp, Mus musculus
attgacattccagaccaataggagaccccacctgaaacaataagtgaaaggtgccagaggaaagacacccaggattgtcctctgacctccaccaccaaaaatatgcatgcacacacatacacacgcgctatcataaaagatcaaatatgaagtaagccattagaacgtcgtccatagttctgctacgtggctgcttcccagttgaaagtggagtatacttcactttgggttttatttccagttaagacattccatcagtcaagggccctgggcttgtgcctccctgcctgggaggaccttgagtggcctggtctccgcagatcgtctggaatcccagggcaaacaggccccttcagaaagagtcagcatcagcagttacacgcctccctctccatctgcaatgggattttgtgctcgttaccaggagatcaatagtgaaagctgattctgttaggctttcggcggcgggggtcattaatctccttcagcctcagtttccctatctgtgaagtgagtctaactgggatgataatgaagagttaggtcaagtgaggttggcagccagacacctaccaccagctggaacacaagaacatatgtttcctctacaacccaggtcagccgaggtcctcctgtttagaataatgaactgccatgtctggagtcttctctctcttctcttggtcgaatattcaagtagaaactgtgctttgttcgcccgctgacctgcacttcagtgccagtgacaactgggagaaaacaagagggtgacaagcgattgtctttcctatgcatgggtgtgcagatgcatgcatgtaatgtcatgtgcatgtgtgtgtggatgcatgcatgtcatgtgcatgtgtgtgtggatgcatgcatgtcatgtgcatgtgtgtgtgcacggatgcatgtgctatcatatatatgtacatgcatgtatgtgtatatgtaggcccttgggtgtcattcagtttttgaaagaggatcattgccccggagctcatgaaataggtgagattggctggccatcaatccacagggatctgcctgtctctgacacctcagtgctaggattgcaggtccatagcaccatacccagcttttattttatgtgggtcctgagg

SEQ ID NO: 34242 - DNA, 1099 bp, Mus musculus
gaagtctcgctcctgtgctcctaaaatttcatattaacctgagaaagagaagaagaaaaaaatgaaagggaatctttcactctttttttattttactctgtccagtcctcagaggtgggcgctcagaatctccccagtcctacccacctactggaataccctgtgaccggcaagggaccgtgtgtctcactgccacacctgtccagttccagcaatgtcacgttcaccagctggctcctgttagaaggttgaagctgattaattataacttaccagaggcctgttctacagtaagactcgggccctgtctgttctgtaccactgtggaacacacaggagaagcaagattcttctaacgaagacaaggtgatctcagatgaagaggtcagcccagatagcattgcttgctacctgtccacccaaccatgagcaaatgtgtaggctggaccagcccgtgttctgatagaagagaacactagcgatttctctgtgtgctgctctgtttaaaggaacaagtaacggtaataatatctgaatataaattaattttgaaaggattggggaggtggctcagcaggtaaattgtttgctgaataagcatgagaacctgaggtcagatctccagaacccacttaagaaggctgagcacttggctccagctgaggaaacctaggtagagatagagacagatcctagggtccctggcagccaactgagctgaaatggcgcatactgaatcaaaggggtaggggaaggcatgtatagagagtagtagaggaagacatctaatgttgactctgtggggaattggtgtgaacatcacgtgcacacgcatacatatacacactacaaatgcacacaaatataaaaccgtactgaagaaaaagcaaagacgggagaggtggctcagcatcaagagtgctcattgctcttcttttaaatgacccacgtttgctttccagctcccgtagtaggcagcacataaccacctgtaactctagctccaagaactctgacatgctcctctggcctctgcaggcagctacatacccatcgcgcgcatgcacgcacacacgcacactctcgagtgcacacacac

SEQ ID NO: 34243 - DNA, 1207 bp, Mus musculus
cctcctaagaggacagaaccccgaattgcatgtgtagcaggaaagctgctgctatccagtgtagtgcgcacatgatctgttcttcttgcagggtgactttaaggcaggtctgcacttgaacctctctcctcctggagtgtttggcacaaaacagcttaagcatacagcagaacacaccctgggtggatgctttagagacccctacgctttataggaatgggaggctccgtgcaactagatgattctgaatcagctcgctcttctttgaagctgatgccaggtgcgtctcttagatttgatccgtgtcccttaatcagttttaactatctccaattacatccgtttcagcctcgtagtgtctctgaagacaaccttttaaagcaatatgtgtgatgacatttggtctttatgatggcttggtgtgaagacttgtttgtctagcggttctcagttgggtgatttggctttcgcttaatatttggcagtgtctggagcgaaaagggactaggggcagaagctccagccatcacccattggatggagatcaaggctaggtttgatactactgtatacaggacatccctgtacccctaaacgtcagcaccgtctaggttacggagctctgtacgtccagtgtgggaaggttcaaggtgtgtatgtcctgggacaagttgacagggcttataacatggcgctagctctccttcaacctcatttactgtgggtaattaggagaaattaaacagaagactgctgtcacccggtgcctatctgcaaagcatccaaggtgctaattagagtgttttgttgccagtaaaaacaagagtcagagtccatgattgattcatgattattttaaaattaatgccgctattatcatacaaagccgcggtaagtgggggtaggagaccctgtaccgggggatgctaagtcaacattgcagtaaacacacagtaaacccatttgtctcgggcttaatactttgttgtttcttctaagcacttcttagacgcccatgggctttttaacattctttgaaagttgtaatttattaatttttttttaatttggcttgcaagagtgaactttagtgacggctctgaagagagtgaaaagaaagagctgtttgtgtatcagcagctctggagcttggactctaaaagtcaacccagcagggaaacttggagttcctagactctgggctttc

SEQ ID NO: 34244 - DNA, 1136 bp, Mus musculus
ggccttaggtaatccaaaaggcaggtgtatgcccagtttttggtttttggtttttattttttataaaagactcagcaatactttgtgagtaaatggttcctacatcaaccttctaaactggcatgatgtcaaatgataattcagggaaggcatttctacaggaagcagagataataagccccgagtgcttttgttttctgcctttgtttcttaatgcagggaaaaccttcagcctcccagttaaaaacccagatgaggggctgggagtcgtcacagtctgacccctgaggacattagtccaattttgttctgtaaccagaacaagtagcaaaatgagacaggacaaaagaaacaagagataacatttacttctcggtttaagggtgtgcatgtgtgcatacctgcatgtgtgtgtgtgtgtgtgtgtgtgtgtgtgtgtgtgtgtgtgtagtgggtagaatagggggttgtgggaatgctttttttcttaccgatgtcatagctctccatccagtgtccccagggttcctcggggacacaggctgatttccattgtgtcatctggtacaagtgtccctgattgccactagagggcgtcacaacagctacaaagtgctttaatctgaggtgtcctatgtcactggctctcagcctctcagctgcctattggctagacttgactggtgtctccagggactctgatgtaagacctctctatggtcacaggggggaagaaaacaagacgtcacatcctgcacctttactacagggttgcacctcaggtccgggagagactggcatataggttgatatgacaaagtggatgacaaggccaaaggacagtagcttggccactgcagctttaacctgcactataaacagaagcccagataaccccataggaacattgtgttggctgcaaagcatgcatctaccaagtgctatggtgaacacttcaaatcccaaatggcatgcaatataagaatctcaacccagcactgctccctgaattaagggatctcaaatgtcctacttcctcgagtccgtgggtccccagaccttacctgccatgctctgtggattgtaaaggaccatatccccttagcataccctcatgatctgtcgatgggtgttga

SEQ ID NO: 34245 - DNA, 1140 bp, Mus musculus
catgagaggggaaaagaaaaaaaaaacgtatacatgtaaaataaaataaataaaagctggaaagaagaggaggaagggaaggttaagatggaggaaaaagcaagtccctgccctagagatgtcacaatcgtcagcattcattgtacaccgaatgcacatttaaactattctcctgcgagggagaaaagcaggaattcagtgctcttatctctgcacagagctcttgagtgagacaggagtcagaggaagtgggtcctttacccttgaaatatttgttcttgtgagtcttttccttggagcatcttctaaatgtttgggaaaaaaatgtgtgttttctaatatcctagtctccacgcccagacagctgctgggccccgtggctcaacaacaggagcaggcagagccagggccagagctagcatgggtccctccctgcccggtacaggcaacgctggcttcaaagcgcaagttggtctctcagggtaattctgatgacctcagtcctgctttatggagccattgtagaactcaggctgcccagtgtcagatcaggggccactatgatgtcttccaataaatgtcctcctaatggctctctactcagaagagatttatctgtttcctgcagcagaatctcttgttacgaaatagactgcagattgcaggctgtgtggcaatgtgtactgggaaggagctcctaggagaggctgcaagtgtcagaggtgtacatcctccctcccaagatggtgctacctgaatgacggcatgataattcgatgtgggagcataggggaagggcttgggacctgcatccctagaggtaggattggtaatccagaggctctgagttgagtgcttttgacatgcagaagcaagagtcaagggcaaagctgcctttgaaaggctatttttgaggcgtctactgcagatgcacttgagcttccttagagcaaaaccagttagtactgcatgcctagcgggcaaatgcgtgaggctccttcacatcacggctgtgtgacattgctaaaggttcccagcctgcttgtctgcttgttctctgaacgttgcccgagcttccacattcacagaagcccacagtagcatatccctccctctgtggtcgcaggattcagctaaaac

SEQ ID NO: 34246 - DNA, 1126 bp, Mus musculus
tggaggtagttctcatctctggtttgcagggagtcagggaaccaatataaggggggaagatgaggagggagacacagagactccttgtcttgtgtttctgcctttgttaccactagagttggaaaggaggcctggcttacatggcccgggccaggtatgtgccaggaagtacatgtgcctgctggtataaggatctgactgtaatagtccggggttggttgtttggtttgtttcttccttccttccttccttctcctctctctctctctctctctctctctctctctctctctctctctctctttctttctttctctcttccttccttcctttcttctttctttctttctttctttctttctttctttcttcctttcttccttccttccttccttccttccttccttccttccttccttccttccttctttccttcctttctatttgggtgtacaagcatgtataggtgcatgtgtgcatatgtacacatggaggtcagagaccaaccttaggtgtccctcctccctttggccttccaccagtgcatcaattaggttaggctgtctgctcagcaagctccaggaatcctgtagtctctgatttccccagagctcagatcataaacacacgaccccatttcctgctttgtgtgagggatctgggaactgagttcaggtcttcacgcttatgggacacatgttttacagcactctccatcctgcctttttgtgatttcaaggcagggcctcgtgtatccaggctggtcccaaacttgctacaggagtagcatgaccttgaacacctgatcttcctgcctcttccttctgggtgcaggattacaggtatgggtgttcacacccatatacgtgtactgaggattggactcaggtttatgtgaatgctaagcaagcatctgaatgtagcagtaaattcccagtagcgctcatctggccccagcgggcttagactctgcatctcaccggcattccacactgcccatcctgattcttttggaattccctttattggatttttattgtaattttaaaagatttattcattgttataaatgagtgcacactgtctgcactcgggcccatgagccaccgtgtacgtatagaggtca

SEQ ID NO: 34247 - DNA, 1167 bp, Mus musculus
acacccacacagagacactcagacatacacccgcacacatgagcacacacccacacagagacactcagacatacacccgcacacatgagcacacacccacacagagacactcagacatacacccggtgagaaataagaccaatgtttaaaggacgaaaagaaccttaccttagcctcttcccatctccatcgaattctttgtcgcttgtatgaggaatgcattgatgacagttatcctttcctttctcctggtatttgtatatgcatatacccatgtgtgtgtgtgtgtgcatgcgcacacacatacacatgcatgcatgaacatacacataggcatacatgcacatacacacataaccacacatgcactcacatacacacatatatacacatgcatgcatagacacacacacacacacacacacacacatgcacatacactcatttaccatttcctttgcaattagtataactatgccttagactgatgacttaaaatcaacacaaagccatacctcatagacctagaagctgaaaagccgtctgcccgcttctggtctgtagatgctcattcgcgccgtgtcctcacagagtggggggaaagagaaccctctcagagtagtgtatgaaggtgctcttccccatccccatccccaaaggctctaccctcatgaactcattaccttccaaagcccttcctcttaataccttcatctgtgcagagttaagactttagcataggacccatgggtgaaggagaggcagacctcagtgagattagtggacatgatccaagttgaactaaaactggagtgggtggcaggaccgtgacaaacttttctaacgtatacacagccaaacgattaccactgtactgttctctaagtagactgatcagtcccaattagaatggtggtcacagggttggaagtagaactcagctggtaaaggattagcctagcatacacaactctgtccagtcctcaaccctacaggaagccaatgcggtggcccatgcctcaagcctataagcccagccttataaggtggaggcaggggagtaagatatttaaggtcaccttcaactatattgaattatattgggagttagagggccaggtgagactgcctctgtggccttctctactgttgaatctgtgtatattc

SEQ ID NO: 34248 - DNA, 1156 bp, Mus musculus
tccctcccttccccacactctggcaatcttcttcataatgggggtttgtctccttggcagttttctgaacggtagccccagctgcaacccagaggtctacagtgaccccgtgctaatcatggaacaatctcttgctaatcttggaaccgccgaggaggaacaagaagaaaagatgagagcccgactcagagaaaaagagataatgactgggtggctactggggcctgaagaaagacgaagaattggaagaagaaaagaaataagcaacttcaggggggaatcttggggagattctgtgccaaataattaaataaatgattaaaagacataaatacagaaaggaaagtgggtgactggtaaatggacctccttttcctcttcctcttctgtcgattttgaacccagcccctcatacatgtcagacaagcactttaacactgagctacaccacagcacctattttattttgatgtgggattctaacgtgacttctaacagccttagtcaacacgagtgttctgacagtcacaactctaggcttacgaactttcccaggatggttcatagctatccttcagcagagctgggtccattcccttcaagaaaggaaggagagaaatggctgtaagcctttcttcgtggtcagactccagaaagccaatgttcctttcttcctttagactgggcgctagccacctcacatcatcagcctcattttctgtcttaacccttgcctgttcagagtgcactcctgacaagctgccgtgtatccttggagagaggcataatggacacttggctccaggacctgcgaagagggactcaacggacagccacaactctaggcttacgaactttcccaggatggttcatagctatccttcagcagagctgggtccattcccttcacgaaaggaaggggagaaagggctgtaagcctttcttcttggccaatgcttccagaagcttctccaaactgttgtagctagcttttctgctccttggagagaatgttctgaccaaaagcaacatggcgggaggaggggagtcctttcatcttataactcccagttcacaatctcagacagaagtcaaggtaggaacttaagtcaagaacttggaggcaggatggaaggaggcctacttccttactggc

SEQ ID NO: 34249 - DNA, 1238 bp, Mus musculus
ggcagtgagagataagggctcaatgtgtgtattcagaaaggaggcaaagctacccagagcagtagggagtaagacagcatgttcccggggtactgtggtttcccttgctgtaagggaaaccccaccttacagacaggaagcctcatctagtgttacatggggcactagaaagtcagatgtgacacttaagtacatctgctgccaaaaccgtagctcttttcatggaacccctggtttagagacaaacagatcccagacttgctggaatctggctcgggagcccccagaattaaatgtgtatgaccttttcagtgtagaccccatccccaccccaagttctgtgcctgtaggatggaagcctgcctgtacctgtagtctgtccctcaggaagcccaaggaggaatgacactgaacttgaatgctaaaatcttaagccctgtcccagggaccacctccttctacgcctgataggaagaatgtggtacagtcagccttgacatggtcaacatcaagatcattaatattattatcttcttccctctgtcatgacaagcactggctatcacatgagagagagagagagagagagaaagagagagagagagagagagagagagagagagcactctggtgttagcttttctatatggcctcagtgaagcccagtttagatgccttggaagccaggtcacagaggaaaacaccttgtgtcacacagggctcaaaggtagctgtggcaatgcagaggaaaccctgacctaattgtactggtaatataattctgtaactcacccagccactgcaaaggtgggtggacagttccccgtccctacttccccctgcacaccaccctgaggtcctaggagagaagtctgcactcgagctgcaattttaaggtgcctcgaacaggtccctgctattaagagtcggtggttccatgtcaatagaagatagatattaaatgaaatccatgttgctgttgatacaatcagccgctctccagctcagatgaaagcttcgataacacagaatgcaagaggagggagctaagggttgttgacttcctactacacatcactggctccactagacacctcagaaacctcagcacgaaataccttgtcaccaaacctgatatatcaatatgcttaagcatcagacactgagagctgatgattacaatagaggcatccagttggggcatagtctctgctcctgttctttggaataaacaggct

SEQ ID NO: 34250 - DNA, 1301 bp, Mus musculus
tcggggtaccactgcagggtacaggctgtgctttctgagcaggggtctcctctaacacctttccttacctttggattttagaatgactcctaaaggagaaaaaaaatcatccatacaagtttctctctctctctctctctctctctctctctctctgtgtgtgtgtgtgtgtgtgtgtgtgtgtgtgtgtgtttgtttgttgtcttttcaagtctaaaatccctcttaagggattttcccaaagggaaaggcagaaaaacccaaaactcaatgagagaggagtgtaaaatatccacagggctcttcccagatagagaagggctcctttttaaattagaagccttggaggacaaagcctctaattgttatacttgtgatgtcagggctatcaatattagggcctttttcattaataaagtggcaggaataggaaccccctccaacgcctcccccccttatctctgagcactacttcatcaaggcaggctcaatcgaaaggaaagagaccatagaactcaggggtgtgctctctgctggccagacacagaagaaagggagcctctatcccccctccatgaagatgccaggctctgggttaacccgagcaagaggtacttaaaaaaagccccgaaaatctcaggcgactccgagaatgcctcaatttgtgtatggattaacacacggcggcgataggccctgagtagcaaaagaggaacactaattacctgacagcgttcccctccactcggcctgggtcattgaaattaatttctgctttcaggtttggcagcaagcagctgcaagatctcagctcaacactcaaatgagcggggagctgaaatggtttctccgcacaggcggagtcagaggagtgggctaccaaatagatcttgatcacagacaccgaggagaggattagtttgctctttcatcaagtgcctgaagtccttgggaagcgcggatgggcgggaggagaagagaaaagcagcctcagtgtatctgagagctaacaccagactgctctgccagatggggtgtgagaactcatggtagatcgcctgtcccccagataagccgtaatttctctccattctcaacaaaaagttgaatgaatggtgggccagcacgcgcttgcgggcacacacacaattacaagtcaggataatgtgatttgtgaacatccatcctgcagcatcctgtgttgtcaagatggtatttatttcctatttcaaggttgaggaagtctatgagggagggaacaaagaggtgaaagggcctgcgtttgggcttcaaggaggata

SEQ ID NO: 34251 - DNA, 1748 bp, Mus musculus
gtgagcagattgttaaaacagtttcagatctgggctggaaggatgccagagtctatccttcaagccctatcggaggagtgaggagaagccctggctttctccttgcttctcactgagaacttggatgcctgcacatcagggatctacctcttgtttgtcctaaggccagccccctgcctcccttcttctcaccagcgcaggtgttcagcttgagggcgtgggtgaggagtccagcgggcaacacccccaagccacaaaaacaaaagcccctctgctgtcagagtggttggggagtcagggccagctgcatcccaccaaagtgggttccacggaactgttctcctaactgtctgttgttctaagccttggttctctcatctataggatgggccctgcccttagccatcaccgcaaagaggtaaatgttgtataaaggaaatagtaactggatgccagaaacagatggtagctgtaaccaattgtattcctgtcattcattttcttctacgaggaccagctggcactggcctggctgggactgacttaaaggaatgtggagagccgggtgatgataagtccggtatcctgaagaagcttgagagcaagacccctggtaacttagaatgcatttgcaagccaggtatagcacatatggccacagaccctgtaacaaggaagccctaataaaccaggcatagtagcactaatggctttaatctcagcaccgtaacaaaacttccactttccctgagcctacaagaagagacattcccacctgctgatggtgctacccaccttcaatcccagctcttgtgaggcaaaaacaggtggatctctgtgagttcgaggccagcctggtctacagagtgagttccaggatagccagggctacacaggataaccctgtctggaaaacttaaaaattgattaattaactaattaaatttgattaaaataaggagagacactccccaacacataaacggccagatttattcggcagaactctcatcagagcccaacgcagagtttgtctgtcatcctctttctgcctgtctgtctgtggcattaacaattcctctaataagcttcttacctaaggatgatccacttcagagttctccttgaagcccaaaccccaggacttttcacctctcagcagctcgcctgccttcctccccagctccctagacacagccatttctccatctgtttggagtccccagggaccccactgggtagtaggattagtcagacattttagttgtcttctgaccaaatttcccccagccaaagcaccctgactctgcaggactatggctggaccacacccccaccccaatttgtagagatcagccaatgctctggattaccatggagataacgcacacgtgcatgtggctccagggcttttatgtgtgttggcgtgtgtgtgtgtgtgtgtgtgtgtgtgtgtgtgtgtgtgtgtgagtcatgtagcatctaataagttcctcacagaattacatacacagtgtaaaaaaaaatgcatcgtgtctagtttcttttcttaccagatttggactcctctgtaataagagctaataggttagcaagtattctttttatgcatacagctgtttatatagcattgtgcagttcctaacatactaatgacctcagtaaattatttgatcacatccagcatctgatttgactgacaccctcttttctttttagacattcattctttttaagtgtgtgtaggt

SEQ ID NO: 34252 - DNA, 1670 bp, Mus musculus
attccatgtggctgcatacgttaaatagcttacaaagctatagagcgctgcctttcttgtctcagaacttttcatcataaagttggctcggcctcctcagcctgtatcttaggggaacaagtaaattaaacaagtaattatatccataatgtttttagaagttagaagatttaaatatatgaatctcatctgagcgtgcagccttttgtctgcggtgtttcctgccaaaagatgtcttgacaggaaataaacattaaaataatctttaatcccttgtctggtctattgccattaacaattgatgcactttaattttgcgggattttaactacaaaatggaatggctaagtagtgataattgggtttggaattatacggccatttatatcaacagagatgcaagaggcagggaggggaggtgattaattatttactatttcctggctgtggttcccattatagaattttctgatacgttctgccgtgaacaattatcaccaagtaagaataaacaaagctgtgattcgaagcttagaacttagaccccaccaaggtgacgtggcttgatttccgcagtccctctggacttcgtgtgatccttccctcccccctctgcccccatatttatgtgtaagcttgctcatgtttctgcgtgttgcttggttttcttctcctttttctcttgggtttattggtaagggctgcagcatagcttaggacactcccatcgcgccccaccccacccccaagttctggggttgtaagtgtgagccacaatgtccacccgagtctttgtgtgtcttagactccaacaggcacactctgaggtatgaatgaccgcttgtcaagttaggacaggaagttggggctccagcatcgattcttcctcctcaaccatttcccagcataactgagaaacgagagcagcacgcggcggtacttgtcacaagcatccctgcacatctgtgatgttcactggagtgatgccatcagaagggagcatttctagtagtagtggttctgggtgggggaaatgtgtgcatcttttgaggacttgagcgatagctcagcagttaagagctcttgctgcttcttcagagatctgggctggctcagtccccagctcggctctcacatcacgcaactcaaaaccacctctaactccatctccaggggattgaacaccctcttctgacctctggggatacctgcacacatgtgcacataccctcacacagacacagacagacacacagaaacatatacacacacacaaaattaaaaatataatatttttaaaatagccaacattgaaataatctgtttagcacgagttgccaacttatctaaaatgtcacagcagtctcctttctgcccttcccacggagaaatgcctgtgacgtcccaggacttagcaccaactacaaaggagattgaaatgacaggcaggtctagtaaatcgggaatctgcagtctgtttttaaaatttatgtagttctcatgtatttgggggttctgacgctgtcactttgtaaccgttaagcctgatccccaagtcttgccgttgccacccctgtctatattgcacattgattttctgtgtgacattatctgcttaatacaaagtgggatagagcagctgtttgtccggatttgtcccgttccttatc

SEQ ID NO: 34253 - DNA, 1126 bp, Mus musculus
cctccctccctcttccccaccccccccccattttgcctcattaagaaggtcactgtccttcactttgcttaggcagagttctgagctgtggcttccctaggacgacctacctgcccaatagccacaaagcctgttagctttgtgaaccctggaatcagaggagacctggtgcctggtgaactggctgcgtgatagtgaactcaagaactccgctccagtttcatctgactccaaggtgtaaacaaccttgcattactttcctgggctgatgggaaagttggactaagagaaggcggtggacctggtctgtctaatagataaggtagccaatggcccggggccactatttacatttaaattaagatttaaatcaggcttggtctactgtaactagtgactactagtacactaacctagtgtactagtacagtacactaacctagtacactaggtagtacttgggggctgttggatttctgtggaactccctaccaggcagaggaggaactgtctcagcttaggtacactagttcttaattacatcacttctgtgtaaggaaacaacaaggggcacccaggcactcaaaccagaaccttttaaccaggaccccccacccccaccccagccaaactctggttggtgccaccagagtgttcctttgtttacagtaaaggaaggaaactggatcaggctgagaaaggttctctgcccggtggagtctctatggacaggcgggatctcgggggtgggagggggtgcagaaagcccaatctcagaggagtccatgtcgcaggtgttaaacctgattagccaagccgactccccgttaattccctgaagtggacaggacagttccctctgctcagcacaaaccttagcgtccgtcctgagtcagccagttccaccctggtggcctcagcaggctgccctttaagatggagcctgttctctgcctagaacagagagagagagagagagagaatccattggtcaactggtccaaaccaaatgcccccagaccccagcctgcctgccgctttgcattctcctgctctgagtccagggttggaggtattcgtacctagctggttcccaaatattgccgaagctctctgagttcttggg

SEQ ID NO: 34254 - DNA, 1107 bp, Mus musculus
ctctgcctctctctctctctctctctctctctctctgtgtgtgtgtgtgtgtgtgtgtgtgtgtgtgtgtgtgtgtgtctttctctcagtctctgtttttctgactctctgtctttctctctctctgggcctgtctctgtctctctcttatttctggaacagtttccctggaagagtcttacagaggtttgttttatttttttttctagctagttttatcccatgacaagatgaaagaggaaatccttctggtgggcctggagatgcttggcagagtctcacttgatctttgtttcaatcctctgggaaagagccgtggtgggttctcagttaggaaagaagaagacccatgtgccaggatgaaagtgcgcttgaacttgacttttgcagtcgtctgaaggtccctgcatagatccttctcttttgattgtcacaatgaatggaagagaaatgggtgtctgtcgtctgaggggttcttaatccttcaggttctgattaagaactctctatggtggcgatggctaattctgtgagtctgacgggacctagagtcagggaatagacaagtctctgggtatgacttccagggattttctagattaagttaatttgaagtgggaagatcgaaacaggggtagtgccaaccgatgggatgggtcctggactgaatacaaaaggaaaatattacctaaacaccaacattaatctctctctgcttcctgactggttgccctgtatctggtctcttcttcaagctcctgcctcaactgcccactcattctgggctttgttttccaactgtgagtcaaattgtacctcccttccttcagttgattctgttaaatgatttatcacaacaataagtaattaacatagagtggaagaaacctaggtgctcttggaagtttccaaagccaggatagcctgcttaagggttatttaacattgtctttgtgatatgaggagaacacttgaatctcatgttccttaaactatggttttaatcttcccagggaactggtggtacacacctttaatcccaaccttcagcagagaggcagagaggcagagaggcagagaggcagagaggcagagaggcagagagag

SEQ ID NO: 34255 - DNA, 1101 bp, Mus musculus
cagtcagggctacacagagaaaccctgtctcaaaaaaccaaaagagagagagagagagagaggcgaggagggttttgttttcttttttctttttttcttttcttttttttcttaacttaaaaaaaaatgtggtacagtcatttaccatttgagccacttactggtggatgctttggtggcaaaggggacagccagtgctgtagtatgaacatcacgtgacacagggcatccaatggtgaacttggtcctgaagttaccagccaccggtctcaactcgcaagatgcctttcagcctatggtaggaaggagcagtctgaggcttgtgtatttatgttgaagcacaggcagctgtttctttgggggcaattagctgacctctttgagcctctatgtctgtctatcttggacccatcatttccctcctttgcatcggatgatctgaacctggagtcagtgggtaccacacagggcaactcgtcacagccccatctctctctgttgtaaccctctgtgatggttaaatgctagctgaccacccatctctctctctctctctctctctctctctctctcgtgagtctgcactttcctatccttgattttacgtgtatgtgcccctgagtgcagtacctgaagagaccagaagagatctcttggaaatgacgtacaggcagttgtgagctacttcactgggtgtcgggagccaaccatgagttttctcaaagagcagtacagtgctcttaactgccgggccgttgctcccgtcccggcttgaccttctgtaaccatgactcaggatgtatgcagcacctgcaaaggctgacaggttctggggggtccctcagcaactcattggagacccatgggccgatgcgagaggagcagcccaactccttagtatctgtcgccactctcagaacttctaatccatagaagccatgtgaggtttccatccattgggagatgcgcacaagtggttaaaattagtcatgcattcttggtccgctgctgcaggaagggtgtcttcgcccgtgagagcgattatgacatgttaaaacggggtaatggtaagcagacagtccgaggggctgcagggcaagc

SEQ ID NO: 34256 - DNA, 1142 bp, Mus musculus
agttctcattggccaggttgggcacttttatgggaatctcccctcccattcgtcagggctggtccatgagtggctgtggtcccactgcacagatgaggaaagtgagtcctggaggacttatattccctgccatgcagagaggaaaggggggagggggctttttaagagttcaaattaaaaacattaaaacctttaaaaatcccatagctttttacattgagttacccatgttaacaacagtgtggggatggggaccgagatattcaacatttaggtttggagttgatagcccgttagatcagcgtggagcgtttggtgtttatttattgcttcccccacccttactgttagggatatataaactaggtaaatatttattttagtagagaaaaataaaagtgaagaatgtgcatgtggaaaatagcggagcatgaatcaggcgagaggaaatgttttcgggtctcgttgagaaatagctaaggagggaaaattacagatcttaaaatagacgcaatatattatacagctgtgaaaacgggccaactagattgcctgcattaaagccgtattggatgttcaaatctcgagttacctggaatgcgactgtacttcctatatttaactaggctttttataaactcttcctttaacacctcaagctcacaaacatatcccacgtggttatttggtatcaaatttgactttctccactctgagagtcctcagtaggaaatctagaagtcagtcttccagaagggttctactgttgtcctctccttacatctccgcatcagtagtaaatagtctgcgatgaaccaaaagctggagaaaaataggccggcatacagaaagaacttctaagtccttttcgctctaacctgacgttcgagcaaatgtaacagaaaacattggcgaacttggcccctggagtatctttacatcggaagtcccacctccacctggaagtcccacctccatccagaagtcccacctccatccggaagtcccatgtcttgttctgttatctccattgctgccttgccttcccctgtctgcagtcagtggataggtacttagtgaattttcagatagtaggcatccagtgtgactgcagacagcctgagatcaatgtgtctgttagg

SEQ ID NO: 34257 - DNA, 1116 bp, Mus musculus
gcctttcttcttgaatgctgtacccttgggacattttttttcttttatccagacaattagtgtttattaaggaagacgctcatgttctgacccaccgaccagagatgaacaaagccttcagaagttctagttgtatccctcagcaccggtgactgcactggtatagttagctatgggtttccttctgtttacctgtgcacagtttttctttctttgttttacgtatgtgtgggtgtgtgtgcatgggaaggtctgttgctgtacacggttgatgctgttaatcatccttgatcatctttcgaccttattaattgagacaaggtctttctagcaaacctagaattcatatatgggctggtctttttactgcggccattggcatacagattcagatttgtgtttgcgtgtctgctttaaccgctgagcagtacagccaatggttctttgtcgtggttggttaggaaaacaagaggaggtgttctcatgatcaactgggcttctggccctggcgagctgcttgggagggtctacaggccttcagttaaagagtcgaggagtcaaggtcaggagctctatttactcagcagagggctgataactcgcttacagtacttgccccatgggtgttcctcatctgctggagaggtggtgtcatgcctaggtacagggcttgctcttaccacatgatgatgaagactacattgggcgacatagtctagattctaggtctgggtaaagcaggcttagttgctctcccttgggtcatgtcctattttgggaccataggggctttcaatgctaattatcttaagtctgtgtgatgatacagaatgggtagaaatattcattaggtaatacctaccaggacagccatagtgctcgtacactgttcaacatccccacattagttggtcagtcatcttgctctgagatgcccaggtgtctctctctctctaccttccacgggaattcccagtcaactcaccacctgaaaagttaatacttttttttaccggggaagggaactttccaaagacatgaccagagctccttcagattgggctacaacataccttgtaaatgtgtccatgccattcttgtaaaaggacactctta

SEQ ID NO: 34258 - DNA, 1138 bp, Mus musculus
tgaaggtgctcattcagtgctgtcacgtttacttgcaaccccatggtccttaggaacctgtcctcatcctcatctcatccccatggtccttaggaacccgtcctcattttcgtctgctttctatgttttcaggtacttaacagtataccatgccctgaaactactatgtagaaaattctggaactaagcagtttataagttctgaaagcacacttccttctgtaaaatgataaaaatctcacgctgtcctgcttagacaccttgaatgaccatggtgtgatggtgattacacagggccgtgctctctgcagttccgggcacccattgcgtttcttggaatgttcctctgtagatgagggagggtgtctattgcatagctagtatccttccattttctccagcacaaactgtgtatgtattaaatatgagtaacatccttcttggtccccatgataacccatgctccactttgttcttcagtgaagcttccccttctaggactctcatacaattggagtctgacagtacgctctaggctggcttgcttcactcagcacatgccttccagatctgtccctgttgtaacacatggcaagattccctttctaacattgctttgtcttttggtagtttcatacatgagtacagtatgtttagatcatatctcccttctaccccccacttgtgagtctcttccctccccctgttagaatgttggctagcttgatcctgtgcaagtcttatgttggcagccatagctgctgagagtttgtggatgcgacgaccctgtcatttctaggagacagtatttagcagcagtcctccatgacttctgattgttacagtctttcctccccattatccctgatatacccatagccttgtgggagacaggctcaagttccttcatatttttttaacggtaatattccattatacaaaagccagtttagtttattgaagatgcttggacactttgggctagggtgggcagagctcttaggaactcctttatacaactatctgtttaaatatcgccctcagtccctttgaaaatttatctaggagcgaaatggctgggccttagaatggctccacattcaaccttttaacacttgtcaagactgtgctcttacat

SEQ ID NO: 34259 - DNA, 1198 bp, Mus musculus
attccctaggcagagggtcctaaacgatatgagtggagcaatcgagctgagcagaagcaagcaatcatgccttctctctctgttctcaactgtgcatgtgaccaactgctccaagctccttcctaggacttcccagataggatggactgtaacccaagggtggaagcgaagaactgaactgtggcctgttaaacatgctcagcaagccacactatgtttgttttccccctttaaaataatgatttgttaaaaataacgaacatgagactattccacaaacaacaattcccagcatcaatgaatggaaaaacataccgggcagttccaaaatgcaaattctagaaccaggggaggggctaggcacttggaagcacaaggccccgagttcagtcctcagaaaacatgtggaaaaagccaggtctccctgtgtagtcactgcatggcaaaggggaagatcggcaactccctgaggtcactggccagcgggtttgcactgctgtgtaagtgccaggcaatgagacatccgatcacagaggtaaaaagaaggtagagagagtgtgggaataacactcaaggctctcctctggtgtctacatgcttacacacacacacacacacacacacacacacatgcacgaacatgtacacacgcatgtgacatgcgcacatatctatgcacaggcccctcctagctggaagtattaagttcttcacagccaagcaaaaattgatcttactggcttccattgcatcgctttctcatttatctcccgacttaatatttgtttaatatgagtgttaggaaaatacccacaatcccgctgccactctccccagccgggacataaatcagagcttgcaattccaccaatgcctcgctgctcttctccgggcctcccgcaggcaactgcagtcagacttccaaaaggccgtttctcccttcctccctttgggggccagagacatgattaacttgcaattatggtgccttcctcattaaagacaagttgtagcaagagaggaaaaataaaaacccagggactgacaggacaagctatgtttccctagcaccttggctgtgtgggcgcctctcatccctctgcccttcaggttagtaaaatcacgaccagttgttgaagctatgagctatcaataaaagttaatgtaccacaggaaatgggaagagggaacaaaatca

SEQ ID NO: 34260 - DNA, 1129 bp, Mus musculus
tggcaggaagtgggagaggggtgaactggagcccgatgcatggattaaaggattgttgtctttatgaaggtccagggtgcatgccggaggggccacatggcaggcacagtctttgatgttcactgggcctcagtaccatggctcctgtgacctctgcctctggaccaaagccagtctgcatcactggctcagccctaaattgagactgaccatggacaagttgtagggaaacagctctgagcaggttacacagtgcaatggttctgcccttatttcaggttgccttcctcaattaacataacacaagcctctgatattaataagttggttattaatttcaccaagaggaaaataaccaacagccttttaaaggaggggatatcaaagagatgccaggttgagagacagtgtagtgaattagcatggtgggtgaatgcagaagtacggtacagcacggacctggcagccatggcctcgacctcttgacctctctttgcctccatttcctggctataaatgaaagtgagaggcagcaggatggctcagtgggtagtgatgcttgtggccaaagctgatgatctgaatttgatggccggaacccacatgttaaaaggaaagcactgactatggaaagttatcctctgaccacacacacacacccaacaaacacacacacacacacccaacactcacacacacccaacacacacacacccaacactcacacacacccaacacacacacacccaacactcacacacacccaacacacacacacacacactgattaagtaaataaatgttaaaaaaaaagcaactttggataacccaagtggtaagtaaaaagcaaaacaaacaaacaacaacaaaacaaaaaccacaacaaaaagaaaaagaaaggaaaggaaaacatgtgtgcaaacgagcacatgatgtctggcaaagtatccagtaaatgctcattttctgtactttgtccttttccatactgcacatttgctcggacccgttactggaggctgtgtacacaccgtccccagttgatgtctagtctgccctcccattggtggtcaccccatcgtctctacttactgtagacacaggggcccttcaaaggacagccgtcttc

SEQ ID NO: 34261 - DNA, 1135 bp, Mus musculus
attcaaggataaagatactcctgcctcccccgcctccaacacatatacttctttctcctattttttttaaagatatatttatttattttatgcatatgagtacactgaagctgtcttcagacacaccagaagagggcatcagatcccattacagatggttgtgagccaccatgtggttggtgggaattgaactcaggacctctggaagagcagtcagtattcttaaccactgagccatctctccagcccttctttctccttttgaagtcatgttttcaaccatattctccagactgccctgtagtcctttcctgtctcctggatctcgctccttttctcttccttctagtaactatcagtctctttccccaaggctggccacttggcactgcacttgattcactgagatgctttcccgaactcagtccccagcactctgtactagcacttagtattagcactcagtccccagcagtcagtcccagcaagcactcagtccccagcactcagtccccagaactttccctatctttcctccgaacaggatcactatcccagtatccttccttccacactggccccggccctctttgaatttgactctcaggttgatgacgcctgcctctgacactgatgacacccgtgctgtgcctcttgctttttatttctcacttcggaaactgctaaactacacatcaatgttgattgaaacctagattggcagactacaattgttgtctgttttagacaggaaaaaaaaaaccctttattcttttattgctacaatgtcagaattgagtatttgtcacagacactggctcacaatcacagaaatcatttgcaaagagctccttatagatgacacttgccaggtatggtggtgcacatttataatccctcagagaggctgaggcaggaggattatgagtttcagacccgtctcggttacctagaaagatgttgtcaaggagaaatgatagggagaaggggacagagaggaagacaaggggggaggggagggggagggaggaagggagggaaagaaagaaggggaagtaagaagggaaaggaaaggcatgggagggagaagagaacagaggagaagggggaaaagaaaaggagggagagaaggagg

SEQ ID NO: 34262 - DNA, 1165 bp, Mus musculus
cagggcaagaagggcacagatcacagtgaccaagagaaagagacacggaaggcggaatccaagagtagcagatggtcagtttccaccatccctttccacgaagcgtggacaaactgtcttccttgtattggtatgtggctgcactctggagtgtggccactcgtgaaaggtcaccaaaacccaaggtccagcgtcctcgtcacctgaatcctcatcactgaggcatggttgcttggctgacgaatgattggctagttgatccagggttaacctgagcctccaggacaggtgataccacatgataaaacgttcttaccctaaacctaattttttggtatttctgcaatggcctgtctcaccctaagaccttagggatgaattgctaccaccaccaccaccaccaccaccaccaccatcaccaagaaagcttaaaaccaggtcattccttagggtttcctaaatgttatcatcagtttatgtgcacctttaataggacatatatatttaaatatatacatttaaatctctgcctctgtctctccttctcccatgtgtgtgtgtttgtgtgtgtgtgtgtgtgtgtgtgtgtgtgtgtgtgtgtgtgtcgggacagcacatgcatgccagagcctgcacatagagatcagatgaccttgggtatcagtcatcactctttactttgggaaagagtggcttgtttttcatggcatattgggatcctcccagctctgtcacccagctcacagcaacagagccaggattagagacgcgccccaccgcatccagctttcacccccagtttaagatccaacctgaggtcctcactcttaggcttcccactggtgcagcttgtcaggtcagagcatctcttttaagaccgctgtatcacaggattttgcagctgtcatgtggacacaggtcttaatatatatacaaagcatctctggtggccatgacatcccctgggctctcagtgttcgttgtataaaagtaagaacagcgttcaacctctgtaagatgtgccctgtccaccaaggccattttaggccccaccatcaaggcttatccctgttgccactaggtggcagcaaccaggattgggaaaacaacccctcaactgttcagaaggtaaaaggggggcctgaagggcaggtaccttttctcc

SEQ ID NO: 34263 - DNA, 1138 bp, Mus musculus
ctgaagagcatctggttggtaccaagaagcagccttcctttgtggcttctgactctgcacctccttgaattcctacattgagtcccctcaatgataagctgtgatcagggcatgtagccaaataaactctttccccattgcgatggtttgggtcagaattttatcacacggcagaaaacaacttaggatattaaaccattgggacaaacaacagtatggggaaaacaatgagagagaagagtgaaggagaaacactcaccgaggaactctggaaaattctgtgctaccactgaggtaaccaccctacacatctttattgaatactctctgttcatggatcagagatgaaaccgtacctagaactttgagccagaaatagacacggagctagacacagaatgctatgctgatctgaaagcctccagttcagtagctgcgcatgattgactggccttgtgttttaagggcaaaagggagacgccaaaggccatcttctcaggatcttcaagctcgggagacctacagtcatgaagacagaggtgttgaggtaactagatagacccggatgtagaatctgcagacgtggccttactggtggatcttggctggaatacagagagacaggggtttgggtttaaccagttggacaacatacagaaaagaatttatagaagagcaagctctgagatgaaggttgaaggtacttccagctggcattgctcgtaggtctggaccacagccttttagacattcagggggtcaggggagaccttcctctaagctgcatagaaagtaacagcatggaaacttgtccgaaggtgtctgggtgtacacacccagatgtttcttaactgaccactcgatgacccagcccaggtgcccgtgtgggtaatttttccagtctggtatttttttttttttttcatatagactgggactatgcctgggtaagatcacgctgtgtaagggagttcttctgcacctcaccctccaaatgtgcaaaccaacaacaaccacagatagatcccagatgccgtttccctgctctcgacatccttgaagtgggccttgctggcaggcacacctgccaaagaaaacgccgccctcaaaatgctcctggtgtggttctcactaggtg

SEQ ID NO: 34264 - DNA, 1132 bp, Mus musculus
ggatagatgaatggatgggtaggtggatgaatggatgaatagttggagattttaatggatggatgatcagatgaagaaatacatagatagatgaatagattagattgatggatagtgggctagttgaatggatgggtggccagatgggttcaaggtttgatgagtggctgcctgcctggataaatgatgcataggaaagataaatgttgaaattttatatttgactttctacagtcatattctaacagcttgccaaaaaatgacatagtcgcccaaatgtccacagtcccatatgtccttaggaggcaccagtcaactaccaaaccccagcagttggaaataggggcagacaacatacagacctgagctcactaaattccgtttctaaaagcaaaggtacacaatgcaccgagagaagggttgtggtggtgccaggacacaatgcacacagagctgcataacgtcccaataatcattgtgtttccacagtcgaaaaacaactgagaattgagaggcaaaggttgtattgggttttcccgaatataaagggagacgttacagttgtgatcaaccggaggagtttgggtggttcaaactgcttgtaactctagctccgtgggatcagacattctccttgggcttctgaagtcacctgcacacacctggcatgcacatatatttatttaaaaaaattaaatcagagcaaggttattttctattttttttaagagtagttgttaagttcagcgtacccaaatataactggcttgccttcccatcttctgctctttgatctcctgattcagagtggagcctttgtggccacctaggcccctgtaccaatgcatcctgaccatccaaaaagcctgctgtttacatctaggtgatcctgagtgctatgtaccctatgggcatgacacacatgcaaccacaagtctcttccgtgttgtatgatgtcaccaatcacatcctatatcgtcagataaaataactattctaaaaaaacctggttctcaggctgcagacacagctaaacaatagaacatttacctagtataaacgaggcttcattttgttgtgttttcctatgagaaggagttaaatccctcatgtagctgaggatgatttcgag

SEQ ID NO: 34265 - DNA, 1151 bp, Mus musculus
atttttcccaggccacagaagctatttgcaccccaagcaacacacctcgctcagctaaccgaggttgcctggctcttagccctccatcttctaccatggattatttagctccattgttccttagcttacctcatccctcacaaggtgaaagaaattccatttggtcccttttcagactgccggactggctgacagaaaacactcagtcccagtcacttctagagaatctgcttccttattgaaatggtccttttaatgtcatctttaatttaatcagatagtgtcatcaaaataacatttactccattactgcaaattccctgcgttattaactagtataactagaccaaaaaaaaaaaaaaaaaaaaaaaaaaagggaaaaaaaaagatggtacaaacccccatggaaatatagactaactgtaaaaatggctacagctcatagacattctatatttaatttgcagtctcaaagcactctctatggagaggttttatggttctgaaataattttaaaacacactttactacaattcatagcaggtagggttccccccccccccccactctggaagtcatggcatcttgtagttccctgagtaactggaacagtggcctgtgttaacctagtaatgctcttgtctttcattaagcgtggtggtggcggtccattcccacaccaaggatttctcagttttcctttggcacctccccccaaacccaaatataaagctcgcgatgtcagctggtgtcatcaggatccagttatttagataaaaaataccaactcatcaatggcccttgggaaagcttgattagaccattgtggtcatggttagggtagggtttacaagctagaaagggctatgtaattacgaagatctccttctggtctggggtggtggtggtgatggtagtggtagttgtggtgtgtgtttgtgtgtgtgtgttagagataagtgggtagctggggtttgctggtcactagcctagttctagattcagtgagtccccgatgaatgaataaggctgaaggtgacagagcaggacacccaagatgacttctacatgtgcttgtgagcatgtacgcaggctcacatgcccgtgttcagtcacatgcacatataccacacccacatcacacatgtga

SEQ ID NO: 34266 - DNA, 1196 bp, Mus musculus
cctggctgctcatttctaagctttaacatctgtactggagaagagaagatgagtttctggattaatgtcataccaaaaccaaataataataataataacaataacaacaaacaacaaaacaataataatgaacaggtaacatttggtcttgcctacattagatctctctattagaaattctatttaaaatgtttgtttggtttttttttttccctcctcttgggaccagtcttgttgggtcccctccatgcttggttccagtggaactaaagggcagcaagctggctgagccatctaagatgtacggtcacctccacccctgcctaggacctctgtacaaccaacacctaagcgcttggctgacagctgccgtccttttctgtttgccttattgctttgcgtctagcatgtcagctcactagagaaatgtcatctgactagggacagtcaagagtcacctaagtctcaagtcaacaaggccactatccgtgctgcttctccatgcggctctgggaagctgatctgtctactttggtccctaaagtgttgactctgttccctttgtgtctagtatttgtttgaacacgccgcttccaactatatgtgtgtgtgtgtgtgtaagaactagagatctgggggaaatggcagcaggggtgtgtgtggcgtgtgtttgtcgggagtgaggggatggtacttgtccggaaggctcagaaatctctgtgacctcccttggagaaggagacttccttgcagtgtctcccgaagaccccaggttccaacagaagacattgattcgcctggttagttatgacctcagaacttcttgtggctcccttctttctgatccagctcccaagcaaagccaaaggcagaacgaatgtgggcagagactggcttaaggaagcctggcccttgctctggtcctccagattgctctcactaaagccttgctgtgttcctttcttagagaagctttcagccctcttcttataggacactgtgaaaagtaggcacagatcctctctaagcatgggggagactctttgcatttaaaaaacaaaaacaaacaaacaaacaaaaatcccaaaagaattcatgtcattgtggagtattcataaaacaaaagagagaacagatagacgtgaaacaaactattcacattcccagccacaccctctgtgcgtcgttcatttgtc

SEQ ID NO: 34267 - DNA, 1152 bp, Mus musculus
ctccaaagggctggacacatggccttatccatagttcgtatgtgtgtgtgtgtgtgtgtgtgtggttgtatgtgtgtgcaagtgtatgtgtgtgtatgtgcatgtgttgtatgtgtggttttgtgtgtgtgtgtgtgtttgagtgtagtaaaacccatcccttatctcactgtagtggcacaatacctgacgaaagcagcttacgggagggacagtctcttttgtttcacaggttaggggtacagtccatgaaagatgaggaagccacagtggcagaaacagtcagaaaacagagtgaccaaggctggttcttagctggctttctccttttagttctgagcaaggactcccagtctgtggaatgatgctacccactgcttctaggtgattctagacctaggttgataatattaacatcatacttaccttaaaaggttttctctccctgctggtttcccggagccttcctcttgaatgcaggcatgccgaaatgttttagacatggaagattctgcagtaaaaaggaccatgtttccttgagaccttccccatgagcaaagactgtgtggatgctggccttgaacttggcaggtgctggtactcttgtagctccctcgttctttgtgcagtgttctttgaggtgacagcagcccactacggccccccatggttttcagtttcagggtgcatcttgctggcacctttatcacctccctgctgttccatttccctacttctcaaaagacctcctccctaaaaatgaagggtgatctccctcctcctcctccccataagctagtgctcagtaggggctgactccatagtgtacccttgtgctggccgctatttgcctttatgaggcttgctattctgctattcctgatgctgctaggagttctgattcctagcccatgaacctttgaccaaagattttcctctatctgggagggcgatgctctggaaccttaagccatctggaagaccatcagatgaagggtgtaggaagcaagaggtgcacaagtaggtggctcgagcagagggactgaccctaatgatttatggaacataaggggtacacggagggatggagagagagagagagagagagagagagagagagagagagagagaataaactccatgctctctggc

SEQ ID NO: 34268 - DNA, 1177 bp, Mus musculus
ggtacaataaaataccaagttaagagtattaattcctcaccagccggatgggtcccagctgtgcacacgcgtgtggggcgtgagggtgtacgctcagcgggtgcaggtgctgacggcgctgttccacctcggagcacgcgggccgggaacacagctgtttctcaaatcctccgccactcgctgcaaaccctctatgaagttgtgctacctctgggtacaattaaaagctatatacacatttcaccaggtagtgttagaaatttaggctgagccaaaaaacggaaagggagaaggtgggagggagaaagaaatgactcccttgttaaggctggcattaacctccttaccctgcctattgaagcaataaagcttccaaatgcctcatggtctccagtgttaggagaggagagttggggtgtggaaaaggtgttagagaggagccttcctgtcttcttcctgttccttcctgcttccttcccttcttcccttccatttcccctttcttccttcttgccttcccccctttctccctcccttccttccttttttctttcttctttctcccttcttcctctctccttctagttctccctcccctccacctctttttctctctttcttttctttctccctttctacattctttctcttcttttcccacttcccctccctccctgtctcttattcctcccagtctctctctttcctacacccccttctttcccactctccttaccaattccttgcttaaatttccccgtctttgcttctgcctcagcacccaggcctgtccgtatggaaacatctaggcctaggctaaggaagatagaattagaagaggccaagtcgacatgtggaaggcctggatctggcagctgttttggagaaaggggccacaatacctcagccacttttatccttaccttgggaaactgattggctttacagcctgggctagcttcctttccatggcgggccccatgcagtaagtctcctggaacccagccacagaaatggcagctgaggctccagggggcagggacaatgactgtgttctgtggcctcaacatccacatagccactgctttcaatgcaggaaccaagggccactctgatcttcctttgtcttcgttaacacacagaaaaatctgaactttccaaaaaggacctcttccca

SEQ ID NO: 34269 - DNA, 1126 bp, Mus musculus
ttgaagtcctctttgttagcttcgatcatgttgtttcttctcagtaaagcatcatccaaaactcacatgaaaaccagcactgagctatgatggaaggaccataggtttctgagttatgactcttgatgggacttgatccccatttctcttctgattctttgtgactatgaagttaatcccatgatccttctgggactctggtcatgtaagtgtgtatgaatatatattgtctctagatatatgtatatacccatatatgtgctcttttattatgctttattatgttttattatgagagacagtctcagtacatagttccagctgatcttcatcttactaggtggctcagaccgtccttagattcatgcctctgcctcccaagtattgggattacagctctatggaacaggctccacccacaagtcacactttgttgtagatgtgtgtctagtcatttgtagaggacatctccgggaggctagcatctggtaggtctcttataattggaggactcactcatgagattgcttgccttgtgtgtgcaatagggagagtcttctgccctcactgcccctcaagctaggtggatttttctcttgttgacaaagagtatttggtagggaaagcaggttaaaaataaagacagcccttccctgccctttgtgtccccttcctggtgacagcaagaaaccatcaacaccaacaagtttccacgttccttttacagcaaaagggactttttatataaccaaatgtggtgtcttagtgactttttgataatgtacagttttttgtgaatttaaatttatttttttctatatttttaggaccaatctcatttttaataaggtttaaaaaaaaggaaaaaaagtctagagaaaaaaaaataccttgtttttgccatgtgatgttccacaggtgcggctgtagaaaagtgcttgtcattgaataaaaaccacatttgataaaagaaaaaaaaaaaaaaaaaaaaaaaaaacacttcccatccaaatgtgaggatcagagttcagacaaataggactcccataaaagtaagcaagcaggtggctctgtgtcgtagtaaggcttggaaggggtcaaagagcatctctggggcaaacttgct

SEQ ID NO: 34270 - DNA, 1199 bp, Mus musculus
atagtcatacattattaagaaatcaagtcaatttttttttctctagaagtcattacgtttgaattctaatttgaaaatgtattgaatttgtgaataagccttaccattaggttcaataatccttctgacctttcaaaactacacgtgtagttcaagatccccccccccataaattctcactgtgtggcagttgatggagttcggaaaagagccttaagcttgttgcaaaaataataatataattaattaattaaaagggtaatacgggttgtttcctccaagtaagccatgttggtgggctcagtgcagtctgtaagtcgctcatggctaatctgaagagagtggtgggaggagctgatggcggcagggaccaggtggattcctcggcgaatgtctttggccataagactggaccgagggtaggttttcttgagccacttgtattctagtagtatggttgagggatggtgccagggagggctgctaactcaccatttgttctaaacaaatgacatttcctgctcctgaccctgctggggaccccagggtagctaaagtccgtgctctctgagagatgttaacaaagtttacataagagtcttgctgtgtagacaatctggagtcagtttctgttccatcatcggcatcgccatatgtccttggtgtttctgtgaggaagtgtgtgtcaagccatactagggtgaagtgtgctggatgaaggtactgtagctacagagagggagcagcaggtgacctggttcgtccagggctgtttcgatggcgaaaaaaatcacagagggtagagttaagtctcaaaaatcaagttataatatcttttggtaggtggcactccagccatcactggctgattctccttaccaacccttgaagtaggattttgcatttagggctatgtggcttagcatgcggtccatctctaggaagtgtccaaagtcactttctcagcctttgggattaagattggcatgtgtcagtcaggagacctgatgtctagagtgaagcttcagccttacgtctctgggtttgcctcaccctccttaccccgacatcttgtctgatgtgggagcttaccgactccaggatattcagagggtgttgagtgctccatctagtctttaacttaccattgtgccattagtcccagcttgaagttattttctaatgtctacgttagctag

SEQ ID NO: 34271 - DNA, 1843 bp, Mus musculus
tcagaagggttcaggaagaaaagagtttaagtccctattctccaccagcctgtgccaccttggccatggggagcctgagagtacagtcaccttggctgtatttggtcacaggaaaaagaaattggagcatgtggccccctggagtccctatagaacactgtaggagctgtgggctgactggggtgtagagaattaaggagcctgagcctcttgtcccttctctgctgggatgagctccatgtacacttaaccccacgcccttaagacatctcctgttctttacatgtctgagtaactctttcagatcgctgcctcctctataggaaacacctcccccaaacctttctgattagcttctgatcaagccagttttgtccatagggaagcaagttgtcaggattctctctagaaatagcacgggatgtttagaaatccctgtgatcagcagtcatctttgactcctgagcatacaaccagatatgctttctctcttggccatttgatgggcgccacacttccgaacatactgaggatctgtgatgactgaggtagacactgaccatttctgaggtgggatttacaccccttgtttttaaagactgtgttccgtctgttggaaggaggtagatctgccacatggacacaaggcatttagtcaacctcctgggctggccaaaccacaggagttggcattttcaggctggctgtttgggtagtgtggagttggaatccaggtgacccacatatagcagattgagctgggatggaaaattcagtggttgtgtccaggttacccccaaagctttattgaggtcaggtgctggctctctcatctttttactttgtaccccattgtcctctctcctcccatgaggtccttttgcttgacctgttactctccttgttccttttcctaccaccctttcctagggcccaagtaaatcttttgaggaattttagatgtctttgcaggcctggtgtatgtgtccctattgaacttggaagggcagctatgagtgagaggtagaggcttcctcttctaagtcaaggttccctctagcaagccatttgagactctcctctgtttaccacaaccttggtggtggcaactcccatatgacccggctggggttaagtgctcagatcccaggcgacttttgaagagttatggttaagatggccagaccacctcagcactgggaagccaccacctaatgtgggtgttcttgggtgaccctttactgggcagaagtaaagtccgagggaaacacatatgcagagaaaggcggggactgggggaaaatggggaaatgacgtaaaatcttactctgtggcataaatcaaactgggaaatatcctctcggaagcgggaaaagatgatttccctgagtgaagttcaacctgaggacgggaaaataatgacaggagacactgggcaaggcatatttaaatctccgaatccctcttttacaaatagccttgactgaacgctgagtcctatccctcactactaactgctggtttccaaaatcctcttaaaaggtttgttaaaaaacaaaattctctctctctctctctctctctctctctctctctctctctctctctctctagtttggaatttagtcctatccccactctttttcaatctaatttctgttgaagttttttttttttgtaaaaaaataaaaattaaaaatagagacatccaccaatcttcctatggggacgtttagaaggagggcttgcttctcttctgtgtttctttattaagatactgagatctgttgtatgtatgagccaagatgccctcactaatatacacagtatttaagactccaca

SEQ ID NO: 34272 - DNA, 1107 bp, Mus musculus
tatagaactatgatgttctgcttatcttcctttaaggtctacaagttttcagtgtctaggatgcccatagaattcacggttaaggtcatggtttttgagttcagagggggaggtaacgaggactgagaactaggctgacgtcaggcgtggactaggccagcaggtgtgtaccatcccattcatcctctccccgccctgtcccccagaatctgccagctctgtgcttctgtgagtagggcatgtggcctgtagttggcctctacctgcttctgatgaccaggaattgtgccgtggctcctgggagaattggggggagccacagaccagcaaataccagccattagtgaaagaagttcttctctctctttctccagggacttcgtgaaggcctttatccagtttaagaaacccatcgtggtagccattaatgggccagcattgggcctgggagcctccatcctgcccctctgtgacatcgtatgggccagtgagaaggcctggtttcagacaccatacgctaccatccgactcacgcctgctggctgttcctcctacaccttcccccagatcctgggtgtggcgctggtaagcctcctgcttcctccataacttcttgcttggtctgagaggcatgtgtctgggtcttagcagggcccttttcccagagttggagtacagcagtgccctatgagtgaagcccaggtatccattagacccaacgaatctgctctggcatcctctgttgtcccagaaccgctgtgactgaaggcaggctgatctcaaccagactgaaaggtcttcaagctgtgggtgtcgaatggagtagctgagctgagccgacactgatgctgccgagttactgtttacctactgtgctgcaggcgccatgcacacagaggcccccttattcctcattacactctggtaaagctgtgcctttgggagagatgagcgctgaaaccaacagccgcagttatcagaggtctcgcacagtggtggcaggacaggtctagtcacagtagtgccggcaggacatagagagcattcacggtgtgtaggggccacacacaaccccatgaggacgatggtggtggttaccagtgaaca

SEQ ID NO: 34273 - DNA, 1209 bp, Mus musculus
aggtggcctgtcatttattgctcacctggagagaattctagactggcagatcctgaatcttgtggataatacacagcagactgtgaacttggtcatgtctacatgctaaagcatgctgaccatgggccacctatgacccctgcaagggtctagggagataaaacaagagaaaattttaactgagacaactagaggcttatatagctcaccaacgctgtgcagaggaccactttcccatgctttttaaggggttcaaccagcaaataacctaaagttggctaacagaagttcatagagacagatcaagttcacaccaggctcccaggacttccatgttgatccttccgctttcactgagggtggtgtgggaaggttttggttcagtgaagtttctttccccggggatggacgtgtgcttccattcaggggaagtctctcagacattcaaagctctgcgaactcacctctgcctgcagatcatgaaggaagtccggcgagccctgtgcaacgcggccacagatgacagcaagctactgctgctcagtgccgtgggcagtgtgttctgcagcggactagactattcctacctgatcggccggctgtccagcgaccggagaaaggagagcactcgaatcgcagaagctatcaggtgagtccgacctctctctgaatgaacgctttggggagcctgccaacggtgaccaaatttagccagttaaaagtacaggctgcccagctgtaaacgtacatcaaacaatgtgcgattttatttttagtgtgagtatatcctcggcaccatttaggacaccaggacatacttacattttaaaattaccgttgatttatctgaagtttgactctttttgatgccagggatcaaacccagggtcttgtacatgttggacaaataaatgttctaccgttcagctccgtttccatctctgaactgtggacacgagctggccagccgacgttttgtctgtggccccatggcaggctttgctctccataggttgcatttcatgcccgcctcccctttttgttttttgtttttttaaaaagacatacctatttttcccattatggcctgcattggcaatgcctgtgatactttctgattccaccttctgcctggtagtatggtctttgattatgtagccatttctgtgtcctggacctgatgtgactcaattactagggagagagtga

SEQ ID NO: 34274 - DNA, 1098 bp, Mus musculus
tcaggtcatcaggtgtggcagtgagcaccttgacctgctgagtcatcatattggcctgcatttatgttgttgttttttttttttttaaataaacttttactgtacttttaaagtcattccaagtaaaggaagaaacacatgttcttagtgtggcacagctaattccttgaactgtatttttctttttctcctcccccttcttttttttttttttttttttttttttacaaaaaaccttaaaactaattcatatatgttataaaatattccaagtacatgtctccctcttctccacctcaaaccttatttagaggtcatttctgttactattttttatggttgtttctggactcttttctaggtatattattcattattttatgtaatttattaacatatatgtaatagttaagtagctattcaaatgttggttgattgagccatgaaaagaaataacattttctgcttattacttattgattggcaatcatcagccatccaccatccatctgtatctgtttgtatgtctgtgtttgtctgtctgtctatcaatctcacccatcatcttctgtctatgtattatctccctccctccctccctcctcccctccctccctccctccctccctccctccctccctccctccctccctccctccctccctatctatcatctatttactctgttagcttcagctgtcagcttgacacaaacctagaatcatctgagaagagggacctccaaccgaagatctgcctggctctggttggcccatggctatgcctgtgggacatttttcttaattgctaattggtgtaggaggacccagccccactgtgggtagtaccatcccttggcaggtgggcctaggctgtatataaaacttagttaagcaacatacaggaaccatgccagcaagcagcttggtcctccatggtctctgcttcagttcctgacttctggtttctccttaagttcctgccttgcctgcctttgatgatggactcttgacatgtaagccagataaacctgtttcttccccaaggtgctgttggccagcattttattacagcaactaggaagtaaaccgggactca

SEQ ID NO: 34275 - DNA, 1116 bp, Mus musculus
aatgaattcgtttccactctgaatttctaggttggatgttggcagccagactggcagatgtttagcggggactctgaggtctgtctgcccatctgtagccggacctcagacagcttggggcccctttggaaaatgatccttgggtcccacgtcttctcaccctcttcgtcttgcatccccaggttgaaaggattgtggacaagaggaagaacaagaaggggaaatgggaatatcttatccgatggaaaggctacggcagcacggaggacacgtgggaaccggagcatcacctcctgcactgtgaggagtttatcgacgagttcaacgggctccacttgtccaaggataagagggtgaagtcagggaagcaggccggagcctccaagctcctccgcgacgcccgcggcctgccagtggaaagactctcccatcggcctctggaacccgggaagagcaaaccatcttcccacaagcggaagcgcgtcaactctcccctgtccaggcccaagaaggggtcttcgggtaaggctccagacagggccaccaagactgtgtcctataggactacccccagtggcttacagatcatgcccctgaagaaggctcagaacggcctggagaacggagatgccggctctgagaaggacgagtcacactttggaaacgggtcccatcagccggatctggagttgaacgaccagcttggagagcaggaggccagtgactgcgacgggacccactccgcgctggtggagaatggagttggtctgtggcttttctttctctcagggttgggttggtcttggctggtggccagcttgtggtgttgttgttgttgttgttgttgttgtaggcaggatcttatgtggtccaggttggcctcaaactcaccaagtattctaggatggctttgacccccctgtctcctgcctctgtctcctgggtgctgggattgcatgcaggcactgttagatcctgtctcaggtaaaggtggaacacggggcatgctgggtaaggactctactcaccaagccagccatgtcttcagccctttggtctgacttttctttcaacctagggaaatatctaagttgctacccaccttctgtctttaac

SEQ ID NO: 34276 - DNA, 1121 bp, Mus musculus
gacctggggaaaactgaagctctgagaagtcacaggactccctaaggccgagatagactcccgctctcacctcggggttcccagttcacatcctgggctctcaaccacagggcagggacagtctctcttgccaaatgttctgtctgcaaggcccagtaagagtcgagtttgttgtgagtgttttgtgcacactggctagatgagtaccattctctgcatagggggcccctgggaacctcagcagtccttgcccagttccctgggcacatgaagtcttcagtctagaactcactttccttcctatagctctgatcttgttgccaggaacagctctgtccagtttttcaggttcttccccctcaaggatctctgcattgtcccctgccctcaagtcctgaccacttggtagccttgtttctgtaaaccccaggccatctcttactctcctctgtagccttcgtagaggctggcgttctgtcttcaacacaggtgaggttgccgactccctcttacctgggcagacttcctgttgccctctgaaccatgtgtggttctggattcttcctgatgcgaactgtgtgtctttggggctatatcacttaccacttgctgggttgccctgggtgtcaggttacactctccaggctgttcttccatccttctgatgtcgccttttccctgtgtgtcctagtgctagctccccatcctggtcttcacaagccttgtgggaaatctgccctacaaatcgtagtctacgagtcaggggatttcttgtttgtgatgggggtcttcccaccagtccacacccacacgtgctgcacgttgcacatttgttattaagcatctgctcatgtccacctttgccgtgtccaagctaacgggactcccgagcgtttcttgtcttcttgacagtggagacccaggaacgcatgtggtttcatttccaggttgtccatagggaaattttctctctttatggcccgcaaagaggtaaggaaacctgtaggtgccaccacaatgggcccccagtctctcctcaatgcccttctctgtggtagggtatcccagggagtgtctggttccacaatcatgaggaaatttgtgctttctaaccttgttga

SEQ ID NO: 34277 - DNA, 1104 bp, Mus musculus
atggtgtattataattattattattattattttaaaaccattagactgtatggtctatggtttatccttgaaatgaggctcctcctccaatgattggagaatcatctcggtgtttgggaaaggcacaggttttagacgttagttggttatttcttctgcaacctcgagcaagtctttttttttttttaagatttatttatttattatatgtgtgtacactgtagctgtcttcagatactccagaagagggcatcagattttttgtaacggatggttgtgagccaccatgtggttgctgggatttgaactcatgacctttggaagagcagtcggtgctcttaactgctgagccatctcaccagccctcgagcaagtcttaaaaccccgacctccccatatataggagaggcgacccactttgatgcacgttctgaggtttgcagatagaaaacctgtcattcagtttcaccgttgacacttttgttggtgttggtcattgacttgataaagtgctctcaaaaggacgaggcttgggaactgggctgaggtcctgggctcaggcccagcactgtttctttcttccttggaccttgctgtaatatgcggtcttattttatatctctgattagctgagcaacctccaggaactcttactgtctccaccccggccaagtctcagaataataagatcagtaatgtagggtttgggttttagctattttctttcctttccgcatccattcacttcctatggaggtttggcctgttgctgtgtatcatagtgcggacctctgtaccagaaggtctatgcctacatgaattctcatgtttactagcctttgttgtgtaaactgtgttccttgatttaagactattaagtaaaactgttaaataaaattggctataaccaattgctggagggatcagaagtaggtaggttttgatttacctgattgggggtggagaggagagaggagagaggaggaggaggaggagtaagggaagggggaggaggaggggaggaagccgtcatgaggggagatgggccatgagcacatagccaggagaaacagctagtatctgggctacaccactagacaggta

SEQ ID NO: 34278 - DNA, 1105 bp, Mus musculus
tgtgcatgcttttacctacactgtgccatgctggtcattattgtgactcctaggcaatatctctttgtaggacagctagttgcttccctcttttggaagtgttcctggtgctttctgctaccataggagctagacctcagagagaatgcattcaggtattccagctcaggggcctctgggccctctgtctgaagtacttggtctcttcagcaataggaacttactttctacctctggggccaaccaagggcatatcaatagcctgtaatgttttgggagtctcttggacaaccccaaccaacaactcaaaagagggcttatatgcactgtcttggcatttttgttagactgtctttggctcttagagtgagcattgtgaacccagatgagaagatttcatttaaacaaaataggtatatttatacatagacttacgggtattctagttgttttttttttttaaggtagttcggtaacagtatgatttcttataactctttcagacacccttcctcttattttatcctccttctcttctttctctttattcatctctctcccctatcctatttggaacccccacttttccaaccagattatttgtaccctgctaattctccctctctctagtgtccccctcctctacgttatagagagggagcaatagcccctcatcatttcctagtttctagagtcaccccagcatatgtactcttatctgaagattttaagtttggagcctccaggagccaaagagagcatacagtgtttgctcttctgggtctgggttacctcactcagtatgatcatttgcctgcagatcccatgatttcctcccccacccccttacagctgagtagtacccacgtgcgtgtggcagacacacaccacattttcatatccattgcttggcttaaggacatttaggttgtatccatttcctagctgttgtgaatagagcagccataaacatgacagagtacatatcctggaataggatgctgagtcttttgggtgtatgtatgccgaagagtgacatatctgggtcctatggtagatttacttttagcgttttgggaattcaaacactgatttccacagtgac

SEQ ID NO: 34279 - DNA, 1163 bp, Mus musculus
tccacatcttttggaagccttgaaatccttagctccagccggtaagtggtcagtttatgtcacgggccagccagatatcaccagtggctgttgcttctcgggagatggccatctggttccctgtaagccggttccctctgagccctccctcctctccagtctgcttcccctccagcccttttccccttttcgtgtctgtgcctattagggggtaggagaaggtgcccataactctttctgaccgtagccgtgtttagactgagtgtccccgtggtcattcttatgtttcgttttcttgttttcaggaattgcagatgcaccactttctcccctgctcacctgcataccgagcaagaaaatgaattattttaaaattagagataaatgaatacatatggcttggcttccgctgcacatgcaggtccagttataaccgaccagcttctgtgtacagtcttgtgtcttagaagccaatccttggcgtcggacattcggtgtttttaatgaacgattgggactgcatctgtccttcatccgtgcatgccctctctcttcccgtctattaagtgcagcagctgtgggcatttgacaagtgataaatatgtgcacgcacacgcaggaggctgcaggttggcctcaaccctggcacgcacagaagtggagcatgggttgactctgtaggcacctcctgtccttcctcccgctgctgcttctcctcagaagtccgtccctgtgggatctctgttacacacccttgatcacagaagaaccaagaagctacccaaccccaaactaggagagtcagagggaagctggaggctactacgcaaggctgcatatctaacggcctctttgtgtaaaacaacttctctattatacatattcctaatatacatatgcttctcgtgatcttttatccatggcacactgaaactgagcatcactgatctgtgaataaagatactgacaaacgcattatcagttcctttggatgaatatacaaatagtcgtgaaaggactaagtaatacttatacagtaatgtgtacaggctgtgggtcatccgatatggaaccattttaagttttagcttggtcagacatgtcaggcgcttccctcgtccctcagtgatctgagtatttgggctttgtgctgacaagttctc

SEQ ID NO: 34280 - DNA, 1083 bp, Mus musculus
aagccagagttaagcagctccaatccacccttcactctagctccaagggtacccatttcagcccgtcaccatgtacacataacacagagacacgtgcacgcacatcttaaaattgaatttatttttactttcttactgtttccagagacccacctagtaaaaaaaggaaaatggaaagctacctgcaaaaccaaaagttgtccagtaaaaccactgaaccactgagcgaccaagcagccccgcgccaagatgctgctgaaccggatgctccggaggtcaagcctgcagcatccctcgaagactcctgtagcgcccacaccaaaaagcagagcgtcgcgacgcctccccggtgtccccagaagttgctgttaccaaagcccaaggtggctctggttaaactcccagtcatgcagttttcccccgtgcctgtctttgtgcctacagcggagtcctcggcccagcctgtggtgttaggtgtggatcacagttctgcagccggtactgtgcacttagtacctctgtcggtaggagccctgatcctcagcctggactcagaggcctgctctctgaaggagagcctacctctctcaaaaattatcagtcctgttgttgagccaatgaatacaggtgttcaagtgaacttgggtaaaagcctgtgtagtcctttacaagaggtagggagtgtgtgtcagaggaccagcatttcctcaagcaacgtgcagacagatctgacctatgcctcagccaacttgataccctctgctcagtggctcggccctgattcctctgtgtcatcgtgttctcagactgacctgtcgtttgattctcaagtgtcccttcctgttagtgtccacacccagacgttggtgcccagctctaaggtcacttcatccatagctgctcagacagatgcatttatagacgcctgtttccagcctggtggggtctccagggaaacccagaccagcaggatgcagaaccgcacaaacgactcagtgccagtgggccacactggcttgtgtggggacatttttgaaagcgtgcatgcgtcatacagtgtgcctactgacaccatcatgagta

SEQ ID NO: 34281 - DNA, 2980 bp, Mus musculus
ctgctcggcacctgcctgctctggagagcaaggtccagttgagcagcacagaaacacaaaccatgagttctggcttcgagcccctggggaacttgttcctcaccagcaacgaaactcagacagcaatggatgacttccttctagccgatctggcctggaatacgatggagtcccagttcagctccgtggaaacccagacatgcgcagagctgcacgctgtctccagcttctgaaggtgcagccaggcatccccgctccttgtgcgtttagaacatgggctcaaggacagcggcaccgactggggatgtagtcagtggggcagctgtttagattctcttcagttcttggtgttttgtactcgtgaccacaagattggtgtgcaaatgtgagtgtattataaagtgtaagtgttgatctgaaatgtcgcctatgtttgctcctgtgtagctattctatctttttttaaaaaaaaatgcatttgacactgtaaaacttagaactgtttagctaatgccaagcttagcaggtggtagggggcaagctttgtggctgctttaactgagtatagcacacttaaatggcatctccacgtaaagggcacctcaaatgctcagacaatgtttgtgtggccgctaactcctgagatgccaccaccttgccttgtcatgtccctctgactcggaagcaccaagggaagccacacctgtctttagcttttatgacagttttgagtctcttctgtcccttccctgctgagctgtgactgccgccagcttcgtgtgccatccttctcccaatgtgaggttactggccagtgtgagaacagcaagcactcggtgtcaatggcaggcttagtacgaggaaggtatccagctgtggagatgcctgcgcactgtggacaccctcagttctgttcatctcaggctcatcccgcttcgtggacgagctctcctctgctccctccagagtgttgatcaaatctgtgggattgccatgtgccagacggcagccagctgtgagcacacagtagctagagggtagttcctggttgaccccagagcttctagctgtctgtaaattggggttcctatgactccacactctttgtgctcagtgaatttactagaactcagggatactgtttctgtgaagggtaggctgggtgcaaaggggcagaggacttccacaccttctctaggcacacctcctaccaagaatctgcctgttagcctcgtaggaacctccaaactcagtcttgtggggttaatggctgctttgttgtgtgggtagagagttgcttaaaccattagcaatcaacttaaccttgagtgtcaccctatctggtgggttgggaggtagggatgaagctgaaaataccccaacctttcgatcattaattattccttggtctctcctgtgacttgtccccatcctaatgctacccagatgctaccagctaccaatgacctcatagcaagcaaaagcaaaacattttttctgaagactttggggtgggggcaagttgtgatatacattacatcacctcccccacaaacatccttcctgctccacagtagaccatggggcctgcccgactgcttcccataatggacttagagaccctctaagaattaaaaaggaaggcatgggtgggggaaaggctttcctgcccagcccccgccagtatgctgcacttgttatcttgataggagaagcagggcccacaatgtctttccttccacccacccccatctcctccctgaaagaagctcttaggtctggcaagcatagtatgtgtaccctgagactagcaactgtagaatagacccatctaaagtacgctgatctagattatgttgtgatgcattctttaaagaggaaaaatctggagagcaattgcttcaacggttaagaatactctcactctgaggggagagcgaggtcaagcctgcctggggggctctgtgctaagtagatcatggattcatagctggtgcccaactctgaggcaaattcagaatcagcccagcctggggacctttccagtctagcctggatggaaaagccctgttcttttggcatacgtttgtgctgccaaaagctgaaccttcaaaatgaaacctaagggggctggtgatgactcattaaataagttggtattgctgctgtcctgtcccattcacccgatgcagaggactcgggaatgggctaataacacacccggcaggtgaatgcaacccaggagctaaacagtggttgtggccacagtcgcctgtgaatgtgagtttcagaacagacacaaagccttaacttagattttctgttgttttggactcgtccactgccttaacgctcaagcatctatttaagccctccggctgaaggagaagtgcatgtctgctcgtggctctttgtaaatataagtgcagcaatctatggctttttaagtttttgtgtctgtggcgatgtgtcttaatagttacaagataaagaatggagcatgtaattgtccttcatgtgcaagaactgtccccacaaaaatcttaagtcacctgaactcccctaaggttggttgtttgtgaacataaatttggtgattaaagagaagctagaattctacctttctgtgtgaatcttgtccacacttaggatgcaagtttgttgttcttgtgtatttcagaagatagtaatgaaatggttgtgcccagttaccttcacgaaaagacagtgacacttttccctgaatagataacccaagggatgaagaggtggcatggtggttcagataccttgctgccctttcaaaggacccaagtttgattgccagcacccgtatcacacccagcggtaactgggtgttcaggttcaaatgttcaaggcatttgctgccttctgaacttgggagggcaccctaagacacgtgcatacataacattcataaataaagtataagcccagcatagtggtacctgcctcacag

SEQ ID NO: 34282 - DNA, 1590 bp, Mus musculus
gagttcaaggccaagcctggtctacaaagtgaattccaggacagctgtttctatatagggatatttgagtgtgggggtctttagtggtcagaggaggacactgaattccctggagctagagttataggttgtaagtcacctgataccaatgctcaaaaccaaacttgggtcccgtgctacagcggtatgctctcttaaaaacggagccatccttactccagcccactaaagtcttagagctaaatttattgaagaaagaatggatttatgttaggataacaacatcacttaaatgagggcactgtattaattttgaatgaatttgactttaaaaggcaatgtgaactgaggttctgttttgggtacaggttggctgatcaagatgacactgagtgacccttcagagatggatgaattgatgagtgaagaagcatatgagaaatatgtgaagtccattgaggagtgaccatggcacccctctactcccagatcaaactggatgtgacgtgctccagcatgcttgtcttaaactagtggagaatagaggacttgaaataacttagcaatactgatggaaagaaactgttcttgacagtgctacttaagagccacccccaacttcctaaaggatgcagataaacacagtgtacaggtttttgataattgccatactaagtatttagactaggggttaagccctggtgtttagaattctgaggatcgtctgctgtgaaacgtggttatgaggctggttttggtgacggaccaccttctaatcccagcacgcaacaggcagatgttagttagttcaaggtcggtctacacaacaagttctagaccagccacagctacatggcgagaccctacctactgggtataagactttcataattcaagataatagtggtgtatcttagataattttgttacttgcccatatccaccactggatttgggtcagagattagtgtcttctcattgggaatgcaaggaagtgttgtacagtgtcagaggcaggagagtactgtctttgtttcaccatgtgctgtgttgactgttgttttcccaccgtgaagcaccggctttgcaacactgcgaaacaaataaaacattcatcctctttgttgattgtgatttttatttggatattaatgttttacttagtgactgctagttttagaagggttgattttaattataggatgttccagtgtctggtgctaggtataccactgaggtgtactgtgcctaaccatgtgaaatgattaaagagaaaaaaaaatagaagtctggtgtggtggtgcacgcctttaattcaggaggcagaggcaggcggatttctgagttccaggacagtcagggctacacagagaaaccctgtcttgaaaaaccaaaaaaaggaaaggaaaaaagaaaagaaaaaaaaaaagaaattaggccaggggctagaggggtcagtggttaggagggcttgctgttcctgcttcttgcagacaacctgggggttgtttccagcacccatgtggtagctcaaaaccatccctaactccagttccaggggatctgatgccttctatttctgaaggaatc

SEQ ID NO: 34283 - DNA, 1106 bp, Mus musculus
tacctgcctcttcctctctgagtgctgggatttaggtgtgccgcccccccccccccccccagtctgtttctgctctgaggtctgctctcactgcgaagctggagagacccctgtgtagctgaggatgacaacttcagatccttccacagtgctgcgactggactgccgagcaccaccaaacccagctgtgcaatggtagagactgaactcagagctaccacagtgataggcaagcacccatcccccaaagccacatccccaggtctcaaactgtgtttttcgaggattaggaagaaagtaattatttacctaatctgctttcttcagtgaggtcaagggttaacggagaattgtaatctgtgcctaagcctaggtagcattcctgggctaaaaggacaatatggactttaagggcaagtggacctgggtgtgctgagctcagaatgctgctggctcaaactgaagctgcaaagttgaggcagagcagcgacactgtcagcggtgtggccgaggatagcgcaaagggtcagagatctgtgactgtccgcccctggtcagatgctgtgttgaggtgatgattgttggtcataaggtaatcagggggttctagacttgtaagagaatggcagttgagagccacagccacatagctgtgcatcatctttgacccaaatcccttttcctttattttttttagcagggttgggaattgaagccaaggctttggccctttcttcaaggacaggcttaaagaattgcagaattttaagaacttggccaagttataattgtttataggaagcctgtttcagtccatagaactaagttgcagttaccttagagaactctacctaaagactcacattacccttttttaggttaaatcttttggttttcatatctttgttgttgttgttttgtttcttgagacagggtttctctgcagccctggctgtcctggaacttactctgtagaccaggctggccttgaactcagaaatccacctgcctctgcctcccaagtgctgggattaaaggcgtgcgccaccacgcccagcttggttttcatatcttaaaaggtttatgctacacgtgttttgcttgca

SEQ ID NO: 34284 - DNA, 1191 bp, Mus musculus
ctcccatcctttggcttgtatgggaagtactccactccactgtcactggcccgaggctctctgttggctgtcttgggtgattcttactgtcttctgcattcagggtggatgccaccaccccttcacttacatggaacctgtttcttcaagcttccgttctatgttctgtctccttttcttgccattttaatctctgctgagtccctgtcctgctggaaaccatgcctgaccctcacatgtgctcagtgagaagcagagtggctgtccaacagtcccttctgacagtgtctggcctccacttcttagctaaggcttggagagacagctctcctggtgtaagtcccctgttgccttcactctgcaattaaacgtgcatttcatggctccactgaacctgttttttgaagagctgtgacacgtaatctccagatgcagtataaactaagacatttctctgccttggcctgtttatcactgcccatcactttcttgacattctgtctctccttgctccagtgacaccttttgtttcccccacagttgactttctggctttcctccttcctgtccctggactgtggtcaggcatacagttctgactttactctgcacttcccccacaacagcactaactgtgccaagacacttgctgccctctcctctgtcccaagcccgaaggtcacttacctagcacctggccaccttcacccgtggtggtcacactgttccttccaagtcagctgtccctccttcccttttgtgtgtggggtaagggtgggacacacctgtgtgtatgcacacaccctagaacagtgggcaggtatcttcatctgttgttgtctacataccttttgagacaagatctctgccctcaaaccctgggcttacagacacactccatgtgagtggctcaggatttgaactcaggtcttcctgccataagaacaaatactcttacccactgagccgcctccccagacccttatttgccttcagtttttttttttaagatttatttattattatatctaagatgcaccagaagaggggatcagatctcattatggatggttgtgagccaccatgtggttgctgggatttgaactcaggaccttcggaagaacagtcagtgctcttaaccgctgagccatctctccagccccagttttgttgttgttggtggtgtggttg

SEQ ID NO: 34285 - DNA, 2117 bp, Mus musculus
tgtctgatctgacacagttggcaacttaggcgcctgaggctgcctgctgttaaggttctccagaggtgctgttgtttcttgggagtttttccttttactggctcctccctccgctctctccccttcagtcctggtagaccagatgtcagaatgaagcagatgtgttccaggttcaaggccgaggttgaccctgagaccttgaatcatgttctgcttaaaatcatgactggtgtgacttgtctctcacacaggggactctccttcacttaatccctgcatatcggttctccacaccaccagtaacagagcctcagtgcccctgcctctggtctcccctggtccccaagtcagggtaaagttgctgagagacctctgccattggagaccctctcccgggagttagctctcatggaagtggccacagttggacctggcctacttaaatggaaggcttgggtagtcaatagtagttagaagaaccctgtgatctcctcagagccggaccctctcctcagccctgtgattccctcacaggcctcatgcttagactaactagagaacgtcatgcagtagacagtaaatttgtgtggtgatgcctttcacagttggcccagagactagaaaatggcaaagcttttccttaggtggccgtatatggcagcatctgagcccagctgagctcacaataggagcgcccaagagaacatatctccccttcctgctttggcccctgacccatgctgtcagttgttctaggaacaggtcccgtggccaggagcatgggctctggagttgaagaacccagggctgcagacttctgatctgtcttctggtctcagggctcagttcagtttgtctctggaggaagggcagtgtgggttttggcctctgtgggctctaaagaaagggtgactgggtcctgggccgctgtgttacccatcagtagcaatggcacagttatttctttggtcatgtctactgtccatgcagacagtgctgtgagacgctgagccagtagggtactggttgggaactgcgcattcctggctcctgtcattgcctggcccagtgtctgccacctccttaaaaagcatccaacatctgtttgtgctgagaaagtcctttcccttctggacacacaccacacaccccacctctcatctccgacattgggatatcagaaacacaccccaccccaccccagacctgtgctgaaatgttcaagagtggcagacaagccaggcatggtggtgcactcctttaaacccagcaagtgggtgatagaggcgggtggagctctgtgagtttagagccagtctggtctacatagcaagcaccaggacaactagaactctatagagaaaccctgtctccctcctttcagagcgtgcctgacggagtcctctaaggatctttaaagtccttaaccaaggaggaacttttcgctttcgccagaatatcaagtttgtcatctaggttgaccaagtaaacctggtgttttctgggctgctggccgaggcttagctttaagcctttaacttggatggtggatgtgggaaccgctactctttctgtgtgtccgaggcttccagcctggaggttctcggcagtgtgcagcatgaggcctgagcatcctggagccgtcctagcaggtgcccagaccctgtaggggccttgaggctctggttccgtggtagggcatagaaaggagcatttcaggccagtgggcagaactacagagtttcattagcttataaatcttgtgcattttcttcttgatttttttttttttttgagacaaggtcttaagagccttctgcctctgctcccaccaggtcgaatgacgttagggtgacagggtgcgtcccgcagttctggctgatggtgtctgccagcactaccaggggcccactgtgctcaggacagactgtgtggtgctctgggaactgtttatttagtcaaaaggagtcattccatgggtcctgtgaggtagttctgggtcctatctaggctttgccttatgccctccactgctcgtcatcacgttagtcccttgacactggccactggccaccagccaccatggcagacccttcccagggtgcctcatggtccgg

SEQ ID NO: 34286 - DNA, 1123 bp, Mus musculus
cctggcagtgagagggacacctgccagccagtcccagcagcttccgggtcagcacccagcatagccaaacacatctctagcctggagcaactggagactagaacaggagccttccaccttccctgaggccaccacaggctctctcagagtcaggggccagcaccaggccacacatactacctcagcatctagcatctgtcacagcattgtgtggtcacagattgtccatcaagattgtgctcagagcctggtcgcctcacagaggctggctgacaccctccctctgcactggccccgcaaaccgctatgggattccttcctgcatcccatggcgtgctccagcgagcaagccaggcttctgtctcctcctgccttgtttagctctgacttaaatacacctcgaacccccaaactgtgagtagagtcagaaatgggagtagcttgtttgcagtgagaaagggaccgctttttcatattttcatcacaaggggtcttgcttcaagagaacccctaaaaactgtgtatatgatgctgatgaccagggtgatgaggactgttgtgatacctagaataattcacagaacttgactgcaggctttgtgtaaacaacagtaatcaagagtgtagggctggaaaggtagctcagcacccccacgggggctcgcagctgctgctaactccaggggatctgatcctctccttctgacctcctcaagcagcgcacacaaacataagcaggtaaataataatttggagactggtacccatggcaaaaagtatcctcaaacttaaaaaagttaactaagccttcactctgtctgtcacataacaacttcttctagatgacaccttagagttcagcttcatcatttagaggccatggaaatcctaggggctgaagaactgtatgttgcgaactattccaagtgggtcttcacggagaaagaagtcaggcacggtggtgaatgcctttaatcctagcactcggaagggagaaccaggcagacctcttaagtccaggctagcatggtctacagagcaagttctaggacagacagggccacacagagaaaccctgtctcaaaaaaaaaaaaaaaaaaaaaaaaaagaaagaaagaaagaa

SEQ ID NO: 34287 - DNA, 1177 bp, Mus musculus
gcaggcaagggaagggccagaggacttctgggtaatcttgactagtaaaggaagtacaggcaattcaggagagtggtcagcacacagaacagaacaccgatgctgttagctgctgttgtttcctttttttttaaataattttttaaagattgattattgttttttgtgtttgagtgtttcaccacaaagcattcctggtgcccaaggaggtgtggagctgctgtgtcagtgtcaggaatcaaacctgggtctcctgcaagacagacaagctctcctaaccaccgagccaactctcccagccctggggtgttagcttttgcagggactgggtgtggaaggtcaggccacttcctctgtagccttgacatcaatcaggcacagctcttggtttcagtttaaaggaacaaaagaaagatgctgaaagtatccgatagtgaggcggcctctggcctttctctgcacttccacttttggtgtctgggcagctccagaggtccctcagggtgggttctcacacaccctagactactagccagagtagtctctgagttccaggcacctagctggggaggtttcagaagccccacccgaacggttttatatttcctctcacggccagcacagaggacaaaagagcaggcttccgggagtgtccacggacagcaggccacctggtggtcaggtagaccctggttctgtgaagttggcttgcgcagccggtgaatgggggtgggggggggccgaagctgaaaaatgttaattttctgaaccagaaaagacttagcccctttgctagtctgttcccatggtttgtaagtaaacacagttcctcacttccgggtgtcagttctgccaagttgttgtttgagtcagctcagatgataaccaagggaacgtagtcatcggtagagacgtgtacctctgtgcatgtgtgcgtgcccctttacacatataagcacctgctcacatgtgtgtgtgtgcacacgtgtacatttgtacatccctgcacacacatgtacacactcttacacataaaggttatgctcacacatggtgtacacctggcacataggtgtgcagacacgtttaatacatatgtatagatagacacatacacatgcgcaagactatacgaacatatgtacgctcatacttaatgaaggatgcaggtatgtgt

SEQ ID NO: 34288 - DNA, 1151 bp, Mus musculus
ctcctttcttctttttgaaatagcctccccccacccccacccccacccccgaaattaagctagcaacttgggtgtggtggctcagagttggtggttccctgctttggtgtggggatcagtcctaggccaccgaaatatttatttcctattaggagacccgggcttggcgactggtgttaatgtggggtgattcttggtctcataggacttggggtctgtggagggattggcctgcctcggtgtgagacagggacgtggtgagctagtgaaaaagtctcattaagttggctgtatttaaaaaatgaggagagttcccttaaaagagattctgggtttctattatttttgaataatagtgataaataaaagccagactttgtgtgccacgtgtggggcctgctctcctttgttccttgaatctagcagctctgggtagcagtggggagggtgaggctccagcttgcccatctgctcctgtcctcaccctcactgtggtcccaggtcctggtcactctacaccagcctctgtctccaggatttgggcctttaatcaggatgccctgagaatacattccagcctcacctctgctcgtttcttctctttctctgttctttccccatccccatccagatgatacctgaggatcccacgtggaattttgaggttgctccttacattcagaccagagtcctgttgctgaaagatcttggaatcagggtgccaggcttcccacgtgatcactaagacacctgtctcatcttgtgctagcatatgcaagacactgggtgatttgaggcagagccttctgtgcctacccatgaaggctctcatgggaatctgggtactttctcttcaggacttcccctcatctgttccctgatcctgtcagcataccctctctgctgcccttctgggtgttagaaggccaactaggctgccttgcccataggcagttcaggagaggagggaatggctgctgtctgtgtctgtttctgggacactgtggtgggtggttgtgtttctgggggtggcccagcttcagcgtgagtcattttaggatctctctctgacgtcattccacttgaggaagctttgatgacgttgaaggggagggctctcctcccttctgggggacatgtggcttcaagga

SEQ ID NO: 34289 - DNA, 1953 bp, Mus musculus
agaaaacaacccagaaatgtgatatgatgttttcattttaatctcaggtgtgaggataatgggcctgcccggatgcagctgactatgatttgcacagtcctcgagcaggggtgtggtttggccagcggcagatagcatctgcaattgtgtgatgtttggagttctggaaacttttcagagggtctgtaaatgctagggtcctgagagacggggttggtggttattggttgttgggggggggttggctggttgttggtttttgttggttatggtttattaagtagccatgcaaagaagaacagaaaggaggaggaggagaaggagtagtagtaggaggaggaggaagagaaggaggaggaggaagaggaggaggaagaggaggaggaggaggaggaggaggaggaggaggaggaagaagaagaagaagaagaagaagaagaagaagaagaagaagaagaagaagaagaagaaataataattagatattttgtggcaaagatcaaacttgccccaaggaactccgatgcctctaataagcaggaagtagtctaacaataacatcgccccctttctgaccccctattcagggatctctttcctttcctctctatccctttttttcccctcctttctagtgttaggaggttggaaaaaaaggggtgaagaaaagtggaagaaagaagaacctgtaaggtaacaaaaggacgcctacagagcaatccatggggagcaagccagtaagcagtcctcttccatggcctctgcatcagctcctgcctccaggttcctatgctgtttgagttcctgtcttgatttcccttcagtgatgaacaatgaggtagaagcataggccagattaaccctttcctccccaagttggtttgatcacagcgttttatcacaacagtagtaattccaacaaagacaatgatttagcacataggtcaaaaaaatgtaacagtgtcatctacctggatggagaatgttccagaatcttccatgctagctgcctcctggctctctaaagagtttcccgaggaaaggaaaagggttagtttggtggggtgtctccaacaccccactccttgtagcccagatcaagtttagtttcagatatgtctttatcattctcgtgtgtcccgagcctagtgctggggactcagatcagggcccgtcagtggtttccatacgaccgatgcgtgctgagaattgagcagatgtgagaaccgggatcctgtcccagaatttgcctctgttgacctagtggctgagaaagcagccacgtgcgtagctgctctggcctcagagcgagggggccccttcctccacactcaggactgtggagtgtgggtgaccccttccctctgggaggaagggatacactgcttgtaggaggtaggacattaggaaagaggactttggaggcagcgcagtgtgtaggttgtgcccgtaccgctgacatgatgtcaggagccacacatgcttagggccacctagatagccaggactactctgatatgcaggactgtaaggcttcaagcaagccaggtctcctgtctgaacgttgggttcctcctccatagaacgggtccccgtaagctgtctgtctttaaatgataaggcctcatggctagtgcctggcccttgctcatgggagatactcaccaagagtcacctgtggttgttctcgacagggttattatcatcccacagggcatggacttccctggtccagtagggacttctggcttgtgcaaagggcaggaggccggtaaggccctgggaggctgggcagtgtggtgaatgggagagaggaggccaaggggtgcagaagttcggataagtcctggcgcacactccagagtggagaaaaacaaaacagcccggtctgcggtgaccactccatttcctgcaaagaaggaagttgcagatttcctccctggtgtccaggga

SEQ ID NO: 34290 - DNA, 1151 bp, Mus musculus
tgatggtttctattcggaggtccctttatgcagaggtaaagcctgcagggtctggtagcatcttccaggcaaagccaggtaccacccatttaaggcaagtctttctatgggatgctctacgtcttgagtatgtttcatagaccttggcctggcctagcttccctgaggtatagttctctgcagatgacctaccccagactgtgtgagcccaggctgggctgctgctgttccaggcctcccagaattgtgagctgacgtcttgagctgtttagcttggccaggtgggctcctagcaagctctttcccgagggaccctgagcctagctggtagcttccagaagggactgtgggactctctcattgctccctcaggacctgacgacacagtgctctctgagaagccccgatcataagtcatcctgctgctgacatctggctagggtagctccgagagcgtattgggtccttggcatctgagagcctgttaatctacaaccccacgggacttgggagctcaggatgccagccttctggatttccacagaagactgcccagtgccctgacccatgtgaaactaccaggcttggaccctggaaactccttccatatagggcatcactggtccctcagctgctgttgcctggcagccatatggatgacttcctttgcctgcccggcatcctgctctgctccaggggctggcgaggggagctcccttctcatcttctgctcccatggcagcgtttgtacccctttgttacgtcccacgtttgatgggcactgggtttcaatttcctttagactgtgcctgactcactcatccccacactccaccgtttatccactcctttgttctcacagcggatgcaaggcaggaggagattccggggttgtccacgggtctggaaccccatgatcaccgctgttggcctctgggtcgggggaggggggacgactggcctcactcagaactcggtcttgtgatgacaagggggaggaggttgataagaatcacgcatcagatgccagcacagagtgtgtcccggtgcatggacctcttgtcacatggttcccttgtatcccttgacttgtcacaacctctcctcccttcctggtctgcttctataagagaagaattctggggactagg

SEQ ID NO: 34291 - DNA, 1149 bp, Mus musculus
tttagttctcagcacccacatggtggctcacagccatctgcaactccagtgccaggggacacgatgctccttctgacctctgtgagttcccacaggcgcacatacatacactcatgcagtcatgcgcatagctaaaaccaacaaacatacaaacatacatacacacatatgtaaattatatataatatacaatatatatatatatatatatatatacacacacacacacacatttgaaacataatgggaaagaaaaaagcagtcaaggttcttattaatgaaagcacagttaggtaggtaaaatagagcatggacacccagtgggataggatgtagccatgtcaaacgtcgccacacatctaacatgcccgtctgtggcaaggttccaaaacctgtcattcttcatgactcatcattacacaaaagtgttgaacaaaggtatcgaacaggtgtatcagtgccttaaaaaaaatcaccagagagaacaccttgtgctgtcaagaaggatggtctctgggggcggaaatggggctgagagaagagttggggagagaaccgggcactttgggcttctcacctcttcctgttttctgtaccactttgaattttaccgacagctgccacgtttgccgtaattggcaaataaattataagctgctcggagcaagcaaaagaccttggaatctcccttgactgccgcctttgggagacagagaatattttccccggaactccagggcagtggtgactctctggggacttggttggaagtgatcccatccctcgggaatggtagctttggagctccaagtttctccagaggcttggaagaaagatgtagccatggcacaaagttggcagtggtgcgagacgtctatttcagggctgacctcccgccccagccacgggaaccttttattggtggaggattttctaggaaaatgaacacagggaggaggtgtggaatttcttcgtaaggtggagtgaatgccaggggtccccatgtgccagcgtggttgactgtgtgcacacatgcatgtgttggaagtagagggggtagggcgggtgactgttggaaggtgccccgctctttggaaggccggagtcaggagggtgctatttcttgagtctgctttgaactgtctaccg

SEQ ID NO: 34292 - DNA, 1147 bp, Mus musculus
cacacgcaggcaggtctgaacctgaagaggaatgtgtttcctgcttctcttgtcatccgagcaccattgtccctagctggctggctctgagtgtgccaggaaagagaggacaggagtcagtgggtcatcggggactatgccctgccctgtgttagcagaaagccctgggagtggagcaggctgagctctgggaatctcagtattgtggccttcctgtcaggaatcagtagtcataaaggaacagatgataaccagtgggagagagggggggtaggagggagagagagagagggagagggagagggagagggagagggagagggagagggagagggagagagagggagagggagagggagagggagagggagagagagacttgtaatgtgttcattgtggaacccaggaggtgggcacgtcccctggtctcacaacagtagcgttgttaattatcttttttgtggtgctgtgatcaaagtcaaagtcagaacttcactcgtgctaaggaagtgttctaccaatgagcggtacccacagctattttactttttggtgtctgtctgtgtgtatacgatcttgtgatttctgtgtgtgtgtgtgtgtgtgtgtgtgtgtgtgtgtgtaggccagaggtcagtctcaggtattattccttgggtgccttccatattgttgttgttgttgttattattattattattattattattatcattattagtattttaaatctgaaagactttctcactgacctggacctccttacattggcaggccagtgatctccagggaccctctcgtccctgtctacccagcctggggttactagctctaccaacttacttggcttttttcccccactgcccctgtagattctgaaaattgaactcggacccccaatgctcgcagacctagagctttgctgaccgagccatcccatcagacacttttatttatttaaaaaagggacgcaaccgaaattgaccaccgttagagcacactccctgtgtctgccacctcagcccacagcccagaagccctctggggtctccttccaattactacctttcttcttctcccttgatttctcctgaccacggcctggttcccttcgaggttcagtttcacagagaaatcgactgtgcat

SEQ ID NO: 34293 - DNA, 1182 bp, Mus musculus
ggctctgagctcatggcctttgggtgaagtgggtggaacctaccagaggcagaaggccatgagatgtagcaggagtcttttaacaggccaccaacctcccattttacaaatgagaaaacctagcagaccaacattatatagaaaacaaacatgtagactttaatgtatccagcagcacacaaatgggaggtctgaggttaatgtatccagcaggattgatgggaggtctgacgtaatgtatacagcagcagcatttgtgggaggactgatgtaatgtagccagcagcatgcataggtctgacgttaatgtatccagaagcattcataggaggtcttctccagcaaattttcacaagcctaaccaacacttgcttagggcagattcacagtagagtatatctggcacctatgcccccacacactaggctgttgttactgtccccagttctgccctttttgacctgcctcagtaggtgtggtcacatggtgtgttggttctctttgaacccgatgcacggcagggttcttgagtaactgattctgtaaaaggagcatgctagagacctcacagcagatggcgtgggacttggtataacctgcccaccatcttaggtctgtctgctcctgagagtgtgagtctggagtcgaagacacaggggttgcttagcattggcaaaggacctgggcgcagtccataatgcttagatagactgaggtgtgtgtgtctgtatctgtgtgtgtccgtgtgtctgtctccctccctccctccctccctccctccctccctccctccctccctctctcctttctttctttctttctttttttctttctaagactgggcttctctgtgtagccctcgctgtcccagaactccccactgttgaccaagctagcacagaattcagacaccttcctgcttctgcttcccaagggctgggatcaaaggcgtgcgccaccatgctgactcttgtggtgttctgaagtgacagcaagtctctgaggtggtaaagggttgtatgggtaaagtacttgacagggagatatgacaggaggaacagagcccaggctcagtgccttgggcagttggcagatgtggcatgcattgggacctctgagcaggctgttctagacagtgattatctatctaccagtgtcttgttcctggattgcacagccccc

SEQ ID NO: 34294 - DNA, 1122 bp, Mus musculus
aggtgttagcactggagcttccacacacatacgtgtacaacacacacgtgtacgtgataaaagaccaaagagctgagtcttcttcatgttcttggggcaccagaactgtccttgaaccctcctgattttccccagccctcctagaaacctggctttgagcgctgagactcccttcccttttgatgtgaaggcctgcctgacctctggagcgacacagtggctctcccagcctgggcctctggagcagcatggtggctctcccagcattctggaaagaagtggcagctgtgggttgttttttccttccaagcaaggggggttggcggggactggagcttccatgtgtcatgagcacccgctttgatggggaccgatgagtcactgagccgcacagggagggttttcacgtacatggtttgtgggtaagccctctttctgccctttaaagcagaattctatttgatcccctccccacttctctttgtggatgagtttttccagacataaccaggaggcagcgtcgccatttgacatgacctccgtccttcaggaggctgtggtgagcagtggggtgctgtcttgctttcagggtggcatgatgattgagtagccactggcagagaggacggtggcccacagttctgggttggccctcagtgtctcctgcccgcccactggcttggctcaacagagacataaaagaaaaagccacagctgtccacacggaggaattcaccctaactcttccagaggtatttagacttgcccggtggcgcggtggcacggtggcatggtggcacaggtctgggggaggagaagcttgggaagaagttaattggccagagttggtgtcaaaagcctgaggcccttgtgacattaggtgctttgagttttcacagtagccccagcgcatacggagagccaaaggcaggcagagatactcacgggaacacaaatcagctcctaacagggctgcagtgtggtagtaggattgtaccaggtaaatgtgttcctggagtggtaggaaaaccagcgcagatctaccaaggcttgggtcagactctgtgcaaggggctgtgtctgtcctcaaacgggatagatttctaggaccatgataataca

SEQ ID NO: 34295 - DNA, 1199 bp, Mus musculus
agccgggtctggaccccagatccagtttcctcatactgagctgagtaccccaagccaggcctccactttgttcctaatggacttcatggcagtcccaccttattgtggccttgttacagaggtttttgggaaaccggccaagctgttgtttgagctctcaggagatcgggcttgtctcaccaatggccttctggtttgttgtttggttggttttgtcgctgttgttgttgttgttgttgttgtgttttcagtttgctgttctgagacaagagacccactaggtagcccagactagtctgaaacttgggcaagcatcctcctgcctcagcatcccaagtgtagagcgattcattaatctctgctcagcgctgcctcttccggctgccagggctgaaccgcactcacacttggccatttctcttctcctcgtccagtcgcgacaactcccccagcctgaaagagatccgaaacggctgccagcagccatgcgaccgaaagcccaccttacctctgcgtctgctgcaccccagcccggacctggtgtctcaggaagccacattgtctgagccacggctgaagtcggtggttgtggcctccagcgaggtccacgtggaggtggagcgcaccagcactgccaagccggcgctgaccgccagcacgggcaacgacagcgagcccaaccttattgactgtctgatggtcagcccagcctgtgggaccatgagcatcgagctgggcccccaggccggccgcacgctcggttgccacgtggagatcctcaagctgctgtgagtaccctggaactcactgtggggagggcggggtttgggaggctggtcctgctgccagccggtgttctgtaaggggcttatgcgcatgctcctgagtcctatggggtaggtatatgcgcatgctccaattagaccaaactgtgcggaggcaggtgtgtccccatactagggaagctaaggcaagaggatgactacaagttaaaggacaacctgggtcttatatagtaggtactaggtcagcatgagctactgaatggacgctctcaaaaaaaaaccaaaaagcacgtgtatctgggagtttgggtcagggttctccagcatcctgtaacatcaccagccgtttagctaatgtcctcagtcgtgggtacacggcaacctgagttagggttcagagggtggcggtgtctc

SEQ ID NO: 34296 - DNA, 1099 bp, Mus musculus
caggaagcctgctcaggctccagcctctgtgtctccacctcagccagcaggaaaggaggaagcagcaggaaacagccctcccttccctcagacagtcttcctagaagttccgtttttttggtctggctgtccatattcagtacctggtcatatataactgcaaagaatgctgggaaattagttgtaattgaggggacagctaaaagtcaaagacaagaccctcacagtccaggacaattggcatgtgtggctctctgccggcttggagctgagggtggcagccagctcttcacatgagagggtgtgcccacacacaacacagacgagcacacacacacacaccatgcatgtgcatgctctgcttgggagggtgctggcttaggttacaacccagatgtgactcaaagctgtgagtcacatcgcaggctgagccaccaccccgcagcttctggggagcgcaaggccctcggggtggtcagagccagtgttgactgcagacaaggcagagggcccaggcccacttgatagaggcatcccagcctgccctgaggtcatgcgatcatgccacccactgcaggatgcggacctggcccgcctgctgagctctggctcctttggaaacctggagaacctcagcttggccttcaccaacgtcaccagtgcctgcgccgagcacctcatcaaactgccttccctcaagcagctcaatctgtggtccacgcaggtgcccgccccaccctgccctcttcctcaccccctctacttaacctttcccactccagagtccatgggcccagccacttgctctccacacataaccctaacccactccccctgagacaagaggaagttggtggccttgtgcccatttcctagtcgggaacactgaagcccagggcaattcctgcacagactcctgagttgggagacacgggctgagagtttacctcagttcatcttaggcctttccaggttgctactgagaagtgtatgcatgaatattctcttaaagcctgctggggtcccagtttcatataccgacctagctctttggaatacacaggttcctctgtctctggaaaagacgcctcaagcacta

SEQ ID NO: 34297 - DNA, 2297 bp, Mus musculus
gcatgaagctctgtctcaaataaacaaatgtaataaaagttatcaggtgaaagaaaccatactgaggtttaaggatagaggaagctaagtggagtccaagctggctgctggtgtgttctgatccctcaccccctctgactattctgttagcaatgggaagggacctatggaagtcccgtctgatttcgtggcgctcgggagctttcccagaatgctacggttaaccctaaatgccacctgggagccagagacagggctcagtttagctgtgatcacgagaaaacaagcctcaggacatcagatgtgtcgtccaatttcagaaggcaattaaaattgtatctactctgggtgatggatgtctttgaggccacctgtgccctgggtcaccagcccaaccccttccagagccctgagatcccacagcctcatagtggacagggtgtgggtggtaggagacgctggctggtatttgaccaggtactttttttatcatccacaggccaagcttcctaacctaaaggaggttgatgttcgctacacggaagcctggtgaagccccctctgtgcacaggatgggctcgcacaaaacaaaacaaaaaagaaacaaaaacaaaaaaagaaacaaacaaacaaacaaaaaaaaacccgactcttgactaatagccgtagagcagagcagtgggtcccggggtggtcccagcacctggctgcgggatagatgggggagtcttgggggggcggaggggggacgggtggggaatcctcggcacgcccagcccccacctaattcttagagcttcatattggaacctttgaccttgatcaaaagcagccttggtggcaacaagaggaagaactgcgggtagggagggcaggggaggggtgggggggttccctttgtggattttctttgccttttgttgtgtgataccgtaggggggggcggggggagggcattcatccagcctgatgctgtccactcgggccagaaggaggacgctttcttcctggaggtgcaccgagccgagatctcgcccctaccattgggacaggaatgtcatgtcaccccatcgtcctgtgtctcccaccatcgctatgcaaagtggttcttgttgtacataagatttaaataacgcacctatttaagaaacgttgacaaattgtgggtctgggacccgctcttatttatgaagtctttgaccggccctccctcctcacctgcccccacttgcctgcccttctcacctcccccatggcgtgtagtactgtctggaccagtcagctgtcgggttagtgctagtggttctgttttgtttttgttttttgttttttaaggaaacaaacaacaacagggggggaaaaaaaaaagacctttggaaacttaattgcttttttttcttaagggactcttgtatgctaatgctctcctggtcagtcagtctgcccactcgctactctgtataatttccatgtgtctccagtttccttgtgggtggggatcaaggtgggagggaagaggaagaaagagatagattctccacgttgtagctcacacctcccctcctctgcttctgtgaatttggaagggccttgaccttccctccctgtataccccataggagagttggtcctccaaggtccagctgttgtccctcacccccttttaagctgtccttgtcccctactgagacttgcaacctgtggcctcccccccccagccctctgtggttcactaagcatgccccacgcccacttctttgcatggtctcttgggagagaagagctacttcacccagccagcctgacctcacccgactgtccacaccttccctccactgacgtggacactgcagcatccccttcccatcgtgtcccgaggcagaccaacctcatttctttttacagacagttggctttttcttaccaagccccttcactgtacagaaacaaccctttgacaattcttttgggagtcccccctctctttccccgactccagccctttttatgttggtttagcacaaatctccccccaacctccaaaccagaccccctaccagtcgatattaattgttttatatctatttaatcttattcgatggagaccatgcttcggttgttttatactttgccaggtaaactttattacccaccccacctccaactatgccctaatttttttaaaaaaggaaaaaaaaaacacacacaaaaaaaacaaaacaaaacaaacacagagactttgggttcgagtctcggtcttaattccctttctgtggcaggttttcttccgtgcgtgt

SEQ ID NO: 34298 - DNA, 1178 bp, Mus musculus
ggtaacccaggtgttcaaacacatgaacccgtgtgtgtgtgtgtgtgtgttggggggggcggcatttcataattaaactgttaacactggcatagtccaccacagtccctggctgtttcatactgacacccgtggcctagtgctctgagttcttagcagatcatagtctgtcgttacttttattgataaagtttcattgcaatacagctatgctcattttcctgtatttggtctgtggctgcgttcacacggtggtgactgctgagtgaggatagcgggtgacccatgcagaaggcatctgctcgcccctggcaaagaccatgccaggatggagccttatttatgtggctctgaatgacataggtttgacattgggtccagtctttgatcaccttgactaggtcctgaggaggaccttgcctgtcctttggtgactttgtgttatcttcgacatctttaaggagctatgggctcaggatctgaacaaagtccgggagcggatgaccaagtttatcgacgacacaatgagagagaccgcagagcccttcttatttgtggatgaggtgagtgggctggggcatgtcacgtgagcaggacttcctttatcccttcccctcggaaggtgtcactgtcaggtgtccgggggactgactccgtgtaaggagtggttttcccagggtggggattaatcctgcttttcattttcctgattcttacctgggtgggattacctgtttcgccactagagggcgttcgccatcagggagaagccaactgaacttgacaaatgtttgatggttgtgtgagccatttatagaggacacttctttttacaggtggccggggaggatcagaagggacatggcttgtcacttgctcgctggggctgtttatggcagtaaaatgtacctctgagccagtcggtgtttctgatttattattattattatttaaatgctaggagtgggtagatgggaaagtccctgggccccttctcggcctccttgtttttgccatggtaggaactgaacccaggaccttctgcatgctaggcaggggttctaccacagacctataacagtgggactctttgtaatgtttattttgtccctccacccggcccccaggaggtcagaggacagacagccttaagtgtaggtcctagtatgcatccttat

SEQ ID NO: 34299 - DNA, 1116 bp, Mus musculus
tggtcttgtccttggagaatccccacctggagacttactgtgtggcttctcatacctgggctggcttgagcatccttagctctagggcgatattgctttgggtagcaaagcttaactagctcttcctgattggctagctagcctagggcttaaccagtaagatttgaggctctttcctgcttccaatagggtctgactggcctttgtccaatgccagcaatccccggagggtgtaggtgggaggtgtgatggaggcgccccatgccctgcgctgcatgttccctctagctgctgcccatctttggcctttttcttgagtagagtccaggcctagttcaggcttctggtactgggactcctgaacccctgccttaggactcctggaaacagccatcaatgagttgtcaggagagggcagagcgagctgtaataagccctttcggatgcttgtggctcaggacactccccccacggagctgcattttggggagaaatggttccacaagaaggtggagagtaggaccagtgcggagaagctgctgcaagagtactgtgctgagaccggggccaaggacggcaccttcctggtgcgggagagcgagaccttccccaatgactacacactctccttctggtaacgcccccttcctcggaggctggtgggtgggaggtggtgtggtcaggctgtgtcctgcctggctctgatgggacatccctgtctctattcccaacaggcggtctggccgggtgcagcactgccggatccggtctactatggagaatggggtcatgaagtactacctgaccgacaacctcacgttcaacagcatctacgccctcatccagcactaccgtgaggcacacctgcgctgcgcggagttcgagctgcggctcacagacccggtgcccaaccccaacccacacgagtccaagccgtaggttcctaggattgggtgggtgacccatggaggtgtgaccactatggggttctcatttccaggaccccgttctctttgacaatgtgggttcttagaagtctatgataactattcccacttgtcagactttgtcccatcctctctctctcttctctcttgcttgttctttaataatttt

SEQ ID NO: 34300 - DNA, 1142 bp, Mus musculus
tcttttcaagtaattttggctacttatttagaatattttttctttcggggtttatttttattgtatgtatgtaagtattttgtatgtgcatgtctgaggcccgtggaagtcataagagtcatggattcccctggaactggagtgtcaggcagttatgggctgtcccatgagtgctggagagcaaacccaggtcctctgcaagagtagccagtgctcttaactgttgagccagctctccagcccctggggctcttagtctcgaataccacgcattctcaacatctgtccaacttatggtatcaaaggcaaataatgactcagggaggtcgccatgtttaaaggtgcaggaagggttgccttctgacccacaatcaagttcataaagttcccaagacaaagaagtaaagagatttgtatccatttgtatccattggtatccatttgcagaatgcaaaggctcacttctgaagtcagggtactgtgggcttttttgtgtgtggactggctcacccggactatgaaaacatatccttgccgttttacctttattgacttagggtcaggagctgagccgcggtgcaggcgtggaggtcagagaagagtttagcagagtccgctccctacgtccaccctgcgggtcctggggattaaactcaggttcttcatgcttcaaacacaacatctttaccactgagcacctcagcaggctcaaagtcgtgtctgtgacctgaatccgaatctgaattagcttttacttcccaagcttttcactgccacgtcctttggaaactaagccttctatatcgttatatcgtttctatattgttgacaccttatagtattttgtatttcttagaatctcaacgtgtggtccaggctgagctcaaacttacaggcttgggcaatcctgcttcgacctactgaatagcagggactccgggtgtgccccaccccacctagccatctttagttttacgtctgcattactgctttccccaatactctcccatccacttccagccttttgtaatttgttcttaggcttttttgaaaaccctagactgtcggattctttcccccatcagagtccagcccagttgcccagttaggtggaagtgcttgctacacactcaaactcctgt

SEQ ID NO: 34301 - DNA, 1163 bp, Mus musculus
atcccctaaagtcttggagcttctaggagcgacctagaggcttcctaacaccttaagcaaatgaactaaccttcaaagaacactgcctaagctccgcccaccaggtgtgttctcattggatccttaaagagccgccattgccaaggaccaagggggaagtggacattccccaaggctcagggggtatgctaggagcccagagcctcctccactcagccacaggtgacctgcgaggtagggtgggagttacccactgatgggactcaatctcctgtatttcaggctgagagagaagagagtaagcaacagcaggttctactcctagaagccgtgtgtgcgtgcgcgcatgcgcacggtgttcacgagcgcatctgggtacgggagagccttataaacagcccccaggaagagattcatctgtgacattcatcgtcctctctccgagccactcaccatagagatgacagttctgaagacgcccccgtgggcaggaggcgttgagaccttcctgctatttttccaccttggacaactttcttaacttatactacccctgatagaggatccccccaactgtgtgccttttgaacttccctgttctcagcctcattgaataaagacaacagtttcatgccgttaagcgttctgtacctgatctgtacagtaaacaggagttcctctgtggtgagcaagcttctacctgtgtgacccaggtaactgacttccccggaaggtgagctgagacacggggaactaattcattagattccaaaaaaaaagatttcagctaagaggcaaatgattctatagttcaggccaccactgtattctacacaaccccaaaggctggtcaggagctgacctcaatgtgtgttagctaccactggcaaagcagttgtctagacaaagctacatggaatctgcagaaatgggagatagagtctgcccttaagacattttttctttgactcatggctagtgatattggagtgctggggtgctagcttattgcatgtccttgttgtatctgccccgactcatcacatccagggtcctcttgagtctggtaggaggctgctgccaagatcctctggggccacagccaatagcatcattgctggtcaaagaggcagctgaaaggtaggtttacaggcaaatttccc

SEQ ID NO: 34302 - DNA, 1146 bp, Mus musculus
tttgccccttgatcattagaggttttcttttggttgttgcccttgtccaggtttggtgggcatcgtgttgtcttattttctgtatgttttacatttccacattagggtttatgtgtctgttggaatgactccatcttcccctgtgtgtaaagactttctcaataagcagctttttccttgtggtgtgaagtgtggtgtcgattcctgtgtcataatgataagtatgttcccagctgagccctgtaggggatccttctctgtagcccctttagctggatttgaggaccatgtacatcaaatccacgacaaagacccactgtctgcaggtcttaacaatcattcaaagtggtgtggcatagacaacagagcataaggtttgtgttctatgtagttgtcaaatagtgggagtgtagcctctatcagctgacagaagcttcctccgacatcctggcaattagctgtgattttgaggctggccatggtggtagactaaagcctttgtcctctaattagacttcagtccacatccaaaagttctattgggcaagtaaacacagctccctcctgcaggactcatgaccaggcttgtcggcaatgaacaccttgacaggcagtgtgtgcctgtgcaggtgactgacgggcagtatcaggagacctgtatttctcctctctgctgctcctgtgagagtaaccagacaggagtgagacctcaaagctttcgtcaatgtgcctgtctggagacctgcccaacagggagtttttgtcccttattctttggttgattggttggttggctttaagacaaggtctcacatagcccaggctggcctcaagctggcttaggcagctgagggtgtccttgaactcccaatcctactgcctctacctcccaagtgctggatcacaggagagcaccactataccctgacccctaacctttctcttttttctccttcatttttttaatctttttatttttgagattataatacaagtacatttctcccttcccttccttcaaaccctcccatgcaacccctccccactctcctttaaatctatggcctctcttttattgttattacatccatatacatatttattctgaactatgacctgcttagactgtgcactgttatttgtctg

SEQ ID NO: 34303 - DNA, 1100 bp, Mus musculus
agtttgtttgggggatgcagaaacaaaaccagcagagaatttaattgtccttagccagctgcatagatttttaatccttgcagtctcttttcaatataaattttgtttttcttgttgcatttggcatgatgtttttggcaagccttgattcttttttttaatttgaaattaaatgtgtgctatacatcttcctaacagatatgagactttggtgggaacaattggaaaaaagtttgtcaagaaaagggaccgagccaattacgaagaagatgaaaatggaactataaaagccataaaacctaagaaaatgttcttaaagccccaagactaaaatggatgcctccgatacaggggatggctgtgagcacagcatggtcggaactcatcctcctgtcgtcggtactggttaaagcaccgtttccctctaaagaaatgcataagtttggagatgtgctgttcttgagacagatgtgtaatggatgttatacatcctttttatgacattctcaggggcttcagatatgtgggcacaggccgctccctagatttttgacctgattctgtgtgtatatacccacagacaggccacatgcacaccgttctccagttactgtccaggaatgacaattgtaaactaattattgcctttgtttaactgcccttatatttatatttatatttttttggatcatgtctctccagttcactttggagtcacatctttgagaactttccagaagtgatttgtcaggaacagacatggctctcgggcctttgtcgtgttgagtagtgtggggtttgtgtattttaaacagtcatctgggtcatttttctaatgttctattaataaacttatacttttctgttttcttacactttgaagtaattttagtcttcctcagtagtacagccttatgcaaataataacttataaagactagctatgaactgagaatatactaatatctaaggttgaaccatagaaggtttccttctgtcagtcaagtacaataaccagtttcgtagggtacagcccgatagaatttagcactgactaaaccctacctagcacatgggcttcctgtctgtccagagattct

SEQ ID NO: 34304 - DNA, 1162 bp, Mus musculus
tgtcgtcccccccacccaccccaccccccggagccatataactgaaaattccaccagagagtcagagagagctcacagcaagtccctttctgtcttcctgaccatgtatcagccccctctctggtcctgaacttgagtttgactctccagttcagcaaggctagcctctgctccctgctcccagctcccaaaggagagcttgctccacttggcagttcctcacagtcctcacggccctctgctctcattagttcaccgtggatacacttgtgttcggttttgtcctgttggctacgatgggtgctgattgagtgcctggaacggaaggtttgtgttgttgccctgtgtgatgtaaatggtttcttttctggcactgtgtctggaccaggatgtccattctttccttccttcctgctccccaggccctggactcacctgtgcgtagtgtttttggtcagaagcagagcaggactccataaaggagtctgaggcctggccttcgctggccgtcgctggccgtcgctggcttgctggagaacatgctgacctgggatttgggtcccaaaccaaagactaaagaatcgctcttgcagtcagacgtactgtggcctgttcccgagagcatttgtgcccatgctttctgtgctgtcccttgcggctgcagtttgtctgctggcccaacccccagcgtcacaagctcctccactgacacaggagccacggagacaaggcttcagcctggtgtttatagccagccgggccttgtgtgagagccgcccaggcctgctgtctgtccccgtcctgcgttctaatggccattctcctctcctgaatatttaatgagcactgggggggggtcactcaagagtcaagtttttttgcttcagccatgaaaagttcaagtttatcaagaattcctggggtctttgtgtgatgtaattatttagaggtgggaggaagccatgcccaaggccgtggtggctctgtctcccggtgccgttggccagatggatcagcttttactgctaaccctgggtagagatctcactgcgctctggctcgctcctccggagagccagcagatggatttccacccagccctgacctccgcctctgcacttggttgtgagcaggtgcactgctaacacgggtttcttctcct

SEQ ID NO: 34305 - DNA, 1102 bp, Mus musculus
tccctttgactattccgatgcttttgtattcagttgttcctacagcaggcctcttgggacctttacgggtaagtgagttgtgtagttctcattttgagttgaacgttcatcccttgaaactgagaagactgtgaaaatatagctttaaaatggctgttgaactcagttgaaataacaaactcagaaaattgagattctatggaaacctcattatgtttttatctaaaccaagaggtctgtcttgacccagtttttttttttttttcttcttggtggcctaactacaggtgtgcttagctgaggaggaggaggaagaggaagagggtgagtgcagaaggaaggaatgaagacaggtagcaccatatgcaaacatgtgtccttccatctccacagctctcagcttaggccagccttgatgggctgcaccttccgcccacctgaaggctttcctcccacgacacctctctgccacagcatggtaaaaaggctgactctaatactaaacccccaaatatcacctgcttgcatttcctgatggctttgatgattcatgatattttgtataagtatttcaatatttaagaaaacccaagttccaccacggtctacaagaaccaggaagatctgcttggctgctaagattctctttagccgcttcccctccatgcacagcatctatctttctattcttcaaacttatccatctctttgctgctgagccaatgtgggctacagttctcccagcccctataaataagttcagaagctttagccctgtgctttacctcatgaggcaatcaatccagttttgtgaccttctatactctttccatgccttctattgctgcccgagagtctcctgacctccctatccaccatatttctaaatgtaactcttccatctgtccactggccctgaggcagaatggactctctcctcttgcaatctatcgacatagtatacgtgtgtgctcttagatcatgacccgctgcattgcaggcattttaaatacatctgaagcctccatgagaccataggcttatcaaaggctgggaaagtgtttggctcagaggtggagcggggtgactctgtgacgtggct

SEQ ID NO: 34306 - DNA, 1891 bp, Mus musculus
cagtcctgtccagagaggagctgaagtatacagtgggccttggagctgccagggagctctgctgcgttacggcaggaaactgaaagattgtaggattaaagatgttcaccggatgggtatatacaaagaaggaaatggaaacaggaagtagagtcagaactctgaataaagatgtctaaatacgaggctagagacgtggctcagctcttagagccgtaagctcttgtagaggacccaagatcggttcccggctgtcccgtgacgctgctcaccactctgcaactccaccttcaaaggcctcctcaaggactcgcactcacccgcacatacacacacaggaataaggactcacactcacccgcacatactcacacagggatgccagacacataagcagactgcttatttaccatggcattttgtagactagtgtgcacggagagtggggaattgagcagatgactctgctggagctgatactaatggtcattttcttctcccacaggctgccggtactgaatccagaatgttgttgtcccgagccaagacaaaaaccaagtggctttctgcaactaactcctatgtgtggacaggtttataaacgtgcattcttatcacagcctgcatagcctagagtacccctacaccccatccctcaaacttgctatcttcacatcctggtcagttctattaattattaaacactaaaattttggcggtttctggataagattgtcaaacgttttagtgatttttttctgagttcccctccccactgctcctctgtggtagttgctgtgtgataaagtggcagagtactcgtgatcacgtgaccacagcccctcccctggcagaagccgttcgtgagccgtgagtgtgtagggttctttgattttcagtgcaaagtgactgttgagccgcccgccactggagtgtcagaagtacttctccagatggcccaggacatttaatagttgtttgtgccgaagcgtctctcagagttttgcatgagattctagtagcgttggtaggacctgccatgctcatccggcagggtatcagagcccagtgaccctgtcctcccttcaagctactgactgaaagggaagagaccaaaagacccaagtgagcccagccctgtcagcaaggctgaaaaatgccctttgacttgtgggaggtgctggtttttaagaaatactattttacttgaactatttcttgtctaaattcttgcacaatgagttctattattgattaaagaagacagatttacattcaggattctggtgtctggaggcttagcctcaaagccagttttgatgacttagaaggcaatctatgtcactgtccccacaaagtgatttcatacaataaaaaccaagagtaattaaacattgaagaatggtgtggtccttcccagaggaaaccctggccaagtagagcgctctgctttctcgattgtgccgcagacagcttacggacaacttgtcctgtttctaaagtgacggggcaaggggagagcacctgaaactgtgttgttggccttgctctcaagtagtaggaattcctgtcatcagccagtgaatggcactacaggttgagcccctggaggtgccactttgtcacacggagacaaaccagctgcagcctgcatgggggacgttcttggtcttataaatggaaactcaggagctgcgtgtcctcagaagtcagtgggatggttcagaaagcagtttgctgccttctgggcagattctccaaccagaaaccccatcatgataaaggtgctagaactgctgctggcatacccttgtgtccagggggcttgttacctcagtgttcagatggacaaggggctgccatgttagattccaaactgaagcctcgggaa

SEQ ID NO: 34307 - DNA, 1349 bp, Mus musculus
cccagcgcggctgggtgccagtccacacccgggacctaaggaccctctccaccattcgctccctgcctgttcccgcatccccgcatcctattgctgagaccctccttggcgcggggaccccgagcgcaagccccaactctcactgccgctgagacgcctgtcccccaacccagacctcaagatcctctccattcctccctccactttatctcatctccacatcccatagctgggacctcttcttcccgcagggacacccccgtccaagaccccaactccacccggaccgtattaccctcacttccatcctcttcttccgcttccttgcatccccatatctcatagcctgggaccctcctccgcgtggggatctccagagcgagccctcccaccaccccatcgcggctgaggcttgggtccgcacccaccgaggaccctctcctcagtcgcccccctccacgttcccgcttccactaattacatagcacggacccacgctactccccttccatcgtggctggggcaccggtccccactggaaccgcacgaccctctacatctcctccttcacattcccgcatccccgcatccgatagcccagtccccgagaactgctgtaagtctggccgctattcccctcttcaggtcctaaccaaaccatcacttgagtccctacgatagggacaagaactgggcactgctagccccctcctctctatcctggattcttccctgcacttccccacacacagcccggaaccaccactgttctcttctctgcggatgtagatgagcccccgtgctgtgccgctttgcgagtgaagccccttccccagctcctctctttccatagaatcagaatcattgcctggacctaggcgtcctcacccccccccccagctccaccctgagcaactgtcctccttcactgtcttcctgtcctcactcttggaccccagactcactcctcatcccacctcgtgcctcatgcaccacaccgctctccccaccccagccctgcagagtggggtggcatataggcaggaaagagttggtggtccgtggaggggcttctgggggatgggactggtcctggggggggtgcctgtacatgttatggggttctgagagaatcggggtatttttgagtgtgttcatgagttcatgtgtgtgtgtgtgtgtgtgtgtgtgtgtgcacacgcacgcgcgcgcccacgcatgccagtgggtgccacatacccctacaagtgtcaggggactggaaaccctattccccacttggcttcccttgctagatctcagaacctgtgggtgtgtctgagcaggagggctttggaaatgggtgttct

SEQ ID NO: 34308 - DNA, 1136 bp, Mus musculus
agctcccttgccctgtttctgtgggctgcaggtaagcagagccatctgtcttttgactcacggagacttgaggagtggcacgtcttgtctggcttagcagatccctgacagacctccctgagtctaggaaaacgaagggagttggagggcctgggcatgccataggctgacttctccttctggataagggaaccaattcctccagggccctgaactgtctcagaccttacgatactgggacatcaacaccacacagaattggttaaaagacaatactgattcagtgggttcagggttagacatcaattcccttttctacgagttggggaggtcttagcagacaccttggtcagtcaggagctgctggtccacctacctggggtatggcctggacagagcagcttttggaagtgccctgcaattattagaacagcctcttggccctgggcacccagcacccaccatcaactgaccttaagggatttaaatgtcagcagagcaggaagtgactttgtctcaaagtgtgggtcccaggttaggactgctccccaatcccgtctctgctagttgcaaccagaacatccctgcctgccctctctccccatcccatacatgacgccatacttcttgtgggctgatcttgtcaccaggtttcaagatcaccaccttcagaaggaacccaggcaagccagagcaaggggaggtgggtcctgaaaaaacagtaggaaggcgtggagctctcgtgggcctctctgagcatggctgggtgcagctgtgtgctcagtgatgggagagtctagggggatgagtgtgcgcacacctgcagagatgcgtgtgggtgtgcgtgagtgtgtagcacgaatgtgtgtgtctgtcagcagccgtgggcaggctggcagcgcagtgggaagagggattgatagcttgtgaaggctggggagggcctctgcctgctgcagtctctccacgctgggtcccagcctcgaggtctcccggggaagtttgggcttccaagctgctcctgggagagggatctcagctgggtcacgaggctgctcagggcacctgcccaggctcatctcaggactgactccagccctcctctctccagattttccgccgcgccgataaaaatg

SEQ ID NO: 34309 - DNA, 1552 bp, Mus musculus
ctagtatatccattgatctctggggaacagaagcttctctgggccgtgctgatgcaggctggctgataaaggtctgtctgccccacacatgtcagggttagaaacagtctaaaatgcctctcacccatactatggttagcagcctgggctacttaactctggctcaaaagtgatgcctaccctgctagcccagctagtggagtttggtctcggattctcagaaaggctgtagctgtacaccattgtggcaccattgaccagtcactgtcctcttgcagggatcatgcctggccgctacaaccaggaggtgggacagaccatccccgtcttcgccttcctcggagccatggtggccctggccttctttgtggtacagatcagcaaggccaagagccggccgaagcggaggaggcccagggcaaagcgtccacaacttgcacagcaggcccaccctgcaaggaccccatcagtgtgagcatcgcagtagccagccacagaagctaacaagccttgaaccactctggtggccacacagcgcctcagagagcattctgggaagtgcctgtttccgaggaaccctgtctccagcttgtggctatcttactgtgttctgcccaggcacctgatgaggtacatcctgcagtgcctctctgtgcttggctctggcagaaggcacccagtgacatcaggcatcaggcccagtgacagtgcaccaaagacacagagcctggaagggctgtcgggacatactttctacataacgctacaaccctgaccaagcaaagacatgcttgttacaggctattttctatatttattgtgggagagtcactttaaagactgtgctagttggaaacagagctgttgctgttgtcagtcgagtgcagttttctgcagcgatgtcataaggagtcagattccgtgacctcctctttgatggaggacacactgaactgaaggggacttgcgcggatgtgggagatgcaagccttcgctttatttttttataactatcaactgccatcatgttttgtaatttggggatcttgatttcaccgttgttggtgaaggaaattttcaataaatatgcataaccttacaaagctggcatgtgtcgtgccccagccccctgcaccttcccattctctctgacagtgtagtatccgcattagctagcgcatactctgtaaaagtgtccaagtcaggcgatgctttggtgagccctactgttctcactaggtaggatggacagtcctacttgactctttttttttttttttttttttttctttttggtttttttgagacagggtttctctgtatagccctgactgtcctggaactcactgtgtagaccaggctggccttgaactcagaaatccgcctgcctctacctcccaagtgctgggattacaggcatgagccaccactgcccggcctcctactcgactcttaactccagaacattcttattactcccaaggaaaactcgagcctgttagccgtcacctgtaccttcccccttgccccacagctagtttgctttctgtaa

SEQ ID NO: 34310 - DNA, 1199 bp, Mus musculus
gttaactctcctgttccacagagaggttaggcatttcagagctgatgtgcaggcacactcctggattctcaggctgtatggcccctcgtgctaaggcaccttagcttaaacagtgtgactccgctgttagcactgcccagggcactaatacctttttacatctcgattcatcgagcatttcaaggtgtgctgtctgcttggcactttaggggttctattgctaatgcctgtgcttacatcttatatctaaatggcatgtggatgggcacacattttaaaagttaactacgcttgtcctactcctgtaaatacagttttgtgagagttggattttgttaaaatggaaattagtaatgctgaaaatactgcttccctgttctaaggatttgtacagttctgattgactgttgtattttgctagtcttaggcaggtcagtttccagttaagtggcaactagaaaatcagtaatttcctcatgagaactcagtgctcttctcattgtttactgcaggattggaggtcttaaaacaagagacagcagttgtggaaaatgttcccattttggggctttatcagattccatctgaaggtggaggccggatcgtgctgtatggagactccaactgcttggatgacagtcacagacagaagggtaagaaaagaacacataggaggactgcgactgtagctcagtggcacagcagtttgcctcagacatgcgaggccctgagttcaatccccagcatgaccagaataagacgttcatgagcttgaagatttgtgtacacagccctctttccgttgtccctggaatgatactggccagaagctggagaataaacaggtactgtgattgctggaatatttctgcatatacctgaaggttaacactcaggatacacaaacctctacagaccttagaatcccatctctattttcccaactgactgtgacaggcatgaggcactgtcacttgcttagtacaaagtcctgggctggagagatggctcagtggttaagagcaccgactgctcttccagaggtcctgtgttcaattcccagcaaccacatggtggctcacaaccatccgtaatgagatctgatgccctcttctggtgtgtctgaagagagctacagtgtactcatataaataaaataataaatctttaaaaaaaaattcctttaacccaattggccc

SEQ ID NO: 34311 - DNA, 1104 bp, Mus musculus
cctcccttcctgagcacagacacctgttcttcactctctgtcgcatgctgttctgtcctgtgtccttcataccaaacataagaaagttcatgtgcacctaagacctgtggcgctgggtgctggagtgccgctgtaaatgtcgtcttatgttgtggatttcctttagcgtatttgcctcctttctcacttctgcttcactggtccgcctagatccagactaggcctgtctggactgcatgccagtgaaatgccagttttcatttcataaaagaaaagttcagtgtgtctgtgtgtagaggcagacagttggctggagtagtaagcttacatatttctcaaaccaaacggcttgtttaagttgacacttttatatgtatgtgtggactggattttgtcaaggaaagaggaaaagtatgtgaggattttaattcttgccttctctgtgccttctgccacttttataggcagtggtggatgccagacaccggaggagcgaacatcccagctctgaatgagctgctgtctgtgtggaacatggggttcagtgacggcctatatgaaggggagtttgtcctggcaaaccatgacagtaaggttttatgtctgtgtgtagaggcatacaagtggcaaaaggatgagggtgtgggctacatgcttaagtctaggtttcagagagatgggattcaaaagttagctgcagtgcagaaagacctacagtgattttaaatagcacactagggaccggggctgtacctctgtagttacctgtcttgcatgtgcaagaacttagcttcagttcgcatcactgtagaaaaatgaactggacatgtgactcagttgataaagtatttacttagcatgcacaaagccctgagttccatccttagcacaacataaactgaccatataatcctagcactcgggaggcaaagcctgacaggtgtttgacgccactctgggatatataatgaaactcttttcaacaaacaaaaaaagtttatttatgtactttaaattttttcttcagaaaccgcatgctactagcacttttcccttgaagtttgaaaggattacttgtagttgatatgtaacaggcaatagcag

SEQ ID NO: 34312 - DNA, 1174 bp, Mus musculus
cttcagatgctgatgctgggtaggtgatgctcatacacaggggagcaccggggagcatcggggagatctgccttgactgcagctgctgctgctttccttctgtctctttctgtgctgtgcaggacaacactgcagcagtttgccagctctttgacagagcttttggcctgccttgtttaccactgacccatgcacatcctccttgggtctagtccctcctgtgtctccgggagaagcactaaaggttttcaatactggccttgaactcagaagcctcagagtgctggagttaaaggtgtgcagcatcatgcctggctatgactaaccctttcgtcactcattttactatagccttttgtgcagctctagtgctgtgaggtcctggcatgtgtctgttatctaagggcttaaaattgcagggtgaaagtagccgtcctcgcattgtcctgaggaagtggcacatacagtagatgtaactgtggcatcacacctggatagtgtctgttctggtggaagagacagacgaggcacgctgacggcctcagattggtgtgagaacatggagaagagtgagagacggctaaggaggctctggggaagcccatggccaggagagattgagggaacctgaaatgcaggggaaagaaaccctccagatgcgtgcgtgctaaggtgcagcctcctgtcaaagctgcgcactttcggacagaagacagaaatgaccttagatttctctgggagtgcttgacctggtttgaattattcattttaaattatttttcttcctttttttttctctctctctctttttcttttgtgtgtctcaatccagcactctgaataaccctgctgatcagatggatgtgattggagtgggtggcattgactttgaagataacatcgctcgcttttcttccaggggaatgactacctgggtatgctttctgtaatagcctaatgggactcacagagccctcggtctaagagcattgctatgtgttttgtcaatgcacaggcagagaagtagccagggctgtgggtatgtacacacaccacccgtcccctgtgaggacaagggatcaggaactttggtgttaaccaccttttagttcagtgaattgagctgtcttgaagatctgggtggattctgagggtcatttcccagttcatgtct

SEQ ID NO: 34313 - DNA, 1187 bp, Mus musculus
gtatttttaaaaaaacgaacaaagaaaaacaacagaagtattccaaaaagcagtttaatttacatagtgtaagggaactagagggagctgaacactggcgttagatctgtgaagtgactgcgcttgctcctgtttgttctttttagaaatgaaggatgttagatactgtaaactgtagaaatgatcaatgtctcagtggtgtcttagaatgggtccttttatgagggcacttagaggcctgggctaatcctcaaaggcctacgtaaggtaggcgggtgcctgtcgcccctggaggggagacagtgtccagcacagcccacttcttggtgcaggttcgaggacttagtttgtggtgtgctgtttgcattctcaggcgtgctttgcttggaacttcaaagcccatgctttgaagagtgtgcttgtccttagaaagcagagctgtcacagctctgtgcacgctcgcagaggccctcagaggactgtttctctttaaccaggtgtcttacacatcttggtttctggatgccttcaactatgccatcctaaagaagatggacgttctcaaccttagcatcggtgggcccgacttcatggatcatccgtttgttgacaaggttggtcaagtgactgtgaagggcagaatgttggatgacagctcctgtgtgtgttcttttataccttcaatagtcatcatttccactgaggtaatgacagctttgtgaaacagacggttagctggttagtgacatgaatttcagaaacttgcatgttacaaacccagtgggttagaggcctgggaacaggttttttttgttttttgttttttaagatttattttatttctatgagtacactgtggctatctttagagggcatcggatcccattacagatggttgtgagccatcgtgtggttgctgggaattgaacttaggacctccagaagagcagtcagtgctcttaaccactgagccatctctccatctgggaacaggtattttaaaggaacattccggcctccctggtaccttgatacctttctgtttaaacctgttttcctgacctagccactgggccagtgtgctgtgcactgtccagcccaggttcatgcagttgtcttccaaaagcttgtgcccgtcctccgggcctagcactgccttggagggggctcctttcttgggcatactt

SEQ ID NO: 34314 - DNA, 1147 bp, Mus musculus
cttagtttaaagtcctcgctacagtctgtcctgaggtgttcggtaggagaagacagctgtctcctctccagagtacagcaatgtaaaagctgcttagacgtcagcagccagctcttgggccatttcctttttttctgtcatctcgaggcgggccactggggagagtgatttttacctttagtgttttggtgtcacagaaggtttatttgagacaaggttttgcagtacagcctaggctgtaaacacttgtaattctgcttcagtgttgttagtgctggggctgcagatgtgtgttaccccaaaacggcttctatagaagttactgtaagtctttctctatgtactcttggttacagaagtcttaagaatcatttgggaataacatggcaactaagtctgccccatagtagtgattgccttgagcaacgtcctgaaacacaacttcaaggatgaccttgactctgagcatggtgtgtgcttctcttggtttctgatcatcatgctgtcttgattctagccaaccccatcgtgccctgtaatgaaacccggtggagccagaagtggcagtcatcacgtcccctgaaaagagccagtctctccctgggctctggattctggcatgcaacaggaagacattcaagtcggcgattgctgagagccattcctcgccaggtcgcccagacactgcaggcagatgtgctgtggcagatgggatacacaggtatgtgctacagacaaggaactttgtagaccagggacagggacagcattcagggagaccttctgctaggttgccctgccacaggtctgtcaccatatacatctgtccttcctatcatgtgtggaactgggtacagttaactgtccctacatttacctcttaagcccagcatctgtttctgtgacttttatttacttgtaaaaaattgtgtgtgtacagaatgtgtgtgtgcatgtgtatgtataggattgcacctgtgtatgtgtgtatacttgagtacatgtatgcatgtgaacatgagtgtgtgtatgaatacgaggggaagagagaaagagagaaaatgtatgagtgaatgtgtatgctaaggtcagaggatgactggtaggcatctcgtatgggacttgggaatggaatgcaggatgtggg

SEQ ID NO: 34315 - DNA, 2027 bp, Mus musculus
aaagtagtatctcttacagaacctattaaaatcggttttccttaggtatcatttacagcagaaagtaaagacctgtagactacactttccattgaataattgtggatgctgattagagataccctgggagatagagagctgcagatgacaggggacacagtctggggaaggcgtgaagggtgggacatgacatctggcttttgctcttcctttctagctctcgtccatctttagtctcttcacttctctcctagtttttcccttcactcctaacagctgtagggatgtttccctgaaagcagtgaggagtaaggaaatgtacacagagttgtctgtctgtctgtctgtactgtggtctgatccttccatttaaatatacagagttgtctgtctgtactgcggtgtctgatccttccatttaaatgcagctgaaactgtcatagctggctgggtcaggatgctactgatgtccctgtgtgctgtttttgtttcaggtccgctacagagcggtggattgggcatcctgctagatttgggtctgtggcgcaaatggagtttaggactcagtggactcggcctcaatgagagaagcccctgtccaagatggagaagaagcggagaaagaaatgaaagcctctctttgggccaaaccgtgggtgaccatgggactgaggttttctttatgttggacaagtctgtaggatggctgatcagtaaggctgcagcttttagccagaacagaaacccacttctgatcaaggaagagcctcgtgcgatttgaatttatgcaattttctgaccatattcactgaggaccatgaagctcgtcagcacctggcttcttgtgctggtggttttgctctgtgggaaacggcacctgggcgacaggctggggacgagagctttggaaaaggccccgtgccccagctgctcccacctgactttgaaggtggaattctcttcaactgtggtggagtacggtaatgacttgtcttcagtgttgggcctcccatctcactgttttcaaactaatataaatactggcttccgttcacctccgtggttcatttcaaatgtacacatcatgtagacgctaacctttgctgaaggtgtttgccctggactagaactgccagcagcactgtagctgggaggggcggatgcaggcgctcagctgacactttggaggtcacgcacgcctcaggcagaagggcagagcaggaagtctgcgacctggacctgaccggagctttgtcttcacttctgtagaataaacagccttagttctctgagttcctttccctattgggaaacgtcatttctttactggagtcagttttagtaaatgtggagggtttatcttattttactttatttattctttcagtttacaaatgtcttgcatgttttgccactcgtgtgacccacatgagtgcttggcacttgcagagagggtttgaatcctgaggaactagagtgtaggtggtgctaagctgctctgtgggtcttctcccgagcagcaggcactcttaacccctgcgccatctctccaacccccacccccccccccgtttatgttttctaaaatatgtttttgtttttgtttttgtttttttccgagacagggtttctctgtgcagccctggctgtcctggaactcactttgtagaccaggctggcctcgaactcagaaatctgcctgcctctgcctcccgagtgctgggattaaaggtgtgcgccaccacgcccggctctctaaaatatgttttgattatagagttattggtgactgtgaactgcctgacatgggtgctggaaactgaaatcaggttccctgcaaaaacagtccatgatcttaattactaaaccatctcaccagacctacacttactcaaaagcaaacaaaaaacaacaacaaaagcacaggtctctgcctttgaagtgcatattttgtgtgatttgagattcgtgtgaatctctgcatgttgccacctgtggtcgttcatactcatctctcttcttgctct

SEQ ID NO: 34316 - DNA, 1053 bp, Mus musculus
acacctttttcctcccgaatttggcctggtagttggtttgtggttgatctcctttgcttcctcacacataagaacactgtgtccctgatccttctgcctcccccacgtgcacacaccccctctacagcacctggcggtgtctcatctcactcagtaagcactcaataaaatggtaaaggcatcatgacctgtggtgttggttttttgtgtccaatttcccagaaccaactggagaagagtaggttacctatggggttctctgtgtagtgaccatagctgtgtagaacttgctctgtagatgcctctagcttcagattcagaggtcttctgcctctgcctcccaggtgctgctggcattgtgcatgtgccgcaaagtccagctgagtattttcttttcaaaaagttcatttcattcctttccacttctttgttttagaattcggcccctgcctagtttgtaaacatcagcgatctctcctgcacagggtacatcctatagaaactgactgtctacctgtggaagcgttatccaggacagtgctaaagtgactcagtgcaggcaggcctctcaagatgctctcacaggtattgcacactaacattctcattatatatatctccactaggtcaaagagtctctctcttaaggcaattttatgtgtataggtgctttgcctatatatgtgtctacactatgtatgtgcagtgcttagggaggccagaagaaggagggccatagaaatggagtgacaggtgcttgtgaactgccatgtgggtgtcggaaatggaacccagatcctctggaagagcagccagtgctctaaccactgagaaccctctccagccccttctgtaaagtgcaagcttactctagcattaggacttttacatcacttcagtgactactggctgtatattcttttacatcacttcagtgacaactggctgtatattctttgacccgtgatctctagggctgctttctgagactcctttccgtgatagggcctctggcctcagcagaatgtgtacgtagtgttagctgacctctgg

SEQ ID NO: 34317 - DNA, 1867 bp, Mus musculus
ccttcatgaggccgactgttacgtctgtgagcaaacctcagggaccacatggttggcccagggcgcatggccatgaagcctgaggacagaacgggctgcttcctcaacacttggagcgtgaccagctcgctcctgtattgtccgtcttgtgctggtctttttctttttctttctttcttttttttttttttttgagaagtcacctgttttccttttacaggtgactgattatagtattggctttcaagatgttcctcaggctgggcgtgggggctcacgcctttaatgccagcacttgggagcttgagacaggcctgggctacatagtgagttccaggccagccagggacatgcagttaaacctgtccttgaaaaaaaaattaatgttcatcaggaagacaacagaaaagtgttattttcaaactgtgaactgggagtgcaggtgttaacagtagacatgtgtcatgctgcatagctccatggggggtgtctgtgtgtacacactgcctttccctaaggtcccttagaaccatgtgtgtgctgtgtgtctgggtgaagttatcgataagactttacagtagactctgccaagacgaggttatgagggagcccttcccagagtaaacgcctgggctactccctttcatgtgctgaaagactttcaggctctacgctgtgtgggcttgccatgtcctacgacattgtttctttgagtacttttgtctttcccactctgtaggtgggttttgttgctaggctgggacacataataggttgtctttggatgtacctaagtggtggttcctcactgagtccgtgttctatctgacccccttcagagcttgttagagctggctttcatacacttttctatgtaatccaatttctccccaggagcgttgttgataaaatcatcacgtgtttgtggaatagtggttgaaatatgggcagcttttgtgcgtggtataaggtagttattgaagtgatgttagctcgtttttagcctgtgtgatgaatgtgtacattgtagggaatgcttttattagcgtgagggtcctttacgtatatcccacaatatgggggcacactgaaacttagtggctttcgttggtttataaaaccaacctcttgggagggtctcatacccagcacgtggaagcttggaagtcatggcagcttgtgcagagtggaggatgtggcgttgccccttgtggtgctgcgctgtgcctgggaagtgagaatgagcggcacgctgggacttggatggagttgctttagtgacatcccatcacctgtaggcccaagtgcactttgcccaggacatcagatgtgccattttaagttgtgactcagatctagatcagtgtcttcatgtcctcagatcatgggcagactaccatgcttggagacagaggaggaggagcctcggcggggacggctaccttactgctgagaaccttcgtgcatgtgataggcggcagtacctccacctgagacctaatcacgcatggtgattagggaggaaggcaggagactgaggggttcaaggccagcatgggctatatagtgaaactctggttcaggaaacaaaaacagcagcagagacgcactgtccgctctgtgtaaggtcctgtggcccagtattcagacttgtctatcaagtgcggagtccttgctccatgatgaggagtcagtgatgttctctcagcaggactcagctagaactcggagcacagtgatccgtggctgcagcagaagactcgaatcaggcacctttaggcttcctagctctcataggcagaccctctctgctgagctagtctgcctgcccactgtggacatggctttttaccaaggaaggaggaac

SEQ ID NO: 34318 - DNA, 1266 bp, Mus musculus
ggaaggggaggtgtttgagtggaccccagatcaccagaaagcctttgaagaaattaataaggccctactgatggccagtcttggcctttgcctgacccaaccaagcccttcactctttatgtggaagagagagcaggggtcgccagaggagtccttgttcagactttgggaccttaaaaaaggccagtggtttacctatccaagaagttacaccctgttgccagcgggtggttttcttgcctgaaagctattgctgccataactctgcttgtcaaggatactgataagctcactctgggacagcaaataactgtagtggcaccccacgctcttaaaagcattatccgacagccccctgaccgatggatgactgaacaagtgaccttcactcctcctgctgtcctcactcccactaccctactgtccgagacttcacctactcatcattgcactgacattctggcagaagaaactggtactccaaatgatctgaaggatcagatcagccttggcctgagagtttgagctggtacatggatggcagtagcctcgcagttgaaggactgaggtggtcaatgtgatagccaagaagatcctagaagaaatcttcccgaggtttgggatacccaaggtaatcagggcaataatggacctgcctttgttgcccaggtaaatcagcgactggccaagatattggggactgattagaagttacattgtgcatacaggctccaaagctaaggacaggtaaaaaaaaaaagatgaatagaattctaaaagagactggtgcagacttggtgctccttccccttgccctatttagaactagaaatactcccttttgattcagccttactctttttaagatcctttatggggctcccatgcccatcactgtcttaaatgatgtgtttaaacctacatgttgttgtaataatctgtatgctaagttaaaaggcttgcaggtggtgcagaaaggagaatgacatgtccggactggcccggcgcctccctatctcccgcccttctgacctaagttaaatgttatctgcatgtacagtctgctgatgtttaaatgaaccaatcatgtgaaacctcgccaattctcccaaccccagccccttttctataaaaacccctagcttccaagccttgtggtcgaatccactgtctcctgcatgagatacatttcgacccggagctctgccattaaaactacctcatgtttttacatcaaggcgttctgttctatttgtgattcttggg

SEQ ID NO: 34319 - DNA, 1117 bp, Mus musculus
gtgtgaaaatggttgacattcaggtatcggttgagagggtgaggagaagcaggaggcgggaggcccatctccagcctgaagactcaggctgagcatgctgtccttcgtctagggcccaccgggctgtgggctgctgctgttccgcgctggagcagaggctgcctgccagaaaggagagcgggtgctgcttgcccagtacctagggcagccaggtcagacccctccatctctgcatctcatctgcacccaggtgagcggcagccttctttctccttgggctctgatccaggcttcaccagagcttcggccagcaggcctgaggcacagccacaggaacccaggaatgatgggtccccgtgcaggtggtctccctagaggcaggtggaatgggtcatctgcaaacctagatcaggagctgggaggcagcagaggttgactctggctcaggaccccagttggtgcaagtgtctactgttgggagtgtagggatggatgtcagggacttctgagaacccagcccagaaaatacatgttttaggttgggtaggccaagttgggcgggacttgaaggctggtgggggtgccgtctgtcctctgggtgttgggcacctcctgcaggctgtgtggcctggagagggttattggaggctggtaccaggtatccactagtctcacctttctcttcttcctcagttctcgatctacctgatggatgagcgcctccccctggtgcccatgcttaagtgggaccatggcttgccatctgctcccctgcttgcccgcctgctacccccagctagccctggccatccacggcccctgctactggggggccagggtgggcagctgcagctgcttcatataacaggtcagccaggcaggtgggggtaagggggccgggtgggggctcgtggggacatgctagtgctgggactggtgtgcctagctctctgtcctttctccaggagagggaacttccatgccacagctggcggggcctcctcagtctctgccctccatcaccgaatccctctctgcctttcccctgctggaacctaagaagcagcagctgctgcaggaacgtctggaggcaccagtcataggtacactgggcaga

SEQ ID NO: 34320 - DNA, 1607 bp, Mus musculus
tagaggaagacttcatcaggagcgagctgaagaaggctgggggggccaactacgacgctcagtcagagtagctacagccccacagcccagagccatctgcctgctccgccaaggaggagactgccgcctcacgtcaccagcccaccagggaggagaagccatgagaggcaccagcgccaccagtgtgtccaaccctccccttccctctcccccctgtggcccctctcaagctcaccaagcatcattctttgagacccgcccccccttttgttttaaagaagtcattttggtgccagggtcatgcataccatctgatcccagaagcctctctgtcactggccctggacctggcatttacccctgccgtcaccgtggcctgcctggtctaagctaccctggccttgagttgctgaggcctggtcaggtgccaccccagcttgacctggctgtttcctgctagccctacgccggccaccaataccaggagctgtgcacaccttacagccttcatgagctcccatgcgcgcgcatgctcctcagagcccatagatgtggccccaggcctcacccctgtcctgttcagagtggccttgagctgtccctctggtagacactgcttggcagtaacaggtttaggtctggcgtggaccgagtgtgaagtgacaaatttgccttaaatcttgcctggcagtggctctgccacgtggtctaaactacccttttggcgaagcctttctgaagcctgagaggtctgagtctggctgggggggggggggggggggagttcagggtcaacctcagggcctccagggtgacaaggatggaaaggtcccctgcaaacagggaggctggcataggcctcagggcacctggaaggcagcaacggttggaatcttagtctgcaaattccaaagatggctttgtttgcttttgaagacagctgaggcgggcttggctcctcgagagcactcgaagatggttctttccctccctcctcgctcttattactctggggaaggatgctgcaccgggctgggctgtgaggaccatctctggcattccgacagtttacagaagtaaatgtgtttttcaagaaaaatgagttgggttgtctgcttcgtgtatgtgagtggttgtccgcactcactgaaggtgcttctggacccagggcttcccttcttcaggagcctcgggtagctcaggctatcctcaaacttttgatataggagaatggctttggcctcgaattcctaattctcgtatggccatctttcaaatggtgaagttacagatgtgtaccaccttgtcctatctcagtagccctttttggtttttcaagacagggtttctctgtataaccctggctgtcctggaacccactctgtagaccaggctggcctcaaactcagaactccatctgcctcccaggtgctgggattaaaggcatgtgccaccactgcctggctctcagtagccttttaatccactgcccccactcttccaggggatccaggttcagtctccagcacccacactgggcagctcacaactgcttgtaactctagcccagatgatccaggttaaccctgaactctctgtggcccagg

SEQ ID NO: 34321 - DNA, 1151 bp, Mus musculus
tgccaattagcctgaaatgtttcttttttttaaaagatttatttatttatttatttatttattatatgtaagtacactgtagctgtcctcagacactccagaagagagagtcagatctcattacggatggttatgagccaccatgtggttgctgggatttgaactcctgaccttcggaagagcagtcgggtgctcttacccactgagccatctcaccagcccttcttttttcttttaaaacatttttcctttttatgtgtggttgttttgcttgcatgtatgtctgtgctgtgtatcacatacataccgtgctagtagaggccagaagaggtgataccatggaactgagttagaggtggttgtgagccaccttgtgggtcctgggaattgaaccctggtactctggaaaagcaaccattgattgcacttaactgctgatccatctctacagccccttaacctgaaatgtttcttctgtcttctccagagttatctttcttttcatcaatgttctgcagtggccagataaataaaacactcctcaccctctaactcttgcctttccagactggcacatttacttcacaccctaataaaatgcaaaccgaggtcttctgtatcagttcgagcatctcccctcccctcccctcccctcccctcccctcccctcctctcccctctgcagctctggctgtcctagaactcactgtgtagaccaggctggcctcaaactcacagagatgcaaagtcacatagtgcatgtgcacgattttagtcctagtgcactcgaggcagaggtgggtggatctgagttccagcccagcctggtctacagagtcaaagttcagaaacccgcagatggcacctgcttctgcctcatgtgctaggattagacgagtacccccatgccctgacacagtgtctttttttttggtttttagagacagggtttctctgtgtagaccaggctggccttgaactcagaaattcacctgccttccaagtgcgccaccacgcccggcccgacagtgtctttaatgtctccagtttgtgtgggtgtgaatgccaacaagaacacaggtttgttctcggtggtagtgtccactaggtgcagtgggtgggactggcccctagaagcctgcagtctcgcc

SEQ ID NO: 34322 - DNA, 1174 bp, Mus musculus
ctggaactcattctctagttctatttttaagatgctcttttgataagaattgcaatgaaataatatttctcaaaaccaaaaatgtttcttcagaccaggtgatgagcggcagcatgtcgtgttgaagttactgtatcatattctcctgtagttcctgacaagtgtagtcctgagggctgagggaaagacagcacccctgtagagccagcaagcacaagtgcattagtgagcgtgccagttcccctgctggcctggctgaagccacagcaactgtccctgaagccttaggactcttcctaaggccacatctccgaattctcctcaaacagttctacccactggaaccaaggagtcaaatatatgagtctatggggggccattctctttcaaacaaccatagcctgtctatgtgcgtgtgcactgaatgcatgccttgtgcttgtgaaggccaggagagcatgctgcatccgattgccaagccagctcttcagccccattgctgctgttgtcatagacaaggcccccacatagttctgattatcctgtaactttctatgtagctagtctgggttagctcaaagaggattaaagatgtaagacaccacacctggcattgtttgtgattgattaattaatgacaggctctcacaacattggtccaggctggcctcaaactcagatagctcaagctggcctgaaacttggcagaccattggctttacccttaggtaaaggctggggtaaaggacatgagccagtatacctggcttttaaaaagccatctaccgttgctaatgatcaagagggctcagagattctctccgttggtccatctattcatgaataaatggtccagataactacacagaggagtagttcttaccttcctgtttccgcttagtttttctcgctcctctctctcggtcagggctgacagtggagtagcgcaggtttctctcagaccctggggttaaccccagtcagagattgaacccaagcaagtcagaatcagtcagctcagtgtctcaaagctgggatgagggctggactccaccccaggcactgatgggagttgttacaggcctggcctgtgtgctgcaagcaagcctaagaggggctccccgcttcccgcttctgtgcagaagcagcactgacggccaattgcgtctcttct

SEQ ID NO: 34323 - DNA, 1066 bp, Mus musculus
tgtgtagtgttttttgttttctctccgtagagcagtagttgtcagcctgtgggtcacggcctttaggggttgagcggctccttcacaggggcacaccagatgctcacattatgatttataactgtgacaaaattgcagttaggaagtagcaccaaaataattgtatatttggggataaacacagcatgacaaactgtatcgaagggtcgcagcctcgggaggttgagaaccactgccctagggccttccataccgagttaatgagtctgcctcccttttagactgtccagacgtggatggtcgggaccacccccatatctccatatctgaatgtctgccgtggcctagtgtctatttagaatgtgtgtgcatgaggaagagcttccttcttgtctgtctcccagcgtgggcagtcacagcaggcgacctcggcaccacagcaccacagccgtgccttacctcccaccatttttttgggggggcaactgctgaactttgaagcagtgtgtccatgctatccatccagttaactgttgaagtcctcctgctgtctgaatagcttctgtgggaattgtgcataatgctgggattaaagggtgtcactgcaccctgctgggacagttattttcatcacactaacttttgaatcttctcttgcccttgactccctctgagccacacccgaagcccttcttgcctttttttccccactgttacctcacttgctctcccccgtaaatgtgaactcactgagccttccctgcttgggaaggtctccagccaccatagaggtatgcgtgcttgatggaactcactttgagaaatattgctttaaaatgccctcaccttttcttctctttttaatgtatgtgtgtgtaagttttaccttttatgtatatatctgtatcctgtgtgtttgtctggtgcccaatgaggcaatggaatctcttgacctggagttccatacagttgtgaactcccatgtggttgcagggaattgaacctgggtctgtcctctggaagagcagccagtgctgttaaccacggagccatctctaacctatgc

SEQ ID NO: 34324 - DNA, 1319 bp, Mus musculus
gtactgtgcaccttgcaccctgtactctggatggatagacattgactggtcatttcttctcagcaggacaggagcaccagaggatcgagtttggtgtagatgaagtcatcgaacctagtgaggggctgccgccaactcctagctacagtatttcaagcaccttgaacccccaggcacccgaatttatccttggttgtacgacttctaaaaagatccctgaagccgttgaaaaagatgagacctacagctccattgaccagtaccccgcctcggccttggctctggaaagcaactctaacgcagaggctgagaccctggagaacgacagtggtgccggcggccttggtcagagggaacggaaaaagaagaagaagcggccccctgggtactacagttatttgaaagatggcggtgaggacagtgcttccccagccaccctggtcaacggccatgccacctcagtgggcacgagcggcgaggctgtggaggacgccgagttcatggacgtgcttcctccagtcatgcccaggacttgtgacagccctcagaatcctgtggacttcatcagtggccctgtccctgacagtccgttccccaggacactaggaggcgatgccaggactgcagggctgtgtgagggctgccatgaagctgactttgagcagccctgcctccctgcagacagcctgctaaggacagctgggacgcagccctacgttggcaccgatactactgagaacttcgcagttgctaatgggaaaatacttgaatccccgggcgaggacactgctgccaacggggcagaactgcacaccgacgagggtgcagacctggaccctgcgaagccggagagccagtcacctcctgccgaaagtgcgctctctgcctctggcgccatccccattagccagcctgcaaagtcctgggctagtctctttcatgattctaagccctctgcctcctcacccatggcgtatgtggaaactaagtgttccccccctgtcccatcccccctggcctctgaaaaacagatggaagtcaaagaagggcttgttccagtgtcagaggatcctgtagccataaagattgcaggtacagttaaaggacaggctgagtgggcctgggagccggctgttggtacccagtggtggtagccgaccggtgtgcaaacagtagtaaaggacttgtatgtgtcagtgttatccagtagtcaaacggtgtgtgtaaggaggaagatggagggagagggtgccgtgcctttctgtaagcagggaagacccatgtctgctatgactgttgtgacaaactccatgtccatt

SEQ ID NO: 34325 - DNA, 2074 bp, Mus musculus
atcacagcggagggcacactggcaagctagatgaccacgcttacccacacacagcgagcagagagtggacagagcatagagccaggctgtaagccccagccagtaatgtcctctcctccagccagcctctgctgcctaagcagtgccaccagccgagagctaagtgtggagttccgtgagaatttcacattcaaatgacctctgagatacagaaagacagaagcgagtgggaagacccccgtgggtgcaagctcactccagactgctctgctcgtttgccttagggatgggaggttggcgataattgcccctgctgaaggcctcctcttcgagcatagcttcttctctcaagccacagagtctcttcagatttttccagttgtccaaagacaactgtgaaatgtgaacgtctctggattttgagacaaggtctttctctgaagctctggctggcctggaacgcttagtctttgtgctctagcccgtctcagtgccctgcctgcgtggcatttccagagcttggtgtctgagagtgtccagtgaggctggctgcttcagttgcctactgtgactttcagtgtagagcataactagatcttcttatatgtgtggatttgcaagacaggatttctctgtgtagccctggctgtcctggaactctgtagtcctggctggccttgaactcacagatctgccagcctctgcctcccaagtgctggaattagaggtgtgggccaccactgcttggtcacctgttttggttttggggtcttttttctttgtggggttttttgttattttggtcctttctgagtgtgtgtgtccatccatctgtccacctgcccgcccacccacccatgtgcaattgtaattgtgtgtgcgcgcacgcgctagagaggtttctgaggtaaggtgcaggtcagaggacaaatcaggagtccgttctcttcaccacgtcaccgcaggagttacattctcattgtcaggcccggagaacgtggcttcacccgccgagcttctccctggccctcatgagtctgtttagccagctcttatcatagaatctgtgcggacgtacttgcttggatagtttgttcttgaaaacagtagcctcagcaggccctctcctttttagaacactctgtttccaatgggcccagaagcgacttgatagaggacgaggagctggaagacacgggcaagggcagcgaggacgagtgggagcaagtgggtcccaagaataagacgtccatcacccggcaggcggacttcgtccagacgcccatcactggcatttttgggggacacatcaggtctgtgctttcccacgttcccatggggcaggtgtgacagtgtctggatcctccctgccatctgccttgcctgctttccccttgctctaatgctcagctcccagggctctggcccattgcttgacatgggccgcttgatatgagtcggggtttctctgtatatagcgctcgctggttgtcctggaactgattctgtagcggaggatggccttgaactgtctgagtgctgggatcaaaggcgtgtgccaccactgccccggtttactttcattgatgtttttcaactttcttttgggaacccagggggcgtcagtcattgcctggcactccggaggaaggctggggcattcgaccctgacaggaaggatttcagctgggtgtcacatctgtcccgacagtcagagccacctcccaccagctctgctttgctcataaactgggacaccaggctgcacaaacaagattgaatcatagagtgttccctggatgaggtgaaatgagagatgaggcacttatggtttttattcagaagaagttagaaaaagaaagatgaagaaaaacaactaaggaaacaacaaggtcaggtggcgccttaccctcaaggctggtcgcctctcctcccagaccatcgacatggttttattgtcatcagcctgctccccttccccctcctgatggttttatagaaggagagcagcattaaaagtcccggtcccctggggattcccgcaatccccgttgcactagaacaggctgtgata

SEQ ID NO: 34326 - DNA, 1824 bp, Mus musculus
gttgaagtgttgctattttgtttttcagaactactttctccaggcatcaaaaataaaaattttaaatgccagagaacctataggctgtttgcaggtgagtgtgtttgcctctggtccccccaaaacacagtgaacagaggctagggtgccaggcaacactgccctggatcactctcccacagagattgttctaggagagcctggttgtcaggaaagcattcaggaccatgtttgccctgaattgtggctgacaggagagaggggtcttaccgggtgtcagtgtccacctgagtcagtagcctgcaggcccgagtggggccacctccctgtggagggggtcgtgggagtgggggcctgtggcagcagggtgagagccttttctcatgggttgcctgctctgtgctgtcttccagtggtctaccaccatggcaacagcgctacaggcggccactacactacggacgtcttccagattgggcttaatggctggctacgaatcgatgaccaaacggtcaaggttattaaccagtaccaggtggtgaaaccgcctgccgaccgcacagcctacctcctatattaccgccgcgtggacctgctgtaaccgtgcccgtgtgcccgtgtgtgcctgacgctgcttcctacagttcccaactcactcactacccacctctctagtggctctgtagagagactccctctgcgcccgtgggcttggatggaaggtgcctgagggcccgcacagcgcagctcgtgctgactgacttcagaagctggactgttgcctgggtgagggcacacgagagccgccgcttctgaagaaccgctggttcccgggcggaggaggcggctcgcaccgtgtcccagtctgatcgcgtagtggaataagtcccgcaccagcagctcttgtaaatttgtgaaaatgaattttatctttccttaaaaaaataatttttttaattcatcacactctcctcctttaccctgtagtttttgataaatgacaaaaacgagccagtcgtcattagagatcgctcttacttcaaaaggaaataaatacaaaaaaaacttgttgctggttcctaataggaaacacattttaacgattacgagagggaaaccgctgacgtagacaccgcgggtcagacatgtgggtagacgtcaggctgcagaggtgggtgattgtaactttattaccctgaaaagatttcaaatcacattcatgctgtgtacacatgaacagtgggcacaatgatggactgacaattcccagtgtctgctgtgtaatctcccgccacgcctctctgatgccgtgtcccccacgtacacagtgtattgattcctaggagtataaagttgtcacccatcaataaagatcacaaagttggtttaaagctgtgtttcttggtgtgctcagcctcggaacttagccaggaccctggctatgctgggttagtgtggctgttgctgagtgggggagggcctgtcttggagtcttgctccctctgatcttgtgacttaggtcaaagcctgcgtcttccctgagtatttctgatgctgcctcagttcctggcagagacgaagagggctctgccagccataggaagttggctgtacacggggcttgcacagggcagggcttccattggcttgaaaccctttactctggagcgccttccttccgttaaggggcagtgttccacccaagtcctgcttagcctcacttcaggatgtggagctggtggcccccgtgcttcctggaaacctggtgacagccagagggactcaggtgctcgttcttcgtggggtgttgctgggacaaatgtg

SEQ ID NO: 34327 - DNA, 1161 bp, Mus musculus
ctgcacttgccccatggctttgcttggctcggtgaacaccgacctcaaatcactctcttggcctccggctccgatctctttctcttcttgccacagtgccctgacaacgtaatggacttaccaggacagcccagcacccggccctgagttcggatatggcagagaccagagctcagtcatccaggctcaggtcagtgtggacttccctggccagctggcctgtcccttgactgctccatgccaagcccagggtaccactgacatttgagtcccagggccattgaagggtacaaggcagaaggcagatgaccccatcttactgccacatgtgagacccacagaccaccctggccattgggagaagtgtggctgtctggctgcctcgggctaacctgctctcttggcattggctccagtgggcctgccttccagaaacccccacttcctgtgcctgaatttcaccctgctgcagtcctgactcatagaaggctctttggtctataacttcttagaactaacagaagacatctggggcatgcggaaatacataatggtctgtgagaacaaaacacccctccccctgtgtgtgtgtgtatgtgtgtgtgtgtgtgtgtgtgtgtgtgtgtgtatgagccagagatcaaccgtaggtattgttccacagacactgtcaccctcccctgccccccatttttgagagacattctctcactaccctggaacttgctttcagccctagggaccctcctgcctctgggtccccactacggggattacaggtgtgggccaccatgcctgtttgagccttggggatccagttccgatcctaatgcttgcgtggtgaacaccttatgggctggtctgaccttcatctccagcctcaaagctgtttttcctgaggaagagcttcagtatgcttctgaattagacagcagcctcgttcagagctgacagaacccttgattatatgaagcaccccctcatttccagatagtctcgtagctcaggctagccttgaagccactacgtagctggagatgaccttcaactcccgagcctcttacctttacccctagtgtagggatggcgtgtcctacctggtctggctccttctctgcccaagggtcatctgtaatttctactctccatcccttgacccca

SEQ ID NO: 34328 - DNA, 1917 bp, Mus musculus
tctctgtctgagccttcagggtgggaatgtctgcagacatccgtgctcagtggcctgcgtgcacagcagccttgtgggcagatggagcgggccagctgacggggccatgagcggcttcatggaccacaggccacaggcacttgtcatttctcttgtgtactgccaggagaagcatgcagtcccgggaggccatcgtctcaccatcctgacccttgggatgtcgcgtgggcacccacgggtggagttgcttctcagtcatgaagaaagccagcacagcagcgctgggagtcctgctggcccatccccagcgcacccccttacccgaaagaaggggttccacagagactctgccttggaggcctctgacacccagcactgaacagtgaaagcagcttccagaacactccctgctgccccggaacgggcatcctttgacccttccagcaagtctgtgtgtgctcatccttgtgtgtctgtgtggtgtgtgtgtgtgtgtgtgtgtgagcatgtgtcagagtcagcagtgtcgttgaggcacgtatgtggtagacaagctgtctttcagactccagtgtttcagggaagtgggacgcactgctggcccttgctggcctactatgaatgtatcctacagtgtccagatccaaagaacaggcatgcctgtgcatgggcccggcctcctgcttttatttcactgaaaatttagtgtttgagggcgtggagctgaggttttgttgttccagccaaactgcaactgcaacagtctctcaacagggagagtggtagcccatgctgaggcccagcgctttggggcaggggccatgaggagctcagcgtgagaagccacctagggccccttggggcaggtgctgcagggtgagacagcctggtgcctgagctgtcagagtggtgatatgtgactatttctctacccatggcaccgcagtcagtggagccttggtgcgggcttagaatcccgtcagtacacaaacagctcccctcaggggatttgccttaaccgctggttgttgctttgctgctgggtgagagcagtctgacagagtctggggacttcctgagagtcttctcccatgcagacaccagtgtttcccttctgggaccagctgcctttctgtccctgggacaccatgactgttctttcggtgtcagttgcttgtgccctgccctcatctgggctcctgtgctactgaggtgacccccagggacctgagccgagccctcatgcagcgagcaatctctggggcccaagtccctgcagagggacatcgaggcctcagattgtctctgcgttcctttgcacacgtgtctgggcatgtaggctctggcggtctcaccctccagtgtggagtctgtgcggtgaacccaagctgagtatacttgacttttcaattcctcagtgtgattttatatgaaataaagtaacccgtccacagttctcaccctcctgcagccctcttcttcctgggtgacctgccttgcttttccaggagctgttgtgtgcctgtgaggggacctaggcatctgggtacaactcctagtgtcacctgggtagatgatgccctaagaccccttaactttcccttaattaactagggaatttttaaaatgtgctttaaaataaaactggctctaagcacacgagctgctgacctccttcagcgcagaggctagaacccagggatgtgttgtcacaccttggcagctagtctgtcaactgacggagtctgtctcaaacacaggagcaaatcagtactggggaggcagaggcaggtggatctcttagagcttgaagctagactggtctacataatgagtccaagaacattaagagctacatagagagattctgtctctaaaacaaaacaaaccctgaagagcctcaggcatccagttttc

SEQ ID NO: 34329 - DNA, 1141 bp, Mus musculus
atatgcagggaagggtttcctcagctcagggttccaggctacagtgtcggggaagacttggcaggaggagcagccgtcagcgggcaggaggagtcacatggcatccacagtcaggaagcagagaggagaagactttctgggtggctcattttctcccttgtatccagtccaggaccccacattcaggtggggtctcccttgcttacttaactcaatctagaaaatccctcatggctatgcctagaggtttgtctagtaggtgattcaagacccagtcaagctgacactcagaattaaccatcacattacccgccattgggaaggaaagcggcttcctcatggacgggtcagtgagggcagatgctgtgtagagagaggcattgcggtaggagagctgtagccctagcactgtctcttgctgcacagcctttgttgcttgaagactcctcccatccctcctcttgtaggctatcacctagcctatcttacccagagatgtcagcttactgtggttgctgtgataaatcttttgttttggttttcaagacaggttttctctgtgtagccctggctgtcctggaactcactctgtagaccaggctggcctcgaactcagaaatccgcctgcctcttcctcccaagtgctgggattaaaggcgtgtgccaccactgcccggctgctgtgataaatcttaagctgggcatatcacacacacatacacacacacacacacacacacagagagagagagagacacacacaccagtgatctccacactagggaagtgaggcaggaacatcactaggtagcctggactatatagtttcacccaaatctcactgagggaattcaggatggacagggtcagtttctgagaggctatagggaaagcctggtcctccttctggaacattccttggccatcaatccccatgtctgtcttcagggtctgcaatgcagagcacccatcatcctggtccttgctgatcctctcctccctggctcatctaccatgatctcccgatagctgtcctgggactgtcctgggacaaccttgctgctaacctgtcccccaggcagcgtctcagtagctgctgctgcagccttcacccagctgggcttcctgatcaggacgggga

SEQ ID NO: 34330 - DNA, 1099 bp, Mus musculus
cccaggtcctctctaagagcaacaagtgcgctaaccacttaactatctttccagctccctttacaattgtgagctagggactaagctgcccgcgttggccttagccttattctatagcccaggctgtctgtgaacttagcattctcctgcctcagcttcttcagacccagtcaccacatgacaccttgcccaagcaggacatgaaaagagtcagcccaaaggacaaagccacagtccatgtcaactgaccctggaagccccagccctccgcgtttactgcctctgtccactgagattaagtcgacaggtttagtccaccctcaagaacaggtgactcaaggcatgcacacagagatgtgggggtcatagcagaccgacgccccaatgccccgaggggtagtagcaaggatagaccatgcctgtgactctccaatagaggggttaaattagagttgtttccacaggagctcctgcccagaggcctcagaactgtgggtgctagaaaggagtgacactgacaagatcagggtgtccccagactgcactggaggggattcaggaaccagctgctctgcccccacgtgtgtgcaggctcatcctaattttcaaaaggcccgtaccagacctcagcttggctcgtcaaagcaggaagtggagccatgggctctgctgtggagaagctctgcaggccactggcacccttggcttgtgctcctgtcgctccagcctggctgcccccttacgctggtgacgcgtgtagctcttcttcttcctgctgatggaggtggcctccccaatacctatgttgattgccgtatgagcacacccctttgcctcatccgcaggctctggggaccggagagaggccattgtccaggcatctgtatcctcggtgactgtgtgtccatgaggccagaccaggccacccaggtgttttaagctaaacctttggcctctggataaaaattcagggttttgagccaggcatagtggcacaggcctttaatcccagcacttggaaggcagagaaaggcagatctctgagtttgaggccagcctggtctacagagggagttccaggatggccagggctacatgg

SEQ ID NO: 34331 - DNA, 1198 bp, Mus musculus
ctgtagggatgggggagaactgctcggtctcacccctgcaatgtggagacctggctcctgtgcaccatgggaatagagtgagtgctgtgcgtggccttcagatcaacggcccagccttgccctacttgcaagcatagaacacaggcaaggctacgttctggtgtcaggacacatttaattgggccagtgagatggctcagtggataaagacgcttgctaccaaaccccatgacccgagctacacacctacacacacacacacacacacacacacacacacacacacacacggtgctaataaatgtaataactttttttaaaagatccactgttacatcaagggtgacatcaagggcagtgcattgatctcaaggggcaggaaagaaacccaagattagatacctactctctggggttggggctgcagccatccttgtattatggcctggtcacagatgtgctccaggccccgagggaggctggaatcccccttccctcctgaattgtggagctgaattgtcctccctacccacccccacctccactccataagctccacagagcctcggccctcctcctatctttatctggccgtgaacagtcagctccccaccgtggcctggcctggggcagaccggctgccctttctccaggggtcagaggcagggcggcattgccatcgccagcagtagggctctcaggacacctcctgagacccatttatcacagctgcctccagcccagctggcagggccacggagctggctcttgtcagcatttttcctcagagcagacgcttgtgacacggagggaagagagggaatcttctgtcccatgtgggagctgccttccttgtgaggtcccagctgggccttggtctgtcttgtagtccccctgttccaggctacagcaaggtggtcatggagggggaagggcccttcccttccttccttgggcctctctggcagggaaagaggtgctggcttttcctacctggggctgttccatctaagatagatggaagccactgacttttacaataggaagatgatggtgcgggggtggggcaaggtggggtggggcagggcagggtaaaatgctggatacagttggaggtgttccagaatgggctggaagagccggggcaggcaaatggttgcagctgggaaccctcctgtttaacacaatcctgtaggtt

SEQ ID NO: 34332 - DNA, 1164 bp, Mus musculus
gctgccactcagtcagaactgctgctggtcctggcctcacatggcttctctcttatatcactctattctctcctctttttggtattcaccgagtgtgtgtgtgtgtgtgtgtgtgtgtgtgtgtgtgtgtgtatgtgtgtgtgtgaatgtctgtgtgtgtgtatgtctgtggtgtgtgtggtgtatgtgctgtgtatgtgtgtctgtatgtctgtgacatgtgtggtatgtgtatgtgtgtatgtggtgtgtgtggtgtgtatgtagtgtgtgtgtatagtttgtgtgtggtttgtgtatgtgtatgtgctgtgtatatgtgtgttgtgtgtgtggtatatgtggtatgtatatgtgtgtctgtatgtctgtgtggtatgtgtatgtggtgtgtgtgtgtggtgtatgtggtttatgtgtgtgtatgtatgtatgtgtgcatgtgcttgtgcatgtatgtgtacgtggtatgtgtctggtgtgtgtgtatgtatatgtgtctgtctatgtgtgcatgtgcttgtgcatgtgtgtgtatgtggtgtgtgtgtgtgtgtgtgtgtgtgtgtgtatgtgtgtctggtatgtgtgtatgtgtgtctggtgtgtgtgtatatgtgtctgtctatgtatgtgtgcatgtgcttgtatgtatgtgtatttagtagaatctcaatatatagccctggaagatctagaactttctgtggttcagaccaggctggcctcacatgcagggtgcagggaccgtcctgcctctgcctccttggtgcaggagtgagagcagcccagccgagctccctcctttccaagccttgctgtccgcagccagactgatggtccttttatcttcagctttagctttagttttccaagtgataggcttacacatgtcccacctcacctggacccttccgtgggccacccagcactcaggaaggatcccacccacgcttcaccatacctgctcagcctcatcttcagaaccacgtcacaggcccaggtaccagaccacatctttggaagaccaccgttcaacccactgcacagggtaggatagcacagggcttggactctagaattcttgtgagatcccaaaatgggtaaaacacctggtcaggacacaaggagtagaaagatggaagccaatccaggcacagatgt

SEQ ID NO: 34333 - DNA, 1193 bp, Mus musculus
tgacaggcatgcagggctgttgggtctggtttctccaggctgtgtggtgctgctgtgactgtttatacagaaaatcagtccgtgaggcggggtctccccagcccagcccagcccagcccaactcaactgccgcctctcacttcctgcctgaagggagcctctcctggggtctcaaagcctaaatatgtgcaagggtcccccacgtaggtccatatcagctgccagcagtgtccacatagctacgggcactgctggaatctagggagcagctctgtcctgaggtgcaggtccccagggtgtgtgtgtgtcctgactctatgaccaccctgttttgcctataggaggtgggagttcctaccctgcagatgccctcacatgcctcatcttgggattcagcagtctggtgtctaaggcttccctgacattgttgagttccttctagagctgagccagaccctgtagaccttggtccagacctgctcataggaggctttctccctaaataccccttttatgctttctttgattaaaaaaaaaaattagggggaggatgtttctagaatatggctccccaaaacctaactcttcttcccgcaggactctggctcacgaggcagcagcagtggtcgggagcgcctattggtggagccacctctcgcccaggaaaaggctgcgggccccgccatcccctcccacctactcagcaccccgtacccctttggcctttcccccggctcagttgtacaggactcccgcttccaaccactcaagtaagtgccagcctggggtcagggaaggcacaggggtggctccagacagacctgagagtttgcactggcagaggtagatagaatgccattagtctcagtggcctgatctgccctgaggtccttggccccatctgaccttgtggtccagcctttgttgagacagacttatcaggtgtcctaaacacatttaagcccatcctctgggtctggggaacagagagcccctccagcatctctatccactcgtggggaccttgagggacaggcagcttcccatctgtgcagtctgggcttcatgccaggctgtacctcactgagaggcaggacctgagcctggtgagggagtgtggcacattacctctgctccccacttccccctcccacagcctccagcggcctgtgcaccatgtggtgccccccagc

SEQ ID NO: 34334 - DNA, 1501 bp, Mus musculus
tccttggttcccacttctcagcatctgcaccccagcagccagtccccactaacagtgtgtggtacctagacagtgtgatggagactccggagtgagagtcaggccatgccctccctcttcctgtagaagctcctggcctcttaccacagcgggtcacaccagaggtctctgcctgcagccagtctgccctcccgctcgctcacccatggtccgggaggtcctaggcgcccatgtggtctgttccttgtggccccagacagtggacatgctctttgcatgcagtctctgcagggctgagcctgagtgagcagtggctcgcccagccgagaggcgccggctcacctgcctgggtcccggcctttctcctgcagtgccagggattcacctgagggcttcgcatctgctaggcaagcttatcctttgtggctcctgcacacaccagtcctgcctctctgtctacaggatggatgactcctattgcctgtcagccttaaggtctccgttctaccccatccccacccctggctccctgcctccactgcatccgtcggcgatgcacctgcatctctccggcgtacggtatcctcctgagctctcccactcgtccctggcggcgctacactcggagcggatgtccagcctcagtgcagagaggtaagctgtgttttcagcagaggtggggtggaggggactgttgagcgttcctgaggtcctcagcggggcctggcttggtggtggcgggatgcggttctttgtgtgtaggtggcaactcttgcatgtggctgctccactttgagctggggcgtggacttgccccccctgcacatccctttagcacgctgccctgttttccctcccaggttgcaaatggacgaggaactgcggcgggagagagagcgagagcgggaacgggaacgggaggccgaccgggagcgggagaaggagcgggagcgggagcagcgggagaaggagcgggagaaggagctggagcgcgagcgggagaaggaacgggagcgcgagctggagcggcagcgggagcagcgggcgagggagaaggagctgctggctgccaaggccttagagcccaccaccttcctgcctgtggccgagctgcacggactccgaggtcacagcacggaggagcggcccaagccctcggagcagctgaccccaacccgagcaggtacctgggctgagctgtgtggagggaatggcctgtgcctgccccagcagtaaggaggtgccatcccaacgctggcgagactgggaggaggtgtgctctgtcaccctgggtggatccaggatcccatgggtgcccccagaacagccaagacgctagggaggggagttgccatcactgcggtagaaccttggttggtctctgccttttgccatggtgatggtgaacaccagagtcacgccactgagatacccccaatctgaccttttgttctgtgtcagagttctaaagccaaggctagcctgggactcaaccgtccct

SEQ ID NO: 34335 - DNA, 3218 bp, Mus musculus
catgctttagcccccaggggacaggcagatctgggaggttgaggtcagttggggtcagcctgggacgcatagtaaggtcctgtgttaggaataaagagatgttatctgaggagaggcccttgtgcccgccccagggtgggcacatgtgcggggccggtcggacctgggattcagagcctgagctgaggcagcagtacacactggttctctgggagcctgtggtgccggaagaatgttctagcaacctccagaggtcactcacgctgctgtgtgtacagatggttctgacgcgcatcttctccccaggagcttcggagtcagaaacagaagatggtctctgagcgggagcggctccaggcggagctggaccacttgcggaagtgccttgccttgcccaccatgcactggcctaggggctactttaagggatatccgaggtgacggtttcccttgcactaggctgaacctatagtatagaaatattatctattttattaccttgaatatttaatatttttcactgggaggtttgaagcttacaaattgagaacgtgccatgcatgaaacaaagggttccaggctccagagaggagatcacctcgacgccaatgtcaccgaggcacctgtctcagctaggactcagtttctctttctgaggtcggcgttatttcctctctccccccacgtcatcctcctccgacactgacgtccaccgtgcatgtggctgagggagagagccagctggttgtttctggtatagctgtgccacgagagcccagcttgctgttgctgcggccctggggtttaacctcttcctgccaggagcgggactaatgcgccgggaaggctgggtgcgtacaagcaaagggctccccatcagtcccgtccgtctgtcgccttcccgcaagcgtcatcatcgaagccactgctcctgggagcacacaagcttctccctggaacagctcttaggaaaagaggcaaacccacacccaaaagtaccttgttttccttggggaagatgcgtggagctgtccacagatagcctacccactggattgctaccgccgtgtgtggtgttttcatacaaacgtacgttttgagagaaaagtcaaaggtgcttcagccttgtactgtgtatatattaaaaaaaaagttttgtatgtttttattactttaattattgttataaaaagcctgccatttttaatatgtggtttggggaattttgtttgtttttcctgtttgggggttttctttggtttttttgtttgtttgtttctgtttttctggatttaaaaaaaaagaaaaccttgcttttagtgtttgtactgctgctggtcagaatgttgttaactgctcagttctaggaagcaggagagctcgcttgtgcagtgtcccacacagcagggctgaggggcctagggctgcctgctctccaaagcagatgacccatgtgcggcagggactcggcaaagctgtgaggagctgagctccggagacaggcacagctctggcagaaagctcaacgctaagggatctccttcccagtttcagcacttcagtcagggctgaccaacttgaaaagagcctccgactgtcctccatcggacaggggaagaggaggccgagcccacccttagccaccaggctcagtggctgtacagagcagctggctgacatctgtccctgctccacccctgcccctacccgcacccctctggttctcagcaaactcagacaaggcagtgccaccaggcctgtcagcaaagcaccttcctctgcccacagccagtcagagaaaacgatccaaaggagggcagaggccgcacaccctgggccgagtcctgcccgacttcccagttaaatgctgcttgtgcccagtgctgctttcccaagctcaccccacctccatgactagaagcttctgcaaatctgcttggtaaatgtctcctgggaaaggcagaacccataacttaaagacacgcacagtcccttccattgtcccacaggagttcctctggctgagtatgccatccagagcaagcgatgccctcccaggtcagtctggggcacaagctgagccgctgactagcaatgcctacagcctttcccaatgcccttgcctgccctggagcttctagggccacctctagcatctggagaccgaatatccccatgctcagaagtaaagtgacaatcagaaccaggtacaagccagtaaagcggcagatgactgccactcagcccacatacggcattcttcccatcccacagtcttagagccagatgaggctaacaagaccacagtagcccccttcccaggtaccacactgtccctggagatccctccagcctagccctgctatagatctgctctagactgtgaaatcagcatgtatgtgaaaaatcccagtccttgaccatgtctcccactccacctgcaagtgattgctgccatctgtcctgggtgggatgcaccgagctagtcacgggtgtcggatcagatcttttaaaaacacttgtctcatgtaattgagacccgccaccatcgcagatgagtgacaagagagaaggctgtcaacacttcggtacatggtgatcttaaaaacacccacctgcaccatcacaccagactgtaccactagggcatccagaacaagccccaccctaacagtgggggcagggagggtacagccaggctcacagcactgagagtctcaaccagctaagctaaattgcaagctagatgcctcctgcccctgccctcagctgcccaggccccagcatggagatggcctgcacagcaggctcagcacctctgaggtgtgcattagccacttatagcagcagtctgtactctttcaagtacgcaagctttgacttcactacttgctgtagcctgtccccactgtctatccagtgcttacttcaaccctagaggctgccttgacccgaggaggcatctcactggttccgtacttgtgtgtgccctacgcctcactgctggggccctggacccagacccaggcaggagggccgacgggtgcctcggtcgctctgggggcagtttagatgctgtgaaattaaacccgttctaagtgtacttgtttgaattaactgtattgtaatattatttgttgaatgtagtaattaggtatttatgaatatattgctgtaatttctgacatcccgaaaaataaaatcttcctaaatcatgt

SEQ ID NO: 34336 - DNA, 1132 bp, Mus musculus
acatccccaaagcagacaccatccggacactgatcaaagacctgtgggacacacgcatggccaagcttcgagtgtctgctgacagttttgtgcggcagcaagaggcacatgccaaggtaggcatggttctcctgtccctgcccggtgccagtgggcactgcctgccagtgtgaccgcttcccagggagctgtcaggccatgctgcctgctcagcatgaaacagggatttgaagctgtgctttgagcagtggctcactgggacttgggggtttggctctcagagcctgcctacaccctcagtaccaggagccaacaactcacggttgagcagtctagctttgccttaaagccaagacttcctccgctcacttgcttttgtgtttcagctggacaacctgaccttgatggagatcagcagcagcggggccttcctcacccaggccctcaaccacatgtacaagctccgcacaaacctccagccctccgagagcacccagtcgcaggacttctagccagaggcctctgctgtgcaaaccctgctgtgtgccctgtgtggcggagattgggggaagagtgtggaacactggtaaggttgctgcccgtctttgtcagaggtcagccatactgcaagttcaactccattgaacagagaagccgccagcctttctcttccacccaaggactgcacgccaagcacagcgagtgttcgggccagctcagctcaagtgtcttcaagcttggcccgtggaaagctgtatgtagttgaggctgagcgtgagggtgggggtggtgatacaaaaagatgaatttcgtcttaacatgatttaggaagattttatttttcgggatgtcagaaattacagcaatatattcataaatacctaattactacattcaacaaataatattacaatacagttaattcaaacaagtacacttagaacgggtttaatttcacagcatctaaactgcccccagagcgaccgaggcacccgtcggccctcctgcctgggtctgggtccagggccccagcagtgaggcgtagggcacacacaagtacggaaccagtgagatgcctcctcgggtcaaggcagcctctagggttgaagtaagcactggatagacagtgggg

SEQ ID NO: 34337 - DNA, 1251 bp, Mus musculus
atcctgggagaagtcccttttagcctggacaactgtggggtacgaggttcccgagggggctacagtctcttgaaacattcttttttggctccaccttgcttccaaaattcctgagccggaattttacctgctcctcagaggagagtctctgaacctctgtccagggaaggtgagaagagagacagagatgtctcacaaggacctcaggccctgcgcatgcccgtgttatcaatgctacccatggggcttaagacaaggaagagcagtagtctagaccagggccctgcaagctgggaacacttgtcacaatctccaggagtcctgagaaagcaccccaactctgacccctccctcagcccccagaggggctccaggtattgggggacctgaggtactggggatatcttccagcctctgtgactctgatgctaggctgtgggagactagggtggtggcctgaagtgaaaaaggttaggcccagggaggaagctgacacagcagagccctccctccctgatgttacccttctctttctcctagtctggatggatgagctggggtcttatcaagacgatggagagctggaacctgaagcctgaagcggcgagacctgtgtggcagcaacctgccccgctgccccgggtgttgggggcgtggctacctgagcagctggatggggaacagcgaattgggtcctggaccaagacatggatggccagaagagtacagcaggtggctggcctcaacggagcagacatccgtggcctctgagtccgcaccaacccagaccccggcttggtgaagaggaggccaccctgccctacggtcaccgtgaccatggacctcggccctcgaggccccagagcagaaggacttctcgccagagcagggcctctgttttttacaagttgttttacaggtatgggacctacatcctgagcgagatttataaataaagctcctttgtgacttgcgggtcctggtttttgggttttggggtgtgtgtgccttcctcgccaggggcgacatcaccggcagtcgaggttgggagcccagcgtgtccaggcttttcaccaggtgtggaaataagctcacagagattgcgaagcagccaggaaattgttatttaaaacaaggaagtaccacaaggacagccgctattggcgaagacactcgaggggctcagttaccttttggggtgagacagagtgagtggtagggttattgagtggcatagcaagggtagtttct

SEQ ID NO: 34338 - DNA, 1217 bp, Mus musculus
agggacagaactttgagtcttttgggaggggaggcctggggaaggctgagagggaaccttggatcctggggtgtcctaggtggagtctagatgtggggtcatgggcatgagttcacttggccctgagctttagggctaagaaatgagaaatggggtccgaagcaggaagggttagagccacaggaacgataggttgctataggacgtgccattcacatatgtatcatttcaataatctgggttttttttattatttttatttttctaaatttattttatgtctatgagtacacggtagctgtcttcagatacaccagaagagggcatcagatcccattacagatggttgtgagccaccatgtggttgctgggaactcaggacctctggaagagcagtcgatgctcttaactgctgagccatctccccagcccctaagctctgttttttatagccagggagatcgaggctcagagagacaagccacccatttctacagtcaccctaggtcaggagttcccaaccctggctgttataatctccaggaagctcgacagacagcccctgtcacggaaatggagactccccggtaactgctaaatctcccagggtgaaaccccaaaagagccaggaggaagaaagctgggtgtggtggggtgctggggcacacctgcaatcctggcacttggaagttgcatgtaggaggccagtgttggcgatgggaagccctggctcaacatcagaagaaacctctcagagaattcctacaggtggctgtggggttattacagccacatccagagcttagcttagcccatccttggctcgctgtgaatcaccgtgtctgagttcagcttctctgaaggtgacttagcctggatctgtggagtctggtttgcctacaatagagactgaggtaccacagaaaagaaagctcaaggtggcgggggggggggggggggggagggcaggagggagcccagcccttggcacagccccagaagacctcctgcacaggctccaggcccaccctacgcctgggtccctagcctgtgccctgcctcacttgttcccctggaaacaggcttctaatagcctgaggcaggcagggaattgacagatgacagctctagtccccagggtggctagcatttgttttttaatctttactgttgcctaatcctcctgagagctttgcttctgcccagaggctgtgagg

SEQ ID NO: 34339 - DNA, 1206 bp, Mus musculus
acggtccgagggatggatgacctttgacctcacacctcagtaggaggaggagggagttctcttgagaccaggtctcacttggctcactcaggcctcaagcttcctatgtagccggtgctagcgctgaattccttatcaagcctgtgggcttacaggggcacagcaaccatgccgggcttggtgtgcatttcctgccaacaaaattgtccctcacaccaggcattggtggaggtagaggcaggtggatttctgagttcgaggccagcctggtctacacagtgagttccaggacagccagggctacacagagagaccctgtctcgaaaacaaaacaaacaaaaaaaaacacaaaaagattgtccctccatgctacccacctaagacaggctttttccttttccatttttgtcatgtgtgtgtctatgcgtgcttttgcatgtgtgtgggcagacatgcggggagaggaatgcaaagacgtgtgcgtgcactggcacttggacacctgaggttgatgtcaagagtcatccattgttcttcggcctcattcatcgaggcaggatctctcaatcaaagccagagctcagggatgtgcttgccagctggctccgaggagccccagcctctgctctgagcccggtggggattcaaaccctgctccccacgcttgcattgtgggcactttagctgcccctcatgttgcttttgaccagtagttcgcaaaggaactcaaccctgctccctcccctgccccccatcctcagcctcaaggcaggtcccactcaaagccggttcttctccctcaacaccccaccaccgctgccaccaccttgactccttttctggcacattccaggcatgacaaagactctcactgttctgtgctctgtggggtggctgagaccaactcccaactgaaccggaggagccaggctccaaagagggagtgtgcacccatgtgccccccctgcagtgaatgaacccctgttggggtgactgacaagcagggcttaggaggacccagagctcttgatccttctgtttgtgtatctcaagtgctgggcttacaggcagtgcaccaccaggcctcctgcctgccaggcaagcactcctccactctcacatctccttaggggtgccaccttcacaaccctccccacttgttggtagagccccatttttaagataccctgttccgcccaccctgct

SEQ ID NO: 34340 - DNA, 1064 bp, Mus musculus
tttgcttcttaagtacgttgatccccacccctccaacacccctgagccttctaaactgacttcctctgtgtgggaacacaggacctgttctgaaaaaaactaacttgtcaaagcactcttgcctagctttgactcctgccttgtgttcagggaggctgctctacagtgtggctagcaagtggtcctaatggagcagaacccagggcctcgcccaggagaaaccacctatactcgggcggaccttgtaacctctctccagcacctgccctttgtcctggttatatttctgttgctctgatgaggcaccaaaactactgtggagagggaatggttcatttcaccttataactcagatggaaggggaggcggctggaggcaggaactgaagcagaggtcacagaggggctgcttactgtcctgatctccatggcctgttcagccggcttccttatgtaactcaggaccacagtcaagggcaacagttccttaattgatagtccctcttctttgtgtcaagttggcaaaaactaactagcattgtattagggctctcagactgacagaatggggagaaggggatgacagcatttattagtcacaggctgtggtccaattatcccagcaacagctgtctcccattgggtagtccaagatttccctgttgagtctgcaagtccctgtctcagctggtcttaagtatatgcacagcgtatatgcacagcgtgggctccagtgcagtggtgttagagggatggagttgccagtgagcaagggtgagcaggcatgggtgagcagaaggtgtggccaggctcaagctggggttttccaactcggatccagtcaagaaaaatccctcacaggtgtgcccagcagcttggggtgtagttagttaattccatataatgtaatatagtgattccaagtcgtacagtcaagttaacgaccaagaatagctatcacagacgtcattattaagccatagcctttcttgtttatctcccaacttgcttctggtcagtgtttagcccaacaatagaaactaaactaggacttcattaacaagt

SEQ ID NO: 34341 - DNA, 1374 bp, Mus musculus
ttgtagaaaggcggggagccctcacactcaccttgcaacacaagattcccttggtatgggcatagctgtgctgctcgcatgggagctaggcaggccctgcccttctcaacactgtactcgtgcctgtcactgccctcccttctcaggtggacaatgccaagttcacgatggactgcgcagcgcccacgatccacgtgtacgagcagcacgagaacaggtggcggtgcagagacccacaccagtgagtgcagcgccgccttggcctgggcacgggctcgggctctgggtggtacaccgaggtctctatgcacaccgaagcaccatggtcctccagtgtttggtttctggtcgcatggatgcttcagccatgtccctctactgtaggttctagagtgccccgtttggagggacctgtccattcatgaaagtccacattcctgagtctcccagcaactgctctgtccttagcagcctattggtcttggtaggtatgaggctgactttcctgtctgtcctgcagcgactactgtgaagattggccggaggcacagaggatctcagcttcactcctggacagccgctcctacgaaacactcgtggattttgataatcatctggacgacattcggagcgactggacaaacccggagatcaacaaagcagttctgcacctgtgctagacaaggaccacactacagcgaagacggaagcatatttttacatttatagaggaatagtaggttagccggaagggaagctgcaagtgtgccttggagggggtgcggtcggcatccttcagggcggggctgtggagaactgtgggtcgcctaggctttggtttcttagtcctgtactgcccgatcccgcccgtcagctctttctgcttgtgccaggtcattcccattaaacagttctatctagccttttgtaatcctgagaagtgtacacggtgtaccttactctttactctggtgagtgtgtggggcttctcagcctaagcccgcgccaggcatcctgaaatactggggcagccagcatctgagcagccaagcagatgtggggctggagctgcactacttcacaggccgcaccgtgggattagacagcactgttgcctgagaaacctcgctgcacagtgagcacagcacactggtgacaagagcagaggtcccaagagaagccaaggccacgaacattcccaaagccagttcctcctgactccgctactccacatcttcagagtgagagctgctttgtgtttaaaatgggggggaggggtgagcttaaccccccacgatgtcccaagcagtgtccttgttagcttggatcatttgaccatcttaggaaatagcatgcaggctctttggtacattg

SEQ ID NO: 34342 - DNA, 1188 bp, Mus musculus
gggcccccgaccgtgccaccctcacccgccgtccaaggccgtcacctgccaccgctgcccaggcgaccgccgcgaccgccctctacaccctggggtgctcgcgaccggaagaacggggcccgcaaccggaagaccaagacggagccgcgaagcatcgcgggaatcagggaagccccgccccaagcccgtccgtttcagagcgcggggcggggcggggcggggcggcgcggctcggggcagggcggggcaggacgaggcggggcggggcggtaactgtcgcgaaaggccgagcgggtagcagctgctttccggcagacgttttccggccgaccggctgaggcgggaggccgcggccggaggtgcgagagcgtcacggcgtgcagcggagggtcgtggcggaggaccgcggtgcgtgggtcgcgatgcccggcgtgaagctgactacgcaggcctactgcaagatggtgctccacggcgccaagtacccgcactgcgccgtcaacgggctcctggtggccgagaggcagaggccgcgcaaggagcatcctcccggagcgggcagccacacgctcttcgtggactgcatcccgctcttccacggcacgctggctctgacgcccatgctggaggtggcgctcaccctggtaagctcgcggtcgaggccgcggcgcggggttccgggccgggcggagtcgggcgcccttcgcgggacgctgcggctgctcccggggagctctcgaggttttgtaagatgaccgagaaactcgaatgtgtggtggacgtccttaaaaccagcactcgagatggggaggcaagagttcgaggccagcctggtctacattagtgagatctgggataggtaacgtttaaagtttaaacttaatgtgtttgtgaggccacaaagaaaaaaatgcctatagcatgtaaatctctagttttacagaggtttttttgtttgtttgtttgtttttgtattttgtgggtccacttgccgatttttttgccccagacttgctgttttagcaagattataggttataatacggactgctgtttctgcgcttgtaatcaaactcggtttctctgcttaagagacatttgcaagacccggaattctaactctgcggtttgcctttataaagccctggactgatatggtcaggcgctgcttactacatcttggaagcg

SEQ ID NO: 34343 - DNA, 1152 bp, Mus musculus
agcatgggcgtcagagccagcgtgccgtggaagagcgggatgcagtccacgaagagcgtgtggctgcccgctccgggaggatgctccttgcgcggcctctgcctctcggccaccaggagcccgttgacggcgcagtgcgggtacttggcgccgtggagcaccatcttgcagtaggcctgcgtagtcagcttcacgccgggcatcgcgacccacgcaccgcggtcctccgccacgaccctccgctgcacgccgtgacgctctcgcacctccggccgcggcctcccgcctcagccggtcggccggaaaacgtctgccggaaagcagctgctacccgctcggcctttcgcgacagttaccgccccgccccgcctcgtcctgccccgccctgccccgagccgcgccgccccgccccgccccgccccgcgctctgaaacggacgggcttggggcggggcttccctgattcccgcgatgcttcgcggctccgtcttggtcttccggttgcgggccccgttcttccggtcgcgagcaccccagggtgtagagggcggtcgcggcggtcgcctgggcagcggtggcaggtgacggccttggacggcgggtgagggtggcacggtcgggggcccgaggacctggagcgccggggccgggagcggtgcctccgagacgcccccggacccgggacttgagcggctcggtgaccttggggcgcccgcttccccgagcgggtctgttgtctcgggtccccgctccggcctgccgggcaccgggcgttcccgctgtgccaggcccgagggacagcgacctgagccctgacgtcacgctacggtttctgccgccccgggcgttgattttttttttcccgggctcggacgttctttctcggggatcgaatctcaggggttgtgctacagtgaggcgtggggctcgggtcgctggggcgggtgacagggtcatccaggtcgcctgcgggacgcaggaacgggaagcgggccagggcctgagcctgggcggcctcctcccgcttgcccttcgcagtctctgtacaagtcaatttttaaaataaaactcagtcgcaggaggtgtgctaccgtgctatctatctatctatctatctatctatctatatatctagttctagcagtttcagtca

SEQ ID NO: 34344 - DNA, 1234 bp, Mus musculus
tttgggctgactggactgttttgagtgttttaagtgggaaacatgggaaggaagacagaactaacctgccgtgagtctgcttgttgagcacagcagtcttccctcagagtctcgagggccaccctctgcttcctgacacacgtgcattcctccagtgggacccaagcctcctgtactgctcagttctcacttagagtgtgagcccatgggggggtacaggtgcttacttgtttcctgacactgccatccagacatgtccagagttagcctcagtgaccagtaggcacttggtaagtccttggctgccagggtcacggtgaccaccaagactctgcaacagtcgcctttccctttttgaattttatgttctgagtatgagaccctgcggttgggtctccatttagtccagttgcttgtgtgactaacaaccctcagccctggtcctgcccctggtgaccgaggggctgcttaggtcaggcttccgtcttaaccgttgaccgtcaccgcccttctgcctagactgccgtccacacggggtttcaggcctctccaatgtgttgtagggagtgttgtgaagagtgaagactatgctttccccacttacgctgatcggcgtgactaccccttgcctgatgtggcccatgtcacgatgctgtctgccagccagaaggcgctgaaggagaaggagaaggccgactggagcagcctttccagggatgagaaagttcagtgtgggtatcagagggggtgcacaaacactcagtagtgtgtggaggcgattgcactgggtcagctctcccagctgggcttctagatacccattccatactgctggcttggccaaacgggagccatgtgacctcacagtcatgtgacctcgtgtctgagggctgtgctcacagctcttcattttccccttccatgtatgctggtgtgtgagtgcaggtgtgtgcacagttgtgtgttctagcctagcctgtgcagtccctgggatgggtttattcagggaggggctgagccctctgtaggtattctttaccttgcatctgtctcattcagtgtaccgcatccagtttaacgagagcttcgccgagatgaacaggggcaccaatgaatggaagacagttgtgggcatggccatgttcttcattggcttcactgcgctcgttctgatttgggagaagagctatggtaagtacagagggtgaggtaggcccaggacagctatagctct

SEQ ID NO: 34345 - DNA, 1207 bp, Mus musculus
gcagcgtgcctttgtggccagatggtttgctttgtatagaatatcgtgttctgtagcttaattaagcctcatgtccacagaggactgcatagtgtgagctaggagacccattggctgcgtggctggctgttcccaagcatctggagtctgggatgtcggccttttccatagtgtttggacactgttgcgcttgcctgctctctgacatgcatcctctctgggtcaggttgtgttgcattccgagcaggccctcccctcctgagtgtgattgcagactactaacatgccagccctctgagtggcacccctagctgtgtgctgggccaccctgcagactctgccactgacagcttaatccgtaggatttccctgctgacctttcacaatcgagggaggttctgagataggagttacagtgccctggattaaagcccgtgtgagagaggggttgggcaggtggcagggcagccttcctcaccaagttgttctgttccacagtgtatggccccatccctcatactttcgatcgtgactgggtggccatgcagaccaagcgaatgctggacatgaaggccaaccccattcagggcttctccgccaagtgggactatgacaagaatgagtggaagaagtgagagcccgctgcctgccggctccctgcctccctcactccctcggcatgctggaagctgccgtatccaatggtccatgctaataaaagaccagtttacgtggtgtctgtgtggttcattctttggcagtcactagatgaaggtacctgtctccggagaggctaggtttctcacagtggaagtgaggagggtttaaggtttttgcatcattactctgtgtgatgtcaggtgcgtgtgtagggaacaatgtggggcttggtgttcgcccttcattttgctgtggtcaagttcaggtcgccaggctacgtgacagaagtttctgtcacttagaagttactacccactgtgatgggtaaatatattctgagtaggggacttgcgttttaacttgttgaggaagagtgtataaaaatggaacctgacaccattgcatacactagcaagattttgctgaaaggacccagttatagctctctcttgtgagactatgccggggcctagcaaatacagaagtggatgatcacagtcagctattggatgggtcacacggcccctaatggaggagctagagaaat

SEQ ID NO: 34346 - DNA, 1101 bp, Mus musculus
tttttaaagatagaatgttgcttagcccaggctagcttacagtgtccctacagttttctatactgtatactcatagtcattttccctcatcaggttcccaggcctcctatccacctccctccagactcccatgcacatgtgccaccatgtgggacagtggttctcaactgtgggtcgtgaccccttcggtgcttgcttatcagatatttacgttatgagttataactgtagcaaaaccacagccatacacatgtaccactgaggtaactgtatggttgggggtcagcacaatgtgaggaactttattaaagggctgcagggtaaagatggttggggacctcctgccagtctcctgcctctcacctcgccatgtagcctgcatgtactgtctgctgtccctctgtctctgtctcattcctctgcctgtgcgttttcttctctcaggagctcaggcaggtctcagtcttagagagtcatcttagtggtgtgcttgctcctgagtgatgctgtggtggtacccagactccaggcgaggagaacccaggtccacactggaatccaaaggctgcttgttcactgctgtggtcctatgttcttctgcctgcatgggcccacggctgtgaagccccactgcacccagcctcccctttccatccgccttgccttcccaggacaggaaaaccaaacacctgtccctcgaagtagagctctctcctctgtcttcacacactgacttcggttctgatggcagaacccccgccttcctctgagccagcctcttagtgctaacggtaggtctgtgccagggcacctggccctgcccactgcttttcacggtgtcttgctgtcacgagagcccctccaagtgccagcgtgttcaccgcacagggcatctgaggctccctcagtcactgtgcactttcagcgtttggtgcctgtgggttcgtgttccgggaccaccgtgggtaacggtggacaagaggaactccgggatcccatcctctccacagaggcctgacaggaatccacttccactgtgccccttctcctccctcaggctggcgaattgggaaaggggaaggctatgctgatcttgaatac

SEQ ID NO: 34347 - DNA, 1179 bp, Mus musculus
tggggcttggagagatgtcacgcctaggtgacagtcccagcagaagctcagaaagcagcaccttcgcaggctggaggttatttttattagaaatgttgtggttgttactgagggaaaggaggcaggcaccccacacccttcccagggtgacgtcactgtctgaaaacagccatggtggactcgggggtcagcaggggtcacagagtaatctcactggtcgcccggtgtcccaggctggccctggtgctgactcaggagctccaggccccatattccagtggaattgctgactcccttggctggagaacagggatgccactgccctgccttttgctccactcatttgtcagtcatcagtctcagagactgggagcatggtctgtcccagccaactaaagctcccaggcacgtgtgccaccaacctctgtagggacctgggctgtccctggatctcactaagcttcagtttccatacctgtcagagaagaatgttgacctgactcttaaagttagagccatgaggcacctgatatttttattgttgttgcttggttctgttttgttttgttctgttttgttttgttttgtttttttcccgacagggtttctctgtgtagccctggctgtcctggaacccactctgaggagcagcctggccttgaactcacagagacccacctgcatctgcctcctgagtgctgagattaatgacgtgtgactccctgcccagcctggcctgaggcacctgctatgggaacactaagaaactcacagccatgggaatgagtgataatttaatacaggactttaaaactcaggaagccctgcaaaccaaaccaaatcacccccaaacaaacaaacaacccattagaggcagattctggctgtgccgagcacgaacagcccgtcagttcccaagatcatggcgctgacggagtcatgaacacagcatctaagtgtcagaaatctgcctaggacacagaccttggtgacaaggactctgcctaggacaccacaagaccttggtgacaagcaccaagctccttctgagagacatacaccctgcttgtcctctgacgttaactgagcctcagatcagatcagagccggtggctgagagagaactcagagatggttggtacctctggaaacctgctctcgtctcctcaagcttggggc

SEQ ID NO: 34348 - DNA, 1933 bp, Mus musculus
agcccaccacacaccggcttccctaaacgcacgccctgcttgctgcagacgaggcttgttgggggctgataccattgttgcatgtagtgtggcctcatgtagagaacagcaaggccctggaagtccgctcaacaaggcaggtggacatccttgtccccgggcctcaccaggccagtgccattggctgctcttgtaattttgctgctgcaggctgcacagcccatggattttggagaaaaggcgccttgtgggtttgcacacttggcctgccccgctgtgtgtggagatggtatgggtaaggtcaggggcaagcctcgggaagtttatagcggggactggactctttcgagtgaggatattgccggtgtctgtttatgtcccgatttcttcaggcctgccagtgtcaggacattaccgccatcactcagacctcagacatcaacagtgtgtctgtggggggggagctctagactccatgccttggtcctgactcaccttgtgtccctttgacatcagctgtctggctccttgtaacatgagtttagactctgggcccctctgctctgggctgtcagctctgcacacttcctgtccctgcatgtctacctatagagtgggtacttgacagtggcttctggccaactgctgcgccagccaggccttcttcacatcaagcaatgaggcactcgcctgctaaccgccttccttccccaagaacctggagctgaacacgctgatctggccatctggggcacctccccggctgctggctgcctcccccagccctcagcagctctctgccaggctcgctgtgaacagtataccgcccagggtataattgttcgttcacctttcaggacctatgggcattagagcagagggcccatcctgctcagctgtcaggactttgcgaacctcaggacacctgcatcgcctagtgtgggactgtcttctcaagacagtggggcacagaggacatcaagcgcctgacctgtaccaacctccggcccacatgacccactttccaagaagggtttcactgtgggtcgtgacactgaaggaacctgccgggtgcttttctgtggtggagtcctctgtgtttgcacagagaccagcacaaagtgctagcatgtgcgttctcagcccgtttcttgtgctcaccgagcctgtttggagcatggggtttgtctggagcacacacagacacacacacaacacacacacacacacctggttctggacagagggtggctcttaaaagctctcaggtcagctccgctttgcctagggtcagggaaggaccctgaaacagtagctgctgtgtacctggtgcctgatatcacctgtgtcactcgcctaggatgtgtggttctcctttcggttctcagtaaacctgtttttgaagccttgttgttgacttgtttctcgggtgttcttcaggtggagatgggagcctcaggaggggtggctgggaccgtgcatctcacaggcacacacaatacacacacactcacctaacattttatgtgtgtgttttgcttgcacatgtgcatcatacacatatgcccagtgcctgaagaattcagaagatgtgaagatatcaggtcccctggcactggagttacagataactttgagctgccacatggggactgggacctggatctgttttgtaagagcagctgggctcttagctgcagagctaacctctccaactcctatatgagctaaagagatcctttggtttttccacataaggatgaaggatcagggtgatttgttagagcttgtgtccttgtccccatccagtgcccttccccccccagggacaatggcagtgtggtggagggcaatagtgctgttctaggacagaaatgggtacatgttcagtcaggcatccacagcgaagatggcagctttgagaactcagatg

SEQ ID NO: 34349 - DNA, 1222 bp, Mus musculus
gctgagtggtagcctaggctctctgtgtatggactgagtttccacagtagcttctagggtcttgggcagccctgtagaagttaggtcaggttctgcctcccagccccgtgctcccagaaataagactcagactcaaaatatgacaggtgctgcagccatacaatacaaaaagacgttctccacaacacagttgttggtttaggcaagaacagctcactaatatttttttaatgcaattgcagaaaaagtcaggtagagcagagaataaaggcctctaaagctcctccattctaaaataacacagaactgggctcagcgccacgtgcctgtcagcctagcactcaagaggctgaggcaggaggattgctgtgagttctgggacagcgtgaggtatagaatgggactaccgtcaaaaacaaaacaagactcccctcctccccaaaaaggccccagaagaaatgtaaaccaacatctgcgtttattagttacttgtgtgagtgcacaggacattcctgtgtactgtcccggtcctcccctcccctcccctcccctccccccatgtcagacaaggggtggataaacatgcttgccctgttgcctggttacctgaactgactccatccagttgtctggcctccaggttccttgtggcacatgtgtacacacatacaaataaataagatttaaaaaataaaaataaaaaaagccaccggctttccctctctgactgggcgcaggagacttttttttttttttgatgctgtgaggattggggagaggatttcagctgtcaagaaagaccagagctggagaggtcttgcctgccgttcctgctcttggtggaggcaggagaattgggttcaaagccggctttggccgtatagtaagcaggaggcgagttctatttccaacaaccaccccccacccaaacaaacaggctgtgaatgaccttttcctgtctaacaaaagcaacgacaagcttgtgacttatttcccagagtgccaccaaggtctggacaccaggttctggctccccgaggggacagtcccggctttgtgacatgctgcctttgtctggtgtgctcctgggctgtgttggcactttgaatagctgctaacacacacctttgcttacattggctggcacagaggtggactgactgccaaggtcatggccagggtatgggaagacttggacatggcagggcacgggacctgggag

SEQ ID NO: 34350 - DNA, 1904 bp, Mus musculus
gtgtacgagagtgagagagatgaagacggcttcctgtacatggtttatgcctcgcaggagacattcgggacagcaatggctgtgtaagactccaacaaagccaatggttgttaagcccttaccaaggcaaaaagggatgttaccagcggacgctggacggctcaccacccacagatgagaacgtaggcacccacatagggtattaggaactgttcatcagccagaaactgagctccatgcaagtgcactcagcttggaaactcgtctaaactaggctattttgtgttcaaactttagaagttaaaaataaaatactttttgcatcctaagttgccaataaaaagatcaagttattttgacatttttctccctagtagggacttaaaacagaagagcagtgtcaggggcagtctcttcctgggacctgctgccttctctaaaagggctcccactcagcagagaagcccctctgaaggcccaggttgcctagcagaggcccccagagggccctggctttgccctaagcaggtctggtgttgtaggatatagctctaagccgggtcctggtcttgaccccagccacaccctttcactcagcagtgcagggacatgcagctcgctgctgtctagatgttaccatacgcccttctgctgaggccaggtctccgcttgtccaggggttgctgacccagcttaagcgactggagagctgtttctctcctggtttgaattctgtctggtccatgcctgcttcagggagagcaagcgctggccttaggatgtggttgtcaagtggtagactgcaagtccaatgctccagacttggctcacagctctttgttggtgtgtaactgtctctgtaagggtggttctgacagctgttgggatttccccatttcatgtcagtacatacatgtcagctgtgaggacaacagcaacagaagacatgcttttgatagacatgccacttcagctaaagctagcctctgcttcctgcatgtggcccgctgtgacaccaggccatccctggtcactcactcactcgtggtctgaggatctcagagctgcctgctgtcatggactgaagccagcatagccacctcccacctagctccccacaggcacccaccttccctgcatgcagctgtctttgctaaccctcaatgttattttacactgtaaattctcactgctctgtcttgtgtaggttgtatacgtcattatgtccctggtttttataactatggtgcgatcagtaaggattcctgtaatactgctttaaagatgctgctcagagggcgggcggcctccattataggacacctgtacactctgatgcactaataaaggcacaacgaacctgtcctgagtgatgtctcattgtcatcgtgggaactgggctctgcagtatacccaggctgctcttgctggggaggagaggagaggggaggggcggtaacctcctttccttggtcgataccttgccaccagctcctgcttttaaactcaatctctgactgacctgccagctatcaggtgccctctggtgccatgggaacacaccaaaagatttactcatgtggatagctgctggcacttgggaggacattgtaaccaacttcagcttagagcagacggcaggctctgcaaagctgctgcagtctcctcggggcagcctggacactactctgggtggcaggcgcctttggggtccagcagtgttgtcagcaggtcctcatcctggaagggcagggcaagtgatagcctagagtcctatgtaacaatgtttaaagctgagaaccttgacagccacgaatgacaaaagatctgagaatggccctatgtggtggcgcatgcctttagcctttaatcccagcactcgggaggcagaggcaggcggattt

SEQ ID NO: 34351 - DNA, 2814 bp, Mus musculus
actatatgatgccaggtttattcttttgtttcattgtctggtctcagcctccagaatgctgggatgattaacacgtcacaccccaggttcaccatggtcaggacagttggtcccactctgcccagctctgggttcccagcacctccatctctggttgtgcagtttcccattgatcctcaccacctgcagagcttttgaagcccagtcaatacctgtggccggagaatgcagtcgtggtgcaggttgccgcatcccttcccagtgccggcctgcatctgctcggtccaggccctccctgcccctgggtgttgccagcttgagtgtgaggtctatgcccagagaaagattcaaggcactgagaagtggtcagtggtgctctgtcggtcacttcccccagaaggtctcgtacccgtggcatgcggctgtgcgagggcgtggtcagtcctgagtggcatctcagagcaggtgggcggtgtgtgcacttttgtgattgactcaggcttcaccctcttctctctctctttctctctctctctctctctctctctctctctctctcgttctctccaggaacttttaggttgaaatacgcccctccagcagaaagtctggactccacggactgatcctttttttttttttttggcaacagaacattttattaagccatgaaaaatcacatagagaactgaagtcaagttgctgtggcgccatggagacctaaggaaaccacagagagctgaagtcgagtggctgtggagcttaatgtttttaacccaaaggtgctttacttaactatactggagagagtctagtgtgcaagttcgtcaaactcgatttcattgccaaattcctagtcttggagcttggtccaaggattgcctagtggacagcgctatggcatatcgtggccgtcacaccatcgctgcagcgtgaagacctgtctcctgaagctcggtggtccttctaggctcacgtaattccagggcagctatgcacgacctgagtcaagactgcaggtcggggttctctcaagtcccccagtcggatccgggacccctttctgggctaggaagcgcccgctggattttgctgtttcctaaagtaggagcctcctctctggcttcttaaggattgcactacctgacacaggcctctgcggtctgggaggcagactctgctgggacccgacaatgtaggggactcccatcggtgggcattggagttggcaccagcaggctgctccgccaaatacaccccgaagtcgattgcagggtgttctgtagacacttggagcagttccaggtttttaatatctttttctgtaaacagatttacacgatatagtaaataagtcatagcgcactctcgacaacttcatctgtaagggtccaggtcccaggggtccgttaccgaccgaggctggagaccacccctcccgctggaggctttgagcctgctctctccaaacaagaaccaactcttgaagactgggggatgactcggctttgtgggttggctgtgactgacgcgcctcattcttccggaagctggcaagctgttgtctcaaatggcttccccaggaccccagccccagagctcactgctgatggattcagacttgacacagacatccagcagtaatgcagacctgtgattcatgaacaaaagactggaaactgtcggcttcttttgtattaggctatgtgttgattgttaattccgttaaaattgcctggaaaacttcagtagagagatgcaagactcctcctcgaaaccgctcaccagttgcagtccagaccggggtgggggtgggtcctcactcctcagcatggtgtaaacgttcgacacaccacagcggaggcataagggacttaaacctccctccgaggttaaagggaattttatgctcaaataacattataatgctaaagccttcggtattagaaaatcgatggtaatattctgccaaggattttccagcctcctcctcatggagaagaaaaatcatagtccttaaacattcttcagacgggacagtcaccctcatacagaattagtgtaaatcacaaaatgccccagaactggaggcgttgtgatctaaggcttcatcgtattctaagatggctttgtctgtggagacccacggaaggcgtgagtgttgtggattctatgcaatgcaggatcgggagacggctgttctgtccatggcacagtatcacatctgttctgaggggatgtgatgaggcgttaggggatgctctgttgatctctcactcagaaacactacaaacgtcaatacaagaactgacacaactttgccttaaagagcaccagactgggattggtcgtattgtgttaataaggaagacttagagtgttcactgatgtttacgattttaatatttctgaaggccatcaccgtggcctgggtatgtgctgaaagccaaacttttaaattttttggtttttttaaacaaagaaatattttaaataaatcctatttcaacacagaagttgttgaaaactgtctcatagcaaaagaaaaaaaatcatatttaagttttctgttttgtggtcagtatagggaatggaagtgtcttacagctgttgacctgaaagacagcagtcttctgtggcaacacccacgttaccttgtggcggtcagtcgaggggagctccagcaccatctcggctgtccaggcagcagaagtctgtgtctggaagctgccggctgcctttggaagagctgtgtggtgtggcatttctgtgaagccgagcgaccggccagcgaggatgaaaggaccatggcag

SEQ ID NO: 34352 - DNA, 1173 bp, Mus musculus
gagactagacttcgtcagaaccccagcctttcctggtgagattgtacccatgagggtttcatgtccttgctcccaggccagaagatgtttactcttctcctccagagcacggcctgcctgggaagctggggccttttttctatacactgggcaagaagtagtcagtctctcccctaaaggtctttaggtctggtcccaggtgcttgtgccacccttgatggctctgcctctgtatgatggccatgtgtggaatacacccatcttaccccgtctgtgctgaccatggcatggcatcgaagagtctgcgtgtctcttggaggcctggttcctgtttaggttgtggtcaggacctggccctgtggctcactttatgttagactcagggaaagttgagcagattgtggggcttggcttgcctgtggtgggacgggtgtcttgcagaaccacaggggctggaaaggtcctactgcagctgctgcgggggcaggctgcttctgttgccgccgcggacactcaccttccttgtcgtgtcttccagctatcccagctctgccctgaagagaacttggacaaactcattccttgcttggctggcccagattccttctatgtggaacgtaaccatgttgatttggaagcaggcctaaggtaaataaggctcttggccaggtggctgtggctgttctggtgtgggcttgtcccttgtctccagcactatgcgttgtgagggtttgaagtacgtggacaaccttagagtaaggtgaggatgaggcgaaggaatcaaatgttgtacctgttgtggagccttgccccctgggatgtaagccgtcagctgtgctgagcggttaaaagcttttctgtgtcagagtgaagacaggcaggcttcctgagtcgtcaccgtgtccaacacagtggtgcatgctgtgctcgggctcactgggtctgttttcttagggtttttggtttgttctttggtttggtttggtttgttttgagactgaggaaggccttgcatttgtaatcctgcttctatctcccaagggctggggtcccaggtgtgctcactacacacagtttatgtggtgttagggatggaacggagggctttgtgcacgctggataaacattctactacccgagccacagccatggcctcggctgcttctcaagtgc

SEQ ID NO: 34353 - DNA, 1145 bp, Mus musculus
caggactttctgcccttggtgctgggcactggggtggcaactctctccatctttgctctgaaaccctgacctgctcatttatcccatactgctgttggtcctgtgatggtctgtgtgtccctggctgacttggaacttgatatataatccaggctggcctcaaactgaagtagatccacctgcctctgcctcctgagtgctgggattaaaggtgggacctgccatgcctggatccatcatcctctctttgaggctcgagactaaacctgcatgtctagggaaaggctctgcccataatgcagagctgtaggggttcaggaagagccagcctccgttcagctacccatatggcaatatggctggagttagtgcccaccacagagtctcaggcccaggttgccatgaggcttcagggtaggaaaggtggttcccatcccatgcctgagtggaaggaggaagaggctctgtgaggtggtgccagctcccaacttgggtgcctcccctggaccccagactgcacccagaaccccgtgtgggttatgctttgtcagaatcccaggagtggctggaggagtcggactcagaagaggacagcagctcagatgaagagagtgcagatggagaggatgaagaccaggaggacagtgctgaggagggagcaggtgagagccacagtcagatgcacctgcgccatgctgctgctgaggggccttgcttgacagtgcttgtgttggggtgggtctaagcaggttgccattcagtgtacccccgccctgacccctctgacctgcctgactgagcaacctcgttctcatttttccttttgggatgggaagatccgcagcacccagaggtggcccgtggggagcaattcgaagagtacctgtcccggactgagcagcactggctgaagctggcccggagccatgtggggcctgaagcaaaggagaagaaagtgttgaaagtagcccaggccatggcaaaatcatgctttgatgatgcagttcaagacattgcacaggccagacactagactgcgcaatggtttcaccatcactggtgtcgagccaggagtgaggaggccctgcagagtggtcttctgtgagccttgggtgcccacagtctgacgggggctagcctgactt

SEQ ID NO: 34354 - DNA, 1133 bp, Mus musculus
cccaaggcactcagccacttgtgtccccctccaaagccaagtgtgacatttgagttcttaggtatagccttcatgcttacaggtagatggggaagcacttagggaagggccctgtgcttgtgttctcagggccccagcgtgtgtaagccatgtggacagatagcgtgctcagagaggaggggaggggctgctgctttcctgtccttcttgatggttctgttcttactccgagcacagaaacattactaaaatgtggaaatctgtggggtctgggttcctgttttactgggggctgtggcctgggctttggggtgcacagcttggggctgaggctgagttctggtgccaggcctgctgcagagctgactgtgctttgcggccctgggggcctctgctgtgaggtcaggaaagtgtgcacagatgtcctcctcctcctctgctctagcggccttccagtgacgtctctgagctgacccacccgtgagcgcttctgggtggctgcagtggccagtagtgctagggggagatcatttatccgctaggtttggggacctgaggaacttgaccttggaggctaatctcttaacctgtgtacccagccccgagccctgagccccgtgaagagggagtcctgtgtcaggagcaggtccctgctgagcttcacagtgaaggatggtggcctcactccgggctgcgtgctggtgtgtttcagtccccacaaggccaacggctgacgatgagctgacttggtgaccacgacccagtgcacggtcgctagcacttttcaatggcaggctagctttttcttcctgtagtagtgcttagacctttctatgtcatactcagcactgtcggtcagatgaatgtggcatctgtgggaaagcacagagcagcctagccgactgcagaggagagatggtgtcacattctggattcgctgccttaggaccctagggaggcgcactttagctcatgaacctcctctagcaagatggcacctccacatctgtttcttctgcctctcagtagtcggtgccagggtccctcagaaggcagtgtcacacagctgagctttgagaaggacaggccttgagggttgctgagtggcatctctcttccttcacagggaacaa

SEQ ID NO: 34355 - DNA, 2148 bp, Mus musculus
caccatgctcaagtgtttttgtttttgtttttaagatttatttattattatatctaagtatattgtagctgtcttcagatgcaccagaagagggcatcagatctcattacagatggtttgagccaccatgtggttgctgggatttgaactcaggacctttggaagagcagtcggtgctcttaaccactgagccatctctccagcccctccccccatttttgtttttgtttttttgtttttggtttttgttttgttgtttgttttttcgagacagggtttctctttatagccctggctgtcctggaactcactttgtagaccaggctgggctcaaactcagaaatctgcctgcctctgcctcccgagtgctgggattaaaggcatgtgctaccacgcccagcatgctcaagggttttaacccctagtgttctcccatttctccagtcaagccctggcttccctgggtctgctctgagtgctccaagtggcatgttgctgaccctccacagtccccatgcctgtaggtggcatccgcatggcttgctttcagcatggtgagcataaggctcgtgtagatgaggaggcccagtggggctgcggtgcacatgggggcccgttctctgatagtgcagtaagatactacggattagggacatataaaggaaagatagtttgtttcagccctcctagactatgaaggcacactctgctataaagtgaactgagagggttggacatggatggttcatggcagatggggtcacagtggtgcatcatgtgtgagaggaagcacccagggagtctgaggtctgaggtcagacttgctatttccttagagcttgacttgcaaaaacacctgagggtctggagagacagctcaatggtaagagcactggctgctcttccagaggtcctgagttcaattcccagcaaccacatggtggctcccaaccatctgtaatgggatcaaatgctctattctggtgtgtcagtgtgtctgaaggtatgcataaaataaatcttaaagccacaaaaccagcctgagagcagcattggtctctaaggacagtacctcctgtgcccacttacctcccagctgccattcttttttttttttttaagatttatttattattatacataaattcactgtaactgtcttcagacaccccagaagagggcatcagatctcattatgggtggttgtgagccaccatatggttgctgggatttgaactcaggacctttggaagagcagtcagtgcccttacccgctgagccatctcaccagcccccccagctgccattcttgccatagcctctggacagtacagatggaaaggggatcagggctgacagccccgagctcagttagcatgcagggcttgtaggccgacctgagccctggtagagaggtaacaggagggaagatgagggatgtgtggaccggttggtccctgatcagcatagcttctgcatgtccccgggtgggataagcagcagcactgctggcaggacagggcccgggtgctgctcagcctttctgtaatgtagactgtaagatgaagtatagtaaggaggaggattgaagcacagacgtacaaagaagacacttaaatggactggcgtcttccccagggtaagcatcgttgcaagcagcagtgctccctgggtgctgagtagatgtgtgcgccctgccctcagggccaacagccagcaagcatcgctgctggacactcaaggctaggcctggggacctgagggtcccagaggtctaaatggtggccacatgcttctttccggaaacagtgagtcagcatgtcacctgaatggtggacggctggtgacacacaggggctgcagttgggtatagctgaactgtgcagacctgtgggtggacaggggttctgtgcagagcaccccgcagtgtcgcagcgtggatggccattggcggtggctctaaaatcaatcagccagagcccggcctccgtggagctgcagctcctctcgggtgctcctgcagcacagcagggctgcttctcaggactcctttgttttgcagagagtcaagaaagatgtggacaaaggcacccagcactcagacatgttcctgctgaagcctgcggaagggggagaaggtactgctgt

SEQ ID NO: 34356 - DNA, 1109 bp, Mus musculus
acctcccactcctcaggtacctctaactattacccccgagattccttcaagacagaggatgtttaacctagtgagaggagccttttatgcccttaacagaactgatccaagcgctactgaggactgctggctatgcctgtcctcgggtccggtccgccttattataaaggaatcgccttcaatggagatttcaacagaaccagcagccatacttcctgctcttggggtacaggacaaaaactgaccctgactgaagtatccgcgaggaatccaggtctctgtataggtaccccaccttccactcacaaacacctatgcggacaaattcagtccgtgtccagaacagaagctgattactatcttgtaccttccccggttggatggtgggcttgcaatacaggacttactccctgtgtatcaactaaggtttttaattcatctcatgatttttgtgtcatgatccagctgttaccccgtgtatattatcaccctgcatccagtttagaagaaagctatgcgggccggcggtcaaaaagagaaccaattactttaaccctggctgcattcatgggaataggtatggcagtaagagtggggacgggagtgtcagctttgatagaaggaagacagggaattcagtctttgagggatgctgtcaatgaagacctagcgacaatagagaagtccatagacgctttaaaaaaatctttgacctccctgtctgaggtagttttacagaacaggagaggtcttgatttgttgttcctaaaggaaggaagactgtgtgctgcccttaaagaagagtgctgcttctatgcagatcatacaggaatagttagagactctatgcagaaactgagagaaagattagagcgaaggaaacgggaacgggatgctcaacgggggtggtttgagtcgtggtttgaatcacgaccatcttggataacttctttaatttccgctgtagccggaccaatccttatgatatgcttagctttagttttcggcccttgtataataaatagaggaatggctttcatccagagtaaaattgatacagtaaaactcatggttcttcaaaggcaatatcaacctatagttcaggtaga

SEQ ID NO: 34357 - DNA, 1139 bp, Mus musculus
tgtgatttggcgggtaaagatggaggcggggtttcattctagcccaggctaacctgcaagtcacagactcccagagttcttcctacctagcctctcatcactgagcttttaggcataagccaccacccccagccttgaatcacttggaacgctgagtaggtatatctgcatatggcacaaactataaaggcccctggggtggcatggcctggagtccacctaggaacaagcactgagtgtatgggtgtcagacaagctccgtttaagggaggtcagacatcattgagaaaaggtgtccgacaagtcggagtggagctgagacctcaagtcccgctgtgagctgagagaagggctggctgcacagaccatcccaggagcctctagccaaaaaaaaaaaaaaaaaaccagaaagctaacatggctcacaagacaggtggggacgggggcctgtgggacccgggatgtagttgtcggactttccagaactgggagggaaggcaggagtttggttttctggactggcagacccagaacaacccagcaggtccaggcagtcagagctaggagggtgggaactaagagttcctgaggtccctgcaatgggagccagagagagctggtggctgtcaccctcaaagagaagaaatgtccatgtcctggacacgggcctcatacggtcaccatttctttccaggacttgggttaattcaccaaggcgctgggacttattgcttcaccgattacgatccggtctctgggtgctctgagcctttgcataactcccccacccacttctccaacccacgctgagccccgagagcgtgcacactcacacacacacacacacacccgcactccatggtctactctaggcaatgggagtatcccacgctctgacatatataccccagggcctttgcacaggcatgcctccctgagcttcttccttgctcttcccagtgactcctcccgtccctgactgcagagcctgagggtgcagctttccaccgcctgagttcactgaaacacctgagaatcgcctgcccacattgcccacctctgggtatctgtcagaacatgttgaggggactcctggaggctctggtgataactgtcccagaggatccgggctacgaagg

SEQ ID NO: 34358 - DNA, 2695 bp, Mus musculus
tgagagtcatgggggtacagggagtagacttggggtcccaccctcgctggtcttagcaggcattctgtggccagctgccctgcgaactggcaaaaaccccaccactggcaactagctcagacacggtagcctgacaacatagagcctgaaaaagttgtatctgaggcgcccagctctggctgattccagttggcgtaggacgtgtgttcaccatgtccagcctcatcacctgagatttcaaaagggtaaacggactggtgagagtaggcgggcagagctcacgcccgatcctccaccctgagttcactcctgtcctccctctccccgcagtctctgtgacggtgctctgccagaagttgatgcaggtggtacctcaggagacttagtcacgtgtcctgggtgctgccgcgctgtgcctgctccagacaactctcctttggaagatcagcggccaggcctgtcagccccacagctccagtgagcaccaccagccgcctaacacaatccactgtccctcaaacgtcaggtgtccacagtggctgtgaaagaaaactggtacgatttggtcccagaaggtgaccgtccatggtccatgcagacacagcacccagtatgaggcgtgctgggacctgaggcctggactttctgactttctggggactgccacatccaggctttctcccctgtgatttttgttttgttttggtttttgtagcgtgcatttgggtcaagtttacactagcgagatgattattttttaacaaaacagggtagcaaggagcaggagatgccgtggccgcacagtccggccctgtgggaactgctggccacagctcttttcccaaggctgtcgttcagtagcatagagtgcctcaaggggaccgcatcactgtcaccaggtcagaagaactactgagacttgcacatcacctgttccactgtggacttggactgacagatggacgacacatatgctagcttggactttagttttctgggaccctagagatggaaccccaacctttctcatgagacagagctctactgtgtgggtcacttgttaggttgaaaatgtagagctcagctctcgccgccctgaagtcctggctccatatgaaagatctctgcagccatgaccctaacagcacctagctgtccgctgcagggccttgtgctctgtgcacacaatgcagcagtgccccggctctcacacgcacagcactccccgccctgccccacctctcttagaaccagaccagcaccatggctctcccacccccacccccacccccaagcacctggtctgtccccattgttcttgagactgctagtagcattctgtcaaagtcactactgctccctccagccccacccttagccattgttcagaaaaataggcaccaagcacccctctgctctctgccaccagtgtggtgtgaccactccagctccctgagtatgaaagccactggctacatgtgtgggaccatcctgcagccttcccgttgtgctctgggtgagacagttgggtccagccagcacatcactgaaggagctgatctgctggagggacttcaggatgtgcgtcccctgctggcctctgccattgcctcagaccatggcctccctgaaggggtgtctactggaatggctactatgcagttcttacatagtggtgacttaccactggccaccctgacctctcctctgtgcttctggggttccctttcattggggtgaggaagcaaggtcaaggtcagagtgcctcttgaaggttctcccagatatgggaactggggtctcttccctggaaatgagggcagggacccagttccatcctggggtgtgtccccagatacagcctgggttaaagggcagggattcatggtgctgacccaggctctctgagaaggccctgtcattcctgtttgtgatgttctgaggatgcccatctgtaggtttttattttcaaatcaagctccgaccaccgccattttgcccagtgctttctattttggttttatcctaacatgtcactgccctgaaagacacccctacctggcccctttcaatggtcagtgtctgacccaccacactgggtccatctgctgtgccacctgagatagtgctgtggttataatgtcttttactattgtattaatggctagcctgttacattagactggggggggggtacagaggtctgctgttttgtgaggctttttgtttttttggggggttggttttgttttttttaaaagctattggaattctaagctgctgactgtgttctgtggtctgtgccaaattccctgtgtaggaagcatctttcctcccagcccacccaagtctcacagccgtacatacattcctctgctcaccaacccctgagggtgacaaggctggaaggaagccagggggccagggacacattaaggtcacaagagggagagggtttctggaagcctctaggtgggaggggcttggcccagaggaaaccagtaggctaatggtgaggctaactgtgctgagagcaccatctgaggggaggtgcaggaggaaaggagcccagcaagaagttaagtgatgccaggtcatctcacaacacacacacacacctgtctcatagacaggtcagacttggaaactagggttcactgctctttgcaggctagcatggcccctaggctagcat

SEQ ID NO: 34359 - DNA, 1847 bp, Mus musculus
tccattttttattaggtatttagctcatttacatttccaatgctataccaagagtccaggtgctcttccaggtctctgaaggcctgggcgccggctcccggaggattgcactctgaggagagtttcagtgttcatggagtgagtgccctgttctttctcgagggcacttctggggaacatagtgttccctggcttccatgccttaggaaagaccccgaggaagcactgagagtcaggttttagggcagaggtctggtttacgtggttgagtcttctggagtcctctgtgtttgtctctccacaagtttccttcacctagttaagactggattgggaaatgacttggcctccatcccgaatgaacccactggtggtaaaggtgcaggccatctccctctcaacaagtctggctccctcctgcaacctcaggcctgatgcgggcagcctggagcggagtctttgatgatgattggaagacttgttttccacattgttctgggtggccgagagcccgtgtgagtgaggcctagggaccatctcgtggcttgctgtttggttttgttctgcttttgagacaagacttctctgtgtagtcctggtggtcctagaactcactttgtagagcaggctggtattgaactcacagaactgtttgcctctgcctccagagtgctagcattaaaggcgcatgttcatttttgcctaagtgaagcttgggtgctgtcgacttgacctggagcccagtggtttaggtgcatttctactgctgtgataaacaccatggccagaagcaaacctggggaagggttttactttcctctcagcttgtagtccatcatcagagcagtcaaggcgggagctgacgcagaagccgtgagggttgctgctcaccagtttgctcctcgtggctcgctcagcattctttgtttttgtttttgtgtgtgtgtggcatccaggatcacctgcccacccatgttggcattgcccacagtgaggtaggctctccacatgagtcgttcacctagaaaatgtgttgtagactcacccccaggcagcttaagtgtccctctacccaaatgagtctagcttgtgtcaagttgacataagaactacccaggacactcagtgcctgggcttgtcttgttacagaatctttcagactagagctgagattccgtctgggctgagatttatctaatctcacagggccgtggctgtctgtgctgaggtgtgcaggaatggagcagcctagactcgggaacaaagcccaggcaggccctgggtggtgactagcgccacctgtgtcccatctccagccttgtgagtatgaaggatgaggcctgatgaccagcctaaaacactgaaggtgtgcaccctatcctgggtggagaatgggacccctacctgctcacgtttgatctcaggtggctgaggactcccctggactgctcaggagacgtaggggctgcctggcatgggctcctcagtgctgcggaactcactactctctccatggaatgagtctggcagggtcttagacattcttagctagcatgtgcctggagacctgtggcctgagataattcccttctagtgccagatcaggaacattgtatttctgatttgaggaaggaccctcgaaccctacctataactgtagagtggggatccgtcctgcctgggtgttggggagagctgtgtttagcagacagcacagagctgatcacgtagagatgggtctgtactctgcctggtggacctcttccctcttaccagggagcagccccacagcccgcttctgcatggagaacaggctggatggagggagaaggaagtggaagggtgct

SEQ ID NO: 34360 - DNA, 1372 bp, Mus musculus
aggggtgcctcaccccacaacccacccccacttatcctagataagatatttatccttcatctcccagacgcacaggatatgcacactggaggaagcggagataaacacccgcgaggcagggccaggattccgggcaggtgttgggactatacactgagccaccccccttccggtgctttctcccttgacaagtcctctgcgccgcctggggcgggagaagaagcacgcccttaccaatcggccctgacatcctgcacaggacttgtgaggaggtgtgagtcgactctccacccgcgtacaacattcggatcttgtgaaacacgccgcgataaacccatcagtagtcacgccgcgttaaacacatcagtagtcctcagtttcaggatcttaacgctccacgtgctctaacagacttgggggcgggggcccgcgaaggaggcggggtcgcgcgggctgagggggcgggggcctttgcgagctgaaccaacagcagcggcgatgggcggagcctggagggcgggtaacggtagagataaaaggccgcgcgggcggggcggacgcagacgcacttctcagtacgcggagagcggctcggccgcgcgcacgccgggtatccaggccgagccgggaacgccgagagcatggcggtcgcgggcgccaagaggcgcgcggttgcgaccccggcggcggcggcggcggaggaggagcggcaggcgcgggagaagatgttggaggcgcggcgcggggacggcgcggaccccgagggcgaaggcgtgaccctgcagcgcaatatcacgctgctcaacggtgtggccatcatcgtgggcaccatcatcggctctggcatcttcgtgacgcccaccggcgtgctcaaggaagcggggtcgcccggactgtcgctcgtggtgtgggctgtgtgcggcgtcttctccatcgtgggcgcactctgctacgcggagctgggcaccaccatctccaagtcaggcggcgactacgcctacatgctggaggtctacggctcgttgcccgccttcctcaagctctggatcgagctgctcatcattcggccctcctcgcagtacatcgtggcgctggtcttcgccacctacttgctcaagccggtcttccccacttgtccggtgcccgaggaagctgccaagctcgtggcctgcctctgcgtgcgtaagtaggggtccgggctggggtggggccgggctggggcggggccgggtgggcgcgagccaaggttcctgcgtttacagctcggcaacacccatcccagtatccctccatctgtccatccctgaaccatctcggcagttccaggctaaagtcacaggccccagaacccacgtgcgtttctttaatccat

SEQ ID NO: 34361 - DNA, 1121 bp, Mus musculus
actccatactctagttgtcatatctcctccagtctgctattttcgttatcccaaagtatccagtgtttataagttttggcaggaaaaacgtgcagtttctggaaaaagcccagcagatactgtagtgtttgttggattgaggctatgtggtcaatagagacactgatatcaaataccccaggagatagactaagaacatcagctttctgctagacatgcagtgtattcacgagaacacgtcagatgcaggtggggaggggtgatgactagaattctgactagtactgctcgaggtgaggggctcaggggaaacggagggtccaagcccaggttctagatgaattcacagcagtggttttactaatgccaccccatgtagcttagcctgctttctcagaatcagatgtgctatggaaacttaaggtgtatggttgaatgaattacacgatgcaaggctgactataaagccccatattacttaaagggtcatttcagttatttaaatccagaaaaagtttccctgggaggggggagactagacagttggatgcaatgagggccccacccaacaagaatgtgacactgaagttagggctgtggtggtcgttgttaatgtctcttctgttcataaaaccctcccagggaaccagtcagtggaagtgcttctaaccagcctcctgcactgttagctggaaggaggagaggctgaggaacctggagagcaggtgtgggtgggatcatggcagttgcttccttaggctgcaccagggttgcaggcagaagcttgcagtgagaactacctgccttgaaatggtgggaggtgctactctcctgtcctgtcctctagaagctcacactgacactggcctacttggatggagttggtcttagagctgtcttggaactgacactggaacatggaggagctggtacctccagagcatggagccaccaccaagggggatgaaacattccaagatactgtggatgtgattcctgtctgaattaacttctttgtagttttcatgtttacacactcaggaactgtccagtaagattctatattagcccatggtgcagcagacagcgttacttccccaaaaggagcctcctaatgacag

SEQ ID NO: 34362 - DNA, 1237 bp, Mus musculus
gaactctgaatgctgcctccttggagtggtggaaacactcatagcacagtggcccggctggcctgacccatggaggcgccgccgccaaaccccgaggagcgcccgtccgtccgtccgtctgcccgccgccgccccgtcagccgcctcttcgagcccgccgcagacgccgaccggaggtggcgccgagctgctggctgagggcggccggcggtggcggctgcagggactgaccagcagagggtttctataggcagctggggcctggagatgctagacttagcctgaagctcccagacctgcttctagaagatgtgttggaggtggtgtgaagaatggggaagtgagactttcattccactatttagggaaaaaaagccactagttagttatctctgagtgttcgaaagccaagtaaagccctacagcgaagcgcctgcagacctttagatccttcggtgcacagagctatgagctgttccacactgggacgttaatcatcccttctggttcttgacatttgttttgcaggtgacagaaaccgcataccctgtgacttctggactcttgctgtcagtgtgccccttcctcgtgctctggatgatgtcagagcaggacctggcggatgtggttcagattgcagtggaagacctgagccctgatcacccaggtacagccgtgagacagtcgatgcactgttgctctccctgtcttttcagtatcaaagccactctgccggacttcattccccagtaaagcagacacagcagagatgccagccctgtgtgaaaatttaaatcataggatgattgcagggctgcctgcatgtgtgcttgtgtacacacacacacacacacacacacacacacatccacacatacttatttaaaagagttctggccattgctctagatggctgctgtgtgttgccaaaggaggaggcaaggcagacacagagctgtaggtagcagtctcgtcttttctattgtgagtgagcacacagaggctggagaaatgcacaggcattcagtgagaaaaactgaactagtgacatgaaactattcatggcataaaagtcagtacaaatgctgagcacagaattctgggaaggtggctgtatcaggccagagcagtggctcagtggttaggagtacttcttctcttccagaggacctgggcttcttcccacattggacagcttccaaccacctataactccttctggcttttgagggcatcc

SEQ ID NO: 34363 - DNA, 1140 bp, Mus musculus
tcctaattttaaactgtttaaagaaaaaaatcaactgctttaaaaaataaaaaaaaaatgtctgtcctcggtaatagtcttagttaactacaatcagaaaggcttggttctaacagctgttgagttgtcaagcagtgcaaggtggcaaccccggaggcaacgcctgcctgtgactgggagctgcctgcacggctcctgggtgcatctgcactgtaccaacactcctgctccgtcatcaggctatgtctagccacagagagcaggaaggtaacttattcaccgtttgtataaaaatgcctgcgctggcccttgaggccttctggttagacaacacagtactggccttattagaatgcttgaagctgggctggccaggtggctcagtggttaagagtgccgactgctcttccgaaggtcccgagttcaaattccagcaaccacatggtggctcactaccatccgtaacgagatctgacgccctcttctggagtgtctgaggacagctacagtggacttatatatgaaaaaagaacgcttgaagcccaggagtataaaggatggctcaccaaaccactgcttccacagcaatgcagatgcttcagcaactactgctcctccaaatgtcttcagcgctaaagtgcctcactgccatccctacaagtacaactatgtgaaatcaaactcacagcatacctgcaggagagacaagccaggcacaacagaattaagtccatttccatctctggaagccgaatgtcactgctgggtgaaaccccatccctgtaacctcacaaacatttttatcatgattaagctttggcatcaaagaaaacaggccttcttttctttttttcttgaatttgctcattcaggtgcggaatctgaaactctggaccccacgccagctgaggctggcagtgttccatggccttctggaccccacgccagctgaggctggcagtgttccatggccttctggaccccatgccagctgaggcgggcagtgttccgtggccttctgtctgccaaggagcacaaacaattagaagagcacccttggagcccagcagccttagccgtgtccagccgggtgtcagatgaccagcaggggacatagatttccagcagaaggccttgggt

SEQ ID NO: 34364 - DNA, 1123 bp, Mus musculus
agaacaaaaattgagattatgcgctaaagatgctcacaaaaaggggattccaggggattttcaaggctaggaatgtaggcccagatggaagttctccagcaagagaccactggaccacttggaacagaaaaggatcttaagtgatctatataaaattgactctctaagattaaagacatcaaaacagaggaaaacatgactatctcggggcgggcaagaagagaagtaaattattttaaagtattcttcattgccttgaagaaaacagaaagttccgtgttcagccttcagtatctgagagctgtatagagacctgtcactgttggtacacaatgcttgctcgcatggctggtagccctggccttgtccttgtaggacatgacccagcagcttgagaaaggtctgttcttagatgttctctgaggcattgctaaagaactttgcttgccacaggctctgagccatgttgtgtgttctctgaccacatggaattgaggtagattttaatgaggaaaaaacttcccataggtcaagtaaaaaaaacttggattcatgaagatgacgtcattgaatgacatatgtcaaaatgtggactgcatcaggtgtgctgaggaacagctgcagacaagcttggggtggagaattacgtcgtctccatccaaaggacaaaagcagtgttggtgctcagggaggattacagatagaggagttccatgtataacaatgttcagttgatgaagtcctggtaccagaagggtgaaggctacaagctgccattgtgggcgtctccacagacgccctcaggcagtagaagatgaggttctcccagatctgtatggatggatcgggaaatgacagatgggatgacatgctgcctggacaccagactcgggtgggggcagcaggagaaggaaggaggaaagaagaaaagaaagattgttgttgcttctgaatgtctgagctgtctcagagcaagaacaggctgtgcttggtggcaacaagtgatgtgtcaccctaccccaggttgagtcaggttcagtcatgcatacttggtatattttgaaagtcatgtgacttaactctggtaataggaccatgtggttatcttaagcagaaaaatagt

SEQ ID NO: 34365 - DNA, 1132 bp, Mus musculus
gttacagtccctctgtgtcccaaacctccccagttctatgtagtcctttggaaggaactgggtggtctatcgattcctttgctgaagctggccctggaggaatccctagaaagaggacccactgtgatacctgacagcagtctccagccctccagccctgtttacttttgctcctttgagccacttgctcaagaccaggcagggtgggggctgggggaaggtgacagggctggtgtgtttgcaagtctcctgactttaagggctggtgataggaggcgtatgacactgggggcaccaagctcctgggacaagtctccacatgccatagcaaggtggccatgcaaggttacagattgacttccaggccatagctggatttgaaacagccatcactcttgcaaacaaagtcatttcaaagatgacaactccgactctctccttctaatctatccttcctcccagttagaattcagccgcgagctgagggaagcccagcttggggctcaacctggggaaagtttgtgtagagttcagctctggaccagagtggtctgtggcccatcaggcccagggtgtgtccctgctgtgcctcagggacacataagccctcccggctcaatcccctcacctgctgggcccaaatccacaggccctgggctaccacctctctactcccgcctccttagactcatggactgttctggctccaagtcctctggaccttgcatgcattcctttcttgtgggctcccctctctggcacctcaggcccatcgtggtcaccctcagcctgcagagccccgagcagggccacctgttttgtgcacttacgggctttggtcacatgctctctgaagacactttcctggcatgctccttgggttttataatctacatagggctacaacattccctctgcccagaggagagtactgagaccacaccgtggggtcactgcaaagctggaccctgggcagtgtgtggctatcagagctgcaaacatagcattgcctgtctgatgcagatgtaatagaaaatcagccacttagggggcttatgaacttgctcatacctccctgtgaggaaaaccaggctgtctagtggctgacaagttggaggccacaatgtctctc

SEQ ID NO: 34366 - DNA, 1183 bp, Mus musculus
cccagcagccaaacttcctccaggtaagcagccatactggagcctcactggcccttggataagtgaaggggggaggggcctgtccataggcatcacatggtgtccttgtcaaccctagaaccccaatcccttctgcctaccacatcctacctagggcctgccctgggcctgacatgcagccctgtgttcttgtagacagcctggcaggctttcaacagcactcgctgatgcacagccccctggttcccgctgacaaggcacccaccccatcctcaggactggacagtaaggccgaagtcaccaacggagagaccagagtgcccccccaaaatgggggcagcagtgagtcccctgcagcccccaggaccatcaaggtggaggctgcagaggagcctgaagccacccgtgcctccggtccgggagagccaggtccccaggctccgtctcggacaccttcaccacacagccccaatccagtcagggtgaagacagaactgtccagccccacgcctggctctagcccagggccgggagagctaacaatggccgggacactctttctgccacaatatgtgttcagtccggacgcgggcacaaccaccgtccctacggcgccacaggcctcggagatcctggccaagatgtccgagttggtgcacaaccggctacagcagggtgcagggagctccggcgcagcgggaacacccactggcctcttctcggggactaagggtgccacgtgctttgagtgcgagatcacctttaacaatatcaacaacttctatgtgcacaagcgcctctactgctcgggccgccgcgcgcccgaggacccgcccactgtgcgcagacccaaagcggccaccggcccggcccgcgcgcccgcaggtgccgccgcagagccagacccgtcacgctcgtcgccggggcccgggccacgagaggaagaggcgagtggcacgactactccggaggccgaggccgcgggccggggcagcgagggcagccagagcccgggcagctccgtagacgacgcagaggacgatccgagccgcacgctgtgcgaggcctgcaacatccggtttagccgccacgaaacctacactgtgcacaagcgctactactgcgcctcgcgccacgacccgccgccgcgccggccacccgcacccacgaccgcaccgggacc

SEQ ID NO: 34367 - DNA, 1232 bp, Mus musculus
ctccagagcttacagcagtaagaaagatgggtgacctaacacatagacaccggctgtctgctcgagtcatacaggtcactcagggagggaaggcctctcagatcctgtgggaaaggctgtgggttgctgacagaggaactacacactctgctgaccagtcacccagctctcagagaacttcccttagtgacagaactcatgtgtgcgtgctgggtgccaggagctgtgtctgcacctcaggggaaggaactccgaatggagtctgggcggaacacaccagaggacacagccaggaacacagccatgggagggaacactgggtcagctggaaaactcacactctggctttgtcccgcactcaaactagtctctggttccctcctcctgggtgcgcccagtcctgctctctgcatggcactgtgggttggtctgcagggctcctgatcatctctgtctttgaaagtgcttcttctctatggagcctcgctgtctcactgcacgagagaacagcggctcagcacatcccagtgctgcaggagtaaacgaacgccaccttgtcactgccccttctctgtccattggcccacaggtcatcgtcacggtcttcatcctactctggctctggctcgtcccgctcccgctcccgctcctcctcctacagctcctattctagccgctcttccagacacagctcgttctcaggcagccgatccaggtaagtcctgcctgctgacctctagcaggctcagtgctcacgggtgtgtggggtgggtcaagtgtcgtgtctctcgcaggttcctgggtgcctgcttccaaaatggtgtcagtaccctgcatcctgaggagccaacactgcaggggctggcctaggacctgcccctcaggtctctgttgagcggcaggtaggaatgtacagtgtccagcccagaagccctgggagagttaggcaagtttctttctgtgatagtgtgtctgccagtggcaggtgcccttcacctcagtcaggctggcttgggggtagggcggtgctcagtggtccgtctgtccctcaactgagctgatgctccatcgtgtcccttccctgcgctgctgtcactgctctttagaaagagcaaaactttggcgtggtgttcagtaaagcggaagtgtcagtcctcgtcattacctgggacacataaagacacgcaacccactgctttgggacatgttaccactaagcatttgtgtgggaa

SEQ ID NO: 34368 - DNA, 1773 bp, Mus musculus
aaagctcctgctgccccagcggacaggtaagtctctgcctacttccatgacaggcttgtcctggacaattgatcggctttaggagtatgggagacatggaagacaggaaggaaggacagacagcagtctcagcccactcctctttaacccctcagactagtcgggcacaactgcatattactgtcttgttgaagaaccctagacaagggccagtggttctcagggtgcctatatagtggggcaaataggagaggctgcgggctagcctacaccctccttgtctccccacagaagaagtggggagccctgggcacttacccaagggcaggctcttcgtcacctctgcctcacaccttctcaatcctacaggaagcgtccactgtcaccccagtctaagggctccagcaaggtcaccagcgtgcctggcaaagccacagatactgccacagcaggcaccaagtcagggaaggccagcacattgtcacggcgagaggagctccttaaacagctcaaagcggttgaggacgccatcgctcgcaagcgggccaagatccccgggaaagtgtagtggcccagctcactcctggagtagactcttcatgtttttataaagagtagggtaagcgcagccattttggattttccagtcaatgtcttattttggctgtgattctttttaaaaattaaaaaagaaaaaaaaagtttctcagctggaaaagaagccacacacaagatgaagatgaggctgagtcccaacctccccaccagactgaaccagcttcttccagaatagagtctccatggacagacggacagatcagcactgaacaggggacaccaactctgtgtaacttaagagcttcaggcacgcaggggctggcctcacccttctgcctccgtcctcacttctcccaggtgacctcctgggctgcagttttcagcagcttcctctggggacaggaaagccgaacacttctggactacaggcaccatccctccctccctggatcagaagtatatatatacttgcctaaagaagaatatatatatatattcttgcctaaagtctgattgggaaacatttcctgtcttttattttaagcatcaaattgttttagttgattaaaaaggaaaaaaacagaaaagacaaaaaaataataataataataaaggccaggggtattgttggggtgtctgtccaatgtggagggtcttttttgagctatctcctaaaataaaatattttgataagcactttctggtcctggtaatgtctgcttgggcctcggctgcctctctcccgggcatccatgccttggctcaaaatgggccaagcaccctaggagagcagatgctattacccgcaggagccaacgggcacagactgcctgtcattaccccccccccccggagtgttaagcctcagttttcccatcctgtggttgaggaaagagcagcccagctcttagcgctgactcggagtgatttaggggctacctccctcccgtgagccctggctgagcagggactgtagacacgattgcctgaccccagctataaagctgcttgtcattcttgctgtgaagctgttgcctggccctcacccaggcacatgttcaggcccaggctatgcaaagcctagctaagattgcaggacttgactgcggtgtccctccatggccttcattattcctgtgagaggagcacttgattaagatccagtcagtgcagacaggtcaataccacagcgtcttcctaggccaccagtcctgg

SEQ ID NO: 34369 - DNA, 1191 bp, Mus musculus
agtggtcatttagggacaactcgtagaggagagcgggggcgggatgtgagggttatgtactctggacagaaagatgataaaaagcagtcacttgccaggagaggtagatgttggggtccctgggaatctgctctcaggatgtaacccaccacaagcacgccagcatccccgcgtctcctgatcctgctcaaagaggcttgctctgggtccctcctttcacacgagatgagggtcactaagatccccacaatctagcccggaatggaaccccaggcagcttgagaggctcatcctgcgcaagctggtgtggacttaccacgaagggacccacccgtgtctcaccaccccccccaatctaatcctgccttagagtctctgacctgtaaagtctccggagcagcggctactgccgcaccccatgactggacactgatttttctccccccaggtcggaccaggacctcaagtcctagacgacactcatgatcatctgctaggccaggatggactgccacaacgggacctttgacctcttccacgtccagtgccatttggagaaaggggttgcccactggaactcgggagctggcctgctggtcagcctctcctgaagggctgcttgatgatcgattatactgggggatgtcgagtgtgatgggcagccatctaggcgatcacgggaacccctctcaagtgcctccggttccccgctggtttctgaagggctagctgacccactcgatggaccttccagcactccagacagctgctcatcagggatggggagtcggtgcctcccccctcccccaagatgctctgagggcctcagtaaccatctaagcgtgatggctcagacagcggtgcctctctgctgagactcaggccacagtttctttataaagcctcctggtgagggtaggggctgtcgagcccacaggtagggtccattgtgtgtgtgggtgcctcatgagggtgcagtcagtggacctgaggaccacaggaataaagtgtgctgttcctgcctgcccgtgtgggctgtgctttcttctttcttcctaaaccagcgctttagggtctctggtctactgatctgctgggtcctacccgccattgagttcagtcttgtttccctatgtagtggagaggtgggggctgaagtgggtcctgccaggaacacttcccactgcccac

SEQ ID NO: 34370 - DNA, 1206 bp, Mus musculus
gatgtactgcatccgagatgggcattttctctcccaagctccacacaagcaagaattttgtcgttttttttttttttttttccgtagctgaaatggatcggcacatttctgtgtcattcttacggtacagtttagtgacctttagtatatttacttgatacaaccgtcacctctgtttccagaactaaccatccattctccaacagaaacagatacaacttcctggttccacctcctgtaaaatcgtggctgttgaatggcttagagttccgaagatgtgcgagcacacgatacccacccaggccaccagttctgttcctaggagtgtggatggtacctaatcctttcacagccttctggctgacattttctacacagtgaatgggagttgctttttttttccatgctgctttttctacgtctgagtttcttggacactttccagctgcacaccaaaacagcttccttgtttgtctagaccgtcggtaattgactcaagccgtcccccttggaagccatgcaccggactttccttgcattgtgtataagagtgcttgcgtagattcctagaagtggatgaaccagccaagcagctatgtgcctggggcgatgttgatagctgttggccggctgccatcttggaagctggatcgattgctcagctctctctgctagagcgagagtgtgtgaataggccttctgcgccacagtagacagcctgtcagtcaggctgacagctgaccaatgggagttcactattgtttccttgtggcttgtgagatggctcgtattttcaatttctcttgcaataacttttctgcttcatacacacacacacacacacacacacacacacacacacacacaccagcagaaaggtggtgtgtttaatcccaacactcaggaggcagaggtcaggtggatttctgtaaattccagggcagcctgatctacagagtaagttccagggctacacagaaaccatgtcttgaaaaaacctaaataaataaacccaaagaagaagaaggggggaggatgtctctgtgagttcaaggccagccagaagttcactgtgagatcctgtctctaaaaaataaaaacaataagttaaagaaagaagagaacaattaatttactccggaatgaatagtttcacccatgggtatttttgtacattatcaggtacagagaccaaggtcacctcat

SEQ ID NO: 34371 - DNA, 1907 bp, Mus musculus
caacttcctgcagcatctgctgcaccggcacaagttctcctacgacaccttcgtggtaggcattccctgctgggccgtgggagtgctgagcgagaggccaccaggcacccaaacctgtcaagggcttgggcatgcacgaggctagctgctgagtcccttggtgcccactcgggccccctgaggctctgtagcagctgccgagatgagtccctggtaaggtgtttccttcaaggagactctgaagggaagcaagaagggttttctcaggagcccctgcccactcctaactaggtcagaagctcccacccccatcccatcatctgcagcctctagccacgtagggttggcttgctttttcctggtccccaaggttggagatctcatggccttgacaacttccatctaagaaaacccagttcttgtccaagaacagtgggttaaaggctcctactgcctgccaagcttgacaacttgagttcaatccctggtacccatgtgacaaatgagaaagtcctctgtcctgcccacactatggcacacacatgtctgtacatatacacaccaaaaactaagctgtagaagaaagattcttaccatctgaaacccgcgcctcatgatcacaaacctgcagagcactggtatgcacacgatccaaggctacctttggggacacatgtaagaactggggcaggcattctgtgaaggaggcttgggacacactgtgacagtgggtgtttgggagccatcctgctcctccctcatgcatctctgcttttccccaggactacagcatcgacgaagaagctgccttccaggctgccctggctctgtccctctctgagaactgaggcacagcctggccacccgcctcttatggggcagaagacacactcccgctttaagggatagggctgttgcccttctgccctggcacctgcacaggagtgcgcctcaccaggccaagtggaatgttacacaaggagagttggtctcagaatccccaggctgggatcctggctagctggccccttgtcatcaagcaggaccaccaggtcctggccagcagcactgggccctcggtgcttcaaggggcaagtgctggccattgggtcagagcaggtggctgcctttcccagacttggtgtctgtgtgtggagaaggatgaggtgccctaagctgtgcccagcagggccaggggaagaggtgcccagccaaggctgccagcccacccggtcggtccctagcttcgcttccaccgtgagcatttggtactggcttttgtgatatttaggaaccctgcgtttttctatcttatcctgtgtgataatcttttcatgttttctagagcaaagacaaagcagttactcttctatcgcaatacccaggtttgactaggaagagcagtatttttatggagcatttacaaagttatatttttaaaaaaaaaaatcaaaaacatgtgggatgagtgtagagggaggagcgtgggtgtggccagggctttgtctgtgtgacaggtggcgtccccaagccatgtgatctctgaggaggtggctcctgtctggtgctttctcttgatgacccagaagaaaccctagcaccggcgggccacttgctgtggctgctcccagcagatgtaggacagcccagacagaatggagtccttctgccctgccctgtcaccttccagagccaaccgcatccctcctcaggcagggacttcccttaccagtggtagagccctcaagggccagagagacctgcttggtggcaggtcaggcaagaaaacatttgtcagcatcttattctgttcatggcataaattgctgtcttttcaaaagagttttaaataaagtgtttccaagcacccacgcgagccttggtcctgggttttactgcaccagtgt

SEQ ID NO: 34372 - DNA, 1194 bp, Mus musculus
aacctaggccctggcgcgtgagcctggcgcttcctccgccagctcgggccgggaagcgcgaccctgactcccccaagcccgccatggtgcgagaattctgccacatatgttcttgttctctcaaagccgggagcagaaatgtgtgaagtgcgcagaaggcctgccggtggtggtgatacgagcgggagatgccttctgcaggtgagatctgggcagccgtccccaccccaccccacccccacccccgcacgccccttttccaggcttgcttgttttcttgtaaaggcgcggtaacttgtaagtgcttagccctaaccgtaaatagtggtgggaaccactggtgacgacccttgtcatctaaactaggcacacccgtcaattcaacacttcagagtccatgacaggagaattacctccgatctgaggccagcttgggctgcagagatgaccctgtcaaacaaaatcccacagtctcctgcgcaggtgcagccagcctccctttgcttctgtgttacagggtttgtttcaaggcattctacgttcacaaattcagagccatgcttgggaagaaccgggtcatctttcctggggagaaggtacgatgtgtggtgcctgggcgctcggctgtcagccctgctgtcttccgtttatgttcgtttcttcagctggcctactgtccctggacattgagggtagacttggtgtctggggctgtccaagaagtggacaagacatgctcatattgcggatgcatgcctccgtgctgatgctgcccttcccacccccaggtgctcctgtcctggtctgggggcccttcgtccagctccatggtctggcaagtgcttgaggtacatctacaccatcttctgggcgtaagcttctggattgaattagcaggggcctccttcctcagcctatactatggaagtttttggttaacactagacagtaccccaccccaccccaactgggacacctttaggatgtcccatatatattcagcaggtgtgcagtccagacacatgccctacacagggtcccaggctacatccctattgagctttatttgttaggacacagtttcaaagattggccaatcatgacaaagagcagagagaagcatttgccaaaaacaacgggagaagcagcataggtagaagggagtggggcagatggaacgggactcaagctaag

SEQ ID NO: 34373 - DNA, 1186 bp, Mus musculus
catcttcagtgacaaggtcagcccacctagcctgggcttcctggccggctacgggtgagtactgcagagggatctccgagagccccaagggttctgagtggtcccggctcacatgcccgcctctcccgacaggattgtggggctgtacgtctccatcgtgctggtggttggcaagtttgtgcggggcttcttcagcgagatctctcactccatcatgttcgaggaactgccgtgtgtggaccgcatcctcaagctgtgccaggacatcttcttggtgcgcgagacccgggagctggagctggaggaggagctatacgccaagctcatcttcctgtaccgatctccagagaccatgattaagtggacacgtgagagggagtaggagcccaggccctgggcaccgggaatgaaggagctgcctcagggcagcatgaccaccagggctggcagagctccttgggttggagtgtagctgcccaaggcacgagctgtgacaggtcctggcctacgtaagccctgatgatgctgctgtcaaagggacgctgtgtccctacccattgcgtccctgccagttggtctgggggcctggctctcccttcccacaagtactgtagggttttctaagtaaaacatttttatttatacaaacggactgtcacagaccaatccttttgtcctcgccttcctgcttcatggctccgcacgactcagctgtcttcctcctcatctgtaatcagatactcctggatttcctcagagaccgagcccctgtgggagagtgcagtgagaactaggccaggggtgtccccagcctccccaaagcataggcgttacctctggctgcggagctgagcctcagcaaggacgtagggtggcaatgggtccaaggagggctacaagagatggagtgtgagaagccacgggaccgtggggatagcttacagggacagatggacagccactcaccaggtccttcatgttcactcggcagctataacataactgctctgtgatgcaggcccgtgcatcccccctgtggaagcagaagtagatttatgtgcctggtctcactctgaactgtttaaggacactgccccctccacccctgctcacggggcaggacacaggcagggtctcacctcttgccaacttccctatggcagctctgggcctgaccctcccctgc

SEQ ID NO: 34374 - DNA, 1204 bp, Mus musculus
cacagacattgcatcctcgctgtcagatgaccaggtgccacaggccttcctgttcatgctgctggtccagtttggcaccatggtcatcgaccgtgccctctacctgcgcaagactgtcctgggaaagctggcctttcaggtggtcctggtggtggcgattcacatctggatgttctttatcttaccggctgtcactgagaggtgggtggtgtgaggctctgcacgttggggcctcagtctgtcctgaggtactgtactctctgggtgtggcacagctccggttggcctcctgaaccgtttgtcatgtctccctgacaccctgtcctgtcccattcaggatgttcagccagaatgcggtggcacagctgtggtacttcgtcaagtgcatttactttgccctgtccgcctaccagatccgctgtggctaccccacccgtatcttgggcaacttcctcaccaagaaatacaaccatctaaacctcttccttttccaggggtgagtgtggtctgcctagggatcgtcaggagcagtcagaagccattgcaggctggccctgctgatgcaaccctggccttggcaggttccgtctagtgccgttcctggtggagctgcgggccgtcatggactgggtgtggaccgacaccacgctgtccctgtccaactggatgtgtgtggaagacatctatgccaacatctttatcatcaagtgcagccgagagacagagaaggtgccagggcagagaggacggatgggtacttgttgggaattcacaatctgcatgcacagcagctcaaagaagggagctttctagaactcttgtggacagcggacttgccttgtgcgccactgggtttgtgtggtagggactattagctgtttgttaccagaattgtttcgtggtttagcatactcacagacaggtgttcatcactgcagccagctttaggccatcacctaatgtcctaatgcccacagaggacatttaggacatgtcctctttattgctccccatctcctctccacccttggtgatctgtagtctccttgacgtgagtttgcctgtttacacagaaccatttcataccaggcttcctcgcctcagcggtgatcctccacctagcaatgctcccaagatccttccttgtagcaggtcaatactcctgcttagagccacataagcgatcctgtgcagtgcaggaccc

SEQ ID NO: 34375 - DNA, 1156 bp, Mus musculus
tctgttacttcatcatcatccttaaccacatggtgacagcctcggctgcctccctggtgctgcccgtgcttgtgttcctgtgggccatgctgaccatcccgaggcctagcaagcgcttttggatgacagctatcgtcttcactgaggtgggtagcagcttgtagggtaggggctgggccacatggcccatggctgagtgccctgtcctgcaggtcatggtggtcaccaaatacctgttccagttcggcttcttcccctggaacagctacgttgtgctgcggcgctatgagaacaagccctacttccctccgcgaatcctgggccttgagaaaacggacagctacatcaagtatgacctggtgcagctcatggccctcttcttccaccgctcgcagctactggtgagcctgccagccagtgcaggggtggcagggctggcttggcaactccgggcattcctgagcccaatcgcctgcctctggtctaagcatgacctgacctgggtcaggctcctcaccaacccgtatcctccatagtgttatggcctctgggaccatgaggaggatcgctatcccaaggaccattgcaggagtagtgtgaaggaccgggaggccaaggaagagccagaagctaagctggaatcgcagtctgagacaggcactgggcatcccaaggagccagtgttggccggtactcccagggaccacatccaagggaaaggaagtattagatccaaggatgttatccaagatcccccagaggaccttaagccccggcacacgaggcacatcagcatacgcttcaggaggcgcaaggagactccaggacccaaaggaacagcagtcatgggtgagagcccagactagacccctgccatgttcctgggagggaaggagacacagatgacccctcagttggagatggccagcctagtacagggataacgcacttgggagcacaccattgctcagtgctcttcctgtatccatccttggagctgtccctatgcctgggatgagtatctatgggctgaagtcttggggccaccccgagagaggatacagtagcagttgctcctcaatagtgtctgccgggagtttcctgtgctgtccatgaagtggggtgaggtcagcctatcagggtggacacccagtcc

SEQ ID NO: 34376 - DNA, 1202 bp, Mus musculus
gctctgccccctccatcctgagccccgccccctccatcctgagctctgccccctccatcctgagctctgccccctccatcctgagctctgcccactccatcctgagctccgccccctccatcctgagctctgcccctctccatcctgagctccggcccctccatactgagctccggcccctccaccctgaactccacccctccatcctgagctccacccccttttactgtgtcctccccccttttactcccccctccttctaaaccccactaagtttccctttccttcctaagcctcaccccttatcacttctgtctatctcttcgccaaggcctatcccccctcactgaaccccacctccacaggtacggccagcaagtggggcctggtggctgaccggctgctggacctagcggccagcttctcggctgtcctcacccgaatccaggtgttcgttcggcgcttgctagaacttcacgtcttcaagctggtggccctctacactgtctgggtggccctgaaagaagtgagtgtcccaacctgggctgtttcctcctctgaagcagggtctctcctgccctggctttgttggctgctctagagccaggcctgctcggttacggcagtcgtcctggagtctagtcccgatgctgcctggtctgcccactgccatctgtgctccacaggtgtctgtgatgaacctgctgctggtggtgctatgggccttcgccttgccctatccgcgcttccggcccatggcttcctgcctgtccaccgtgtggacctgtatcatcattgtatgcaagatgctctatcagctcaagattgtcaacccgcatgagtactccagcaactgcactgaggtacaggcctggaggcgtccctagggcccggggaccacctgagaagttgtcccagtgattcctcatggaatgtggacggggacagtgactcctgcagtaagaatagaggggccctcaggacagctgtgcctagattcacctggcttcattctttctatttgggccttgacctgtccccttccccatcaaggtggccctgtgaacctccggtaggacagctgttgtctaccctggacccaacctgctgcttcagctgtgagatgggcttaagatagcacctacaggggctagagagatggctcaatggttaagagcagtgactgctcttccagaggtcct

SEQ ID NO: 34377 - DNA, 1094 bp, Mus musculus
tccttctgcgtcagttcgtgaaggagaagctgctgaagaagcaaaaggtgcctgcggcgcttttggaggtcacggtggccgacactggtgagtggcatgcgggagggtggaacctccacctgcactgtcccctctctgtctaggctgtcacttcaccttctgtcccactctgcagagcccacacagacccagacgctgctgcggagcctgggggagctggtcaccggcatctacgtcaaatactggatctatgtgtgcgccggcatgttcattgtggtcagcttcgccggccgcctggtggtctacaaaatcgtctacatgttcctcttcctgctgtgcctcaccttgttccaggtgacctagggaatgggcaggtagggctcgtgggtggggctctgtccctcacctgccctgctcaccagccaccccacccccatccttctgcaggtctactacaccctgtggaggaagctgctgcgtgtcttctggtggctcgtggtggcctatacaatgctcgtgctcatcgctgtgtacaccttccagttccaggacttccccacctattggcgcaacctcacgggcttcacggacgagcagtgagtagggtaccttaggggcagtaccgctgagcgctcttcagggggcggtagaggcaccttcctcgtcccgtcccatgctcagactctccgatctggttcaggagggctactggggcagggcagagtaaagggctgatggtgctcgctctcttctgccaggttgggcgacctgggcctggagcagttcagtgtgtcggagctcttttccagtatcctcatccctggcttcttcctgctggcctgcatcctgcagctgcactacttccacagaccgttcatgcagctcactgacctggagcacgtgccgccaccaggcacccgccaccctcgatgggctcacaggtgttctgccttcgagggccacgggtgttttttggtctgtgggaactggggttgacgctgggggctgtgtcatagagttagccgaccgtcctgcgcttgggcgggagccgtgaggcagccttaagccatgtagacttggcctagagtttacag

SEQ ID NO: 34378 - DNA, 1095 bp, Mus musculus
tggaccagagctatgtgtgtgccctgattgccatgatggtaaggaacagcccctcccccaagccccccccctcccagggaggagcagtccctcccctcctccccactccctggccactgcagtcttctcatagaatgcagggaggtggggtgtagttcatctcaaaacctgaggtccagttaccagtaacagtgctggaactgcccatgtaagtcaccaacatcccgtaactgtgcagtgggtgtgtgtacatgttgtgtgtgggctacctcatgggaggccttactgttgggggctgaagctctggccgagtgtcccatgcagtccctgctgaccgaccctggctgtgcctgcaggtgtggagcatcatgtaccacagctggctgaccttcgtcctgctgctctgggcctgcctcatctggacggtgcgtagccgccaccagctggctatgctctgctcgccctgcatcctgctgtatgggctgacgctctgctgcctgaggtacgtgtgggccatggaacttcctgagctgcccaccaccctgggccctgtcagcctgcaccagttgggactggaacacacacgctacccttgcctggacctcggtgccatggtgagtatcactggccgtatctgggtagcggtaggatttctccctgggaacccagtgctctgctcgttggccattggtttggttgggtagagattgaaggagagtgtatctgaagtcaacagtgggttcctgcgagtccaccctagaatataggcgttgtgaccgagtatgtggcatgctgccgcaatgtccttgatgctgtgagtgtctgtgtgtattctgactgcccgacagggctccactgtgtggcactgaatgtctgtgactcaaatctggtccatttgactcttgggtcacccaagtatctctgcatgaggcaggtgtggtgttgcctgcccactgtaacctggtggattttaatacatctcaagtgagactatatgtgtactagtgtatctatctgtatgcatctgtatgcatgtgagtgtaaacttgtgtttaccaagtctgggcaaagtatgtaagatcgggggcctggggc

SEQ ID NO: 34379 - DNA, 1016 bp, Mus musculus
atggtggctcacaaccatctgtaatgagatctaatgccctcttctgtatctgaagacagtgacagtggactcacatacataacataaataaataaatctttttaaaaacccaaaaaattctttccctctatcccaaaaaggcctctccccgggaacctaacaaaactgacacaggatcttcagggacagatttgggacctgggtggctatcttgtcttttagggcatcctgtccaagatggtgcaaaatgatatattccagaatagctggggcatcctatgcctggcctggcagagttttgtgttttagagtagcatggggctgtggggttgcccactcagtgagaagggagagaaaggctggtttcaggctgtgggcaacatcagagaggcagctgtgggacaggcctcatctcttacttcagctaagcagatgaggctggagtggcctcggtggtgatgaccctgacgtcacttccccatgacttcagcaggatgatgacgatgacgatgatgacgacgatgaagacatagatgctgccccagccgtggggctgaagggagcccctgccctggcaaccaaacgcaggctgtggctggcctcccgcttccgggtcacggcccactggctgctgatgacctctggacggacgctggtcattgtgttgctggccctggcaggtaccccggggcaggggctggagtcttgactctgactggcatggcagtggcggcggtggcggtggcggcggggtgactcagcttcccgatgggtcaggccaggagtgacgcagagtgcctgtgcccaccccatcccctgtaggcatagcccacccttcggccttctccagcgtctacctggtggtgttcctggccatctgcacctggtggtcctgtcactttcctctcagccccctgggctttaacaccctctgtgtcatggtgagctgttttggtgccggccatctcatttgcctatactgctatcagacaccatttatccaggacatgttaccc

SEQ ID NO: 34380 - DNA, 1147 bp, Mus musculus
actgctagaaccttctggcatgggacctctggggaggataataaaaaggagtgggtgtcaccaaggaagctagcccttgggggccaaggtcagttctgaggctattccacacatttggactgtgcccaggaaactacataggacagacatactggcagtggtagcccccagaagagaggatcagtgtgatcctttggggctgtccttgtggaagagacctgtggctctgaggttttcaatgatggtggcctcagcagccttgtggcttgaattgacagttctgctacagtgggttgattgcccacaggcaaagagctaaaggctaactccagtctctgtataggtctcagagggcagatgcaaggaccagagccctgtgtcacctctgtctgtctgcagccaagggcttccctgctgggtgggctagctggggcagttggaggctgagcatggccatgggacatgtacagcatggccctgtgtgacctgggtcccatagtttgatggctaactcctggccggtgtctttcccatgagtgatcagtggaacaagatctttgggggctgctactcagtggggcctgaggttggggatctatcctgtttgctgtcctgggactcactctgtagaacaggctggcctcaaacttagaaatccatctgcctctgcctctgcctctgcctctgcctctgccttccaagtgctgggattaaaggcatgctccaccattgcctagcggcttctttcccgtaacactctaaatggaggcagccagccggcaattcacttttttggaggcatttggccccatcgcccaggccccttctctgggataccaccctcctcgtgacttcatttccagcctccacgcaggggcaggtgagcatcactgtagtcaataatggtttcttgtttttctgtttgcttcttcttgttcccaagacctagcagtgatatccctctatgctaactaagttagaaaattcaattgtgtctcgtctgttcagggcttggacagtgttggtctttggggagcagggagcaaggccaatgtagtatctgggccagagttgcttcctaaacttccctaaacagtgtctggcagtcccttccccattctgggctgacattcttatttagaaacca

SEQ ID NO: 34381 - DNA, 1205 bp, Mus musculus
cactttttggagttcatcagttggcttgattgaccagcaggctctgttgctgtttctacagaatgctacctaccacacacagcgtttcatacctgcaccaatcactgtacgtaatctaagtgtgtgtatgtgtatgaacacaggtccgtgcgtgtcacagcatgctcgtggaagtcaaagggcaagcttgggtgttggccctcatcttctaccttatttggcacagggtttctctgttaatccctgctgcttttgccaaccacctggcctgaccgcttctagccagtctctcctctctccctcccatctcctggtagaggtgcgctgggattacaactggcttttgcacaattctgggaatccaaactcgggtcaccaggcttctgtggcaagccaccaagacgcgtccttagcctggctttccatcttttcacgtgggttctggtgatctcagccgaggtccacgtgttcatgcggcacatgctcttggctcccgacacgggcttttgatcactgcccctcacgtgcttggttcagtgctggccattcccggtatgtgaggtcgaaccagtgtcctcagaggcaggacctgtcacatcagggatgttagataggagaaagctctcaggggcctgtggatgaagggactggtgggtagtcagctgggtagacaggtgggcaggatcgacaagccagtggaaagctgggtagacatctacctgaccggaagcagcgagtgtgagggagggtgcagcctctgtgagactaggctggacgtggccctggttgggctgagaaatagagccctggaaagcagagggatttcagaaagctttgcctccacaaatgcacttcccccctgcctcttgggccaaagaagatcgatttttttttttaatgtatcattgttgaaaacttcagatttgatttaggagagctgagccttgcatggtagccaatgtatgtcaggaagaagacagcaccctgactccagagaggcccttgggagccaagagaagtgcagtcgtggtcaacaccctgccctccccactaccaccaccctctccacccctgctgccaggctccttgaagcagcaggtgcccttggaagttgggctacatctcatgtccactgtgatcctggaagaagactgtgtcaggcaggggctgtgaagagggtacaagctgaattcagaagaagtcac

SEQ ID NO: 34382 - DNA, 1189 bp, Mus musculus
ggggagaggtaacatgtggtcagggaagtggacaggactgaccctggtggaggctctgcgagcggctcaccagacttgctccaggctctggagagctcacggtgtattaagggaagaactcccagtccgaggctaaatttgtcagtggtacacagtatacagggccaggaccagccccttcttcagcttcctgctgagggcgaagaccctctgagctccaagtggtctgtgaggagggtgtcaccttcaggagggacagttctgcgggccaactccctcccaaatgggatagggactattttctgcacccatgtacttcccagggccctgcccatgtgctacccggcctgtttacctgtgacagccagtagagatggctgcagataggtctggcttcctccctccagggaggagtgggtggggatggctgatacggaatggggcccaccctgtaccctgagttctctcctcttttgttgatagttgtcgcctgtgggtaggtcagctttgggtggcttcagtctcatacctccaagcgactcgcatagagtacagactgtgcctctgtgtgataggcattgtgggttgtttagggggggagactgtgagcagggtccccagttagttagctgactgactaactgggaccaacgcagcatctgctgggaagaggacctgtcacggtcggattgagtttctcctcgtgtcttctctgtctctggtctctgggctgtcctgagaagtttggggtgggaggcaagcatccctctgccagcttgtctctggtgccagcagtagctgtatcatccatccttgatctctttgcctgatgcagccctggttgagagccagggctcagcaccaagccatttcctgctggtcttctgggcattcactgccttcagcacctctgacctgctctgctaggagtggatactgtggagttgctccaagttagggagaagccgagagccgaggaaccacagtgccttgcgggccatgtccagctcgctgggcagtgggcatccctccctcccacctcctccgggcgtccatattcagccttacctcctgtttgttacctgtataacctacctcatctcagcctgtcccctcttgctctgcgacttcctcaaagtatgacaaggtcactgtgggctgagggaaacataaaagttgactagctgtt

SEQ ID NO: 34383 - DNA, 1146 bp, Mus musculus
tggggccacaaggttaaggcgaggacagacctttgggaggcgctgtggggtctgagtgggtggatggcctaaaccgtacctcagtctcctccctaccactatgcccttgtccctcacttgaaaaggacattgtcaactcctcctgcacgtggcttgttctaagtactgtgaacccctgtgcctgtctgtgactgtctgcctctccaagctgagggtgcagagctagtgtgtggagcaggtttctcatctctttctgatgctgccctcaggtagcattagatctgtggggactttgcaaatgggtagttttggggttctgggtcacagtgtcctctcctaccctgtggtctggtggtggtggtggtggggtcaaaccgtgtggtttgatagtctaatgggaatgcctctctttgacagtgtcgagaaagctcctgcctaccagcgcttccatgctctggctcagcctggtctcccaggccttgtcctaccctacaagtatcaggtgctagttgagatgttccgcagcatggacaccattgtgagcatgctccacaatcgctctgagactgtgacctttgccaaagtcaagcaaggtgttcaggagatgatgcgcaagtgagtggtgtgggggaggggacctagctgcccccagtgtctgtccggtgcccgcctgcctggtccctctcattctgccctctctcccataggcgctttgaagagcgcaatgtgggccagatcaaaaccgtgtatcccacgtcgtatcgcttccgccaggagtgcaatgtccccaccttcaaggacagcatcaagagatctgattaccagctcaccatcgagcccttgctgggccagggtgagtctttggcgaggccctgggccttctcgatcctcttggacttgcggctgggcagttggacgggttggggctcaccacaggtggtctttggcttacagaggctggcggtgccacccagctcacagccacgtgcctcctgcagcgccggcaagtcttccggcagaacctggtggaacgtgtcaaggaacagcacaaggtgagggcctgggtttctggaggctcaagcaggctcagtccctgctccgagtggacagtggccttaatcactctgctctctatgtagctgcttt

SEQ ID NO: 34384 - DNA, 2913 bp, Mus musculus
ctcttacagggacgacatttaattggggttggctcgcaggttcagaggttcagtccattatcatcgaggtgggagcatggcagcatccaggcaggcatgatgcaggaggagctgagagttctacatcttcatctgaaggccactagcagaatactggttgccaggcagctaggataaaggtcttaaagcccacgtccatagtgacaaacctaccccaacaaggccactccctgggccgagcatcacagtcccttgctatagttttctttaaatgtaagaagggctgatacctaccctataggctggagctggggcagagctgcctggaaccccaaaactggggagttcaggattacgtcaagatcccgagaggacgtttgtattctttagtcaaccatggccatgtgctagaaacatgcctctcttcatattatccctggtcgtgtctaggcacagaacagctaagttggtgttctggttggaaatactgaaatgagtatttcaaccttctttcctccaggtcttcctggcttcactgaacccccccatggcggtgccggacgaccagctgacccgctggcatccgcgcttcaatgtggacgaggtgcctgacattgagccagctgaactgccccagcctcctgtcacagagaagctcaccactgcccaggaagtgctggcccgtgcccggagcttgatgacacccaaggtgaggctctctgacttgtaacttcattcctttctcctcagggagtatggctgcctggccctggagggcggaggtaacagctgagtgccttcaggttaccagatacttcctcagctgagggcacaaagaaggtgtgctttgtacgcacacgtgcggctcatcgggctgtgtgtatatgctctggtggggctatgcaaagagcagccttcacgaggttggggattttatgaatcttttgtgacctctgacctgtgcctaccctgcagatggagaaggccctgagcaacctggccctgcgctcggctgagcccggtagccctgggacctctactccaccactcccggccactccgccagccaccccacctgctgcctctccgagcgccctgaagggtgtgtcccaagcactgctagagcgggtgagtcctgggtctcgggtagggtggacttggtgacaggagtgggctttccttgttgaccattggctgctgacccatccccatgcagataagggccaaggaggtccagaagcagctggcaaggatgacacggtgccccgagcaggagcttcgcctgcagcggttagagcgtctgccagagctggcccgcgtgctgcgcaatgtcttcgtgtctgagcggaagccggcactcactatggaggtggtctgtgcaaggatggtggacagttgccaaactgctctgagtccaggtttgtgcaaagcaaaacaagggtgagagggtgggcatggtcatgctcactgtgttcttggcaaggagctaggtctatttctgaccagggacagtttgtctgccatggtcttggggacccccaattctgccacttataggcctgctcaccaggctcggagcacgggtgtctttgcctctttgctgttcgttctcctggtgcttgagcacggtgtcccccatggctcttggctctgcttggatccactgtacatagcagtggataagccttgacaaaggcctattaatgggatgtcgggcacctgggtgcgtgagagcaaaccatctaggcttacacccacaatccacctgtgcaggggagatggagaaacatctggtgctcctggcagagttgctgccggactggctcagcctgcatcgcatccgcacggatacctacgtcaagctggacaaggctgttgacctggctggcctcactgcgaggctggcccaccacgtccacgccgaggggctgtgactttgagctccttgcctgtttctttcatcagtacacgacgcacttacgcctttaagcctcgccagtgtgggcagctatcgttgcccatggatctcataaagtgctggcattaagttgcttcctgaggctttggggcatcccagactcagctctaggggaagtagactctgaagagtagggtatgttggatggccattgcacaaactactcaagcattaggtatggtcaagacccaagatcaaggtccaggtggaagcctaggctggcatagccttgcttccccatgagacttaagaatcacacagaccttggactttcctgatttcacgggacgctgctctgagagtgaaattgggccttctgtaaatatgtgaagtgtggtttcttttcaaaccttatatggccctgcatgtgactgctagttttggcttttaataaagtcatgtaagatttaaataaaatactactgagatgaagctgaacctgtcaccgtaaaatctctttaaatgctgttgtgtgatgtggggcaatgggctatggacagacatcctggtcctggtgggtggtaattttcacatggacatggacagaaggcgttccatcatgtctcctggacccctggctcctgtcgaagttacagcccccacaggagaggcatgtggcttttagtcatgtagccaatgtcacaagcttctggcattctggctagactccttcccacagttacctagcaacagcaagatggcaaagcccactataaggggctgtttggcccctcctcgctctcttaagctctctggcttttttttctctttcccttcccccctctctccacgtggccatggcctgtccttctaccttctctttctccttgcctttctacaataaagctctaaaaccatagactgtctctgatcatgaaggcccaccgtgtttgaatgatgatcggataggctttctcctaatgagccacttttaa

SEQ ID NO: 34385 - DNA, 1606 bp, Mus musculus
ccctgagctgttcagaaggcaggtaggatccccaaggctgagatgatgagttgatggctacccagtagccatcaacgttcttctagccgtagtcagcaagacctagtgttcctagcaagtgttgacctcgcccatacttggcctctagattcccatgcccctcagctccatcccacaaccttccctccttaccctaacaggtctagactccaggggcttcctgtttggcccttccctagctcaggagctgggcgtgggctgtgtgctcatccggaaacaggggaagctgccgggccccactgtgtcagcctcctattctctggagtatgggaaggtaagcgagctgtgtgtagaggaagggcagggtcttatcacggctaccagtgtctaggagtaaatgtgggtgctcagagaggttgagacattgggtcaggtttacaccacccagaaacgctcgaggctagggaggtggccacttgttcgcgcctagactctgtcttacactacttcctgtctgcaggctgagctggaaatccagaaagatgccttggaacccgggcagagagtggtcattgtggatgacctcctggccacaggaggtaaagaaccaacccaagacaaacagacttcaaagggccagaccctgtcctgggtgctgactaagcaaagagcttgaacacctcctctttctctgtcccttccccccaggaaccatgtttgcggcctgtgacctgctgcaccagctccgggctgaagtggtggagtgtgtgagcctggtggagctgacctcgctgaagggcagggagaggctaggacctataccattcttctctctcctccagtatgactgaggagctggctagatggtcacacccctgctcccagcagcaccaggaactgcttggtggctcagcccaggcgcctaagtgacctttgtgagctaccggccgcccttttgtgagtgttatcactcattcctttggtcagctgatccgccgtgcctgtggacccctggatccttgtactttgtacacgtgccacacaccctggagcatagcagagctgtgctactggagatcaataaaccgttttgatatgcatgctgcttctcctcagtttgttgcatgggtcacattccagggcctccagagtgacactacagggacaagggggctcaggtgggaacccataggctcagctttgtattgaagccacaacccctactagggaagcagatgttatctctgtcagtctctgaggcagctgactacataaacaggtttattgcttcactgttctaggctgttattccattaggatggacgaggatgaaagcagtgacccacagccactatatttttttctgttgtttgtcgagatggggtttcttaatataaccagccctggctattctggacttgatttgtagcccaggctggcctcaaacttaagaggtccactgcctctgcttcttgagtgctgggatcaaaagtacgcaccgcaacacccagttcacagtcactatctcaaaaaagctattttgttgcagggcatggtgtatagacctttaatcctagtgccttgaaggtaggcaggctgcttaaaa

SEQ ID NO: 34386 - DNA, 1227 bp, Mus musculus
ctgcaagtgcctgggagaccttgtccttcggactgatgaatggaagagaccagctgccctctgcccacccatccctgcatggacggcccctgcaaccaggtgcaaggctccaagactgctcatcctggagccctgaccctgtagtccgctctcgagcaccacagcccatcttgccaactggctcctgaaaaggaagccggggccttgatcaccgtaggtacgtcaacccagggtctgaagcactgtcactgtccctgcatacatttcaacctaggtgccgtacacaaaagtgaagatttcagcgaaatgccaaggaagtgccatctatctggcttctcccccaggccaaccctctgagccaccctacctctttcgcactggctacaaacaaaagacaaagacagcaccttttccagtcaaggtggcatctgcactgccccatggagatgggaagatgacagcctaagtttctggccctggctcagggcagtatggggccacttctgtaacctgccacctctcatatgctccacataatctccaagaccctttctctgaaggctcatggacaagttttcacatctgtgcagtaactgcagagccaaggttgagctgtaacggttgggaaatgatggtgaagagactgagaggaagaataaaggaacaggagggggttagctctggtagccccaagtctatttttgggttggtttgagacagggtttctcagtgaggtgctggctctcctagaactcactctgtaggacaggctggccttgaactcagagatctgcctgcctctcttgggagtgctgggattaaaggcgtgcgccatcatgagaccacctatcctggtcttttgtttgtttgtttgtttttatttttttcaaggcagggtttctctgtgtagtcctggctgtcctggaacttactttgtagaccaggctggccttgaactcagagatccacctgcctctgcctcccaagtgctgggattaaaggcgtgcgccaccaccgcccggcatatcctggtctttaaaatcgagattatgatgggagactgtgtgttagatctccacgtacctgttgcatgagctttccctggggattcagaaacagatgccccagatacgattccagtgagagcctaaagtaaccatcgtgtccaatgagttcactgcctacaagaacatgaatgacccccagagcagctgcatcaaccaaacg

SEQ ID NO: 34387 - DNA, 1195 bp, Mus musculus
agctgcctttggaggtagcatattgtgtgggtccagtcccttctgtactgctatcatgatctccctctccagcccggcagcctgctcctcatcagtagggacaccacctccagaagccatggagcgggtcatggccacgccacggggaccgtgggccctcagggcctgcgccgccaaagcgcccactccgcgaagtaaccttgaagccatctcgcccgagacaagcagatgcatttccgggccctaagcctgatcttatggtagcattttctcagttgagattccctcctctcagatggctttagcttacatgtagttgacataaaaccatccagcacagacagccaatatcctagagacacctgctttctgggtgcccatgactgcttccagtccctgtgacccagaagtgcttttggaattccctcaagggatctgaggtttatagtgaatagaaccttagcgttgtcacacactccatatgctcccctcggggtgttctttgggggtacccattgttggcttctcaagagtttgggtagtttaaaagtcagaagaaagaaattccctctcatgcgtgtgtggctccctctctggaccattgcaaggccacttaaggtctccttaaggcagggtccagaaaagcccatctctgcttctgccagactagcacccatccaagaggttgtatgccaaatcctaccagcaccggtgaatgtctggaaggctctctaggcagaactcatatccacatggcctgttgggtaccagatagtcccgatgttatcctgtttgcacaaggggtcagaaggtgtcgtgaggagcctgtggtgccaccaacagtgccatactctgcactcgagcaggtggagtggggcccacgagggttttcacagtttctagctacccagaacatgaagactgtaaaattaacgtctgaaacgtgtacaactcttgctattagcagaccttctccccactgtgggacaatgattccaaagagcccaggtcttaggtcctcatccctcaagggccagaattagatggctgaaagttggtctcttgccagagtccggtctaaagagcgtcatcctggagcctaagccagggctattccagccaagtcaggagactgtgtccatcacttccaccctcctaatcttaagttgagaggccaatagaggcctgaggtcta

SEQ ID NO: 34388 - DNA, 1233 bp, Mus musculus
gagataccgagtatgtgcagagtgcactgagctgctgtttgggggacacgtcctgttagattccttttaaccagtgttaaaataaggcctgaagacacaaaatgaatcctcaggagagaagtgttggacattggcctcatgcctggacgtgctgacctttatacgccccaccctgtaccctgttcctgctgtgcttggtggcaccaagactcagggccccaagtcagcagcagagtaaaacttcaacccagggcattgtccagaaccacagggacttcctgggcacatgcccaccaactgggtctgcctcagctttgcaggaggaagtgtaatgccagaggtttggagcagcccagtgtacagagtaaaccataggtgcctaaacacgaacccctcccactttcacattagccctttctgggatgcacccgtggtctgctttagtcagcccctgcacacatctgtcccctcatataaatcttctctgggtcatccagctggtggccagctctccctgaccaggcagcagtagtgaagaatccacgtggccgtggcaaggccacatggtcagcagtgactctggctgtgcaccagcagctgctaccatagcctcagtgaggctttggcttgcgggctggctgctcacacacacaggttgccactgtaacagagcacagtgatctcacagtaaccccatgtctcacatacaggagcaagcatagcccaaacccagctctaattcctacccttttccccattttcctacaggttctgtggggaccccattgccaggagtggaagtacgcatcatctcagaaaacccgcagaagggttccccctacatcatccatgcagagggaaacgagagggggacaaaggtgaggtcatcgtttgaaggtttcttcctcaccatgcaggggtggggcagccatggacaggagagatgctgagggatgtgacgggttgtgtgctagtgtgtctgagcctcgcccaagaggctcttccattccttcccagagcagcccaggcctccccatagctctgtccctggaggacattttgagggtccatatggttttactaaggagcatggggcagcacagcagcaatcctcacagactaggcctgtgggagcgttgagctgtcaggtaccggtgccatctgaaagcccgtgtgttgagccccttcatctgcaggaaagtgggtctcaacttcatatgtgacttttaactt

SEQ ID NO: 34389 - DNA, 1198 bp, Mus musculus
gcacgcatcaaggtatttgtccagatataccacacttttgcatgggcacacacatacatacagacaagctcatgaaccagacttgaagaggggcacagtagcagaactggtacactaaccagtcctgttttcctcaccttctgcattgtggtgtagcctgttccctcacctctccttctacaatgtcacctggcctgtcatgtatgggcccaacgtatgttaacacacatagacacaaacacataggatcatggcacacactactgccccagcccggaagagacaaagacaggtttcctgggcttgttgtcagacagcctagatgagtcacagagccccaggctagtgagagtctcaaaaaaacaaggtgggggctggagagatggctcagtggttaagagcactggctgctcttccagaggatccaggttcaattcccagcaccaacacggcagctcacaactgtctgtaactcctgtttcaggggatctgacatacattcagttaaaatactagtgtacataaaattttaaaaagttattacaaaaaaaaaaaaaaaacaaaaacccagggtggatggagctgaagagacggtggctgagcggtcaagagcacaggctgctcagcttctgtctagccctagctccaggggatctgatacccctggcctacagaggcacattattctatactcaccccaacacacacacacacacacacacagagaaagagaaagagagacagacagacagtatgctcaaatactaaaacaagtatataggtgggccttattttactgttggattgttcagttttaaaatctccatttgtagctgggcttggtgatacatgcctttaatcccagcactcgggaggcagaggcaggtggatttctgagttggaggccagcctggtctacaaagtgagttccaggacagccagggctctacagagaaaccctgtcttgaaaaaccaaaaccaaccaaacaaacaaaaatctccatttgtgtctttggtgtttttgagatggcttcaatcttctgactgcccacctcctccctctggcattgcaggtacacatcgccaggcctgatttctgggtctgcagcaagcacttgaccagctgggctacagtccctgccctgtttgtttgtttgtttgtttgtttttttttttttgaggcagggttttgcttctt

SEQ ID NO: 34390 - DNA, 1490 bp, Mus musculus
cacgcacgcacgcacgcacgcacgcacgcacaccccaggctcacagaacagttactccaatctgatggtcagaatgggggaggtccatctgctgggtgcaagtctagccctgtcctcacacagctgatacccagaggacctgggcttcatcaggggataaaccaggttctgggctaagaagcggggtggggtcctgtgggtgaagcctgaaggcagtggtggaagccagggcctggccgtccctctcaccttgtatgttccacagacatgtttgctgatgcggcagcaacatgaggctgcagccctcaatgccgtgcaaagaatggagtggcagctgaaggcccaggagctggaccccgctgggcacaagtccctgtgtgtaaatgaggtgccatccttctacgtgcccatggttgacgtcaacgatgacttcgtattgttgccagcatgacactcggaggaaggtcacaggacacaaacaagggccacataggtcgcccagtgctgccgatgagtcccggcagcggaggagggagcaccgcgtccatcaagtgggaggagcccagagactgcacctggccgtgtgtctcccctccagatgcagtgaggtagaaagcatctccttttaccagttgctgtgggagcacaaggcccagacactgcagagctttgccaggccttgggacaaggagaccgtggccacagacaaggtggctctgtgtcagccatgccctctgggttttcttccagctgatgacagggcacttgaggagtcgcagagcagagtgtttttaattcctcgttccattctgatcaactaatggaaaatagactaaggcgtccaccttcataagcagtgacctccaggtcagagaagcaggaaagtgctgtcccgccatggtccccgggacaggcttggacactggtgccggcaagggtccggctgctgcctgcctggacacagggacgcagccaggactcttcgatagtgtttttaatggagtcaaatccacgtggtttgtatatttccctctaatcttgggcattttgtttctctttctgagaaggtaacttgaaacactacagagccaataatcctatagagtgtatccgcaaacctgtacagttttatatacattcacaatgtacttttgctgccttctagataatttattttgcaacacattactgcacagttgtaaataacttatgtactgtaacatcactttcagttatgtgtaaagaaataaataaattaattaaaatgttctttgtacatggcactgtcccttcaggtagccggttctctcttgtgggggcgggatggtaactgacacacatacctaagtacacacatatctcttacagtaactgacacacatacctaagtacacacatatctcttacagtaactgacacacatacctaagtacagatactgggctgcagctgcacacttcattttggattccagatagagggacagggct

SEQ ID NO: 34391 - DNA, 1195 bp, Mus musculus
tctttgagcctcacagggagctacatgtgctgcccatccccgccgctgcatgctcctcctccgatgcatagtgatagagacaacaaaaatgatttacacagttcaacccacctctctgtgtctgccttggaagtctgactccatacggaccaccgcagacatgtcctctcctcattgtctctggtgtatttacttgccctgggagacacttccacagggccatagggatatgatgggaaggttcccctcattgctttaaccaatcatggttgtttagcctgcaccctcaccccaagacatccagccttggttcaggattctacatgcacatctccactgaatgcaccctgttcactcaagatccccacgctcccacagtgctcctttggcataggtgcgtacacctgacccagctgcttgtgcctttcctgccattatttacttgtagggttcacgtgcagctctgctctgtggtggttccaggtaaccgtcagactaacacaagtttctaggtgtggggttaacatgttcacagtttttaatatgtttatcatggcttaccccttttgccttatatttgcagattgcaccccctccctctctagctgagcccctgaaggagctgttcaagcaacaagaggctgtgcggggtaagctgcgcctgcagcacagcatcgagagggtaagtggagcctcgggtagggggcatgctggcaaggatcttaagcttacctgttcctctcctccttcaggagaagctgattgtgtcctgtgagcaagagattcttcgggttcattgccgggcagccaggaccattgccaaccaggcagtgccattcagtgcatgcacaatgctcttggactccgaggtctacaacatgcctctggaaagccaggtcagtgacccccaccagtacatctgctcccatgtatccaaactctgcccaccctgctcatgactgctgtggggacctagccccaatgtgcctcagaaggcacagtaatgtcacggacaaagccctcaagcctacagagtctctgagacaactgtgcatgcaagtaggatggatagcatcctccctcctctccctggctgcaggtctgatggcagccccatcgtgagctacaggtaaccagagctgctatgttagtgaccatgattggtcaataattgtagcaacaagacattagggcc

SEQ ID NO: 34392 - DNA, 2231 bp, Mus musculus
cattgagttgttctcctcagaaaagaaagacaggagtgatcctgaacgagagcctgccaagaggatagagaaggagttaaagccgtacggctcgagtgccatcagcatcttaaaggagaagaagaagagagaaaaacacagggagagatggagggaggagaaggagagacacagggacaagcatgtggacggcttcctgagacaccacaaggacgagccaaagcctgcagccaaagacaaggacaaccctcccaactccttcaaggagaagtccagggaggaaagcctgaaactcagcgagactaagctgaaggaaaagttcaaggagaacacagagcgagaaaagggcgactccataaagatgagcaacgggaacgacaaacttgtgccatccagagactccggcaagaaagacagcagaccccgggagaagctcctgggagatggcgacctcatgatgacaagttttgagaggatgctgtcccagaaagacctcgagattgaggagcggcacaagcgacacaaggagcgcatgaagcagatggagaagatgcggcatcggtctggagaccccaagctcaaagagaagaagcccacggaggacgggcgcaagaagagcctggactttccttccaagaaggctctggggctggacaaaaaggtcaaggagccggctcccacgctgaccacgggtgaaagcaagccacactctggaccgggtacagagtccaaagactggctgtctggacagcccctgaaggaggttctccctgcttcaccccgcactgagcagagccgacccactggggtgcccacgcccacctcagtagtgtcgtgccccagctacgaagaggtgatgcacacacccagaaccccgtcctgcagtgctgacgattaccccgacctggtgttcgactgcaccgactcccagcactcgatgcccgtctccaccgcgtccaccagcgcctgctcgccgcccttttttgacaggttttctgtggcttccagtgtggtctcagaaaacgcagcaggccagacacccaccaggcctatctccacaaacctttatcgctcgatatctgtggatatcagaaggacacccgaggaggagttcagtgctggggacaagctgttcaggcagcagagtgtccctgcgccctctagttttgactccccagtacagcacttgctggaagagaaagctcctctgccacccgttcctgcagaaaagtttgcctgcctgtcccctggctactactccccagactatggtatcccctcgcccaaggtggacacgttacactgtccaccaacagctgtggtcagtgccacaccacccccagacagcgtcttctccaatctaccaccaaagtcttccccttcccctagaggtgaactgctgagcccagccattgaagggaccctgcccccagatctaggcctacctctggatgccacagaggaccagcaggccacagctgccatcctcccccaggagcccagctatctggagcctctggatgagggtcccttcaccacagtcatcacggaggaacctgttgagtggacacacaccgctgctgagcagggcctgtcttcctcctcccttattgccagtgcctctgaaaaccctgtcagctggcctgttggctctgagcttatgctaaagtctccacagaggtttgcagaatccccaaaacatttttgccctggagaatccctccattccaccaccccaggaccctacagtgctgcagagcccacctaccctgtctctccaggatcttaccctttgccggcccctgagccagccctagaagaagtcaaagacggtgggacaggagcaatcccagtggccatctctgctgcagaaggggctgctccttatgctgctcctgctaggctggagtcgtttttcagcaactgcaagtcacacccagatgcacccctggacacagcccctgaacctacgggtgttactgctgtggctcaggtagaggctctgggacccctggagagcagcttcctagacagcaatcctagcatatctaccctcagccaggtggaaccagtctcatggcatgaagcctttaccagccctgaggatgacctcgacctggggcccttctcactgccagagcttcctctccaggccaaagatgcttcagatgttgaggcagaagccgcaaaggccagtcctgttcctccggcggagagccctccaggcccca

SEQ ID NO: 34393 - DNA, 1294 bp, Mus musculus
aaggccatccttttagagagtgacctctccactgagaataagctgaaggtattgaaacacgacagagagcaccttaagaaagaagataagctcggtaggatgaagccggaggataaggactggctctttaaggatgagaaggtgctgaagagaatcaaggatgccaacaaagacatgagcagagccttccgggaagacaaagaccgtgccagcaaagcagagagggagagggccacgaaggacaagtccccgaaggaagaaaagctcagactgtacaaagaggaaaggaagaaaaagtccaaagaccgagcttccagactcgaaaggaagaatgacatgaaagaggacaagctctccaaggagaaggagaaggccttcaaagaggacaaagagaaactcaaaaaggaaaagctgtacagggaggacgctgcctttgatgactattgtaacaaaagtcagtttctggaccatgaggacaccaagttcagcctctctgatgaccaacaagagaggtggttttctgacctgtctgattcctcttttgatttcaaaggagaggacagctgggactcagtaacagactatagagacatcaagaatgactcggtggccaaacttatcctggaaactgtcaaagaagacagtaaggaaaagaagcgcgacaacaaaatccgggagaagcgagattttaaagactctttcttccgaaagagagacagggactgtctagacaagaattctgagaaaaggagagaccaaacggaaaagcataaaagcatccctagctatctttctgagaaagacaagaaaaggcgagagtctgcagaagggggccgggacaggagggatgggcggattcggtctgaagaagtgcacagggaggacctaaaggagtgtgggttcgagagcagcttcaaggacaagtcagactgtgacttccccaagaacctggagccctgggaacggccccatgcagcgcgggaaaaggagaaaaaggatgccctggaaaaggaaaggaaggaaaagggcagggcagacaagtacaaagagaagtccagcgagagggagagaagtgacaagtccacccttgacaagtgtcagaaagacaaagaatttgaaaaatgctttaaagagaagaaagacggcaaggaaaagcataaagacatacacagcaaagacagaaaagcatcctttgaccaactgagagagaagaaggagaaggtgttctctagcatcatctcagaagacttctcagagagaaaggatgacaggaaggggaaggagaagagctggt

SEQ ID NO: 34394 - DNA, 2528 bp, Mus musculus
aggactcagtcaaactcaacttccctgctgcctagttcatgattgtttgattctgtctgatatagcacattagtttaaaacagttttcattttctgactgttaacctgtgcacaaattttctgcccaagtataattatttcaaaaagttttaaatctgcaaacttagcaggctagatgttcattatgcaaagcgccacaattgttttaaagggacgccgtctcagggtgtaaggtaacaattgcccagctggccgctccttagggagagcagcgcacatcctctgtgcttccccccagtttaggcagggtgaagctttcagggattacataacaaataccccaagtttctgtctgcaggctggactgcactgcacgaggcgtgtaaccggggctattacgacatcgccaagcaactgttagccgctggtgcagaggtgaacactaagggcctggatgatgacacacctttgcatgatgccgccaacaacgggcactacaaggttggcatctccctgcagccctccagtggctgctctctccttaacttctggactattctacagcttcatgtttctctgtcctagctagttttcacattttctgagactgggaagtgagctttgtgttgtcatcgttgctgtcccctgttgcctctcaccccacccaatcccttttcaagccttaagacctagctgttgcttctgccctaggccagtacccagataacctgagttttgataactcgcaaacagcactgcagtgactgtgtagtgctggctcttctgactgcatgagtggctactgagcccctgttctcgggtactgagcctgcccagaaggtcagagtctcggggagagaggcagcatagtcaagattagattactgtgctgggtaagacttcctctcttagggaaagggcttccggtagggaaggaaaccctaagatatgccagacatagctcttcttacaagagaatgggttgcagaagtggatttattagctacaaactgaagaacagtaagcttggtaagaatgggaacatctgcccaagttaatagtgcagcaagcaggtcctgcctggttgtgccagaacctacagctctcaagaacccagtggtgcacagcatacacacatatacatacatacatacatacattacatttttagatttaatatggagataatgacatgatggttcatttgcttgctggtttttaagagcccttttagaaaaatgttctgaaagggtctatgcaatgtctgagacttgtaaaagaataccatggaaggtgggtagtgataaaactgggagggaagagccactatctaagtcttcatacatccatgagttttcacgtttttctttaagtatgtaaaatgtcacaactataggaacacagtaagctgaagaacaacagtggcctctcaggagagatatatggtgtagtcctaaaggcagcttcctggatggaagaagtagacagataaaggagacagaaagagtaggctgggtagaaacatggcctgtatttctggccttaggagaaagtcacagaaggtactgaccgctaacgacagacatcaggaataggtctttggtcccagcactgcaggaaccaaattctgacaacagcccacacactgaaggaacgagccagctttatctgcgccgtgatgtaagccaagccagcgagactgattccctcgactctgaggcaggctgtggtgatttgttacagcagcagtagagtctcacatgcgctaaaaactcttcatggtgatgataccttgagctggaaacagtttgtgagtgacaagaggatgtgttaaagcttgaactgaagttgaggatagattgaaactggatgtttgcactggaatagagtgagttactgtttcaggcatatgctgataaatgactgaatagagctgttgaaatgtcaccttgaatgtttctgtcacccatgtaaccacctttatgcatgtaaaatcaagcaaggaaggagttctcttattttctaatgtaaatgaaaataaataaaccagcttacagaaatgtggtctttgttttctctatttcccacccccagcccctctgtgcccctctttgggagctgtgctgctgcccagctctctcttgggaaggggagctcgagagaagattggggaagagcaggagagacctggacgtgacctgcttgtcaaagggacccgccctgtgcagtccctcacaaaggcacagagccctgctagacacttatggctctacacgtagcccccgcaacaggggggcctcctacaggcatggcagggtaacacgatttctcaaacagtctgttaatatcaacgttaatgttttgtaggtggtgaagttgttgttacggtatggcggaaatcctcaacaaagcaacagaaaaggagagacaccgttgaaagtagccaattcgccaacgatggtgaacctcctgttaggcaaaggcacatacacttccagtgaggagagctctactggtaagccagccca

SEQ ID NO: 34395 - DNA, 1120 bp, Mus musculus
cagccagtgggcccatgttctgaatcagaacaaagctgcaactttcccagtcttggtgggcaggggggttgtggttgttcggggccttaacccttggacagtatgatttgcacctttaactctgccagcactctatgcgagttatgttgtggagtttgattctgacttgtagggagagttcagtgctcctcatcaacagtgccgtcctcgtggtgggaggctaaggcagagagcaaccctagctaaaggaggagcagtcacagtcaagccttttagtcctagaagcatatatgtcctagaacaggaggggctgttgatcgccccagtaaaatgtttgctttctttggcacatgaagccaaagtcgtgacttgaggatttaacccggaaacaataactgaaagcattgctctctctctcttgtaggataaagataaagtttctctaaccaagactcccaagctggaccgcagtgatggcgggaaggaggtgagagaacgagccaccaagcggaagctgcccttcaccgtgggggccaatggagagcagaaggactcggacacaggtaccagactgggtttaacactgtatccctggaggagtcttgccatagctattgcaccagtctgtacagtgcagcccagagtaataacagtaagggcaagagacagcaggcctctaggtgatggctccccacagctcccaaggcacatggatttgtggcagaacccagggagaacctgaaatcgaggcagctggtgtagtcttcctaagaatggataggtctaagaatgcagaacaggagcatatacgggttggggttagcacctttcattgtgtacgttcccagtcggattctgtcttgctcaaggagaaccctggggtctgctactggcttgcatatccttctgaatttgatgatgcaggcaggactccactctactggtcttttctcctccccccttttttaaggcctctggggcagtagaacacaaatggcagaggaagcctggggtgaagcattgggtttcatgtctgtcatctcctagcactgaggacgttgagatgaggctgctgatgtctcggggtgggaggtttataaaggcttgcatggatgtcgca

SEQ ID NO: 34396 - DNA, 1189 bp, Mus musculus
cgaggttcccactgtatacatctataaaccaggttggtgtgttgcacttaacagagatctgtcttctgggattaaaggagagtactgctgcctctctgcattgttttctgcaccagccataccagtttatatttctactagcaacttaaaagggctctctcagtgcaaacatcccagagccagtaaggatacactcaagacagttataacctgttttttttgttttttttttttttgttttttttgtttttttggtaaatgtgatctttgttggcagatatggcagataaaaggtgaatagctctctattaaagaatgtctggggttggagagatggctcagtggttaagagcaatgactgctcttccagaggtcctgagttcaattccagtaaccagctcacaacagcctgtaacttactgcctgtaagatgtggcaccctcacacagccattcaaccagacaaaataccaatgcatatttaacaattaaggaatgtctgtttatgcccatcacctgacttctgcaggtatactcctgggtctgggctcctttctcagcagtgtccccagcttttgctttctgtctctgtctctgtctctccctccctgccccccgtgctctttggttgttttgtggtgtgttctaaggaaagaagacatcaagcctggatgctgagctaactgtaaatgctgacaaaccagcccgccaatctctcagcataacctttgttagcatgggtcctgactggcctcagacttgagtctcctaccctcttgtagtctgctgccccacagacaggctttcattatatgcactgtcctttggactagaaagggttgtggtataagatggtagcactcttgctttttgaacaagtatttgaataatagtgtgtggtagaaatacttttcttagtgtaccctacttctttcagctcctagtcctgtgcttgcctgggcctgaagaagcctaaagtcaccaaggaactttgcctatacgtggggctttgcatttacttcctaggaaaagatactgccttttaatgtgctaggattcaattacactttttagtttaattttatgtgtatggtattttgcctgcatgtaggcctgtgtctgacatggaggcaaataagggcactatagtctctggaactagaattataggtggttatgaacttccacag

SEQ ID NO: 34397 - DNA, 1106 bp, Mus musculus
attagatagtcatgtgtatttatacacgtacattttgactccgagcttgcacttggagaatgatttagcactccctgtacttaactgttcagctctaccaatggtttttgttttataaaactgccatcacagccaggatcatggcattgattgaacttactagccttggtcagcttgcttgttttccttgtgctcagacatctgtaaggaaggagattgacttttgttcatttgttactgtctggggttacagagagcatttccacatcttttctttaatttttgagagctactcatgcatctttcatttctaagacgttatcatacaaaaggtcatagaaacaggataatagacattgtaacccaagggaccaggcagagtggtgcatgtctaactttatcatccaggaagtggagtcaggagaactgggagtttaaggccattctaggactttttctcagtgtcagacacgtggggatgtaagcttgggtttcccatgatggtatgggaagggacaaccatattacccatgagattggtccccaccttttgggttagcttccttcccttcggacagtggttctcaacgttcctcatacaccaccctttaatacagttcctcatgctgtggtgacccccaatcataaaattactttttgttgctatttcataactgtaatgttgttactgttgtgaatcgtaatgcaaatatctcacatgcaaccccctgtgaaagggtcacagcccacagattgagaaatactatcttaggggctactccagtgcctgtaccagtagtcctgctcttatggttgtcatctcctctgaaactggagttaggacaatttgtgagccaccatgtgggtggtaggaattgaacctgcgtcttctgtaagagcagctagtactctagttcaacttacttatacttgtttttaatagctttaaggctttaattcgtagcctataaagagatttaaggacagaccaagaaagctcactttatctttgtaacattcacgtggaacatcttgcttggtacagcaaaaccaagctagattttttttttttttttttactatgttggggagcaaaagttggagat

SEQ ID NO: 34398 - DNA, 2238 bp, Mus musculus
caggaggtgtgtctgactagtcacagatccactgtcattaacaaatgtttgctgatttatattctatatcatgtggtgttttgtgttgaaaagagagaatttatagtttggtttattatttattgatagaccttttagggttttgtttcaccactttttgttagctttacccttccctttaatatggcttcctactcactctcaagtgttctacaaagagccagagagtgagtagttgaggctttgtttgcagcccttcagctctgttcttgttgcagaaaatgagcacagatgtgctaaatgagcctgatacctgtcagtcaagttttgttaacactgaaattacagttttggagctgtggatacgtcttagtagttaagaatgtggttgcctataatgtaaaaactctgggtttgatttccaacatcacataaactgggtgtggtccttggaattctgtagaggcaggaggatcagaattgcaagggttacacactgagtttgaggccagcatggactacaggagacactgtctcaaaagaaatcaatgtaatttttatctgtcacaaattgttctctttttaattaattaaaaaaatttaatctacctggtgttttgctcacacgtgtgtctgtgtaccacatgcatgcctggtgcccctagaagccagagagggtgtggaggtggggttacagacagttgagctgccatgaggctgcagggagttgaatccaggtcctctggaagagctcgaatcacaaaaacattttgtttcagttaacatacagatgtaaactcttcctagataatagactgttattttattttttagaatatatttgaccttagggccccaaataagatctcagactcttgtcacattggtgaaatggaatggcttgggtttgctgaaggtttgtccctgacactttctggtagctctttgacaatggtgactttacttctttcctgtttttggagtaaggtctcactgagtgccatggctgtcctagagcgcctatataaccaaggctagccttaagatgtgtgatttttttttttttctttctttcctgactgcctcttgagcgtcttctaccacactgtgtgccacaactggtgctcttctttctaatgtttaatttgggatatagttgttttcacattatgttctttgtccactttatattcacattttgtagtttaggggcctgactctggtcaggtactggctcctactgtcatcttcttttcaagtataggtataggcagatagacagattctttttaaaagttgtgttatatctgagacatgcttggtctttctttggcttgtaaacagaatcgaatagggagcatctatctccctgtggagttttgatctgtatagaaggaagctgccttctcttacatggaaagctgtgggagcaggaaatgtagtaattgtcttgatgtgtattaaaatcagcccaaagtctcttccacataaaatcgttggccttagaattactaagtatgctgagatgaagtattcataattgagccagttctggctagttaaggaacttgtaaaatattgctgtgacaaccagaaatgtaattacctatgtgctgggcaggcctgttgctgtgtactccatgagtgcatcacccatgatcgaggaggaaagttaataagggtaataagagactctagacttagtgtcgtagtggaacataagggcaatgaggctcagatgagagccctagactctaaacttagtgtcgtagtggaactggttataggaataaagctagcttgggcatttggaacggggattgcaggcatgttttatcatacagctttattattttatttgaggcttgcacatgaaagttgcagagactggccgtggacttcgttcttcttactgagcctcttgagtagatgggatcacaagtctatctgtctgttacttagacttgaaggagaagtgcagggtcccccgccccactctgtagctttggctctcttggaactccttctgtttaccacgatgctccctggaactcagagatctgcctgcctttgcctgagtgctgtgattagaagtgtgtgtcactaccacctggcaaagggactggactctgcaggggccagggtgggcaagaattcaatcactgagccacccatgtcatttgtgctagttactcctaaaaaaggattgcctgtcagtgtctggaggactatatcaca

SEQ ID NO: 34399 - DNA, 1133 bp, Mus musculus
gaacttagagttgttttaagtgatgtcaccagggtggggaagttagaaggacagtgtggggtgaagagctcttccacagtggtggtggccatcagtggacacctttgtaccgtgtttttgtaagacattgaggttgtttaggagggagattcctttggggtgactttctttctggaattttggggtaacccaggtgggctgggggagagtatccaagtgtggtacagaaatgtcctgtcattaggagagtaggatttcctttctttgcaataggatgtcttacagtatggttttagtttccttctagttttcatctgcattcctcttcactctggcatttgggtgtgtgctagagcctatagcttgtatgtgcattcccacttctcagaccttggttgaatctgggtttcaaagaccacagggtggtgatggccctgtaatcctaagttttagggagacaggcaggaagattgagagttggagaccatcccagaatgcatagcatattccaggccattctctgtacaagtctcacacaaaccccaagcccaaaccacaatgttcctctggtcccccctgaagtccctggaggacttgcctgtgtgactgtttctcatgttctctaactgttgtgtcctgttgtggggctttgtgggcccctcctccctttttgagacaggttttcatgtaccttagtctagtttggaatttgataacttgatatgtattagaggttggccttgaaccttaagtgctgggatttcaaggaggtgcttgtatgtatgcctgcctgttctgcctccctccttccttctcctgattcctcttctcccacttctgccccctcttctgccccctctcttctgccccttcttctgccctctcttctgccccctcttctgccccctcttctgccccctcttctgccccctcttctgccccctcttctgtcccctcttctgtcccctcttctgtcccctcttctgccccctcttctgccccctcttctgtcccctcttctgtcccctcttctgccccctcttctgccccctcttctgcctctctcttctgcctggatggactttgtttgctaaaaaggggaagactgtttaggaactcaccttgtaaacagg

SEQ ID NO: 34400 - DNA, 1219 bp, Mus musculus
agagagattatccacacacaataagaaggtggggggtgggggagaaaacggggccagtgagattatagattctgaaagccagtctttagtgacatacttcctccagcaaggttagacctacacgttccagaccctccccaaacagcatgaccaactgaggactgagtgttcaaactcaggagcacatttcaaccaccacaaggtctattgtttcactacgttgatagtgaaaacatctctttagactatatattcatttttgccagatggtttagagtcctccatcctaagagccagctatagcatgtctgcagcactcatctctgtcctgtcactttactactctgtgcgtttgtgagaggtgcgtggatggggaggtcagagttgggagtcagttctcctccaaatgtaggttctagggaatctactaaggtcaaaggtcattagggttgtgtggcaaaccctttttgtgtgagctattcactgtttgttgattttgggcccaactgtatactccatgttactcctgtacaactgacgagtaaccttgatttcttattcaacctaagctaaaggatcaggtgccgtttgttttgtgcctactgtaggccacacgggactctgcataaggacttgggtagctctggtgtcctgtggtttacattttcgagggagatgtgggcagcttacttcagagaggacacagtgttcaggaaagtgacaggttcagatcagagaagcctcgaagtggtcagacagggcctgcatgtatttcagcagaaatgttcatattaggagctcttctgtcccagacagttggtagggagttaagagacttttggtatttgctctcatagttttatttaataagtcagtacaaaatgtaagccaagacaggtgagagggagttaggctttcagtagttgcaggagcctgagaccctataaaggaagagtagagaccctgtgtgtgttcagaactggatgatgaattcacctcaggtttagttttattttctgccttctgtattttctttctatttgtgtcagtacataggtaactaatacttactgaaagagattggtctttgaaggtcatctgcctttacagaagcttctatatgtctgagaaaatggtaatactgggtaggacataatattttatctaacaaacatttaatacatttactcaagacaggatttaatagtgagtgtttttg

SEQ ID NO: 34401 - DNA, 1494 bp, Mus musculus
tagttgttattcccagcgtccctattattatcgtgttttgaaatgggagcaggcggccctcgggctgcgagccgagccggagggggcgggcgagccggggacctggagctgcggggtgcggaggcgcgcaggcccgagtgggggcaggaatgcggggcggcggggggcgtctgggggaggggaaggcgggactcgggggggagagtgggaggaaagcggtgtaggcgacggctgcaggagcagcctttggcctcaaggaacaatgtgagacgttgcctgaaatgttaatttccgttcctcatttcatcatcccctggcaaggcggtagctgcgagagtgtgtgtgcgtgtgtgtgtgtgtgtgtgtgcgtgtgtgtgtgtgcgcgcgcgcgcccgtgtgtgtgtgtacgtgtgtgcagggttggccctgccacatggatctagccccttcacagacggatgtgcggttcagttcctatgtatgtggcttggtgtggagtctcattttttttctcaaggccttgtctttacctggtgctcctgtaggtttttctgtttttgttatgtttctggaaagctcgtctggggtttggaagactggtgaaggttaagctggttcacaggaaggctgtatgctccgaaatctagttacatgtgtatagttctcatgtttcacagtggtttctgcagtcgtgagaagttttacacccacttgagaaaactgggcagttttacaaattttccggtagaaaaatttggtttttgtacctatttggtgagttttctgtggtcctttgaacactttccattcaacacgttcttccattcaactactgaatagaagtgcacatttgtacgtaaaattttacttaggctgttgggttgcctatgagggataaggagacttaactcagcaaagactgtaggtgataatgggttgtggagaaagctatggaaacagttactgtgttttgctgtgtgcagtcctagtcagtggtataatttgggtagttccatggtagagtctcggagaatggtacttgttgccctgagacctttatttctttttggagcactagctgctctgaagactagagttctgtctgtgtcttttgaaatgattgcacaaatactccaatgtcactttgcagctatacctaaaacaaaaatgccttgcttaactttgattgtgacccttggattggatctccatatagctggtgtttcctcccccacactccattcagctgttgttctcctttctgtagtttcacgcttaagagcaggatctcccgtgataggctggccatcctgaatggaatgggatgggagggaacaaaggccaagttgctatgacatttttctcttctttgtgcttgcctcgtgcattccttgaaaagcaacccaaaagataccgctaaatttgaccttagcttgattcttttaggagtgtttctttttcttgtcttccctttgtcctcctgtggtaaacaat

SEQ ID NO: 34402 - DNA, 1099 bp, Mus musculus
ctgattgtttgaatttacagaacgcggaaaaagtttaatgatggtttgcgttagtagtgatttggtttgcaaacgagctaaaaattcgaatcccagcgctgtagtgaccgagacaggcgtatccggagctcagagtacattgttgtgaacatttcgagttcaagatttgagttccatgaaacctttgtctcagaaaaatgcataaagtaattgtgacgagtctgatatgttggtataggctttttatcccggtacttaggcagaggcaggctggatctctgagttccgggccagctagggctacacagtgaaagccaatttcataatataataaaatataaaataacaagtaaccagggctggagagatggctcggcggctaagagcacgtgctgcccttctcggcacccacctcagacagcttcacagccaccttcagaggacttgacatcttctgacttttcaggaactcacacccgagtagagtactcacacatatagactacatataaatcttttaaagtaaatgggacctggggagatgacctgtcggtcaaaagcactcactggctgctcttccagaggatctgggttcgattcccggcatctgtaactcctgttctagaagatctaacattgtctaggggctccccaaacatgcactagtacacatacatatacacagaaaaaaaatacgcttctgcacagaaaaaaatctacaaaaaaaaagttttaagtagtcaaacttccagccttgtcctatttaaagagcatctgtgtatttgtgaaccagaaaagctaagtgactaaaatcaatatttatacttctttgttttgttttgtttttgacttttggggttttgtttgtttgtttgagacaagttttctctgtggagccctggccttcctggaaatagttctgtagagggtttgggtgttttgttttgtttgtctgtataaacaaagtctttacagagcacagattatgaaatcatgggattgcacatcccggagtgatgggaccttagaggtgacctttcttccctatttgaagcaaatacagagtttagaggacatggtatgataaaaactgccctgc

SEQ ID NO: 34403 - DNA, 1044 bp, Mus musculus
gctgatggtcaataaactgaggcaggattagaaggcgggacttccagtggagagagagctaggcaggtggctgttttaccactcgaacacggaggacgtgggaacaagaagctgaggagaggaagccagccacgtagctgaactcaggttagaataaatgggatattaacttaagagttagctggggaacgagctagcttatggcctaggaatgtattaataatattaagcctttgagttgttatttgggaactgtgtgtgggtggaaaagcccaaagttataattggcacctaacgttcttagaatctaggcttagagcccgagacgccacggggaagggcggtttagccattctgtggtggtgggcagactgctgtgtgagctgtgagcggagcagctcaagtccagcggacagggtgggcaggaagctgcagagaggctgtatgtggagacgccagccactttcccccttgaggtgcagtgtggctggctgctggggacagggggtgctgtgagcagttgatagatgggggaaccagatcctcagggcacgtgctgctctgggaagccaaaggcccatgggaaatagcagaccagtccgggccgactgcatccccagctcgatgcccagtgtggtagggcatgtgggcctgagactacctgcaggtgcctgcaggtgaaggcctgaagctgcgaagaagcgtgatgggtcagggaggcctggccagggttggaaaaccctagaccaagatgagtggacattgctgggcaccaacaacagggtgctaactgaaccacggaaggagcaccggggccaacagaaaagacatccaagcccagacacaagcctctgaccaggtagttatctttgaaattgtgctaagtgctgaaaagaaatcgaatatagaaagtcatagggggaaagtctctgaaggaaggaaagaattagagcttgaaaaaagaaaaatattttctatggtaaaaatggagagaaactcaatgacacagcacatctggatcccatatggtttgtcttgcttttc

SEQ ID NO: 34404 - DNA, 1132 bp, Mus musculus
atggatcctgaggacccagcccaaggacctggcatggaggtctttcttgtctcagctacggctctgtgattagtgcagtgaaactgaacatgtgtccttcgtccctcagacactggccaggtgtccttggcgtgaaggaggctccagtgaaccttctcctgtggctcttccgcgcccccccccccaacctcaaagagatattttatttaaataagggcttcgatggatttcatagcattaatactcaacaggtagactgacaatctgccaacgggtttgttaccttacatacacagttagaggcagggccaccttcctcaagagtcttgagtgcgctagaaagcaggccgttttctgagctggatttctctgaactactataaaaatagctgtttgtccccaagagttggctgaggaacccgttgcttgtcacattggcccagcactaacaagtctctttgtgtgctcacagctgtgtacgctggctccttcagacgccctgaaactagtctttgtcgtctctgcaggaagaacagtttctgttctttggcgtgcggaggatggagctgagcggatgttgtgctgcccgtgggaaactcaccaaggggctgagaggcctagtcatggaggtcccagcccagcacaggctgtaagcttatacaagcgagcctcaggccagcacctctttccccccctgcttactacgaggtcacctggccacaggtgccttggagaaagggctttaacatgctctggtctgttgtcacatatgcacaggtttatgttttagaaacaaacagtgtaaacgttgatttcatatgagagtcattacaaaaatcctagtagggccgggcatggtggcacacaactttaatcccagtacctgggagacaaaggcaggtggaacgctgagtttgcggccagcctggtcaacatagcaagttccaggctagccagagttacatcatgaaaccctgtttcaagatggagggtggggggtgggatcgggggtggggatgaagaaaatcctaacaggacttggtgactggctcagtgtagagttcttgccttgtgtgcatgagatcctgggttgtatcaaaaattgaaaggaagaaaggctggagagatggct

SEQ ID NO: 34405 - DNA, 1046 bp, Mus musculus
ggcctctaacccacacctgcatctgctttgagggttaaaggcaagcccgatcttatgaaggaattttctcattgaagttttttcttctgccatcactttggctgtgtcaagttttaataaattcaccagaatgtgccttacagaggttgtggctctaattttataatatatatttccatatataagccaaagctggtttagaacttaatttgtagtctatggtggcgaagactcaggattctcccatcgcaacctgacaaatagtggggatttacttatcccagggggtggttctgcgcccggagggctgaggcagtgagtcctgtgcacaggtcctgtaggctcctgacttctgttctctttccaggtgtacaaaaaggaaaaggccagagttatcacagaagaagagaagaactttaaggcttttgccagtctccgaatggcccgtgccaatgcccgactctttggcatccgagcaaaaagggcgaaggaagctgcagagcaagatgttgaaaagaaaaaataattctgtgttggagagctgcaataaattttccataaagcaaaagctgggtttctttgtctttttttcttgagcaatagttgtgtgttgcaggtttgagttagaaggtattcctaagagatgtgattgagtttcagcattttgggccttagttataactgagtgggtgggagactgctgttaacaccagctgctgagctcaaacgtcgtaaatgccatagcccagccctaaaattaacttcagcagggtcttccttggggtggtcgctgtctactgtatcagtagctgtagcaggctcttctaacttagcccagaggaaggctggtgcctggattttgtagtaacttgcccctctcttccctggtgtgacaggattaggtttgccccgacagtgacttagaaccatgggagtcctgtattaccctgcatgtgcagtgcctgtggtgcctgaggcattcttactacatacaaagaggagagccccagagataggttttggggcctgaagttttttctttttgg

SEQ ID NO: 34406 - DNA, 2363 bp, Mus musculus
ctgtctgtggggctgtgtacctgctctagtgttctgtcctgaccccgaggacattgtgggctggagcacagtcttgcaaagaccgtcccacttgctggactgttgggcagggcagagggaaacccctgtgtcggactgcacagctccccttccatcagaatgcggtgggtaacccctgtagccagcagctcaccatagaaggaggttccatgctcttcctaagagtgtcacagtacgtggctgtttctgcatcttttcacccattgtcccaggacagctttgagaacctcagtctgagtgggtcctcatttctgggttcaggtctagctctgcacacagtgccctctgcttgctgcctttcttaccacagtctcttgtgttggtttccaggttggctgccctgaggaattagcacgtccgtggcagctgctgcctcccttgtcctgtgattgttctggaggcttctgcccaactgcttcactttctccaacccttcgtagctgcctgggctcttttccaacctgtcaggctggcgccttagaactgagccttaggttgggcagcgggtctctgtcctggtattgaatttgcacaagtgtgtggtgacatatgtgcttgtgggccacagctggaggatggcaagctttctgttgtcctctgcctatgtggagttgacagggtttggcctgcagatgtgtctggacttgagcccagtgctttggggccttgagactccagcgactgcacacccgctctgtgctgcggccagggagggtgagaaccatcgctcctttgccaggtaactcttgggagcctctcccccttctgcatagaggaaatcccagtgtgtgacagcccttaaggttcctgtggactttgtgtaccaaggtgtccagtgccaccaacactgacctggggcctttacaaatggttgctctcctccatcttcccagggctgcggtcctggtgtctactgccggccggctgagtctgcgtgggctttctgtctctcagctccctttcccagcccacagggacagaagtaccatccactttcaagtccagctccttcctaagagattcttccaccttactctgcagctgcctctggaagaactttgggctgctggggctgagctgtctgcttgatgctgacagactcctagtgtcagctcccaggccgccttagagctgctcattcctgaatgactggctcccctgcccttttagacaaaggctgctgctttcagccttctccaagggagagcctggctggctaacagagggagcctgagtcagtcacatctggcagctggcagcaagctcttcatccctccacagtgaggaagctggcagcgagcaggtagacctggagactgcacggctgctgattggtcttctatctcctgaagtttactcatgttcttaaaactcctggtgactttgttcttttgccaacgtagaaagcacagtggacgggttgtgtttgtcccagccctctctgtaggctgagcagtgcagcggcgcccacaggtttacacacaagtttggtttggtttcttctgttctgcactttggagtccctgggtattccacattacaagttgatgttataggtgggggctggaattgttgccctggatgtggggaccaaggtacaatctaaccatgggcccccacaaggcttcctgaaatcaaatgttaggtgttgagagtagctgcagtctcgggataacttgtgagttccctgggtcctggagggtgcagggtttgtggaacagtagtagggatggggagctgggctgggttcatcagaatgggcgtgtctgccttcacagtgctgtcctaagtaaataaagggattggtgaagaacgtctcagacttttttttttaaggagttctcggggtggagggaggtggctcagcagttaagagcagtagctgctcctccagaagatctggattcaacccccagcatccatctgtaactccagtcccagggtacctgacacactctgacctctgtgggcgctgggcccacagacatggtacacagacagacataggcaaaatgcccctacacaaaaattagtctcaaaaagttaaagaatgagatgtcaattgtagcccaagatggccttgaattcaaggtcctcccactctggtctcccgagcggttcagcttatatgtgggtgccacacatacctcgtttatttaccatcctccattgttaaaactacctctcctctgctttgctttgtgcccaaagtagtttcagactgacttcctggggtttggggtaggttagctcagtggtagagcacttgcctagcaagttcaaggcctccaggaagtggtcag

SEQ ID NO: 34407 - DNA, 1134 bp, Mus musculus
agcagcccaggtgcatggccttcatgcctcctccttcctcttccagcatcctgaactggcaaggcatggcctccaggctgtccctgctccagtgacatcagctggcttcccctccttcagggctgcagcccagggtgtcatggtcgggcagaggtgggaaggcatcctaaagatacacagagcagacctttagccagatgttgcccagctctttcctgttgtttgaaggctcagtagctccaaggctgtggctgctcaggcctctcgggtgaagctctacacccttcccgctgtggttcctttggcctttgtcacctgtctgctatgcagatgtggctctggaggaacagcagactggacccctaggctgctctgtggcactcatccctgtctgggtgcccgtcctcctgattgtggcattgcacttcacagagctcgcccattcctgagggctgtacctagggaaactagagaggcacgcaagctgctcacagagttcctccatgaatatttccctctgaatcataggcccttcagcagaaaaatgtggagtgtgcccgggtgtatgctgaaaatgccatccgcaagaagaatgaaggtgtaaattggctccgaatggcctcccgtgtggacgcagtggcctccaaggtgcagacagctgtgaccatgaagggggtaagtgccaaaccatggggccgtgtgaccagcgtttgttgtagggtttagtggcaggacctggtgcctttctagagtagagggaagctggaccagcagcgaacctgggcatcgggcagcatgggacatggggaggcctcaggacagcctgggtctcctaatgtcattccacaagagactgggagttagacagagctcttggttccacagcagagcttcccttcaaactggagagacccgaggactcctgtgtcatcagttgtgttcaagtagctgagttagggccctagtggcctgtccctggtctgcagtcctcggtcgcctgttactctgtttttatccctaatcctcttctatcccaggtgaccaagaatatggcccaggtgaccaaggctctggacaaggccctgagcgccatggaccttcagaaggtgtctgcagtgatggacaggtttgagc

SEQ ID NO: 34408 - DNA, 1219 bp, Mus musculus
cagctccaggccagccctgaagctgcccttctcctgcagcctgtgaaccggagctcatgcctaccttcccccaccaccgcaataagcgtgctgccccagctgccgctgaagggcagagcaaacgatgccggccctgagcctggatccagcccacccctccacatcctcacggatcatcagccgacgactgggaggccccagcaggcctttggctcctccagttggctgactcctccctgatatttccctctgtccagatgcagaggggatttgtggacagggatgtggctgagtggggtacccaggatagactgggcagttgtagcaccatctggtggcctgtcttgtctatcattgaaggcccgcttctgggggaacagagctagtgctgagaggcctaaaggtcccattcagtgtgtgtgagaactggagctgggcactagcctggaatgagtaggcctgggagataactcttcttggagactaggagctgcccaggacagatgggctatagtgaccccgggcaggagggagcaagggttggttaactggagtaggatacttgtaagactgtcagaatggaagcccttggtggacgcggctggcactggtgcccaaggagaggattggtggactgagagataaaaagcctttccagaagacagtttggcaatcctttaatgtactgtggggtttcgatccatgcaacatggacagtgtcctccgagggccctgcatgaggagcaggaacaggcttggctgaggtggacccgtgtcctctgagggcctgcatgaggagcagggacaggcttggctgaggaggtgccactagaggaagtgtggcaaagtggtgatctctgtgcctgggccttcgagtggttgatgaaaatccagcccttcactatccctatcctgaggattggcagtttagggaccctaatgaggggtcctggtctacccgcatgggagatgagggtataacttcttcctggttagctgcatgcccagaatgagctacgtggagtggggcggtgagctgctttttggcaatagcctgagaagtggcttgtacatgctcccttcctttctggctggtaggtagctgatggcagagaatcactcctgctgggtgggagtgacagctcctcccactgcctgggagtgtgcctcactaacagcagaggtgaaccggggtcctcacagctaagtaagctctgct

SEQ ID NO: 34409 - DNA, 1173 bp, Mus musculus
agacattgttttcctccaagggagaacctaaacccttgtgtatgctaagcaagcattgtggtcgagacaaggtccttgttgtatagcccagcttgaccccaaactcaccatcctcctgcctcagcctacaggaatattccactgtacctcgctggcaggtagcctcccacgactgtagtattccagaaagtccaatgtgctttctagatccaagctaccaatggaatcaaagctccagggtttaagcttgggtctttctaagtgtgaccgtctacaacagctctaggcttccttggagcacttctgtgcatagcacccttagggagaggatgtctacacacaaggagcactggccagaacaccctccttagggcgttgcacctcgacttaagagaaaaggggcttttccctaaaaccacacagctaggaggctctatccttgccagctccaccccaacactatttctgaactattcagtgtgaaggccacgcctggctgcctctgtcctctggggcggatgggtgggcttctagcttgacagaactgaatgaaagtcctgagatctcaggtattcccgtggagcagcaggctggtggggtgtggagggggagacgttaccatgacaaccggtggaggtttacctcgcccacgtgcattctgacgtcattgccttcccactcaaaattagctcagagcggccctaccccctctaagtggtctgccatctgacctaaggactaggccagccctggacctggccgcctaacctggacccaggcaggaataagatccctgctgttctgatctgctgttctcttcccagtcttagcagcctccttttacagatggggaccagtccacatcttagaggagttaggatgaccataggacatcaagtacctccctcacccacccacgtctaccctagaatttccatggcaactagggcagtgagactactttgaggacagccatataagttctaggtgaatgactggtaggcatgcatcccaacacgcccacgagccctcaacgcagaaccctcccctgaagaggatctgcagccctcaaacagcctggacaaggacgggagtgaaggagcaccactgatgccataccttgatagtggtgaactcctttctccagggcagcaggtacaggtgcacagcggc

SEQ ID NO: 34410 - DNA, 1184 bp, Mus musculus
agggtttgtacatcacagccttggcccaagccatgcctgaccaggggtgggaggtgggggggtgcctatcatgtccctgtgggtggcaggacactgagcaggggcagcaagtgtgtgagcctccctggcccatggaaaaagaggtcagagccatagcctcggggtccagctgcccctcacctcttggtcccatgctcttccaagaagctctcatgtgtaccctgactagtgcagctagagctctcctgagccgggcccagaggacctagtgcagaggtgattatcttctagtctcaggcatttgctcccaagcttccaaaagcacctaagtccatagccaagtagaacatcagaagagacctagtgtatcctgccattgagagtgttacttgggcccagtattactatggccaggaggtctcctgggctgttgggggacaggggtacaaggattatagccagcctggccaagatggctccagagaggcagagcgcgtgtcccttcggccctggtcccacagaccgacctcttggcctttgcccagcagcggtgctgatgacttgctgcccatcctgtccttcgtggtgctgagaagcggcctcccccagctggtgtcagagtgtgcggccctggaagagttcactcatgaggggtaggaaggggcccaggctagtgggtgactaggaggctgatgtgggggaagggtctctgtgggaagagctggggacagagcagctctgacaaggggggacaagggaacctcaccccccccagtacaaaagcaatggctatagtaagccgtggaagccacaagggggcccgcagcaccaccgccactttcggacatccctctgagatccactgtgcatgggacactcttacccgcatgctctgtagccttcagaggaccctgtgcaggagccagagggtgtctctgatcagcatctgcccggggaagagcagtatgcaccacagggccatcacaggacctggactgacagtggggaaaggtccgccctgacccagctctctagcaactctacccgtgaccgagtcattgcccaagcaagaagggaagatgttgccctctggcggcctaggcttgtccatctgtcctctcagtcgacacgtccttccccactccacacaggtacttgattggagaagaagggtattgtctgac

SEQ ID NO: 34411 - DNA, 2092 bp, Mus musculus
tggctgctggctctgaggtggggtgtagtctggggtccaatgagcaagcagaactacaccggcagggcagtgaggactgagtgaaagtgtccttaacctcacgtcacctgctgagttcaagccgctcaaggcgcccagccagccagcggcctctcaggtaggctccggcttcacagcctgaccctccatggtcccagaggggctcagaggcccaggtggcggctctgcttccagaggcagggctctgtcctgggcctgggtcagaggatggaccatggacatatgcacgttgaggttgtgggccttttcaaagcgtcggccgcactggtcacaggcgaagtccagctcagtctctgctttgtgtttggtcatgtggtacttgagggatgctcgttgcctgcactggaacccacagacctcacacctggagggcagaggcaggtgaggtaagctgcacttgtcccagtcacaggcagtgcccagcccacacttactgcagtggcttggctcccgagtggcgcatctggtggacgagaaggtgcttccgctgcttgaaggtctgcccgcactcgtcacagatgtaattgcggacctctgcaagagcagagcggtgtgagcagcagccaccgccgatgcccagtctgctccaggagaggacggtgaccactgctttacacagcaccggggacctttaagaacccaaccttatttaaaaccaaagacgattctgatatgaagaacttcactgataaaagtttctagctagtcgacggtggtgcaccaaccactaagtcccaggactcgggaagcagagacaggtgattctcttaagttcaaagatcgtctggtctagagagcgaggtctagcacagccaggactacagagaaaaaccactttccaatagacactagttcattaagagatttccaagttcctcacagcgctgttacacggctaggtcttccccacagaaactgtttgcatttcagacctttctgtttgcttttgagacaagatctcactgcgtagccatggctggccttccagaggactcagagagatccgtgcaccaccatgcccagcctgacctttgcgggcacagatctctctctgggattcaccccaaagtgagccccaaacagcgcagataacgtggtggaggggaagcgggctgatgcactgtgggaatcagcttctcgagctactcaacagaaactacagccacatcaggcatggtggcacacgcctgcagtctcggtactcaatagttcaagaccagcctctgctgtagatcagatttgaggccagccattacatgaaaactctcaaaaacaaaactgttgagaaggctcagcaggtagtcacttgccaccaagactaataacctgattcaaatctcagatctcatgtggtacgagagccgatagctacaagttccacatgcatgctgtgtgcacacatgtgctttcttttacaccgtggccactgcagcactatgcaccaactgtacttgttccaaccgatgctgtctacacagctataaaacacctctgacctctcagctaaagagtctgtttcacctctttgttttttgaagcaggatttctctgtgtagaccaggctggcctcagacttaagaactcctcctgtgtctgcctcccaagtgctggggtcaaaggcgtgggctatcacggccccacgaatgtttcacctctgcagagagctgctgctgtgtccactagtgactggctacacagcttgaagatctggaccaaaggtagttagtcatcaggagacatgcccaaatgcgcttatcaaggaaaatcaatatatagctgggtttcaccataaaaccaagtaaatgatccatcaataaaatgccgaacgctaatgtaaaaagattttggtcatttatataaacccctgaaaactttaacaaatctatctgaatgaatgccacaataatttttttctacattctaaattttgggtggtgtgtacatgccatgtagaaagtgtgtgagatcggaaggcaatgtaggagtcggttcttcaccatgtaggtcctggggagatcaactcaagtcatca

SEQ ID NO: 34412 - DNA, 1225 bp, Mus musculus
ggaatccatgatgtctgtgtcctccctgatcaaaagtactccaaatcctgctcagtaaccaagccggtcttgctgtcaaccctgctgctaagggagctgcagggagctcagatgactcctctgactcctgtagtgaacagcatgagttttctgccacactcttaccctcatggaaactaagatatcatgctagtaattgggcctgactctcttgggctagcccagttacaggcccacatgaacaagcaggaatacggagaacttagtagtactatggcctcttccttcaaagctgctggggccccgatatcccattatgaggtgggtagggctaagctggttccctcacagtgctgtacaccgtgtgacttacgtacagggatggccccacctatcaggtcctccctgaggagacagacacaatcatctgtagtgattctgggccctgcactgtgtttgagaggagagccccttgctgttaaacacagatacctggtggccaggagtgtggccattaactctctgcaacgatgtctgtgtgtcagtttcgcctccgcgtcagcttccccagcacccagccccgcctggatcgcagctgctgcgctgcactttgcgtggagaggagttaggaaggaagatgtcactgcacatctgcaaaggctggactgccaaagagaggaggtgagacagtctccagggaggttggcccactggctttccaaagacaagcagatttggggttttcactctttttcacagttaaacgattagcttagtgtttattggtaaaatgctttacttttggaagtgctttgtcgggcttgtttttgcctgcattacaacttagaataaagctaccagccagtgtccacactgtgagccaaggctgtagctctgcctctctgttccagcttctaagaagcaaaagcacagtcaggccttgagtgctgggccctagagaaagagtcctaaacacccagtgccttctccaatgagtacttacatgacctctggtgtgtggatcaagatttgttggggacagaggaaatgtgaaccagcacttgggaaggaagttgccgcccctctcacttttcaatatgggtcccccactggctcataaagtatatcccaacctaagaactctatcagcagtagagctgattatttgctgactgtaatataaatgccccaggattcttctaagcccattttcctgttgcttttg

SEQ ID NO: 34413 - DNA, 1210 bp, Mus musculus
ctgcacgtgtgtacacctgtctacacctagcacaaagggcagtgcgtggccccagagagacctgtggtggtatgctgggtaacccctgtgctcatttatgtttacaatttaaagattgctgtgtttggttctatggttttgtgtgctgggggtaagggtaggctgaatctagagtctgtgcatcccaggcaagtgctgtaacccgcgcaggcccctgaatttgcagtcctcttgccttagtctcccaatagctgggctactacatctggctagagatggccttcacatgtaaaagcttgtgtccttgtccctccttactcctcatccctgtggagacaaccttctcaaggtcatctctcagagtccccagctaaggtccacagtgagctgagaacccttctgccccggttccggtttggtgacaggtccgagctggagggtgaagtaggccctgctctttcccaggagatcgctctggacttggagctggatcaaggttctgctgtgccccatggctgttctacgccgcagagtcactttctgtttcgggtgttcagaagacggctgcaggctctggcaaggccagacagcatggctaccagcctcaggagacaacaagaactgctcacatgcaaacggtatcatccggcggactctcatgccagcgtctgtctttagcttccactactaattgcttatttctattatgtctactccatccaagcttggaatggtttcagtgtcttggtggctctcataggaacaagtgtaaaaggtgtttcggattctagtctttcttcttagactcaagaatccctctagggaagatgtacttactataaagaacacgtttttgtccttttctttttgtctttaaagtgcagtgcgactgttctcataatagaattttccagtaaaggattgcttccttagacagtggtgcatccttccacctgcttgttgaaattttatttatattttttgaagtgcatttagggtatccacagtgaataagcaggaattaagagctggggacaaaggcagcgttgagcacatgagctcaagggcaaggtcagtgggaactagaagggctgtggctttgagcagcatcacttgatctggaaagtattgtacagggcaaggacaccctgtccatgctgtctgtcttcaccacgatgcacccctttctttccaaggcttctcctctgcc

SEQ ID NO: 34414 - DNA, 1164 bp, Mus musculus
taaataggggccgagagtcctctccgtctccctgataagcaagaaatgctctcaatgtgtcactgaggagacccttctggtgtcattgctgcttggctagctcagggtgtgtgtgtgtgtgtgtgtgtgtgtgtgtgtgtgtgtgtgtgtgtgtgtgacagtacaggtgtagggcagcctgcatgcactgaaggggctcagcaaggccagggctaagggagaccccagggagacctgctctgcttccctgctcctcctgcgcccctgctcatgatgtgctgtgtctgtcagggctgtaatgggttcacaagaaggtggcaggtaagatgccctggtgggcgtggtccctgggtgtgcccctgtgaatgtttcatactggctgtgaacttctccctgtctgtttcagtttcagttcgttgtgttaagattgttcccagaggccagagcaccttgtgctccagagcatgcagcttgcgtcccctggagacctctgtaccttccttctgcagactggcagcgtgctgcgctctctctgtggagacgggacagcttccaagagctcctgaaggacaaggaattttatgtaggtttccctgtcttccactgtttcacatggcctgactgcctctgtgtgtgtgtgtgtgtgtgtgtgtgtgtgtgcgtgtctgcctgtctgtctgtctgtttctatgtttgtgttcctgtttaccttggcctttgtccaagtggaaatgcatggagggttggtctataatgtgttgttgttgttgttgttatagaaaataagattttgagatctggtgtgtgagattgctttaagaattttcataagaagaaacaaaatataagatgccatgaatatttgaagcagagtattacatcaaggttatgggtttttgtttggttgcttggttggttggtcgtttcggacaggatctcactagccctggctggcctggaactccctatgtagaccacgttggcctcaaactcacacaggcctcaaactcacacagatcccctgcctcttcctcgagtgctgggattaaacactgcccagtttataccaagatttgttcccccaactcctggcctataaaataatttcttttcttatcagataacaatttagctaggcacaagctaattgattaaaagtgaaga

SEQ ID NO: 34415 - DNA, 1175 bp, Mus musculus
cagtttcatgtgtaggactggcatggagcccagggctttgtgcacgctgagcaagcattccgtgtgtgtgtgtgtgtgtgtgtgtgtgtgtgtgtgtgtgtgtgtgtgtgtgtgtgtgtgtgtgtgacagttatatatgttacttttttgtaatttttaaaattattttttgtatatggatgttttgctgcaatatgtgtgtggtgccctcagaggccagcagagggcatcagagactggagctacagatggttgcgagccacagcttgtttgttgggactcagactcaggttctctggaagcaagcaccgctcttaatccctgagccatctctccaagctcctcctcctttttgtgtgttgctaggagttaaacccagtgctttgagcgttataggcacatgttccattttgaatgacatctcctgtctcagtgctttcatttttgatactgtatgtgatttccaccatcatcaaagagaaggccttccagagacagtgcccgctctccacacaatgcagtgcacatctgacatacacagctgtggtgctcagtaatggtgcacatctgtggtgcacatctgtggtgctcagccgtggtgctcggccacacttccccaagcatatgagctttttgtatttataataatgtcactgagtgtgactcccatttgacctaatctttaaaatgtccctccctggttcagatgccacctcggctcaaaggacagaggccgactgtgccaaagagcccctgggactgctcacagcagcactggaagagctcagagctttaatgacagacccgacccaatacagtggtaagactcgggatgaggcagtgtgtggtagtgcttgtgctccgggtgcctgcgtgccaccatagtgacaggctggctggctcattcctggagatcggtatttggcaggtgaacctgcccaaagactagactgagtggggattcagagtgatggggacgatgtggccacccttccattcagagcaggctccaagttgggtgtgacagcttggccagtgctccctagcgtcttgtgaggccacgctgtcgcttggttacatcgttctttccatgccttacataactgcatgtgtgtttgcagttatttctgctcaggtggccgtggtttctgaaaaactaaatgctgttctgggac

SEQ ID NO: 34416 - DNA, 1160 bp, Mus musculus
gttcgtgtgaaagacgttcttacttggctatgaagcatggcatcttaaactcttgggtggtagcagtaaccagctgggtaccctctgctggttggagacctcggggaagattgttgctaaagcccagggggtctctccagccttttctgaggtagggcatgagttctctttcttattgtagaatcctgttcagcctccagatttctaggatgcgggaccctgaaggtccttcaggcccacttttctgtcctgtgtgtgtgacctccctcccacgtgtctgtcttccgctgtggtatgcagctcctgccttcctagtgtgtctaatctcctgccctgcttctggactcttgacatcctaagatggctcacttctctcttgatgaaaccacatgtcccatgattcatttgacacgtgtggcttcatggcctggttgagaaagtgatttcctggcttgcatgatggtgagccccgttggttcttggacaggatcccggctatgaacagtgctttccctcttggccaccccctcatgtcatttgcaggattcctatctactccggacatacgtgctgtggtgtggtaacagagaattctctgaagagcttcttcagtcacacgctaactcagattctgactcacaagcccgtgctgaaaggtaggccgccgtgccgtggccactgtctgcccattttggggtcttttcccctattcctatggtggaactctcacagagatatcagtgactcttgggtgggcttgtggctctgtcctccgcaggctcctgagcgctgagacctgggggtgaaatggaatgctttaaggcccttgagatcatgacactagctcagagtctggcatccttgtcgtctggaacccacatccctctgattctgaggaatgacctcagttaacaaaaggaaatggtcgtgtcaacagtgttgaacaaattaaaacagttgacatagaaacttaaaaaacagggtattttggatggttggttgcttggttggttgggttgtttgtttgtttgttttaaaataaacgctgacttgaagtttttgtgtttcctccccagtgtctgatgccattcagatgcagaaagagtggagctttgcaaagacacatcatctgctcacggatctgcactgcagggtgagtg

SEQ ID NO: 34417 - DNA, 1177 bp, Mus musculus
ggttctccctctcggctttctccaatttccaaggttgatgtttgtgaaccggctcacagctcagttttacagttcatttctcgacagtggaagccacccccacctgtaagtgtggcttgcttgccgagtgccagtcactgggtgtgtttccacccaatccagaccagccctctgtggtaagtgataccactgtgcgagaggaaactgggactgcttagtcacgtgatctttgacgccagtctctctactggaggctgtacccagacccaggagaaatgtcggtggtgtattttctcttttcaaaatttattcctttttaaaaaaaattttcgagacagggtttctctgtgtagcctgggctgtcccggaactcactctgtagaccaggctgctcaaactcagagatccgcctgcctctgcctcccaagtgctgggattaaaggcgtgcgccaccacacccggctccaaatttatttcttgggtttagcgaatccatgtattttaaaattcagacagcttcttcttaaattttatttcatctgtatgagaattttccctggatgtgtgtatgtgtaccgcgtgcatgtcggatgcccgcggaagctagaggagggagctgaatcctccgaaactggagactgttacacggtgctgtggggctgtcctgtgagtgtgggggatgtcggccctctataagagcagccagtgcccaaattcagaaagtttaagggaagaccttgaaggaggccttgtgttggtgtgcctggatgcccgcccatcctccctactcacaggctgccaagatcgtgagtgtttcctgcacataccagcactcaggcgtgtgtacttcctcctaaaggcaggcgttgctttctgttttgtttttctccctgagtgggagccttggatcaactcagcacacaaaacacatcttattggtcctttatttgaaacagggtcttcctttctgtgttaccgaggttgaccttaaacttgaaatcttattgcctcagcctcccagatctgatttcaagtgaatttctttttcttttctttcccttttccccctttctttcttattttggctttttgaaacagggtttctctgtgtagccctggctgtcctggaatttgccctatagaccaggctggcctcagactcaaagattcatctctg

SEQ ID NO: 34418 - DNA, 1178 bp, Mus musculus
cccgtgccaccaagtctggcttaggttagattagtgaagggacatccatgtttagccaaaatggggtaacagccactttctagttgaaacaggcccaaagaattaaacaaagagtataaaacaataggctttaagactgggtatcaggttaacagtaagaagctgacagcgagcttgtgccagcctggggatgtttgccttcatcagctggacctggggtaggagctagggcagctggagatcttagaaaaggagagggagaggagagagcagcacagagaaacctggagatctgcctctgagatgtacgtgtgcacagagcagtcacatgctcgtaatcccagtattccaaacactgaaacagggggatcatgaatttgaagctggcctgaagaaaaataatacttatttaataactccactacttcaaaagaaagcaaaaaaatgaaaaaaaggaacaaatatatgtgtaaaaaatagcaagatgataaacataaacacaattctgtccaactactacatcaactgtaaatggcctaaataacccaattaaaatgtagactatgctggcatagctaacctgccactgtcaacttgctgtggaagagagctatgaatgtaacccaacacacaaaaaaatttacattataaagtagagcttttgttgttttaactgaagtgtaaactttgtagatggccatgtcaataggttggacatgggacctggagagatgtgtcaatggttaagagctcacactgcttttgcagaggatctgggtttgatgcctggctctcacaaggccactatcaactgtcccagggcatcacgtgacctctgcaatcactgcatgttgtgcacagacatacacgcaggcagacacccataaaatatcataaaataaaaataaaggttaacattttttttaaagtttggacatgcctgagttgtacacttctgagtttgagtaaaaaagcaagacccagagctaagatacagtggctcataactggaaccctggaactcaggaatctgggacaggaaaactgacaagaatctgagaccaaatcctgtctccaaaaaaaccaaagacaatgaagaaagtagattttagagccaagactatttccagtgataaagcagttcgtcccctaagaaagaatcacaatctatatcatta

SEQ ID NO: 34419 - DNA, 1429 bp, Mus musculus
gtgacgcagggcaggacggggcagtgacgtcagagtgggcggggcgtgacatccgagacagctaagggggaggggcactgtggatggcgagtgggaggtggggttcagttgggtctaggcttcactgaaggagtagggttgttctgtccggggcaatgggatggtagggtaggcttggtttcatttctgcgacttgagggaggtctctcttctgcaaacatttcggcttattcatcacagtacttctgtgtgtcccagctacttgtacctatcgtatcgtattcctcgcagcagaaaattgggtagcagtcctgagccccgtgtttttccttacgacagactgacctgggtctgcagtttcatatgtgtataaattatgattctgacttcatgtgtgggcagataatatgtcttttcctcgtatctccaacttccacatatggtaaggtgtcagtggccattttcgagtgagtaaaaagatgtaatgtgtctgagactctcagtcttgcagtgaattgtctcagctagctgggacacacggaagtactgggtcttcctcaagtcgcagatatgaaaccatgtctatcctactgttgcagcacccaagacagcactacccccagttgtccccagctttttatcagttagcaggtttaaaagttcctagcaaagatattgattggtgtgagaaatgtcacagacattttggaagtttggttcagagattgtttatttctcccataaggaaaggaagggatctgtcctgtagtctgtggcgatggtgaaatatgtcttcccttggtacagagaactcgcctgcctcctctgactttgagcctgagagcaacccccattcctactgtttcttctcccttcactagtacttttcttagatttacttttgcttatcatcatttctttttcaagacagggtttctctatgtagtcttggctgtccttgaactcactctgtagactacttagagatgctgtgtctcagactcggaaattcgcgcacttctgcctcctgagtgctgggatcaaaggcatgtaccaccaccacccagctatgtttacttttaaacgtacacaaaaattaggaaaatacaaataacccgtatgcgcccatggcccagtttctgtcagtctacatgcctttaatataattttaatcccatttctcttaagaggtgattgcaaaacagagcctagatatcccatcattcacccatctgtagccttccttgtactgggattcctcccttgacggcagctggggttcactctcagaccttagggatctgagaccattggttcttaaagattttacagctctcctgaacttgtcctgcacttcgctttccctggttctttacggctttcacctttagccttggctccctgtcctctgcttttgcctccctctgtc

SEQ ID NO: 34420 - DNA, 1103 bp, Mus musculus
gacatacatgtggtgcgtatgcatgcatgtaggcagaatatacataagagaagaaattaaagtccctgcatggtactcaataaatggggtcactgtggcttggggattctgattgtcatgcctaacagtgatgcacatcttcagtgcactgactaagccagaactcatcacaggcttagagatgtgctggtgctgtgtgggtcaggccctctctgttcccagctctctctgttcacagtcctccctgttcacaatcttccccattcacagtcctccctgttcacagccctctcttttcccagtcctccctgttcccagtccttactgttcactgtcctccccattcacagtcctccctattgacagtcctccccattcactgccctctgtggtttcagctggacggagcctccaggtgtgctgcactgggacgctcagttgctttcatctccccatcgtttttgcagataaacacggaggatcttgaggatgaccttgtggtaaatggggagagatctgactgtaccctgccggactctgtgtcatcagggaacaaaggaagggctaaacatggaaacgcagagaccaagcaagatggaggggccaccaaagcagggtcctcggaacaggtatagaggatcagtcacatggtatagagtcacatggtggtgggacactgtgaggcctgccagagagagagccccgaggtgctggccacatccaccctgcactaccagtttcttgaattcttccgaatttgagctcaattgtttggttgccctgaggaacctgggtgggtttcctgtagaaatctgaaggccagcagttgcataagtgtgtccacctgctcttgtgggagagcctgtgcctgatgacctgatgagaacatgcagcctggtgaagctcgagttctcacgggacttggctacaggaggtgttgtggtggagcagaggcctcatagagcccctggcccagggagccccttctgcaggggtggtagagcacagcagggaatggttgccaaaatgaagatgggatggcagcgtccaggtggctgggtggtcctgtgagtcatctactataggtcatgggaaggcccgaa

SEQ ID NO: 34421 - DNA, 1207 bp, Mus musculus
gttagtgtatgcagccattcagccatcaccaccatctgcgtcagtcagttttaaagcaggccctactgtgctctgcggttgtgcgtgaagggtggagtccatgcgtcgagaggccctagcttggcatccttcatttgccacctttgtggtcccagctgtagcatgtatcacacttctacctgtttgttgctatataactctatctgtgtgtagaccaaatcttgtgtatctgtcatcagttgatggacgtttaggttgtttctccggctgttgggaatgtgtctgtgcaggttttgtgacgatgcatgttggcgaacaagtgggtatgtggtattagcagatcacaacaccagttgtatctcctggtataggaagctctccctctgcagcttacagatgtatgttgcgctaagctagagtcattcaggaatgcctaggaagtctgtgtgccatccctcatcagggtcccagttacatgacctccttccttccagaactttccttgttgtgaatttttataatcattgtgtctgtgacacccccctctggtgtttgtggcccacagagagagccctgtacagcatggagtgtgcattccaccccttgttcagtctcaccagtggaacttgcaggctggattatcgcagacctgagaataggtgagtctggtccaccctagagtgagtaacgggtaccctcaagtcacatgagtgactgttgtgatacaagattgtcctgtccctggggatggagcagggctctgaaggtccagggtaccttttaagctttgacgtgtttccagctgaactgcagagggctggctcaaagaaccaggcatcagactggccccaaattaaacctgttcaagttacaagtgagcataacaagccatggagcagtgagacctggagtcatgcttctcatggctttggagggacccccccccccccatcccagggaggttgaagttctgcagcgcactttgtggctgtgtctcctggttctgaaatctgagatgagcttaggtttagcttgacttcagagatcacacagggagcactcccttctggccttctctgagcccgaccaccctctggttttagctcatgcgtgcccttccttccttcctctgcttctctgtatatccctgggctgccgtagcaggccatcccccacctcagtctcatccactgtccactggtgcact

SEQ ID NO: 34422 - DNA, 1168 bp, Mus musculus
tttcacatacacttggttagagccaagcgtgtggcacctatgtagagacttggcgtccagcgttcagaagtagctctcttgagccaaggatggttcaaggtcagacttggcaacatagtcagatcccatctaacaccagaaaaacttcattcatgtgtaagtgcgtttataactaaacaaagaggacatatttcctggccacttaggaaattgggggacgggggggacgggacacagtgctggcccctcggccatgttctgttgcttttctgtcactctaacgcacgggaactgtctctgacccaggagcttctacctgaccctctacaagcagatgagtttcttggagaaacgtggatgcccacgtactgcgctggagtactgcaagctcatcctgaggtaagtattcacttggactgtgtggccgcctgtgctcaccacagacccgtggggactccagccgtgacagcatttcctctgtctcccttgttctccacaccctgctgcctccggaagccttgagccagatgaggaccccctgtgcatgttgctgcttattgaccacctggccttacgggcccggaactatgaatacctgattcgcctcttccaggaatgggaggtacgtgtaagccgtggaaactcgggccttgaaaccgcagctgtggctcctttacctttctggcccacactgtgtatgttgggggacagccttaggacaagatgctgggagcctgactcagagtgcaggtagagcaggcagatcaggtagaccgggtagatcgggtagatcgggtagatcagggcctccggcttttttggctcccttgttattacttttgctaaagatccagtcttcctagagggtgttccagcagccctgtgggaacttctgtccacagacctgaactgaaaaagtgtgcaaaacagtggtgctagtggtgatgaaaggttggggacacccaggactccctgtggtcacacaggtagcagtcacgacgcagggtgccatatgagactggcacaggcaacctctgtgcacagactcacattctgcagaagtcctggacagacagacatataaccataaccagtcccttgtaccttgccagatttgcctggaaataaaactggagggtgagctggaccgcactgccacctggcccag

SEQ ID NO: 34423 - DNA, 1125 bp, Mus musculus
tcagcattcaagcagagagggggacaagagggttagaagttcaggatcaccctctgctacataattaagttcaaagccagtctgagttatatgagatcccatctcaaaagagatgcatgaggggcctagaattcaaagagacgttaaaaaaaaaagaaattgtcctaagcaggtaaggaatactttacagagattaaagggtatttgatctagggatgagtggggaaccctgaccaagaacccgagtccagtggcaggaacaaagaccatagccaggcaaggccggaggtctgtgtctcataagctgtttgtggaaagctccaggctgctgaggtgttacagctgtgtcaggtgtctcccaggcagcactgacggtttgcatcccacaaagcctagcggaggctctagtctgtggagcagagtcttagctgtgcaatgacagcgagggccccctaaatcttggtccattgatgccttcctgggagtctacgtgtttcagactggatgattgggtttggagtacacataaaacacgctttaggactgagccattctgatgtaacggtactggctggcaggcccgatggcctgaattcagtccccaggactcatgtgctgcacagtgagagctcgctcctgtagcttgtcctctgacctccacacaatacactgccaggtgcacacctacagaattacacccaggaaatggaaaagggacagtttggggttaaagcactgtgcagaggcccaggctgtgaacttaaagcacacatggagggtgactcacaactacccatgattccagctccagtgtacacttaaggaggtctcttaataggtgctctggggcaaggggccctggatgtgactgagcaggggcccagagcactgccccttcagcagaatattgagggctgacttgtttccatctatcagcctaatgtcatagcccattcctaagggggccatttacaggagggactccgtgttcaacgtacatgcctggtaagaggtcacaggtcacatgaattggtgctgaatgtctttttttctccagcatgaattggcaaggccatgaagtctggatacaggctctacaacttctgctcgtgggtcagcaggggc

SEQ ID NO: 34424 - DNA, 1267 bp, Mus musculus
ctggggagggcaggcctaagggcatggctcccaccagttgcctcacctatccctgggtttggtgggatgatctacacccagtcctggggagggttactgctgagatgggcctcattcaatgtgagtttccaagttggaatggcctgtggtgagtttcagccaaggggaggaaggactgcctaggaatggatgtatgttgtggaaatgacaagcaagcgcggaaaacctggcatcctgcctcttcctttcagcagctgtaagtccatccggatgaggatgtgacatctggagctgcagcagctattctgcaaccacgtgacaacgaattccaaaatgaagagccatgctctaggaacagtgaagcagaggataccccaggccttcaggaacgtcccacctgcaggcctgtttcctgagaggccatcagatgatcggcttcagaagtgttgctcagccttgcaactgaattcatttctaatggtgaaaaataaaaccagtccttcacaccacctgtggatcatcatcgggaaaagtaactttctgagacagagtctcactgtgtagcccgtagtggcctggagcttgctatgtagaccaggccgccctttactctgtagaccaggctggcctcggagatccgcctgcctctgtctcccaaatgttaggattaaaagagtgcaccaccacacctaacctgcatgtcatctcaacagctttaaagtctggcctgtcacccaggtaggggtgacagtgtgtcccgctcctcccgtacctccctggcccctttcccaagaggcgcctgcctatgtgttctgtgcagaattgttggtcatttgtgcattttcatgtagtcagggagaaaacctgtttgctgcctctcagagaaagttcacaagaaatgaaagactttgaaacaaaaacatggtgatatggcctttttaactttgttttttttttgtgtgtgtgtgggtgttttgcctgagtatgtgtctgtgcactgtgtacgtgcccacagaaaccagaaaaggacatacaaagaggctgttggatcccttggaactggagtcaatatccctttttcctttctatttctttttgttgtttatctatttgcttatttttcgagacagggtttctctgtgtagctttggctgtcctgtcctcctatcctggaacttgcattttatgtgaggctggcctggaactcacagaggtccgcctcctctgcctcctaagtgcttggattaaaggcatgcgctaccatggc

SEQ ID NO: 34425 - DNA, 1104 bp, Mus musculus
ctcaagtaaggggacaggaaggaagatccagttccaagaggtgtgtctcataggagacagctagaagcaagggcctgactagactggagccaagtgagaaatctgccctcttgaggcctagcacagagccggctgaagagttccaagaccaagtgaaacccctccaggagtaggacctaggattccagactttctgtcagacacccttggataagcctgtacccctgggctagcccttatcactggggagttctgaggaaatgccaccaggggagcatggttagaggtagctgtgttggctttagggggagggtaaggattgaggctgctttgtggggttgccctgctatatctaccccatgtccccagccttggggaagtgaaggagccagggtgttgttggagaaaggggatgagccatgacgagcctgggacactcatctcagccgtgctgggccctgcaggtgggatgctatggaatatgatgagaagctggttcggttccggcaggcccacctcaaccccttcaacaagcagcttggtccgaggcatcatgaacaggaacccagtgagaaggtcacttctgaaggtgagctttggtgcagggtgacaccctgctgtgtagattgacaacttagatcaaccctgtcactcttcctgcttgtagcccttccagtgggtggtcatagtcacattccacctgctctgaggttttctttgtcttccttttttttttttttaatttgtttttgggttttttgtttttttttttttgtatttgttttttttttttcaagacagggtttctcggtatagccctggctgtcctggaactcagcttgtagaccaggctggccttgaactcagaaatccccctgcctctgactcctaaatgctgggattaaaggtgtgtgccaccaccaccctgccttcttttgtcttccttatcagaatgaacctaaaagaacgggagttatcaacctgtgggtctcaaccctttgggggtttgtgtaaccctttcacaggggttgcctaaaaccatcagcaaattcagatatttatattatttataacagtagaattgcagttatgaagtagcagtga

SEQ ID NO: 34426 - DNA, 2472 bp, Mus musculus
tcgagttccatccctgcaatccacatggtagagagagaaccacctcttgcaagttgttcctgttttttataggtgtgtcacggcatatgtatgccttggcatgtgcaggtacacacatacacacttgacaagagcttgggtatgagtgctggcggccccgctcgttaggagaagccagcagctgcgtaccaggctttgtggaaaatcctgcagatgccgattctgtttctgtcctgtggcagcagcgagcctctctgaacttgtaggaggatactgagaactggcctagggagggaagtcttctgggcagaccccagcctgtctttctaacctcagggactgttactacgacaactcgaccacgtgccccaagtgtgcccggctcacattgaggaagcagtcactattccaggaacctggcctagacatggatgcctagaacactggagaacgccaggcaccgtatccacccctccggctggtgcctgctggccttgcccaccagatgtgcattctactctggagacgacccccccccccccagtatatcctccagacctcttcgtctcgggccagaaggaagtgactagtggccaccgggactcattcctcaggtgcttgtggagacttcgagtgtgtatacctggctgttgattgggtgtgctgctatcggggggtcaaaatactgcctgtgccccattgtaggactccttaggcagaggagcctgggtgtgactctccaggaaggtgggggagtcgctctcttatggcacagagccctccaggcctttaaaaccaatccttctgcaccatagagatggccttgctcctgtctagtacacccttacaactggtcagaaacttgagaggccagtccagtaagaccagaggatgcctcctgactgagttttatctctgctgaggaagatttaggttctactcagaggcacccaacccttttagcaccttgtctcctgagggacgtccggttttctctgactggggctgttcactactgtgtcccgtggatcttcccctgcatcctgagagttgtcatcgtcatccttaatctgtcagtcacgtgtgcttccccacccccctttgtacaatagggagggaaggggtctgtggaacttctcttggcagatacgcctgcttctgccacagcctagtccactttatcctggtgctctgagccgggcagctaggaacccaccctaaagaggcttagcatccagttccataggtgggactgtgtccggggaggaggttctaggtcaggtgagcctgtcagttatcattggcctcggtggcattcgggggatgaagcttttccacagaggtcactgtcctgctgacgcagtgcactgcttgaagatgaccagtcgctgggtgttaacgtaggagcctgaggtcaagagctaggaatatttgctagacccccagcaggaggcccacggcccatacaggaaggtctaagttttgaaggtgggtggggcctacacctttccacctccatgcacacaccccataaatcctacgatggaagatgtgtggagacgaggggaatctcacaataatgtggctcctgtctttcttcctgggaggcaggagttggttgtgtctgcccctttgctccttgtctgtgaattgctgttgacacacacaactagtgggcaaaggccagggcatgtcacaacctggatttccttcacctttaatgaggcacaagaagggacttctcaactggccagttgaagcttagcttactggcgtgtttgggggaaggacggacacactgccacctcctcctcactgctctttgccatcaggtggctttactcatgctgtttttctgtttcagttttcccatctggaaagcattggggagggggagttgacctgcctcagggtgaaagatcaggagtcctttgagtgtgatgtgggtcaacaatgggtccctgttccgcttcctctttggcgttaaagagggtcttaaaaccaaatgccatttcccatacccccaaatctgtgtgtttcctgccattgtatcacatgtctgtcctgagtccttggcccttcttgagcctcctgtgtaatcaacatcacgtttccaactataaatcatagtgtctaaaggaaatgttactagtctgccatttgttgggcaaagtcttgggccttctctgagagcacactccaaacctccttcctccatacttcacttccaccattgccttcaggatgatgcagatctggtagaaacatgctatgagtccacgggtgggtatgaagagtctagccagcaaccgaagcccatttggatggctgacactttctggaagagtatacccaatggtatccatcatggaaccaggctgccagcggggaggcctggtcacaacaattgccactgtgatcttggtctcattaattacgggatatctaggttggtgtgtggtgaatctggga

SEQ ID NO: 34427 - DNA, 1138 bp, Mus musculus
tggtgtttttagcaaataaataaataaataaataaataaataaataaataaataaataaattggtgttaaagtttaggactgcctagcattgtggtgcatgcctgtactcaggaggctgaagcacgggcattgtaagttctagtttagcttagcctgggctaccaaacagcttctgtttgaagcccgcagagcaaaatgtgactgatacttttatgatctaaagctgctctcaacgcggtctccaagttccccttcttcctctctctctctggggttttgtttgtttgttcaggtacattctgcataaatgtgtctgtaggctggagctcagtactgggtcttaatcacttttcaggatagctttaattttcctaactacatttattcattggcgtgtgggggagggggagagaggagttgtggaaggtggagaacagcttttgggaatttgtcccctccttcatcacctgcgtcccggggatgggaatggggtgcttgtgcttggtggcaaagtcctttcctgatgaaccatctcaccagcctacacctggagcttgctgggtggtctaggctgactgccagcatgcctcagggagcctctgtctcttctgccctggcactgagtctgtaggcacacacgtcagtgcctcagaactcagatccccaactttgtgcagcaggcatgtaactgactcccccccaccccccaccccctgccctggtttggttcttgacttctcttttttttttttttttttctccgagacagggtttctctgtgtagccctggctgtcctggaactcactctgtagaccaggctgacctccaactcagaaattcccctgcctctgcctcccaagtgctgggattaaaggcatttgccaccactgcctggcttgacttctcattccctgaaaatttctgtttgtgtggtaacataagattcttctttctctccctacattccccgcgccccaccccttttttataatctctgaaactgtagaaccaaaaaatgctggccctggaggagatggaggcaacagaggagggaaaggagatgattttccctggtggaaacggatgcaaaaggtttgtgtgtatctgaagaccagaatcagatgtgctgttccttc

SEQ ID NO: 34428 - DNA, 2947 bp, Mus musculus
ttctttggtcagatcaccaccggagctcaggacgacctgaggaaggtcacccagagtgcctatgcccaggtgaggagcagtgtccctctgtgtggccctgtgtgtggctgccttggacaccacttaccccgggcccctcctattcttcagattgtgcagtttgggatgagtgagaagctgggccaggtgtcctttgacttccccagacaaggcgaaaccatggtggagaagccatacagtgaggctactgcccagctcattgatgaagaggtccggtgcctcgtcaggtctgcctataatcggaccctggagctgctcacacagtgccgggagcaggtggagaaggtaagtggggcccaggttggggtgtggaccatgctgatctccgtgggcctacttagcttaggttctgtcatggatcaggaccactaagtgcatccgggtcctgggcacagcagcctgacgggtggccatccttttcaggttggcaggcgtctcctggagaaagaagtgctggagaaagccgacatgatagagctcttgggccctcggccctttgcagagaagtccacctatgaggaatttgtagagggcaccggcagcctagaggaggacacatcccttcctgaggggctgaaagactggaataaggggcgggaggaaggaggcactgagcggggcttgcaggagagccctgtgtagcctgtggccaccggggcggcttatgaccactgctgactgggagctgctcagccatcgcagagcagctgtcagagtaactgaaagactaattaaaacaggtgacaacttcgaacacacgtctcagataagaccatgcaaaattcacagaaaagctgctagactccagcatccagccaaggagatagctgagggaacaaaggtgtggcctgcgaccataggccctggacctaaggctggccggttctccaggttctgtgaagcctgagtgatgtctttttggagggattccaggtgtggggctgtgaggagctacattgtgtttgattaagtttccaagtgagcctcttacagctgcttctgaggtaacctgctcaagggctgagccctgactcagcacagataaaggttggtgaagaagtaaagaaaacataagacagttaaggaaggaaggcgagccgggcagttgtggattaaaggcagagcatgcctttaatcccagcactcgggaggcagaggcaggcttgattcctgagttcgaggccagcctggtttacagagtgagttcagggcagccagggctacacagagaaaccctgtcttgaaaaaccaaaaaaacaaacaaaaaacaaaaaaaataaaaataaaaaggaaggaagctgctcagcccttaggaaggaaagccagcgcaccagtagatgtgcagtggaggacagggaccgtggccaccccacctgtggcagcgtcagaaattctgtttcgtcagtcagacctggcttctagcctttgggtttctctgcctcactgatgggagtgtcagatttaattccgtctcacagcagtccttcctttctccagcatccatgccccccccccttttgaaccacagagggtggtttaggttgagccctctggctctggtgcatggggagggctttggaacgccaagcctccgtgggctgcaagaggcctctctttcctgttaatctgggctgtgtcgaggcctgctctgtgagagccgagtgcttggagtggagctttgggttccctggatgttgttgtggacttgctccaggtttcggggggacacagatctcagggctgcaccatccgctgcaatagcctgcgttggggctgctcgtggccctggggaggaatctacttgctcccttgactctgtaaaagtgtgtgtgtgtgtgcatgtgatagtgtgtcttcctcaactgctttctatctctactgttttccacttacatctgcacacgcacgcaccacggtgcacatgcgcagggcacaggacaacctctggagtcggggctctcctctgtgtgggttccagagatcatcaggcttggcagaggcgcctctacccactgagccatctcgccacccagtctaccttgctttttagatggagtctcgtattgagtctggctgtgtttgcaggtcagcaagccccagggatcctcccgtctctgcctgcccagtgctgggattgcaggctcacctttatcctggccgttccgtgaacgatgcagggctgtagtggatgttcatgcttgtgcacaggcacgctaccgaccctcctgcctttcagctgatgccatagcttcccgggtgcctggccaggatggtggaggcctgtccttctctttggggcccggctaagggccagattgggtggactgggtgtattagctggatgtaaagactatactgggtgtgcatggtatcgcacattctctaaactgtcacgctcgcctcagagatgtcatcaggagacagatactttcaattttcactgtttgtaaagtgtacattattgaattttaaaaaaattatttctaattgtatgtgtatgggagttttgcctgtatgtttgtatgtatgtgtgtgtatgtacatgtgcagcacatgcatgcagtaccgatagggtccagaagagggtgtcagatcctctggagctggagttaacagttgtgagccaccatatgggtgctgggtgttaaacttaggtcctctggaggagcaaccagcactcttacctgctgaaccatctcttcagcctcatgttattgaattttaaacccatatcatggtgtcaaccaaattattcactgagcaactcagggccctggggtcttgtgttcagttccctctgatgaggtggggtgatcccttggtgcccagaaggcctgtgacatggtagactctgtggtagggactccaggaccagcactgacctgct

SEQ ID NO: 34429 - DNA, 1193 bp, Mus musculus
ttccttgggctcctccacagtgaggaatgtgtccacaattgtcccttgccgctctgggtcactggggggctgtttctcacggttctgctccgcccttgttttcgtccaggatggtgaacgtaggcagctggctcgagatagtgggtgcagacctggtgaaaacacagaaaggtacagtcaagaattcagtaagatgggggactgagtctccaccttgtggctctgccagtctcagttgcgtggtttctgggtgcacataggcctgggtgtctgccactgcactgtttataggatatgcagggacttttctgatgtccctaggagtcactgggctttttttttttttccctctcattgttttttgagacagggtcttgctatccagctttggtggcctggagcttactacaaagactggactggcctcaaaatcagagatccagaaatgctgaaattaaggccatgcaccactatgtctggctcaagtcttgagactgtctgccctatcccccacattgacaggccactaccaaatccctgacttcctaagtagcttaatatatcttgcggccctgtaaggctgacagtgtctgtcccatcatgagacctcagctgctgtccagggtgcaggcagtatggggctaggataacagttgggctggagttgggcttccactctgcctgcctggccacagatgtcacgggccatctcctgactcagcatacacatgcaggctggaggggaaggcagagctaacaaggggtgtcaccagataaggttagactccattctgcaggagagctgggccgggaacccacgagagggagccggggtccaccttcatgctgctgtcttatctcagagcccacagctccctggatacatggagtccactccaccaacctccagaagcacgtgagctggcagagtcctcactgggactggtggtgcctttcataagaatgttgatttcctagcaattgggaggcagaggcaggcagatctgaatttcaggccaacctggtctacagagcgagttccaggccagcccgactgcatggtaagaccgtgtctcagaagagaaaggaactgtgactttcttcgggcccttggcatacggtataggccctaatcccggtcatgtgcgcctgtcttgacttggggctggggcttagctcctttgcttttccta

SEQ ID NO: 34430 - DNA, 2136 bp, Mus musculus
cccaagtgctgggattaaaggtatgtgtcactgctacctggctgagaccatgtctttaaaaagaaaagaacactgagccaggcatgttagtgtaagcctttattcccaactcccaggaggcagaggcaggcaggtctctaagtttaaggacagccagggctacacagaaaccctatttcaaaaagcaaaaacaagctgggcagtggtgacgcacgccattaatcccagcacttgggaggcagaggcaggtagatttctgagttcgaggccagcctggtctacaaagtgagttccaggacagccagggctacacagagaaaccctgtctcagaaaacaaaacaaacaaaatggaaggactgaagcatttgcggcaaaccttgtgttctggccacaggggttacaacatatcctgctgacatggggcttaggagaggatggaaggatggaagactggggtctcacccacacagcccactccagatgatagcacctcctcctctcctgaggagaagccactcaagtggtgaggggcccaggttggtggctgcccccgccttgtgcttagcttaacttaaagtccacacttagtaagttatattttcatttggctcaattgtagaagtcgagggaaggtagataggggcatagcaatgcaaagtatgagcaaggacaagtactatacacagttgggtaaaaatggtgtctttctaagtagggatctgaggggaccaggagccccaggacatccccagagcaccccctttatgccttttttccctcaagccagcgtgcagcctcacctgctggtgactcagtggcaaggttttcgtcatcggagtccgcaaagacctcggccaactcctggtcagacatgtccgtcagctcagtgaggtccaggagatcgaagtggacctccagagaggagacgctgctcagaggctctaggggttccaggagacacaggcacctctcagtcccacttgaagctaccaagagccttagggacctctttgcacagaatccacaggtgacccggcactttgggtattcatgtgtgctttcatacatatgtgcacacgtgcaggccagaggccgacgggggtcttacttacttctctgctgtaccttttgagatggggactcatataaccagtttgtctagactggctggctggtcaggaagtcccaaggattctcatttctgtctcctcagtgcaggacttatataaaagcacgtactgccatgcctgatttttcctacaggagggctggggatctgaactggggtccttaagcttacagagcaagcagtttacccattgagccattcccagaactggcacttcctgtaaagccagtactggacaagaccaggcagactcagcaaccgggtggctctgcacactctagaccggagagctttctcagcgcctccattctacagacaggacaactgcaagcacagttgcccttcatggggcagggctgccgcctctcatacgcaggctgctggatggatggatggatggacagacggacggattgtcagtgatacttacgcctcctctctgtgacctgcaggaaccctggtgctggtattgggatgccaacctcctcctcctcctctgccacaggtgtacggcacatgtcccctgtctcatgagctgaaacattcagggcagcctgtggtaccttgacgtccttaacgatctctgtaaccaagatacagtgttacctccacactcatgggaccccacatccctccaggatggggctgtgtggcaagtagggaggaacacgaggccctcgccatgatgaggggttccatttcatggccacaaggaagcagagatacgcggctgcttccctttaagctgtcctccctgggtgactgggcaaaggtgtctgccagtggatggagggacagacagacagaccactcagcactgcagctccagcgtgcttagtctgggaactctacatcaggtttgccagcattaggctccactgtctcccacaccgtagcttgtctagttatggtatgtttattagtcactcgtgggttcctgcctttcttctgggcactgactgacttataaaaaccctgtggagtgtttgagttcaaatggaaaaga

SEQ ID NO: 34431 - DNA, 1191 bp, Mus musculus
tcactgggtagtcctggctgtcctagaactcacgatgtagaccatgataacctggtacgcacagaggtccacctccctctgccccctgagggctgaggttaggtgtgtgttaccatgcctgccccagctctgtttttagttgagggcattcatagctggatatggcggcacaaacctataatcccagtgcttacgaggtggaggcaggaggagagcaagatcaaagccagtctaggctggttagagagccattgtctcaagaaaaccaaaaccaaaccaaaccaaaacaccaaccaaacagttgcagggagatggcccagtgggtagagctcctcaccatgcaaacctgagctgggccctggaacccgcagtggaggcagagaaccagctcctgacagttgtcctctgacctctgtgcgtgtgctgtggcatgcgcacccacacacatcacacactagtaatgaatcatgtgaatgtgagtgtacgagacgaagccctgtgctgtgtgtgactgccaacaggagcagatggaggacatgcgtaagaaggaggaacacatggagagggagatggcggaggtgactctgcagaaccggcggctggccgacccgctgcagaaagccaaggacgagatgaacgagatgcagaagagactggggaaccacgagagggacaagcagattctggtcgtgagtgccctgctcaagtcttcccctcgctgaaccctcctcttcctcagtgtaagagatcaagagactcgaggcatggtgacataggccctctcgttcttggactcctgggctataagcaggctggcgctgctgtagactagaccccggttttccacacattccgctcatagcttgggtggggcccagctgctggagtcttcccaccagttgttccttgctgtctccaggagtctgtggtatgtgagtgtctgtgactccgaagtatttatgtctcctaccccctatctctctgcagtgtacaaaggcacgtttgaaggtggctgagagggagctaaaggacctgaaatgggaacatgaggtcctggagcagaggttcatcaaggtgagcaggtgtgggcgccatggcgggctccgagtccaggagtaagtagggcctcctacctgagcctacttttcctgttctttgtttggaaatagggtctcaccgtcccatgtggcc

SEQ ID NO: 34432 - DNA, 1099 bp, Mus musculus
ggtcaggattccagaagctgggagggacctcgggtgggtggaaggggaagtcacgggtgggtgagggcgctgttgcaggaagcccgtggaaccgtccaggaggggagggaggggagaagaagcgaggaggggagatgtgtgtgcggccaaggctggcactcactggctgggcccgtggtgcgtccagggcaggcagaggagggctggtgggggctctgggggaggttgtaggcagcgtgaggcaggcagcgcgaagaagcgaggaggcacggtgggctggggcgtgtcgtgtgggtggggctcgggccgggctgaggggcgggcgtgtcgctgtgtggtgtgtgtctgtcggctgggggctgggctctggtctcggggctcgtgtgagctcgtcgtcgtcgtcgggcatcgggcgtcgggcgtcgggcgggcgagtgagcgagcgagcgagagcgcagcaggctcttggggcttgtcggcgccgcccaccctcacctacggccataccaccctgaacgcgcccgataaagtctgatctcggaagctaagcagggtcgggcctggttagtacttggatgggattccccctgggaataccgggtgctgtaggctttttggactcccctctgtctctctctcccttttggccacggccacggcgacccaggctcaggccagcgccatccacaccccacaaccccccaaggagcccaccctcgtcctctcacaggcttgccctctcacgggaggctcctggagccctaagacagggcacaccacgctgggcacctcggcaccaccctgctgagttagctagcaacgggacacgggacgggagagcctctctccatttgcaccgagcccaggctggcctgaacactccatcctcatccaacaccgcacttgccttccaccgtgtgtgtgtgtgtgtgtgtgtgtgtgtgtgtttgaaagagagagagacagagagagagagagagacagagacagagagacagagagagggagagacacagagagagagagagattctgtgtatcttgcccctcctgccttctgctaattcacctgggtccctgtgtgtgtgtgtgtgtgtttg

SEQ ID NO: 34433 - DNA, 1088 bp, Mus musculus
cattgttgctggtatccagcactcagactcccagctacagccaaagaagtctaaaagcaggaccccggataaggtgcgggacctgtccaagtcttggtggaggaagtattgctgcctggcctgactctcgcaaatagcaggtgtttaagctgcaacagctctttatggacgaggctgtcataggatgagccccaaagcaccctcttctgcccttaacttcctgtgtgcgggagcttagggctgagattcatatgcaaaatacgtttttttaaaaattgaaagttacattttttttctgttaagtctggaagctttgagctgtagacctccggattaatttatattccatatgaaaagggctcttcaaagcggggtgtcagcatgaagttctgctgtgttgtacaggacaaaggagaatgaatgggaccttctcctgattaagggctactgagggctcagtgcagggcacgtgtgcaccaggcttggtgagagtgagcaagcgtgagctttgaaaccacacgagccacccccggttttgtaagggcaaagatctgaaaccagcaagggccttctgcttacgaaacctcgagcccatcccttctgtttactcagattctcttaggattttaaaacaaccaaacatcccacagcctactggcatagtgttggcgaacagtgcacttgcttgttacggttttgttttgtttttttaaatcacgtgaccagttatattgctatgaaaatggtggagatgcctcgtagaaggcgagtgctgggtgcacatgtgacattttcttcagggagcgactcatggtgagaccagagagggctcttagcttgcaggactggcttctgcagggcatctgtgtcctgctgttaaaagcaggaggaggtgcttgtctgggagctttaagtgtgctgggctcatatcgtcccgtttgcaaggaattgggccaccttgagaggccatagttgatggctatgggacacacacacactttttccttaagtccaccaaaatgcctgcctgtacacacacacacacacacacacacacacacacacacacacactggctggtttgctga

SEQ ID NO: 34434 - DNA, 1646 bp, Mus musculus
aagctctttcacagggttgtaggtatttccaagacgccataggaaccagacagtgaatcatagctatcagtttgctgtgggcaaggaacctctttttggccacctggtaacaaaattttatgtctgtaaattttttcttgctatttaaaaaaaaaaatcaatcttacgtttttctgtaggaaaaaaaaaaacaagtaaaagaacaggccatatttcaggtcaaaggcttcttcctgctggtaaatgggactgaagactttcttacatcattattaaaaggctaattgctgaaccactagagtatatgaactgtttgtgaatgatattagccatagtctcctgaggtgtttccttgtggcctgagtggtaacattgttttgcttatggagatgctgtaactgacctagtgactcagcttatcctattgtgcatggctgtctggaaagccagcgtacaagtggggctttgcctgccctgtgtacagagggtgggtgggaaagagtgaattatttaattttaaatgttataataaagccaatgtagttgagaccaaggaaatgagcattgagaacacaaacttgaagtctggtgccagggttgttggacctcacaccctgtctctgagccacccggaagtgacataaaggacgctgtgtgatcaagttctggacacttttctgggatgcgtaccactggactatttatgtcacaaatctagtgggttgacgctgccctgcaagttttcaatgtccctgcatcctatgaagtcataatgtctgactgtactggaggttttcctgcattttttacttttcgaaaatagaggtttgggctgagaattctaaacgcatgtgcctgggtgggacgtcaagtcagggttctcatcaaagctgagaagtggctggaatgttcagcttggtgtctggggaggatcctgtgagctatgtagagaggtggctcttcagcctgactcagtgtgggctgaacgaagtacctgcagaacacacggtagcaggctccaaaatcgtcacctcaagcatgcgtgcaagcaaacttccgagaactccgttttctgctcggcagacgtgtgagcagctacccagaagtctcaagccaaaaggggagcctcgctcgctggctcctctgcaggtgccttatcgacctgtgctcttctcttttcccgtgtcaaagatgttggacaggatcttgtacttgaaacatactacaaatgagttactatgaaataaattctgacctgtggaccgagctgctcttgcttattctactgaaaggatagaagctcagatatgccttggcctggacaggttcagaagcttccctgtattcagggaaagtacctagtatcacactcactcagtacttcctgtacctagtatcatactcagtacttcctgtacctagtatcacgatcactcagtacttcctgtacctagtatcacactcagtacttcctgtacctagtatcacgctcactcagtacggctgtgggctctggtcttgttctgatggttggcaccctctgcatttgtttgtttgtttgtttgttttgttttccagataggtttctctgtataacctccctggctgtcttggaacttgctttgtagaccaggctggcctcaaac

SEQ ID NO: 34435 - DNA, 1327 bp, Mus musculus
cggagtgcactcgacctaaccggagcatctccagaactagcaagctctccgctaaactttcagtagcgccctctcccatttaccatagtggacatttttgttggggaagttgaggcaggaactcactctccagcccacctgggcccctaccttaggacaatcctcctgcctcagcctccctcccaagccctgggattccaggtccccatgcccagctcacaggctggcgagcagtgtgagccagtgttgatgcagtcaggtctgccgggctctgagccgtttggtctttacaagcacaggagtatctgaatcacgcttaacggttctcaggttcagcggtgggtcctggagtacagccgccggagcctgaagaggctggagtttttactaccatcttttctactcggcacagaagtagatcttcctggggaacggtgtacgctggcagccggggctcagcagccattctgcgaactaactcagcggacagtacctttagatgccacatgtatgcagacccctgccccacacgtacccttcacgttctgttaaatccagcttgtgctgcccacagcacgttcccacagcacagagccggtgtgacatgacagaaccctgcactcagtgagctttctttttaaactcccaggaaatgcagttgtgaatgtgagagagcgtgcttttctcattgcgcgttggttaactcccaggagatgcagtcatgaacgtgagcgtgctttcctccttgtgttggttatgcgtatgacccggtatgaaaggactctggtgtgaacagccagtgcgtttcttatttaatccctctccccccaccccttttacactgtttctgtgatccacacctgaaatgctaaacccacaggactcattaacacctggaaataaagtggaacggagtttctcacgcacagtacactgtcctgctctgtgcagtcgcgtgagcctgcccaggctgctcggcttccacgccaccctcaccgtctcccggccagaagacacactgttgaccgcaatgcttttcctgaagctcagtgtaggggcatcgaccgccacctcttcgcatgggtcgttgtttcgtggtcattttcaggaaactcactacctctaggacaaaggatattgcttattaagaaatcctggccaaggctaaagtgctttggtttgcatgtgcaaggccccgggcttggtctccagcaaacacctccataccacacacctacggtcacacctaggtcagacgtgctgatagcacacctataatccctgcactcagtgaactgagacagcagagggcgctcatgagttcaag

SEQ ID NO: 34436 - DNA, 1293 bp, Mus musculus
ccttagtagtgggacagaccatggaagccatagatgctggcttgtttatgaagacaagtccccaagtcttgatattcttgtaagagtttttattgtaaagattttgctctttggagatacccacaccgagtgcctttaaccggctctaggcgcttcccacccacccctcctgtagtccagtcagagctgctctttttcatcagctccacattccacagctggcagggtgtcctgtccactgttcaggactcaccgtgcagttcgccatgcacggagccaaggaaggcaggtatggagatccgggctgttctgaaaagccagagctttggcggctgcggaccgattacacttgataggttttgtttcatctcgtcttcatatagacagtgagacttcaggattttctggccagagcgagggtcaccttttctccctaagtcatcccttagacgttcatttaatgcatagtttaatagttctggaacattccagtgagcgacacgcagagagcatgttcagagcaacgatgacgtttcttttgagtcactttcctttaactgcagttggctgcttaagtctgaccgccattcctctcttctaagagagatagcggatgaagatattgagaagttgtaatctgcagtgacatttaatgaactgggtttgtttggcctgtggggatgggaccagcagacaccgttagggtgtccttgcctgcatcatgccctccttttacagaacttaatgacggctttgtgcacagtgctgatggtctaggttgaaaacctggctgcttgatcgctggcccgatgatctttgctgccatactgtgggagaatttcgggcaggtgctggcctgatggtaatgttcgttcttcctttaatagggaaccactgtcagggttttaaaaaagaggttttaaagaacacgtgtttccgtgagatgggtgccttggccgccgtgcagaagagactcccagaaggatgagcaccgtgttcttctggagagatggggagctcttttgcctgcacccacgcagcttctgagcctgctgggtaagacccagtgttgggtgtgtggctgagcattcccgtgatatttttactttgggttcttgagtatgataatttctagaatgcagactgacttcattccacgtgagactgtcacacgatgtcatctgaaaactgtatcaagctttgaaaatgcacactaaagaattttttttttctaaaaaaaaaaaccacttttaaaatatttgcctagttttgtacagtccccattcatgtaca

SEQ ID NO: 34437 - DNA, 1184 bp, Mus musculus
tgttcctaggcacagcagcctgccaactgcctagattggccttaggcaaggagcaagagggcgccacaaggcagagatgctgccatttccagtttgcagaataaagaattgggaagaattgaggaggggctttgctcactgttcccttgcaaggacaaggtttggtttggttggttggttgttttgttttttcaagatttttttatctgtgcagggacaggggagggggcggggagggggaacccgtggaagccagaagagggtgtagtccctgcagctggggtttcgggaggctgtagcctctcagtgaggtcactaagaactgaactcgtcgtgtgcagaagcagcaagtgctgtaactgagtcattgctcctgcccagtgtttcttgtttgtaagtggaaaggccgtctgcttcatggagtaggagcaggatctttatttaagtgtcataagcaggaaaggtcacaggccgtcaagacagtgaggtggtagagctgaggaattaatctgtgccatcttggtgtgttctgttctcaggggatggcattttgggcgctggctcctgtgctggtgttcctatccttttctctaggaatagtggtctggtgtctgtcactccaagggaaaatgtatccctgttagcagaagacctggaagagtctttgacctcctcagttggtggacggggcagtgaggtaaggatcgaagatcgtttaacatttccttcatcagcacattcacaccaggccgcgggcaaggtctgggagatcacttcctggttatcttgcacccagtctctaggtcttctttcccagagcagctgcttgtaggtcacgggcattccttctgctcttacctctgtatctttgagttgggacttgggacaattcatgcttccttctctcctttacctttcctaggagcagggtgcggggcgactgctggtgtggttcctgggcccagggggcacttgtggcatcacatacattgtgcagccgtgggattccggagcactggcagtgtggatgtcgcacacaccatccagcggctcctgggggtgctggttggggagtttcctgtggtcactcaggaaggtggccaggcttagcctgctgactgtccagaccctaaggtcctgttcccacctatgccaggcagacctgtatgccaccttacgagggt

SEQ ID NO: 34438 - DNA, 1932 bp, Mus musculus
ttctcaggtgacaactttaaaaagggaattagaaactaaaggcctaactaatttaagccactgacgcacctacctagggccactgagggaaagtttgacgcgtccatcctccattaccttctggcgtcagagttctggagcactacagggctgtacctgtccaaatgtgcagtgctcaccatctgagcaccagagtctgatacattttgccaaaggaagaagtcccgttctgtaaactggaaagcttctatttttttattacctccttgtttaatgactctttttgagaagcaaggtacagataaccaggcgttatcaacagaggtggatgaaaatccatggcgcatctgttgaagcatgtattttgaaaaaaaaaatacccattttaaatatgtgattcccaggtatattgtagttttatattttaaatttttattaataaggctgaatctgaataatataattttcagccttgagtatgatgactcttgcagaggcaaggcatcagaaggaacatcagcctttggaaagtatcacagttaagtcacatgtggtcctgctgctgagactctaagtcctagaaaccttcaggagtcaccgtgtggcaagtgtggctgcccttccaagcaccagagaacatctaactgcagaaccaaggctaggagatgaaactctgctgggtctggggggaaggaggctcctgaattgtttattgtgtagacatggatcctgtgaaggaaaaacttaaacccgagggtaattgttgcagcatccagttcatgttgacgatttcaacagtcatgaaataaaccactctggtttccaaaagaaaaagtagagtggctcacacccacctgagctttaaaaccagccagcgcttgagactttgtttcaaacagagattggaagagtttggaagccctgctccatggagtgcatggaaccttaactgggagctgccggataaaggtacccttgctctctgtgcttatggtttgtcacctacagtgtcacagctcttacagcagtgacagtggctaatgaatatgaatttgctcttttttttttcctttggtatcagtgctgttaactggatgttgcggaggaagtgggttttttgtttgtttttttgctggtgatgtagagcctgagacacagctacgctgagaggtagttaaatggacacacctgccgtgcctcttgatgagaagcagtgtcaccacttatgttacctggggaaccgggtaatgagcatgaggccccatggatgtgtgtgcaggtcttggggtgagtaggcagcacacctgtgacggtcaccttccactgtccacatctgctcagctccttgcagggtgtcctcagaactcggagttgttgcagatcagactggtgagaaagcattatgaaaattgaattgagtcatcacgttttctttcttaatatggttaacattttatatcagattaaaatttatagtgaacttaatctgtgtctgtgtgttatgatgctgaggttgacccgaggttctccacacatgctaagtgctttaccacgaacttacattcatgcttcagcctcatggctatcacttcttttaaaatttggtagtcactttattttctttattttttcccctctagttttccagacagggtttctctttgtagccctggctgttctcaaactctgtagactaggctggcctcgaactcactactgcccctgctgcctccatccacatattaatttcttttttttttaaagatttatttattattatatataagtacactgtagctgtcttcagacacaccagaagagggcatcagatctcgttacagatggttgtgagccaccgtgtggttgctgggatttgaactcaggacctctggaagagcagtcagtgctctcaatcgctgagccatctctcaa

SEQ ID NO: 34439 - DNA, 1142 bp, Mus musculus
agggtagcagcaagcaggcctggtgtgcataggacacccagatggccctcccaagtcttccttagtgatcctggcttttgtaagaggttggggaaggcggagatgaaaacaaggctttacatttcttggctctgggggggtgatgctgggatgctggtactgatggaggaccatctcctccttgggatgctggtactgatggaggaccatctcctccttgggatgctgggatgttggtactgatggagaaccatctcctcctccttgtcatcaccttccctggagccatgggcacagaagccactagagcacggtggcactgagagatgtcactgaggtgggtcagacccgagggccagtcttcacactgtgcttcacactgctcccaagaaaaggtgacacctcaattaaggtcgcacaagaccttacatgataagcccagcatctaggcctgtttctgttcacttcagtcaggcaagggagacacccacagggaggcaggggcattctgccctgagctccattcttctcactttggctttctgccttccctcttgtgtttcagaggggatggtgttagatgagaaaaccttccagggtgccctggagttcagaaacgtgcacttcacataccctgctcgcccagaggtgtccgtattccaggatttcagtctttccatcccatctggatctgtcacagcgctggttggcccaagtggttctgggaaatcaacagtggtttcgctcctgctgcggttgtacgaccctaattctggtaggtggctagtgacagtgtgggcagaggcatctctgagctgtcagtgacttctcctgatgcctgttcccaccccatgcctaggagagaccacatctgacaacactttcccatattcctacccttggaaatgggtcagcaagactgcccagcagcacccagcaaataccttctggtgccagcagccatgggtgctgtggactgtcccatacccacactggaactctgctgacatgtgctgacatagcaattctggatttcaagaggccttctgatggcttctgcctcagggctgttccttgactgtttttttagggtcttctgtgtccagaccagacagtttagatttattttgtatgttctgcct

SEQ ID NO: 34440 - DNA, 1187 bp, Mus musculus
gcaggggaaggtttaggagtactcagccttcagggaagtcacggcttgtcaaaaattaactggcacactcgtgtgtgtgtgtgtgtgtgtgtgtgtgtgtgtgtgcacgcgtgtctttcatttttgaatccagattgcccctgggtgggtgtacacatgcgacctgtcgggagccaaatttgtttttaaataatagaataaattagtaagtacatgaactatacttggatgagtttagatttagtcaaatagcctccttttttccccccataccgtatctcactgtgtaaccatggctggcctggaactggctgggtagaccaggctggccttgaacttggaattccaggtgtgcttcaccacagcagggtccccctcttctttgtatgagtatcattacagtgttagaactcagttggaaccggggttacggagttcaacgtacagattcttcatgtgatttagaaaactagagaagtctggcataatagttcacacctataaccccagcactcgggaggcagaggcaggaagatcactgcaagtttgaggccagcctggtctacatagtgtgctccaggaatgcctgtaatcctttgccttagttcgggttatatagctgtggagactatgaccaacgcaactctcataaaggcaaacatttaattggggctggcttacaggagcagaggttcagtccattaccatcatggcgggaagcatggcagtgtgcaggcagacgtggtgctggaggaaccaagagttctacatcttgatctgaaagcaaccagagaaagactctcttattcaggcagcctcaaggaagctctcttctacactgggcagaacttgggcactaggagacctcaaaacccacccacacagtgacacacttcttccaacaaggccacacctcccccacagtgccacttcccaggggccaagcatattcaaatcaccacatcccagcactcgggtgacagaagcagtaaagccaccggaagttccatctgtgtgcagtctatatatatgtagcgttctaggctagccagagttgtatagcaagaccatgtctcaagaaagaagaaaaaaagaaaaagaaaaaagaaaaaaagaaagggaaaggaaaggaaaggaaactagaggagagcctggcctttgggaaggttcttccttgtggtcagtca

SEQ ID NO: 34441 - DNA, 1187 bp, Mus musculus
aggcctccataggatactcccggcctgccgtccttaagaccactgctctcggggtcacttctactctccgggcctctgcggcacctcctgcattgcacagttctccaagatgtggagactccttggtctgccgaccgcacgaaggcgaaggcacccaaaggtctcaagcaagagactcaggtcgtaaggggcgacctgagtgccgcgcatgcgcactccgccagtgaccggcgagagaaagggctcggacgctccaggttcacaagtcgtggagggcgcaggagagcgaaaaagcttccgcgtgcggctggcgggcgcaggcgctggcgactgcctgccggacaaggcactgccggggagctagcggctggtcgccgcccaggggtggaccctacgcggcggaaggcgcggcccgggcgctggcccgatggggcgggaggggcgggccgctgctgcgtccccgccctgtgctcgggccgggcggggagggtcccggggcgtgcggcccggccggttggtgagactgtccgggcagacgcagcgccatgcgcgccccttctgctagggcgctactgctgattccgcgtcggggccctgccgtgcgagcgtgggccccggccgtctcctctcggatatggctggcttctgaatggaccccgctcgtacgcgcgtggacctctctgatccacaagccgggttcgggcctccgctttcccgcgcccctatccgggctgcctggcggcgtggggcagtgggccacctcctcgggggcccgcaggtgctgggtgctggcaggaccccgcgccgcacatcccctgttcgccaggctccagggtgcagctgccaccggtgtgcgagaccttgggaacgactcgcagcggcgtcccgcggcgaccgggcgctcagaagtatggaagctcctagggctggtgcgccccgagcgcgggagactgtcaggtaagaacctgggggtactagtgggccagtgggcggccggtgggcctcggcctggccttggccttgacaagggcgatcaagtctgctgacacctgttggaaagctatggatgctggctggcactccccatctgagcctattactagaatatttggtccctatcagcttgtcagcatctgctttggggcattctctgaataagttagagtttcctcctttaagaaaaaaaa

SEQ ID NO: 34442 - DNA, 1346 bp, Mus musculus
gaactgagaggccacacggacagcatcaccagtctggcctttagcccggacagcggtctgattgcttctgcctccatggacaactccgtgcgtgtctgggacatcagaagcacgtgctgcaacacacctgctgacggctcttcaggtgagcttgtgggcgtgtacactgggcagatgagcaacgtcctgagtgtacagttcatggcttgcaacctcctcctggtgactggaatcacacaagagaatcaagaacattaagtttttatccaggtggcagactgggtggggctggaagactggtcacagtccaggacttgctaaaaccgaatcagtgattgcaaaagagccctcccctatcccacatgcactcaacacagccctggtgcacaagactccagttgagagctgggaggctcccaggctcgaggcctcctgcttcatgcaggcaccttgcttttgcatctgtctctaccatgggtgtgctgggacaggtgcagaacctccctgtagcagctgtagacagtctctcctgtggctgccccttgagggaagtgggaacaggaattaggaaaggaggggatgacgtctttccttttccatgatgataaaaccaggatttttattattataattaataattttattattgagaagaagaaacctagcactggcagcaagtgactcctggcactggctataatacttggaattttgaggttcagggaattcagactttggtggcccagtgtatcaggagaaaggggcaccatgtgctgtgctctgtgggcaggcaggtagctactgaacatgggctcctgcagggatggaggcaaaggaggttcttcattggctgcacttgtgtcagcacttgtaccctggggagaagcactgtggtgagcagagggtaggcctcagcgttgcaccagttacccagggttccatccctacaccatcaacaaaattatgataaagaataattttgaataagtcacaagatagacttgagaaatgctggatttaaagaagactgcttattccaagctgtggcttattggtctttttccccctcgatgacctgcttccacctctctgcagtgtcggtagtgaacaggggatgaatcatgaatgcgcactcgcaagtattgaccatgctctgaggacaaagcaagtctgctaaaggattaaatatttctgttttctgaaaagagttattttgtattttgttttctattaaaatgtatttagtttcaaaaaaaatgtgtggcatcttatttatactttcagaatagccgagtgcatcactggacctagagtagtgggcagagcataagccagatgagacacag

SEQ ID NO: 34443 - DNA, 1225 bp, Mus musculus
ttcaggtggcagtgtcctgctacctcaaacgccggcagtacgtagactcagaaggccctttgaagcaaggcctgagactctcacagacccctgaggagatggcagccaacctcacaggtatcagggtcctatggatgtcccggaacgggagctgtcagggcccacatgggttctcagcaaagggtaggctaccaagcttcagtgagcagctctgaggggcactggcctttagacctttcctgtccctcaaaactatcctcactgaacttgtggaggccctgctagagccgtgtatctttcctcagagagtccagattgttttctgtcttcctggtggtaggtgcagcattttgtcccctataagaccctgagtgccttgagcagggcctctgctggcacagaaccttgctcctgggagggagtcaggcctatactgtgaactccctcagttctactgtattcacgaatatccctccatccacaatgtagtagctacatatgacattttcttcaggtcactaaagatgacatctggaagtcaaggtcagtacgacctaagtgggtacctgctgctgcaaggaatttgagggcgtctttctccgtttgcagagcttcagtgtctctggatgtcgtgtgaaagtttgccttaaagttacagtagaaatcaagagcagaatggtgtagactctacactgggttgtgcagaaagcttaagtttcttctttaggaagcaaactcaggccagatgtgatagacatactcctataattccagcataaggagacaggagaagagaggataaagtcagagggggcatgcttgcatgttaaagagtgagaccccaggctgctgctcctgctagcttcccggaacatgccatgctaagtgataccccacactccatcatccctgtggtgccctgtttcacatccaggcaataggcctgggggaaatccttctctgatacctgtccataacatagcaccgagataagaaaatgctgctcagggagaaaaaaacattttgagatatatatttttttagtgtgcattattttaaaaaaaaatggtgttttgcctgcatgtatgttttccctcctgtgtgagggtgccaaatcacttggcactaggttacatacagttgtgagctgtcatattggaaggcatggcctctcagattgacaaacccaggccatagcacatgtaccatgttaacatgggctaga

SEQ ID NO: 34444 - DNA, 1139 bp, Mus musculus
ctcagttcccagtacctccatggcgcctaactcatgactatctgtactctagtctccaagactctaatgccctctttgaccttcttggactcctgagtgcatatactcaggcacatatacataaaaaattttctttttaaaagatactgtccattttctggtgtctgttcagttaggccttattataatactattttccttttttaattgtagaagacgtgtagcaatggctgctgtttattctggtatttcctttaaacttaaaagcaagacaacttcctgggaagataaactaaaattagctcactttgcttggatttcccatcagtgctttctaccaaataaagaacaagtaagtttaacgtagaacttgtacgttttatgatctaaaataatttcatgtacagcttggatattaacatttaaaagattagaagacatgttggggagaaaacttgatttgcagtcactgtcagtgaagaagcagtggggcttttggattgctaggcgggaagttgagaagttggaaagtgctagtctgagggcaagctagaagcaggtaggtaccagttatgatgttctattgggatttcttaagttgctgtggctaaaaagtaggcagtgcagctgtggtaggatgacaagctcatggaatagggctggcctccatccagtgctggtatcagactgtattataattgtgagagaagtgacgaggtgtggtttgcagaacagttagcttacctgtcagtgtccacacctactacgtgtttgagtcatcttgacagctaggcagttccttggtcagcgctgcacaacatgaaacaaaagggtaatcctggtaggcttgagcgagagcccagctcgtctgtcacacctacggacagtgctgcagagtagaagtgagcaagggcaactcagtccagtgtttgtccagcacacctgaggccctggctttcttatcgtcagcatcaccaccaccatcttcacgatctcacacatatggcacacacagaagactcatacacacagctctgcgagctgaagcatcaccttttctcagtgtattgtgcttgagaaaacactgttacaggaatggaaactgcatgtgtccaaagcccttttctcccatagacact

SEQ ID NO: 34445 - DNA, 1194 bp, Mus musculus
gcactgcagccagtattattctctggggatctccctagccagagctgctctggatagttcaaacctccctttgttgctaccaggtgtagaaatggagttttggaagaaggtggaagagtgtgtaggccagtccaggtctctcagtaggtactgcttagaacagctgtatcttcagaaggtgaaaaggactttaatgcggagtaattcacaatccaaagaagcccttcaaaccttgaggtttgacactgctcacattcttgattctagcagagactgtttaagtcagaagacagcagctgcctgggataggcaggtgtcgacaatgaatgagtccatatatcctgtagcacactggcacttgattgtatcaaacctcacagttttaataccctacctttgtttgaatgatgtgagatatgtggccactgtcttgttaagaactttaccagcaagtaaagcccagggaagcttggcacatggtgagccacatgtcacacttgagaaaatatccacagccctccttcacagccctctctttccagagatgcagtccctctactctgccttcctgacgtgtatcattgcagaatgttccagcactctgtgctctggagctcatagtgacctgagtcttgttagtcagcagctcccctggctttctggaaaggacgaccacacaatcgtggctcactgggaaaccagattggcaaaagttggacctgaaggtgtagaaccaagaggagaaattgcccagaattttctatccatggtcaagagtggttttccaatcaagctggatgaagaacagctaaaaggcctcctggagctcttagaagtcatctctgcccttcgcctggacagcctctcgccatcttaccacgtgcatatgtttttcctgctattctccatggctgtctccacattagggcattgctcttgcccactagccctccagttcttggtgaagtgctaccggctcctcagtagtctgcagagaggaaagaatggccgcactgtattcagggttatgtacgttagtgacatctttgaggttgtgctgacctcactgttgcaagccagtgccgagtttcaggttagggaggatgaccctgcttggctgcagcttcttcaggtgtcaggggtgttcttagagcagctgatgcagatgcttacccaagtcaagctgagcttggt

SEQ ID NO: 34446 - DNA, 1640 bp, Mus musculus
gtcttagcgagtctcaaggccagggttctggcttcgccaatttcatgctgctggctaagcttcagggtttttagcatattgcctgggtttgctgagaaccctccttccttccttgccaggtaaccttgtacccacctgtgaagaacctgcttcaggaggggatttatctcatcttggatctttgcatggagcgggatatccagtttcttcgggcctcactacaggctggagcgcgagatgtctttaaggatctgcacagcgactacctcaagtaccacaaggccaagcatgaaggagagaaaagatatacggcctaggtcacaccacagaatcacctgggacaccttgcagaacattcatagttcagagtcctggaggatgtaaggcttctgacgttctcatacacgttgtcaacaaccatggaaaacacacacacacacacacacacacacacacacacacacagtctcactgtatatccttgaatggcctagaactcactatgtagaacaccaggctggctttgaactcacagagatccctctgctttctgtatgccgagtctaaatgtatcaccttgcccaccttggggattatatatttttatagcttttttttttaaatgctaaatgttctttgatatcccacccctccagcaggataaagattgaaccaggccctcacacacactaattgcacacttctgcggctcagccacacctgcatgcctcagtgcacctttgaaaactaagtgtggtataagagacctggaaatcgggactgggcttggtggtgcacatctttaatcccagcattcaggaggcagagggaggtggatctctgtgagtttgaggccagcaaagccacacacagaaaccttgtatcgaaaacaaacaaacaaataaacttggaaatgggttctgagatgaatttaatggaaaattcctgaccattatgactgtacctaatgtggtcctttctttcctctcttctggctgtgaactgcgtagaattgggtctataattgaatcctgtgtgagtaattctgctctttaagttaaatcaagttgcacagagacactttccagctgctacactgtgccgtcctgttgggaattctagtggtgctggggaacagccagggcccagcagggtggtgtgcacttgtctggtagggaagtcctctagcacaggagacaggactcctgcttgttcccacttcagtttgagaagctgattacaaatcttttcctactcagttcaaaaataacgttaacagttcttacgacctaagcaatatatcatagtggtcttgattattaagcctttattatcgcttggaaatgtcttgttttagagtctttgctgtatatatatagatacatatgtgcatatatatatatatatatatagtaaattgatcaaaaatgtgttttaaggtttcttaatgttttcttttgtaatggctgtcattatcttaagagttaataaaaaaatttggtattttttaatgtcacatagtattctgctgggtagacatagttgcttcatcaaataagttcccctcattgtcagataaaggaatcttacatacttttccttttataaatattgcctatggctagattattttctaagac

SEQ ID NO: 34447 - DNA, 1211 bp, Mus musculus
attagctttaggtgtgaagaaagcccaagacctctttgtgatccgatggagaccctatagaaagagcagatcaatgacctggggttctgttgtcagtgagccataaaatgttgtcctggctcagggtatcatggtttagtgatctgcagggcaagggagtgctgtgaaaactgcagatttggggctggtgagatggctcagcaggtaagagcaccgactgctcttccgaaggtcctgagtccaaatcccagcaaccaaatcccacaaccatctgtaacaagactggatgccctcttctggtgtgtctgaagacagctacagtgtacttacatatagtaaataaataaatcttaaaaaagaaaactgcagattttgaaatttcagtagtgctcccattgaggtagcaaggtggatcctgagagagagacagaggatgccgccaaactgtggagtgccatcttggatcccttagtgggtttaaacactagacgactctccacatttagctcatccccttgataagagaaaatgtgcgattcctttagcgtgtacaacatgactgtgaggataagaagagcagctttactgagagcctgtagattttttttttttagcgataagtagatggcatttcttctgtgtttggtgctgatcacagcgggctcttgttccatctttagatagttcttcatgctctgctgtttcattcccaaggggccccaggcttcagggttgtgctttggggattgtctgagggcatcctgttaggatttctgctgcttcagcagccaggccaggctgtgcactgtgtgccctgcctgctaaacaacaagtctgagaactgctgttctccatttagcaaaacccaggaagtcagctcacctcagactacagactgaataaactaaggagctgaaaaccagctgtcagcatttgctggaaagcccggactcgatgctgtgattccgcagggcagaggctccacgttaaagcaatttatgcatgatgtttaaaattgcatttcatttgtataggtatctccccctgccatatttactcttgcctccctagatgatgatatgcacttcaagaatgcctttcctttgagcatcttaaatgctttaaaattttaatcacgttaagtttccctggggccctggtatgctggcagtggatggcgctgcataggagggaagggatttctgttgaaa

SEQ ID NO: 34448 - DNA, 1137 bp, Mus musculus
tacagatggttgtgagccaccatgtagttgctgggaattgaactcaggacctctggaagagtagtcagtgctcttaacccctgagccatctctctagcccaagccactgtcttaattaagcacctagagccccacgggctctagttgcttgtttcttcctgcccacctgcccctgtatttttgagaaagtcagtctccctcttgtctccctttccacatagagcagctaagggtgaactctgtcacccactagggttcctgtgcccacttccctgtcgtatcaggtactgagtgttggaatgctcacctcttgtcggtgacttgaggtctggccttgccttgagcagaggtgcttgtctacccacatggtctcagctccttcctgccgaggtctcttttgatgcaagacctcagtagtgcttcccacaaaggctgcccaaggagcttgagaacaggccgggccaggcgggcagcttgcctccctggatggttactgtactctgatgtaccagagaagctcaccacagcagaacttgaccttgctctctctgggtcggaagacttcctgacctttggcctgagcattgtattcgggaccaactccagcctcagaggttctcctgggagtatataccttagtctagaaggcctttctgtctcacttcccagagactatgggcccatttggagtggaataagaggatgggggaatcaggcttcaacaccagtcagctcacctgctgagactgatttttttaggctcccatcctggagtgggtttgtgtctgggtctgccagtaccctcctgacatggcttggtctgtaaagctgacttgtccatacttagtcttctccggtacgtgggcctaggaagcatgtgtcatgttgcacagattggatttcgtgtcagcaggctgacatgtagacagtcgtgattcacaggggctgggtatgtaggaaagcagaccctcttatttgaactctcatttctggagccatagtttgggctttcctaggagccatatgtcatcccgaggctggtgtgacaaaacttcagtggacggtggctgtcactggccaagctaaacctgtcgcccatggcccagcctatccttgcaggctgtcatcctggtgaat

SEQ ID NO: 34449 - DNA, 1174 bp, Mus musculus
tagtgagtacaataaggatttttccctttttcagcctgctcttgcggcctgccttctcaaaagctcgtgcgatagctgcttgttacctctgcacacagttggttgctcactctgcgaggtgtcatttccagggtttgcccatggcttcctggatgttgacttacaatttcttctcaggccatatgtctctggatgccatgtcaagtcccttataaggtgggcaggtctgtggaggcaacctgtgactgtgggagggtttcagtgagaaaaagagctgggtgggaacactgggcaggctgcctgcctttgagcttcgtgtctctgtgaacccgaggctctgggtcctggagtgtgccggaactgacagtggcttggcatatcgcctggaaatccagctgcccgaggcgctgggtttggagctttttgttttgttttgctctggtccccagtgaagcagcaggtaccgttcatttcacttgtacaaggcacagaagcacacatcagcgatgatgaataatgccagggcacctgctgcgtggtggacgggagcaaaagtactactgccctgggactgcttgtctcactgcctggggctgtggggtcataaagctgctcttaactggctctgctgaccctcaggagtcatgctgcagggcagcgtggctgtgccgcagtgaggaatgagcccgccatgttcccctcggtggggctggagtggtgtccagtctggatgcttctagcgagtccatcctgcatagcctctcattcaattctggtagcagtactaactgggcaatgttgttagcccatagttcccatggtccggtagtaccggggggttctgctgaggcctgggactagaggaggaagcagcccccgcagcagggtaaggcctgggttcttcggaccctctctgcaggacgttgtgccccttcagaatggtggtgctgaggtatgaagtcttaggtctacagggcggtgccttgcttggttggcagccaggggagactcttcctagagtgtgaacagacatggtgtctggagggcacaggtgaatgccattgacaggtaggggggtgtgtgtgtacgtgtacacatgtacacgtgtgccattcattaaaaaaaggagaagcacagcactgaacttccacactgccagggataagaggagttt

SEQ ID NO: 34450 - DNA, 1189 bp, Mus musculus
atacatgttcattactctcatttgtgctcacacgcctgttcgtgtatttcatgtgtgtctacaatataccataatacacgttgtacacataacatggtgcccacggtacatgcctatttgtctgtgcatgtgacatgtgtttgcatgcatgttctaacattccaggtgaactccccagagacagcctggccactgtttcctcagaagccgtagtgagctgactctctcttcctgcagaaatccccagggatcctttaggatctccctccccacctccactccgttaagtcccagcgcctgcactcggatggaaatgtttgctgttacgcttctcggtttgattaggtcgttggattaaattaattgtcaggctgcctggaactaaagcctcttaaaatgaaaactgttttcactcaggaaatttatgcaagatgaagaatgggaaaaccttcctggggaggaaaggccgggtcacctgaatctgcctgtccctgctccccaaagccaggatgtacacgccagcaggctccttttgttctgttctagatgtgtctccctcttagagcctcttggttacaagtgaaaaccgcccaggacaggagtaagctgaagagggaacgcttggggtaggagggcatctcacttcaccaagaggaaggaaggctgccaggaactgggacctggagtcagcctgggccaccacagtctagtggcctggttctgtgccccagatcggtggctctgctactttttcagtggaggtgttttctgctcagatcttgtatctgtctgtccctagtccagcttctcagcctgggctgagcctccttgagggaacccacgagcccaatttaatatgggctcctgctgcgacctatctgcagagggagtatatgtcatgcagatgagggtagctgataatggacaggacttggatcatcagaaagcattttgtacctccgcgttgtgtttgtccttagcctgagttgctaggatatggtggagggagaaaggaaggacggtcagcacaggtatgaaggtgcaggaactctgttctgagaagggccctttctggggtgggatttgctctttcttatacgagttaaacagagacctttgagcctctttgtggggtcgaggtatctgtgtgtggaggaaggctgtactgttgagcttccgtcaaagcttg

SEQ ID NO: 34451 - DNA, 1182 bp, Mus musculus
cctgtgcccgcccgtcctccctttgccgaggacgggcgttaactgtgaggctctagccatttgtaggactgcctcacagcttctgagggctgaggtgatgcgtgccatcgtgtcacagctagatgggtctgcaggccccctccgtggcattctcacaccctactatgctttctgaaagcaaatggtacaacatcacagcaaggtgggacctgtgtccagctgcaggcagatggtcatggtcagagggaggagctgctggagagtcctgacagtgattgagggatcacaggagctcctgacctcagtgcagacaggccttccgtggagctttctggtccccaggttcagctatgcttccctagtctgtctccctccccctcagaacatgaacgcttcagtggggccagacatgagcctgcctttgctcatctgcgcctttggaactagcatgatacccgcctgtgaccagtgcctcagagaccccgaggcaagtgtgtgagaggtcctgcaatttcatggtctgttataccacataaaaccttctccatgactacatgtcaccctagagaagacataggactcttgactctagtgaaagtgcccacaggaaggagctgaagcaagactgactggtgaatgtctgggggaggcgcaggctattctagagccttctccctaagaataggcctgcatatgaggatgactgggtcctgtctgccatgctggggtttctcgggcagccacactgttcactgctccacaggctgggtgtcctcacagctgcagagagtattcctaaggaggcctcacaggaggctgtgcaaacaccctgtcttaggctgtggcgttttctacactgtagagatgtgcccctctcccgatggccagtgattctgctgacagcagtgggactcagggaaggaacgttttaggcgtgttgagtgcgtgggctgttgcaggagtgagcagtgaatacccatagcccaggggtgtttagcctcctaggaccctcttcacagggagcaaagggaggagggcatggtgattctagtgaggtcagaacagtcagcagagctgggcgtggccgcaggagcatcatcctcagctacctagtgagtttgaggatagcctgggctacgtgaaatcgatcaaccaaaagaacagtcagcacgatgggtggtc

SEQ ID NO: 34452 - DNA, 2769 bp, Mus musculus
caaactgcgacacgtgggcagcaacctgtgcctggatagccgcactgccaagagcggaggcctgagtgtggaggtgtgtggcccggccctgtcacaacagtggaagttctcactcaacctgcagcaataagaggcccccggggcccaacgtccacccgcacaccggcccagtttgttgatcacgtaattacgtttctgaaactttccgcaaaactatatacctcagtgttccatcacggtctgacagtcttaagtctcaagtcttcatcgaggcatgagcggggcagacagcagtgcagaagaggaaaggagcccctggggctcaggacagagggtccctcccaaggctggcgccctctgcctccctctttctgcttcctgctcacaccccagcactggccggaacaagtgggcaagcagcaatcatgtttatatctcagacagaggaagcaggggcaggcgcccccacagtgagagctcgccaatctccactctgttttacctattcaaaatcgtgtgtgtgtgtgtgaaccaggcatggtggccagtgcctgtaatcccatcactcaggaggctgaggcaggcaaggccctgtctaaggaaaaaaaaaaaaatgatttccacaaagctggcctttccttgtctgtccctgcacccgggctcagctggcctcccagccacgtcccctcttccattgacatacttgctgtatttgaacgtgaactttcctctggtggacactaaatagagataaagagaatcatggtccgttccctacgcttccccgacatcatcttgtgaaccctgcaacgcagcgcagcccagagcaaaggtgcatctctggggcctcaccagccggcccacgctgctcctccagtaggggcatccccaaaccactggccccacccacaagcgtcaatgtttaacttcagcgaggggatcgcagctgggttagaaagtctgctttgtgcccattgtcatctgtaaaactaaataggtcacctcttttggcaagtattgctttgggttttcttttaaaattagatttcttttctttaggaaaactcaaccccacagcttctaactaatgtgagccagcaggaccctactgccttgtgacagaccagggacactggacagctgtcacccactatccctaggctcacagtggtttgagaccctgtatgttgggtctttggtactaagctgccggcagagcacagaagagcagctcttcagcctgtgggtggaccccacgtgcccgtagccctggtgtgggtaatacccccggtacatccacaggcaactgcaggaattatgggtagagttcagatcacaaggcctgcgcactcccactgaggacctaggcatgtgttagccacagaggtgacctggatgtggggaagtgacacctggtgggctgcaggcatcatacgtgctcatctcgggtatcccagagatctcgggaatcagagttccaggtggtcagagggcctgtaggtgagtgctgtgcctcccgcctgctccagaaggggggtagctggtttcttctacctgaggggctccatgtgtgtactcaccatgtgtgtattcgccatgaccatggaccctctgcgaaggcctggccaggtgctgaccctctgtctttctacccctgccaagcaaccaacagaagagacattgtaacagacagggtgcccacatgtctaattaagttcatacaatgtccaccttccaatgtaggctctgggaactgtcactcccaggtacaggtgcaaagctgtcaaggacaaggcaggagtttgctggagtccggtcaccacgacctttgctaaccctgacactcctgcactgcttctatcagagtgactccacagatgtgagacaacatggggcgtcccaaccacacgtgtaccccaccccaccctgtggcctcttaacctttgtaccatctgattgtctggccaccagggtgccaactcaacccagctccgagcagaggggggtgtgggcagggcccgtcggtgagccatgtttacatgacagtgtgccaaagtgactcgccgagcttgtattgctttgtagtcatctgggctatcccaccctcccaactcctgtttttaaaactaaaaactcccaggagccctgggcgcacacaggcaaaggtggctgtcttctgtggtggtccttgagtctccgtgaagctgaaaatgatggtgtctgtgagtatgttttgcaaattcaaaatatagtttggtaattttttttccagttgatttttaaaaaaacaaaacaaaaaactgctgtacagagcttgtactttgtccattttatagatggaaaccatccttgaaattgtttaacttaaataaagagaagatactttatagataatcctccgccgctgtcagtcttggtctccaccaggtgtgggtggcaccaggcagagggctggaacctgggtcttgcttctgcccacacttctatttctcatcgcccccttaaaacacatctctaaggctgtggatcctggacctgatgtaatcgtgacaattgtttgcagcgtggaacaattgggctgtgctggacacctggccagcctctgcaatgctctgcctaaacttgccctgatcctgcacaagccgcttcctgtagtctgccctgaacacttggcccacactctttaggtaccaaatttcttatacctcggtatttaaaatgcacagtcctgctcagcagccatctggggctcccctacctatcctggtc

SEQ ID NO: 34453 - DNA, 1234 bp, Mus musculus
ggtgacctcggaaggtaccagcagtaggaccagtggaccgtgctccgctttccagagtgtgaaagatcatgacgggctcaagttcagaccaggcaagcttacaaaatggacccctcggtgccaccccacagcatccggggcatgggttcctagcactctcccatgagatcagcttagatggctcccttggaagaagagatgcagtgtggtgccattaaaactcagagccagggggggcaggggcggctgcagcttgctgactgtaaacagggtgctcctgttctgtcctccacgggactgcagcgagcagggcgaggaggggagaacaatgccgggtttttgttttttttttttgttttggttggttgttttgttttgttttgttttcaatgtatcttcaggttaattccctactgttgcttaaggtctactgtgaacagatgtgccccccactccccactctctgacaccacataccttcacagctccctgcatgatcacagttctgtttctggcctgtggcaggttaggaagggccgctggcttccaggacagatgtagctagctatggctaccaaggcctggggagcctgcagactgaatactctgtcaccttgtcactgttggcagaattacctgtcttgagaactctatagcatcatgaaaacaaaatccttcacctccctctgtctgtgagaatggggtcccctagaaagtcacagcaggattaggaggccctggctggggactgaccctgtgggatctcccataggcccaggtccttcccaccagaggttgacatctctccatggagcctgagcctcaaggtgggcccactgtccccacagatgggatacaaggatttttccacaccttgcagcccttcctcctgatctaatggcacctaatgtccccagatgcagactgtcctcggcaggggctttggggcacttcctcatcctttcagtgagccgaggcgtggctggcagcagaatgctctccacaccttgtcacatctgtgtccactctctccacaagcaccctcgcctgcggtgggacccgcaatgccacagatcacaggcccaacttcagtttgtgtttaagataacctttgctgtacccttaatgggatcaaaagcactttcaccacacggagaaatatattttcaatttgtgatgcttttctacaaggcccactcttcctgagttcaggtgtttccaacgcttagggagc

SEQ ID NO: 34454 - DNA, 1127 bp, Mus musculus
agtcctaaagtctccacgctccacactgagccacccagccaggctcccatccttccagcctgctgctgctttctcctcagaacccaagaccccaaatcagagtgtcggagagtctgcacgcatgtctctctccttagctttggcatcttctcaacaggatcctcggtcatctttaggtttacagtccaccctggggctctctgctgtgcatgggtgggcaggcaagtagactgctctgttgatgtcatgggaattgatctgacatgctctgtccatcttgccttggcttcttaccatccggcctctgtccctttttctgcttgcctggccagcccacatagccttctgcccagagagtttggggagctggaaatggaggtagggaaagccacctaggggtcaggctggatactgcaagctccttcagaggccctccaatcccaggtgtcttatctgtttgttaccccaggctcaggcactgtgagccactgggctggcacagagccaatggcacgtggctatcccagccagagggcattgtgaacaagagccatgtggcaatatcatgtgacacttgaaaagacctggatgcctgagacacaccttcacaccaggctaatcaccttacaccgagcatcctggtttgctctgattgtcctggtttcagagctgacgtcctgggtcgggaagtagttctcggacctttgcaaacctggatgggtgttcatcctgtgaccctcctaacagtgatgaaccaactccatgcccatgtgaccatgcatagtcgagaggcaggagtccccacccaccgtctgtgaggctgcagtgctgcctcaggagtggtaggctctggatgtctcttacctgaccatgggagaacaacacaggttgctgcttggtccctgctggcctggacccacaacaggaagtgaccatgtggtcacatggaatggaatcatgcataagagtaacgtgttcacggttggaaatcagacgtggtacgagaaagatgcaaaagatggggcagctttgcagtttttatgagaatgtggcagctgagcaaggtttgcgagctctgcaggtaacgtaagagccgtagggccaggtggaagagaaagcattagacc

SEQ ID NO: 34455 - DNA, 1237 bp, Mus musculus
gtgtcctattaggctgacaggcagtgccaggcagcacagagctgtcctgtcaagctgacagtgtcaggcagcacagagctgtgtcttctcaggctgacagtgtcagacaacacagagctgtgtcctctcaggctgacagtgtcacacagcacaaagctgtcctgtcaagctgacagtgtcaggcagcacagagctgtgtcttctcaggctgacagtgtcaggcagcacagaactgtgtcctctcaggctgacagtgtcaggcagcacagagctgtcctgtcaggctgacagtgtcacacaacatggaattgtgtcttctcaggctgacagtgtcaggcagcactgagctgtcctctcaggctgacagtgtcacacagcatggaactgtgtcctctcaggctgacaggcagtgtcaggccgcacagaactgtgtcctcttagctcctgtctgtattcactccttcccgagttacactccaaatgacgtaaggaccctgctttgctcttttgcatttggatattcactttctcagctctgtttttagaaagaccatcctttctctattgaaccgtcttggcacccttatcaaatatcggttggtggctgtttagaggcattctctctctctctctctctctctctctctctctctctctctttctctccatttaccccctttctctgcagagactgaacccaggtctggcgcaggctcggcgtgagccccatatcgatccagccccgattttccatcttaattctatttatatctctttttgttctcttactctatgaaaaaaatgccaatttcctcacaataatttgaaaatattacattgactcccagaacaagccattttcaggctgggaggctgcaactcattgctggagcgcctgcctgccatggaaggctccagctttcgtctccagcaccgagagtttaagaaagagcaaggtctcctgcatcagaaaccttcaacattctatcatacagttccagggtttatggcttgtagcccttcatgtcacacattcatggatatgatcataggcgtgtgtgcatgcgcattttcacacacacagagagagagaggggggggagagagagagaatattaaacgcatgttttgcccaaatggctaaatgtttgcttaagtcacgactgaagctgactgtagaatgaacttctaagataaaaagaacgccttttgaagtttagtttaaaagcgtttacat

SEQ ID NO: 34456 - DNA, 1166 bp, Mus musculus
aggattacaggcaggcatcagaggtgctggggatccgaacccaggtcctcatgtgtgcacagcaaactcctcacccattgagccttctccccagccccaggactagggctttagacagacacccatgcactctcggggaacatcatgctagagacttaggaaacatgacagcccattttcctgttgagctgttttgtatgtgactgccatcttaagaatctcttatttacaccgggcagtggtggcgcacgcctttaatcccagcacttaggaggcagaggcaggcagatttctgagttcgaggacagcctggtgtacaaagtgagttccaggacagccagggctacacagagaaaccctgtctcaaaaaaaaaaaaaaaaaaaaaaaaaaaaaaacaaaaaaacaaaacaaaacaaaaaagaatctcttatttacaaagcaagttcctacatggtgtcaccagtgtctgttaccaacctgtcattaccatcttgtgtccaaggtactttgagactgtgtcagacgtgctgaactcagtgaagaagatggaggaaagcctgaaacgcctcaaacaagccaggagatccccagccaccaaccctgtcagctccagcggcggtggtatgagtgatgacgacaagatccgactgcagctggccctggacgtggagcacctgggagaacaggtactaggagcatgtgcctgctctgagggccaggctagcaaagctgaggtgtcacctccctagggccatcgatagaaaagagtcaggcccaatttgctgtgaagaagggtgtgtgccaggaagtagacaatagaaaaggcagagggatcccgagtgtcccctccctccccacagcaggttccctgggtgcttcagcacttgctcaggctgtccacagagctgcccttgatgcctgaaatcctgagccagtggcagggcctgcagcttcctgtcctgtgccatatagagcactgattttgacatcatggtagatggctgatggcagctcgtaaacctcccatgagggtgtagtgacatccactgtacgaccatttacaaatgtaggcaactgcctttcttgacagtcaggtctatacgtagcctgttatccctgccacctaggcagggggattgccacaagtggaattgtaagacccaat

SEQ ID NO: 34457 - DNA, 2732 bp, Mus musculus
gctttctggtctgtagcactgaggtaaattgaggtcggggcccctgaggcagaagtagctgctttcatctgggtcattgtaaatgaagtgccatgtttaggttgtgtgtggctgaagcagttgcccgcatcttattttgtcgcccttgttcctctgcagatcagctccagtaatgtgctcttgaagacaggctttgattttctggacaactggtaaatggtgctacccagaaacacagccaggagccccgcgtggcccaccgtggtgttcagaggagaaggcagcactgcctgcgtcttttcctgttttctctactcctttcttagtctttttggaaactaggaaatgttgccaggttttccccgtttttggtaaaaccaaatagataaatatgctattttcaatgatttgataacaagttttacacttgggatttttaaacactaggtacccagtaagccttgtaaataaaacttctgttcccagctccatcccaccttccctccaatgaggttccctgaccaagtcacaaaaggtcgcaaaagtgactctttcttgtcacttcctgttgagggctccctgggtagatatgagctgttggctgtcactgtggaagactcatccttaaaaagtgtgctcacctggtaccctttcttcatagaagccaggttaagcactacgtatccttcccctcccaatgcataggaagcagactgcgggcggtggcaggcaggtgccctctgagctggcctggtgacttactcagagctctggtcgcccttcaaaagcagctgcctgttgtatccagttcctgttgttgtatatagagctgcatcgcgttccttggctctgtaggagattcctttgggaagttattaagaccgtcccgctagcgtcccagtcctgaccgctgtaggagtcagggtggtgacagctgtgctagacatcagggctcttctgattcactgaggtagaaccccaggcttaagcgtcattcatcccagtctggtctggctgcatcgtgcaggacacgcccccagacctgaccgcattcctggtggttccggaagcttccccttgcagccccaagagctcacagcaacaaggctgggcgaggagtgtgtgcctcacccggagtttgatgccctctgtcctcactgccctgacatggcctctggaccctccatgcacctacaggatgctaagcaaatctgtgagctcggggtggtgtggtctaccctttgctatcactccgttctcctcacccgaagccttaatctccacgagcactcctccgagagcctggtttcagtactgcaagctgtagcctccttaatgtctgaagtagcttctggaatattctatgtagctccaaggtaaagcacgtggcaaccccaccctcaccccccccccccggccactctcccctcctctaggaagacatgccaaagctgtatacttagccaatatcgatgtgatacctgccaattagcttgtgtcccgaacctccctcggtcccagtccctggtggtgctggggtttgccttcctctagcaacttttgatggagtcatctttccgcactgtttgtaggggagttgatacagaggaagagttgaaacctgtgcaacaatgtttttcctccccatgggtctacgctccataacattggtgtagcaggaggagactctgacctgagtgtaggcagcctctgtgactggtcccatgggtgactctcgcagtggtgtgtctcaaggagtcctctgaagagcaggtgggaagtcgaagatggggagtctaagagggatcctataggacccgcctgacctgggaattgtccttgtgcctgggtggagtccataccacgctggcttcttggtctccccccagggaacatgtgtcagtgaccaggaaatcagaactgtatctatcattttcccttcctccatacatcatgatgaagtatgttcattattcttctctgaagcacattctttggctgaagccgctgtatgatgctgggttccgccacatgcccaggctcagcacctctgggaggcagctccagggctctgtgtcctgctcttggtggctgtgtccaacagaagctctcaggaacccaggctctgcgtgtctggtttgtccctgaatcccagccctccgggttggatccgatcctgtcaggagcagtggagtctgcctcctggccaggtgccctcctccttgggccagtgtgggagtggccttccattcttcactccgccctctcctttgatacatactttcgaaatggtaaattcttactgagagcttgtaatttggtcctattttatactctagcctttaataaagccattttaaaaatgagagtcagatctgtttcattttctgctgtttagggaggggatcagggtactggcaggttaatgccaagttgtgtatctaaggtgcaaagaaatatttgctcaccctagataggtcactaatagaccaaagagaggagtccgtccaattctacttagtgagccagtgaatttattggatgacttaccaatacaaccctttctcaatgtggtgggttctctcggggctccaccactgaagtctccaagttagcctctccctctagattctagctccacccaagctcacgtgcatcagaagggtgtggcaactggaacctcagttggccctttaacatgacttcctacctcgcttccactgtgttctaga

SEQ ID NO: 34458 - DNA, 1304 bp, Mus musculus
gaggctttccacgagatcgctgtccaggccgggtgggaaggctccagcaaagggaagtgagtgtaactccgaccctctctgaactgagtcgggtccaggctgggccagcaaaaagttgacaattcagtgaggagtgcggcagggtctcaggagagaagatctcttcccaagtgttacatacagctcttggaacaaaagactcaaaggaatagttctcgcatgcctttaattccctgcatggctttatatacagttctgggggtgattcagggtttgacagcaggcacctctcattggcttggactgagagtttggggggaaccttatttgcatgtgggaaggcttggtgctattcctaagtggctgatagctatgcctcttctgtgggggttgtgggggcggtaactccaacaggagccaggatcactcccgggtcccagggttcaagatctagcctggactggaaaccaggctgtctgcgcgtcacctgttgccgcacaccctataagttaagatactgagttatttcccgctaaagcttgccataaatcactgttgcctttattcttcagaacacactcaactcctgctgctcaggaaataaaagcgagggttgccaggtttctaagccaccagttagccctctctggaaccaccattacagctgtttccttggttgactctaacatcccaccaagttgacagtttagacgaaccgttacagctcaccagcctttgctggcctctcgcctggtgtggccacactgtgcactgggatggcctgtgtgctctttttcacaagtcggagccagtcgggctcctccctcacttttacagagacccatctttggtttatcctggaagctgtgggtaaggccgcagcactcctcatgagctctgctccacaggatcgctgatccggaccagcctgtcctgtggctggatcagatgccagctccaagtctcagcagagggttcaataaccacatcaacttaatcaggtaggggcctgtgtgctttcttgtgtttgcgtaggagtggagcagtgtgaggggccctggtggccttggcggggaacacacccagggtagctgtgcacccacaagtatctttcctgctggtccactggcacaaagtgcttgccgtgcacctgcacaggtagagccctgcccgctcaagggtggactctcgaaggatggagggtgtcagttttcaagaagtcgtcaaacagcagagaaatcgatcagatggggaattccgtatttgcctaggttgctcgtgagcctgctgtggccaggaccacc

SEQ ID NO: 34459 - DNA, 1226 bp, Mus musculus
tcacgagttcaaactccacacacccgctccctacccacaccatcaccagctctgctgccgccgaggtccggatccctctgcctgtgtgctctgtctagccacacgcaaggattctcctttgccagggacgtttgggattgttttctggctaattttgctattaattccagttgcaccccggaacaatatggtcccttccttacccattcttcttacctccaccaccaagccctgcacgcatggaagctactgttctgcctctcagcctgcctgccctctgcctgggtgctgatctgggccctttcccaccccccacctcctccactggcatcagctggacaggcagctctctcctccattggggatctgcctgtactctgtctgctcactcactttgctcctgtgtatgtgtgtgatcccttggcaagaatccttctccttccgtgttggctttgcttgctcttcctaacacacagcaggagtgctgcagctatgcatggtccactagtgtgaagtctgactcaccaagaataggctccaagttgacagagtggctgctgcccacacagcacactgtagtggaggaagagaaaccatgcttcactccgaggttctggagagagtcaggaaaggtcctggcatgaaagacctctttggggacgggggactgggagcatacagtgtcactcttggccagactagtttctgggaaatggctgggaagtagttctggttttctgagcatggagtggaagtgtggaagggagaagggacagggtgagcaatgaggtcagagagaggcctcagtttctgtggggctccacagcgtggcctcgctgctgtagctctcagtgaccgagcacgtgcagacagcacgggtgtctgacccactgattcttccctgggccccacatgtgatgtgcacacgtatgtctgcatgcgcatacatgtgttacatactgtggtgggctctcatgcatcctggtggcagtgtgaagtacaatattgtagggttgggtgacagcacaggtgagtgggacacccagacatctgggcacagagaagaatgtagaagacaggggggcagctttagaaacccggtgaacaaagcataaagacgagccagacggattcttcaagaggaggcatggtggtcattgtgtgtgtgtggtatggtgtggggtgtgtgtgtgtgtgtgtgtgtgtgtgtgtgtgtcgctgagagc

SEQ ID NO: 34460 - DNA, 1128 bp, Mus musculus
ggaggctgagataggagtattgtgagttccaggccagccctggttacagatgtacagcctgcacacgtgcacacagagaaaggacggcagagaatcttgtataagtcacctgtgtgtgctggggaagagtcctgctcagtgctgacctcttgcaacattgtccccttgcgctgtctgtaggaatttgtcagaggttgatgggtctgaccagtgctctgcaggagaaagcctgcactctgcagttagaggcctccatgtccacacctgcttgtgcttccccagtcttcagcctcctggcctgtgtgaatcacagcaaccacccctagagctgtgtcctctttcagtttagtgaacatcctgtgaagaacctgtatctcgtatttagttcgtagagttctcagcactcagatgtcgttgctgcttagaggccaacaagtggctcacactctaacagaaggacttcgtgctttaaaatttttatttacttacgtggttttgtttgttttttaatgagtgctctatctgtatgtacacctgcattccagaagggcatcagatcccttcttagatggttgtgagccaccatgtggatgctgggaattgaactcaggacctctagaagagcagccaatgctcttaactgctgagccatctctccaggcccctagacctggaaatgaaattttaaaatattaattttgaaacttgagctctgcttgtgttaaaaacacacacacacaaaacttgtggctatatgatgttgataagtctgtattctcagaaaattgatgagatatgttttgctcattactttcaggtccttaagtctatgtgggggtggtgacacaggctttgtttttcagtggaatttgaaatgcaaagatagatgtttaaataggtttcaaattgcagttctatatacaaatggagagtaaaaaactgacagtgagcacaagcccctgtgtagacgacacctgaggtgttgctgggatttgaactcaggacctctggaagagcagtcagtgctcttaaccctgagccatatctccagcctgagggagagattcttgagcctattctttgtgacttcttcctttttagtggcctggttcacttttgaccccaact

SEQ ID NO: 34461 - DNA, 1143 bp, Mus musculus
tacaaaatgagttagttcggagacagtcagggttacacagggaaaaccaaatgcacacaatgaaacagtgttctgaaacagttctgactatttccacctgtataagtcacatgaatgtgactgtctggctgtgtttggggggggggggtgaaaatattcctggtgtgggtggatgtgtgtgtacacgctagggtctattcactgctggttgagaacttgtaacttagatgaagaatgtagttaataacattggaaatccacatgggtcattctcagcacaaccactgagtgtcatgtggtgcacaattaaagtacttggaaggctgaggcaggaggcctgtctggagttccagaccagcctcgtaccctacacctgctttgctgcggtaggtatgcctcttggcatgccctcggctcacggcttctttacctgacccagtgacactgtctttgactgtcagatccatgggaaactctgcatgttttgtttgctttgtgaagcatacctgcggtggtggcagctgcaggactcgagccagagtccagcccccgatgacgtgatccggtacgccaaggagtgggacttctacaggatgtttgtgatcgcttctttcggtaagcagatgctgagcagtccgtgtttagctaaccatcgggtcactgttctaatcaaagctaagacctggtgagacaactagtaatgcaggagtaaacaccatatctcagctcagccactaacctgccgtgcgagtttgtctgaatggcctgataggttatttccctgcctgtgaaatgagccaattcgaaccagattagattatgtgaaaggtaggtttattgggaagttgctctccagtgagttcaccggctccaaaggattgaggccaggggagtcaccatggattgggggtctgatggtggagggagaggggaagaggaagagagaaagggggctagggcacagagggaaagagaggagagcaatccaaatgcccagattacacagggagctgtaaagttcaaggttgcggcagggtatgccaggtaggaattgagggattgctgggaggagctggccaggtctgccttgataagtaagatccacacctcagtcccttgtcctgggtatgagacttaccatca

SEQ ID NO: 34462 - DNA, 1866 bp, Mus musculus
cacactgcctccctgtgcccagcgctcagtgctacagcttccttctgtttgttcttcatctgtcattcatggtgttccttccttctctgctgtgtggagctccctcctgtgcctccctgtctggcctatgggctccttcctccacctgaggaagcaggatcctagggtgaagaaatgcaggaggacccacagcaggagagggagccatactcaggctcatgtcgtcttcagtatgtcaccttgggtgtggagcgctccactcctcacatgccctgtggtgtagccctgtttgctgctgtgctgtgagccagcccagcttccttcctcctgggcctttgggggtgtggctgctggagctggcctccctcctcagtgtacgtgtatggctcctcattctgggcgttccgtctgagctgctgcgtccctgacttcccctttgtggaccccctttccatgccctgggtccacagtgcgaaacttcacagagctgctgcagctctgtcaaaatgttcccgttggtgctggaattctagccccacccccttccttccttcacgtgaaagggtgggtgggcctgttcttcccagatccctctcctggccagtgctgcgtcctgtcccctgcctgatacttggtgtatgcaagagtattgccctccgtccgatatgcccacactccagctgctactggttccctcctatagaaagctgccacgttcactcctgagaaggacatctctccacactccaccctggtgcttctacccagttggcacctcaatagcagctgccttccaaattcctaccgcaggccacccaggtctgtgttccctctggtgcgtctgtatgtctggctgtctgctgtaattcataggaaaatcaactcaccagtcttcagaacccactacagagccagtggcctactgtgtgatcttgtgctttgttctgtcttcttaaaattacactgaggagagaccctgcctcccgctcccctgtgtcctccgtggctcccagccagccttggaagcagggcttctgtggtgatcagaacaggccccacaaagtagtcttgctctgctgtctacagctttattcttcactctctggcaggaccagctacctcaaaagagaaggcacaaaagaacccaaggtctctgctttctgtgagtgaagccaagactggggatttctgaacgtacccagacaccccagaagatctgaaccacctataccaaggctgaacgctctcaggcagcactgtggttcccttataggaatgatagctctgagctccatccttcctgctctttagtgtaatattttattacactggtggctttaaccctgtattttgtgtctttctgacagaagcactttgaagttatctttcagaataaatcaagctttttatacatttccagttcagtaactaaggttgtcttttgaattacctcagccagaaatagccaagataatcattgtagttctctctgtaatggtatgataaagactctacaactagggtactttataaaagaaagtgtttcgttcagcttatggtttcagagggttagagcgcttggcagcctatagagagttcacatcttgatccacaagcaggaggcacagtgagcactgggaaccacaggagtgtttgaacctcaaagcccaccccagtgccacacctcaaggtcactccttgtaatccttcccaaacagttccaccagctgggaaccagcagttcaaatagatgggcctaatacatggtggctcgctctttttaagcactctgtgagttcaaggccagcctagtctgcaaagctaggacagccagggctacacagagaaaccctgtcttgtaaaact

SEQ ID NO: 34463 - DNA, 1174 bp, Mus musculus
gaaacctgttcaatgtcctagtgtggggactctcagcagggataatgtgccttacacccagcttctccgggcactctgaaaggtctggcaacactagtgatcctacagtacaattgagaatccatctccctgccatgaactgcacccctgcagagaaactcttctgtggggtcccacagccttggttccatacctcagccttgcatgttactagctgtgtgtgcttaagctactttgaaaactttgaacccaccgtaagtaacattgaacttggactcttgtgggaaggggtaagtatcatcctctgcataatcccctgtgtgggactcaagccattaggtgttatttactgttttatggtatttatgcttaacccatggatttgtggaaggctacgggggcggtgggggcagcaccctgttctttcaagcctcgttggcttggagaaagtagcagctggtgactgtcaatatatttttctgaatttatttcagtttaattggtatgcttttataagcttacagctgttgttctgtgtgtgtgtgtgtgtacacgtctgtgtgccatgatgcgagtgtgttggcatgagaacaacttttaggagttggttctctcctgccacctgggttccttggatggagcttagttaggtcgtcaagctcggcggcagagaagctttactcaccgagccatttgccagcatgccggccttcatgtgcttctttttgatttttgtttcatttgttttattgaatgtacgtgtgtgtgtgttgtccatgcatgtgcacatatgtataggtacacacctctgcatgcacttgtagagggcaaacgttgatgcccagtgctcgcctccctagaactccacctcacattctgagacaaggtcttttactgaatctggggttcacggatgggccaagatggctggtcagtgagtccctgggatcctcctgtctctgcctgcctagcactgggatcccagacatgtagtgacctcgtgcagagcctataaaggttctggggattttgcctgggtagcagttactttacctactgaaccatctccttagctctttggggtattgtgtatacgttaacgactgagaatatttgtcccaaattacagccccacacaccacattctgttgcatattgcatggtagtcagtgca

SEQ ID NO: 34464 - DNA, 2105 bp, Mus musculus
tgagcactgccagccaggaccagagtcccagtcgaaatgactggctttgctttctgccttttaatgtattgtgtaaatatttatgctcagcccttaagaaaggcagagaagtgtactgtgtaaatactgaccactaagaattctaaaaacatttcagaggacaaaatggtggacaaacagctctgtgctctgagtacagaaggatcaagcttaagtcggctctggatgaagattctgatgaggcctccagcaaattaactacagcattggttctctgcccgtgggtggcacttatcagatatttacaccacaatttataacaatgggaaagttacagttatgaaataacaaataattttatggttggggtcaccacgccatgaggaactgtattaaagggtcacagcattaggaaggttgagaaccactgctctatggaaaagccatccttagggaaacagggtcatgcctgagttcttgctctagccatggtacaggacctggcttcagttgcctcaggcccatgcagttgtgggggacatatgatgcaaacagggcttgctaggagggaagtggcctgcacaggaaactcactgtggccaggaaaggactgcaacgtgagtcctgactgagcccccagaaagagctcaggtgcaatggatcagagggagagagagggccatgtcttttgagttagggtcctagaaagcaggcagattctacagtagaggtcagcaagcagccccattggggaagggtagcgggtccttcagagggtgagagagcccagagggttttagcatgcttaagattttgactggcatcacatttcttgagttagaacccaaaggggcaagctaaacagtgaagaactccaagcagctgccccatcgtgtttttaaatgggagttttaaggactagaactgtggtttttctttttttttagacagggtttctctgtatagccctggctgtcctggaactcattatgtagaccaggctggcctagaactcagaaatccgcctgcctctgcctcccgagtgctgggattgaagacgtgcgccaccactgcctggcaaagctgtggttcttatgcttgcaccgcacacacattgtctgagctgttaccccagcctcttctggtcacctcttagtagtcagaaggcatgtggccatgaccggtgtccctgtgtccaaagctatagcgtggtccctgtgagtacgtggacatatgcaagtaagacaggcagtactgaaagactgaatttgttgaggggctccagctttcctcgatgattaaatctcagcccttagagatacagggaatttttttttaattagcatgtagctgtagcctctagctattgcttaagcaggtccagcttcaatcagaaatattcaaggtttatgtagggttgggcattgtgattatcatagggtggtctttttatcccctccccaaagagatcttccctagagctaaacaggttttacaggagctaaaattctcaagtttctagttaagacagtttgatggttagcagacagaactcactatctaccagggcattggtggtggccagttctcaagggaaaagaatacatgtgaccctttccggaaatgagcagtgagcagattgacagagcagaagccaatggttccggtttgctatgctgcctcagctcagactgtttcccagtctgttttcttctttaaatctatttatttttattccataataaatcatttcattaaaaaaaaaacaaaacatgttgctgttttgcctacatttatgtctgtgtgagggtatcagatcccctggaactgcaattggaaagagctgttgccatgtttgcctgggacttgaacctgggtcctctggaagagcagccagtgttcttaaccactgagccatgtctccagcccctcattcagttttcctgctctcacataacctagcattttccaaataagctcagtaatcctaacgttaaagcttgctacgttcctcttctccgctgagctcagctgcaggtgtcggggcggcagctctggcctggtcttcacagactcactcagttattaatttgtacactgggggt

SEQ ID NO: 34465 - DNA, 1232 bp, Mus musculus
acatttgaactctgtatgctgtgctgaggatttgaaggtaggagtctgtgacaataattggtgtaagttgagaaccacaaggacaacagctcgagtgtgatgatcactgagagaccgggttgtgacatgcggccaacttgagaacctcccagttctcagaggtgttcaagctgatctggggctctcctgcctcctggcggagagggccctgggtgatggtcagatcatgctagggtcaaggccaagctgtggacagatcacaggttatggaggacaccgtggggctttgagtgtggctttgatgggaggggaggactgagtgggactgagtggcttatgaatgaaggagcagtgcttgggccggaagagccacttgccctgcccacgcagtgaccttcagatcactgggcatcttacagagagagaggatgtgttggaccatgtatcctgccttggagcatggagcttctgggatgtgtggctgctttctcattgagttcactctgctgctctctctgtagataacaaacttcctgaggaagtggtccagtccagcatcctcctgcactctaacctggccagccttgtcaaagaccaggtggttctgaaaatgaactctggaagctcacaagtggtcaacgggcttgtgcccgaacatatcgccctcctcatgtgctctgcctacaggaaccagctgctcaacatttttgcccgtccttccttagtcgccctggctttgcacatgacacctgggctcaggaaaggtaacttctaggaatgtggccttcaatgtccgaagagacccagctctctagtcccagaaaggagtagtgtagccacatctattctctacaaaaggaggctgccctgaccacgtagaggtctagagttggaagaaggtatagtatcatgtggcttagcgccccatctagtcaggaggttgaggcagtaggagcttcaaggagtttagggacagcctggggtagatagcgactacggtctcaaaagaacaacaaaagcgatggctcagtgcttaagagcgtgtctgctcttccagggatgctgatgtaggcccccagcaccagtgttaggaagctcacagctgcctgcaactctagccccaggggatccaacaccctctcctgccctccattggttcctgcacatgtggggcagacatacacatatacatgaaataaaatgaaaataaatctttaggaaagaaagaaact

SEQ ID NO: 34466 - DNA, 1614 bp, Mus musculus
ggaacaacatcttacttaaactgtgtcccagattgatctagcctggcactcgccactcagcggggttgggagtgggtgagcttcaaactcacggcctttttgtctcagtcacacccagctgtagtgacatttaccctccctctgggtgagaacttatggtggattcttaatcacaatgtcctagtgcatgatgcgggtaagagctgcctggatgctataggctcagaaagagggacatctagacgaggtggccactgactttgtccaggccaatagagcccactggaaccagctaagtgatcagtgggtgggccacagcccgctacagaactatggcaatgctcaagaccatgttatctcatgagctgtctttgtcttaggatgtaagaagccaataggaaaaccagccactgcaaaactataacaataatggagcagttgtagaaaacacagttccatagtgacagtcacaaaggacttactctgccacaaatgggcactgagaggaagatgtgacgtctgtctccttgagacctctgagccatgcttctgccaggaggaggagagcatgggagtgtcggtgtgaccctcccaccgtgatggctgctggccggcattcgtggcactgtgttgtcaaataaaggagtcttgaaaacatttcttgggcagcagagctcaggcccctccccgtttactgccactcagattcccacacctaccccactctcaggctgacctccgaggtttagtacagcagcagcactgaccacttatctgtgcactgaagaagggacactggtgcgtgttcccacccacagctccatgaggggcccaatcaaaccacagggcactaagaacactgtgtgttgggtgtgtataaaaccaaggacgttcatgtctagattagctcaagtctccaggacattttgttctgcataagtacaccttccgaacctgaaaagcagtccagctcactgttctctgtcagtgttttcaataaactgttcttactaaacaaacaaaagctttaaatctgacacacttccatcataactattttgtataagggactcaacctatatctttttacttcaattacgttgtctcaaccaagagcaaatttgacagaagtgtgtaataaattatttagtttactttaaactttatacccaatggtcttattaacaaattgaactaaacagagtgtgtgcaacaaagagatgcctgtgcgatgtgccgtgagtatacctggagggaagagaagttactggtgacctgtgactccagcggcagtggacgtatgccgtaggctggggctaggtgacagaggaaaggacggtggatgtgtcaagagaattgtctcagataggttctttgggtcaccagagaaaaaaagccataaatgaatgccctcaacacagccttttattttttgtgtcctgaaagctgaagtccagaatgaaggctctcacaggttcgccttaggtttggatgggcgctgagtccatgcgcactcaggaccacagaaagtggacagaaagtggacaggcactggtcctttctgatcttttcagtacatcctgcacccccccaaaacaaaataatgactgatct

SEQ ID NO: 34467 - DNA, 1460 bp, Mus musculus
tttctcatactaggcaagcaccctacccactgctacacctgctgccctgatggtttttgaaacttagtaactgagtagagatgcacatacctcaagcacagggaagggaccttctgtgactcttcaaatgctgtgctgcattttaaaaaacaagagcctggcatgctggtgcacacttttaatcagagcactgggaggcaggagcaagcggatctctgagttcaaggccagcctgatcaacaaggtgaatttcaggacagccagggatctgtagagaccctgccttaaaaacaacttttaagagaattccagattgtaatacttacttcaggttgttgagtagggataggtgggtaggtggagcccctaagcttttatttttttttctttttctttttttggttttttttttgtttttttgttttgttttttgttttttcaagggtttctctgtatagccttggctgtactgaaactcactctgtagaccaggctatccttgaactcagaaatcctcctgcctctgcctctgcctcccaagtgctgggatcaaaggcatgcgccaccatgcccggcttgcccctgatttctaaagtgagctctgctctgatcacttaatgtcctgttagaatgtgggtgctgaaacccattttcccactagcttgtagctgtgggttttgtcaacgatgccatgtttttatgtccattgggtctaaaggctatttcttgtctcttgaataaaagaggtagtagtaagccataaaatgatgtaaaaccctaaatggcttctgcagtgattcagggttgttaagactcctcagcttcattaactcatcaggccagcagtttctctgtctttttctagctctccatgcatagaaagatcgcagaggtcaccactgcagccttccactttcccatgttagggtttgttgatttaaatcaacaatgaagaccaagcgggtcttgaactcacagaggtcatcctgcctctgcctcctgagtgctgggattaaattatgctccactatgccttgctaagttagagttttctacataaccataactggatgtcccagccaaacaaatgtactcatttctcttaagctcactggacttggatttgatgaaattgtgtggctgcgatgccgatttggtgccacttggaatttaatagataaaccgtgcataaggcctcgaggtgtaagaaggctaacatgtttccccacataataaatggctgtatctttatggaaatggaagtagagaactttattctgctaagaacgggctaatgtgttcctctgtgtagctgagggaatgcagtctgggaaatctgcaggaagcttgaaggattgtctagcagtggtagttccacacatgctgacgtgctgtgacattaaccaccttttgtttgctttaaaactaactgcatagaccaggaatcacagactgggtta

SEQ ID NO: 34468 - DNA, 1869 bp, Mus musculus
tccttccctccctccgtccctccctccctcccttccttccttccttccttccttttttcccctctgtcccatctttatttaccaagcagcggttgcagaattgagagtaaagtggataccgaatgtacagtgcagttgttttggaatgttaaagtggttacttggttctgcaggccagatttgatgggaacgtaagtgaatggtttaaacttggtgctaaaatgtaactgatgtataacatctcaccaagctgcctgattccttggagagcagaaaatgcctaggcagcactgtgaactctacaccaaagtgcgagcaaagatgaccatctgagctctggaaggttgtgtctgtctgcatccgggcaggggacgcagacatgtggctcagtttatcttgtctcctgtctgttcctccaccttgctgactttgctacacggtgcataaatcttgtgcattttggggtgaacctggtttgtccggtgttcccctgtataatttcctccattacgtcccccaggggagctgggggagtcctgctgtagttgacccttcacagggcctgccttctccatccccagaggtcacagtttgttaccagagagtgtgaaggtagtttctttgttaccgtgtaggcttattttcattcctttgtagaatttaaagatagctagaagtttcctccctcaccccagtattattgaaccattggaagtgtcccagtgcagggctaagcaatgctgacaacagccactcaggagtggacgtcacagggtgtctgtggtcagctctatccaactctcctcccagcagtggccactgtggcctttcagcatccctgacagggtctttaggtgcaggattgggtgacaagttttgctatttcttaaagcatgaagttaatagtatttaatgtttataggtaaatagctattaaaggtttttttggatatatgccatattttcactaatttaacaggttatagacaattaaatatttttgtgccaaactacctaagttctagggctatgaaacaaattaggtggtagttcacacctttcaggagctacatcctcagtgagggaaacctgcagattaatattggtgctttgtgatggtgctgggtcagggttttactctggcactggttttgagttgagttagcttgttaaggaaggggaagggcctcaggctgggagagaactgggtacatcctgtagaaacacaagatggtgagctggatggaatgtgagatttgagcagagggcaggagggagggagagtgtagacaggttgagggtgggactgcacctgctgtgtctgtctactaaccacctgtgcagagtagccaggtgcagtctcggcaacaccagcttctcagcatggtgagaatgctagaaagtgggaatgtaatgagcctgtagttgttacgaagatttgcccctaagagtagttacccttttatctgtcattttatcagtgaaatgtggattttgtttgtattttcccactggaaggaaatttctaacctcacagtggagctgaagttggttcagctccacactttagggccacagctgtactcctgttttacagaatttgtgcttacatcccagttccatgctagtaaaaagcagtgtgagaaacctttccttggctttgcccaactgagtccacatcctaactgggacctctgaagaaaagggaaaaacattaaaaccccattctgtcttgttccaaagctctaagattgtatttttttttcaaagctttacagaatttaaaaataaacagtgttttgatgtaaagtggttgatgtgtctttccggtttgatttttgtggtgctgatgggccctgactcctcata

SEQ ID NO: 34469 - DNA, 8232 bp, Mus musculus
gaagggttgacaaaagaagaatgcagataccaaggaggaagaagctagcacttgtcacatggctaagtcccatcatagaggacttgatgtctactggtagcttccttcgatccctccacgtgagcacagcagtggtgtgcgctgaagcctgacagcacagttttcctccccactgcagggcttctggcattagttgaccacacacagatacccagagctctactcagcgcctctgtgggtgcagtcccttggtataccgtgctgactagtctgagctgagccttgataagccgagtagagcacgtgttccttttcagagggcttattctccatccagtctgagtttctttccttcactgacatgacatgggaggggatttgtagttggccgttcagagtggggcagcaccaggtagttcattccccaggttttggttccaaggccagctcagaagacaactccgccaagcaggtcagaagcctgccttcttagtttgcagtgtgcaacagtcaggacagtgaagcctagaaactctcctaacttctgttacttaaagcatgggctaatggcttgggacaactcgggctctccactattgggacccctgaccttccatgttggctcattccattgctgcaaagcttccactgagctaggttctcccgacctggggttgctcactgacctacgccgtgttttttataatggcttagaatggttttacctctccttaccacagaatggatcttacaacagtcactcttgggtatgaatcagagttccccgtgctcactcatggactgttatcttgtttttcaggccatggttgcttgttacccaggcaacggaacaggctatgtccgtcacgttgataacccaaatggagatggaagatgcgtgacatgtatatattatctaaataaagactgggacgccaaggtatgcaactcaattcagcagagatgttttttttcgacgatgtggtttttttccctcatggatatctgtagacctctctcgagtctgcttcagtctggacactcagagtggacttttgtgatatgatacctataatgctgtgcttgaaaacaagcactaatacgaacacatagcagcatgccttgtgcagtacgcacctatgggtggtgctgtggtgtcagtgggcccagtggaacacaccaggaatcccggtgcctgggaggtggaggcagaagattcagaagttcaaggccgcccagttcagggaaggtttccagctcgagttgagtgtcaaccagccagctctccttgagcagcggggtgaggagaaggaggatgtgtttgtcatcccaatctgtctctaagagtttgcaaggtgccttgggattcagtaacctacaaaagcaaagaagcaggccatattcctactggctgacattagtctactgtctaacgagttctaggtcaggcaacgcactcaactgcccttcaactttgagtccacccgctcaggagcagcagtgtgttgggcttgctggtgcatacctatgatctcagcatttgggaggctcagaggttaacgttggtcatccttggctacatgaggaatccaaggccagccttggttatttgagaccttgtttcaaagtgactaaatatctctagattggtgattttggtctagtgcttttcctcatagtcggaaacacaagggccagatctatatgcatgtcccccactcctcatttagggtccctgtgatattcagtggactccgtgtactgcctgtgatgtgtatccagtccccgcagagagcggaggttgaggtacacgggtgggatgaatggagttgagctcacatcagctacgattagaatttagacccaggctacacagggatagctgagtacagaatgggttaggatgggagatgactcagcaggctagggtaactgccaccaagcctgaggatctaagttcaatccctgggacttaccaactcccaaacgttgtcccccccctcctccccagcttccttatgtaatgagtgtagattaaaaaaacagagaccgccagctcacctgcttgctaagcatctgttgaaagtttaaagcaccgtggttgttttcctgatagtacattactaggtaagctactgggcaaatgtggcttcatgccttccttagcatgactagaaatactcactggttttcaaaccttacaaatagggttggaaattgtgcatatttgtctatggcaagggcttacaacaaaaaggcattttcccatgcatctgtctgccctatccgtggagtctcggctcaccgtcacaccttgctagttacaacataactgtatctacaaatagtcctgttaatcattttgagtcctttaactctgcctgctgcctgtttaacctggtgccattcttggtggcgcatactgacatactctgctcttttcccaggtaagtggaggtattcttcgaatttttccagaaggcaaagcccagtttgctgacattgaacccaaatttgatagactgctgtttttctggtctgaccggcgtaaccctcatgaagtacagccagcatacgccacaaggtagtgttccactcacgggaacttggttgacagtgtgacagggcagggagagttcgaagggtgaccctgaagtttctgtggagcagccgcctgctgtccaggccctctttcggcgttaggaccttcttgagtgatcatgagtatctgaacatgctcctgggaatgtcagtctgcaataagccatcctttgcctgagatgacctccccaactctgctactcccaaccccaccccacccctatccccaacatggttgcacctgttatcactgcccactccaggattctgtgggtgttttcagagcgctcttagaaaactagtaaagggggctggagagatggctcagaggttaagagcactgactgctcttccagaggtcccgagttcaattcccagcaaccacatggtggttcacaaccatctgtagtgaggtctggtgccctcttctggcttgcaagcataaatggaggcagaacactgtatatataataaataaataaatcttaaaaagaaaagggcagtttttcagaagtaattcagagagcagaagtgaggagagaaggaattgtcagacggggtggtggccatatgtgtgtggtgcatgctgggaagacagaccagaatcactctccacatctgtggccatgtgtggtgtgtgcccgacatcgcagcgccagaactgttgcaagtttatcgccagcccaggctacatattaaactccaggctatgtgatagcagcacaaagcaatcggtctgtttttttcttcatgtctctttcattggactttaaggtttagattctaaactgactatgttaatccatacactctcttgagggtggtggtggtttcccatgtggcatcagttaatgagaagattcagaagaccctgaaagcacagtgtgaagcgcaggcttgcagggagtgtgcctgcttttatcagggaaagtggcaggaaaggttcccccacccccctctggcttagaagcagccaactgctggtgagatggaccctccccagtgttggggtacagtggccaaggttggtggccatggatgaggtcctggagcctgcatggcatctgtcctcttcctgcttctgacccgtgcggctttcatcactgaatcacagtgggtggcagctgcctggtggagcctggagtcatagggaccctgacaggaaacctgggaaccaggcacggcacatgcagtgaggccagaggtgcagtcaggagaggggccaccgggccagattccaggtgggtgagagaggaggctgtcgagtctggggctgtgaggaaggcagcttggggaagtagcagagtctgctcgtgaggactcagggctcagggaaacgcttatcagatatcagacttcggatcggcagttgacagacagcctgggacgtgggcaagagctgttcagaactagctgtatagccgtgttccctgaaaaagaccatggtaggaatgggagcagcccgggcagagcgagtcagctgctggctagtgttaggacacaagcactgtggtgcctgccgccggctctgctctgtatttgagtcttcaagcaaggtgctgtgattgtgtagccaattactcgggctgttgcttttcccatgaactttggcctggatcctcagattctgtctgacctaatgatggctctctcctgagggaccagtggcctgaggcatatgctcacaaacacagcgtctgttcctttgcgccactgtttacaagtgctggctgccacatgctgttagctctggagtcagacacagtgagacacacttctgttgtgccatgaagtcacctgcttttagctctgaacagacctgtcacaccacatttatttgtgttcagttagatgagggcttttggggaaggaaccctagaagtctatgagtgttgcataacttcctcagagacgcagtcaaagatggtggactgctggactatgttcctttgtcccaatcactgtccctcctgggtacttgcccttcctctatctgtccctgaccatgcaggctgggtggacatggagagaggctatgagcctcccttggctgctgtagctcatctgcgggatggacaggacccgcttgccagttaacacctctgtcttagaggctgcttcacgcattacaattgtcaggaacactttcttcccagggaccattctgatcctgtcttaaatttccttctaggtacgcaataactgtttggtattttgatgcagatgagcgagcgagagctaaagtaaaatatctaacaggtaaacgcagctgggcgtggctggcaaggtcggggatggtatcttccaaaagccacagtacagtccaggaatgtttctgccagattcctgaagtccctattttaaacaggatttctctagttggccttcattctgacttgttgaaattgtccagtgcttaccggtttgatgcatgtctgagttagatagctcaaacacaggcagagcttttctgcgatgccaccctgagcctgaagctccttggtgctcttcaggttccctggtcccctccccttgtctttcagatagacggatatctcttcctttcacaacattcactctaaagaatgtgtggcgggctggagagatggctccgttgttaagagcattgactgctcttcgagaggtcctgcgttcaattcccaccaactctatggtagctcaccgccatctgtaatgggatgtggtgccttcttctgtcatgcaggcattcatgcaaattgagcactcatattcataaataaattttaaaatcttaaaaaagagagagagagagagaatgtgtggccataaggaaagtctgtacagaaggggcagaccagctccgcagacaggtgtgcggattcccaggtgccagctctgtgtgtaggccatggacgtgtgcacctgtgtgtcctgggacctgaagcatacccagtagtcccaggacccactcagtgggttctaaggagctggactcagagctgtgccttatgtactttcactggctcagtacttttcagtactcgggtggctttaaattaaagatgtcactgtttctgacgaggtgtctgtgcttgtcacagaggcaacgggaacagccactagggtagaccgatgagaagagccgctggagaagtgaggtgtttccggcgccatcacgggctctctggtgctttatgattggctgcagtctcagagcctgttgcttcatgagtgaatgcctctttttcttgcaggtgagaaaggtgtgagggttgaactcaagcccaattcagtcagcaaagacgtctagtggggccttgggtccggcagtacccacgtcacctacagcctctcagttgccttctgtggactcgtggacaggatggacagagagacacctgcctggtatttcagctgggagccaggcgacttcgccgggtgtcatccaacagagggctccatctgctgggactgtactgtggggtcagctccagatctgtgactgctcttggctgctgacccaagaggagacgctgtcggaggagagtagcttttccatctggacacgaaacaagggccctttgtaggaatttcttcagtcttctattttgccagacctgtcacctaactgagttcatttcatctcttttttatatcaagttttgaattcggggaatttttgtattaggtacaatttatcaaaactgaattaagaaaaaaaaatttacagtattattctcaaaataacatcaatctatttttgtaaacctcttcatgctattaaattttgccctcaaggcctcctgcgatgattgttgccagtgagtgacgacgtgttgcttctgcctgaacgtaaaggacgggcgggcgctgtgtcccagcccgagtgcacgaggtttttcttggcccgtctctcagtgattccaacctgtaaaggtcactgctctcgcgcttcgaccgacctaacagtagatggttgccactggcactcaactaactcaacatagttacaagaggaaacaagccacaggagagggtttgtctcttcagttaatttttttaaagcgaagtgacgggcactaaatgaactcggggctctccctcagcttcgggttcctgagacaaagggctttcttctgcggcaggtctagcctgcctacagccgtgtcccactgccgcaggtttccttgtggcttctccgtagttttgactgtgcttccagacccttccaggtcagggctgtgttcttgtggcagggcacctggtggacccaggcacgtgaatgtggtatgtggttgtagcctcaatcgtggccatcggctccttggacagccacgagccattttcatacccaataatgaaagctgtgtgctagcttagaaatcaaagggggtgtaaaagcacacattctttgttttatgggtttttctctttttagaggacagagggacaaccacacgaggctgccagactcctgtcacctctacagtccccttagaaagccagagtttgcacagattgtgggtataactcctgtccccttaggtgttctatctccgaccttgatctttgccaaaatgtgtgtatgcagaactatttctgtgtattttccttgacacccgtcttagcacctgtgtagtttgtatccggttagaaaccttttctatggaaagctcagtaattcttattaagagattgctattgttcatgtaaaacatgaaaacaaccaagtagagccgtgtgtggatgagggcccactcagcactgtgcttgcttgaggggctctcggcaggaagtctccttctgacccatatccgctgaccacacctctccagcaagtgcctctgccgctggccagctcaaggtttgcccacctggccccgaagcaccgtgtttcggagttgggaggaactgtttggcattgttggcagaaggtgtgattgcctggagcagcagccttttaaattctggagaccctgtagtcctttgtatctcagacctttactgatgtaccaggtcccagattctgtggcaggggatggggtggggtgtgcttgccagacgaaatttaaattatctatcttttgggaagtgtgtgctttcctggaggtcactgtgaaaacaaacaaacaaatcaggaccgttaaccccttaatgcccacttaaactcaatttcatgttaggactcttgtttaaaaccatttgtggcctgtatgtgttcatcctggttagagagaaagctttatgacgctgtttctgttcaacacattaaccagctgtggaacagccctttttgcacgacaggcagggcacttcaggattcgcagagagactcgtgtggtttggaagtggtatttcctatgaaagcctctcacgttgcttgtaaagctaatctaattaaaaagatgtataaatgttcttgaaaaaaatcataactgttgtcacctccagctgtcgtctgtttgcccggcccattatcacaggccttccccgagagcccattggttagttaataactgccgtccatcttgggtctagtccacaccatgcagcccactcccttctgtcagtagcagagtgagcagcccagcccgcagatgctccaggagcagaggcacggtggctggtggctgcacccgcgttctcagc

SEQ ID NO: 34470 - DNA, 1196 bp, Mus musculus
agaaaccctgtctcgaaaaaaaaaaaaaaaaaacgaggaaaaaaaaagagagagatcattaagaacacagacaaattagggcgaaaataattacaaaatgtgagagacttgcatgtgagatttgcataacatttttttataaccaagaagttagataaatggtctggagagatggttgagtggataagtggtctcccacaggaagctcattcagttagttcctggctcccttgtctggtgtctcagttacctgcaagtccagctgtgtgggatctaatgccctcttctggcctctgtgggcaacttcactcacgtgcacaaaccacacagacacattaaaaagacagcaagacaaacaaaccaaagatgtcagagaaacagtccaacagaaagatttgaaaagctgtttcacagaaggggataaacagccgtggtcgagggtgttaaaagatcctcagggggcaggggatgtggcttactcagccttgagcttgctcagcatgaatgaagctgggagttcaatccctagagcctcataaacaggtctggtgtcacacacctgtaatcctagaatgttggagctggaggcaggaggaccgggaatttggcgccacgtgggcttcataaagtcctgtctctcatctgactggttgttagggaagcagaaaccacagcgggaggctagtacacatgcatgcacgcaggcaggcaccgtgcaccaggatgaaggctcggggtaccagggatgtggatagagctgatgaccgtacagaaggttgtcacacatgtgttcattgcttagaggaatgcaaaatggtaccgccactctagaaaaacaggctggctgtgtctcagagagttaaatataaacccatgatgtgagccaggaattcgattgctgagcggctgcaaagagaagtgagaactggcccatgtggccatgggggtttcgttcatccttgcctacgacagcatggccgtttcattgatcctcacccgtgtggccatgggcgcttttcatttaccacagcacaaaatagaaggcagcccaagtgtctaccatctgcaagtagataagctgaggcagggggatgacatctcagtaaaaggacgccttgtccttgataaagcagcgtggtactccttgtgcagctaagagaggccacactgctggggcccctgctgagatctggtgc

SEQ ID NO: 34471 - DNA, 1198 bp, Mus musculus
ggctggggctatgatggctcagtgggtgagagcgcaaacgtgaagagcatccccagcatgctcgttacaaaactgtatggccacacgtgctcgtaatcctgatgctgagacaagacttacttgggcttgctggctggcagcctagctcttggttcactgagagacccccatgtcaaggcagtaaggtaccaggggtatagcagagtctcacacatcttcctctggcctttgcacatgcagattcagtcatatgcacactccagatggacacacacacacacacacttcaagtccactgtggtggcacacacctataatcctagcatgtgggaggtggagacaggagggcaggggttcaatgtcatcctcagctgcatagggagttcagggctagcctgggctataagagacctcacaagtctataagcacaaaacaattgtgattactgtgtggagctccgcaagcctttgctttctgtgttaggcacatgctgctagcacccagtgacttaaccttcactgtcctctggcctagatgtcaccttccttttaccacctgcccaaactgttaatctctaggagcccttttcacccccgagcctgtgggtgttctttccaattgtggtcaactcccctctctgtgtactatgttgttcctgacccctaattttccagataaaaatagcccaggccagcctggtcttaaactatttttaactccaagtactgggagaaaggtctgctttgaaggtgaaatgaagctctgtgccagtccctatgacaggagccaggcagggttctaatggcctgccccttgcagaggggtggcctgtgtgcttgcctcctcgggcccctattcccctagtgcctgagactctgcagggcatgcttgtgtccccaaagctcgcagcgcttaaggtatgatgttatgttgaaaatgacctcagacataggttacaaggtgaccccccaagagagaggtacaccatcagagttaacttcaacacgtgacatcactctgtggtgttgatatgtttttaaaactgtcacgcccagtcgctaagcagtagggcaagctgaagagtttatttaacggggctggagcattgggtgttctgaggacctgcgatcgattctcagcacagcacccaccttgtgcagctcacagccaatgcaactccagctctggggaacctga

SEQ ID NO: 34472 - DNA, 1175 bp, Mus musculus
tgattttttttttgcgtggtgattggacccaggaccttgcacatactggcaagtactatcttattttaactacaatttcatttctggccattggctccattgttcattgattttcttttttgagacaggatcttataatcctgtgtccaccttctaagtcctgtgattagagacataaaaccacatcagcttcctttaaaaacaaagcagaacaatgctatatctacttttaagctggatttcttgtttctcttgcatttaaaaaatcaattctggcaatttatgacagccagtgggggtgcttataagattatttatgtttaatgataggtcttggttctcttttttttttttaagatttatttacttatatgagtacactgtagctgaattcagacacaccagaagtggtcatcagatggttgtgagccaccatgtggttgctgggatttgaacttaggacctctggaagagcagtcagtgctcttaaccattcagccacttctccagccccttggttctctctcttttcttgctttgtctgtttttggtcctttgtcctttttgttgtgaagctgccgttcccatctgagtcttcttcccagcactttgtcgtctttggagccatggcctctgtagtcccggctgatctcaggactctttggcctaagcctgtcttgtggtagacctgtaggtgtgcatcaccatactggcttctgcctttctcgggactgagtgtgtgtttgtatgtaagtgtgtctgcaggtgcacacggagggtgggtctttcttctgataccttctgttctttgacttagtcttttgagatagggttttcactgagcctagagcttgctactttgcccaaactggcactgagtgaggtccagtcatctgtgtgctcctctgaccacagtgctggggttagagatgtgcagcactgtggctgggctttcttagggtgcaggcatctgaactcaggccctcacggttccatagtgagtactttacccattgaattacatccccgcattctgaaccgactaatctttttgtttgttataatttttagtgacagaaacagaaatatatctaaaatcgaagcttctgggaaacccatttgttttcctgcctggccaagcttgtgtttcaaagcttggtctctaaacatatcct

SEQ ID NO: 34473 - DNA, 2216 bp, Mus musculus
tcacagtgtttcctttgtgtctgtggctttcttgtttgtcttttcccagcctcccgcggaaggacaagagaagcagctggttacatggagactgaagctcacccctgttgactacctgctgggcgtggccgacctaactggagagttgatgcggatgtgtattaacagtgtggggaacggggacatcgacaccccctttgaagtgagccagtttttacgccaggtttacgatgggttctcgttcattggcaacactgggccctatgaggtctctaagaagctgtacaccttgaaacagagcctggccaaagtggagaacgcttgctatgcccttaaagtccggggttctgagattcctaagcacatgctggcagatgtgttttcagttaaaacagacatgattgatcaggaagagagcatttcttaagcagccccactctgctctctaaggagctcctgggcgaccagttggtgagactgttctgagtgtgcatctgagtttattgtggcttctgtagacgttccaagttgtactagtttgaagttgtaaacagctgtatataagtttgtccacagggaggttgtttcttacactcccgcgcatttgcatacagtgtttgtatatgtgctcgctctattgttgtgtgaacgtgcttccgattgcactttctgccacacctactttagttcactttgaacttggagtgacattttgggtggaaggaagtctcttaagtgggtgattctgtctatggagggaaaagtgtggagaagcttcctgcgtgcctacgttcctcagcaggatcatggcaggcctttaacgtggctcagtacgtgaaacagcagtttaaatatggaagttatcagtgttttctaagtgcaagttttggtggtggtataatgagaattcacttaaaattctggtcaagtttaggtcgttttgaattcgtaggaagcagttttcctgaagagttgatgggtatctggatgttcactttcccacgttgtcttttcctttctcaccgatgtgggaaggaaggagctgacactggtcatcactggtgacgctgagtaactgactccacactcgtgtgtaggttgtgagcagccaggccctttgtcgtgtgttaggtgtggtgcacttgtctaccccagccgtcctgggaccccagaggagcagccacagtgctcccagtgctgacaacccaagccttgaccctgcccttggtgtgagctagcgatgttgccaaagaaaaagaattgtgagtaattcagcaataagacgatggccaacactggagggagcgtcgggcgtgggttcatctccccagtcagtcagagtcatctgtggtgagagcctggcttgagcgtggcctgcggctgtcaacgccacatgctttcaacgagttctgtgacttttcacaacttagatactgggctttatttttggaaagaatatctatttgtaaggctggttctttgaaagtgtaattttccaaaaagtctcaccaaaagtaaaataaagtgtgtacatgcctggtaagttagacttgttgtcctggtggtgatgaggcttcgccttcctgtagtaagatggactcctgagctgtagtcagtcctggtacctgctctgtctgtctggtttttttcagctacttcaagtggaatttataatgttaaaataatggattgaagaatgttttacagaaatttaaagcaaactttaaataaaatattaaaatacagcagccctctggttaagcttttaagctccattgtgtattgtgggcgtggtgggcgtggtgggcagaggtcagacacagcttgtgcagacgggtctgttccttgcactgtgggtgacggggacactggtgggtgtcaggttgggataagggcctttttcatccggcgaggccacctcgtgactcccagagcctggtgttttgatggtatttagaaatatatagtgaatcagtaatgtgatttttgggtaaaatgggacatttaagattggctcgggtaatgtggaggtctatttttcctcccttaagccccgagacaagatgtcctagtggtatgactcaacctgaaatgtagtcagggacttcccttgtgtctctgtggtctgcatcctctctcagtgcctccccgggttgcctggtttcagatatggtagggatgctccagaagtggacgtccttgtgttctctcaggtt

SEQ ID NO: 34474 - DNA, 1105 bp, Mus musculus
ttacagggtcacataaaaatatcccagggatgtcagggcctgagtttagactggtttttttggttttgtatttggtttggtttttggtttgatttggtttggttttttgagacagggtttctctgtgtagccctgggtgtcctggaactcactctgtagaccaggctggcctcaaactcagaaatccacctgcctctgcctgttatgagaggaccaagcaaaggtatgtgttgcaaggggacacaatgtcaatcttgtttatgacaacagcacacatgtgtatcttatatatatgctctattatccttacccattcatatgttgaagggctgatttcataatccatgaggttcactgtgaggttctgcaagggtggcagagtagggggcgccagcttgaacatcttcattacctcattatcaccaggtctagctcctgaaactttacagcattgatcaatcaggttaatatgtcacaattgattctagtcctgcttggcgatgagactgcctcccaccccatgaacacttgtggattggcaccacactgagcccttcacagccagtcctgcaatcacagatctgtctgaggagagtgctccacagaggggagagtgctccacacagaggagagtactccacacagcggagagtgctccacacaggggagagtgctccacagaggggaaagtgctccacacaggggaaagtgctccacacagaggagagtgctccacacaggggagagtgctccacacagaggagagtgctccacacagaggagggtgttcacaggcctcagaatgaccaagtcctcttcctaaggctcagagttggttcaaaggggggtcatggggaatcctgaccccccccccatgggcagctgttcctaatcaatgtcctttctaaagtgcctttgatgtcctctttgcagtttgagctgtgaaactcattcaccagctaaaacccatgactgccctgtgaattctgcctgtaagcatcgagtcactgatctctgggtcccctcaccctagcaaaccgtactgtgtagcctgggctctggatggttttagaaaccctaaacctccatctactgtcctggccca

SEQ ID NO: 34475 - DNA, 1429 bp, Mus musculus
ggagggttctgccaacctagttgcctctgtccaggtggcatggagcggtaaagcttctgattgatagacttcctacacagcggctccgctcctccttaggaacggagggagccaggaggctagagtgactccagggtctgtgagcagcaaaacccaggggccctcatgcagctcaggggggcaggtggccagctgccctctaacaccatctgtctccgatccacacaggagaagcaggacaaggcggtgctgcaggctgaggtccagcacctgaggcaggacaacatgcggctgcaggaagagtcacagacagccacagcccagctgcgcaagttcaccgagtggttttttagcaccattgacaagaaggcctgatcagctcgctgctcctcaccttgggaccacgggctggtcggcctgcctgcctgccaccctgcctacccgtggtcccttccaagtcagcaaagcagtttttacatgtgctttccatcacctgtaggtagatgtctcactgtctgtctgtgtctctactcaccccagcaggcaggtcaggggcctggactcccgcatagctgcagcagaagatgaatgtaactgctggtggatgctgacagcctgtagccgagtggtttccctgacgatgctcgggtctccttcctgtggggagagaacctaggcaggtgacctgcagagatgctaagccagtggactatggcagggctgtagggctgtaaaataactatggagacgagaatcagacatgtactttaatgttaaaggtgctctatttttcggatgtacagtagttttatttccacagccgcattatcatagcaataagaagggcacgcagtaggcggtctgcagagctctgtcagagacggaccctgaagtttaacactagcacgaacgctgttgctgtagagacgtatttatttgcaggaacaaacggtgcctgaatattaacagtgttctgaattttttttaaaagagatgcatatgccttgtgaacggctggacctgtcagtagtcactcctgcgcgcgtagtttgctttcttgtagttgctctgctgcagtcagtcagtctaccctccccgatagagcccccgatgctgagtgccagcaggatcctgtgtccgacaccagatctgtttatctttgtacagaacctctgataaagtgtcttgtatttaacactcttatttaagcttatttaaccctaacttgttaattttatatgatttttgtttcacctgcgctagctgtaaggcgggaggcaggcaggcagtgactgagctcacctggacctgactgaagcaggtgggcgagctgaggaccggatgctgctggctaacacgttgtttgtattgcttctccatttttaactgttatatttgagatgaacatacattttgcttttttaataaa

SEQ ID NO: 34476 - DNA, 1099 bp, Mus musculus
tggccacatttagggtgggttttcaacatatctcagacaggcacacctgtcacctcagaaatcacagatctagtcaagttgacaaaaccaaacatcacacccagcacccatgtgtcttctgcactgtccttggctgtaaaccaccatggctgaggtggtgccactgaggacaactaggacttctgctgggtgtgggctgctaagctgtggtgagacagccacccttccagggaagaggacaggagcctggagctagctcctgttgaccaggacagtgggaacagaggacggggctgtgtgccaaggagacattccagctgcttgcttttcactagtgctgttcaatgcagctcagtgcgagataacattatattcagaagtcacatgagttctagttcctggatgattcccaccctcctcggaactggataaaagttggcattctgtaaaagccaccttggggtcttgtagccctgcagcatcttttcaaagttcaggccacttgtaagagacctggtgtcaagagtcaaggtacctcagggactcgtggaatctgtatagcaaagagtttcgtgttactgctaagtggaaagtgttcagtgttcttggacacttgccttcagtgcacgcccttcattaggcaaagaaagggagttgggggggggggatttctacagcagctgtctattaatacgacaggctaagggactagaagcctatgaggagctggcctgaagcacctctttggcctagggttttgtacttatgagactggaggcatgagcagctgagttgaaatttgagtcactgagtggcctacagcttgcctgctctttgctgtagcatttcccccagttgtatttctcagcttgctcctgccacacccgagcgtggggagcctctggacacagaggcttcccgtccagcaagctatgtggtagagaggtcacctgccttcccagcccagtggccagggaccacacgtcactgctgtatctgctatgatgccacctttggctgtcttcacagtggctcgcagcactcaggaagcccttcagctcactgctccaaaagcaccggctctctggacagttccaaa

SEQ ID NO: 34477 - DNA, 1253 bp, Mus musculus
cttttcatcttggccagtgaactgtaggtggatacttatgggagggacaagagagccacttagcctgtcagagctgagaaagtatgcagtgttagcaacatttttttatggttaaagataaaagagaaatgaaaatacatctgatcacatttctgctccacacatttacatctgctacagtcgttcctgtgtggtgcctgaagcgaatcctgcatcctgctaacgtttctctaagagtgctggtgttgggtttctgtgagagttccagtcagccttgcacaacaggatagtcaggcacacctgagctctgtgacagtgtaaagaggcttggtatcagcagaggcaagggtgaaagatgagaaatcgcctgtagaccggtactgacctgaatcatgtcaatcacaactgactgttttctgtcttctaattcaggcaaaggaatgctaacgacagaagtattaaagagtgctgccgaagccgggacagtgtcaccacagcccctggagcacactcgtcgtggcctcagagaaaccgtgctttgaggatgctgtttgcgtttggtgaaaaaggcaaccacctttctgtctctgtctgttacagtgctgtgtgacgaccatggagggaggctcacaccactactgctgataactgcttcctgttcctgtggacatgagtgatccaaggccgtcacaggcagagaagcacaagcttggcagagctgctgccaaactcaaggacccttccagaaccatgcaggctgatgattattttgctcggaaatttaaagccatcaatggcagcatgggacctgctactttaaacacttccagttcgagtgagggcggaggaggtgggggtgggccagccaatggtaccccagcagtgcccaagatgggtgtgagggccagagtttctgagtggcctcctaaaaaggactgctccaaggacctggcttgcaagacgctgtgggagagtcgttctcagtccagctatgagagtgttacctctatcatccagaatggccaaaatgaccagggtgacaggcagccagaggagcagctggacctggactttgtagaagcaaagtacaccattggagacatctttgtccattctccccagagagggctgcaccccatacgacagaggagcaacagtgacatcaccatcagtgatatcgatacggaggatgtcctggaccaacacgcagtcaaccccaacacgggagcggccctgcacagggagtatgggag

SEQ ID NO: 34478 - DNA, 1236 bp, Mus musculus
tcttttggcctcagctttctgagtagctgggaagacagagctgcgccaccaggcctgacattaggaagtttctatagaatatatagaatatagactatatagactatagaacacagcctatgctaccttgtcattgtaactttactgtttcaggacaaattctctagagcagtggttctcctcaaccttccctgccacccttcaatacaggtcctcatgttgtgataatccccaactgtaaaattatgtttgttgctacttcataactgtaattctgctactgttatgaatcgcaaatgtctgatatgtgactccaaaggggtcacgaccccataggttgatctagagagccattcacctctgcatccaagttgtcaaagtggggcccagtgagcagggtgtctatggctggccctgctgctgtcttggtgagcgtccctgagtccaggactgttctgtgatagtcaccttgctgctctgtttccttgttactagttcctttgttttggaatttggttctgttgacaactcagcccttcctctcaggactgttgccccgggctggggtgggtaatgacactggccaccgagtctgactcctgagtttgaaccctggacccatgtggtggaaggaaagagccgactcctgaaagtcattctctgtccttcacacatgggacatgtatgtgcgcctcccctcctctaaataaacgtgaaggaaagaatgtgccgcctgtaccttagctgaccctttataccgcttcctgtacccctggtgggattgatcaattgcctaggcacccagtgggtcatctttagccataggggctcccttttgggggctccaaggaatcatgttcttatagccaagcactaggacatgtgaagtgcttggttttagtaactggctgagtctctttccccttctcacaggctattatgaaagatggcacctaacttgctttacgagttctgctgactgagattttctaagtcagaagtgagtctgtgttttactgtgtccctcgttagacctgctttgtatgtagttagtgattaggaaatatatgcttaatgactgactggctcttatacattaggggaccctgtggctttctaaagacccaacagaaaggacatggaaaaggggatagagctagaccgctgctcctgccctaagatttgcatcatcttatgtcccttgcagttaggggaagagccggtgcttccctggtg

SEQ ID NO: 34479 - DNA, 1151 bp, Mus musculus
aattgctgtcaggatcactgtggaggatgttatcttaaagatgtggtgcgaatgaaactgtgtgcagagggtagagtggagcaggcaggtggcttccttgtggtctgctaggagctgcgtggggacagctcacgcaccatttcttccggcagcagtgaaacagttgtctatagtttcaggtgcacacatgagctccagacagacagcaagcacatggatcattcactttatcctcaggatacctgtgtgaagcatcatagaagtccacagggaacgccttggatgactgacgaggcagaagtgtatgctaattgagaaactgctgcctctgacaggtgtaaagtttccattcagcttcagtggacatcgtgccttcttcctgtagccactagggatgttgacaaaggacgattgtgagtctcgggaatggaggtgggcagattccattggctccagagagtgcctcatgaccctcatcccttcactcattatgagagttgaggaccaattcaccttctattctagaactgggatttggggccaagtgggagctctcttgatgacttgtggcttttctgtgactaggaacatgttgcaaacacgacatcaagaaaactgtgtctgggttggagatatggcatcatcattaagggcactggctgctctcccagaggactcagtttggtttccagcacccacattgggtggctcacaaccatctgtaactttcacctccaatggggtctgacacacactttgggcatctatgcacactgcacacatgtgcacatacccacacactcatacacataaataaaatcgcacctccttgtcagtgttttgagttacctctgcagtctgccttcccagcacaatggcgcctagcagttcccaggaggagaaagattaaatccggagttgtctgagcagcctccatgcctgggggaaagcctgcagcagggattgtgtatcctgttatgaaagtgcacatctaggagatctctacagtatactaattttgaaacctcggggtagcgatggcttcagggtggttatgttaaacccagaggggacctcggggaagtggcaggtagagaatgtaagacttttactcagtagatcagcagtaattcatgctcttgtgcttccag

SEQ ID NO: 34480 - DNA, 1289 bp, Mus musculus
acattttaaaaaaaaaatggaactttggattcttggggtgggttttaatccctgggcaaatgaggtatgcacctgtaactcataggagatgtgatcacctggtgccatacactggggacgaatacttgaaacagtgtactgcagtaggcggaggcagattttatatgtaactggggactctgggtttgcattccaatcattttgccgacagctaagcagcaacatttatatttataaacgaaacaaaacaaaaatctatagagatgtattttataagtaggtttaagtgtcctggcttgcatgtgcctatccaaaatgattatttttgtagagtctaaattaactctatttataatgaataggccaccatccactgtgtacataaaacatataaatatgtttatattctgtacatatgtgtaggctaacagatatccctgtacttcttaagccaagataagagatattttttttttcttcttgatttctctttatactaaagaacccagaattgctaccacaagctgggaggcctaacaaactcaagagaaaatcggtacgatattctgttcctgtatacatttctaccctcttgcaacggtgtaggaccagacaacaagtgaggaagagagttggtgagaaggtgaatctatttggactggaaggcataccaccacttctacccacttcacaggtctggagggcataccaccatttctacccacctcacactaaagcacaatggcagtccccctctcccctgaacagattatgtcaggttaatctgagaattctacatttagaatctgaaatcaataaaatcatggcagatggcaattttgtggtttattacaactgatgtttttctctatgtacattgtccgtgtatgccccacttgagagatactatacaataacagtgcatctgggatgtcaggatagatactacacagtaacaaatcactggtgtttctggcatgtcaggacatttaatgagaccaggtaaagaccatctaatacccagcagaggggacacctgtggctctgtcacccacgctacattctgagtgtggggctcaggaaagtccctttgtatccccaggatctaggtaccttgtgggtggaagaattatttaacacaatggctgtcacattatatgcctgacccttcatagaagagagtcacagggatggtttttgagggtgtggagtttattaccaagagttatttatgacacagacagacagacaacagcaaaatgggggttctgaagaaaatttaggcccca

SEQ ID NO: 34481 - DNA, 1264 bp, Mus musculus
cttggcggcttccgctgaggattcggcagcggtcttaggggccgaggggctcatggaagtaaagctgaagacaaggagtggttccctgtcaccaagctgggacgcctggttaaggacatgaagatcaagtccttggaggagatctacctgttctccctgcccattaaggagtctgagatcattgacttcttcctgggtgcgtccctaaaagatgaggttctgaaaatcatgccagtgcagaagcagaccagctggccagcggaccaggttcaaggcttttgtcgctattggggactacaatggtcacgttggtcttggtgttaagtgctccaaggaggttgccactgccatccgaggggccatcatcttggccaagctttccatcgtccctgtgcggagaggctactgggggaacaagactggcaagccccacactgttccatgcaaggtgacaggccgctgtggctctgtgctggtgcgtctcatccctgcccccagaggcactggcattgtctctgctcctgtgcccaagaaactcctgatgatggccggtatagatggctgctacacttcagccagaggctgcactgccaccctgggcaactttgctaaggccacctttgatgcgatctccaagacttacaactacctgacccccgacctctggaaagagactgtcttcaccaagtctccttatcaggaattcactgatcattttgtgaaaacccacaccagagtctctgttcagagaacccaggctccagctgtggctactacataaggattttgtacaagaaaaataaaagaattaagtcttctaaaaaaagaaaaaagaaaagaaagaaacagtgtgagaaaggtttgtagtgggtgtttaacttctatttaaaaaaaaaaaagttcaaatcatttggaagcattcacccagcagaaattagttggtattttaatagaacattgttttctaacaaccgctggggtccttagcacaggttctggggatcagaacaactcttagagttgaatgtggggtgactcctctacagacctggctgaagcctgattccaaggctccatctgcccctaaagcttgattccttctgccctggggtagccttgattcctctacacttagatttcctgctccatgggcattccgacactgtgaaatactacagtgaattgagaaaggaacccattaggtctcactgagggaaaataaagagtgtagactaaagaggtgggattttacactgaagttcaa

SEQ ID NO: 34482 - DNA, 2007 bp, Mus musculus
tcttgtaatgcccttacttactggaacccaggttgacttaatttatccttctccaatagtaacattcagagctcctaaagaacataacagtaaaaggttcttcctgtaatacagggaaactaacatgtcttgttcaattttcttctgcagaaacgagcgggaaggaatcccagccaacctgatccagcagctggatgtgtgtgtggagattcctcagcagggcatcatccgctcactaaatgtgcatgtgagcggggctctgctgatttgggagtacaccagacagcagctgctcgggtgtgcggagccaccatcctgaaggctgggcctcacctgcgatctctcatggtgctatggtgacttataaccttctggactaacgaaatattctgagatgtcctgggattttcttcgtgtctctaaccttgcacctcaatgccaaaaccttttcatgtgccttaaagtatatatcattatatatattgtcccctttttagctaacctttttaaatattttaagcatttatgggatttttaaaaaggaatttttaagttatggtcttcctagaaaccggtattgtcagactggcagaactaaagttgttatttatgggcacctgtgcccttctgttttgagaggctgcctcctctccctgctgctatgcacctgtgtattcctgctgagagagggagcacatgtgacaagacgtgagtcagcgccaatgatgttctttatcctcaggtcctgagcttcatttccaaagccaaggattgagccctggttgtttgagctagggttcaatgagattttctttacatggttgtgtcctcacatcatcacccctgtgccgctgagccactcccgtgaatccctactgaaagcaagaacaaaatccatcaatgctttctgttcagataagtgcattattcaatggtaatcattatcattgtccagcaaggaacttgctaaccctggaatcctttgagtaatacttaaatatctcccgaagttttgatctgcaacagtgtttcaaacatagaccaccacatctccacacccccacttcctccagatgccactcctgtggtctgacataacctacattatcagtctggcttctttcaggtagccgagtgcattcccagctcatccaggtctttgcttgtgttgttggtattccatccatcaatgggatagagtactcctcctgccataggcatctggttttaaatgacttgagtgatgctgcaggctttgctttcagttcatttgctgaggtagctaggagtggggcttgtgggtttaaaggtcagcatgtttgactgaaaacctctgtagagggctttcctagtttacagtatcaccaagagtgtcttgttctgcatccctgtcatcacttggtattgtcagactttaatcgaagccattctaactggtatctagtgacacagcagtatggcattaatttccattattctaatatttaatgataaggaggctccttttgcccactttttaaatgggatcagttatcttatcaagaatcatgaggtatttttttgttttttaattctggattcaagttcttaaagaaatatgtgacttgtgagtattatctccatatttgtgagcgcatccttaggcattttcttaatcatctttgaatagacccagttttcccttcccaatctacatagttatttcttctttgtcttactgaagtaggtagcaacccaggtattgtctgatcactgaggacatttgaacaaatgttaacccattgattagttaacttcatccaacttcattgtgtagtttttgtattaaagtgctaactgccagaagcacgcagaataacctatcttagtttttatttattttatgtgcaactatatttgcctaatatgcagctcttattccaaagggggaaaggaaaataaacaatgtatttttataataaactttttatataatgattttatgctttttcttagaatagatccctc

SEQ ID NO: 34483 - DNA, 1144 bp, Mus musculus
gaaaggtaagctttccataaggctaaacatgatgtcaggttattgtctgcttacaacagagcagatctctggatcctggtccttctgggtctggttaggcaagcattctgcactttccccacagccttccctcttccagtgacaatcaggcttccctgtaaagccagtggctcagtgtgtccagggcagcctcattctgctggctcttccctcagtttgaccccctgtgggcacctgcatgtatgtgttacatatacatacaattgggctgtatacaagtgttaacaagaagaaaggatatttaaaaagtacatctgaagatgcaaagaggattgactctggctaagttacatgtaggcactattatttcttctcaggttctactttgggtgaagcagacagccagtcagaatgggctgatgtccagaaaaaaatcatcccatggggacaaagcgctctggaatcagacctggagctcgagtttcaggatcgggctgccaagctcggaaagtccattagcagactgatcgttgtggcctcactcatcgacaagccgaccaacctgggaggtaaagtcatctaccctttgtggctgtctgttccatacacagtcctctaggcaggcttcagaggaaaggccggggtggtgtgaaccttgtgacatgctggagacagtcttggtaatgggccattctgtacagggctgtgcaggacctgtgaggtgttcggggctgcagtacttgttgtcggcagccttcagtgtgtcagcgatagacagttccagcacctcagtgtgtctgcagagcagtggcttcctctggtggaggtgagtgtgaagtcgcttattgcattctgtatttgtgaaggtgttttggcatgtagtgtctttgtgccagtttctcagtgtaatccttcagtactgagttccaggtttagtctgtgacctgcggtcgtgtggcagtccccttagccaccactcagcaggctgtgatgtggagggaaccttcctgatgctgtctggtgttctgcattcgctttaaagccccattgagttttaatgctttgtcggctcattgccactaaggtgagaccatcccagctgatgaattatctgcagcagaaaaaggcagaaggctacactgtc

SEQ ID NO: 34484 - DNA, 1198 bp, Mus musculus
aggaagcagtgtttcattggctacctcgaagctggttagacctgaaagtagaggagctgaacattatctagaaaggtctctgagaagtgaagacatacccacctttgatgaaaatggccccagagatgcttgactggcttttcatcttaaaggaaagggacaatatgtataacattcttcagtggcttcttgggtcagcagtgacttggtgacaaaggtctccctcgaggagctgaagctgtagcttggtagtagaaaaggagcccctgggttcagaccctgggaaggtgggctgcttggctgattttgttgaaagccagaaagaaaagctctgggatgcaggaggacacggtgctgccaccctgtgcctagaggtggcattgaatgattgcccccttagtgacattggaattgaactgcagattcaaacccaaataggataaaggggcagaaacagaggtgtatagaatgctgctttgtaacacttttcaggtttgcagttgtctctgatactgttcttagtcacagatgtggtaggaggcttaccctgaccgattcccaccctgtctcttcaggatgagtcagcatccaggtccagaactcgataccatgagaactccctccagcaccgggtgaagaaccgtgtgtggcagactctgcttgtcctcttccctgcatttgatcaggtgtgatagttctcatgttctgtgtcttagttagtgtttctgctgctgcaaagaaataccatgaccaaaagcaagttgggaaggaaagggtttattggactgtttgtcaccaaaggaagtcaggacagaagctcaaacacagcagaccaggaggaaggagctgaggcagaggtcatagatgagtgctgcttactggcttgcttcccctgttttgctcagcctggtttcttaaagagccaggaccaccagcctagggatggcactgcccacagtgggctgggccctcccctattgatcactaattaagaaaatggcttacagctggatctcatggaggcatttcctcaactgaggctcctttctctcttatgactctagcttgtgtcaagatgtaaaatccctttcatttaaaaaaaaaaatctgtgtatgagtgaggcagagacaaagagagagggagaatgaaggggaatgtgagaaagagacagacacatggagagcctgacagacagtc

SEQ ID NO: 34485 - DNA, 1176 bp, Mus musculus
tgtccctgtcagctcagttgttccccccatcaaggaacttcccccagtgtatactccagtgtggtcctccctgtaactgcgcttctggtattcttgactgaccgccttctgtggtccaaggaaccctgtaactgtaacgtccaagcaggcttgctgcatgaagcagggataaggatttgactttattgtctttaaacgtgggacataatgtttctctactgatggaacatggatcaggaataattatggagctgttttcgtttcaatgcatcatttttgaaggagttaatgcttttttgaaagaaaagttaaaaatcgtgtgtgtgtgtgtatgtgtgtgtgtgtatgtgccagaaggttagaagacaacttatgggagtaagtccctttttctctactatgtagattctgaggatcaaactaggtcatcaggcttaattgcaagcacctttatcctttgaaccatttctcaggccctgagaacacatcttaagccctaccttttgttgtcttacagaagaaagcagcttcatgccagactggctggacgccaggctgacagcgctgatggtcctgctggctgtggacgtggaaggactgaagaccaagttcaggtcagggtttcttcagtgctaggagtggtgggtgcatgggggagaaagaggctagttaggtttttcaggggcatttagacttttcagagattggtggagtcactgacaggccagaaccaggacactagccacacactaaagaaatgtttaatttaccagcccattaatgggtgtagggtcggtcagtgcttgcaggttggtaaactgaatgtcagatttacaattaaatgttaaacaatgtatcgttttatactggcaccagaaaaatagatgataagatcccagtgtaaactgtaaagtgccctgatggcagtaaaagtggcagttaggatgggctagcctctgggtacagggcagaagtgccagggttaagtgggactttggccttgtgtacctcgaccttgacaaaccacatcccttctagacagttgtagtgccaaaggcatcctttgtagcgtttttcattttgcatttttaaaaacagttgacgtgacacatcttttactagtttatccttttcttttttaaatttattcattgacagtcatatgtgagcacggat

SEQ ID NO: 34486 - DNA, 1204 bp, Mus musculus
acagaggtaagctgcaagcagcggtttgaaagctctataaaagccccctcttcccatggagctatcactaaccactatgaaatgcaacagttgctttcaaaattatattcctcagtgcccctcatacttcaatgaatggcggccccatgagattgtatcaagctctgatttaaattcagtttatgtggaagtcagaagattggatcggggaaattagaaatgctttgttctgttacattttaagaataaaataaccttgccatggttttcctgtgtagctctgtgactggctacgtgtcaatgaaagatactttaagcaatcctcacttggtggctctgatggacaggaggcgtcattaaatgcttacgtgaagaacctagttcaggagttcgtgaagtctcctggttgggaaagtaagtgtgaactcttcagggaaagacagaatgtgctctgaagtcacgtgcagattgacgtgtaggcataagccattgtgctgtgtgagtctgaacctcagccacaggatcagagccgctctctcctggccctgtgggttgggagacttggggatttgttgaaccggtgtcagtgtaggtgtcaggggctggagcgggaagaggacccacagggcaggtgtgtgtgggtttctagtatggaaactcgtgctgagtgcaaataatgccaataggtttattttcatgatttagaagcaccacgttaattgtgaactgatgaacatgtttatccgcttgatacgtgcgtacgagtgtgcatgtatatgtttgcatatgtctggctgagcactggtgcatgcggaggctggggcttgtcatttgccctctttttttttttttttttttttttttttgaggctggctctgattggctggctaggctagcagcttgaggcagggtctgattggttggctagtgtggctgaggcggggtctggttggctagtctagctggcaggtttctcctggggatatgcagttgatctgatctcctgtctgcctgcaagcactgagattgcaggtggaccaccacctctgccagcttttacacagctgttgggaatctgaacttcaaactcctcatccttttacagctggggcttaaacgcctgagccatctttccagtctccaccaaccagttttagatagcgtacttattatttccatcactcacttgtaaagacctttctt

SEQ ID NO: 34487 - DNA, 1219 bp, Mus musculus
ttaacatgcacccttttaaaaagcagccatctggggggattgcaggatatctatgtgaatttagggccagctagaaaatttaggccctaggcctatttccaatcgggaacttcggaactggtgtaatactatgtctgcagcaactctttttactaaaaactgtgagtggcaggaggcatcacactcccaacaaagttgaaggaaccttatgcggtcctatgccgggcagggtatgtgtgggtgggaacctctcgccgcgcacgcgcactcgcgcttagggtggccggcgcacgcgcacaggtctactccccgcgaaatggagcgggtgttggcggacgcgcttctaacgcagagtcgggagcccggcgagttgctgggcgcgctgtgcggcggggaggcgagtgcggagcgggcggagaccctgcgcctggtgctgcagcggctggaggagcgcggcgcgggcgccggcgcgctggccaaggcggcacacgaggtggccagggaccacctggtgcccttactgcacgcgtcccagggcggagggcctgcgaggccccgcgtgctccgagcggcgagtgcggcgctgcgctcgtgcgcgcgcctggcaggaccggagctggcagtcactctggccgaagaagcgctgcgcgagctgccgagcgcgccagccgtggagctgctggccgccgtggcgccgtgtttacgcgcgccggaggatgccccgctgctgcgtcgcctggggcgcgcgtctgtggagctggcgctggccggggacgcgccgccggccgtgggagcgcgcctgctgcccgcgctggcacagagcgcagaaccggctctgcgtgcggcgtgggacgcgctgagctccgcgggaccgggagctgagggcagcactgggccagaactgctggtgctgagcgcactggccgagaagctgctgaccaaccatgagcgccacggggatctcgacgcccgtctctgcggccgcttctggagaaccgtccaggcggggctgggccgcgcgcaggacgggctcacgcgaaagcgcgcgcgctacctgctgcagagggctgtacaggtgtctgcagagctggcggtggactgctcctgcagcccccaggacacaaaaggtacccacttgtctctctaaaaaacaaaattgtgtgtgtgtgtgtgtgtgtgtgtgtgtgtgcgcgcgcgcgcgcgtgcctgtgtaagttta

SEQ ID NO: 34488 - DNA, 2639 bp, Mus musculus
tttgacgacaaaaggtatgtactttaaggcattttcttcttttgttaacgttgttaggctgtctgtgtttgactctttgggtgacagttgctgttctttgtaggctgcgacttggctgcttttgtttttttttgttttattttgttttttgttttttttttgtttgtttgtttttaaagagcacttggcaaacaaatgcttctagctgtatttgtatgcacttattttaaaaaagaaaaaaagccaaatacatttttttctgacattgtaagattgccttactgtctgtcatttctcctcgctggcctctctcaggctggaggccagttggtggaggagaaaggaagtgagtggaagggggacacctgtcacaagggcattccccgtcccccaggaaatgtcacccacctttccgagggagggaaaatggggtttgaatcttgtcaacggttcagctcttgcaatactggtcgtcagaggtgctgctgaaaggttatttgcaacattgtgtgttcagggtttgttttgttttgttttttaatggaaggcaagctagctgatgtttgctctgcccacgtgaccggttgtaagctttcagtgctgcgtgctcctcctcctcggtggccccaccggtggttccagctgtagaagtagttgtcagggtggtgtggaaatcaggtggctttcctgctgaccagcctggctctgaggtgctccttaagtgttgcaggccccgggtgaacttgtgggattcgtgttttcttctgttctggtgtgtttggtctacgtgttcagttcttgcctgcgtgctgtcccccttgtgacgagtgcttactgcagtgtgcacgttgatagtcacagccttggatgctgccaggaggacctgtgggcactgtcagtggtgggcccagtgtgggtagaggaagcctgcagtttttccttaggtgtgtctgaaatactaagagaataatactgttctgaaaaaaaaatgagagagaacctagtgagaatacttacatgaagggtttttacataagcaagccccacctctaactatttttagaagcctcttgtaaactaatttcttttggtcactattttgccttagtgaagtgattgtttttaatgtaaacaacatcaggtcattagctaccagtagtggtgcccttagtgatgctggttttgtgggttttttttttttcttcttctttgtgcttttttttggtttaatgtcaacaggaacactaccctctcaaccctgacttgaggtgtttgtaacttggccttgtcggctcaatcatggcttctaagtctactatggtttgtgtgttgttcacagcctggcttctattttaatttgaaaatagagattatcaccagcttgacatcatttctagttacttagttcttggttttgttttttgttttgtttttagtttttgtttttaaccttttttttttttctttagtagtcaagttactaacacttgacactgaagcaaatacagtatttcttgtctggtttttcttgagtgcacctcggcctctgttatcttgttaccagttgtggtgttacagccgggcttgcatgattagaccagttgatcctaactgtgactcaggtccgacaggtctctctctgaggcagatgtacacacacacacacacacacacacacacacaaagcagagtcagtttcacctgcccataaagacatttgtgaagggctcaactattatggtctgtactataaatgtgtttctaagcactttattataaactggaatttggcctcatagatgttacaactagattagtcatttgacctaatttgctgtggctgtctgtaatctcagcacagataaggtctccaaaaaaaccaagaataaagaaccatcctgctgaacagaagtctgtccagcagcagaaacggccacctgtggtttttctctctctactagtagcaaggccagatctgacctgtttaaaaggggccgtagtttgagattaagggtggacttcagaaggcttgaagctaaagtgttgtcctggagtggggcggggcagggtcgggggagtctttctctggcctactctgaaaccggtcacacggggccctcggttgatcttttcttgtccttgatgacactgtggatgtagtccacagctgggtagagatgtcaggttcccaacactgcttctgctgtgactttgatatgctcagaatagtggggggggatggggtggtcggtcaggtttttgtttttttttcttttaacagtttatagaatttaacagatagagttagtgtctttcatgtggcctcactctggagttaatgagaacatacacgtggtttacagcttttctatatacctttccctggccaccaggtgttttgaaagtgtgccacctttcaaactttgctttattttttttttaagtcgaaggtgataatttttctatatctgatgaaactcaatgtctactgaaataagtgtaatctgagctatcaacggtatattttaaacccacgctatggagatatcacctgcattctgtcatttgtcagatttacagtactttttttttcttttagcattaaataaaaataaaattgggagcactgaatgttttcc

SEQ ID NO: 34489 - DNA, 1089 bp, Mus musculus
gggcggcggcgtcccctcacccggctcctcctgcggcgcggcgggctgtgcggacatggccgcggcggtggcggtggcggccgcctctcggcgccagtcgtgctatctgtgtgacctgccccgcatgccctgggccatgatctgggacttcacggagcccgtgtgccgcggctgcgtcaactacgagggagccgaccgcgtggagttcgtcatcgagacggcccgccagctgaagcgtgctcacggctgcttcccggagggccgctccccgaccggtgcacagcccgcagccgccaagccaccgccactgtcggccaaggacctactgctgcagccgccgccgcagctgggccacgcgggcgccgaggccgcgcgcgctcaggctatggagcgctacccgctggcgccggatcgtgccccgcgcctggcctccgacttcagcacgcgtgcgggtgcaggcctcccacagtcggccgcgcagcagtccgcgccggcgaacggcatcctggtgcccaacgggttctccaaactggaggagccgccggagctgaatcgccagagcccgaaccctcggcgtgcacacgccgttccgcccactctggtgcctctggtcaacggttctgccgcgctggggttgagcggccgtgctgcggccacactggccgcggtgagcggaacaccgggcctgggagctcagcccgccgagttgggcacccacaaacgcccggcgtctgtgtcgagcgcggcggcggagcacgaggcgcgcgagccgagcaaggagaaggcgcagcccgcgcaccggagtccggccgacagcttatccagcgcggccggggccagcgagctgagcgccgagggtgcaggcaaaggccgcgcgcccggggagcaggactgggccagcaggcctaagacggtgcgggacacgctcctggcgctgcaccagcacggccactcggggcccttcgagagcaagttcaagaaggagccggctctgactgcagcaggcaggttgttgggtttcgaggccaacggggccaacgggtctaaagcaggtaggggcgactgcggggcgaggggagaagggatgga

SEQ ID NO: 34490 - DNA, 4328 bp, Mus musculus
gcttggctgaagatgatgtggaatgagccagataccaacaagataaaatctcagtaaaataatttaacagttagcttggaagctggtcagctctgggggattaagggcaaattatgctgtcatgaactgtcccacactgacgtctgccaaagcgaatatgaactttggtagatccattgtctgttctatttatttttccagtgaaaagtattttgatagagcttttcattttataaatacactgagttaaccaaatatcatggatttccgtttgttcttaagacatgcaattcaaatgtaaatacagtagagtattacttaggtagaaactcgtggtgattttaagattggaaaagaatctgaggaagagttgaataacacacattctaaagactagaacattttattgtatgttgtaaaattgggtagaaatttgtgtttgtgaaaactgagcattaaaaccttacagagaccgtttctcgtttacttaagaaaatgtgcggtgtgttgtctgttgttaattccattccctccgtgtgtttccttaaaagcttctgtctattagtggcttcctgtgctctgggcacttaactcctaatctttcaaacaccgggatgcaaacagcacagggattagacctgtgtgcaccctgacctggagggtgagctttgcctgctgtctgctcgcttggctctttatacagactgaggctcagtctgcctgcccgtctctggggtgttccatctcagcattaggtcagttggttctgttgagtgtcttcaggtccacctccagctggtgattatttcagaataaccagaccttgtacttgtttatattctgaatttgcatgtttgcctgacttagtatttctcaattaaaacctcttaagtggagtaatttctttgtcagttgctactgatgtgaagtgattctgttactgttgtgtaaattaaccagaaactcatccttaaggaagctggggtggtcttcttgtgcaagtgtttttgcttttaacagaattatctcttcagttctactatggattgattaatttatcttacacagtgacagcggcgtgccatcttgacgggagatcttgtggtctgctactatctgttcaccaagcagcattctcacaggacagctcacttgcatcagtgctgtagacttgtttgcttggctgtcctcacctttgcctgggtcagtgtagtgggaagaatctggaaatggaggtttagttagcttctttctgcctgtttggtgtttggataacagctttggacaactccattcactcaagagcctttctctaatgtttgctggtggaatgccagacgtggagaggcacacatttgagacctcttccatgagtccttctaggccttttgatcccaagtccttaaacactacgttcttggtaggtaatgcatgttttggggaatgatgctacaaatatgccagttgcattttgctggtagaatctttagtcccaagcatcataatggtgacttgtctgagattgacatcactgtagagtcctatgcagcccagacgtggagaagaccacagggcactgcttacagaggtactctgcagtgtgcactggatgccctggccctggaagttgcagaggtggagatgctgttttactttgaggctgattaagccaagtttgtttgcacgaaggacagatgtggggctttggcactgtcacttgtgaacactagatgcttgttttggttgcgacaactactttccttcatagaaacaaatgttgcaccccagctcacctgaagttaaatagatggaagcagaacactagatgcttgttttggttgcgacaactactttccttcatagaaacaaatgttgcaccccagctcacctgaagttaaatagatggaagcagaaagcgttggtgctggtcagcaaggccagaaggcaagattaacacccaactgagataaaagcagttttaagtgttgccatgggaagtctggagagggaatacatgttagggcatgttggcatgctgccttgggtgccactgtcttaactgaaaacattttagccagctgcctggaaagatgtaaacagccccagtagtgcacactgaggccaagtccaggtgctgtgttcctgcatctctgtccagcaggttaggtgtgcataccaccatgcacctgtgaccttgaaccagcctgcaaaccagagtgctgatgtactgtcatggaagtggtgtggctggtgccagacaaatccattcttctcacgtcagaaaatgaagtgttcattgcctgtgcctcagctgtattaaagggattggagaacatctggcttggtgtgtatttgcagaactgaatgctgttgattttggtgactacttagaaaggacaccgcattttaggttaacaccctaaggccctctcccatctcacccctttagtaaacaaaagcctgtttactgcccagtatggaaagtattttaggttctaagttaggcccttcttccttgatcccaggaggtgagagaatagcagtgtctgctgtgggtttggtgtctgggatgtgaattctaagtgggtgaagtggccaccaataggaaagggagaaacttgatgacagtgactcagcacttttgaaatgttcaagattttaaatttgttacaatccacagttacactaagcagtttccatgttttgggagtaaggtaattttacccttacccaatcaatacaggacaggttaccctctccctggtgtgtgtaagacacaactaaagctacaattgaaggctttggagaattaaccatttaacgtgcttactactttagtctacccacaggatgaggctacatgcaaaaactgcccaagtcaaatagttttgtcaagttaagtaaggggctggaaggtgaaaagttgaccctagagaatgcttcagctaccctttggggcaggtagccctggcccctgtgtgcaggtgtgctgtaggcattgtggagacaggggttgggggggggggtgtgcctgctgtacttgactgaagtgtaaagctttggtaaggatttggcctctagcagtcttaggtttctgcatttaccacggtgacacagcccctacagggctgactaggaacagcacatcctgtgctgttgaagctgtccacatctcattcctaaaggtcctctctctcttgtcaatcagggctccacggacagcaaaacattccctcaccccttttcagtttccttgatgtgacttacctctttttgtttatttcttttgagacagggtttttctgtgtatttatagctgtcctggaattgttctgtagaccaggctggcctgaaagttgcctcctgcctctgtccgccccccaaaccctgggtttaaaggtatacaccactactaactgttgaggctcagtctcctaagagctgggatttctggaatgtatcagtatgcccattttaggacccaccttttggattaaggaatatcgcaggaattagaacatagtcttagtagaacagctcccttctgactctgcttatcactgataaggaagacgtcaaggctgggttgtgagtttgaggccagtcttgggcacacagttctaagccatctttggaccccgtggagactggaaggttcaggatttgaattaggaagggtaaactgacaagattaaaatcatggagggtgggggctgggaagttttttgtttgatgcttttcatatatcttaagctggccttgaactcttgatcttcatgtcttaatccatggagtactggatttacaggtctgctatgcctagctacttatttatttaggacagggtctcactatgtagctttagctggcccagaactcaaagatccagctgccttcgttttccagccctcacaggaccaaacaggaactcagttgttcccaccttcattcctcagtagtgttagtatcaggattagatcctatcagggtgatgatggatgctctaattcccaagtactgggaccacaggcatttgcctccatgtttgtttttcaagagtttttatttatgtttctgacttgaatttcataggaaactgttggaaagttttagcttggtgttaaggcagagtttccagcactttctgaaatgaccctaaacactgcttccatgttatactgtgtttatgtaaagcagtgttctctgcatcaactatgaagttgaaatatcagccagctctaaataatgctgatggcgctctgcagcttacaggatcaaatgctcacccaaaattgttatgtaaaaagcacacccatttcttcttccat

SEQ ID NO: 34491 - DNA, 1023 bp, Mus musculus
aggttcgaggccagggcagactacacagcaagttccagaccctactatgctacaaggggagagcccgtctcaaaaacctaaaaagcaaacgcatgcacttcaagtcacaggcttcctgaaggacacagtgagatgagatgctgttctcagccggctcccaccttcgtctttcattagcaaggacagtggattagaggcttctgactcagcacgccacaaacacgtgctgcccctgaccccctggtcacgggatgacgcacaaatccttctgcagtgcacgccccgcccccagcttggcgtctcagccgcgcagactgggtccatctgcgcgtgcgcaccaggcgttcccgcgcaggcaccgccgcggacagcccgccgcggaccttcccccggggtcctcgcgcgccggaagtcctcgcgctcggccttttccgtctggactggaggcaggcggctgcgagcggccggcgtgctccgatcggtcggagctaaccgctgccaggcgggctgccgcggcccggcgtacgccccagtcgagcgaagatggtgggccggaacagcgccatcgccgcgggcgtgtgcggtgccctcttcatcgggtactgcatctacttcgaccgcaaaaggcggagtgaccccaacttcaagaacaggcttcgagaacgtgagtgggccccgcgcgcccccgagtgctccccggcgtcgcgctcttgcggccagggtcccgcctgtgcccgcgggcctccatcttggaggcgacctggctccatcttgctggcggtggaatgcatgctgattcgggggaggggtagcacttttttgcctttccccagctctgtaattctgggggatggggggtgggagacaggtctttagctcaggttaaggtggttatcctccagtttcaaggtctcaccacgcccagctccattcccccccactcaacttgtgttgaagacagggtcctcctgtgtagctcaggctgtaacccgcgctagcctcgacctcgtggcagccagcacc

SEQ ID NO: 34492 - DNA, 1275 bp, Mus musculus
ttaggtgtgtgtgtgtgtggaggggggggtgctcataagaaaaatactcttccaggaaaatgtgatgcttaaattagtatcactcagaatgaaacagctgtcccagaaagtttaaagacagcatctaataaatgatgttaattaaactgcagtctttaaagttgaatgacatgacaacatggtgctgcattccctaagttccagacacatcttaccaagctggggctggatccaggatgaagtgggggaagcaggaagccaaggctgattcaggcaggcagagtccagtaggcaagagggtaggataagttttcactcttttagttgtaaaagttctgtctttgggaaatgccatgtagaaaacctaatgaggtctttaaaacatagctctaggggctggagagatggctcagcagttaagaatactgactgctcttccaaaggtcctgagttcaaatctcagcaaccacatagtagctcgcaaccatccgtaatgagatctgatgccctcttctgttgtttgtttgtttgagacagggtttctctgtatagccttggctgtcctggaactcactttgcagaccaggctgaccttgaactcagaaatccgcctgcctctgccccccaagtgctgggattaaaggcgtgcgccaccatgcctggctgatgctctcttctggaatgtctggatacaactacagtgtacttacacataaataaatcttaaacaaaaaacaaacaaaccccatagctctagaggctggagagttggtttcttggttaagagcatgcactgctcttcagagtacctaagttcaattcctagtacccacgtcaagcagttcacaactgtctgtaacttgagctcctaggtccaactcctctagtctccccagactttgtgcactttttcactaacataacctacacacacatatatacaagtaaaaaataaaagtgtggggctggagagatggctcagtggttaagagcactgactgttcttctagaggtcctgagttcaattcccagcaaccacatggtggctcacaaccatctgtccgatgcactcttctgctgtgtgtctgaagtcagctaccgtgtactcacattaaataaatattaaaaaataaataaaagtgtgtagcttttacagcagagaaagctctatttcctgtatccaagactggataatttatggttggttttccttacagtatttagaaccttttcagttaaatttcagcaattttacctgatcactctggagcattt

SEQ ID NO: 34493 - DNA, 1179 bp, Mus musculus
ctcggtgggccagagacccttcacttactttagttagctgtccttcaactagatagacctctcctaagtaaggacccatgttttctcaatcaacagattctgttttcagactgtttggtgggcacagaaacctctgtaggtcgtagagagtgttgagtgtccagggcctagggcagagaatgacaataacgggcacccacagagtgtaaagtagacatgaagagcttatgtggctttcctttagtactcctgtgccctgtgctgctgccgccgctgcctggctttagtatgtcagaaaatattccttaaactctttgatatagactttgttttctaaaggtagcgcacagcagaagccagcagaaggtgtctgcagtcaggaggcaggactgagtgtcacatgctggtttttttgtttgttttgtttttgactcctcctttctttggttgttccttaaaaactagggaaagtgctctagcaagtgctgatctagaagaagagcttcatcaggaccaagggcagggaagaaggagaaggtctcagtctcggggtaaagtggcagatggagaagcactggacgttgccctcagccttgctaaggatgggggccaaagaacaaaaatcccagtcaaccccgaagaggagcggttaaaaaacgagaggactgtgtttgttggcaatttgcctgtcacatgtaataaaaaggtgagtggaagggggtagaatgaacctagagaagctattgactaaggttacgtttaatgagctcatagttgataactaactcattgctgcatctttgtgcttcctaatcagcacaccatagatgggttctgggatgtgtgtgtgtgtgtgtgtgtgtgtgtgtgtgtgtgttgcttggctctcagccctaatttaggcttgtgaaggtcatgtttgaaatagtagtggcctatttctgttttttttcccccctcttcacctttcttcctgttaatgccactagaatgtaaaccaatacacataactctccctccctccctccctccctccctccctcctttactgttctgtcttgcacacatgagaggatgcctaacacagtaaaggttcaaagaatatttgctatgtggaagaatgagttttgccttctatgtgggtgtagttggtagtctatgcaaacctcaggctcaaat

SEQ ID NO: 34494 - DNA, 1145 bp, Mus musculus
acaagccaggggaagcaagccagtaagtaacatccctccatggcctctgcatcagctcctgcttcctgacctgcttgagttccagtgctaatttcctttggtgataatcagccatgtggaagtgtaagctgaataaaccctttcctccccaacttgcttcttggtcatgatgtttgtgtgggaatagaaaccctgactaagacacttgcatgtttcggcaacagtcatgggaagtgtcttctctcatgttcggacttcaagatgggaaacatcctctgccttagttttccaaggaaaggttcgttgccgagcttcacttcacaaacagcgtcggccacgcaacgttctttctcttcttgtggttgtcacttattaattctgagactgtggaccccagggtcccgtttgtggtctctttagagccagtaaacttatcccttgtctttctctcttgcaaatacttgccacttcactgcccaattttgctttccctctggtttcagttaaaaataaagatttgggcagaagtatgtggtgtgctgagaatcctgggaggaggctgtaggtcttgtcacccaaacggttcatttgtcttcgagcttcagctggtgtggtgtgagatccaacccagaggctttgcagtctctttcagctcagtggttttaatgacagattgttttatatcctttcataggcccgtgctggatagttttatgtcattctgtcacaagctacagtatctgcaaagagggaacagcagtagagaaaatatccctatgaggttggcctgtgggcaagcctgaagcacattttcttaattagtaattgatgtgggaggacccagcccatggtggtaggtggtcatggggtgtacaagaaagcagtctgagcaagtcagtaaggagcagggcagtaagtagcattctccaatgacttcttgagttcctgtcatgacttacctggatgatggacctataagatggagtaagtcccttcctccccgagttgcctttggtaatggtgttttatcccagtagaagaaaccctaagacaggtcccaaatgtgtgtagcagaggtagctagctgtagagtttcatgctgcttcccagaggtcatggaacaaagaactataaatatctaagtg

SEQ ID NO: 34495 - DNA, 1151 bp, Mus musculus
agggtgatctggagcatctcttctgagcgcagtgctgggtcttcagatacgccctaccacatccagtttatgcgatattcgtgatgggccctaggacctttgcgtgcaagctgagcattctgccattggcacttagtccccagctcctcctggatgctattgtattacacactgagtattcaactaaacatgtgcagatgctgagacactctatgttgaaacatactctgcccatatggctttgtgagtgaatatatgtgctgctgacctcaagacaatagcatatcaccccctcccccccccaataatgataaactctcttattacaagccgagggtcttggtggcgcatttggtgtgtgtgtgtgtgtgtgtattcctggggattgaacccaagatcatgtgctcaataggtaagtgttctaacaacaagccaccctacaccctctcctctggtttcaaacaggtcataaaaagagaatttagaatttagacaactagttgaatgttttatctctagcagttcaactggtgagcgctctctctctctctctctctctctctctctctctactgctcccctgcagtgcactcaaacattagtttcatctggtccatgtgcactcccctgtagctgatgtcatctctgcggcacatagatctttctaggactttgtgttcactgagcagcagaggcatgtgcagttctgtgcctagtgacctttgcctgtgtgtgccttatgtgcatagctttgtaagttagggggaaatcccccatggtgattttggattgccacttctacctatgtgcacgaaagacttactctctgttttttctggccggggctgtaaagagatcgttttagtgtagcctttgcctcctcaggtgaggatgagtgacttgtggttgaaatttattttaacaggttgtgtcaaactgttaagagatattgaaaatgtttaatatgagagtcagaggcaataaatcacaaatgcctgtcgaaacagatgtccaagacacatggtggatggagccagtgtctgcacagagacttggcgtccctccccagtcaggcccttcatcctcacctcgtaactccacagtaatagacggctgggagagcgggtggtgaaggagggatttaacaccac

SEQ ID NO: 34496 - DNA, 1105 bp, Mus musculus
catagaggtgtttttaattaggtcctcagtattattttaggtacatatatcctatgtgaacaaattagaacaccttcgatcctcctgttatatcaatgctggggtaaggtgctattttaatctatttttgtgttaacagcatttttatctggagacctcagaccatgcgttatacaattgcacggaaagtgcgtgtttggaggaattaaacattaaggactggcaccgttgtcttgccagccgtgcactctgtgctgtcttgatacatagattctttaaaaaggacttctctcaaggaaggaagaaggtgggatgctcttgggaccttgagaattttgatgcaggaatggtagagttgtcaatgtattccctttgttatctcctgtgtgattccagacacacaccgcctactcttagattttcatcacacactgaagaagtactgggcagtgagtgacaatcctcggtctggaaggtggcccagcatcccacaccccagagtctgaggcaaaaggatcaggactttggggctagccttagctacaaagggagaaagactctttctcatacaaacaaacagttatctgcctttatgtggtgtcggcttggtgctggcactttactctggttttggtcctggtactctgttctgttgggtgtgtgcacgattctctggatttggcttctccacttggtcagcttcactaagccagccctggctccacattgccttgtgcttgggtccctctggcagttataaatattgctgttttttttaactttcctttctggtatgacactgtccataccccttgtcctaaccctccccttcccaagctcagcacctggaagtggcctgctccttttctgtcacagcccttaggtgactctgatgaaggcaggttcccatgcattccacccagtgttttcctttgtttgtttggcttttgagagaagcactgggtctctttccagttccctgacatgtcagcccagccatgcttttattgaatacatttgttattgttgaggaatgtctgcttataatttgtatttttgaaagtatttttctctttaaacattttgtagcaagcattttgataaa

SEQ ID NO: 34497 - DNA, 1194 bp, Mus musculus
aaatcctgccactaggaggaaaacagtacttaatatcagtatgtcttttctccatcagcctgctgatttatactgtgtcaggtgcatagacatttctcagcgaggtcctacctggctagttcattgattgtctcctgcgtctttaagctcactccctatagaccaatgtttcatatgatagaaaaagaagtgttgaaattccttatgatgacacaaagaagtgattaattttgtgtgagcaaggcaatttttcacaaagagtactttgtgcatgcaaccaaaagaattttaaaggcttgtgataatttttgaaagggtgtacatcccaggagagagacttcaaaaaaaaaatatacatccaaaatgaaacatctttcctaattggaaggatgtcagatgtcttcagtcacactttctcacttagcggataagagagatgtgtcctaaaaccccgtgatgattttgctttgttttggttttgactgttccctcttggggaatgccaagctctcccggtaagttttaatgacaccacattgactggaagactctgaggtatcaccatagcctggtcccctggtccccatgtgatgagatccttaagacatttccccaacactcacatcacagtcttcgttctgctctggtgtcggagttacagaaccctggccagtgacttgcctgaaatggcatattgttcctgaaccacagtttgaatgtgtggttctctgggcagtaggtgcctctttagtaacagccagtttatctctatcactttgaatggatcactcagaaatgtgaccaaaggccaaacctaaccatactcctctctttttggttggattcccactgccattaatattagaacatgagtcctattttgtattaggaagcaactcataagggctgggaatatagctaagagtacttgcctagcatttacagcgccctgcttccagatccacaaaattaggttaagtaagttaaaaaaaaaaaaaaaagtaagtaaatgaacagataggtaggtagatagatggataaaatcccttcatgagtcttcttagtatttctcctttgaaaaaccttgagagaccttttcaactattcagccaccttaataacaacaatgaatagcaggcatagtttgccaacatgtttactttataaatatactacaatctcctttttgtcagc

SEQ ID NO: 34498 - DNA, 1156 bp, Mus musculus
atcgagacagaatctcatatatccaaagctgatcttgattttacgttatagctaaggatgaccttggatttctgattctctttatctcccaaatgctgggattacagttgtgtgccacagggtcaagattatgtggcaccgaggtgaacactgtagcaatccacttcctactgtcctgtatgctctaacttcaaatggttttaaacgacatgtcccacagtggagtccagtggtgctaacattctaagtttgggtttgttccacttggtaggaattggtaaaaccttcactgtcatgatgtcattgttcctacggtcagaggagatgctcgactagtgtcacttccatgtgacaacaaactggacagcaaggatgcatctgcaatggttgatctggttgagtgggcagatctcgtgctacttgttcagcagggtactttggaggggtgtgaccagctgtgtaggtgacagcctgccattgacttcaggaacctacacatctggaaggtggatgaatgaaagaagtttagaagctaaagtatacatgaacctagatcgttggcaataagttgttaaagtgattgttgaagatgtgagttcagtccccggactctatgttttaaaagaggctgtgcactgatgcatgcttgtaatcttaactctgaggatgaggagtcaaaatgtccttaaagcagctcactggcagccaactttgatgagcttgtaggtacaaccagttgtttctgttcctctacccaagtatgctttaagtttttgtttgtttgtttgtttgtttttgttttaatgaataagctatttttagtttagagcgtcttgtggacgttcatttgaactcttctcctttgctggcacttggtattgatacctgtttccttcctgtcttgtcccctctcagccatgatcttggcttttcattcgtcagttattgtttgtttgttaaggatctcatgtagcccgagctgacctcaagtactgggaccgcatgcatgtgctactacattaagcctctaatggttatttttctcactacacatctcaaaagaactgtgtcttaagatttccttcctgccttgaacatgtgtgctccatgcccacccccgtgttcaattaaagccaactatttcgcttgccaggag

SEQ ID NO: 34499 - DNA, 1153 bp, Mus musculus
ttatagcataccccccctcactgtggtcttatttttttctctctacactgtagagtggaagagaccacaggattggaactttcagtaatggccaggtgtgcctcatgactcctttcttcaggggaaataatcccatggatgtctaagctttggaaaacggttggttcctgtgttttcttttgttttctagctttctacactggcaagttaattctggaccacttcatcctctcgttgccagacatggtaatgccttcaaatgttttgagtggttcttctgccaaagacttctttcatctgtttacttcattcttatccacgtttccccctagcaaatggttccaaggcctaacttttacatttgtcaaatctgcatctttcttcctcaacattcacccttcggtacccccttctcttttgctgtattgtgtttccctggccatcgttgctgtctcaccctttggaggtttatttgcctccttcatacccactgctctaaagtactgattctttttgtctcttcttcctgtcacttcgacatggcagaaattgcatgtagtagttgatccattcattgcaagctgcagacctgacttccagtgtagctctctccaaacacaccctaaattcagaaggaagttacttctttattgtgtgactatggtggctcctgtgtcccttctccctggattcttaccagcctccctcatctcttttctcttcttcctcctccttccttcaccccctgcctagtgatgacgtttcacagaatatgtctctgatatttctccctgagttttgccgccgttaccttttccttatctggtgtaatatagtatgttagtgccactattggccacctatgagcctgctcaaacaggccaatcagcactaccttccggagtctagctaggtggatattcaacagaaaggttgcagaagcaaatccattttgtcttgcttggtattcttacctcatggtcttaggtctcatccagtttccttattccttgctgtttcctacctcaggctgtgttgagagtttgcctgccccttgctgatgcacagtgctctgctgtaggcctgtcttccctcttacttaaatttcatccttcagtgcttgtgtctgcacactgaggatccactttaccat

SEQ ID NO: 34500 - DNA, 1190 bp, Mus musculus
aggaagatatactgatcaacttacatgtcaaaaggatgcttcaactcccctccccaccccacccccctctgccagatgaggtccctccaatggtcacccaggttagatggttacactgtctttttccaggacctctggcatgcgtgatatgaattcaccttagtgcttgtggcataccagttttgtgcctgtgccctggatttaggtaatgtcttgttttgttttctgagataaggtttcatctattccaaactgtcctcaaacttgatatgtagctgaggaccttgaacttctccaacccaatgctgggattacaggtgtacccacataggtcaggcttattctacactgggagtcaaagaaggttccatgtgtgctaggtaagctctctaccaatggaactttatctccaataggtttatgttttggttacaaattatacccagctatgggtctttcttggacttaaagaataatgattcaaagacacttaagggcaccacacttagatatatatgaacagaagttccacagacgtgactgtctctatgtgatgagcttgtatgatttgaatgttaactgttacttttgtttttttttcttaaagcaataagtaattattgaaaaaccataaacttatgaaaaaccgggcatgatttgagctacacatatagcgttagtacttggagtcagctggataaagagtatattgtatatctagtaaggctggctctcctgggcaccacatttctttgtatggccatacccaccattgcttctactgagaacccagtgaagacactctagctgtgacatctaggtgtgaagcaacttcttcttgtgccaggaccacgtccttttcccacctgaacctccatcctcctcatcttgctgccctggccagctgatgccccagactgtatctgtgtcacatccctgtgatgcacagtaggtataggtatcagctacctactgtgatagctaccatcacagtaggtagctatcagctcctttgcctgtcctgtgtgtctggctcctgcccctgccctctatctggtattgtagcatgatatatttactgactctcagagaatcctgctgtgggtctggaggcagcacatactcctagtttgccactgaggtagatagtctcaccttaaaacaaaataggcctctcgtggagaggattc

SEQ ID NO: 34501 - DNA, 1140 bp, Mus musculus
tattgacaaatgttaaatatgaatgtgggatgaaggaaccatgtgaaggaagatccagggagagctagtgactgattagagtggggcacaaaattgactaaatcagcctggagggagaactcaatcattaaagtacttgtctagaagcattagaagcttgaatgaaagccccagcactcatgagaaaaagttggatttgatggcacactcttgcaatattagcacttatgcagagaaagatggagtcttgggattcaggagtcagatagcctaacctgttggctcagttccaggtcagtgagagaatgtcttggaaagtttggcagtgcctaaggctgacccctacacacacacacacacacacacacacacacacacacacacagagagagagagagagagagagagagagagagagagagagagagagagaataagaaattagctaaatattttgtttcagctaaggaagatttattttggctcagtttgagagaatgcagtccatgatcccttatctacatgttcctgggcccatagtacgataatccagagataaagcccatcacaggagaaaccatgctggctggagaataaggtagttggtcacatgacatacacatcaggaagaccagactgatgaatactgctgcttagcttactttctcgttttactcactgtgggcccaacatcagaggatggtgctgctcaaattcagggtttgtcttcccctctcagttaaatccctctggaaacagacatgcttagaggttgttttccatgatgattccatgaagtcctgtcaagttgacaattgggattcatcatcactttaggcaaatactctatgactgagcctgaaaaaaaaagttcttataaagtaatactgacaatggtgtaaaacacactgaagactatgtgagaggcatgtgccttatacatccttccatttcagagatgtttttggtgccctttaatggggccccaccattctgccacagtaacacagatgcctcgctctgtggaaatctgctttatctgatcagaagcaaagtggcatatgcattccccaaatatacttttattaatcagatgaaggagatccccatgctaaagttgtcttaatagactgctaaaat

SEQ ID NO: 34502 - DNA, 1182 bp, Mus musculus
ataaaatctacagcccccagaaactgtatcctgaggacacacctaaaattggtagggtggttatcttaaatttttcacttcaagcatagtttatattctaatcagaaaactggagacagtctttctagtatttactacaagtaaaaatgtgccagtctagattgagtcaaagaaatgaaagctcaattggttatgagttggatgaatatgggcttggcagttatttaacatactaaaagtggagtggaagccctgaagacatttatgtggtatgggcatgagattgtcagtcataaggaaaaggcaatacctgacctaggtataagagtaccaggacatttataacccgcagaacaataggtgctgaaattacagtgtcaacagtatggtctaatggtgtgtagctaggctaatggtattagtactagtgtgtcatgcaaaaagacaagatgattgccgtttgtggttctcagtgtcaaggggaccccaggtcattaggttttctttggagtagcctggtatagcttagtaactgggctgcatttgttcatttttaacatgtatgtttatttgcatattcctggtctctgtttttcttgtgatcttttcatttttttccctttgaaactttaaagatactgaaaagtacagtgtttttgtttcttttctaacagataaaaatagatgtttaaaagcaaatgccaaatcttgcggagaatgtatacaagcagggccaaattgtgggtggtgtacaaatacggtaagatttctgatactgttctatttattctctgatttttagacttattcagagccttgtccttgggaagtgtcagataagatataccattttaattaatgtttattgaatagtgtatagtagtcagaattatgctgtttgacaaaatacttgtcttagttaattttatttgttgtgacaaaaaaccattcttaaggtaacttataaaacaaacaaacaaaacatttaatttgcggctcaaagcagagtgtcagtccatggccgtcatggctttgagcattgccccagacagacagacatggagctggggcagtagttaaaagcttacatcctgattgacactatgaggtagagagagctaactgggaaagttgtgggaatttgaaagctcaaagcctaactaacttcagtgaaaggaaata

SEQ ID NO: 34503 - DNA, 1190 bp, Mus musculus
ttgctattttttatcctaacagacccttgcttcaaatttagtggcaggtagtctgtaacaataatataattgaaaatatttgagaatctagccctgcaaattgatacattcctttattcccctgcatttgggaactagaggcaggcagactctgtggtcaaagttagcctggtctatttttctatttttctagttgttttgttgtttgttgctggagtatgctttcattttgctcagagtggttccttgctaaaggtaaattttccccaaggctcctgtatgttctataagaacttgagttgctacttgcatgtgtgtatatataaacacagtggacttatcttatgtttgtacatgtggagtgagcatccctacttgatactttgctaatgtgaggaaattgttacactttttgttttatgtgactgtgtttggatctttctgcaggtgcaatgaggggcgtgttgggaggcactgtgaatgtagcacagatgaagtgaacagtgaagacatggacgcttactgcaggaaagagaacagttcggaaatctgcagtaacaatggagaatgtgtctgtggacagtgtgtgtgtaggaagagagataatacaaatgaaatttactctggaaaattctgcgagtgtgataacttcaactgtgataggtctaatggcttaatttgtggaggtgggtaagcaccagcagtagctacacacatagttcctctaatgagatcagatatctgagagtctctgggttaacacacagaaggggaggggctttcttctatgttgtggcttgtttttaatttgtgaataattgctgtgattatacattttaccattgttttgagaaatgatctttttcgttgcaggcaatggcgtgtgcaggtgtcgtgtttgtgaatgctatcccaattacactggcagtgcatgtgactgttctttggacactggtccatgtctagcgtcaaatggtcagatctgcaatggccggggtatttgtgaatgtggtgcttgtaagtgcacagatcccaagtttcaagggccaacttgtgagacatgtcagacctgccttggcgtctgtgcagagcataagtaagtactgccaaagtgtttcacatagtcacattcactttactgaccctacaccactagagccagaggagagtgctgatagagtatacttcaa

SEQ ID NO: 34504 - DNA, 1098 bp, Mus musculus
agtctttagctaaagaaatagattttatgacccccaaataaatgacctgctgatcatattttctactgtcttctaagctcccttgttagagcctagtagcttctttttgtttgagacagggtcttaccttgtctggtctggaactcactttgtagatcaggctgacctcaaactcctagaactccattttgagattaaaggtatgtgccaccacacctagcctggaacttagtagcttttaaataggtttttgggacagtgcagtctcttgagtgttcagcactattaattttgtaagatcccatccaactctttgtggtcatgtgaactttgtatatactcagtctttttatgctcacgattaaccttttcatttgtagactgtcctactggtcccgacatcatcccaattgtagcaggcgtggttgctggaattgttcttattggccttgccttgctgctgatttggaaacttttaatgataattcatgacagaagggaatttgctaaatttgaaaaggagaaaatgaatgccaagtgggacacggtaagttatgaaacattactgagagcagtaggatggttcctgaagtaaatgtaacttattaatggtgaggctgacctttaaagtcttctttaaatattttatttcccccaaagttcaaaatccaaagaagttgcatttgctgaaaacaagaaacctcctattcaattaataatttaggaggatatgatactctgtatatatagtggccattgtgttttagttctttagtaggtcagattctaagtatgctcctcagctcatttgtctaatataaaagagaatcttaaatgataccaccagtgtctctggccacactagagctcctcttcccctccatacactcatgattcttttcatatggtttctggaatatacaaccaaattgttatttctaaggctagactgaggggagggctgactagaaggtgggattacaacaggccttcttagatgatttctaggtgtgtttgcacatttggaaatactcagcctgagcttaatgtatattttactctcttcagattgcatctctgtaaaaacttgcttaatag

SEQ ID NO: 34505 - DNA, 1806 bp, Mus musculus
tttagggtttccataagttggtacaagatcttcagagactctaatggcagctgtaaaggttctgtgtggaggccttttgtgaggtagccctctagggatgacggactggagtcagagcacaatattttaatagcctgagacttttgggtcagagctggccttctcaccactgtgtcggattttatctttgccttctaaactctatttgacactggatattggaagagacttattaagacaactgcagctattaatcttgttttggaacactgattttagagagtaactggcaatttgtgttttttttagggtgaaaatcctatttacaagagtgccgtgacaactgtggtcaatccgaagtatgagggaaaatgaatcctactcaggcggattttgcaacaccaagctcacagcagcagcatcttagtcacagtagggtagttttggggctctgtggccagggttttattcacatgcaggtttggaaaatgtacaatatgtataatttttaattttttattattttgaaaataatgttataatccatgccagggactgacagaagacttgagaaaggatctttatccttgtcagctgaggtcacagtgtgcctttttaacccttccttctggaccattggaatcaagctctcactagattgaatgacactgctagtgccaatgcagggcagagctgagcagcgtcgcagcatctgaaccatgactgattttcagcttcacagggtggccagggctggttatacagaatcaaagaacagtccttgctggtggctttgttctttgtttagcctgctggctgccctctgggaattcccagtgatgtatgtggaagacaagagtgttgacagtttccaattaaaataaaattgacacagttgatgttcaagtccattggaaaaattctgagaggtgggaaggaaatcttagctttaaaacctgtgtgccattgtgagttacttgatcctgtaactccgacgccttttctttataaatccaaccttggataaaagtactgggaacttctctgctaaaaagtccctgacttagcactattcacataaaggccataattttagtagcattgctgagtggggaccttttgggttgagcttattttacctttttttttttctttaattcctggtgctcctttatcaccttctctaatcttttaatgtgtctgtttgcaatatgggggttagactttttatcattaccttttcttttccttggctgtacatttacctttttcacaaatactgtaagctgtcctgctgcttgcaggactacagggcctgggcagggccccccagcaacaattcacccacagtgcacctgcacatgcctttcctacatgcttgctctgtctcgaactagtcacaatcttgttttaagtgccttttcattttgacagtgctattaactgaagttatttattaaaataaaaaggcctaaatacattaagtgatttgttttggctctgtatttttattagttttgtgcatttttatgtgttaaagatatggtagagaaacgtggctcaaaccacttaagccaaaatgactcattttagacatgtggggagtgggtagtagaacagattttagttaggtgttttattcttacgttagcagaacattttatgaatatcattttaggctactagatgctggagaactaatagttaagagaggggttgtattttcattcttaggaagaactagggaaatcttaactttcttttggttttagtttatttttctgtaaaactatttccataaaaaca

SEQ ID NO: 34506 - DNA, 1174 bp, Mus musculus
ttctaaagaaaataatccccaaagaaatacataatttaatagttagtattttcagttcatcaaaagactaatgctggctaataggatgtaggtgtcttttctttttatgttcatactggcagaatcatcaacttatcacttacatactctaatcaattaggtagttagctaattgataatgttgtgaatgtgggtgcatttatgccgtggggtcacgtacataagtgttccagtatattttgcatattacatgtgtgagcatgtgtagtggctagtagtgaacattgagtttcattccaactgtgttattcattttgtttcttttgagacagggtttctctttgacacataactaacaggttagcttaagcagactggttagtgggcctcagttttaggtttataagccatttactgagctatctcgccagtcacactgcccatttttcttcctcttttccattactcctgacacccctctgcactcacatagagaccaaaggtggatgtcaggtttttttctcaatcattatcttagtttaaaattatttattcatttgtagtccctttctctccctccccctcccctgaaggctgtgccctattccttgcctggacataatgggagagttggccttggtgtcatgagagcaggagtactgttcttgcctctcatggggtgcagcaacttgggagagcaggccttgtaccttgcctggcagcacagtagagctgactgtagtatgggtgggagtgatgatgtgagcatggcagacctggccccatacctggggagtgtgggcaaaggagagatgcccttccccactcttacccgttaccgcctatggcaggcaggaaaactggccctggctcacaagggtgagagagttgtcactgcccttcaattgctgcagcactcaggagagcattccctgtaggtcccctaggcagtacagtagggctggacttggatgtgggctttgttggtgagctggccctgaaggtgtgagcatgggagggtataccatgctctattgtgcagtagagtggacaagggagagataccttcctccttttcctcattcttcactattatggcatgcgggaagagttggccctgtggtcctgagagtataattgtccctgtccatcactgagtgcaacacttgtgaga

SEQ ID NO: 34507 - DNA, 1165 bp, Mus musculus
cttttagagcaacaagagtagatgattctctatctctctgaattgttttctgatccatgactgtctcctgactctccccctttgatcttccaggtgtttgtaaggattgggtgaggcctgtgtgggtctgacctcacatcttggtcacattgaaggtgttgaagcaaccttctgtacttttccttttgggggctttgttcattttcctccatgatggaatagggccgcttgcgacccttgccaccatcagcaggcttcctcccagttacagtctgcttttcaggaccttcggtcaactctaggggttttagttgtttttgagtctctccctgggtttctgtacctgacacttgttaggctgttctcttggaagctctaggtcttgaggctcctgaggggtcttcttctgagccttgccaggctctctaaataccatcctgttccttcctggcatttcctttttggaccttgtcccaaagcttcagactctgtctctatcccactttaatcctggtatttctgttttcggacttttcctgaagctttgggcttcatctccaacccacactgtgtagattgccacatggagaactgcttggattgctttttcaagtgtgttgactataatatagtactgcctttctaatttccaagggaaagcaaccatatgccttgctccgggtgggtactcttaggttgttcaccctgatgtacaaagaatcactcttccagtagatggttggtccaaggtcacgaacctatgaggctcctttataaacagttgactttgcaggttagggtcagtcaaagaatggacataattaagatgtcaatatcggagactgatttctgtgtagtcagaggttggcagttcaccaggggtccactctcgaaaaatcggaggagttctaagaatacttcgtaataagtatctatcgttcttgggttctgtaaccagctaaatatccaaaacttcgaaataggactcatcttcctagttaatcactagtaagacaccaggcctaaatctagcagctaccgcaatggaagcaaccttaaaaatgatgtataactcagagggttgccactaggcatagccttcaaggttccattgctcggtgtgatgtcacctgaaagaacactaagcaatgtttttgaagggtgg

SEQ ID NO: 34508 - DNA, 1250 bp, Mus musculus
aacttttgtgttaaaatctttttataactccaacttttgtagggtcatattgaagcaattatgtgagattttaatgaagtgaatattcctggacaataaggaagtatctgaagagctgggtgtggtggcgcacacctttgatcccagcactcgggaggcagaggcaggcgaatttctgagttcaaggccagcctggtctacagagtgagttccaggacagccaggactacacagagaaaccctgtctctaaaaaaccaaaccaaaccaaaccaaaccagaaagaaaaaaacaaatatatatctgaagttttatctgaaattgtttgttccaaaaaaaaaaaattatactttctcactgcatcttgctattacattctggatgcctgcccagaaacactttagccagaagattctcagtaattaatagaaatttaattcaacagatactcattaagcacacaccctatactgagtagtattaaatactaggagtgaagttgtaaacaagtaaaagaggttggggtgtagatgaattgaagaacctatgtttgtcattgaagctctagatttagtactgattaccacaaacacagacaaaccagcaggaaacaagaacgaagtacctagggagctgaccttcaagaagggatggctggtacaagcgaacaaataagtaaacatggtgtgtgtggtgatcataaatgccatgtaaagagtataaaagtctttgagcaaaagattacttttcaatggcaaaaataactactaatcccgactaatttattaccagaaattactattcctgatccatttgtctaagctctaaacacaactctaatagtttccttgaacagttaaattgcaaaagttaaaatgttttcagtgaaaccaaacattgttcttgcagtcacagttggctgtttcttactcacagtttgtctcagttcaggacaggggttgcatttttatctagtcagtgaaaccaaaagcatgttcttggaaagtattagtaaaattgatgaatatctacccagactgagtataccagggggaaatttttgtgatttttgtaattgcctcaattaaaaaaaataattaaaaataacatgtaaatgttttaaaaccatcatgttctttaaaaaaatgtttataatgaacaatttttaaaattgtagtaggattttttaaaaattctatttgcatatacattttgttgtctatttttttctcttttgagagggtatctcata

SEQ ID NO: 34509 - DNA, 1099 bp, Mus musculus
gaacaggctgttcttgaacccacagaaacctgcctgtctctgccaagtgctggaattgaaggcaagtgccaccatgtccagctaaatacatttaaaaaaaagatataagatttttagctattcctaaatcaaaatttgaatattgttcttgtgaattcaagtttccaagtaagcaagttagccacgttgactgatcataatgaaagactccgagaggaacccctcgctcaggcctcaggacagtagtggaccccctagaactcatgagagaccaagcttgattccatgagagaccacatgaggctttattcgggggaaagccagagctctggggacaactcatatcccacacaggggtagaggagtcaacctcgtgaggaaaggggtcccagtttttataggctctcagggggaaaggagaaggggggagtaggggggagtagggaatttccagatctaaacaatgtctattctcaagaaatgggtatgggaggggtacaaggaaagagtctggtgcaggtgtagcaactcaggattggcccggctgtggttgctggggagattttcccactcttccccagcaaacaatatcacaaacacctggcaatgggcttcatcagtgggcacacacatgggttccaggaactgtcaaaacattggcagacacacgggttcaaggagtggccagagcattgtgtaactctatttttctaaatcagtgaagctagttctcctaacaatgaaatctatcttgccaatatcagggcttctgtgaccttttacattctgtcaggatctttcaataagaacaaaatctcttgaaatgtatgtttactcattaggctaattttaatatttccttattattgaatattttagaaataaacttaaaggcaggcatagaattgaggcaaagacaggcatgagttctcgtctgctccgaagtctgtgtcccagagttaaaaactggcctagggttacatagtgaaagtgtactggctgtttttttttgtgtcaacttgacacaagctggagttatcacagataatggagcctctcttgaggaattccctcaatgagatctaactgtgccacacct

SEQ ID NO: 34510 - DNA, 1371 bp, Mus musculus
tggcatcccatagcacgaatgctccaaactttgtccttgcatcagtcggtgaacggatttgtgtgctttccttcagtatcgttttattataagaacctccaaggaaagatttgacatatagctaagttagattggtctccaccagtgtaccaatattctaggaaatcgttgagccaaccttgggttttgaatttagttagaatgctactcattcagacgaaatgccaccagtgtagatagtgaaagaaatcaggcattacaatttactagataagagctagaaatcccagggctagttctacaaagtaaacttagaataacagccaagtcactcccatatacaggaatttacaatggcctaggaagaaggaaggttgtggtctaagaaggaactagagtaattacttagaataacagctgagtcactcccatatacaggaatttaaaatggcctacagagaagatggattattcaatagactagaattggaactatggcaagggcataaagcccttggccctggcttctaagaataagctgaccttagttgggcctgctttttatcccagttgtaaacactgtctggttccttgtagcttttatgtatgcatttctgttttgtgtaaagagttattttgcatcgggctacctcagtataccttggttgatcttaatgtatcacctaacttccttgttttcttctgtgatataagtctcatcctcgctttgagacattacattcagatccaacactttctctgctgtttgtcaccctgctgactccttgcccaactgagtaccggaaccctgattctcctgagggttgagggactgactgagtccagtccgaggcacaactgtaaggcatttttttcaattagcaatcatggcgggagagccccattgtgggtggtgccattactggactggcagggggtggtgccatccctggactggcagtcttgggttttatatgaaagcaagctaagcaagccaggggaagcaagccagtaacatccctccattgcctctgaataagctcctgcttcctgacctgcttgagttccagtcctgacttccttggtgatgaagagcaatatggaagtgtaagctgaataaaccctttcctccccaacttgcatcttggtcatgatttgtgcaggaaatcctgtcttaaaaaaaaaaaagtaaatcagacattcatttccatcatttcttctcctttgaaagggcatcctggggtgtcagtcaaaagtataggaagaaatatgtccattgaccctgcaaggcctaaatgcaacttactgtatgttttctaccaatagaattaagaagtgtttgtgagtttttgttactactcatttctagca

SEQ ID NO: 34511 - DNA, 1188 bp, Mus musculus
tccccttaaatgaacattaaaataggttaaaggtttggggagacagctcagatagctggcatagtagtttgcatttgtaaccctagtgctccagcagaaagatgggaagtagaaacaggaaaattcctgcagaagctcaggggccagatactttggaaacttaaggggaaatttcgttatgatgactgaataagtgaggcagggattagaaaaagtcgttatataaagtagcaaaaatgagagatcctgtttgaaacaacctgaaaggcagaacattaaaggttgtcctctgacctcttgtcatatgcaaccaaaggggaaattctgttaataattgattgaaaaaccatgacagggattagaagtcaaactacctgggctttattctgggtgccttaggtggtagatcatttctagtccctagttgccaatgggatgatgccattatttattgatatcattaatattggcttagcattttggcacaatgtgttggtcctgttttctgtgaatgtacatacaccttgtgtgcatgcttccatacattattagtatcctgtctcgttgttgaattgcttcttttctgttatggcttctgaaatgtaggtttctcgtagttatatgatacaggaatatactggaacccctgtgatctgattttttttttccagattagataatatgatgttggaagtttgaggcttttaatgaactccctgattgtctgaagggacaaaaaaaaaaaaaaattagaaatcatctccatatatttggaagaagactatttctgagtgaccaagtagtggtaagagagcaaggtagagcttttaagagtaccagaaagagtcagtgaaggaatactgctggaggctatttatttgtgtaaacagtattataagatgtgttagatagttaaatgccaggattcttggaaatttgaaaaccaatggactttagagctataaaaaattatcagagccaggtgtggtggcgtatgcctttaatcccaacactcaggagacagaagcaggtggatttctgagttcgaggccagcctggtctacaagttgagttccaggacagccagggctatacagagaaaccctgtctcaaaaaaacaaaagaaaaaaaattatcagtctgattttaggactataagagatcattgtctgagttctgcattttgca

SEQ ID NO: 34512 - DNA, 1212 bp, Mus musculus
tattatatttaatagcatgataaataagtaggtccacttttattgcattgtatatatatgtatatgttcacatttttctttctctttaaaaggaaatcattggtggtatgctggatctagaacctagactatggaggaaggggatccgagaaagctttgaggaccagaggaagaaatcattgcagtttgctcagtggtggaaaccatatgatatcaccaaaagtaaaagctcttaagtgtaggttatgtttcattttctatgctgaacccattcagtttatgtctattatatttacaaacaactgtgctttgggctctagggaaagcagcagcagcagcagctggccactctagtcactgacagccatattaggtcaagctgttttcttcctcatggttcctggaaacatggtttgggtgactgtggagtaagaacaactgtatcaatattatgggctcacatttcattctgtgtctactagatgtaccaaattactcagttactctagagatggacttgtttctagaggtctagcaaggctacaggggaaagtgtgtctgcttccaggtagagtctgccatctaggttcttttgtgctttttaaacaagactggatgtattcagtactaattggaagtttattttcatagtttcatggaagagtttctttactaatagcatatagtatcactatgtactatcttggtttaaagaaaaggattaaagaattaaatgataaggaaaatattcataaatacaaacttgtttgttctagaccttgaaatagtctgaattttggtaatcataaaaacagttgttctaaataacacaattttcatttgtttgtagttcatgtaaatgtagccaaattactgtattgggattgtaatgtctcaaatgttaaagtaaatgtccaggagatgttctgttgttccaacttgattaaaggtacttaagttttactgttctcaacatttgatcttgagaaaagcttggttttataaaatatgaattgtattctttttaaacatgcttttaaaaaaccaaatgttttgttaatgcctagataaaggatgccacagactaactcattacatgtttattttaatgtcaggttgtcaatgtttccatgtatgttgtttgtatgttacaaaggcaactgttcttttttcaaatttcacaaatgtattgaagcttaatagctttaactt

SEQ ID NO: 34513 - DNA, 1177 bp, Mus musculus
tgttttttcacgagatgaagatggagctcggtggctgccagagagattaattcgtcagatgaacacagattctgactcttctggtaagtatcattctaaagactaaaattccttttgtgcttagaattcagctgagagcgaaagctcccaaagctgttctccagctactctctgagccagctcccgacaggaggcctgagactagcctcagctttacaatttgcatttgaataaagtacctagacttccccaaaagaagttctgctttcctaccttctcactgtcgagattttgtctttcaagcaggtaaatcaacattctcgaagcggaccagcggatgtgcatccccgcccccctagagcacacaggaggctgctgttatctcctttccaaggacatttccagcacgtggctttcagtctgagttaaaaattaggtttaccaagagggctagaagagtagatatttctatattaataaagattggtttttattttgatagacaggcttagccccttagctgacctctggcttttcacccttgctgttactgcaaggtgtccttagctcaataaggctgtggaaaaaacagggatgagaaggaacgacttccagctcctattttagccacaaatcgtggtgttactaacgacataattcttgcttaggctttgctaaatctgaggttgataattctcctttaggagctgcacagcactcagaactgtgcatactggtttgtgatcgtacaaattcagtatgggcattgcttggtgcagagtcactgcaggggaaggtccagcttgaccatttctgagtttcctgtgagataaacccggtttgaaagaggttggtaccaaattttggctaaaaatgaaaaatatttttcggctctgcctcacctcctcaaaaggtatcaagagccacaggtgtgggtcttatcagtacccatataagcgctgccttatttaacttaattaataggggggagagagattggagacgtactattgaaagggcaagcccttcactgcctcccacccaaataaaaaagccaattggctttgtactacagagccggccgaaccccttctccctgtttcccacctatcatccaaaaatgcggaggtcaactagaaagttacctaccaagtactaattagcatcttaaggtcag

SEQ ID NO: 34514 - DNA, 1196 bp, Mus musculus
tatcatgaaaagaaagtttaccaaaaaggagtgggaaacaatcagaagttttaatgatgaatggactcagctggatatgttttaccggcactgggtacaattcctttgtaattctataattattccattatattcactagaaataagagtgaaagatttgtagttactgctaataccatatagtgcttgatacaaatggacagattcttgagaactttgggatttttttaaaaaatctatataactctatagaaacacatgaaccttatttaacagaaaatgtcacatcacagttcttataatttagttaattctcttagcaaccctttgaggatggcattgtttggtcattacagtttacacttgagagatcttgaataatttacacagactgctactaagattgttttcggtgctattacaatgagcaaaataaaacaattacaactttatagctgtaacaaacatagaaatcaaaatgtactatatctattaatgttataaaaagttttagctattgaatcctctaagagaaaatgtccctttttctctctaggcactgaaagaaagcttcataaaagccattggagttggattgggatttgaaatgcagcggcttgaatttgatgtatctccattaaacatggacattggtcaggtttataaggaaacctgtttgattttggatggggaagaagaaaaagaatgggcctttgaggtaaggaatttattataattattatagctaagacattccatatttattcacgtatgtgcgaataatctagattgttcctgaaatttataagaatgtcaacagtgtagagtacatatccattgtgagcttgtgtaactttctttgaaagtaattcaattccttttaattagtaattaaaatctgatcattaaaactatctttcaagacataatggtgcctgcattcagtttcagtatttgggatctctgtgaattggaatccagcctggtataataaaagcagttgggatttgtgttttctaaatgttactgtctgtcctagttagggttactattgctatgataaaaagccatttggggagaaaagagtttatttggttcacacttccacttagtccatgctaaatgaaatcaggagtagaactcaggcagagtacaaacttggagccaggagctactacagatgccatggagaggtg

SEQ ID NO: 34515 - DNA, 1209 bp, Mus musculus
ccaggcccagcctgtaaactccggctgcgattggcttgtgcgactgtctcgttagctctttctccagagtgagcagctaaaacggttctgagaaactctggtcccgccctttccgaggagagcgagctaagctcacaagacgtcacgccgtgccgcagagctctgggttgactctgaatctccgccccaaaccgccctgccggcttccgtaggagacgtacaggttgggggcgaagctgcgtcaggccacgcccccacgctcaaccctgaactaaaggtgggggtgggggggtctgtgaaacttctaagccgggcgtccagctacttcgcacagacgcctgaaaaggggtggagcctggtaacgtctgttgcgaggtgctgcccctttgcgcagactccggagcgacggggcgtggctacgtcagcgtctgctctacctggcttgaggatcagcggaccgagccggtcgtatggtgttccccgctaagaggctgtgcgtggtgccatccatggagggcgttcgttgggcattctcctgcggtacctggctgccaagtcgagccgaatggcttctggcgatgcggtctatccagccggaggagaaggagcgcatcggcaagttcgtgtttgcccgcgacgccaaggcagccttggtacttgaggcctgcgacttttgggaggcgggccgggctgcggactcccacgtgcgctcgtggcgttgcggtctcggagcctccggagtgcgtgcgaccgtcttcagccttcgtatcccggaggcctgggtcactcacatctagtcttcccttgtgaggttgcctgtggagacccttaccctaaaattggaggcggggcctatggagtaatcgtctgtttactaatgaatgtgtttatactttgaaacttagaagccataaatatactttctaagcagtgtacttatgcgattagtagatagcaatacacaccgtgtgttttatgtctgaacaggctggtcgtttgatgataaggaaattagttgcagagaaattgaatatcccttgggatcatatccgtctgcagagaacttcaaagggaaagccggttcttgcgaaagactcgttgaatccatatcccaatttcaactttaacatctctcaccaaggggactatgcagttcttgctgcagaacctgaggtacaggttggcattgatatcatgaagactagtttt

SEQ ID NO: 34516 - DNA, 2519 bp, Mus musculus
aaacaatcttgagacaggtctggggagaaggttcagtgtgtaaatggcacaaacctgacatttctgcaacttcccttcaaagctgactgctgtggcatgcatctgtaacagcaacactgctatgacagacctaggagaatagccctgaagcctccagtctgctagcttcaagcttgcctcatgggaaacaagaaaaaccctactttgcgcaatggcccacattctcctgcacttacatatacatgtacacaaataagcaagaaatgaaataatagtaattaaaagaccagtaatggagcaaactgataatgacgaaagcaaatactaaattcgcgttttttttcttttctgtcagtttgagattgaggaggaggaagagatgctgtcatctgtcataccagattccaggagggaaaacgagctccctgacttccctcacattgatgagtttttcaccctcaattccacaccatccagacccacctatgatgagccccatctgctcatgaacatagagaaacagaagctggagctggaaaaacgccgacttgatattgaggcggaaaggctgcaggtggaaaaggagcggctgcagatagagaaagagcgcctgcgccacctggacctggagcacgagcgcttacagctggagaaggagaggctgcagatcgagagagaaaagtggaggctgcagctggtcagcaccgagaaaccggctctagagaacgagctgggccagggcgagaagtccatgctgcagccacaggacatcgaagcagagaagctgaaacttgagcgcgaacgtctacagctggaaaaagatcggctgcaatttttgaagtttgaatcagagaagctgcagatagaaaaggagcgcttgcaggtggagaaggagagactgcggattcagaaagaagggcatttgccttgactgttcttgttcctgggcttagcaaacaatgaggaattgtagctttccccctcagttcatgcaaaggtggtcctggattagctaccccatcaccacccctgtttaatgtcagtgtttttagtaggaaaaagataggaatacattggtagctgtgtgctgcagtagtgtactatataaatgctctgcccaacacaaacagaatagcagaggatctgataggcacttccacattagtaatactgcatagagccctgtcttatttgtgcaccccaagtttacaatgatgtctgtagtaaagtttctatccagtgattctccagtggagtttgggctcccagaagacatttgggactatgggatgttatttggtggtcaaagtaaatgggtgtaggatgctaccagcctcaggagaggcttcaccatgtttagcatagttgtcttcacaagaaagaattacccagtccaagatgtcattagtgccaagtttgaaaaactgtacacttggcctaactgtgcatctttatagctatgttctatagttttagaatattaaaactttagatatttatgtggttagatacttaaacggccaaaaccattttaactgtgagacattactatgtagtatgttgaatatagggagtggtggagattgtaggtccgttattcaaatggtattttctatcaatagactgagacttagaaacctgggagcatctgagattgtttaaaatgtgtcattttgaaaggcagttgccttcaagaatcaacacatgactggaaagctttagttctcccttctttgaagctgttgtcatagtttttatacagaactaaccatttcagtcatgtactgaaatgttatgtaagagaatgatagaagctagtaaaaatggtaccagtgccaaaaaggtaacagaaatccatgatgtggaacccaatgaattgtcgattgatttctaagtgaagaatagtcatttgagactgagagatgggggaaatatcctctgcatcagtgacagtggtgttgaaatgatagtagtaactgtgttattgttagggaagatcttgcttaacttaaaatctacaggagtctgtgaaaaggtaccttctgactccagaatctgaaattcagagaaatcctgcagaaagtaaacggctgatactttatatagcattgtgtttttatctttaccccttcaggatggctaaacctgggaattctaaatgcaaagggcagacttcgcctgctgatttgcccacagtgtcctgattgtggtttatttcagtagtgtactttctcatgcacaacaaagttgcaagtggttgcacgaattcactttgtgttttctgttttctggggctgatagctttaatacaacacttctgttgacacactatcttgattctgtattctttgttaatttaagaatggctagaaaccatgattgaatataggtatgcaaagggaaattatacacatgattacttactctgattttgacatagtgttatttttttataattctattaaatacttctaccttagaaataaattttcctgtctgaaagtttatcattcagagtt

SEQ ID NO: 34517 - DNA, 1722 bp, Mus musculus
ccatgggcccgagagcactcttgaataaaaatcctcttgcaatttgcagcaagaccatttctcgtgagtgattttggggtgtcgcccctcctgagtcagaacgtgggggagtcctcatgttgtgggtctttcatttggtgcgttggccgggaaatgtgaccacccctcacacccgagaaccgacttggaggtatggggatcccctcttgtgtgcgtgtgtgccagccggtgtctctgttttgagtgtctgttttctgaaacgaacattggaacatgtgcttgttatgttgtttgtgtcttgtcctatgtttctgaagcacggcaaagtctgagtttggatccatctgagtttattgaatttgtgtcttggtttcagggttacgagatcgtgggtttgagtcccacctcgtgccttggttttcaggttgtgagatcgtgggtttgagtcccacctcgtgctttggtttcagggttatgagatcgtgggttcgagtcccaccttgtgccttggttttacacctggcagagtgaggaacaagtgtgcttctctggttttggtcgtctaggtagaagtggacgatggtgtttgtagacaatgggatgatggggttttctgaaatgcgcgcgtctgtatttgcagctgttcttttgggccgtaaggaccggaggactgtggtcggcagacgtgctaggaggaccacaggctgtggccctgggggacgccctgggaggtaaggagagccagggatgcctggccgtctctggatcggtcagagggaccgagttttgttgaagcggaagcttccccctccaacatcgtctaatccttttgcctgcttgtggaggacaagaaagggtcgagtgtgtctggatttgttggtttctgttttatgtgtttttgtgtacgtgtttagagctatgtgaaaatctagagaaacaaaggtaattctcataggtgctttataccctgactagagatagtttacacctgagatatgagaaaatgggttttgagaaaagcagtactctctgactatctggagataatttggtaataaaaaaataaaataaaataaaataaaataaaataaacagtattaattggtctttggaaccccgcacctgtagttaggaatctagtgtggctagagaagccctgctaggcgctgattataaatgctgttcttatagggaccagcagcttctcaagttctatggtaagggaacagatgactgtttttcccacaaaaattggattcatcaggtgacaaggtgctcctctcttgaaattacagctagaaaaaaaaaaaaaaaagaattttgtttggtttaaatggacaaatgtatacgaccatttcatttttgttcctaaatagtttcaaaagtataaatatgttttatatgtcttggttatagattagtggctcataagttattggttatgattaaaaatttgtaacattggtaacaaaaagttgacttaaaactggtaactctgggttagagtaatttagaactacaacatgcagcatgagacaacccataggaacaggtctctaaagatacgcctgaattgggtaatattctatgtaattcttatcctagaaacccgatttataatagatatattggcggctacaccttcttgtgtttgtgtgcaggaacagacagccaaactttgtaacaagtaatgtttttggagttcatttttaaagaaaatag

SEQ ID NO: 34518 - DNA, 1122 bp, Mus musculus
tttttttgtttgtttgtttgtttgtttttcttttgttttttaaatttttttaaaaatatagaatggcttcctgagagttgcttttagctaaaatcctgagaataaaatatccctatgacatctcttctgtcctagtgataaaccagagtgatccagtgagtctgggactacctcccgatacataccatctcgccatgaagagacaggatcagaagccaaaaaggacaatatcctaaatatgctaaatatggatagtaatatgtgtacactatcgcttaaaaggagagcaaacaacaaaggctacaggacaaacttgcctgcctaccacccctttaccctcttggtttgaaaaggaggggaaaatgttctgataggtctttataaagaaagattatagacggtgagcaagggtgggtttgaggtgtctggggtaggtgggcatctgacatggcttcttgtttggcatgtttaattatgtggtttaacagtcatccttgcaatttaaggtgacacttaaaataaaattctctcctgatgatgacttgagccctgacactcaatgggagaatcagcagaacctgtacggttttatttggagttaacattctgttgtaactttaatttttttctttctttttttctttttttcttttttttttttttttttttttttggttttcactggacggaaaaagatgttcattttaaatattgaagtgtacaagttgcttttttacaataaaatcagtgtgtacacaaaggacctgatgcttttctgtcagaacagatgctcaacagaccttccaagtttgactgcataatgacatcacgtcaaactttgtctccccaacttcgtattttttgatacgcactttgcaggatgacctcagggctgtgcagattgagaaagggatttgaatcatgttttaacgtctccgtactgatttgtgggcacagcttgctgctgtggacttgtacccttgatttttatctcaatttgacatattctttttaaaatgggccttttcccaaacctcacggcagcacctatctgctcccaccgttactgaccttttgctctgtgccatctatgagggacagccactggtgtgtcctcattgg

SEQ ID NO: 34519 - DNA, 1227 bp, Mus musculus
aagctctcagttactgctccagcctgcctgccaccaggccgagggatgtcttagctgatgcccaaggtgccaggtaaacttaactggagcctgatgctgtgcatctgcataaggctggtcctgggaaccaacaaacaccaaggcgataaggttcccttggggagagataccatgctgggtgacaccactataaaggggacatttcacctttgtgtgtaccccttaattcttttataccaatacatttgtgcatgccttgaatactctttaaaaatggtaagaaagaataatctattaacaaaaacaatgtgttagctccaggctcactactgtgtcaaggaactcctacttgggcctatgtttgccttctgtttccattcttcagcacttccaactgaaatcattacttaccacatacttgtcttggttcattgctcaagttatatagctcagttgtagctaaactagagaaaaaacataagattatgactgcttttttgaataataatattttcagtaatttggtaaaaccagtaaattgatgtgaaaggaatagtttttgccatgtgtaaaagagtcagctttgtaagccgtatttgtccccacgtctgggtatagcaaattggatcgccagggtagccagttgttctgtaaggtaggttgctacatccactccagtagtgacaagtgcaacaggccccgaaaacctgggcactgtcccgaggcaaaaagttcacagaaacttaatctcctggaactgtggcatcctgtataacaaatgctccaatgtccttgctttagttggtaaacggatctgtgtgctttcccttaatattgctttattatgagtgctcctacagatagatatttttgacatatagctaagttagattctaggcagtccttgatctgagtctgggcatggatagccaagtcactgccctacacaggaatttaccattatctaggaagaaggaagtttgtgatctaagaaggaatcagagtagatacttagaactatagatagctgagttacacccataaacaagtatttacaatggcctagggggaaggtggacttaacaatagactagaataggagctatggcaagggccggaagcccttaaccctggcttctaagattaagtgaaccttaggcagaggtgtttttgatcccagttgttaaacattgaattttatcccagttggttcctgccagtcctgtg

SEQ ID NO: 34520 - DNA, 1187 bp, Mus musculus
tctcaccatcaatggaagagtgttcctctttctccacatcctcaccagcatctgttgtcacctgaattcatgatcttacccattatgactgctatgaggtgaaatctcagggttgttttgatttgcatttccctgatgactaaagatgttatgtgcttctcgaccattcgggtttcttcagttgagaattctgtttagctctgttccccatttttaaatagggttattttgtactctggagtctaacttcttgagttctttgtatatattagatattagccctctattggatgtgacattggtaaagaacttttcccaatctgttggttgccgttttgtcctattgacagtgccctttgccttacaaaagctttgcaattttatgaggtcccatttgtcgattcttgatcttagagcataagtcattggtgttctgttcgggaaattttcccctgtgcccatgtgttcgagaattttccccactttctcttccataagactcagtgtatctggttttatatggaggtcttcgatctacttggacttgagctttgtacaaggagataagaatggatctgaagaggtctgcaaccctataggtggaacaacaatatgaacaaaccagtaccctcagagcttgtgtctctagctgcatatgtagcagaagatggcctagtcggccatcactggaaagagaggccccttggtcttgcaaactttatatgccccagtacaggggaacaccagggccaagaagtgggagtgagtgggtaagggagcggggggggggggggtcatagggaacttttgagatagcatttgaaatgtaaataaagaaaatagctaataaaaaaaagaatggatattcagttctattcttcatctacctgcctgtctgtaccaataccatgcagttttttgttgctgttttgttttggttttttttttttaaatcaggaatgatgattgccccagaagttcttttattactgagaacagttttcgctatcctggttttttgctattccaaatgaatttgagaattgctctatgaagaattgagttggaattttgatggggattgtatagaatctgtaggttgcttttggcaagatggccatttttttctatattagtcctgccaattcacaagcatgggagaacttcccatcttctgaggtcttcga

SEQ ID NO: 34521 - DNA, 1207 bp, Mus musculus
tcttatgcattggtaaaatggaaggaccccctgactaatgaatggaagggtccagatccagttctaatttggggtaggggctcagtttgtgttttttcacgagatgaagatggagcgcggtggctgccagagagattaattcgtcagatgaacacagattctgactcttctggtaagtatcattctaaagactaaaattccttttgtgcttagaaatcagctgagagtgaaagctcccaaagctgttttccagctactctctgagccagctcctgacaggaggccggagactagcctcagctttacaatttgcatttgaataaagtacctagacttccccaaaagaagttctgctttcctactttctcactgtcgagattttgtctttcaagcaggtaaatcaacattcttgaagcggaccagcggatgtgcatccccgcccccctagagcacacaggtggctactgttatctcctttccaaggacatttccagcacgtggctttcagtctgagttaaaaattaggtttacctagagggctagaagagtagatatttctatattaataaagattggtttttattttgatagacaggcttagccccttagctgacctctggcctttcacccttgctgttactgcaaggtgtccttagctcaataaggctgtggaaaaaacagggatgaggaggaacgacttccagctcctattttagccacaaatcgtggtgttactaacgacataattcttgcttaggctttgctaattctgaggttgataattctcctttaggagctgcacagcactcagaactgtgcatactggtttgtgattgtacaaattcagtatgggcatcacttggtgcagaggcactgcaggggaaggtccagcttgaccatttctgagtttcctgtgagataaacccggtttgaaagaggttggtaccaaattttggctaaaaatgaaaaatattttttggctctgcctcacctccccaaaaggtacccagagccacaggtgtgggtcttaccagtacccacgggaggaatcgggtcaatgtccacccaagccaaggttaaaagcccactcatctacggatgagaaaatcatttgatcacctcagttaagcgttgccttatttaacttaattaataggggggagagagattggagacgtactattgaaagggcaagcccttcactgcc

SEQ ID NO: 34522 - DNA, 1383 bp, Mus musculus
gctttgaataactagtgtggaaaaaaatagcattctaatgaaaatcaagtttgatatgctggttttgaaagtattgacagtagttgggatatttttggtttttgttctgcatcaaaaggcactgattcctttgagcaagtaagagctttctgtagttgcttcctttaacaatagaatatttgataccatgttgtatttcctcagctttgaagaacagcttttcttaaacgctgaggagattttacagtttttactcaagtcagaacttatttttaactgggacacagaaggaccattctgggttttttttttgtttctatgcggtgtatgcataaaacacataacttgtttgttttgttttgtttttaactgaagatgaaaatacaagttgatgagattccctccttgtgaacattttcctgaaaccataacctttcagattaagcagattctgtgatttattggctagtttaaaggcaacaacatcagaattgatgtattatcacataattacagtggtatatttacagagtgttgtacgcgtcccctttggaaaatggaattagactaagtaatagtgtgatttaataacaagacttgggctagaggcagatagagctctgacctaagaggccagctgagaggcagaggcaggtccaggtcagccactctatgtaaaggttcctctggtgaactttgtagaaagttaaagtctgtactaaaaggttatgatttatggaatctgtttgatgtggaaatagaatcgtggctggagctgacgttgacaatttaagacctgctaagtgagtgaacaaaatttgctaatatcatttaatgacctgcatgctttttctttaccctgactcattccttactggtaggatcagtcttttcagtatttgggttatggttcaatgagccagaaaagtaactttgtagtatcagaatgtcatccaactgtatatttactttattgtaaataatggtgaacagtggtcaataaatagttttatattcctttaaaaaaaaaagtgtaagccatataaactcgttccttcccaacttgttattggtcatggtgtttcatcacagcaatagaaactctaagatagaatttagtaccaggagtaagatattgctatgatagatccaaccatgtttgggggaagattatggaaggtttttggaagtttgggctagaaaatccattgagtgttgagggctcagtgggttgttctgtgtgagcttcaaagataagaatattgtgagcagtgcagaagatggaggcctggcttgttaagtttcaaaggaaaacttaaagattctatcaggggctggagagatggttcagcagttaagagcactgactgctctttcagaggc

SEQ ID NO: 34523 - DNA, 1190 bp, Mus musculus
cggaaagaagttctgctttcctactttctcactgtctttcaagattttgtctttcaagcaggtaaatcaacattcccgaggcggaccagcggatgtgcatccctgcccccctagagcacacaggtggcagctgttacccccagtctcaggacatttccagcatgtggctttcagtctgagttaaaaatttaggtttacctagagggctagaagagtagatttttctatattaataaagattggtttttattttgatagacaggcttagccccttagctgacctctggcttttcacccttgctgttactgcaaggtgtccttagctcaataggctgtggaaaaaacagggatgaggaggaacgacttccagctcctattttacccacaaatcgtggtgttattaacgacataattcttgcttaggctttgctaattctgaggttgataattctcctttaggagctgcacagcactcagaactgtgcatactggtttgtgattgtacaaattcagtatgggcaccgcttggtgcagagatacttactgcaagggaaggtccggcttgaccatttctgagtttcctgtgagataaaccgggtttgaaagaggttggtaccaaattttggttaaaaataaaaaatattctccggctctacctcgcctccccaaaaggtaccaagagccacatgtgtgggttttacccacgggaggaatcgggtccatgtccacccaagccaaggttaaaagcccactcatctacggatgagaaaatcatttgatcacctcagttaagcgttgccttatttaacttaattaataggggggagagagattggagacgtactattgaaagggcaagcccttcactgcctcccacccaaataaaaaagccaattggccttgtactacaagagccggtcactccttctccctgtttcccacctatcttccaaaaatgcggaggaatatcaacttagtgctattttcacatctttcagtcaaacttagccagagttccaacgccctacttaaaattcaactagaaagttacctaccaagtactaattagcattataaagtcagagtctgcagctccaggcctttcagttagttgtttactagaaaggacagtcttaagccagatacagtttaccataagaaaagttaaagattcccagtgaagcaagttt

SEQ ID NO: 34524 - DNA, 1175 bp, Mus musculus
cttgctcaggggtggagcttcctgctcattcgttctgccacgcccactgctggaacctgcggagccacacccgtgcacctttctactggaccagagattattcggcgggaatcgggtcccctcccccttccttcataactagtgtcgcaacaataaaatttgagccttgatcagagtaactgtcttggctacattctttcttccgccccgtctagattcctctcttacagctcgagcggccttctcagtcgaaccgttcacgttgcgagctgctggcggccgcaacattttggcgccagaactgggacctgaagaatggcagagagatgctaagaggaacgctgcattggagctccacaggaaaggatcttcgtatcggacatcggagcaacggacaggtacacatgctagcgctagcttaaaatttcagttttgtaaagtgttgctgaggatgcggtaggatacgaattaagcttgaatcagtgctaacccaacgctggttctgcttgggtcagcagcgtgttaatcggaactagaaacggaaacaggcaggttagccgcagctttttaggaagctgcttaggtggaagaagaaagggtttattaaaaggaataggcggattgccccagttaataaaaaatgcatcataagggaggaaaatgtcccaaaaagcagagagaaatatctctctgggccttatagcaggagtactctgttaccttttgtgtcttgtctaatgtccggtgcaccaatctgttctcgtgttcgattcatgtatgttcgtgtccagtctgtatgaatgaatgttctatgttttgtgttggataataaagatggtataaaaaactttatctgcaaagccgagagctgccacgtgtttcatccaggaatcagacacgtggcgggagggcccctgctggaaaaactgttcgttttaggaaataaggtcgagtgcacagcctctaagtttcagagtaaaaaagctaataaatggttcatgattaatgtgtttgacaatggtaaagtgttttttatttttatggttgtagctacaaaaattattattctctgattggtctaaatgtaactgcttcatttggttcctttttattggtaatgtgctctaagtgttttcacaatcagctcataagttgttggttaagattaataattg

SEQ ID NO: 34525 - DNA, 1171 bp, Mus musculus
tgtatgctttctttcttcagtggaaaagaatatgaagtatattccaacagaagacgtttcaggtaaaatagagctagtgcttcagcacatctccgttacttttagaagctggttttcactaatgttcttctgttctcaggcttgtcattggaagagcagttgcggagattacaagaagaacgaacttgcaaagtgtgtatggacagagaggtttctattgtgttcattccgtgtggtcatctagtagtctgccaggaatgtgccccttctctaaggaagtgccccatctgcagggggacaatcaaggggactgtgcgcacatttctctcatgagtgaagaatggtctgaaagtattgttggacatcagaagctgtcagaacaaagaatgaactactgatttcagctcttcagcaggacattctactctctttcaagattagtaatcttgctttatgaagggtagcattgtatatttaagcttagtctgttgcaagggaaggtctatgctgttgagctacaggactgtgtctgttccagagcaggagttgggatgcttgctgtatgtccttcaggacttcttggatttggaatttgtgaaagctttggattcaggtgatgtggagctcagaaatcctgaaaccagtggctctggtactcagtagttagggtaccctgtgcttcttggtgcttttcctttctggaaaataaggatttttctgctactggtaaatattttctgtttgtgagaaatatattaaagtgtttcttttaaaggcgtgcatcattgtagtgtgtgcagggatgtatgcaggcaaaacactgtgtatataataaataaatctttttaaaaagtgtttctgatgtgattcatgagattcctttagataatcagctgtgtatgctttgtaagtaaagtattgggtgaagacttcgtcagtatcaaaaaattgagataaatctacatgagaatttacaagaaatagtttacgtgcctggtgtgtaggtgtttgttaggattggaggttaggaaccagacattgataagtacctttgtgcaccaaagtatatatgacctgttccagatgtaggtctgataggcttgtaaagatttgaagtgttattttttttttaaagcaggccgtgatgttgcatgcacacttcagtctctga

SEQ ID NO: 34526 - DNA, 3354 bp, Mus musculus
cacacaggcagctctgacactgtgtgcttcagttggtatgggtatagctacgctcacacaggcagctctgacactgtgtgcttcagttggtatgggtatagctacgctcacacaggcagctctgacactgtgtgcttcagttggtgtgggtatagctacgctcacacaggcagctctgacgcttctcacagaacatttgttcatccctcctcaaaactaggagacaccatcagccaaagcaccctgccgtcacagcagagccgcttccccgactacctggaagccctccctgggacaaatgtggaccttggcacactggaaggagatgcaatgaacatagaaggggaggagctgatgcccagtctgcaggaagcgctgagttccgaaatcttggacgtggagtctgtgttggctgccaccaagctagataaagaaagctttctcacgtggttatagagctgcagggagccactctgagtctgtgagggatccacagagcctaagatgtgcacgcctgaaattcagataagtcagtgggggttctctggctaacacagaaaacagatgaaccagtgtccatcgttgttccgcttttctctgcccgtcgctgctcttacgttggttgctgacctcttcacggccggctctaaagaacccgaaccgcagacagattcctttgttaactctgctatgataactacgttctctgggattgctgggggatggcctgctggataatggatgttctgccttttgtccggtggtcctttcaccatcactttaactgaacacacagactgggaactgaatgctctagaacattgttcaagaggtggtttcttcagctgccttgggtccaacaagccagaggcattgcgtctgatctcgtggaggacggaggggacccacgctgaagactggtgaactttccattcttctgttagcgatgccgttaggccatagtgacctgggtcttatcttagacgcttatgaggcatgagacagcttccatagaaatatattaattattaccacatactctagattaggtttgaatgaatattttctgtgggtgttttggttggtttttctctgcccccccccccttttttgtggttggtcttggtggaacgtaggcaaattaatgaattcgtttatagctgtagcttggggtgggcaataccattcttttggtgggaaatctgtatttcttggttttttaacatcctatttaaatcttaaatcttggttatctcctctctacatatatacacactcttattatgtctatggtagtgtgatagcagaatatatctttataaacatttctttcctttccagtttattttttaaatggtagccttgaacatatacatttagacacagtagtttatgtttcacaaatactttaaattctggttggagcaattgcaggtgtttgagggagggtgggcagtgttatagaaagggctctagtgggtaaagccaagaggcgcctcttgccctctgtgcactgtggtgacaacagaagccaacagtgagtggccttacttcccttagcctgatttcatgccatgtagtgtctgagctgtaagctttagagaggcaggcctgccttctgcctccacctcagctttgggtgtacactcagatactgagactgataatccacgaggtcaggttgagtgtcacctacaagatcatgcttaggaaacctcctcccgtgtctgctgagtggaccctggggtagtgtgcagaatgctgcgaggtcataggtaaagtgatcagactagcaagtgtggggtagttggactgagcagagctacaatgaagcatgattatggctttatttttgcaagattactagagtatgtgtctccaggagtaataatggtttccaaagagtattttttaaaggaacaaaataggcatgaattaactctgtgtataagctatgaagtaatagttggttatgaattatagtggcaccagctagcacctctgtcatttaagggtctttgagtgcttctagaagaatcccttattttcaagggttcataatgaacaacaattttcccccctggctaaagctgctactataaaatcctcagcttaggaagatagaaatcttttggccctttgatttagtatagcacaagaatgaagtagaaaagttttattcagtactttgagtgctcaaaaaatacaatcagtgtattatatgtgattcataggtcagtcatttgaggccattgactctaaggcttttaattagaaactagttgaagactcacccttgaattaagtctggggaaatggcctcccggaggatgcagtgactgtagaacagagatgaaattctactctagttgacaattgagcagatggatgatccacaacagtgcgtggggaatgggcagatgataggcgtgccgagcgcctatgattggccagcagctgcagaataaaggatggcgtcttctgtgggcagactagctgtagtgtggggagggggaggggaggtgggcatgagctgttgaaaggttaccgggctatgatatagaaaagcttttatgaacttgtttctcttcagtaaagacttatctcgctctcagtaaagaagttcctaagtttgcagctgcttaacctcccccacaaggtggatgtgccgtcttcctcctccctcagcatggtgcgccttgttatacctcaatgtccagcagcccctggtgcctgacagtgctctctgaccttatcaaaccctccatgctgactgtgggagatttaagcaccctgactctcactaaatttgaatcacggcctgaacgtagtctttcttgttgtgtccagcagtgtttaatgcttcctggctgtagtaggtagcatacaggtaagaacttaactggttattcttgaatttcttttacaataaaccaatttttataatcttaaaatgtgtcaacttttttacatttgtgttcttttcaattaggacttctgagtctctctgggggaaaaaagatgagtttggttggggtttcagagcaagcagtgttctgtttcataactgtttcctaaatgcagagacttaacttctaaagagaaggaaaaaaaggtcccaaggaagcagctgtggaatgtgcgatgttgctgtgataagtgttaatatgaaagtatgccttagtcaggcagtggtggcgcacgcctttaatcctagcacttgggaggcagaggctggcagatttctgagttcgaggacagccagggatacacaaagaaactctgtcttgaaaaaccaaaaaaaaaagaaaagaaaagaaaagcaaaaaaaaattgtgccttacagaaaacact

SEQ ID NO: 34527 - DNA, 1175 bp, Mus musculus
ggagcccgcgcaacagccgccgccccagccggccccgcaaggccccgcgccgccgtccgtgtctccggccgggacccccgcggccccgcccgcacccccggccggccaccaggtcgtgcacgtccgcggggactcggagaccgacttggaggcgctcttcaatgccgtcatgaaccccaagacggccaacgtgcctcagaccgtgcccatgcggcttcgcaagctgcccgactccttcttcaagccgcctgagcccaagtcccactcgcgacaggtaagggtatcccgggggcgcggggccgcgtgggggtgcggtgctgggggttgttttcgcggagttggccgcagggggggtgcacaatgcgcgcgcctccgctccgcaccttcgctctgacgagggggaggggaggagggggagggggccggcgtcttgtgcgggaccccagccgggggtacccgatctccccttcccgcgccactgcagtctccggtggagctgtgttaactgccctcttgttttcgcgtgccggtgaggggtgggggttgaactggtccattgagtttctggttccttctcccggtcccctccccctccctctcccgaaagcttttctgttctcgcggcccaggcgctctccggatgcagggttcgggctccccagcccgagcgaagctccctcgaccccccactcgcctccgccgtgccctggaactcgcgcgggcgggatcctttcacactcggtgggctcacgtgtccttttcctaaatcgtaacctattatttactgttcggcccgaaagcttttaaatgagccacgtctgtgtgttgcgcaggagctcggctgcgctcacggtgcagaggtttctgcgccggcctttgatagcgcgttgcaggttgactcataggccgagttctgcccggctcaactgtgattaaaggtaatgtttgggaagcaatgactaattccaagctcgccattgctctttaactgactgcggatgtgaacatggctgcttatccgtatccacgacgcctggttattttcccaactggatccagcacagaagtgaaaccgtttcaaagtattaacattccgataggtcctggtagatttctttagtgtcgctccccccgcttttaattacttaatttttaaagaacttgctttaggctaa

SEQ ID NO: 34528 - DNA, 1222 bp, Mus musculus
tttagagtatcttatttagttttaaaataaaattaatttaatgaatttttaagaagcaagttatttcttcggcctaaaatatatgttaaacaaccccagaatcttatatgactttcgagtgtttctgtaaataaacaaacaaggaaggaaagaacagatgacaaaagcattcctctgcattgtattgtgttttttgagacaggacatcatatcgctagtcatgaacacttggtcctcctgcctctcacttcgcaagagctgagattatagggtgcacagcacacctggcttcagaaagctactcctaaggatctggagaggtggctcagtggtgaagtcctgctgtgcagcatgaggacctgagttcagatccctcgcacccacataaaaaaggtctctggatcatcccttaggctcagaaacagtcagacctcagggctccactggccagtcagccaaaatggtgatcttcggtttcagtgaaaagaccctgtctcaaaagaagaataataattaagttggagcctgcacgtgcacatgcagacgagcacatctgcccactcagaaccacagcactcacacagtcaaaggaaattcctccaaagcacatattaccaatagtaaaatatgaaaagtgtgaattattactgtccataggatgccctacaaagagcaggatacagcatcgttgaaattgatgcatgtactattttgatttgagttttagtcttcttaaaagtcatgatctgaaaagagaatgacctgtgaacatctgcagatgtgacagttaagagaaccctctgaactctcttacagagcagccagccaagggcaagtctgtctcctgatgttggatccacagtgcaaagaaaatactgatgagctgtgatagtcactacttagtggaatcattatttttgagaattcctgtaaataagttctgtaattctgcatttattaatgatttaaaatactagacttttatgtttataaaagtaaatcataatgtacttaatgaaaatgaatttactagcttatatttatgctacaaattatactttattatgtattttcttgatacatttttaatgaatgaaatatttcattgttttcaataagcatgctactggatataaattttctctatttaaaaataagagactattttattattcaaattatgtattagggatgatagtgaatctttgttttctgaagttcc

SEQ ID NO: 34529 - DNA, 2094 bp, Mus musculus
acatcagaatttctagagaaaataagcagagtatacatacaacgttgtgcatcgatgtatctatgattttaaatgaaataagataatggattagaattaatgtgtagagagtaacagttgacagacagatgcatccagaaattacagcagtgaactgaatgcattggctgtctcataaagacaatgacatgataggtaactgataaaagtttggctccttcattttctttcctccttattctagtccttgtacactacagtgaggttttgctaagctccttggtcaaggtaaagcctgatgtcttttagtatactaactaataacattcctgtctctggtaaccattttctgagacaaaaggtagcttttataacgcaccagtagcctgactacatggctttctgttgaagcccttcgcatagtgttagatcagaacccctgaagagaagctggtttgctctcaaagaccagcttgacagtaaagattcaatatcttcgtccactgctgatgcacagagaaatcccaacttttccttttattttaatgtagatcccagcattcctgactcccagttgtctgtgagctaaaccaacagatgcttactggggacttagagcttagtaggacatgggtatgaaatccagctctgctttctgatctattctgtgtcattatttgttgaagttccttccctgaaacaagacataaacatgctggttcatgttgcacttgtgcttgcgatttaatctttcagaatttttttcttcatgttaattatatatgtaaggaaaccatgatgatatatgggagagaggctaagggtactttcttcctgaattaagtaccctaaagttaaagtatgcaggagcactacagaaatgaagatttgtgctctggagtgcatggaaggtgtgctggacaggagagcattgaggtgatggaagagtcacgtctcaaactgtgatactattgatgacatgaagaaccttacctgtgagacagtgggatgatgaactgtcatatgtacactctgaaagctacaatatacacccaaataaatgcctatagtttgatcaatgtgaggatgtcttgggggttgatgtaattcccttgggtgtgctctgcaagtatccttgggtttgaaacactgatgcgtttggcaggtgatttttggctattctgccatcccacttcatttggttcatacaagttagtcattcaactgaacaattttcctaatgtattgtgtgtcagtatctgaaaagtacaataaactttcaatctctccagtgtccatgcagtgtgaagaagcattatctccttgcttgtgatgtgatgtgatgtgatgtgatgtgatgtgatgtgatgtgatgtgatgtgttataggcaggactgaaatattcaccaatagccccattgcggaaagactttgtcagagagatggtgggttaaagctataaaagatatactttatatttctgttaacccccaactactgaaacaccaagtagtgacaataaaaatgcatgagacatcctccattttctcttttgtagttactcttccatatggtgcctgccttcagaatatgaatgaggtcgagaatacatgaaatctctctgtgcttctgtgaagattccttgctgctaacttctctcccaacctcacatccttctcttccacagacgctaattaaaatagttgctcagacctcagctctgaacagtaattggtagtgcagccggagcatgctttatctaaaaaggcctttcagattgtggaatattgtggataaataagataccttatgttctaacagatactctaaaatatgcaatgattacagggatgagacagctcaaatcaagaaattcctttccagttcttatgtttgctatatgtagcttaaaagaccattcaagcagtatttttaatatgtacagaggcaagtttcacagactggaattttccagctgtagaatcatacaagtgctcaaaatactgtaggtttcatgtttgtggatgagatgctttcctccgtaccaggtttgtgctaagggcgcattagcagctagagattgacatgatttat

SEQ ID NO: 34530 - DNA, 1207 bp, Mus musculus
ctcgaaggacccttttgtttctgttgtcttttattgtcgctgttagttttgggtttaacacagtctcattgtgtagcccaagctggccttaacctctgcattctccatcctcctctgctttgtagtgctgggatgacagttgtgtctgcccattgccactattcacatctttttttttttttttttgaatgaatgaatgcttttcttctattggaaattttctttatttacatttcaaatattttcccctttccagatctccccttcagaaaccccttttcctatcctacctccccctgcctctataagggtgctcccccatacactcccgtcctcctgccctggcattaccctacactggggcatcaaacaccttcaggcacaagggcctctcctcacactaatgtccaacaaggctattttctgccacatatgtggccagtgtcattggtagctccacgtgtattctttggttgttggtccagtccccaagagctccgggagggggctctggattgttaacattgttgctccctctatggggctgcaaactctctcagttccttcagtcccttctccaactcctccatctgggattcctgtcctcagtccaatcaatggttggctgcaagcatctgcctctgtatttgtcaggttttggcagagtctctcaggaaacagccataccaggctcccatcagcaagcacttcctggtgtccacaataacatctgggtttggtggctatacttaggatggatccctacttggagcagtctctggatggcctttccttcagtctctgctccacacactgtctccatatgagacagtgagtattttgttcacccttctaaaaagcactaaagaatgcacattttggtcttattcttactctacatatggtctgtgatttaatcttgagtattcccaacttttgggctaatatccacttattagtgagtatgtatcatgtttatttatttgtgactgagtcacctcacccaggatgatattctcaagttccatccacttgcctgcaaatttaataatgtcatcgtttttaatagctgaggagtattccattctgtaaatgtatcacattttctgtatctgctactctgttgagggacacctgggttgtttctagcttctggctattataaatatgcctgctatgaatatagtggagcatgtgtccttattac

SEQ ID NO: 34531 - DNA, 1166 bp, Mus musculus
cctttaaataatgctctattgatttttactgatggctcctctaaagggcgagctggatatcttattagtaatcaacaggttatcgtagagactcctggtctctcgactcagctcgccgaattaacagcagtactgaaggtttttcagtctgtacatgaggcttttaatatttttactgacagtttatatgttgctcagtcagtacccttattgaaaacctgtgtaacgtttaacttcaatacgccgtcagaatctttattttcagaattacaaaacatcgttctcgcctggaaaaatccgttttatattggccacatacggtctcactctggtcttcctggacctctgacagaaggtaatgatcgcattgacagagctctaataggagaagccttagtttcagatcgggttgctttggcccaacgtgaccatgaaaggtttcatctttcttgccataccctaaggctccgacataagatcacaaaagagcaagcgagaatgatcgtaaaacaatgtcctaaatgtattactttatctccagtgccgcatctaggagttaatcctagaggccttatgcctaatcatatttggcaaatggatataacccattatgcagaatttgaaaaactaaaatatatacatgtttacattgatacttgttcaggatttctttttgcttctctgcatacaggagaaacttcaaaaaacgtaattgatcattgcctacaagcatttaatgccatgggattgcctaaacttcttaagacagacaatgggccatcttattccagtaaaaactttatttcattctgtaaagaattcggtattaaacataaaactgaaattccttacaaccccatgggacaagaaatagttaaacgtgctcatcgcaccttaaagaattggctctttaagacaaaagaggggcagctatatcccccaaggtcaccaaaggcccaccttgccttcaccttatttgtcctaaatttcttgcacaccgatatcaagggccagtctgcagcggatcgccactggcatccagttacttctaattcttatgcattggtaaaatggaaggaccccctgactaatgaatggaagggtccagattcagttctaatttggggtaggggctcagtttgtgttttttcacgagatgaagatgg

SEQ ID NO: 34532 - DNA, 1281 bp, Mus musculus
ttttctttcaagcaggtaaatcaacattctcgaggcggaccagcggatgtgcatccccgcccccctagagcacgcaggtggcagctgttatccccagtctcaggacatttccagcacgtggttttcagtctgagttaaaaatttaggtttacctagagggctaaaagagtagatatttctatattaataaagattggtttttattttgatagacaggcttagccccttagctgacctctggcttttcacccttgctgttactgcaaggtgtccttagctcaataggctgtggaaaaaacagggatgaggaggaacgacttccagctcctattttagccacaaatcgtggtgttactaacgacataattcttgcttaggctttgctaattctgaggttgataattctcctttaggagctacacaacactcaaaactgtgcatactggtttgtgattgtacaaattcagtatggacatcgcttggtgcagaggtactgcaagggaaggtccggcttgaccacttctgagtttcctgtgagataaacccggtttaaaagaggttggtatcatattttggttaaaaatcaaaaatattttccggctctgcctcgcctccccaaaaggtaccaagagccacatgtgtgggttttaccagtacccacgggagaaatcgggtccatgtccacccaagccaaggttaaaagcccactcatctacggatgagaaaatcatttgatcacctcagttaagcgttgccttatttaacttaattaataggggggagagagattggaaatgtactattgaaagggcaagcccttcactgcctcccacgcaaataaaagagccggtcgaacgacttctccctgtttcccacctatcatctaaaaatgcggaggaatatcaacttagtgttattttcacatcgttcagtcaaacttagccagagttccaacgccctacttaaaattcaactagaaagttacctaccaagtactaattagcattttaaagtcagagtctgcagctccaggcctttcagttagttgtttactagaaaggacagtcttaagccatatacagtttaccataagaaaagttaaagaatcccagtgaagcaagttttttctttagccctagattccaggcaaaactattgagcatagataatttttcccccctcaggccagctttttctttttttaaattttgttaataaaagggaggagatgtagtctcccctcccccagcctgaaacctgcttgctcggggtggagcttcc

SEQ ID NO: 34533 - DNA, 1201 bp, Mus musculus
cccaagataggttgataaaattcttaaatgtacatgatatgatatttcctaagatgacttccttacagcctttaaataatgctctattgatttttactgatggctcctctaaagggcgagctggatatcttattagtaatcaacaggttatcgtagagactcctggtctctcggctcagctcgccgaattaacagcagtactgaaggtttttcagtctgtacattaggcttttaatatttttactgacagcttatatgttgctcagtcagtacccttattggaaacctgtggtacgtttaacttcaatacgccgtcaggatctttattttcagaattacaaaacatcattctcgcccgaaaaaatccgttttatattggccacatacggtctcactctggtcttcctggacctctggccgaaggtaatgatcgcattgacagagctctaataggagaagccttagtttcagatcgggttgctttggcccaacgtgatcatgaaaggtttcatctctctagccataccctaaggctccgacataaaatcacaaaggagcaagcgagaatgattgtaaaacaatgtcctaaatgtattactttatcttcagtgccacatctaggagttaatcctagaggccttatgcctaatcatatttggcaaatggatataacccattatgcagaatttggaaaactaaaatatatacatgtttgcattgatacttgttcaggatttctttttgcttctctgcatacaggagaggcttcaaaaaatgtaattgatcattgcctacaagcatttaatgccatgggattgcctaaacttattaagacagacaatgggccatcttattccagtaaaaactttatttcattctgtaaagaattcggtattaaacataaaactggaattccttacaaccccatgggacaaggcatagttgaacgtgctcatcgcaccttaaagaattggctttttaaaacaaaagaggggcagctatatcccccaaggtcaccaaaggcccaccttgccttcaccttatttgtcctaaatttcttgcacaccaatatcaaaggccagtctgcagtggatcgccactggcatccagttacttctaattcttatgcattggtaaaatggaaggaccccctgactaatgaatggaagggtccagatccagttctaatttggggtagggg

SEQ ID NO: 34534 - DNA, 1166 bp, Mus musculus
ctcctacaaaccacttgttagtggtctgtcatcctttagttttctttcattaacagttaccatttattaagtttgttaggttgtttatatattgactactgtctgagtgcttaagcaggcattgctttaggcgttttatatttatcaatagttattctgtgaggttaatatacttacacagaaggaagcagatgtaaatgcaaggtaactggaggccgtgggatcagtctgcttagcttcactgttaccgttacaaaatgggttctcacatcacgtatgatctcacatcactacttctaacctcacccttaaatacctcaccccctcatcccacaggccgcccacattcctctcattttcctcgagtccacctctcccaagccgtcacatcttgtgttttctctgacatactagtgtcctcttccttctggagattttcctgttagctgactctcactgggcggccaggcgcatgcgcatcgctccgctttgtagcgccacggggcccgactcccgacagcccccgcgcgcagtgcaggctgggggaacatggccgcttccggtctcggagcctgcctggcgcggggctgaccgcggctgcggccccgtgcgctcctccctctgcatctcgcgccggcggccgcggagggcgcagcggcctccagtttctcgcgccatggagaagagctccagctgcgagagtctcggcgcgcagctcccggcggcaaggctgcccagcgaggactcactgtccaggtgaggccgggcgtatggggacggaggccgggagcaagtgtagatggagacgccagggcgtgcgggaagagagactgaggctgctcctgcgggagggaggccggggcatgcggaggagagacctgggcctagagaggctggaccccgaagagggcaaaagccgcgggcatcccgtgggtatggagagcccagcagagcagtgcttgcttcctcctctgggcctttggtgcgagaagtgaaaatacagtttctttatggccactgcccctctaattcccgctcattttccggtcctagattttgctccagttgtgtttaaggacgcagcgttttttactttatcaggagttcagttgtcaagggcgtgacattttcattcttgtgctctaatcacagtttggggaccagcc

SEQ ID NO: 34535 - DNA, 1232 bp, Mus musculus
cttcagctgtcattataggacagcattcagctgccacttagagcagtgggccttcaggactgtgggtggcattggatatggaaatgccaagggatattgagggcttggatagggtttgagaaatctgggcagtgaattcagggctatttaaccctgaaggaggtagggattccaaagcacgagccgttctcccagaggaggaggttggagtctgtctggtcccttttgttgttgttggggattgcctctccccagcctgtgaaggtgtccaccaaaaccagaaggtacctaacacttttgactgtgagcatgtgggtaaagtcaagctgccagttggttccagggagagagcctctggcctggtgaaatggaaaaggggggctgcagtaacaggagttggaatctgctatttgacagatttttttttttttaattaaaggcagtagtagtagcctgtaagaagtgcaaatcctcaggggtgggctgcaggtgggcctgaacaaagagaaacaagtttggctactacgatgaaaaagctggtgtagataggacagaatttgtccagtggcaggaggtgatggtggggatgtcctattgtgggtgagatgggtccaggcctccaagggctgcagctctagccaccttgtcgtcattggcttgtttatttctcatagagatgatcgaattgtcatgatgggactggcagtcagttcctatagctgttgggagatggcggacttttagcagtgctataatttggtgttagttggttatggatccttcttttgttgtaagtagtccaaactctttccagatggcagcaagtgataggaggatgtgaatggcttacttggggtctgtatagatggttagggattgtccttatgcaaatcggagtgcactggtgaaagctattagttcagcctgttgattagtggtgtgggcagggagggtctgtgcctcaaccacctgtatcgaacggacattatgacatagcctgcattttgggcccccttatgtatgtgtaccaggtatagatggcctgaagcaaatgtgccctcttgtatgtgggagggatgaggcagtagttcctctaggttttcaatgcaagcatgagatgggagtggtctgtgtttggttggggaagaagatttgagatgtcgaggggtgggcatgattgaaaaattaagtgtagtatcttctactagcgcctggagagaaagaatccagat

SEQ ID NO: 34536 - DNA, 1920 bp, Mus musculus
ttaggtatacagaagaaaataattctataaaaatctaaaaactgcaggtccatagtcctgaagttttaagtaaatgatatttataaagtagcatcttccaggaacatctgaagcaactgaatgatcagaggtgacaacaaaacatgaatttaattccactaaggagctaaaggtggggctgtccaactgcttaaacagctaatgccacaaagctcaatgaatggttaagacctcaagtttgtctggattcctgttgcagtgattttgtttgctcttgcaggaacctatccacagcagatacaaagaacttcttgccaaaagagcagagcttcaaagaaaagtagaggaacttcagagagaaatttccaaccgctcaacctcctcttcagagagagccagctctcctgcacagtgtgtgactcctgtccaaactgttgtatgaaaggactaggcccagggcctcattgccaggaacctgacattccagcaccttatgggtagaaaaccttccgtgtttaaaacccatctactggagaatccttcggatgctgtatttatttcaaatctctcttagatgagtttagaaacatagcagtgcaagtgacaatgaagatgatctcattcataattaaagtatgacactaatcttaagtcacccaaagaatactaaagtactgcagtcctgtattcacactgggagcaagtttttcatttaaaaatgtcttaaaaccctgagcacctggtcagatctccaggaggggagaaaagcaaggccacctgctgttgcacctgagagcacacgcattgaggcttgtgtcagatccaaatattcctttctcagtttccccaagttttgtgatatttaatatagtaaaaagcattgtcttgagattattatggcatagtaggttttttttttttttttttttttgctgctgacattgtaattagcatattctcaacagcaattaggaaacaatgccttatatatgtgctttggggggttgaagggacaaagtagtagctgtcatctactccatttgtgtattgatcacaaacatcacagaagacatcttaaaaccttactgttactctactttatctaaatgctatttggcaagttttaagacagtattttaaaaacttagaagtctgactttatgtgctgtgtaaatctcacatggacactttaccaaagagcactctgcatgagttagtctcagtgccagcaagtaaagccttgcttctctgctcacccgagtccggtgctggtggggacagttgactcctggggtctgttttactctgtacaagagccatatgtaatgtactgtaacaaacgagcttcttaccacttggtcttttaattaaatgacttcaaactttgtccttgtccacagttgtctaaagtaccctccccaccccacccccaaaatgttaacctggaattatccaatccaatttaagcccacctgtctttgacacctaaaatcaaactgtaaaaagcattgttccgtaactcattgtttgaactgtagtcctggtgttgattttggaattagtacatcacagatctcctctttcctactttttttttttttttgcttatatattttacctggatattgagcccagagcctcacacttgccaggcaaatgctatactattgaatataccccagcatacccagtatttacaagaattggtaccaaataatttggttggtgtaaacttagctataaaaatttttttgaggaggtatttatgttcccagcattcaagtaagatttctgtaacagttcactttcctcactagtctgctttcttccctgaaacctttgaccatcttggtatgacatcagagggatgctgatcatacggtcacccaaacggcagagaaatatgtcactccaaaacct

SEQ ID NO: 34537 - DNA, 1723 bp, Mus musculus
aagcctgtccctctctccttaaggagacttttacagtatttatatagcacttatttacctggctgtgtattttacatatgtgatttataacttctgcagatctatgtgcttttaaaaaaacccacctagaatctatcacttgagtgttagaggaagattatttaagtcaatggtgtacttaagaagttgaggcagaagaatcaagagtttaagactgaacatagcaagacctcgtatcaaaaacaaagctaaaagaaaatgtttttattgaattcattttttccctgttttgattatttggtcagctggagaaacaaaacatagataagcagaagaaggaattaaaagctaacaaaaagactcttgatgaagaagggaacagcagcggtcgttcatctggagtcccaaggaccgcaagtaagaaggatctggccaaacagagacctggagaaaaaagcaggaaaaatcttcagttactgaaggacatgcagaccatacagaattcactgcagagcagtaatctgtgttgggattactgacaccaggtcataaatgatgtacctcactggtcataaacgatgtacgtactggacatgagcagactttccaggtctcatgcttgctaagctgccattactggcaggtgttaggggccaagcttcattacagtctattgtgctatgtagcacaactgatggagatggagttctgcggcagagaagcctcactgtctttgaatttgctgtactcattcactgcactttgtaaacaaatgaccagttttttactcatgggtgtgttttttaaactaggtatatatgtaaattgggtttgaaaattcagaatatgagatagtccccatagtcagtgcttgaagtcttgttttttaaatcttcccacagcatgaagtgaccactactctcccttctccagatgaccattaaatgtactgttttcaagaagactttgttttgctttggtattttagacattgatcaatcataaattcacttaagtcagttatccatgaaatatgtcacaatgtcttcagaaaaactatataaacagttgttactgaagtaaatgaaattttggaataaagaatgagaacgtgggtattgtaaaatgtacacgtttacagtttttagacagtatctatttgtaatcatgttaagcactgtttaatcttgacttaagagaagctcatgcttttagcatacagtatgtgaattgaatacacacatctatcatgccaatgtaaattatttaactttgagtagatcgacatgttataatctttataaatttggtacttcaaatcaataaagcagtttttaaactttgcttaacagccagctaacaaaggctttatttgtcatacaaactcaaaaagtgcatgttagtatcgtgattgaggaacgagaatatctgaggcatgcttgtcatccttgtgcttacagagaccaagctcagtgttcctgaatggttcagacaggctggggaacatactagccatctactaagttgaatagcatgaattgtttgttacttgggcaccagaaggccctatcacttggtgaattttctagttagaaacatagatttttaagcttcatgagtcacctgaaattgtatataaatttgtgtgtgcagttttctgatgaggtttgcaggaacaatgacctgacaaccgtgagtccatagtccccaggaaggtaagaaa

SEQ ID NO: 34538 - DNA, 1157 bp, Mus musculus
gtcaatcttcagatctccaaaacctttcagatttgctgacacttttctctctcgggctggttctacaccctgttagcagctttcctcagcaggtatctatcccatgattctgaaatctctaacatcctgggatctccaacaaaatctaggcttcaccttcacagcttctttcagtgacctctctctgggcctccatgcaggacttccctgacatatgtctgcccacagcagctttccttagttgtggagggaaactccgaaacccctttcttacatccttgactgtaagggcagaaccatgtggccgaagctgccaagttcttcttactggggtggaacttggccccttgctcaaatacattcttgtcactttctgttttttgatgttttctgtcactgcttaagcttcactttaattccttgtcacaagttggaagcctagcagggtgaggtcttgcccggaggccattactccttttattctatttagcaccaccctttcctttaaatttttatctccttgaacactgctagacttaactccagcacatcctggtgccccctttctcctccaactgtatgctttgtatttttccttacttgtttttattgtagatctgcatgaggatagtcactaataactgcatgacagaattcatactaagtggccttggaacctcctctgccagtgttattaatccaaaactcttcaatttagcctcaggcagatttttcagagaagggcagaaagcagtctcattctccaaaatactgtaggccacatgaaacttcatgagctgggaccccacagttcaaattgtcaccagcactgtcttccatgaccctggttgcatggcccattaagtcccaatttaaggcattccactattttcctaatacaaagtcccgaagtccacattttaccaatgagcaccatggtcaagcctgtcacagcaataccctgatcacttgtaccaacttctgtctttgtcaatgttctattgctgtaaagagacaccatgaccatggcaactcatccaaatgatgagcttatggggcgcattcatattcaaatcaccacagcctctgtagctcagttgcaagtggtatgcttctgaggtttttagagcaagatgtcattcctacaaggaggagag

SEQ ID NO: 34539 - DNA, 2137 bp, Mus musculus
gtccttctaaacagagccataaagaaatgaccgtcacatttctttactgtgctaggtgtttttcaggtttaccttgctggggctgaacagtggtttcaccaagccaaagcattctttccccagaaaaatctatttgggcaactgggttaaaacaaagcaaaataaaacaaaaacacagcattgtcatagaggagaaaaaaagcagccaaaacctcacatttttgcatcagtttatgttgtttgactagactatcttcagagagcacaaccttatgtgtttatagctttaatttgcattatgttaatgaaccagtgaagtgcctagagagctgcccaggcacctggaggactctggctgaacaccttcgcttgaggaaaggtgacttgtgttcctcacatccatgctaatctagactgtccctgtctgtcacagtaagtcatccagggagcttctacagagagctcctcgggggtttcctagttatgtgggtgacttctcttaggaaaggcctgtgggccagtgttctgttaggctgtgctcccctctgtctgccacctttttctggatgttagttatctccttttccttgagattttgttccagagagggaaacaaagatggctgtagacctgtcagcataggtagttttagactccaggatcttgtttaaaatcctccatgtggaggaaaaggttttgaagacagggtggtttctttaaagagactattgagagaacctgtgccaggtttcttgcgttcggttgggtgtgtggactgtgtgttcaccttctttagattgtctgaactacaagggagtgtttagaaggctggcgaagcacaggggtaatgccccatgctaagactttcatttaggatagagtttattattggtttttaaaagtaagtgttagaaacagtttcacttcatagctccatccatctcttgtgcaggtaaactgagtggcggagggaaatagcttttatgtgctgactgagagaaggaattctcacgggtccctgaataagctttagaccaaaagggaagacaagggttaaatacagtgaccacctactttttggttttggttttgtgttgccccagaaatgtcagtagagattgggctgtggaaatcattagtgccttcaatagatttctctcctagaaaagcttccttttagttcttcaggatcagtcaataatcaggagaataagtgcatgaaaacacagcaatgtacttatgaacctaagtgaaccagcctcaaaaagttgatttgtgaaggcggctccacctccatgcttcagcagatacagcattcccagtgtgcatgctgctgtgagaatttgctgtcaacccatctttatccagtgcaaacttgaaattctgatgcggttttccagggtggcatttttttttcagagtattgaatttacgatgtagtaatttatagtgtagctttttatacataaatgtgatattttttaaaaggagctacctgactcagtcggtataataacagagcctattataagctgagctgcactcgggcggggctcacactgtgccaaacataagcgtgcaaatgtgtgtgaaaagcacgtctgattgtgaagccctcaactccctgctccttgtattaaaagcagcctgaaacccatgatggttcatggtttggatggctcagtttgaaatttcacatttgccagcatctatgctaattcttaatttctcagataactatcaaaaacatcaagaaagtcaggcttagtgactcatacctataatcccagtgcttgaaagcctgaggcaagaagatggtggttttgaggccagcctgggctacatagtaagttcaaggccagcctgagctacatagtgataccctgtttcaaaaactaaaaatgagagagaaagaaatatgtaagtacccttaaatgtgaaagtgggcgtgcccccttgtctgtgggagtggtctgaatgctttggggcagtgggggggggggggggtgaacctgcctgagaagtggtttctcaggccaggtttcctcaggcagactcagaggggaaaggcttttgagatgagactacttttacagatattccttgtctcagtccaaggaataacttgccacccctt

SEQ ID NO: 34540 - DNA, 1057 bp, Mus musculus
cctcagccactgctcccactcctccctcccaagtctgcctggatctcaatgcctttcacaattgcacatcaccagcctcctgctaatcatcaccagtatgctgtgtctttttctgagtacatttccccccatcgttaaaacatgtctttcctcaacacccttcaagtctctccaccgtccatctctgttaccaaatatattacagcatcaaatgtgtcctgtccaccccctgctgtttataccatcttgccggctgccaaaatatcttgctgtcctctacctcatccctaaagagcctataaactcagccttctcctgggttcatcctctgctggtcagtaatgctagtccatattttaaataaataataaaacctttgccttctatctatcaaagtagaaacctttatatttatacacgagacagaaattgaactatttctaccatgaagaatttaacatttagcaggaactcagagtgattgaattgctagcctaacttggtctatgttagatggtgaatactggtgatagacccagtggcttgaatgtagagtaaaaattccccaaccgtccagattaacctataactcttcagtgggacaggagattcctggcagacaaatgaggtagtgttttagacaacagtttgattggtggtgtttgggccttaaaacacatatctcatagacgacaactaatgaaaggtgtttagaaggtcagattggatcatattagcctatttgatatataatgtagataaaaatcccaaaaaactggatacatctgaatttgacttgattaagcttctaaccccaaccctccctgttcccaatgggaaaaaacttaccttgtgatggcttttgtctcaattccccctggctgttcttcgtgtatgtccagatagtgtcattaaggaagagaatgttgtactgaggcaggaatgcagtttctcccctccagccaggctcctaaccagaggtacacattcacatgtagatggtggctgccctgccctgcttgggagtgtagatctgaggtctctaatggtcttcaga

SEQ ID NO: 34541 - DNA, 1463 bp, Mus musculus
cagatcccaggccacttgggcatcttctttatactaattgaatagacatgcgtacaggctggtcaaggtaaacgagaaccatgtcaggtcaccttgggaacatggccttgccacttggctccgctcctgcaaacctgaaagaaacgttcctcatcatggaagaactggatgtagcttttaacttatgaaataggaggtgaacttgaaagcccttctgaatcctgattgtgcagagcagctgcataatgaatgtacacatgaagaccgtagctgaactgcacgagtcagatgccaacttcatgactttccatgtagacgttgtctccttaagttgtgagtgatgtatgtagcatgctgtgaagcgcctgttctagttcttaactcatcagtattacggagttacccttgcgttccttggtactttatattcaatgtaatcagaagctgtgatgtatccccttcctagtcccatgctttgttgctgtaaatttccttatgaagcacgtgactttggactcatgtaaggtggatgatcttgaagactgctacacacacacacacacacacacacacaccagtctcttattgtgtatggtttaaagttagggtaagcttttctccagtagactattgatgcagtttagggtccacaagttcattgtcaggtggcagactcctttttataggttcaactctgaaaatagcaagctttgtcaacagccacttcacccttgttctagcgaagcagaccctgctgtaagtgtaggctatggtggttacccataatgccctccacatgcgtcggcagttatgaagataacagaacccatgagagcttcttgtatgtataactaggcttgatttgtgttgttttgttgctggtttggcagtttgactaaggctaacccaaatgggccagctcgtgtaatactctagtggtttaatgcctctcttctcgttctgctgctgtcgttttggtttttgagggatgggtaatattatttgaacagataaagaaggaactgttactgaatcaagacaaacacacctgaagtaaaggagctgtgtattaacctgttaacaattcataactgcactttctatgacattttgaaaatctatttataggtacagaacaatgggttttgttaaactgtatcacgtttatacctgcagaatttatttcattgttattagtaggaattttattggttcaataaaattgacaaagctgatcctgctttctttctttaatgacttgccgttaagagtgctctcacctcaggttgcctctgcctggtgactgaaacgtgctctgggagctgggaaggtcatgggaagatagtcttaccctggtagttttgagccgtactttcttttctcttgatctttagtagcactagttcagaatgtagaacaactgttacttttaaagagtggtctcagaaaaggcaagttcatgt

SEQ ID NO: 34542 - DNA, 3432 bp, Mus musculus
gtccttcctcatagtgcagaaggctcgttttcagatctcttggagcatttgatcatagaacttgagggtcttctcttgggataaagaaaggataaataaaggctgtggcacttagtggtggttggccagcatcctgctttgtccttgagtgagcagtgtggtgatgtctgaatacttccaggtgtcgtgtggaacctgagaagtattgagatcatgtctctgtccctgtggtttcagtaagtagattcttctatgtgtaagcactatttctctctggaggttcatagcactaagctgccaagaaaaacacgttcatttgcaaagaattaagagtgtgtgctaaacacttgacattgttctttgtttctcagaagctagtgaccagcaacgtggagtgttcagcaagtccccaccatgcctgcagggtggggctgctcccttccacacccagctttccttaggggtggagacagggaatggtgggacctgtgttgttccgtcccgcagaggtctctctttggagcccatgtataaggcttgacatttttctgtgagtagatttagaggcagttgttccaagtgaattctggcctcagtacaaagaatccagtggttctgacactcgggacaaaagctctggtatcccctgtagagaggctctgtcctgctttgctccagccactcacacatagttaataaagtggctgaagctcctcccttcccagagctgctgtgctggggacgctgtctgcagcccgcccgagtcccagagattggtgtgagcagtcagataaggctgatctgggagacggaggaggtggccatgacacaaggtgttgtcaggagaagatgattgtgacacaaggtgttgtcaggaggagatgactgtgacacaaggtgtcttcaagcagctcctttgtgagtaggctgcagagagccatcctgagtgggaggttgtgttgtttaaacacatggtgtcttctttgtctgcactggatggagcagggtttgtttctatgtgttctccaggtgagctcacaccctctttaagaaaaggggtcttgtggatgttggaagcaaggtctgtcaaacattcttaaatggtgatgctagagaaaagcgagccccctgtaacttccctaaaagccgactcagccactaagtatacatgttgactttcttctactttttttctagttaatcagtgtgatttaaatgtctttagctgatgtgaggactttttaaaaggcagtagtttgtggtgcagctccgtggaacaggttgtgtaataagaaacctcagaagccaggcttcaagggggccgggtgtgtgtgtgtgtgcggggtgcacccaggccagcctttcagtggattcctattctcatttagtaattgaatggtatattacattatatgtaagtgcatacatataaggtggaatttttctcaatataaaaaaagaaagaaagaaagaaagaaagaaagaaagaaagaaagagaaaaagaaagaaagaaatgtaagaaagagaaagaaatccttttgttttcctgtgagctcgctccttggggaggactacagggctccccatgtaaaatggctgttgactcctctagcacaatggcctccaaggtctggcctgctcctcggattccctttgaagtgagaggtcattgtcttttgagaatggatttaagttttgaaaatagcccacattgttccagcacaagggaacgaacatagggcaactagtcagaatcagaaccccagggccatcagatgacttggtgaaaaggcacttccaccaaagccaagacctgagtttgatccccaggaaccccatagtaggagagagccaactgcagcaagttgtcctctgactcagacacacacacacacacacacacacacacacacacacacgcgcgcgcacgcgcgcgcacatacatacacatgcacacacacacttacatgcacacacatgaacatgcacatgcacacacacacatgcatacatacatacacatgcacacacacatatatgcacacacatgaacatgcacacacacatacatgcacacacacatacatgcacacacatgcacacgcacacactcgtgcgcacacacagtttttagaagactacctaatgtgtaggaaaagggttattagtacctgcaacctctagggcctcgttttcaagcccgcttctctctccaggcttcatatgtgtgcaacccctgcatacactacagacctaagtacatataaatatgaacagccaataggtactctgtaaaatggatattcttaagtgcatgttattgttgtgtgtgccgtgactgaggtgtgtgttcgtcatgagactttgcttcttagctgaattaagactctgccctccctccgaggcaggaaataggctgcagcttctggaatcagcttctcacgttttcccgcctttgttgtgtttactcgtggctttgtctgagagtctgttctcacatacacacctgtaagtatttattacaaggtagaatggggacaggcagccacagtacttgtatttgaatgtttccagggagggacaatggagccccctcctcagtgaggtgctcacagaatctgtgtcaaattctgtgaaccagggccaacactggtaccagcttcaccctgacctggggccactgccctctctctccactgccttgtgtgtgtataggtgtggttgtgtgtgtgtgtctctgctgggggcatgtgccgcacttcccagcggactctggtatccatgtgtaacctttggcacctgtgttactggactgcattgacaggtggtgtacagatctgtacagatgggtctgtgtgaagagttggggagtcccccccacagtgaatatggatactgttggtcagccaaagattttcctattctttgctgcttaaactttgtgccttaatattgtaaataataaatgtttaaaacagcaaattggctcctcttttaccttctttgttcctaattcctccagaggacatagatgaagctcagatgtcacactgagatcttgcacatggagcacacctcgtgatgctagccccagagccttgtggctgcccacagtgaccctcagcccacacagacacagtcatagctgttggagaagatggctgtggagggaagaagtgtgagaggctgtgctggggtggggtgggtgggagagtggggggaggcagaagggacattctctctgatcatatgcaggcatcttgggaggcagggctcatggatggtggcctgtgactgtgggaaacagctctgccttggagattcatccaagcagcttggataccagggagcaaaccacaagtagacatattttgtgctgcaggatgggcaggaagatggtagctgctttgccaccagaaaataacaatgag

SEQ ID NO: 34543 - DNA, 2150 bp, Mus musculus
gcctgagttcccagatggcgagatgatggaagtgctcatctagcgtcgtcctgtggcgcttgccagcatgctgacagatgagaacagaggctgaaagaagagctccagatgggcagttgcagtagcaactgcaaaaccaggacaggtgtggactcgtcacaatgttaccaaaacagctggctcactatctgcagagggagtgagagaggacgcatgtaggcttggaagcagagtagagaaggaggaggagtggaattttccattgtagagaaattgtatgtcttagggaggctccatgcttccccattcttggcttataaacagatgaagaagagctgggccttccttggaatccccttgttccctttgccttttagcaggtttggtttaagaagaatctgctagaaatcctgaaagcccatctcggcataatggtgtgtgtgtgtgtgtgtgtgtgtgtgtgtgtgtgtgtgtgtgtgtgtggtgtccttagcaaatacatccaggataatggggaatttcaagttttgtcaccttcttggctgtttcgtttgtggtttgtgatttcagagagtgtgaagctttgcttgtttggattggatggtattttctaagcaggatgtgagcaagatgcccttgccctcacccatcctgatttctttgagcttatctgtctcatctctacttactattttattgttgtatttttcctgtttaattagacatagcagagttccttatatatgggacttaggagactaccatccttgctgtggtgtccagatggacagagcctcgtgttggcaccccaactgctcttcccacctttgcttagcagaactgcagctgtcagccttattgtgagctagagatacctggctgaggagtccatgagttgctgacataacatcatgcctctgatgtgcatctctctcacgtccacactcttgctaggaggttgacaattacaccccatcgccctgtggggaagacttccttgtgaataggtgccacaggaacccatgatggcttacccagagctctctaggtagcatgggaggtctcagcaggcatccccagcctttcttgtatttgaagctctcaggtggtcttttgttgctctcccctgccccattctgccctggttgctgttgataagcacagtgccatccctgatcaattctttttccctgtgaatttgtttcataacccatcagactggtagacacacagcacaatcagtatcacagaaagggacacgacttacctgaagtgaggcagcaaagtcatggaaatgagtccctatgaacaagaggcaggacctgaggctgctgccacaagctctcatgttcattgctgtggaagctggcttcctggaaaccccagaagaagctgcccaggggagggtgaactatctccagatcagtaaggtttatttccaagtccccttcctcatcactcctttttggctcaagagaaaaatgaaaagtggtaattctgtgacgtcaagtccctcttaagtgcagcactgaaaatagcttggctcagagagctctgcttggatcatgtgtcctaggactcatctctaggatgagactgtggcctccccaggttgaggtggtacatgtattgtgagagacgtagcctggagaacagagaagaagagaggcaaggggaggagagagcagtggtgtttccctacaggaccctggaccatctgacaagacagaggaggtgggactagactacccacactccacttggcagtgggaaccaggctgggagcctcccaccccctccttaactcttctctcagatcttgcagcctgagtactgagcttgccctgtgccttgtggggaagggagtgagaaggcagcataagaggtcttgccagttgagacagaagcaggtaggtgcaggaactattttggatagggcatgttgttcagttgatggcaactaattctcttaagaacatattgtctcctattaatgttggggacaaacccagaaagggaagggtatagagatggggaattggtgagatcttccagccctgagaccatgtctgagccaccccaaacttaggctatctcccagcataggagtgagacactgcccagtttactcaaattctagtgtacgtgtt

SEQ ID NO: 34544 - DNA, 1147 bp, Mus musculus
caggcttgttgcttatcgtctttggccaccagtgggcaagtcatcttctctcctagaacctagccatttcttcatttttctttccctatagagatgtccctacagacacagtttatctagtttggggccagagcttctgcttccctggtatccccgcctccactctttctcctcgagatgtgatccacgggcatccttagcttagtcctgggagtccccagcagatggctactgtcacagccctcctgggactcccccatctgctgaggcaccgggaaggtgcactgttggatctacattggagagcatggaaagcacagcttgagaagtttgcagattgctgatggttcaccatctctgccgttctccaccccaaatctcagattcactgtgaaagtccctgagacaagcattccagagttttctaactaactggcattttagtgaaacctttgttcttttttggttttgctttacagtattaaaaacctccatgccaaaatcatagagaaggatgccatgataaaggtcctgcagcagcgatcccgtaaggatgctgggaagacggactctgccagcctgaggcctgcccgctctgtcccatccatcgctgcggccactgggacacattctcgccagacttctcttaccagcagccagctgacagaagagaaaaaggaagagaagacgacctggaaagggagtataggtgagaagaggaccctatagaagagagcatatagagagcggcacctatagaagccctgaggtagccaaccaccttatcactgcttaggcctggggtgccacctgaggtcaacttatgcattcttcaaagggggaggaaagccaaacgtgttggattttgagggttaaatgagatacatggattccaaaggttatgtgagctcttgggcttggactcatcttgtcactgttgttaacaagtcttagcaggacaagcctaaagtccctcagaatgttactctgggaccatctctgcaactgccctgcagtgtgtctatacccgtggaacaggaaaggatcaaggaatgtgccaggaggatcagtgtcacggattaggtcattctgtgttgtgcaggcaggatgttgagaattctccaggagtggatcttagatggagtag

SEQ ID NO: 34545 - DNA, 1569 bp, Mus musculus
tttgagaggtatttgggtacatctgtggagatttctgcagtgtgtggtttttatcagaaataattttgcaggacacaggtaatacagaaactaaggatattttttggtgctgatccaagagaaaagtatttttaaatatcccgtaccctgggtctttgttcagtttagcacattgacttgtatttttataagctaactccaaattttcatctttaacatactggtgcagtttagctgtcttctctgcatctccagtttctttaattctaaacaagaaacactaaaaaattcgtgtcttaacatctttgtaagtttaaaaaaagtagtggaatgtttagatgttttgtttttgaagatgtaggccattctgagaaaagcagttgggagatgtttaatccttgaatgttttacactgcctcccccaccacattcataaccctgtggacagtcctacctcaccctggtcaacccatgtgacccttactgttatggccagacagtgtctccatttagacatgcacaaaactgtttcttggtccaaaagattaaaactgccctctgaagtgttcacctttctctcttgctggattaggcattactcataagttccaggaaatgtccagcactatccccacggccctcattttctacaagccatgacaaaggaaaaaggacaaggaattctaacagtgaggaatgattgtcatatgggaccagaatatcatgtggctcaggctttcttaaaacagaaaaaacaaaaacaagcaaccaaacaaacaaatgaaaaaaacaaatcaaaacaaaaaaaaaaaccctcatagtatggatagtaacacagagtgtaaatataaatagaatacaagttttgacagggcagaaggcaacttgcatataacttcaccagatctatggcacatttgttcaaattacattaacttttatcttcttggtgcctgcaacatagtttttgatggactctcaacccctgtatattcctgaggggtcttctgaacatgagaacttgaaacctaggaaaaggacactgagggctcattgtcaactttgaattacctagtaaatacacctttaatatgtctggaagggagtttctcaaaaagtttaactgaagaaaggatgcatatccagatgtggttggcaccatcacctgggctcaagtcccagattaaataaagagaaaacaagccaagaaccagtgtttgtctctgtttcctcactaggtagtgaaccagctacctcacatatgctgttccttccccaccatgatgactgtctcttaagccatatgatacgtttttcctaaaggcgtttgtttaaagtgtttgttcacagcaagaaaaaaaaaaagtaacacacaaaaacagttgttcttgtcaatatttttaattgtctatcattttttaaatgactaagtcattttggttttgggccagcccatgtaactcatctactttagattagataatagttgtttaatcaaatgaatatggagctaaagagataagcagcaatgactgctcttctagaggactcatactcattttccagcac

SEQ ID NO: 34546 - DNA, 1151 bp, Mus musculus
atcttcttcaatttctttctgccctacttttgtgagagtctctcattgaacctggaaagttatttactaaagttcccttgactagtacagcaatcgagatctatgtttcagtgtcttctgataattaaaaacgaatcatctttgctctgtttcctctatctccattcctttgtgctgtgattgagccaagggcctaccatagggggtcatacatttcaggtcaaaccacgggttaccctttcccctctttaaagttgaatagtatcctcacttcactgtgttgctaaggctggtgttaaagtagaaggtttagtgaccacatgaggctgggcaaccctttttctatcatgtctagattttaaacaatttttgccttaaacttactaattttagtactgttttctgttgattaggtggattttattttgttaggtggtgatcttttccatgaaaacaagccctcgaggaaaaccctgcacagctgcttggagctgcttaggaagtactgtatgggtgaccgccctgtgcagtttgaggtcatcagtgatcagtcagtcaactttggttttagtaagtaagtacatttacatttgagagatggtttttttgggtgtgatgtctttgttgctgctggcaaaattcccttacaaagcaactttaaaagaaaagggtttatttagcttataatcccacattacagtccatcattttaggaaagccaacataggaactttaggcagctagttttatccacaatcaagagcagagcgattgaaaacatacatgtttactgttctgctagctttctttctttctctctctctctctctctctttctttttttttttttttttgtttttgttttcgagacagggtttctctgtgtaaccctagctgttctggaactcactctgtagaccaggctgaccttgaactcagaaatccacctgcctctgcctcccaagtgctgggattaaaggcatgtgccaccactgcctggctcagctagttttttgtagtctcatacagtccaaaactaaaacttagggaatggtgttccttacagtaggctgtggcttcccctatcagttactgtaaacaagaccatttcccacagacatgcttaggcctgtaggcagtccttcactgag

SEQ ID NO: 34547 - DNA, 1213 bp, Mus musculus
tataccccccaaaacaccaacaaacaaacaaacaaaccatcttataagacaccactttatattacaatgtcttgtttcacagctgattttttatattttttagtggccagggtgtcatgttagtgatgaggtgctagctttgcacctgctgtgtgctttcggctgctgtaggtgatgtgtagttagaagaaggtagtgtcttcatcactggatttagttttgggaagacactgtcataatctgtttttgtaattacaagttgaatgtcctttatccaaaattattaagccaaaagcgctgcaaaatcttaaagttagactcagaagtttttggttttagatcctgtttggttttgggttttcaccttgggattctcacctgttaaggtctgcacaggtgttctaaagtcaaggaaacccaagttctgaaaacacaacattctgtgagtaagacacacttgtgtacagggtgtgcttttgatgtgggtgtgctgctcacccagaccactcatttctgcagacacactcatgctctttgaaactttgacacaggcagatgccctctgtgccctggatgttttaagctgtgctgggtttgtgaatcactttggacggtcaatgtcggtggagaaggttgacattagtccggttctgctgcagaaaggaagcacaaaactcgctctgtacggcttaggtaggtgattgacttcggtcagatgtgatccctttgtccacgccagtggagaattgtgtgtgtggttggcaaatacagtgttagagatagtttggacccatagggcttccaaagggggggaaattggacaaatttgattatttcttattgatttctataaaagatggtggagttttctggtaaaaatgttcttagtatttctaaggactgatagctcttcaaacctaatggcagttttagtagaaaataaaacacgcaaacaaaaactttgcactgttttggaccttttatttagagtcacatttacaaagctggatggatgataagtgcagactaggtagcggaactgcattttgtgtcacagaagtccgtgagaggtcagagcatactattcagtatggtaacactggcctttgtagtggggagagtgaaatctggctgttgtgagttgtgacacactagatatcagagacagacgaagacctgttattaacaggttatatatgttaaagttaatttt

SEQ ID NO: 34548 - DNA, 1595 bp, Mus musculus
agcagagcacacactgcatgtgagggcacacatgtacacagtagtattagtaataataataatgtcaatgaggaaactgaacgaataggatagaaatgtcttggatagtttctgtccttgctttcctacacctcatttgctttgattaatgtttgtgactgggaaaatgtatgtgttgtgtgttatagatatgtgcagtgacagacaagtcctgcctggcagatttttactctaatgcacagagaactgacttgggcctttatatttcacagttaaagggatagatgtgataaatgtgacttgctaataccattttaattgtaagagtttctttcttagctcagagacgatgagtggtcactgacatagcataacgtttgtgtcatttcaggatgatgacgatgaccctttcatgagcagtagttgcccaagaagaaaccgaagataatgtttttaatggaacttagaaattgcatgatgcaggaagaaatcaaagcaccacatactgacttcacagctgaagatgtttaagtctgggcttatattttatcgttttctgaacggtgactcccttaagccatttcctagcccaatgataaggagattgcagctcttcttagcctttaacctggttgttattgtctggggctgctctgccatatcgagaacattaacttcctgacagaactgtgttttctgcttgtaagaacttggctaaaatcccattcttaaatgatgattagagaaaacccctccgttgttcatttctgcttcatgatcagaggctgtcagcctctgtgccacagctagcagttgatgggaaagcttacagacttgagtggcatgtgctgtaaccatctcctagatctccagaaagccaggccctcctgtgtggggggcacccagcaccctgcttgttatcaagtgtggatatcagagcttgctagaggaccgtctactaggaccagaagggtcttatatttaaataattagtagaaggtttttgttaagaacattttggctgttttggttttgatttttattcatgttatagcagagattcagatcctgtgcccattgggcaggactcattttcttgatggctctgtcagtaatgacaagctctttttctttctcgtatacttgtcaggaagaaaaggctaatagaatttttctgttttcttaaaaataccggaaagcttttttaggcaaagcagcatctgaccttgtggttagttcaggctgccatactgcagcagtacagcttctgccggtgttggtgccggacctcctccaccagcagcacactggcttcagttgctgtaaacatctctgagtggatgatcccagaactgaccgaaacagcacacttatatttttttacttgttttaggaaggaaataaataaaaatgttatcccttctgagataagataaataatctcattccctgtcccacactctaaaaacttctgctggtcttaattttataaggcaagtgtgttcagtcactctgataaaatctgaaccctctagcatgacaacatgatgttcttcatagttgtagacaccagtgcttgggctaaacagtgcctg

SEQ ID NO: 34549 - DNA, 1161 bp, Mus musculus
ggacttagcagctaagggcacttgccgctcttgcagaggccagagtgttggtttcaggggatctgacatcctctcttggctcccgagggcactgcacacatgcagtcagagcactcatataaaattttaaatgtctaaaacatttaaagaaaaaaaaaaaaggttttgtttgtttgtctgtcttggttttttgaaacagggtttctctgtgtagccggggttgtcctagaactcactctgttaaccaggctggtttcaaacccagagatcctcctgcctctgcctctgcatgctgggttaaaggcatgtgccaccactgcctagtgaaaaaatggtttttaagcatggttttattccgcagcagtcagatgaagttacagttactgtttgaagttttcagtgtgacagtgttgacaatgcccgtgcctttcacacttgatgagactggccagggtcccaattatttttatttgctttgtttttcagtctgtgggagatatctgaaagccacttcaagtacccaatcgtggagcagtacttgaagacaaaaaagaactctagtcatttaatcatgaaatacattagctgccggctggtgacatttgtggttatactgttggcatgtatctacttgagctattacttcagcctctcttcactctcggacgagtttctgtgcagcatcaaatcaggcgtcctgaaaaatgacagcaccatccccgatcgcttccagtgcaagctcatcgccgtgggcatcttccagctgctcagcctcattaacctcattgtgtatgctctgctgattcccgtggtcgtctacacgttcttcatcccattccggcagaaaacggacattctcaaagtgtatgaaatcctgcccaccttcgatgttctacatttcaagtctgaaggctacaatgacttgagcctctacaacctttttctggaagagaacataagtgagctcaaatcgtacaagtgtctgaaggtgctggagaacattaaaagcaatgggcagggcattgaccccatgctactcctgacaaacctgggcatgattaagatggacatcattgatggaaaaattcccacgtccctacagaccaagggagaggaccagggcagccagagagtggagttcaaaggtagggtgggctctct

SEQ ID NO: 34550 - DNA, 1167 bp, Mus musculus
gcccctaaactactggccctagaagaagattattagaggggacagggctcggaccccctccctgagcctagggtaaccctgactgtggagggaacccctatgaactttttagtggacacaggggctgaatattctatattaaaacaaccattgggaaagttaaaaaaacaaaaaaactatagtaataggagcaactggacagaaacaatatctgtggaccacctcacaaacggtagatctggggagaggaaaagtaacccattcctttcctgagtgtcctacgcctttactaggaaaagacttgttaacaaagttgaaggcccaggtcaggtttacttgaaccagaccagaggtgacacgggaaactcccacctccacggtattggccctgaggctcgaagaagactatcgactacaggaggagtccttactcagactttgggaccttggaaaaggccagtggtttacctatccaagaagttagaccctgttgcaggtggccttcttgcttgaaagctattgctgccatagctctgcttgtcaggaatgctgataagctcactctgggacagcaaataactgtagtggcatcccacgctcttgaaagcattatccaacagccccctgactgatggatgaccaacactcgtatgacacattattagagcttttgttgactgaatgagtgaccttcgctccccctgctgtcctcaatcccgctactctactgctcgagattgatgactctttacctactcatcactgtgctgacattctggcagaagaaactggtacttaaatgatctgaaggaccagccttggcctgggcgtccgagctggtacacggatggcagtagcttcgtggttgaaggtaagcagaaggcgggggcagcagtggtggacaggaagcaagtgatctgggccagcagcctccctgaagggatgtcggcccagaaaaccgaacttgtggctttgatacaagctctacgaatggcagaggggaagtctgttaacatttacactgacagcaggtatgcttttgccactgcccatatacatgaactaatatacagacaaagagggctgttgacatctgcatggaaagacataaaaataaagaggaaattttgagcctcttcgaggtcatacacttgccaaaaaaggtgg

SEQ ID NO: 34551 - DNA, 1252 bp, Mus musculus
ggaactaaagcactgcgttgatgttactatgcagtcagaagcagcctcgaactccccccaggtgtggggttaggggtgtggccctcatggcctgctcttgaaatgcttgtttatgaggtcatctgagctattgggcagattttccgtaactttgtaaactgcaaagtgaatggactgatgttggtttcctccatagttcgtaacggacctgagagtggcagcaagattatggttcagtttccccgtaaccagtgcaaagaccttccgaagagtgatgttttacaagacagcaagtggagtcatctccgaggaccattcaaggaggttcagtggaacaagatggaaggccgaaacttcgtttataaaatggagctgcttatgtctgccctgagcccctgtctgctgtgattttctccagaacaagttccagaaatactgactgtttgcagatcagttataagcacaagggagagatgtcttccatataagtcccgagtgcagactcatgtgcactgctgctccaatctttcacgggagccctgtttaaaagttacgtttactttgcagcctgaattctctcactttataagtgacgagtactttggaatgaaaaatgtatgtacagttatagtatgcagtatggggagatgtaaaatagtacattttttatacagctaacctgaaaatattactaacttaagggcttgaatttgctttttttaaaattccatctttaatgttaacataaactttgtgtttaaaaaaatctccccaagtattttgtgaatttctcataacccatatgagctgtctctcaagtcagctgctcctgctgtttctttaaaaatcacccaagaacatcttacaacacagattcactgagcaccccaggccctgttcctgaagttcaccaagatcacgcacagtagtcttccctagtacctggggctcttggggtgttggggatgtgaagtgcctttgtagccctcttcctcacctgggtcttcatgaacaggtcaaaggcagagggaaccaaaggacgtcccataacacagtctctgttttccctgttagtagtcactgcctttgcattccacttgaaatttgacaagttgagatataaaggagatgtgccaagtgtgacaactcatgcctctaaccctaggactaagggttgaagaccggaagctcaagagttcaagttcagcttgatctgcaagagttccaggctatttggggctatgtaggaaaa

SEQ ID NO: 34552 - DNA, 1562 bp, Mus musculus
catatgacactcatattaccatattatttaacatcttcatgtgaggggagcgtattgggaacatagatagctaattgagatgctcactttagtaaaccaatcttctgtctttatagcccagcaaagtctaccttctcttcataccacagatatgaatatggacagggaccttccattattcctgctatctaggaataacttacatttgggtggcattactaaatttttcaagttcatctcacaagggctaagggagtattagacacaacagtgtgggatctttgcactgagttttaaaagcccactgtggaaatcagtgcactacgttctcagcactcaggactacccacactcagaagtctgcagttgccttccacagatgttagtagcattgatgagccaggctccgcctgaattaggtctctacccaacagtttgtaccttcgtaatactgtttgcaagataagaaagaaaagaaacagcaacaaaacacaacacctaacatggccactccccatcatgagatataaaactaccctcttattatgtggtgtcttaaagagacacttttgtgccctttctttggctatatagactgttgagacagtgaaccacaagaaattggaattccctcaggaatttcatggcaggagaaggaaaaggctgaagcctggtgccagccagaggaggaacttgtcttctggaaagatgtcacgtacctctcaggacaaacaggaacccagacaacagtggtgggcaggaccacagcttgatctgcttagttaggtatacctcgtgccttctatttaaacctgaacctcatgccaggacccagcatgaattctgcaggatggtgggggaggggtgggaatccagagacctgtttattcctcttcccaaagtgactacattcaaggaatctttttgtgcttttcaaaggatattacactattactgagcgctgatggctagcatatggtgatgatggttagaaaactccttgctgttctgtgtcatagaacctgtgatgatcattagccagaaatcaactttccaaccttcccaatggcaataagatgtgggtctaggaactctttagaactaagccctaaacgttttctgattctttactttgtaatgcacatgtcttgtattatttttaataatagtgttatttttaattaaacatgatttttgaggtgaaactgaataaaatcacttaatactgttttttttttcttttctttcatttgtttgtttattgagacaagagtttctctgtgtagttctggccatcctggaactcactctgtagaccagattggtcttgaacttgagatctgcctgcctctgcctcccagatactaggaataaaggcgtgcgccaccactgcccagctgatcagctgatagtttctttgaatatcttacttcaacaaaaacaatattactgggctggaaagactgcttagcggttaagagcactgactgctctttcagaggtcctgagttcaattcccagcaaccacatggtggttcataaccatctgtaatgggatctga

SEQ ID NO: 34553 - DNA, 1121 bp, Mus musculus
gctagtacaagtacatcactcaaatgccaaatcagaataactagaaatgttcattcagtagggataaaaagatacaccatgtactagtcccacacctaaaattctatgagttgagagtctgaggtgagaagtttcaagtacaatctgagaaatggaaactttgtctcaagatcaaattcttggctgggtagctggcacagtaaatataagttcaaaaccctagcagccaggcacgtatgatggctaaatctggaagctctgattttagtgagaagccttcagtgaatagtatttggagtgctcagggaaggtaatctattatcagtgtgtgtgtatgtacatgtacccaaaagaacattaatcctttttgagcaattttcccattgggggaattttagctgagatggaactctcatgcataaactcaatagctgaaagtctacccagtaaagggcttaggattttgcactgcatggtatctgcactcagcagttctttcctgttgggtgttcaaaagacagtgctatagaaactcactatctggcatcgttggtttcttggctttgtgcatgttaaacctggtatttctaatgatacagtttttcatatgtacataaatttttgtatgtaggtgtgtcggggagggcagaacaacttgcaagtttgatctcaatgtgggggtcttaaactacctggtcttaaagctttctcttcttcctagggtgacacgagtgaaccctaccctaaaatggtaaggcattatttttctttttcttgctgtctttacttactagatgcatcatatatgagcctcattgtacataagaatgggcattgttggtcattgtccagaactggtcgatgtggctaaattgagatacaggtcatgcttccatcacagcagatacattacagtggtgacaatgagacctgtaacatttgtctgttacactcaagtatgttaattcattttataataatttcttatgatcaattttgtaggtttaaagataacatgaagggtccttaaaataaattgaagaaatcctcaaatcttctggtaagatgttaactctgaaaccacatgtgagatgaggtaattctgaaattcactgccaggt

SEQ ID NO: 34554 - DNA, 2020 bp, Mus musculus
gtggaaatgctgtattaggggctgtatttggtatttggtattgaaacaagccagtttccaaagcccccaaccattattggtattactatgaagagaattataccaaatgtgtgggtggttacaatgacattatacatttggtcatcacccattagtgggcctcactgtcctaatccagcgtggattaggatgcttagtgctggtcccactattcctgctcggtattgaataggacatagagagttccaatatctttagagttggttgagtaagcattagactgtaaatctaaacacagaaattaagccctctttttatcaagccttaagatgataatcatgatgaattgcaaatttgaagttgtagagaaattactaaggcttctcccaccccctttctgataggtaggagtagatggaagccagaagtagggtatttagctgttaattacattttcgtaggtttgattcctgccaatctagttaaggtcttagcttaattaaagtgattgatttacattcagtagatgtaggatatagtcttatcagaagttaaacttgttcgttttcttggacttcgatatcctaaacttctacatgattagttgggatgaaagggggagggcaactgtacttataatttttagggagggaaaataaagttgtgtttgaagtttatgtggtgggtaattattttggggttattgttggttggaaagatggtaagtaaaatttaataaatgagacatatataaaagaatagatgtaacactgctattgaggctattagcgttcctaggatgaggcagttattttgtagaagttctgtgatgatacttcattttgggagaaagcctagaagagggggatgcctctcctagggatagcagaattaaagaggttgttaatagaattattggtattttgtttcataggaatgaaattgagttaattgttgtggatgaaggctataagtggaataaatattggaactgtaaggataatataaataattaagttaagttagggtggggttgtaaatgaggatggccattattcatcctgtgtgggtaattggtgaatatgctataatttttcacatttgtgtatgcttaagtccacctcatgttcctatgagaattgcttggttagtttctgctaaggtggaaataagtcttattatagctatggctcaggctggtgtaataagtcatatgtgttcttgggtggcgatgagtataggaaaaatgagccgcttattaggaggattgaaagtagaataatggctattgttatttcttacgagattgtttggactataattcgaagggctccaggtagggagtattttgagtttgatgctcatccagatcatgagatgaaatatactgaaaggcttgatgttgctagaataaataaaattcctagatttaaattgattaggggtgtactgtgggtaattgaattcatagacttagggctaatgtcaatgacagggttggggcaataataaataatgatactgaggtcgttagggggagtatcagttcttttatgaaaagtttattttaaagatttattttttattttatgtatatgagtacactgtagctgtacagatagttgtgagccatcatgtggttgctgggaattgaactcaggacctctgctctgctctctctgggccaaagatttatttattgttatatgtaagtacattgtagctgtcttcagatactccagaagagggcatccgatctcattatggatggttgtgagccaccatgttgtttctgggatttgaaatcaggaccttcagaagagcagtcagtgctcttaactgctgagtcatctctccagcccttatgaaaagttttatagcatctgcagatggttggagaattccaaaatggcccaacaatgttgggaacttttcgtaattgtatatactctatgattttacattctaaaagtagaatgtaaaaatagcaattagaatggggactagaaatgttaataca

SEQ ID NO: 34555 - DNA, 1282 bp, Mus musculus
ctacattttctgtctttctttcttccttcttttcttaatgagtattcccctggtgagtagtatagatgacaataaatgttgctattttttttcccttgacctgaggtaaggcaattttaagaaggaaaataaaaaactaaggtatacaaatgcagagaatgacaccatctggtactaaaatttactttgtcttaattgcccctaatcctactttgatccctcaaattcacattttagttaaagtcaagaaatctgatgttgaggatcatgcagtattgagtcatgctgtctcaaaagaagaagcgtgtacaaacctgggtccacttggaaagccagacgatgaggttagtcgtactatttggtgtaatttatttagcagtttggttttatatttgtttagttcattaaaaacttaaaagactgttctctgagatctactgaaatagatcagtgatgaaaatagccaaatctgagcatcagaaggccttttggtctggggcatgatctctctagttctgagaagcaaaactacaaagcggtttgtctgtggtgagagaaggaagagtggtgtatggatggatggatgagggtgtgtacatatctgtgtgtgtgtgtgtgtgtgtgtgtgtgtgtgtgtgtgtggtcatctctgagcaatgatgaaaaggttttagtactgaattttgtcactgtgaaggctcctacacttgacctgagctcagaattgacaactggcaaatgtggatgatttgtggtttttctagatgtgtcatgatcatgatctaatatttcccttttacattttaggctgaaacacaagagatttctcaggagccattgtcttcagtaactgtttctactggaagcttcttaagttatgaaatcacagatttgagcctcacagatccaggtactatcagactttgtgaacatgtttaaggaactgcactggctggactgcagtgtggtagtggaagaagcactgcttcttagtgtgtccaagggattaggtttggggtagaaacgtgtcgcgtacaaagaaaaaagcatcagtgtcgaatagaatatagtactgtgcaaagtcaagtgtgcattctggcacattttccctcttggttccaccaatgtcagcaatatatattgctatgacatattatgtttgtgatgaagtacccagacattattaaattactgtattataaatgttaattaaatgttttcattacattcaatttcagagtcattttcagaacagacagagcatctagaacaagaatctacc

SEQ ID NO: 34556 - DNA, 1282 bp, Mus musculus; identical to SEQ ID NO: 34555

SEQ ID NO: 34557 - DNA, 1214 bp, Mus musculus
cttcacacagctggccagactgagagtgagcagggactttccccatcttctgcacacgtccacatgttacctgtttccagatgtggacagtattggctgtgtcttttattgcccaaggctctaatgctcagggtcaatttatgccttgaggttactgaaatcctgagaggaacaggagaagattgtctgtggtgttggaattccagctcaggcctgcctgcctatcaagctcatgcgtctacgctcctaacagcagtccccaggctgacgtagctcttcattctccccagtcacatgtgttcgttgtgtttgcaccacactgtgtgtgtgcatgtgcacacacgctgacaagttcatgcaaggcccctaatttgtttgctgattttttttttctttccactggatatcagaggcctgcagggtgaatgtggaaaaggtggtactcaaggcctgcgttacaccatgtagctggtgtctacatagggaaatgacagccctgctgaaggccatgcttagtgtttgagcacgtggtctggggcctatgaggtcccagtgctccatgcacagatgcaggagtcctcgggagtaggcagagagtcagtcacagagactgtgacttgagtctggacgatgtgtgtgacagttagtgctacaaaaggagtaaggtgatgcatgcctttaagcccagcactctggaggtagaggcaggcaagatttctgagttcaaggtcagcctggtcctggtctacagagtgagttccatgacggccagggttacaaagagaaacctaccccctcccccacccccaaaagccctaaacctgaatggaataatagtggcctgcggcatgagagagacttgagagtgatgtgcagtaggtgccaaaggtattgccctaaataatagcagattcaaggcctcaccttgggtctggcttcttagaacacaaattgaaacgagccatgactaacctgtagagagcagattggcttttattacacgctgcatttgacagataaagaccccaggggcaaggtgcctgttcaaggtcacagtgtaatggagaggagagccgagctggatcctgccccctggcccgctgcagtcattactctggcagccctcctggaggaaggagctggctacctgggggaagttggtgttgtgaattggatgaatgagttcccagtccagatcctgacctgtctgtctc

SEQ ID NO: 34558 - DNA, 1146 bp, Mus musculus
agaagataaaggatttcaacatggtataaattaaataggcacatggtttaaaaacctctttgaagcaccccacaatagcaaagtacacctcctgtgtatgtgcacagagatgcgttgattgtgttttattccatgggtgatgctgctgacaagccctgaaggtacagtagactccagctgaccaccgtgcaagcattagatagttcccagagccagaagcgctctattgttctgctctacagagcatagaggagcactgggaagcactgacaaggttctgacttcctctttcagccgtaggtgaaagggccagtgaggacctggaacattgctgccctagctgtgtcttgttagggtttctgttgctgtgagaaaacaccacaaccaaaagtaattatggaggagagggcttctgtttacacttccacatcacaatccatcatcaagggaagtcaggacaggaactcaaggcaggaacctggaggcaggagctgatgcagaggccaaggaggagtgctgcttactggcttgcttctttctcatggcttgctcagcctgctttcttacagcacacagggcaaccagcccaggggtggtgccgcccacagtgggcatagccctctcagagcaatcatcaatctggaggatgccccacagcctctcctctcttccaaaatgactccagattgtgttaagttgacataaatctagccagcatggttaccattgtaggaaatggagttccagaagtgttggtgacttaagcttgagtcaagagaacctgatacttgacccaattcagagatggaagaaaaatgatttttcatgtcatagtcagtaatgataaaacacattcagcttaattttagtgtaaagcttaattatagtttcatcctttgggagtgtgtgtcttatgtctgaatagtatatgtgacatgataaaaagccagaaaagaaatccaagaaacctgcctggtggctccatagatcccaaacagggaaagaagctcacagtcttttatacagcaggagactggcttgctgtagggtgtgctgtagggcagaggtcacaggaggtgaggccccttaaacagtaggagactgcgggctggctgtgtagtgttctagtcacacgcttccttgtct

SEQ ID NO: 34559 - DNA, 1127 bp, Mus musculus
tccccgcccaggaagcagcatgtggctctttgtcagctgtgttcacggtgtgttctactcggcatgctcagtttatttttgtgttttcacctgttccttgtggaattcaagtgcagtgggtttttaactggtgggtcactgcagggctttttaagttccacacacagagtgtgagcatcttatcagcccggatttcttatggaggaaggctgctgaatcaacagctcatatgaaagtccccaggttatcaacacaagaggagtcacaatacagaaaggaagatatgctgggagaagaggagatagttttaatttgtagtgtgagccactgtttatatgcaaagtataaaagaaacacacacttgtttaagggtgtctgaggacgtatttaccatttgatcatttttctctgatatttggctttacagaattctatcttctaaagatttttggagaagatatgttgactctagcagctcttccttttgtttggggacttggagggaggggaagcaggcacacatggcgaactcgtgtttgctggatcacatggtgactgcagtgaccccagcagttacttcctgtcatggtgggaactgtccctggaagctagtcagttgcataggtgctattttctctgtgaagcattgagaagaaagctgttgcttactcccaatggctctctgttccctgatgctccgaggaatgcattggtgtctgagtccactcaaaacactgttcccacaggactttttaacacaggctctttccctccatgtgtccccctttctccacagttgaagaagtcggagctgggaagttttcaggttagatgtgccagttaatgtaaagaaagctatgtttgtggtgctccagtactttcctgttctgttctttctgacctgtcaccaaagctggctctgagtcttgttagatggtgtacttaaagtgttcataagccatttatggccgtgcgcttgtgaatttcctatcagggtttgatcttatttggtatatgtgcatttgtggtcctagagaatgccagcttaagtgcacatcgatacccttgctaactaggttttacatagctcaccatttcactgtggtgcccacagatgcagcacatct

SEQ ID NO: 34560 - DNA, 1153 bp, Mus musculus
tttcccatattatgagcactaaatgaccatacacatctctgtgagttatggccaggctcacaaacagtggaacaggcactgcatcacaaatgctagtagtcatgcaaactaaagtaagacgcttagcaagaagagtttcttcatgatgaaatacctttggttcccttctgattgttacagcactgttgtctggattttatgaaacattccttccctatttaaggggcaatgaccccccaaatttccttgaataatcagacaaaaatgataaggcaaaaggttatgaaaactgaagtcagatgcctgaactgaaggccagagctgatggaaaagtcgttttctacggcagtgagttatttccatgttgtggattaggtggttcatttagtgacaatttttaaatgaagtgtaaagagtgaatagtgtgcatatttcacattctgtgttcacaccaatgaactaagtcttcaaaagtcagaggcttacttacggatcctagcaggaagcatggatatagttccatgagaacatgttccttagctctctggaccctattggaagataagcaacctataaccataataaagaaaggaacatcgaaaggactgcccagaaatgcaaaggaagccatattggagtatcacagatgtagctgatactgtgaggaaataagatgggaaactgaggcaaaattctaagagttgaagcaagacactgaaggtttcaggaaagagaacatcaagcagagcatcaaagaaggaggcagaatctctaaacagacagttgagggtcttgaatgtcctcctgaacggccatttggaactttttgaataagagggctgaatgactcagtgtggcctgtgttgttttgttcactaaggttgatccttgtggtgctaaatcctacattagttacgtttttaggctctgtgaaaaagaaaggcaaagcaaggaaggagggctttagcctggctctcagctctagggtccagtggatcacaatgacagtcccgtggcaggagcttgacatagctttcacagtcagaatacagagaaatgaatgccagaactcagcccactctttccatttacagagtccaaagattccagcatggggaatggagcctctcatatttaggatgggtttttgctc

SEQ ID NO: 34561 - DNA, 1237 bp, Mus musculus
acaaggttccacagaaaaaagtaaaacttgatgaagatgatgaggacaatgaggatgatgatgatgattttgatgaagaggaaactgaagaaaaggtcccagtgaagaaatctgtacgagataccccagccaaaaatgcacaaaaatcaaaccaaaatggaaaagacttaaaaccgtcaacaccaagatcaaagggtcaagagtccttcaaaaaacagggaaagattcctaaaataccaaaaggacctagttctgtagaagacattaaggcaaaaatgcaagcaagtatagaaaaaggcggttctcttcccaaagtggaagccaagttcatcaattatgtgaagaattgtttccggatgactgaccaggaggctattcaagatctctggcagtggaggaagtctctttaagaaaaggatttaaacagtttgaaatattctgtcttcatttctgtaatagttgataactggctgtcctttttataatgcaaagtgagaactttccctactgtgtttgataaatgttgtccaggttcaattgccaagaatgtgttgtctaaaatgcctgtttagttttcaaggatggaactccaccctttacttggttttaagtacgtatggaatgttatgataggacatagtaatagtggtggtcagatgtggaaatggtagggagacaaatatacatgtgaaataaactcagtattttaataaagtaaaaaaaaaaaaacttggaaaaggacatctgaaactcaaatgaaggggaaaatatgaagcaaccaagacaatgattacattcttaacgaaaaccatgctgccattaattaaatgtattttacctagatgattatggatgagttcagaagtgatcagtattaggagtgaataatgaggtatctgtctaaaaaaaagtactaataactttgtagggaatatttatataaaataaagaatttccttaagacttggataaaatattctaaaatctaaattgcatgtgcagatgggttcatctaaatattttataaaaattctatttttatacaaactactatagcaaatagaaaacaggaaatgcaccctaactgattttataaatccagccttgttctaatattgacacatatttgaagaaatgagtatattaaaagacacagcatctcccatgaatgcccatggaaatgacactttacatggtaataaactgaaatgaaaactgtgtgtcactgaatttaaac

SEQ ID NO: 34562 - DNA, 1137 bp, Mus musculus
agttgaaacaatctctgaggctgggccagatagggctagccattttgaagttgcccacagtgcagattttgagagaacatctggccctggaaagatgttgggactgatattagtgttatgggcaatttttttggttaggtgtgcatgaaacacttatatccatggttctggtagctggaagaggagattcccatgaccagggaaatgaggattatctcaagccacactcaggaataggtggaaaatcttaggcctttgattaatggaagtactaatcgggcctcaacttgacctatgtgaggtgggttcaagttgtttccataaagcttactagcattttttaaaaaagacgtcttagacatggtagcattaccactgtttgtaaactttacagaagttcatattgaagaaaagacagtagactcacacctttatctcatagtagaagcttgggaaatgattttgagtaaaaagcatcagaactccttaaggtgacctcagggataatagcaacccacccatggagtgaaagggcaaaagctcacttgaccttgattatcggtacaaatacagtccatgaagtcagggcttctttactctatccagaagactgaatatatagagattgtattgacagctttagcacaatgagaagaaattttaattctgtctttagaaaacaaccaaagcaaatttaaaatcttgagcttgtggctatgataatagaaatcagtgctcacaagagctagattaatagcttatcagaacttaattggttaaactctgaacttttgaagccttaatatagcaatagcaagagaaagaaacttgaagcactttaaaatttttataacataagccactttcttgtacctttacaaattacatttacatcatgcttttgtatcataactgaagatttcatgtcctaagaccatacacatttttgcacttttttctatccaatcattgactgcaagacacaagtagttgattagtgagagcaggaacagtaaagactgttcttttaaataaagaaatagtaaaaattatattggaatctgttttgtacatctatttcttttctgagtttggtaacaaggtaaactgcatcaagatctagtagtagctctagga

SEQ ID NO: 34563 - DNA, 1605 bp, Mus musculus
acatcccaggctgactgtgctttcctgattgatgttgctggttttggtgaatttgaagctagtatctccaagaacgggcagacccgtgagcatgctcttctggcttacaccctgggtgtgaagcagctaattgttgctgttaacaacatggattccaccgatctaccatacattcagaagagatatgaggaattcgttaaggaagtcagcacctacattaagaaaattggctacaaccctgacacagtagcatttgtgccaatttctggttggaatggtgacaacatgctgaagccaagtgctaatatgccttggttcaagggatggaaagtcacccacaaagatggcagtgccagtggtaccacgctgctggaagctttggattgtatcctaacaccaacttgtccaactcataagcctctgcgagtgcccctccagaatgtctataaaattggaggcattgagactgtccccgtgggccaagtggagactggtgttctcaaacctggcatggtggttacctttgctccagtcaatgtaacaactgaagtcaagtctgttgaaatgcaccatgaagctttgagtgaagctcttcctggggacaatgtggtcttcaacgtaaagaatgcgtcggtcaaagatgttagacaaggcaatgttgctggtgacagaaaaagtgatccaccaatggaagcagctggcttcactgctcaggtgattatcctgaaccaggcaggccaaattagtgctggcaatgctcctgttctgcattgtcacacagcccacatagcatgcaagtttgctgagcttaaagaaaagatcaatcgttattaagaagctggaagatggccccaaattcctgaagtccggtgatgctgccattgttgatatggtccctggcaagcccatgtgtgttgagaggttctctgactatcctccacttggtcattttgctgttcgtgacatgaggcagacagttgctgtgggtgtcaccaaagctgtggacaagaaggctgctggagctgacaaagtcaccaagtatgcccagaaagctcagaaggctaaatgaatattattcctaacacctgccaccccagtcttaatcagtggtggaagaatggtctcagaactgtttgtttcaattggacatttaaatttaataggaaaagactggttaatggtaacaatgcatcgtaaaaacttcagaaagaaagaatgttttgtggtccttgtgtgtgtgtgtggcagttttaagatattagttttaaaaatcagtactttttaatggaaacaacttgaccaaaaatctgtcacagaattttgagagcattaaaacaagtttaatgagaaaaaaaaaagtgctttgaaattaagcatgtggagtacccgtggttcagtctgggtgtctctcacttagttttagggctttctcagtacatgaagcagtcacctgaaaggcgacgaggctttgcgtaggaagagtcttctgcacaatggaaaccatacttctttttatataagttttgcaatccataactatttcagatgtctttattatctgtagaatcataaatgaaatatttttacaaatattcatattgtgat

SEQ ID NO: 34564 - DNA, 1230 bp, Mus musculus
cacgagcaatgaatgaatgaaattacaggatatgctacccccaaaagaaaatcatttggggatggagtgatggctcagcaggttaacctcttttttttttaattaggtattttctttatttacatttcaaatgttatcccctttcctggtttcacctccaaacaccccctatcgcctcccccctcaaacagcttcccaacccacccactcctgctttctggcccaggcattcccctatattggggcatagaaccttcacaggaccaagggcctctcctcccattgatgacggactagcccatcctatgctacatatgcagctagagacagaattcccaccaggtgttttctttggttggtggtttagtcccagggagctctggagtactggttagttcatattgttgttcctcctatggggctacaaacctcttcagctccttgagtacatactctagctctttcattggggaccctgtgctcagttcaacggatggctgtgagcatccacttctgtatttataaggcactggcagggcctctcaggagacagctttatctgcaagctggatccttaacttcgtaactttgatataaggattggctctaagggctgggtcagtcgggctggagcggaagagggaatttcgccaggccctcccacacaggggaagacaccccccaccctcccaccccccccacccctcctggcatacacagcaatgaacaatcagagaccttgtctcaaataagatgagatatgaggatagacactagagattatcttgtgacttacacacacatgcacacacgtacacacacacacaaagagagaattttaaatgatatttaaattttatcatttcagcaaactatgttgttacacttgctaattcatatttttaaaccagcaagttttaaatacttcattacatattaaagttaaaagatatactaacttctttttaatgtaatttattttttaacttctctattcttatcatctactcctattgatcctattaatttttagatatctgcagcaacactattttagaaaagaggaagatacagatttcagaatagaatgataaaactttaaatacttatcctacaattaatcttgaattttgtaaaattgtctcatctatgcttaggttcttcacttaaaaataactattgttcttattttctgggtcaacacagttctaatcaaacctatgttctgaa

SEQ ID NO: 34565 - DNA, 1158 bp, Mus musculus
catagagtaggtggctgaatgactcgatgcagagtgtggctcatcaccgtgagagcctttgctgtctgtcctgtataccttttcatgctttctcctctatgacactttacctttacttgactcgttcattctgttcctacctccatctcatggtaagaattataatacggttttgtttgctttttgttttattttgaatgcttagctatgcgaatggcatagagctcatatgtgtacaattaatggtataagttgaagagttgggcattcaagaaccttggtaattggtggacttaaagtcatagcctatgtcccaagaagccaagttcatctttgataatttagttaaaacagataaattaatagtgaaaaacataaaaagcttttatttatgtgatcacactagggagagggacaaagatccaacagcatccacccaaagtccattttggctgagtgagattaacgcttaaatagagggctagaaataatgtataataaagcagttgcagtcagggtatggccccacctaccatgaactcattatgatttggccttccatttgatttggtactggattttggccttctattcctctggtctgagattccttgagggtgggggatactcaaaacttatgagctttcaaaatgaacatgacagtattgaaaaagacagcttaactgctatttgacatttttcttccaaaaatttctatcatcagcgtttattttttgcttgttactgatgtcaatgtaaaaggaataataaaacttgttatctttcttaatttctttgttttatggaatgtagccatggtctgacccattttgggactctgaggttattactaaagtgtactgcagttgataattcatttttttccttcctatttttttttaataatgttactctaaatatttcaatgtgtaactttagtgactagaaatggaattgtatgtatgttcagttttagctgaatggaggcaaatgcttgtagtatccaccgggttgtctacacactagaatctttttttcttccttgctttttactttcttcactggtgttaaggttgagaccttttctttctttttttaggatttatttatttatacaccagaaaagggcatcagatcctattgcagttagttgtgagc

SEQ ID NO: 34566 - DNA, 1675 bp, Mus musculus
gtcttgaactacctacaaccaaaaagcaggagaaacaaaaagatatagctgattgattagaagagaaatggaattcttaatgtgtgtggtgaaatagttgcttgctgctgtaatctttttgttgtttttagtctgtcgttttggggtcatcatgaggttcttcaaagccaaagtctgttaaatgtttgtgcctctatcttcctttcgagttgcataatataattattcaagtctcctcactagaactatagttgttgcccttacacttgaagggagggaaagaaaccataagtataattgcagtattttttagtataaattattataagcaggaagtgaaagaagttttgttttgttttgtttaatcctgataactcctttttcccttaaatgggaaagcaaagtggtatataaaaaactgagttggcctctccatgaacttttgttattataattcttgaaaatctttaaggaaaagactttttgtttcttcctatgcagtagttactttttgtagtactaattctgaagtggagtcaaaccgtctgtgtgtgctggctgagtttataattcatttgcagttaaattaattttagaaagttgcttcaatacttgcattacctggcaagcagtataatttaagtctataggaaataaactaagattatagaattacaatttggttaaaattcatcataagagtaagcaataatgttaaaatctctttcctgattatttaaagaactctttatggtgttttgacaaaattatatctgatttatagtctaaacactcttatgggtgatatctgtctccctgatgaaaaactgtatctgttaaattgtgaatgtgtagcttcgttgaaatacattaaggtgtgtgttgcggcttgaatctgaaatgtacctggaggcttgttttgagctgttggtctttcaacttagggctctattttgaaggctgtgaaacctttagcatattgaggggtgagcctttaaggattatacagtcttgctggtctgatccagtcaggacatatgaaccacctctgtcccatactcccactgctgcctcctcagccattatagattgtatcctctgaaaccgtgagccaaaataaaccttacctcccttgagttgtttctgtcatgtgttttggtcaagacaagaaaagtaatatacaacgggaaaattacagtctgtctgtattttagaatacctgaatgttatgttttaagttaatttagtagtttaattcttgggagccattttaagggtttcatgaagagttttacatataatggttatgtgttatacttcattttcattagttgtagatgacacagataaacttagatcaaaatgaaagttgaaggtctttatttctcaaactctttggtgttaatagaatcctaacaaagtttcattagtctattgttttagttagtaaagaatctatgggggctggagaggcagctcctttaagggcactagttaatgggttcaattccctgcattcacgttcatttcacacacaggaccttcttctggcctccatgggcatcagtcaattattctgtgctctttgatacagcaagcaacctatttgcatgaattatcattctgctattagtagataactattaaagatattatgaacctcaggcaacaagta

SEQ ID NO: 34567 - DNA, 1099 bp, Mus musculus
ggctttccagcacccactttgggcacttaacaactacctatgacttcaactccaaaggatgtaatgctttctttcagcattttttttgtgagcacccataaagagaataatttaaaaaacaaaaattactctgaaaattgggtcttgtatacacctaagggaaactttaaaagctcattaagagatctagaattcactgacaggtacttaggggtgtgtgtgtgtgtgtgtgtacacatacatacacacacacacacacatcatttttatttctctttgtctttgtttttaacagctccacttttgaagtttgaaaagtaaggattggtttgtgctactgttttgttcaggttattttattttactttaatctatgttcgttcattcagtattgttttatgggcttattctgacgtttgagctttcaatgtcagcctgggttttgtttttattttttttttagaaaggttttattggtctctttgatttctttcatatcagtagaaggtcatgtagaaggtcatgtttttacctgactgcttatcttctgttcttaccactgtaattctcctcatcttgcatgggccttttaattaatgatagtttctcatattattgggtatatagcattctctctaaaatacctatcttgccgagattttacatttatgtatgtatctaatatacatatatgtatgtatatatatatatatgtatatatttttgatttttagtttttatggggatttttagatgtgaagaaattctttaagaagaaacttccaaagacttttattttcattagtgatctttaaatacttcatgtcatttaaagattttgtattaaaatagcaagatttgttactcatttttcgctaagcaaatatactattcaagtgaataaattaaaaaactatcttttcaaaacttttcctaattacagactaatgattaaacatgaaaaagggaaaacttcccaaaggttgagaacactgtcttttttgcaacaaagacattgtataagtatattcctgttttatgttatttgttataatctttttgctgcctgcaaattatatttgctatttttgttttggtc

SEQ ID NO: 34568 - DNA, 2114 bp, Mus musculus
taataagtaaataaattatgcacatgtgactcttaataactttgcaagccttctagttacaactgctccttaagaaaattgattaaaagtgcaattagtcactgcccctttacagccaagtatttaaaatattttgtcaacaagttattaattcaaaaaattagatattgtgaaattttaaaaccttaacttcttaaaagacaaaaaagagaaattgtatccctgtacatactatttagtgcattcccatgcacactattaaagtcttacctttattttcaaaatctaatattttaatgtcaaagagtttaataaatgctttatagtatcttaaagggatctacttattggcttatagattgatcctaaaacagctaccttattagaaaagggaaaaacaggttttctccacagaacgctgcagaagcatattagtaaattcgtgtgacgagctagtaggtaagttgactcatgtcctgattaaattgactaaaaaactaaattaaattcatgttttagatccattcttacctgtcattttttcagtttagactagcttctagccttttaactttatggcaatagtacatcagagactgtatattcaggcttagtaaaattagtcatttaatagagtcataatgatttttctcttttcttcagtgtgaccagctattctaactcaatcttagactagtctaatattcagtccaatgttagagattcctatattctaaattacctagcaaagttaattcagagcacatcccccacttcccctagatccctaacctcagaaggattgctggccttacagctagtagaaaaagctattaaagagcaattggtcacttaatacattggtaaaatagaaagaccccctggctaacaaatggaagggtccagatccagttctaatttggggtaggggctcagtttgtgttttttcacgagatgaagatagagcgcggtgactgccagatgtcagatgaacacagattctaaatcttctaaagtatcaccttgaggactaaaattcctcttttgcttaaaagtcagcttgaggactcaggctctgaaaaaagctactctctgagccagctcccgacaggaggccggagactagcctcagctttacaatttgcatttgaataaagtacctagacttcctcgaaagaagttctgctttcctactttctcactgtcgagattttgtctttcaagcaggtaaatcaacattctggaggcggaccagcggatgtgcatccccgcccccctagagcacacaggtggctgctgttatctcctttccaaggacatttccagcaggtggctttcagtctgagttaaaaattaggtttaccaagagggctagaatagtagatatttctatattaataaagattggtttttattttgatagacaggcttagtcccttagctgacctctgccttttcacccttgctgttactgcaaggtgtccttaggctgtggaaaaaacggggatgaggaggaacgacttccagctcctattttagccacaagtcgtggtgttactaatgacataattcttgcctaggtcttgctaaatctgaggttgataattctcctttaggagctgcacagcactcagaactgtgcatactggtttgtcattgtacaaattcagtatgggcatcgcttggtgcagaggcactgcaggggaaggtccagcttgaccatttctgagtttcctgtgagataaacccggtttgaaagaggttggtaccaaattttggctaaaaatgaaaaatatttttcggctctgcctcacctccccaaaaggtaccgagagccacaggtgtgggtcttatcagtacccacgagaggaatcgggtccatgtccacccaagccaaggttaaaagcccactcatctacagatgagaaaatcatttgatcacctcagttaagcgttgccttatttaacttaattaataggggggagagagattggagacgtactattgaaagggcaagcccttcactgcctcccacccaaataaaaaagccaattagccttgtactacaagagccagtcgaactccttctccctgtttcccacctatcatccaa

SEQ ID NO: 34569 - DNA, 1224 bp, Mus musculus
atatttctatattaataaagattggtttttattttgatagacaggcttagtcccttagctggtctctggcttttcacccttgctgttactgcaaggtgtccttagctcaataggctgtggaaaaaacagggatgaggaggaacgacttccagctcctattttagccacaaatcgtggtgttactaacgacataattcttgcttaggctttgctaattctgaggttgataattctcctttaggagctgcacagcactcagaactgtgcatactggtttgtgattgtacaaattcagtatgggcatcgcttggtgcagaggtactgcaagagaaggtccggcttgaccatttctgagtttcctgtgagataaacccggtttaaaagaggttggtatcagattttggttaaaaataaaaaatattttccggctctacctcgcctccccaaaagatacccagagccacatgtgtgggttttacagtacccacgggaggaatcgggtccatgtccacccaagccaaggttaaaagcccactcatctacggatgagaaaatcatttgatcacctcagttaagcgttgccttatttaacttaattaataggggggagggagattggagacgtactattgaaagggcaagcccttcactgcctcccacccaaataaaagagccggtcgaacgccttctccctgtttcccacctatcatccaaaaatgcggaggaatatcaacttagtgttattttcccatttgttcagtcaaacttagccagagttccaatgccctacttaaaattcaactagaaagttacctaccaagtactaattagcattataaagtcagagtctgcagctccaggcctttcagttagttgtttactagaaaggacagtcttaagccagatatagtttaccataagaaaagttaaagaatcccagtgaagcaagttttttctttagccctagattccaggcagaactattgagcatagataatttttcccccctcaggccagctttttctttttttaaattttgttaataaaagggaggagatgtagtcttccctcccccagcttgaaacctgcttgctcggggtggagcttcctactcattcgttctgccacgcccactgctggaacctgaggagccacacacgtgcacctttctactggacccgagattattcggcgggaatcgggtcccctcccccttccttcata

SEQ ID NO: 34570 - DNA, 2013 bp, Mus musculus
tttgtagaaagtgtgagaagacctgagttgttatgcagcaattgggatctctgtgaaaacctagggactgggaagagtttgtattgagtagcaagaaactgtcaacatgtatcatgctcccaaacacacaagaactgaggcagagagtcttcaccctgagcattagtgctaaagtcagcactactacgtgagcacaccagagtgaatcttgcattaaaaaatggagagcaaactggccagctctttattgttgttggctcacaagccaagatgcttctctctctttttttttttttttttttggattttttcgagacagggtttctctgtgtagtcctggctgtcctggaactcactttgtagaccaggctggccccgcctgcctctgcctcccaagtgctgggattaaaggtgtgcaccaccactgcctggtgctttcttctttttaaaaagaaaaatctggcaggggctgtacatggcactcaaattctgatatacatgctgtttataaaaatcttcatttaaggtttggtcagtagcattggctttcaacctggagcagttttgctgtccagggcacttgtcagtgtctgggtaggttttagttttgagaatggagggagatgtgttagtgatacagaaagaggacatcacagatgctatcaaatagcctatgatacacagaagtcttccatatcaaggaattatgtgtactactataaaagtactgacgttgagaataatctcatgattctcacatgaggagaaattttttgcagctttttaaaagaaaaactgcaatgcagttctctctgaaatgtatgaaaacgcatactgatgataactatgaaaatgattttagccacagtcccatggtgtatgaatgtgaggttgtatttacaagtcttttttgataacaactgagtctagctctttagttttcttgacctttttattagggttagggttctctgaataactcttagtcctcatcataaacaattgaatgtagtattttttttactatagctttgtaaattatatctttatttcactttagtaaccttatcctgaccagagacatgtttagaaatgtgtgatgttctgtactagattgtgtgggtatttttgagtacctgtgtcctattcattgtggtcagagcatgaagcttcctaacagatcctttagttgggtttggctttctatccaaaaagccaaaagaataacaaggacctaggatttcccatatccatttaaactccttttatagcggaagactcacagttttatctgagtatcaaatagttccactataagaaatctttttcagtttttcatgcaacttgtattctctacatgccatgactctggccgttgactcataaatagagataagtgtgtggcattctgagaaaaacctcttggaaaaaaatctgatttttgtttttttaattcattttgtggccctgaagatgaaaactgcagtctaaagatgacagaatagagacatcacagtgatactagtctgtattgtggcttttgaaagagtttaccttggaactcaatttattaaatagactttctcttccctgagaaaacaataaaattgattacaagattacaatgggactgatatttgtttccctgtttgctttgttgtttggaagtgagtttcctctcctgttggatgctgtccaaaacagatagacctctttctctgaaaagctaatcactgatacctttatgtacagatttaattggtatcctattagatacagatttttaagtactttaaatcaagtattcatgtgacatttcaagttgatgtgttatgcttttgacagctgtgtatagatagactccaggttactgcaggagtacatctcaataaagtacatccctttaaacctatcatcagtcagaaacaaagtagcaatctcaatgcatcctaagacttctggtatgtttgtgcatggggatggaggccagaagatatctgatgtcatgtgtac

SEQ ID NO: 34571 - DNA, 1103 bp, Mus musculus
cttggtagtagctattattgcagtctaccttaaaccattttgtttacattatgaacgtctaagtaagagtacatagttttactgagacacctttggcatataagaaattacatataagttttaacatctctgtgcccatagaaccatcaccaccattaagattaaaaaacaaaaaggtttgtgatttgcctattattgtacctccttgttcctagaccaaccatttgcttgagtataagcagatcaggcttctctgctggattgtgtttgggaaaacctcaatgtttttcagtgaagaaggggaggccagcctcagaaactcattttcttgttcatcctatatatagattcatatgattctctggtggaacccacaggccaaacgagcagatctgcagaaacacttaattggagtccagaatttggagactgttatgtaggttatcttgggaattggaaggaaacttggcaagtgatgctaagcaggtagaattgtctaggaggccagaacctgcatatttcacaagacttaatgctttaataccttggcaaagcaattgaaaccctcctattaaccagttcatgccttaagggtctcaaaattgatatttagtgaatgttactggtttatctttatttctggagcagaataattttataagccccaaagattggcttaatgcatattctgaaacagaaaactcattcaacatctttgaaacttctttgtctcacaatatcctgactaggcgcatatgtatgtgtgtgtgtgtgtgtgtgtgtgtgtgtgtgtgtgtgtatatatatatatatatatgtatatatatatatatatataaacaaaagccagcacagaagcataatctgcttatactcaatcaaatggtaggtttgctagagaacaatggaacaatggggaggaataataggcaaatcacagaacttatggagatcatcttaatagaagtcatggttttatgggtatagagatgttaaaaacttatgtggaatttcttatatgccaaaggtatctcagtaaaattattcactcttacttggacatgcataatgtaaacaaactggtttatggtagactgcgatga

SEQ ID NO: 34572 - DNA, 1204 bp, Mus musculus
cagcctgcttctgtctcctgagtggtgggattaaaggtggtcacaccaactatgctacttgagtactgatactgttaacatggtttgcagacaacacgtgtgcctgcatgagtttatgtgtactccataaatgcaggtctctgaagaggcttagagggaagcataagacgctctggagctgatattacaggtagttgtgaacctgctgtgaatactggaacggaacccaggtcctctacaagagtagtaagggatattaactattgcatcatctctccagtctccattggctaatactttttttcccctgagaattcactttgtagaccaggctggcctcaaactcagaaatctgcctgcctctgcctcccaagtgctgggattaaaggcatgcgccaccaacacctggcaactaatacttagtatacactgatatgtcaaaggccatagcctgaggagaaatcccccctcctcagctttatcaaaagacaattccttgagttccaggagaacacaactggatcggccttcttcatataggtggtctacttaacaacagtttgagttctggggcacagcctaccttctgaatactatgagggaactctggctgccaatgttgtatattgatgagattaattgcagcagccaagaactcaagaaacaaaaacctctaaggagctcagtgatggctgggagagaagtcatttttctcagtagcatatttacctgtaatttgtccatgcttcagtaattagctcccacctacgctcatgaaacaattgcattggttttggggcgttcacatgcacaaacatagaagggacttgttggaaaggagttcagtgatactcctgaaagtgaccagaatgcattatacatgtgtaagagtgtcaaaacgtggggctggagagattgctcagtggttaagaacaattgttgatcttggagaggaaggatctggacccagttcccagcacctacctagtagttcacaatctgtgcccccaactcccttttacccccacagacaccagttatttggtgctcatacatacatacatacatacatacatacatacatacatacatataaacacgacaggtatgcagtgctcatacatacattcatatgaacatgacaggtatgtggtactcatacattcatatgaacatgacaggtatgtggtgctcatacatacat

SEQ ID NO: 34573 - DNA, 1331 bp, Mus musculus
tttaatgcccataattttcatgtcagctctaaaattctttgctggtgtgtctggaagcattcttggagttttattatgttacagttttaaattttactttcagggttttgtttgtttgtggtaacctaactatgtaatccatgatagcatagagcaggctggccttaaacttggagcagtatttcttccccaggccttttgagtgctgagattttgggtttgagccagcctatccaacttaactatatttcttttactattatttgatttccttttcttttttaacccccctaagcttatatacgtgcatactgtttttgttttagttactgttactgtttctgttttggtgctaggaattgaatttgtggcctcaaggatgctaggcaggtgctttaccatcaagctatagttctaacttcattgttgaaattatgtggaccacataaagggcttttattgtttcatttgtttgttttttggataatatctttataatctggctggcctagaacgtgctatgtagaacccggaactcacagagatctacctgtctgcctcccagagtgctggaattaaagttatgtgttcctatgcctgccattgactatatgcttatttgtaaacaatttatttatgtttttgtatcagtgttatactgtttgatttctgcctatatactggttttgtttttgctgttctttcttaagacaaggtttactggagcttagactgcctttgagattaactaaatgatcaagaatgacctaatgaccttggacttttgatcttcttgcctttatctcctagtatgattctaggcatgtaccaccatactttgcacgctcagtgcttatcaaacttcatactaagtggacatctctagccctgtaatacattgttaagcctagaatttttgtttttatttaggtccttttgggcttaactgaaaggttttggtttcttatgactttgtttttttttttttttttaagcctgtgggggaaaatgcctttagaattgttaatgcagtggtaatctacaaagcactttgggtaggatggacattgtaacaatggtaattctctcaatgtgtgtggcataccttgcaaattgtttatagacttgttcatggtagtttagattttttcctgtttaattttgttctctatcattttatgtagttttatatgttgtataatattttgctttttaaatttgtagtatgtaaagatactgttgacttgaaaatcttatgttttatgagtttttataatttttttcatggatgccctgttaacctgaaacaattttacttttcttatttgggt

SEQ ID NO: 34574 - DNA, 1133 bp, Mus musculus
agggagatggaccatagaaatgacaataccaaaatattgccagaacctatagctctctgatggtatagaattcacaattgaaaatacagagacacaccttctcacaatgtgaagaaagcttactccaatatcccataaacctggcatgataaaataaatctgagccttctgatgaattgcagctgtagggacaatgcagtccctgttcccaggcggaggtctctcagactctgaggctttgcaaggagctccttgggtttggtgtgtaaatagcaatgtgagtttgtgtgctgtaggagggatgctgctgcagctgtgaacacgtgatgaagctcaatatgctgctgctgcttttcataccatagtcttaatttccttcataaaggacaagtgcaggagctggcacacttgttcaaactttatattgttcggaggagcattaaatgctgtggtcaaccagttgtcctattatcacgtgtttgaaactactgaacgtctgctaagcatgttctccttcgttaactctaatgtcatattcagtcttgttttcagactggactcaggctggccttgaactcccagtgtagctgaggatgacctttcgctcatggacttcctgtttccacttcctaagtgctgggattccaggtccgtatcacctgtatgtatcttactcatatcaccgcattctctgagtacccatcccctttataatagcatctttggcttgggctgaggccccagtcagcagcatatctatttctttttgcttatcttcccatgttttctgtattgaaactattcccagtgtatagtgttcacatgagtccttttctcacttggtacctccctccatcatcaagttgctgagtgaaatgaacaatataacggtcccctaatctccaggagggactttttaaataaatgtgttttaaaatcatttaattatttgtgtattttgtgtatatatgcatgtgtagtttgtgtgtttagatgcacatgtggaactcagaggccgacatctatgtcttctgcctatcatgattcctgcgttagggtttctcgtaaaactgtggctcaccattttggctaggctagctggccagcacgtgtctgacgtcacatccctccca

SEQ ID NO: 34575 - DNA, 2330 bp, Mus musculus
acacaaaataacagcatgcttggcttctggagtagactcttcctggcatgcagtcgctttcatatgacaaagtctgaaaatgaggattttttttttccctctactcatacaaatcgcagcattgtggaatgacgtttccactcattgtcctggactatcaaatgaaattctaaagaccctatctgaacagtcatgctgagctttagatttaacatgaatttgagagggtcatagattcttttggtttcctagacaggtaatgatatttgtagataatgatgttatttttttttttctattttagttgtttccttacataaattagtatgatgtccagcacactagtgaaagtagtaaaagcatatttttctttagaattataatgaggtatgctctccattatactgatttgcttattaggatagagggtttttttaatatctggattttgcataatggttttatagtatttctttctttgtgaggcaaaattcctcttggattcattaattgctttccctgtatcctctgagatgactatcctcattggctggtagcactcaagtatctaggatttcattgttccataataataaatactggaatgactaaaaggactccaaaataaagcagtcatttattaatgattatatattatttgttttctgatgttaactttaaattcttagatacattcaacttggacattaaggttcatttttgttttgtgtgattgctgaggatcaaacaagcccagctgaggcaagcactctgccactgagctataatcttgagcccagtggatcgattctactacttcatgttgtttatgcttgctcacataaagactaccatagatattcttgagtagcattggcatagaacttttccttatatgtgaagaaatggagtagggataagaagagtgcctgtttagcaatgcacaaggctgtggtttcagtcctcagcgccaccaaaacagccagatgtaaaacgaactgactggttttagctgtagattagaacagtgtcatacactgcagtgaatgtattcctctcctgtcctaattctaaacctgttcaggtatcctgatttagaataattgacactgttttaggtacccgttttctattaccttaaactattcagtatcttttatgtttataggacacctaagatttacagtatcatttaaattttttgagtatatttttctaggcatgctttcattttcacatatgaaatttattttttcttgtattcctgatgtttcatggttgcataattaactaactttgggtctgccttgtatttcaatctgcaataatttctccttgtatttaaattgagttaatcctcagtcagtattcttttggagagtatttgtctcaaactacagcatgttgcctcacactgtaatcttaggggttgggaagccaaggcaggaggatcacagatttaaggggagcctgagcctgggctattttgtgagacactgtcttaagaagacaaaaataaaaaaataagacaagacaaatgtgcccagggaggagttggggcctggtaaataatctgggagggaaaaaaattttgtcttgaaatacttaactttccaatatagtttttatttcattgactctggcaggtatgtacatggttatatattttaattttctttttgtatccttggttaaaaaaaatttgggggggaggtgctaggattcaaagtgggggctttacacatgctataacccaggtgtagatgtgtcttttatatatactttagttagagttttaaaactctgattacttgaaaattcctgattaacaattcttttagaccattatgtataatgcaactagtaacaaaattggaattttagcaacttttttcttctgtatttgttgcatgtaccttttctgtaatgttttcactgaaaattttacccagtgcttgaaatttatgtactccatttactatttagttgctattctaaaacattaaatccagttttaaaataaagtgtgttaatgttgtttctttctgagtggactagacagtttgcatacaggttgccatcattaatctcctgagcatcacaaagtcagagacccagaagcaagtgcactactacactgacattgaagaaattcaaagtagcagaattaatgtcatagaggatttgctaaggagacattaaatcatacaaagtaggatttagctgaaggagtgctgttcctcaataccccaaagtagtgtgctactcaggcctattagagataaatccatggtgctaggatgtaaatgtctgttcactaggattgaaca

SEQ ID NO: 34576 - DNA, 1192 bp, Mus musculus
caggatgtatgcttgcgaagagatgtgtaattgtcatgagttctgtcaccaggggcaatatagagtcatatgtttctttctacattttattttattttatttattattattgtgtgtatttgtatgaatgcgggtaaatgcagagtactttttggggggtcagttctctctttccatgtgagatcctgggatcaaactctgggcatcaagtgtgagcattaacaggtgagccatctcactagccccagaatcaatgttttttataccgtaagttcctttatctataaagtgagaacgctctctttctcagttggcagcacagttcctagcttgccctctggctccaggggaggcgtaagtgctgtggcatttcttggtaggaatatgtatttatgtggtttgatgagtgtatagatggcaggggaatgtcacactgttgtggagtgacttcatggcatgtgaatgtggggattacaagcagctctgggattttatgctgtctttctttcctatcaggccttctttctagagagcctatctacgtctacgaagcaaacatagaggtagacgggacggtgactgacaaccaggcaaattgttaccaggtaaagagagaggatatcattctaccagatacaacttcccatctgtgatctagaagcatttccttctagagtctggagttgacacagactcagtctctagggctttcttaaaggaagtacattctcactagggggtgaaggttatcttgttgaattttcctggggaacagagccttgcaaatccttctagcatttttgttattgcttattaacgtgtttgcctggctggggattgagccaaggcctttttatccatgctaggcacatgctttactactgagctctatccccaacttcactaattaatgtttgcttagatagagtctggctatgtagcctaaccttgaactcgctagccctggctggtctcagcctccctatccagtgttggggattacagacatgggcccccgctaactaatcttgagcttcacttacaactgcatgtcttttgttttgttgagtcttctgacagtaagtcaggtgagagcacccttttctcagaagcgctgtttatcccatatgtacagtttgtttaggactgtgctgcagtgagacagtaggaccagaagagctgctagcctggc

SEQ ID NO: 34577 - DNA, 1105 bp, Mus musculus
gtcttggtttcgtcagactgggacttacactactaagaagtcaaggaatgtgcaacagcccccaactgtgacagtttactctgaaaacatgaaaagaactcatactcaaaatgacccatgaacttaaggaaagaaacataatcaggaagtggccctcactacttcctaagaccttactaaatatgcgagacttcacaatgaggggaaatcactgatgtaagatgcattgaaggttgtagttctgttaagtattttaaaatcacttgtctcaacagttgagaaaaccttcatgaaggtaaggaatgttagaaagttaactatgaactcaattttcagtgtttagtaagcagtataattcatacccaagagaaattaactatatggaaattttgtccatgtgtgctggcagcaataaggcctgttgagtgatatttattgtgaactttcgccctgattcctgtcctgatatattcctggagttataatacattttcttttcttcaaggaactccattttatgttggctgctataacttctggatagtaagctggtgttatgaggacttttgaactataaacattgttttagtgtactgtagattctgttgttggcttaccaactattaaacattctaccctatagtagcttacagcagctgagtttcatgatatagtcctcaccgtcattaaaatgttcctgttcccttttcacaacttttagataaaaggtgataaataaataagcaacaagctagcaaagtcctttccacaaatacattgagctaggaattcataaatgcatcagtccttgatagagccggagccctcaagatctagatagctctcccatcctacactgaactctacggcccgaggatccagccgtcagtgcatgaacttttgggggtccatttcagatataaatcatagtacaacccctcctggcttctggtaattcctcaagattataaataacttgactgcctggggacatgttttataatcattataactggtagctgttttctgttgtgtgtgtgtgttgggagtgggagaggagatgagacatgcactggaatctgttcccttcttccaccatgtgggt

SEQ ID NO: 34578 - DNA, 1446 bp, Mus musculus
gagctcagctacctgcaaaggcttgaggtgctgggctgcaccctgtcagctgacagcacgctgctggccatcagccgccaccttcgagatgtgcgcaagattcggctgaccgttgggggcctctcagcccagggcctggtcttcctggagggaatgcctgtcctggagagtttgtgcttccagggtccccttatcaccccagacatgcccacacccactcagattgtgtcctcctgcctcaccatgccgaagctcagagtgcttgaggtgcaagggctgggctgggagggtcaggaagcagagaaaatcctgtgcaagggcctgccccactgcatagttattgttagggcttgtcccaaagaatccatggattggtggatgtgagggcatcacccatccatctctggaacctagcctagcttggagagtgaccttataagcaaactgaagcatgtaaattcatcaggcgtgagggaactggaggtgtcaaggaaaggaagctaggaccttggggcttcctgagctggggttatctgtaatctgggtcacctcagacttgtcatcaagcctctggaagaccccgttcacacatttaggaataggcatcatagctacctcatgattcattttaaaatctttaacaccccttcccctctttcttttccagtacctgggactcaaacccatggccttaggtctggtagagaagcactgctgtgctgctgagccaccccagagaccttagagagggctcattttcaagtggaggtgtgtggagttcagggctccgaggttggcctggttttctacatacatggttgagaggcatagagggcaggggcaagggagcatgctgttggattgtcctagttttctagaaggttctcagtcatatttactgtattttgtatcctgtctttttcaagttttctacagcatatattttactattaaagaaaaataatgtttttcaaagtgtgttgcacttatttaacaagagttgttccttgccagaacctgttattcacggacagtttttattatttatctacttatcttttgtattacatttattcattttgggtttgtctatgtgtgctacaaaagcccatgtgtgaaggctgggggacaactgtgggagtcagttctttcctatcctgtgggtcctggggaccaaactgaagtggtcagccttggtgacacgtgcctgtacccattgagccagcttgccaagctatttattatttttgagacaggaggtcattgtaatgatcatgaaatatattggtagctgaggattactttcaccgcctaatcttcccacctctacctcccaagtgctagagtctgaggtgtgcactgttactcattacttaggggatgctaagaatggaacccggggctttgggcacaccaagcgaatgctctaccccctgatccacatcc

SEQ ID NO: 34579 - DNA, 1142 bp, Mus musculus
tgactgtagttgaggacaatatatatatatttttttaatttgaggagggagggtctggatcttttgtctgcagttatgtgtgcaccacatgcatgcctgctgctgacagagaccaggagaaagcttccaattccctggagccaccacgtgagtcctgggacataaagccaggtctctggaagaacagtcccaagtactcttcacctgctgagctatcgccaacctgaggatgagcatttaagaaaatgtattgttgtgtgtgtgtgtgtgtgtgtgtgtgtgtgatggggtggagggcacttgaggacaaacaaacaactttgccttttcggcagtcttaagctccactgaatattatttatagtttgagttcttagatcagagcgtccattcctttatccagggtggatgttgagctacaggatccagctgtgagcagatggaaggtagtcatctctccgtcaaagttccttaacacgtgtccttcagatgaaatccacgatgggatgaacctggagctttattaccagtagagggggattccttctcctcctcgccctgctctgccctgccctcctctcccatcctcatctgacactggtgtagatggtcatttttaacagttcacatgaataaaaacttggctgctgctttgctgctgtcatacttgtgtgagagttgtgtgtgagggcagagctgctgtctagtagttagggggtactgctacttgaggggaagattgactggaagctgggcctggttggtgatgcacacctggcatctcaacacttggaaaattttttgtcttgaaagtcctgtgtagaccaggttatgaactggctgtgtaccacaatgaccgtgactcctgcctccactacaagtgctgagattgaaaaggtctcagttttgcttttaaggaattgccaggagctgtggatgcctcatggatttcatctaccctccatagtatggcccaagtttggaaatggaaaggaaggctgtctgttacgtgtagccctagacaaatactagaggatgggtaatttgtgaagaatggtttggttttggttttggttttttgagacagggtttctctatgtagccctggctgtcctggaactcactttgtagaccaggctgtc

SEQ ID NO: 34580 - DNA, 1225 bp, Mus musculus
tggccgtgaccagcactccaggagctaagcaggaagtttgaggattcaagagtagcctgagctgcataggaggctatgtctcggagataaaaggacagagtcctgtccaggccatctgggaaaactgagagagagctgctcaggtcagggtggctgccctgggagtctctgtgtgccatggctgcaagttagtcagaagatggggacaggatgggctgtcttgtgtctgtgtctagggctttcttacccacctcaggtgctacctagaccaggtgcctggtagtctccccaccttgcacatgtctgagagtgcatagcacaggctcacatgcatccgcatacgtggtactgtgctctcactcccctgagcctgggtcctttcaactgttttgttgtttgtctgactttgtttttatttgtttaggtgaggggttggtaagagtgtatgaaggtcagaggatacaacttgcagaagttgattcttcgattcttgtaggtcccagggatagaacccagatagtcaggccgtgtgacaagtgatttttgttattgttgttttgaggctttgcttcagtcactattcaccttctttccagcagccctggcttcctgaccccgcaggagagtcacaacccagtagagccgctttaatgtctcctgagctctgccaatacagtgtggaaccttgcctatgggaccattgtacaggcactcacacacagtccttacaacctcagtgccccagcgagtactctgctgtgcctccgtgttgcgcaggtggagactcctactgcccacagctgaagaggtcaccagctccagtgaagagcttggctgcatgctagctggctgcaggtctccagagccttgacattgccccaggagtaggggtgggcagtcatctgctgtgaggtttcagctctgtgtccaggcctgagaagaggtcactgcgtgtatgggtgcttcaattcctgtgcaccgtggatgactgtcctggctattcagatcgtgctatggtcataggcacgtgaggatgggcgactggtttgcaccgttgggacatgcacatgggaggactgtcttcatgggtgcacataataagagcacaggataagggtgtggttgcttgggcctgagggtatgggaggtgttgtgggtgcgatcagcataaccttgtagggaactgggtgcacaggtcgggcaggtctggcctagctcctaggtg

SEQ ID NO: 34581 - DNA, 2426 bp, Mus musculus
ctgggccacagctcatcactgcacagtgacagggctataaaacccatgatgaatatgcttgagactgaatgcaggcaggagccccatctgctgtgcagcctgtgcctgacctccactgtctgctgtttcacaggtcagatgcagaaaccatttgaggatgcgtcgtttgctctacggacaggggagatgagtgggcccgtgttcacggactcgggcatccatatcatcctgcgcacagaatgagggcaggcacctggccagcctgctctggctgccacacagcccacggatgcccttcctgctactgtcacacagtatttattgttcctaaaatgactgggaggggctctgagcatcccgctccctgtttgcccctattcggggctgtcctagccaggctccttctggaggaattgacttcagaagggcagtggggatggggaggcccccaggctcagggggtcagaggtgacctgatcccccaggtctcagaggcaggcaggagggccttctttcttgttagttatatgctccattcgttcctctgttcagttgcaaaaagcagacgctccatacctggcggtgcagcaactcagcctcagggtgcagtgcagcaccctacgcaccttccattaaatctggaaccactggttggtggtcctgtatcattaccttcctggtgaggtgtggggcccttgtctcagggatggggcttttacccacgtgtccagactcttctctagctctaaaagaccttcttttccacagcttggggggtgctggcaagaattctttccactagctatattcccagggctgcaaatacctctgagccccaccagtccagacccacttgtataagcaccctggggactgttcaggtatgcgcagaccaccccaccaccccaccccacttccagctgttaggtctggagtgatcccaagagaacctggcttagcatctgccttggcacacccccggtgcccatccctccccctcagcacacagacagactgcttattggtgagaacaaatcacccagcatctgccacccacttctgactggatattcctgggctcagccacaagacctagcactctccaggtgctgtttccatggtaacagaggccccctcaactggaggagaggggggctttatcagctcccagaagaaaagagatcctattggagggggctgggaaatggatattgctttgagtggcaggtggggagagaaggcggactctcccaccttggctagggccctatgtctcccacaactgcctctgagcctaaggactgagggctcagaattcaatcaaggtttctgcatatacccacaagtgatggggggcccagcctgggggatgttctaaccagcaaggcttgggggccagagcaacattaagcctggaccccaagagagccctccctccccacaggcctgagtctcatgaacagagtcacctgagcctgctcccatctggctgctttctagagcaatcgctctttgccagccgcctgctggagcatttgtcattaggaaggtttaatgagttttttcccagctcagacaggcacaggctgagctgagttggctatacctccagcaaaatgttctccagtgggccagtggggactcaaggcaaacagtcacagttttgctgtcttgcaacagttgggtgggctcaggaggcagtggcagccctccaagtatcatgggacctttggagggaagaagaggacctctagcttagcttgcaacaccaagagctctgggaggttctccctagggccactgccacatctgatccactgcctgtaagaagcaggtattaccatagtggtaatttgtgcatccctatgtgtggccatgtgatttggtatctatgttctatatgatcccaacccactgtctagggtctgtcctttggacccctgccaacctcttttcctgtctacacaattgtaaaaacctaagactgaacattgctgttagataaatgagccccaggagcccactcagcgtccccagcatatattattaactacctgtggtttccctcacctgctccaagttcccacccagacttgctactgggaactggctataaatcctgggcctttaggatggcaacagtgtaacaaccccccacccccaagggatggaaacttctctttgtgcagactccactgctcattcttaatgggctcttcttagacttgacacaggggattctgggttattgctgcagtagggaatggcagcctcctgattatagccaaacagtcatctatgatttagagcaagttggttaactcagcaccacatagctcaagacagacaaatgaacagaagtggatgggtgaggcgggtaggaccaattgctaatcctttgtagttgcagcatgtgccgagtaatt

SEQ ID NO: 34582 - DNA, 1186 bp, Mus musculus
taatcacacaccacacagcctgccctcccctcacagtgagccaagaggattgggctgcagctgtttttccttttttcttgtgtgtgttgtatatgcatatgcctccccaagtgctcccccaccctcgtgtgtgtgtgtgtgtgtgtgtgtgtgtgtgtgtgtgtgtgtgtgtaggacaaaggacaacttcaaggaattgggctctcctcttctccaggcatggcagaaagtgcgtttacccactgagctatccaccagccagcttgagccaactttttgttgtttattcaaggcagggtttctcagtgggtttctcaggtttctcagccctggatgacctggaactcactctgtagaccatgctggcttcaaactcacagagacctgcctgcctctgcctcctgtgtctgaggttaaaggcacacgctaccaccaccctatagataacttcctagcacaagtctgactatgtctttgcactgcacatacagacttacaagatcagagagtgtatctcccttcttgatgttaatttctagctagatggtctttaatccagctcaggactagggctcttgcgattgtatgaaagaagtgactacgccttcagttaagacctgatgacacaagccttgatgaggaccaaagatatcactcagccatcactataacaaatggggcccagaactcagtctggagccaccatgtatcccaagatgtggctattagcacagtaactgggcagtttgggggcaagaccaattctttctccccatattcatttctctctctctctctctctctctctctctctctctctctctctctctgtgtgtgtgtgtgtgtgtgtgtgtgtgtgtgtgtgtgtgtgtgtgtgtgtacatttgcagattgtatatgctgaggtgcgcatgggtgcagatgcatgaagaggcttggagttgatgttagaaatcattctctattactctcccactatatccattgaggcagggtctcttaatcaaacccagagcttactgatagtggtcagtctcattagccagcctactttgaggatcccctgtttctggcttccaaggctggacttacaggtgggctgccacacccatgcagcatttagatgggttctggggatcctaactccaatcctaacacttggtgttgagcacttaaacagctgagc

SEQ ID NO: 34583 - DNA, 1181 bp, Mus musculus
acggtgagtgaaagaaaccatcttgtctttttcccacctctgccatcttctgccatctttgagcccttattctcccttcacataacacctgtccctcctgtctgtcaggtaatgtcttatagtacagaacctgaagccaagccttaaggcaagggtgctgcccagtattcacaaggctatgggcttcacccgcagtgcatgcacaggggtaggggtcatgtggggtggctagatcccagcctcaagccccattccctagcagcacttgagcgtgggcagggccctgggtttcatccagtcaccacagagaattctgggagttgcggcctgtgagggtgagggagctgtggacccttgccaagggcacagcctgtgccatccatgacccacgatgtccagtaggagaggcagagggagttgggttggcgctcaatgaccttcccatcctccctcaggtgaaactggcctcgtggtcccgagagaagcctggaggctggtacagcaccttccgccgagggaagaaggtgggttccaatgctgacatggaggacggcatgcgtgagaactgttgggaactggcgtgggtaggcagagaaggacaagtacttctctacaaagtcctgggctccgttcctaacactgaataaataggaacttcaagtgttcaaggcaatcctcagctacaccatgaatccaagaccactttgggctacttgagacttggcagaagtgtcaggcctgtgggtagactgcaggtggactgggaggtgtcttcctcaccctaccttgccccactgcagttctcctatgtggatgctgatggctccccggtgaatgtggtccagttgaccttcctgaagttgttgagtgctgcagcccatcagaggttcacttacatctgccagaactcggtggcatggctggatgaagctgcgggtgaccacaggcactccatccgcttccaagggaccaactgggaagagttgtccttcaaccagacaacagcagctaccatcaaggtctcccatgatggctgtcgggtaagaccatggaaccagggactggcgggtgtggagtggggaagcctctcgtcaccctcctctgacttactctcctaccccctcatggccaggtccggaagggacaggcgaagaccctctttgaattcagctcttctgtgg

SEQ ID NO: 34584 - DNA, 1204 bp, Mus musculus
gatcagagggaggaggctatgaggtctaagaagagtgtacccctgcacacccctttctcctttgtggattttcccttgcaagggggctccatgccgggaagctgcccaaggaaccagtgtgggggtgtagggagcagggaaggcttggctctggggctccagccaggaagacttgattcatcctagaactaggtcagctttttttttctcaccaaaaacttagggggaaagaaacaaccagtcaacagacggatgtaccagcaacatctgtggggcagtgggggaggtgctgctagtcccaggccactcgcttcctcctgaactgtgaggacaggaatccccaaatctaagcaagtattatggagtttggggcccttttttttttttttttaacttctcgattttcagacagaatctcattaagttgctcaggctggccttgaactcactgtgtagagcaggtagaagagcctcccacctcagccttctgagtagctatcaggactggagattatacaatcaggcccaattcctatgcggttctggccaaaccttctcatcctggtgtctttctacagcagaacctgtggacgtactggaagcctggggtgtgcatagagaccaggctggggtggctgaagggcctggcttctgccccctgaggattccacagggtgaccgagcattcagggtgggcaagtccagccttctcagtgtccccacgtggcagctcttcccaggtgagttaggacaggaaggcttgggagggggtcatcctggaaggatctacactgtctaacctgttccctttacctgtctacacagatgggcattttcctgagaacttttctgtgctgctcacactgagggcccagccagccaatcagtctgtccttctgtctatttatgatgagaagggtgtccggcagctggggctggcactggggccagctctgggcctccttggtgactccttcaggcccctccccaagcaagtcaacattatggatggcaggtgagtatgggggaagggaaagggacgccctgtggaaattcctgcactgagacttgttccttttgcaggtggcaccgtgtggcagtcagcatcagtggtaacaaggtgaccctggtggttgactgtgaaccgcagcccccaacatttggtcaggggcctcggtttataagtacagctggactcactgtg

SEQ ID NO: 34585 - DNA, 1108 bp, Mus musculus
cattgcagcagcgtcaaagtggttcccgtgggtgcaagccgcggcatgaagaagctcttacaggagaagttccctaacatgagccgactgcaggacatcagtgagctgctggccacgtaagtaagaaagctggtgggtggcagctgcacctgtggagcgcccaaggtaacctgttgttttacacaggggtgtggggctatcagacagtgaggtggagccagatggagaacacaacaccacagaactgccccaggctgtggccggccgtggcaacatgcaggcccaacagagcgccgtccgacttactgaggtgagggtggctatggtggccctctcagctcccagtcacaaggctagcctgactctcttcccattcccctgtgttggcagattgggccccggatgacactgcagctcattaagatccaggagggcgtcgggaacggcaatgtcctcttccacagttttggtgaggggacagggtgaggccagcccgtgagagcagtgtcgagtcccactgtgacgttgacagattgtctgatccttcctcacagtacacaagacagaggaggagctgcaggccatcctggcagccaaggaggagaagctccggctgaaggcacagcgtcagaaccaacaggcagagaacttgcagcgcaagcaggagctgcgcgaggcccacaagaagaagagcctggcaggcataaagcgagcccgtgcaagggccgacggtgacagtgatgctgaggacccaggggcaccgccagaggcagtgggggcaggtcagcctgaagatgaagaggatgacgctgagtatttccgccaggctgtgggggaggagcctgacgaaggtatgtggcagggtcctctggtgacaccttggcccttttcatttcttctccattaatcacatttaaccacttctctccctgcagacttgttccccacagcggccaagcggagacggcaggggggccctctgggcaagaagcagcgagggaaggagcagaggcctggtaataaaggccgaggtcagggtggcaactggcaggctctgaagctacaaggtagatcccagagaggcaaggccaagccgagacccagagcc

SEQ ID NO: 34586 - DNA, 1172 bp, Mus musculus
gtgtggacgtggggacctgggagggtctcagctgttctgtggtagtgtgctcttctcttccctgcattacctgtggccaagtttgagtggcttcgggcatggtcatcctgatgtgtgactgatagcttactctaacttgggtatgcgtgcgtgcatgcgtgcgtgtacatatatactctgtgtgtgtgtgtgtgtatgtgtgtgtgtgtgtgtgtacatatatacgcagtgtgtgtgtgtgtgtgtatacacgtatatactcaggcaacatccaccatgtatgtgctgggctcagtgtggccataatctaatgtgtcctgtgggggtggctgcctcttgtgacttgtatggaactttgcttctcactgtcatggatgagtggcctagggacatcctcactgttgtgtgcctgtagtcgggatgctgccgggctggtggtgtccagcgctggggctctgcagtgctggctttgttgtgtctgccctgtggcttgttcactttgctcgtgacactagcagagactttgaagagtggtagcttcctagatgtgatgtttgggtcaccaaaggatgactgggtgtctgtacctgggggctggggcagaataatccttccgtctgctgctttccagagctggagcccgtgcaggccgcccagagcaagacagggaagtatgtgccccccagcctccgggacggggccagccgccgtggggagtccatgcagccaaaccgcagaggtgaggaggtgggaggcccgcccccggaggcaagggctgtgagtactcctgcagtgtgggcgtggggtccagcggtggcacccttctcactgccatctccccctgccctgcccacaaagctgacgacaatgccaccatccgtgtcactaacctgtccgaggacactcgtgagactgacttgcaggaactcttccggcctttcggctccatctcccgaatctacttggccaaggacaagactactgggcagtccaaggtgggtgagctggtctgaggagtggagtgggtagctggagtaggcatcccttgacccacttcttacacctccatgtctgcccctggcccgcagggttttgcttttatcagctttcaccgccgggaggatgctgcacgtgccattgcaggggtgtctggttttggctacgaccatctt

SEQ ID NO: 34587 - DNA, 1188 bp, Mus musculus
taagatttgatgtttgttttctagcacccagatagatggtggccacggtcatctgtaactccaaattccacaggacctgctgccattctctgccctccgtgggcattgtacacacctgtagccatacatacacggacggaaattacccattcacactaaataaaaatgaataaatagtttttaaatgctgcctgaagtgacctgggtgacggggatggtagctgatgtctgtgatcctggtagttgaagtgctgtggcaggaggatcactgagttggaggtcggcttgggcagcagagcaagacactctcaacaaataaaaggccttgaagctgtggtgtgaggtgtacaagactaataagattcctgttctcagactcggctctcagttgctggtccaggcatttcagaggagggtgctcggccggggattataaatctgtggtaaagtagtattcccctggtatcctcctcacaggcctgagaatacccacaggtcctacaacggatcctatcacactgacatcaacatgctttactggagcgacgaggaagctgtggtgaacttcagcgacgtgcagggccgctgtaccgtggagtacggggaagacctacttgagagcatccaggattattcacaagggggccctgaccgcttctacttcctcgaggtggagccaagcttcaggggcaaatgtgcaggagcagggtgcccaagacagtggctcgggctggggcagggctcagtgagacagggcctttgttcagcagacgctaggctaatcctgggtgtgtctttcgacaggagaagctaaggaggcagctaattcatgtgtagatctgttttttattttgtttttttttagtgaatttttaaaaaaatttttattttcatgagaattaattggtattttgcccacatgatatatgtctgtgtgatggcatcagatccttgaaactggagttcaagacaattgtgagctaccgtgtgggtgctaggaattgatcctgggtccttagagagagcagctgctacctcatctccccagagctgtctgtttggtcttttgagatagggtctcactgtatagccctagagttctgtatgcagattaggttgaccttgaactgacagaaattctcctgtctcctccaagtgctggaattaagacttgtactcacaagtctt

SEQ ID NO: 34588 - DNA, 1153 bp, Mus musculus
tagaggtgggcgactgcgtctcggtcattccagatgattcctccaaaccactctatctagccaggtatgcatgcctgccttttctcttgaacacctcaagtccaactttgtcagaacagaccccaggttctgctggttacatgagacatttcttccccgtcctgtcttatgactgcagggtcacagctctgtgggaagacaaaaatggtcagatgatgttccatgcgcactggttctgcgctgggacagacacagtcctgggagccacctccgaccccctggaactgttcctggtgggcgagtgcgaaaacatgcagctttcctacatccacagcaaggtcaaggtcatctacaaagccccttctgaaaactgggccatggaggtgagttcctcctttcgtccctatgttctgtcccaccgttagagccgaggctgacacgagtctgtctccatagggaggcacagaccctgagaccacactgcctggggctgaggatggcaagacttacttcttccagctctggtacaaccaggagtacgcaaggtttgaatccccacccaagacccagccgaccgaggacaacaagcacaagtgagtgtgggagccaatagcaggcctccccgtgcccaccctgctctgtggcgtcaagaaagttttacttcccagttgtgctctttgctgaccaaagaggcctaacatatggaaatgtttaaaatgtatggaccggttggaggttaccttgagcaaggtgtggccttctgtttaaaaatcctcatttgtggtgctgcgttgtagccctgggccttggacacgctggcagaacacacctctgctgttcacagcctcggccttgtttctagtattgatttctatctttgagctgtggtccccaagagctgtctacaaagtgcagacataaagaaggggggcaattatccagatacctgcagatgttcttgggtttcagtggctgctcctgccacttcagagcctcgagcttttctgctcttgccttggcttctgcaggttctgcctatcttgtatccggctggctgagctgagacaaaaagaaatgcccaaggtcctggaacaaattgaggaggtggatggccgggtctactgcagttccatcaccaagaatggtgttgtct

SEQ ID NO: 34589 - DNA, 1123 bp, Mus musculus
ccctgcctagaactccccagcgaggggctcaggtacactgcggcttagtggtacattgcttgcctagcatgcgtgaagtactaggctcttcctcccccagtattacaaggaagcaaaatattcaaaacatctgatcttcttttcttccctttaaagaccactgttcctccttctaccattaatgtgaaccggttcacagaggactccctcttacgccacgcccagtttgtagtgagccaggtagagagttacgacgaagccaaggacgatgatgagacccccatcttcttgtctccctgtatgagagccctgatccatttggctggtgtctccctgggacagaggtaaggatgtagcaagaatcagattggaggcttgagaccagaggaggcaatctcctgtgtttggttctctgaaacggtggccatctccctcaggcgagcaacaaggcgcgtcatgggtgctaccaaggagaaggacaaagcacccacgaaagccaccaccaccaagctggtctatcagatctttgacactttcttctcagagcagattgagaagtatgataaggaggacaaggagaatgccatgaagcgccgccgctgtggtgtctgtgaggtgagccggctatccttggcaccccttccttagatgtgaaggagagcactccatgctttggggtagcctcctgaccctctctgtccatctggggttgaagtcggagtgtccaagacctttggtcttgctgatgctaggctacagatcctgggtttcctgagagatgctagctccgcctctatttcctgtgggtgttgagagagcagacgctgaccccaggagccaaagctgtcccctccacccccacccccgggcacatttcctgggattctatctagaactgaaagtgcacatttctctcagtttagacttatggctgcagaagcctcttgctttgacctccaagagctggccttacagacctgtgccaccgtgcctggctcttgtgaattataaatccttttcatatagatagccttggaatcaacctacattacactaaacaagcaaacacaaacttcaaataatgtggtaaagctacacatggaggcgccggcctgtgatcctg

SEQ ID NO: 34590 - DNA, 1120 bp, Mus musculus
ggtggctggtcactgttatctcttccctgctgctggaacactgattcccatagaggatactgtccgccagtaatctagagggctaggccttaataagcaggagacctctgaggggcccgttgaagcctgccctgtgatggcagtcaggagtggtgtctctgtggcagcctcggggttgaggccaggcttccatcagtgagttattcagccaccttcctggtaggggaaggtctgagggcacacagcccttgtgctagaagctgggcgccataagggactccgtgttaactgagtgactagtagaaacaaaccttgggcaggatcaggccgggcactacaatgttctttttagtctggagagtaaattcgggttcggttcctgatacctatgtaggagccctctgaccttggtgtgtgtgcttgtagtgcaggggagggagcgagagtccgggtgggtgaagggcggtcttggctctcagtgttgggtttggtggtaaagtgatgtttgttgcctattcagtgtgtactgcagtcgcgggcacctgtgtcctgtcgacaccggtctcattgagaagaatgtagagctctacttttctgggtgtgccaaagcaattcatgacgagaatccatctatggaaggtatgtgaagtgctcaaacaagggttgtcccaagaagcaagcacatctaggaggcgagatatccctcctatgggaggtactgcttcaagaaagagcttgaagttctgccattaaccgacaaaatgactttggaaaggcagcctgctggctgggtcgctggcggggatatgagttgtgagtcaccatgtttttagtcttgtttcttatagaaagacatcttttctacaggtggtattaatggcaaaaacctcgggccaatcaatcagtggtggctcagtggctttgatggtggcgagaaggtgctcattggcttctccactggtgagtgtctgcaggcacagcatcctggaaccacccgcctgcctgcctgggcttgctgggctctgggcagaggtttcctcgggcctggggaatctggtggctagtgttgatcataactggcctggaagcgggtcctccacacgtaggacagtcaaatgct

SEQ ID NO: 34591 - DNA, 1150 bp, Mus musculus
tagggcagacttgtcctgggatttggacattagcataatttgggcctcattgcctgaccttaaccaccttccttcctgggtaagttcttaaccctaaagtgctgtccaaaccaagagaggtcctgttcctttgtttaggaggagaagagacgaaaaacgacacgtaaaaaactggagtcacacaccgttcccgttcagagcaggtgatggtgttagacagtcccagaaagcggggtgagagatgggttcgtgaactgtcacagcagccttagcttctggtgggagtgcagaccaggatattcggcttctgctgggcacgttggtagagggtcccttagacctcctcgtcctgacagtcatcgacgtgcatggggtggcttagggggggagagtgagcgcaaggctgctgctggtgtatttcaagctgatgaaatggccaacaaccttgcgcttccttccagatcggagagaaaagccgctcaaagcaaaagtgtgatcccgaaggtaagtgcatctgtgggagcctggccggcagggagggtacagcagttcctgatgctgggggctgccctcaggccgtgcctgttccttcccacagatcaactcaccaaagtgccccgagtgtggccagcacctagacgaccctaacctgaagtaccagcagcaccctgaggatgctgtgagtccctttctgccctcacccttttacccccctgccacctggtgcccacgtctcactgtcccctgtccttcaggtggatgaaccccagatgttgaccagtgagaaactgtccatctacgactccacctcgacctggtttgatacttatgaagattctcccatgcataggttcacttccttcaggtaatcgccgtgcttggctgcctgtgatgatgtcctactggtagatgcccctattcggggcatccatgtataaagtccttcagcctaaccacagggctctggagatgctcaccctgtaaagagccaagaggccgattaagttcgggtagacattagccacatgagacggggtttcacttgataggcggttgtgggtgaccttgccttttgtgcagttctgggatgccagacctcacgtacgctaggcgggcacttcaccggctgagtcacatttccagccccggt

SEQ ID NO: 34592 - DNA, 2232 bp, Mus musculus
gccacgcggatgttgctggtcctcagacgctagccctgctcaagacggtcaccatcgtactgggtgttttcatcatctgctggctgccggcttttagcatccttctcttagactccacctgtcccgttcgggcctgccctgtcctctacaaagcccactatttttttgcctttgccacccttaactcactgctcaatcctgtcatctatacgtggcgtagccgggaccttcggagggaggtgctgcggcccctgcagtgctggcggagagggaagggagtgacgggacgcagaggtgggaaccctggtcaccgactcctgcctctccgcagctccagctccctggagagaggcatgcatatgcctacatcaccgacatttctggagggtaacacagtggtctgaagggaaaatgtgaactgatagttaaccaagccacagagagctctgtggggagagaccaggtgacctcatgatgtccctcagtgctgcaggtctggagaaactgaccacagctcataggtcaggtgaccaacggaggcactgactaatcagattgtagtactgtgactgtggggatcattaagggtctagggtgaccgcaggctggagcttagggctagacatttgccacttgatacaaagggtgtcagcattctgtctgtcctatcttccagcccccctggttcccgtcctgccgcctcctttttagggcctctctacatagccttgactggcttgaactttctatgcagaccgggctgacctggagctcacagcagtctatctacctgtctgtgttctgagggttgggtagcagctcacccagctcctgcccccttccataaacaaccttaggcctctgaaggaaatgctgtctgcagcggacccaaggcttcttccctgtctttctgaggcctaaatccacagcttccccaatttcatcaactgctgcttcttctctttcctttcatattcggggaaaggaaaccactgtgggggcagggaggaggcctggcatcccagtctttattttcagatctcactggccactcgctttattggtgagccgagagggatcaggtgaggcagtatggggcagctgttgaggagactttgggctctcactctcggggaggtgatggtcattcctggaactcctccccccacacccagcctttctccccatgagctcatcacctcttcatcctatcccaggtaccacggcccttaaggcagggcagccttgagctggatgtggctgcttgcaacttgtctgtgctgttttttaaaattgggacagggtctcatgtagcccaggttggtctccagctcactgtgtagccaagactggctgtggacttccgatcctcctgcctccacttctggagtgccagtatctgtatcacaggggtgtaccaccaccacctgtcttgaaaattgccatgaatgacatagttcacatagccatgggtggccaaggacactcctgggtactcttactgcatcttcccttgaaggactttgctaaatcctgtggagaaatagaaaaatccaatacggtacaaactgtatttatatgtgtctgtgtgtcaatgtggggtctgtgacctcctatcccagtgtgggtgctgtctgacctcttctgtgcacatctgtatcaagactgctagaaagatagacaggggtggggtgtgtctgtgggggtctggccatgatcaggcctcctgggaattgctgattcatctctcccacgcatagaaacctcttccttgaagaaatatgtgaaagaaaaggctgaagaaggggagatttgggaggcaaggagcctgtcgggagtgtgtctcccctcatatagcttcccagatgtcctccttgtgctggaaacccagatctgggccaataaacagttcaatttctcttgctgctggtggttatgtgtgtgtgtgtgtgtgtgtgtgtgtgagtgtgtgtgtgtggaaggcagaaatttctgaccattcgtggcctgccaaggcaccccagccatcccccactccctcactcttagctctgtctgagctggaattgcatgctgtggcttctgagaaataactggccaaccttgaccttttccctggcctgttggaaggccgtctggctcttcacagtgactcattccgcccagggccaccatgttttccttcaacgatacaccttagcaggtgggtttccactcttctccatcccaagt

SEQ ID NO: 34593 - DNA, 1151 bp, Mus musculus
tcagtttggaaattcctagatcgcaggggccagcgaggcaggaccacccctctctgccagggcacagtctccacccggaaataccgaagccctcgttccggaggggaaggcgcgaggtttcccggaaagtggccccgacagcaccgcccctcggccccccgtgagccagagactataaaagcgccgcccgcctcagtctgcacccagtgctagtgctgagctccgctgctacctgcactttgccctggccctgcaatggcttcaacccgtgccaagcccacgctacctctgctcctggccctggtcaccgttgtgatccctggtgagtccgaggtggggtcgctttggggggcaggtctccaaactccaggacccagagcgcggtcgaaatccctgcttcccggccagcggaacatcacataaattcagctgttaacgggaagtgggattggaaacccagggttgaaaactaacagcccggagttcgaatcccacgtagcatcactccatgggtgggttacagaacccaaaatctcggtctctctctctctctctctctctctctctctctccctcccagtccctccctccctccccctctctctgtcctctctctctccccctgtccccctcttcccctcccttcctttctttcctgttttgagaatgatgccttgacacgttagcctaggctggccttgaactcagtcctcaaggcctcgcggctcttcgggttacaggctcaaaacacactactctcctaaaacatgcacgtttagaacctgggctcatggtctgtgcaatgggaactgtggtcacagtccttgtcatggggcagtcagaatatggctgaggtggggaacagatggtctgaggggctggcccgtcctaaagtgaatcttgaggtccggttccctcccccacagacacccgttcctcatcctcacccctggggaagtccaggctgcttctgcgctggggaattccagggttggtgtaccctggagccagagtgagccggctcaggactccccaccttgctgctgcctgggggcggcgcctgccgtcctcccaagagaggaagattcagaacttgttcagcagctatcaggaggctcccgacttggattcccgcaatccataactcctag

SEQ ID NO: 34594 - DNA, 1413 bp, Mus musculus
gtctgtcaaacaggagatgaatggtacatacgtgtgccatgcctttagctcccatgggaatgtcaccaggaatgtgtacctgacagtactgtgtgagtatcccaggatataaggctggatgaggggtgggctaggtgccagggcctcaagtctcaccattcccttctgtctctaccacacagaccactctcaaaataactggactataatcattctggtgccagtactgctggtcattgtgggcctcgtgatggcagcctcttatgtttataaccgccagagaaagatcaggatatacaagttacagaaggctcaggaggaggccataaaactcaagggacaagccccacctccctgagcctgctggatgagactcctgcctggaccccctgcagggcaacagctgctgctgcttttgaacagaatggtagacagcatttaccctcagccacttcctctggctgtcacagaacaggatggtggcctgggggatgcacacttgtagcctcagagctaagaggactcggtggatggagcaagactgtgaacacgtgtgacccggacccacctacagcccggtggaccttcagccaagaaacgctgacttcattctctattgcccctgctgaggggctcctgcctaaggaagacatgatatccagtagacacaagcaagaagaccacacttccccccgacacaggaaagctgagacattgtccccaactcttcttgatgtatttattaatttagagttttaccagctatttattgagtaccctgtatatagtagatcagtgaggaggtgaatgtataagttatggcctggaccctgctgcagatgctgtgagagtctggggaaagatcacatgggtcgagggtttctctactggtcaggatgcttttctcataagggtcgacttttttcaccagtcacataaacactatgtggactggcagtggttctctgctcctccacatcctggagcgtcccagcacctccccacctacttttgttcccaatgtcagccaccatgccttagcagctgaacaatcgagcctcatgctcatgaaatcatggtcccaggcggctccacctcaaagagaaagcctggaaggaaatgttccaactccttagaagggtcgtgcaagctgctgtgggagggtaagcacccctcccagcacagaaacctttcctttgaatcaataaagttttatgtcggcctgagtgtcttgtgagtttgtgtacagtcatcacatcagttaggcaaagccctaaggactgccgactcccataatgcctcagggttgtctggtaacctaaccctaactctgagtctgtggatcaggttggtccccacccccaccccctttcttttttgagacaggttctctttgtggccatggatgtcctg

SEQ ID NO: 34595 - DNA, 2151 bp, Mus musculus
gtctgtatgtctctgtagccttgtcatccaaggggtctcggcgacagctcatgctgcagtggttttggcccctctggttcccactgttgagcttcccctcatctcaagttggcctaaggtgtgggtggtcttagccccagaagacagatgagagacagctggattaccaccaggcctcagttctgagttgcaggctaggtggcctcagggtgacctgccccacctctttgactccccaggctgttggttcctctccaatgggctccagtgaagggctcctgggcctgggccctgggcccaatggtcacagtcacctgctgaaggtacgggcaggaggaggggaggcacagggctgggcaaccctggctctgggaggccactgacctggccccccttgctgtctgtctccagaccccactgggtggccagaaacgcagtttttcccacctgctgccctcacctgagcccagcccagagggcagctacgtgggccagcactcccagggcctcggcggccactacgcggactcctacctgaagcggaagaggattttctaaggggtcgacaccagagatgctccaagggcctgcaccaagttgcttttgggttttttctggtatttgtgttttctgggattttatttttattattttttttaatgtcctttctttgggtaatagagaaatctctgcaaaagactttgctgaccaaccagctggagctcaaggaatgtggggtatctggggccacaccattacctgtgggcttgctcctggagccaaaccctgcagccttaagagagaggggcctgacctgctctctttccctccctagctccaggcctcctctcctgcctcgtcactcctgtgttctggcctcttgagtgcctttggaggtgtctctgacctgtgaggatcagagacagtccccgtttttaaacttcgacaattgacttttatttccttttctaatttttattattttttaaaacaaccaggatgattatcacatctactcccccatccgtccagaaaagccccaaattgattccttcagggtctggcctgcccaggctctattccacatgtgcaggttccaacagcttaaccctattctcttcccagtcatctgctgcaggtatagctgtctcatgcccctgcctgcctattctggccagtaccctaagccccaagatctccagcccctgccccagtatccttgccttctgatgccttaaagttgggccacaggtcctgctgggtcagagcctcacagatgcggagctccaaaagctccgctcaggaccaaagagctctggcctagggttcatcctttctccaggtgtctgccctgtggacagaaggctaaagccttgatcttggcaaaccaccccttttgcccaaagcctggatgcagagaccagtattttctgctggcttcaacagtctcccctgctgtctgtgaaaggtgaccattgtacccaggccactgggcctctaccatgttctttcaaacccaggtcattaccatccccaggctggatcactggagcaggcctcctctctgtccatgtgagggggacctaggggctctgcccttagccagctgagccaccaccagcctccctccccaaacatgataacccaaacccactccagtgggtgtatctcaccccctcaccccacccccaccccctgcatagacctttgctgaattaaagtttgtaagtaaacggttttaaaaaaaaaatcagagctggctggttcttgatataaaccatgggccagcaaactagctcagaattctggtaacacagacagcctgagttttatccctctgccccaaatggtggaaggagagaactgactcccgcagattgaccactgacctacacacatgtcacggatgggctcatacacacaatccctaaaaatttaagttgggcttggaggccagcctggtctatatgaattgcttagagacttaagaatttctcagtctatagagattctgtctcaaacaaaatttaaatactggttgcacataaccggtaattccagcaaaggaattcggagatcaaggccagactaggggatcctgtctaaaaattagagaactcagaggttggtcccaattgccgaacgtagttt

SEQ ID NO: 34596 - DNA, 2151 bp, Mus musculus; identical to SEQ ID NO: 34595

SEQ ID NO: 34597 - DNA, 1268 bp, Mus musculus
ctgctgttgtttgtgctttagaaattcaccgagctcatcggccatacccagggccagatgaccgtgctgaggctcacagagctgctggaacgaggagagaggctgcctcggcctgacaggtgtccctgtgaggtgagtccaccagcagatgttccctgtccccacccttacgacacagggcagatggccccacagccccatttctcccgcagatctatcacctcatgaagaactgctgggagacagaggcctccttccggcccaccttccagaatcttgtgcccatcctccagacagcacaggagaagtaccaaggtcaggtgccttccgtgttcagcgtgtgctgacagtcaaaggcatcagggacggccccacacagaggcctccacacaccttataccttactctgcctggaaaccccacctgtgacctaagtttccttccttggccctgagcctggccatgacctgaacagaccttgaatatgcaaaggggctaattgggattcctgagtctattcgttctgggcccatcttgtcttttcatggttgagacccccatcttcattagctgggaagaaactgtttgctttgccggaggcccgagggctgtgtgggggggtccatcttcagcaagatgtgcagacagagtgagacttcaaaggaagcagtaacacttctgatcacccctaaaccactagccaagctgcagtgtgactggggagccagtggggagcatgggggagacctgggttctgtccctagctggttaagacagacaccaactagatcagttcctggtatacaggaggcactcagtagctgcttgttagaggctggggagatggctccgtcagtgaagggcacacaaaagtgcttgctttgcaaggcttgagttcagttcccaggcctagttagctctgcgtgggggcacatgcttgccatggggaagcggagacaggcagcattgtggggctcactggcaagaagcctaggccatccagtgacactcaggccaactagagtccctgcttcaaaacaaatagtagagcagggccccgggaagaatacccagagttgccctctgacctctgcacatacatttgcatacacacacaggaaggccatttgtcacatatgtgggactctgccagttttaccctttccttgctgtgtaacctcaggaaactgtcttgacctctctggccctcgcatctcagctatggggatggtcaggctttctacctcatagggctgatgatgggttgc

SEQ ID NO: 34598 - DNA, 1177 bp, Mus musculus
ccatttcccgccacccccatcctctgtttagcctacattgcctgcctagtggctgcaagccctagctgaaatcctgtagaggtttacttattccaagaaccagccatctctgcttggttccacccaccaagtgccacctctccatctctggccagcctagcttggctctgaaagccccactcctaaccttgtagagcactgggtctcaaccttcctaatgctgcgaccctttaatacagttcttcatgttcaaattattttcattgctacttcatacctttaattttgctactgttaggaatcgcagtgcaaatatctgatagggtatctgatactccatcccttgtgaaagggtcattggaccccaggggtcgtgaaacactggttgagaaccactgttgtagagatttgcgtttgacccttcccacaaagcccctcccctccccgcacgccctccaagctagctttgctggcagagctcttgctctggctcttccttttgcttgctcaggccagggctgagcttgactcgctctgccccaccccagggcatggcctacctgcacgctcagcactacattcaccgagacctcgccgcgcgcaacgtgctgctggacaacgacaggctggtcaagattggagactttggcctagccaaggctgtacctgaaggccacgagtactaccgagtgcgcgaggacggggacagcccagtgttctggtgatcaagagctggcattgtcggagggggcagggtggaggagacactggggtgcagaagaaagctgggcggggcctagagatgaggcgggcgtggcttaaggaccaaagggacttgactgaagcccactaagccaggttgacttggcttagtaggtgtgtaacccctcaggcagtgccctgaagggtgaggtcccaacgtcctttcacctgcctgtgaactcccaagtccagtcagccagtcctgagcctcttctgtttccaggtatgccccagaatgcctgaaggagtgcaaattttactatgcatctgatgtctggtccttcggggtaactctgtatgagttgttgacatactgtgactctaaccagagtccccatatggtgagtgacagacaccccactttacccttgtgtttgcaagggagcttttctagaaaagcaggcatttacacttc

SEQ ID NO: 34599 - DNA, 1369 bp, Mus musculus
agcccaagctgacctcaaatgtgctacataactgatgacctttgctcctgaccctcctgctgccacttcctaattggtgggatcacaagtgtgtaccaccatatctgcttgtctgtggtgctggaatggtagagtctcagaacactgggcaattgctgcacccgctgagtcacatgctagcttctgcagttctatattaccagtcctgggtggagtgggtgctgagcagccttgaaggaggtgcaggggacactgggcatcatgctgctggcatggcctcatctgctgtcctccctctctccacaggatgccaagtatcacatgcagcgttgcatcgattctggcctctgggtccccaactccaagtctggtgaggccaaggagggggaggaggcgggccccggggacccattgctggaagccgtccccaaagcgggcaacgagaaagacgtcagtgcgtgacccttctccggaaaaggaaacttagccaccatgtccctagctcccaacttcttcacttgtgctgctcctcacatcctggcccatggcctgccccgtgtcccctctcctcccacctgtccccagcgctcatcagactctctgcttcgggttgaggggctctgctgtctgcagcctcctacccccatcagcgttatgccaaagtcctgggggcctggggaggggcagcagttgccaggttggtccaccgggttggggatacaaatgtccccatctaggcaaggtctgtccctatgggtctatggtcactgtttttcttctgtctagcttcctgtcctgcaactggcaacaatgtccaataaacagttccaggtgctggaggccgctggttcagtgctgtttgaggcagagggtgaacctaggtggggagaactggagtgctaacagccatccatgcctttgccctgtcctcacccttcagaagtcctaggccttctgtgtctctccaactgtctgtctcagcctcccctaactcctccctctgtctcccctctccccctagcactccatggagacaagaggacacgagtttgagggtaacctgggcatgagatatatgtggcctttcacactagactttgcctctgctaggggaacatcttattctaaatttttatttgtgtgtgtgtacgctcgcacgcccgaatgtctttttgagataggttttgtatgtatctttggctgtttgggaacacactatatagaccaggctggcctcaaactcagatatccacgtgccactcactacctcttgagtgctggcatcaaaagcatgagccactcctggcttaaaatttaatttatgtgtatgagtgttctgtacgtgtacatgtagtggctgcagaggcca

SEQ ID NO: 34600 - DNA, 1193 bp, Mus musculus
cacactctccactcaccacagaccacctcaacgactcctggccctcctgagaaaaaagaaaacagaaaagtggggttttttctcttttctttttttcacccttccccccctgcccttgcccacagggcctttttgttgaagtggggtatggagagccaggaactgaagtcccccaaaaaagggattttatttttttgaattttaattgtaacgtttttagaaaaagaacaaaaagaaaaaaaaaaaaagagtgaaacacatcagctgtagatgctctccctcccggcccctgggcccacctcgttccctcatcaccctacctatcaacctcagttccaaggcgccatcctcctgcctcttttgagacttgctccttgagattcaagcctaggtgtggcactgccctttggtcagtccctccatacggagggagtctacaacccgattgggaatagccaccgggagaggctgtcacaggagaggctggcccacagcaggcctctccctggctcactgtcctctaccacaaagtcttccatgtctctcctctctgttttctatctttgtttgttcaactctggccacatggtgaaagaggtggtcagacgggctgttgctttatgatccagggactcttggtttcaccccgaccaccagcctcagcctggggtcccaagtctcaattcccttctctggatgccatcttcctggtccactctgggtcactttgaattctctccgttggaggaagggggctctgttccatgcgcacaaacacatcctccttccagctgcttcttcctcttgtttctgccttaacgattcctgtggccataggtgaagtctccatggctccctcctgctccctgggtcctatctcccagcatagatgacactcctttgccagcatccactcaaccacccttcagccccgtcactccactcccctacaccaactctcattgccctaggaggaagcaataatggtggtaccacatcctcccatcctgggcagccctccccccccatcttactgagcctgaccccccacccccagccacaggcagtccctaagcaatacagatagagcaaggccattttctccaagccatgggggtgaggggacttttaaaaaggaatgagcccatttccccctgccacatggaaccagtctgcagcagggcagtgggggc

SEQ ID NO: 34601 - DNA, 1220 bp, Mus musculus
cttccagtgtgctagatggactggattccacttagtcctgggacagtaacagaccactctcggttgacagcagaagtacatcaaggtgcacttcagtgaaggtgatttcgtccaccaataggaaactcagcccggaacagacctgaaaatcttaggccactgggggtattttggggtcaggcaccggagctcctcagaagtttcagggcagctgttcagaggctaagccaggtaggcatggtccagctggtccagaaagaccctgaactgaaagtgctttcctccatccgcctgcagatcctcagctcctcctcagtcacggaacggtaccccatgttcacagtggctgaaggccacgctcaggaccacagcctggatgccctctgcacccagctgtcccagcccacactgcggctaccttgcacaggacgactactcaaggccaaaaggcccagctccgaggactttgtgtttttataatgggaagggatggggaaagatgccagactatttatttttttatttatgtcatgtcaggtatgggatctgcaactccagtggtggtgctggacccctgtcctcatgtccccgtcctccccaacacagctgagacctatctgggcccccagctgcccctgcctcctcaggagccagggaaggagagtgggctccagggcactcactcagggcctaattcaagttctgtagcctgcattgggtcactggtcccaaggtcccaaaggtcctgtcctgggagaactgactgtggctgataaagatgcagacttgaacatgcctggcgttgttgacatttcaggctgtctgtggagaagacagtgctctggtagcctcatttcaaagcttaggaacagcagtgccctctcctgcaggtagctttcgtaggctgccaggcagagtttggtcagcagcttagttgtagaggcaggttggctccctgtggccctcaggagtggctctgctgtttcttccgttggcggcctaactggcggaagtgcagccttttggggttgagaccaaaggcctgcaatctctgtctgctgaacttgtgacctccaagtgtcaccgtgggacccagcagcctggccttcttgctcttctgcttctgggatgctggcttctctgggcaggatgtgtgggccaacccctcttccttggatactaaggtctcagcctggggtgtcttctggtcagctccattg

SEQ ID NO: 34602 - DNA, 1884 bp, Mus musculus
gtcagcattaagccatgtgagatccccctgggagagtggcatgggaaggcctagtgtgtggctcagtggtagaacccctgcctacagtcccccaatgaggggccagggctgtggctatggtagagcacctttctatctttgggatccagcctctgccaccaaaaaaaaaaaaaaaacaaaaagagagagaaaaccaacaacaacagaaactagaacccacccaagcgaatgtataaccgagactagcacatgcacagtggagccagttgtttccttgatgattgcagggctacgaggctggaactcacgctgcctctgtttgccatcaagagagagttccagacagatatcactgatacccggaggataaggagttcagggttgtccttagctacacagttctaatgcagcctgggtgacagaggtggggatgaagagaagtttctcttggtacataatgtctttgcattccataaggttgaaaaaaacaaactgaatcattgacatattatcagggatgtttttttttttttttttttttttggttggtttttttgagacagggtttctctggctgtcctggaactcactctgtagaccagcctggcctcgaactcagaaattcacctgcctctgcctcccaagtgctgggattaaaggcgtgtgctaccactgcccggccagggatatcttaatttcctgcttttctgaaaagaatctcaccatatatccaggtggactccgtcttaccacccttgtctgcttctcggggactgactgcagttacagaatataccagcatggcttggaccttaaatttatttgctgtaaatgttttgacattaatctgttgggggggcatcacatgttccatggcacgtgtgtagaggacatgttggtgggactggatctctagctaccgtatgggctgcaggggttccagtccctcagttagttttgttgtgtatttgtggtgacgttgggatagaatgtagaacccagggctctgcgtatgcaagcatcagtgactgagcactagtcctgcagctcttcttgccgttagcatttgctgtactggaaaaacagagcaccgggtgttgagaaatctgtaagaaaagtctgggccccatgagagccccaagtgggccacttgccaagcagaggaagtcttgggaagaggctgaaggcacattggtaggctcagtgagggctgtggagcgctgtggagttgtctgctttcttacatttaaggcacttctcagctcttagctttggtttctccatggaggagcaaggtgctgttgctcatggtagctgtaaaaatgtcatcaaggacctgctccaggttgagcatatgcaaattctttattatgtgcacgataggcctaaagagatggctcagccttaaagcgtattggctattcttccagaagaccaacgttcagttcccatcgcctccaagtcacctcatagctcactgtaactacagtctaaggggatctgattccctcttctggccttcaggagcgtcacacatgcatgtggtgtaggcatacatgcaggcaaagctccatacacactgagtaaaaataaaggcagtaaaaaatgaaaataaatgcacagtagatcatgttgtcttctggtaggcccgcaatagatgtgtttctgtggtgatgtgcccagccccaactgccatgtaattgtgagcctactgtatacctgtatagactcagggatcatggtagccatggagacccgtggctgcagtgtccttgtagaatcacaactgtggctcagatatggattgtagtgttaggggtggtgccagggtttttgtgtgtattgggacagcatcctatcacctgagttccaggctcaggctca

SEQ ID NO: 34603 - DNA, 1163 bp, Mus musculus
gatggttgtgagccaccatgtggttgctgggatttaaactccgaaccttcggaagagcagtcgggtgctcttacccactgagccatctcaccagccctctttttttcttttttttcaagacagggtttctctgtatagccctggctgtcctagaactcactttgtagaccaggctggactggaactcagaaatctgcctgcctctgcctcccaagtgctgggattaaaggcttgtgccaccaccgcccagcttttttatttttcaccttaaattgccaagtcttctgcctaaccctccccagttgcagcactatcttcaggctcgccataaataccttccctacacccttttttaaagacccatctagggggctggcgagatagctcagtggttaagagcaccgactgctcttccgaaggtcccgagttcaaatcccagcaaccacaaccatctattccaggccttcatatttaaccaaggatcaccttgaactcctgagcacctctgtaccttctaagggacagggtgacatgcataccctaccacagtccattgatgtggtgcagtgatcagtgatcgggagggaacccagggctttgtgtatgctaggcaagcgctctaccggctaagccaagccctcattttctggataaccctttgagggaaccagcgagctgctgttatcttccattggcaagatggggagcctgaagtttggctccaagagggtaaaattgtccaacagttttgtttgtctggttttgttattaatgctataatatagtcccagacagcctggaaatcattatcctcctgcctcagtgctgcggggatcacaggaatgctcgatcgtgcccagtttacgtggtgctggggctagaacccagacactcttgcatgctagacccatgatctaccagctgggctcaacccctcagcttttagctggctccagctcataggctccaggagaggagtccttccttatcatcagcagacacaggcagcctgggctcgcctcacctctgctgggagtgggataggcagattccaggggcttccctgcttgcaaggacactgtgatatacatacatacatacatacatacatacatacacacacacatttacacacacacaaacacatgcttgagctcacacac

SEQ ID NO: 34604 - DNA, 1152 bp, Mus musculus
ctggagagaaatgacggttcagccgagaggccttacttcatgtcttccactctcaagaaactcttgaataaaaccaacaagaaagtagcagaatcctaaagacacctgcctcccagccctctcaggacgccgggataggtgcttgctgtgcagctgggtcagagtccccagctcatcagacttgcctaacacatcactgcctctctgcaccctccccgagttcccatttccaggaacctagaggactggggcatctctttcctatgccaaagggcacttgggagttttcagtgcagccctggaagatgggacagaatggatctctccagctcttactggctcagatggtgccaatatggtgaagtaacttgaagtcgaggatgggagatggccctaggatgtctgcagcaagcttctttgtatttcagtaacccttctggccaagagggaaagactggatgagagtgggcaagtcagctcagcgaacactagcgccaagctccccagcggggacagaattggatctccatagctgatgtacctaagggccagcaaatacacgtctcactcttagtcctttgtagcctaggcagacagtaagggatctacctgcttctcttccatcaggctccagaactggatggagccaccaagagtgccttcatatgtaaccccacctccagcgtgggctggctatggtcacaggaagaagtgtgcacccagaactggaggagtcttctggataaacagacagcatctgcgaggagggccctgtgtgaggaacgattggtgttgctgctggtggttgggagtagttgtggaaagcaggcctctgtacttagaccctacagagttgctttgactgatgacttctaaatggaaaacttgaggttggaaaatgaatgaaaatagggcctgtctccccagccctttttctgccagtaatgcacactgctctctttgtaagagatgagaaacttaagttcacccaagggatggtttcagggactgaggtgtgggtgtgttctatattccaaattaactaggcctatctggtttctttcacttgaaactagagaatctgtttgccaaacttcttgatcttgggagccagtagactggttcttcactttacctaccgtatgctaaggc

SEQ ID NO: 34605 - DNA, 1269 bp, Mus musculus
gttacctgcggtccaccgcagtctgaaaatattaagtggaaatttccagaaagaaaaaattgataagttttaaattgtgcaccgtcctgatgcctgcgtcattcacctcacttcatctcatcacgtaggcattgtatcatcatcacttcatcacaagaagaagaagggtgagtaggacgatgctacttggagacaacattcacattccgtcctgtctaagcctttcctgtgcccgattgaccgattaaactactgtacctgtgtgtgtagaggccaaacccagaccgtattggttttggtgatgtccgcggtttaaggcttccattggggtcttggaatgtgtaccccgcggataaggggggactactgtagtatagcgatacgtagagtgccccattcctgctgcagcctggagagtctcctctcaggtcctgggtcacgttcccatagactgtcttctgaaggatggaatggtactgaggtgagggtgggctgctggctgtccttgcatcatttttagcgtagttttcgcatttccagcgtcccatgagaatttttgtgaatgatgatcgccacgtgatggcaaagcattcttcagtgtacccaacacaagaggagctggaggctgtacagaacatggtgtcccatactgagcgggccctgaaggctgtctctgactggattgatgagcaggagaaaggcaacagcgagctctctgaggcagaaaatatggacacacccccagacgatgagagcaaagaaggggctgggtgagtctctgtttttgtttctgtctgtctgcctctgtgttgtgtggtgtgtgtgtgtgtgtgtgtgtgtgtgtgtgtgtgtgtgcgcgcgtgcgcgtgcgcatggatggatggatggatgtgtatatatgtttgttgaggagggcttaggtcttttcaggcagggtctcatgtagcccagacttactagctcactatatagccaagcctgcccttgaattcctgacattgcatgctgctatcttgcctagctcatttagtgtttctttttttttttgctggtttttttttgtttttgtttttgtttttgtctttttttttttttttttgtggcaggatctcactggatagcctgtgctggccttattttgtagcccaaggtagcatgaaaatcacagagatccttctgcctcagcctcctgagagttgggattacaggtctgtgtcaccatgtggcacagataagctagcatctcttctaagaagtaccaacctctct

SEQ ID NO: 34606 - DNA, 1185 bp, Mus musculus
tttgaccaacaggactctctctgtcaaggcctggggctagggcagtcccgcctggtgggcggaggtggtcccctgcgctacaggtggatgcctgtttgtgagaagcagagagggagttcatttccactcccccacctctttttttgtttttgttttttgttttttgttttgttttgtttttgtttttcctattgtaaattccagcctagctaatttgtggggatgtctactagaagatagggttagcctatcttttcccttccctaccgattgttccttttagagtaacttttcttttttgattttggtttttgtttctgtggtttaaatttgggagagggcctcccaatttttctgacttcctctcagagcagagctgatggcactttagcctctccttcccttgtccagggtggacacaaattgagattgtgggagactcagctgccctttaggaagctgccacatcccctttgtacctgacagaaccccttggtcaaactgtgccttgtcttcttattccatccatgaatagaaacgctatcagtcaacgatcccccggacgttctggacaggcagaaatgccttgctgccttggcgtccctccgacacgccaagtggttccaggtttgcattttgttcttctctttgtcttttggtagagaatgcctaagttttgcaacatggctaactttgaccataaagtgtccataacattgactgtaaccgtgccgatcttgttagcacctgcagcgtgcagctgctaaaggaacgcgcctcaatcaatttgacttgacagccctgaggagactcatgctgagcgggggctgctttgcaataagggtaacaggcttccacatatacaatgcgtgagatgctggccacttacttggtggctttgtacccctgcaatcgtgtacccttggcaaagcagcaccatgagactcaagttttttcatgtttgcctggtgtcctccatggtgccctgagtatgaagagtctgcactttcttcctctaggccagagccaatggactgaagtcatgtgtcattgtcatccgtgtcctaagggacttgtgtacccgagtgcccacctggggtcccctcagaggatgggtaagacacacttgtgactaggggtggggttagtgtttgtccaggcaggccctttgagagtgtagccttc

SEQ ID NO: 34607 - DNA, 1210 bp, Mus musculus
acggggggcagccacgacaaaaggtttgttatggaggtgagtaagcaggtggctggctagaggcaactctgagcttcctgggaaagaagtaagtgctctgggggaaggcctggtcctctccagaaaggctttggggataggctctcaccctggaggagatgctgggttagttcagcccctacacactgtgtgtttctacaggttgaggtggacggacagaagtttcaaggtgctggttcaaacaaaaaggtggcaaaggcttatgctgcacttgccgcattagaaaaacttttccctgatacccctcttgctcttgaagccaacaaaaagaaaaggaccccagtacctgtccgaggtggacccaaatttgctgccaaggtgaggatttacctttgacccctctgaccatgggtggaaatgtggatgatctgaaggtggggcaaaccccattcctctgcgttctctttcagccacacaaccctggttttggcatgggaggccccatgcataatgaagtgccgccacctcctaacatccgaggtcggggccgaggaggtaacatccgagggcgaggacgggggcgaggatttggtggcgccaaccatggaggaggctacatgaatgctggtgagggacctttttcatgtcacctactggcctactccaggaatgattgtgtagtacctttccttgggaggctcagggtgagtgcatgtaaccctgtaacctgtctgttcttttgcaggtgctggatatggaagctatgggtacagcagcaattcggccacagcaggctacagtaagtgcactttctgtgtctgcacttgggaagctgcggcagcatagtctgggtctcattagggtagggtgctggcctcagcatctctgaggctcaaggccaccagccgtacctttttgcggtgaataggttagctggccctcaagacccccacctccccatccccaaagtgtgtccttgacagttttaatgctaagacagcctttgagtaccacttaagttcctttgaagtcggcattttaaatttctctgctttaagcaccagtctttgagaatgcgccttcctgcccatgcaccgctcttgtcttgagaaggagccttcattggggggtcacacgagcagagaaatctaaaacctgaatttcaaatgtggcgctctgtgccctttttcaaaagaattctaatttcttc

SEQ ID NO: 34608 - DNA, 1610 bp, Mus musculus
ccgtgctgtgtccctgtgcttcactggggttctcaaccgtggctttccaccgcagcctgtctgaaactgttagcctgcagacttaagacaatggcagtttctatcatgaatttgcctttgagcttggtcatttcgaagttcacactaagtggaaaaacccttttctcagagatttttttgtgtgtgtgtgtgtgtgcagccttgcacagaattctagagccagcgttgttcagcatcaaggcaaaagcccacctttgctttttatggaaagcattcttttatttaaagagacagatactggcacgtttaatctacctttgtcttaatttacagcaggttttgtatgcatttttaaccttttcacaagtttccacttctggttgatgcctttggcagtgatgaaactgtttcagcacatgtgaatccacaatagctgactctttccttgcctttttactgagcatgtaaacctccgggacggccaggactgtggactgcatagagcagggcctcccaccttttgtatatgctctggtgggtccttggggcgaggaggttctgtggctgttttagttaagaaagtgaactcgcaaaggcatcaaaactgcgcttccgttacttgtgtgagaaatgacacaggcttgagaggaggaaataacggtaaaattttgcaagtcctgatggcagcgtcagtgacggactcctggattggatttggctatgttttctttttcacaatggggctttaaaaatgagctggaagagtcttgacaccatcaccagaggtttttcccagctccccctacccccaccatgatctacactgcctggcacacagacactgaatctgtgtgcctagaaatttgtcccagtgtgtaatgtacagagtcccttccttttggtggggagtcttgtgatactgtggctaggcccctgctctgcagtctttgctgcagaactgcccctgccttgacttgcaagatttgacgtttattcaggcaaaaagtggtcaaaatggttactgtgtgatttgtttcccaaggttcgaaaagtcagtgaaactttctaagattttgcatgatgtattttattttatttttattttttagaaagttattgttggcaaataatgtctttttataccaggaaatagttctgaatgacgttgaagacctacccttccttattactattattttttaaatgaatacatgttaaagtaatgagccctccgtacttgagtcttcattcatgcctggcttcaggcaggcagctcagttgctcagcaaaggaccctggggaagctagggcagggtttggaggagatactggggtggggttggggagtggggagtgatggggccctcggcttcccagtatcctcactgagtctccatgtgtttgctttcttgcattgtggaacacttcctcctgcagtgttgtggctttgtgatggggatgggagagacctgtctagaggagggcctgcacaggggtattgcctctcctggtgcttgtgctggtagctgggggcagcatcagcatgggtgtgaggtgtgcatccacaagggggcaaagggaaggggtggtgcccttagttttcaacctgg

SEQ ID NO: 34609 - DNA, 1196 bp, Mus musculus
gggctccattctctggccagaaagtcaacacttgacatcagcccctagaggcttgtcccacttctcagggtagcagtgagtgagaggcctatatgacaaagcaggagctgccacctcagcgtacaattctgtcctctaagccactttcatcttgcaggaggctactcatcacagtcaaactacagctcacctgggtccagccagagctacagtggtcctgccagctcctaccagtcctcacagggtggctacagtcggaacacagagcacagcatgaactaccagtacagataaaggcccaggctgcctgcccctctcaaccttctgcacctctgcctccaacttgtctcgggagattgagtctgcacatcaccagttgccatgttcactgggccagtgcccacccgtccacgttgctgacattgccacgctttgaggtgtggtggtcgctgggacccgtgccgtgacccctatttagctgtgttttggactccgtgtcttcagtggtttgttagttaccattacgtaaaccttgtctgagtagtgttccgaggtcttgccgttccggatccctctgtctgtttatgcctggtgtgagttccatcgggtgtctttaaatagttgcagaagggatacgtcatctgttaatgctttttgtgaagtgagttaatgagccttcattattttaatgcttagtgtttcagttttataagtgaaaattttattttaaaaaacagtggtttttttttttgggtatgtctggatcattcagacagtacatttgaattccgctgaatgtagataaataaaagaaaaacaaaagaatgcctgtctcaggcctgggtgtctgaccccccagccatggaagaggggagcaggtcagagaagacatgtttactagcgagagtccatctgcaggccttccaatgtcttctctgtttggatggtgttggttctccaagtcctcattcactctacaggaccccagcagtctcaaacttgcacaactcctcctacctcagcctcccaagtgctgggatgtcgggaacagggggtgcatcaccacacccaggtttgatatggttttaagtctaatcttacactgaggcagagcagactgggctggataaggtcccccagtttgagctgggactggagcttgtgcatgcccaagggcagtggttgtcagcctcgag

SEQ ID NO: 34610 - DNA, 1180 bp, Mus musculus
tgcttggtctttgtcttggccttaaaaattcttacaaaccatgatgttacaagctcctgcatcatgtcagaggctgctgtcagcaaacttggtctgaaggacatgtccccatcttcccagatctcataatttagaagctctgagctgaacaggaggaaagtccatgtttcttccactggtggagggaagaaagatacatgggggccaacgagatagcccagcaggtaccctctgctctgcccgactgcctgagtgtgatctgcaggcagaagcacagaaccaactgcaggttgtcctctgacctccacacacacaggcactgacaacacacacaaatgtgcacagagggctgaagagatggctcagtggttaagagcaactgctgctcttccgaaagtcctgagttcgaatcccagcaaccacatggtggctcacgaccatctgtaatgagatctgacgccctcttctgatgcatctgaagaccgctacagtgtacttaaataaatctttaaaaaaaaaaaaaaaaaaagtgcacaatgctaggcttacaccagtaactgcagagttgtgtgagttgaggcaggaggagactgagtttgaagataacatggcctgcaaaagaccctgtctcaaaaactgaaacaaaaacaaaacagaaaagtaaagcaaactgtctttgtgtccttttcctttgaggccgtagctctcacctcataggtgtgtgtatgctagtgtggagatcagagaacagcctgcagtgtcccctaattggtttctctgtgttagccctggttgtcctggaactcactctgtagaccaggctggcctcaaacctagagactgcttgcctgtgcctcctgagtgctgagagtaaaggtgtgcactgcctctgccacctagccactacgcacttatttttaaatcaaggtctcattgtaactcatatttggctgtgtagtcatgcttgatcttgaccctctaccccttatggtaggattacaggctagtgaatgtcagcacatccagtttgcctgtgttgtagatagggcccagagctccacacatatgtggcaagcatccggcgagcatgagaaccgcagcctggcttagccttattttcttagacaggatgtctcacctacctggaacggtaccagtaggttaggtctgctggctggaa

SEQ ID NO: 34611 - DNA, 1243 bp, Mus musculus
ccccaatctgggagcccctcgggtgggctggaagggctgggtccccatcctcaccctgcttctgccctcactaccctccacctccccgtatctttactttctttgcagcagaagagcgcccgctgcgcccagccggcccaccattatccgcccagccgagccgtccctgctcgactaggctgcagggggcaatgttctgggggggtcctcgtgcacccacagtgtaggacagttttggtggtctgggccctgctacttgccctccatgctgggaccaggctccccgtgggcaagccctgccctttccctcctcgccctagtggacatgacaatgaagggtgaggaggcccacagcacagcacatgggggctttgcactttgggatgaggaggagctctggctagcagaacaggaactgcatccttgggaccatcaggaaaaaaaggtccaggctagtgtggggggactcttctggagctcctccagagcctttgttctttctggggtccaggaactgcccacctttcctaaggactcctcaggagtgagccaggcccagcaggtccagtgctgacccacctggctcaagttgtatatatagagctcctttggccatattaaccacacaagctgagcccagcccaggctccgcacccagaggtgcctttgtgccttcctcaggcctggagggcctcagctctggccaccctcactctcctcagccccggttgtggtttgggctgtatgaactggggagacatcagaggcctcttggctcccaaccagatgtccccacagggtgggccctgggtgcctctgcagcctcggctcccaccgcctggattgaccactgttaagtgcctgcctctgtatatcctattaataaactaaaataaagggaagccctactggtggctacgtgtgtgggccttttgtgtgtgtcccagctcaggagattgagcaccccctcatgaggctgcccacactcatttacacgcgtgagtcttgtgtcatctgttctgagcccctcttgtccccatccgtaccaggcctcacacacagtgctcatgggaaacaggaattctatccacctctgtgcgatgctgtggccaagccctcctcccagccccgccagccaccgggaccaggggactcagttcattcagccatggtttatggtctttttctttcgtgccaggcgaccacctccattggctcctgcccgacctttcttctgagcttc

SEQ ID NO: 34612 - DNA, 1212 bp, Mus musculus
cactgaactatttttgagacaatcttaggttttccaagctgggctctacttgctgtgtagcctaaagtggccgtaaacatcatgccacttctacttccctcctgctgggatagcagaattttaccaccatgcctgactttggggtgtgattaaacttgggttctgaaggcagactaaactggatgtgttgatttctaagggtctctgtagcaactgaccacaagtttggtggcttagagctgttgggatatagtctctcatttcctggccacaactccgaatcaaggtgtctccaaggccactttccctctgggtgtggagggaagacggcttcctctcttgcaggttccaggggctccagataccactacttggccatctgtagccaaactccagatacccctcatttctgtgacttctcatttgtatctgtgtacttgtgtcctatttttgttttgttttaagatggtctcatgtagagtcttcttgggccctagtgccttgtccagaagacaccaactgtttcagccacctatatttccagaccccaggatctgaatttgagtttgttcatgggctgtaaggagggtttgtcagaataccaagaggaatctagtgcctctgctgtttatcaatctctgtgggtactataagggcccggcctgaactcagggatcttgacaggtggtagttagtcagctatatagtctagctagccttaggacaagtctgtgcctatttccttacctgcagcaacgcttttctgatagcctgggattcctctggccggctgaagtgcatgaggaagagaagagagtctggagcaggggatttgtagcaagtgtttgtcaacagagcatttctaaaatgacatattctttggtaatttcacatatgaatacattgtatttaaaccatatccacactgaacaaaactcttttacagatgttatttttattttgtattgtattgttactgatattttgaaacaatgttttatgttgctcaaagtggcatcaaatttgcagtatagctgatgaccttgaatttctagtcttcctgcctccatctctccaggcctgggattagagacatacagcaccatgctggtttatgccgtgcgttgtgtgtggtggcagactttgtgtccactgagcttagccccagtgttcatcagggtagcatcagaaggaggagctggctctctagga

SEQ ID NO: 34613 - DNA, 1246 bp, Mus musculus
tgttttcaagtgctcggtgtcccgagagacagagtgcagtcgtgtgggcagacagtccttcatcatcaccctgggctgcaacagcgtcctcatccagtttgccacaccccacggtatgtgttttggctccatggtagagcccaggagatggagggatggctttttttttttttttcttttgttttttttgagaaagggtttctctgtgcagccctggctgtcctggaactcactctgtagaccaggctggcctcgaactcagaaatccgcctgcctgtgcctcccaagagctgggattaaaggcatgcgccaccactgcctggccaggatggtcatttaatagaagtgttaccatacaaacctgaggacctgagctcagttctcagcaccacatgaaaagttaggcttagtatagtacacacgtgtaatctcacagcgagggagatggagacaggtggatccctgcagctcactcaccagcaggccttgccctatcagagctccgggctagagagagagaaagtctgcctagaaaaactaggtggggaagagattcctaaggaatgacacctgccacctggagctgacatcttgcctctactccacatgaacaggcaacacacacacactctctctctctctctctctctctccctccctccctctctctctctctctgcacttgcatattcccaatgccttggcatatacttgtagccccagctgctggggaggctgaggcaaaaggaaggatccctgcctgaagataaaagtaagttatagttgtgggcaggtgtggtggcacgtgttcatcatctcagctgctcagaaagctatgatatgaggatcacttgagcataagagtttgaaaccagagctggagagatggctcagcggttaagagctccgactgttcttccaaaggtccggagttcaaatcccagcaaccacatggtggctcacaaccatctgtaatgaaatctgatgccctcttctggggtgtctgaagacagctacagtgtacttacatataataaataaatatttatgaaattaaaaaaaaagagtttgaaaccaacctaagcagcttcatagcaatacccttgctctaaaaaaaaaacaagaaggaaaaaccagcccatgaagagacttttaaacagatgccctgcaccagtatctcactggctgctgtgaatcctctggatctcagttctttgtttctccaaaagggccaaactgactctct

SEQ ID NO: 34614 - DNA, 1300 bp, Mus musculus
ttgctatgggaacttggacaattttgtacacgatgtcgccgctgccctcaagtacccccagcccaacctttggtcccgagcgcgtgttgctgccatactttacatgagatcctgttggggcagccctcatcctgttctgtactctccactctgacctggctttgacatctgctggaagaggcaagtcctcccccaacccccacagctgcacctgaccaggcaggaggaggccagcagctgccaccacagacctggcagcacccaccccacaacccgtccttgcacctcccctcacctggggtggcagcacagccagctggacctctccttcaactaccaggccacatggtcaccatgggcgtgacatgctgctttttttaattttatttttttacgaaaagaaccagtgtcaacccacagaccctctgagaaacccggctggccgggccaagccagcagcccctgttcctaggcccagaggttctaggtgaggggtggccctgtcaagccttcagagtgggcacagccccctcccaccaaagggttcacctcaaacttgaatgtacaaaccacccagctgtccaaaggcctagtccctactttctgctactgtcctgtcctgagccctgaaggcccccctccatcaaaagcttgaacaggcagcccagagtgtgtcaccctgggctactggggcagacaagaaacctcaaagatctgtcacacacacacaaggaaggcgtcctctcctgatagctaacataggcctgtgtgttgcgttcacattcatgttctacttaatcctctcaagacagcaaccctgggaaggagcctcgcagggacctccccagacaagaagaaaagcaaagaaggaagggtgattaataagcacaggcagtttcccctattcccttaccctagagtccccacctcaatggccacagcctgccacaggaaccccttggcaaaggctggagctgctctgtgccaccctcctgacctgtcagggaatcagagggccctcaggcagctgggaaccaggctctctcctgtccatcagtaatactccttgctcggctgcccctcccccacctttatataaattctctggatcacctttgcatagaaaataaaagtgtttgctttgtaagaaaagcctgcaaaacagcagggtagtctccagggtccaagaatcctcccatcttcatagggagggcaggacaagtagtatccccttgagtttggcctgaaaaagaaagactcctaggaatggtcccaggaggagggtacatcctcaaccaac

SEQ ID NO: 34615 - DNA, 1160 bp, Mus musculus
cccaccagtatggtcaccagatatatacttgttacattaggtcctgtggcttatcccagtgcagtggatacagtggctctttggagccctgggcctggccttgtcagcagccgggctggtattcacactgtggcctgttgtccgagaggatacacggctggtggctgcggcactattgtctactgtggtgctgcttcacgccctcttggcgctaggctgtaaggtaggttccaggagattctcaccagggctgtggagtggggtgtgctgccacccaactgtacattcattctgaggtctttctgcagctgtacttcttccagccactgcctctggaccatgtggtgccagcaccccaagctacacctccatctcccaatgtcctgctgcccagttcaatccagcccatgacaacctcctaggaaggctcataggtgagggaccagtttctgtgttggttgaggatgtaccctcctcctgggaccattcctaggagtctttctttttcaggccaaactcaaggggatactacttgtcctgccctccctatgaagatgggaggattcttggaccctggagactaccctgctgttttgcaggcttttcttacaaagcaaacacttttattttctatgcaaaggtgatccagagaatttatataaaggtgggggaggggcagccgagcaaggagtattactgatggacaggagagagcctggttcccagctgcctgagggccctctgattccctgacaggtcaggagggtggcacagagcagctccagcctttgccaaggggttcctgtggcaggctgtggccattgaggtggggactctagggtaagggaataggggaaactgcctgtgcttattaatcacccttccttctttgcttttcttcttgtctggggaggtccctgcgaggctccttcccagggttgctgtcttgagaggattaagtagaacatgaatgtgaacgcaacacacaggcctatgttagctatcaggagaggacgccttccttgtgtgtgtgtgacagatctttgaggtttcttgtctgccccagtagcccagggtgacacactctgggctgcctgttcaagcttttgatggaggggggccttcagggctcaggacaggacagtagcagaaagtaggga

SEQ ID NO: 34616 - DNA, 1136 bp, Mus musculus
gagccagaggaaatcccaaaaagatctcagtaagatcccttctcaccactctgggacctgtgtactcacccctgctcatggccttcctgctcctccgtctactgcactgatctatgctgccatacagttcaattgtttccaccatgggacctagaggctttctgggtcctcttctaagcctctcaccaccaatgttagcataactcatttgcctaccctagtcagggaccttcatgacttccctaacaccctctgagttagccagacctacccaccttctgctttccatcttggtgcctccctcaactaaacacgagttttgctcttcatgcatgactgcccatttcagggcctggtacagtcccatgtttaagtaaatactacattgattcaaacataaacccccatttaccatataggtcgggacggtttctaagatggtgccgcacaaagttgtggccaggatggggcagcagggagcctttgatcctgtccaagacctggaaagcaaagcccagggtctagaatgagaatcctggtgttctgagaggtgtcagcacatcctactgaacaagctcgaacatgtcaccactgtgaaggtggatttcaggcctgtcaccttgctttcagcttcttgcagcctctcctctcaaagtaaggacagtccctaagttctggatggtcttgcaactacatctccaggatgtaccctctcactggacctggtctatcattagaggttggcttgactgggaaacattctggctttaagtcacacacctatccacgcctactttgtaacctagcttttgccttccagccccaccatacccattcagtcctcaagtatagtggctggactccaagcaactccaagtgccttacctgggaggtatccacatcaaaaaagctctgatagtagtcaaatgtccagaatctgggctgtggtttttcttcctgtagaagctataagacaaaagactcagaacttgcctgctcagccagggtaagaacagaggcagatcatcggggcctaggagactcactgatgtcttgtcatcctcttcctcccctacttcagctccatagccaatgcctgaacccacaaccacagccacgtgctctcgggaggtcag

SEQ ID NO: 34617 - DNA, 1200 bp, Mus musculus
tcccactgccacatacgtgtacacacacacaatcaatcagtcaatcgataaatgaattttagatggtgacagagcccggagcaaggtcttctgggtgtctgtataactgtggctgagcttttgcctggcccatttatgatcctgtgtggtcagtcttctgaatggaccctgggtggagcatcaaagtaaaggagcactagcctttcctaccttcaggaatcaagtctgggttcacagtagatattgtgccctgagccagccatgctggaaggatgtcagtctgggggcgtcctccctccctagccgggccccaagagtacgcgtctcggcctctctgtatcgacctgggtgctggctgtcctattttaccactattgaccctgaaggctatcgaggagggcacgctggaggagatcgaagaggaggtccggcagaagaaatcttcacgtaagcgtaagcgagacagcgaggccggctcctccaccccgaccaccagcacccgcagccgtgacaaggatgaggagagcaagaagcagaagaaacgtgggcggccacctgctgagaagctgtccccaaacccacctaacctcaccaagaagatgaagaagatcgtggatgctgtgatcaagtacaaagacaggtaagctgaggcagtgctggaggggtccctgagagtgatggagaagcatagagtaggacctggtacacagctacactggaggcctgtgttttcatgcccgacctagaacgtctagggatacatacaagtatcttccatcatgacaggaaaagagcaagtggcagaatagagaggcactatgtgggtgtcagcaaaggtggcatgtgacggttgctctgtctgaaggagtgcaccctgcagtagcagcagcagatgcagctgttggcatggtgattggcacttaggttgtggcttgatatatgacgactgaagcctctgttcttcctgctgtgtccgtagttcttcctctccctgtgtcatttagatgttgtgagtttgtggaccatgtcttgttccttgctgggttccacttactcttagagtggaatgtctggtgaggtctggccacatgtgagacagtgcatgttttctgctctgccgaagccggcatcaggctgtgctgctcctctgtggtgatgccgtgtggttcccacgaaggccttgcctagcctgaggtggga

SEQ ID NO: 34618 - DNA, 2052 bp, Mus musculus
ttatttattatatgtaagtatactgtagctgtcttcagacactccagaagagggagtcagatctcgttaaggatggttgtgagccactatgtggttgctgggatttgaacccaggacctttggaagagtaatcagtgctcttaactgctgagtcgtcttgccagcctccttgatgcagtttttttttttttgccacagtaagataatttatcccttaaggatctaggcccttccacagcattgagaacaccatggacaagggagagtgcctaggccgcagcctactcacaaactattccccctgttctttcaggaccgctcaggaagtggcagtgaggaagactgaaccagacattcctgagtcctgaccccgaggcgctcgtcccagccaagatggagtagcccttagcagtgatgggtagcaccagatgtagtttcgaacttggagaactgtacacatgcaatcttccacatttttaggcagagaagtataggcctgtctgtcggccctggcctggcctcgagtctctaccagcattaactgtctagagaggggacctcctgggagcaccatccacctccccaggccccagtcactgtagctcagtggatgcatgcgcgtgccggccgctccttgtactgtatcttactggacagggccagctctccaggaggctcacaggcccagcgggtatgtcagtgtcactggagtcagacagtaataaattaaagcaatgacaagccaccactggctccctggactccttgctgtcagcagtggctccggggccacagagaagaaagaaagacttttaggaactgggtctaacttatgggcaaagtacttgccttgccaggtgtatgggttttgcattcccatcacccacacaccctaaacaagccaagtcagtgagcttcaagttagagcctccacctcaatgtgtacgtggaaagcaatcaaagatgatgcctagcatccacctctggccctcatgtgcagatgtacacacactgaattacatacacgggacacacacatccacacggaggcagtccatgacttgcactggggagatggtaccataggcgaaagtgccacaggcacagggccaggctaatttagtcctgcagtcctgtgctcttaagatgaaggcacaaagaggaaccccaggcgctccaactagcatgccaggcagtgacaagaccctgcttcaaatgaatcagagcccacattcagtattgccctcttacccgatgcgatgcccatgccctcacatatgaatgtgtatatatacatacatacgtaaaataattcttttttaaattatagacatttttgtgtgaatgttttgcctgaatgtgtgtgtgtgtgtgtgtgtgtgtgtgtgtgtgtgtgtgtgtgtatcaagtacattcctagagcctacagaggtcaagggagggcattggatctggaactggagtcacatgaggctgtgagcaactgtgtgggttcctgggcctttgcaacagcagttagtactcttcaccactgagccatttctccaatctcaaaaagaagcattcttttaaatgaagactgaaataaataagtaggacttgccttggttctgtgcctataagccccagttctgcctgcagcccttttgccctccagttctccattaccgctcagtctttggccatccgtagctaccagctgccttgggagccacagttgtgtgacagctctaaggcgaaaggggaagtgttgtactccaagagaagtgttgtactccactccagtggtggaagtttgtcccaaggtcttacagctctgaagagaaaggtctcctggaagtctagagccaaggaataccacagagacacactgtacaacaaaccccacaggagacttcccaggagggaaagatccgagagtgtggcagcagaggcaaagatctccgatttcaaggcctgtatagtgaattccaagattcatagggttcataggccctgtctcaaaataacaaaaaatttgttctggggccaggcatatagtatacaccttta

SEQ ID NO: 34619 - DNA, 1219 bp, Mus musculus
tctgcccccaggtccacgccctttctaatgctcttggccgtggtagcagtgcagacttgggtttcatgtcatgaggatctgataactgttggttacttggcacaactttagtgccaatattgtaccagtatgttaggagatcaggtggcctgtactctaatctcaatacccaggaggcagaggcaggcaggtctcctctgtaagaccaaagccattctgttctatataaagttcaaggccagccaaagctacacagtgggaccttgtctcaaaataaatttaaaaaataattaactagcagggcgtggtggcgcacgcctttaatcccagcacttgggaggcagaggcaggcggatttctgagttcgaggccagcctggtctacaaagtgcattccaggacagccagggctggctacacagagaaaccctgtctcgagaaaaccaaaaaataaaaataaaagtaaaataataataataattaaccaattaaattcaatatgtttttagactttttgttcaatagccctgatgtcggtattaacgtctgacaggttgccctggctatgctgggtacatttgtcacctctgttgcgttctccggttagctgatgcagccatctttgagttctgctgttgacacaccttcctttccttctgctctcacagcagaagactcatgcagcaggaacgagttccagtgtagagacggaaaatgcatcgctagcaagtgggtgtgcgatggcagccccgagtgcccggatggctccgatgagtccccagagacatgcagtaagtcccctttatttgttggtggttgtagaagaacctatggcctgtgcgttctaggcaggggctcttcccgtgagtctcaaccctccctggggtgttactagacaaggggctctactgctgtgccaagaccctgcccaggaatggtaattccattcgtgagttagaagaaggctcagggtgaccatccccaatccaagtattcaaaccccaaggtattttgtatgctttgatgatggatttggaaggtttcatacctgacctcatgctgtggcttacagtcatactagtccactaacagggctgcatgggtgcttgtgaccagccttcacacacacacacacacacacacacacacacacacacacacacacacaggggagatggacctggtctcaccaaatcatattccttttgagtgacaactcc

SEQ ID NO: 34620 - DNA, 1153 bp, Mus musculus
tctctgtgtagccctggctgtcctgtcctggaactcactctgtagaccaggctgaccttgaattcagaaatccatcacccaagatcagctgtggtttttttttgtttgtttggtttttttgtttttttttgttttttttttttttttgagagttatttgccccctttgaacctccttccacttagctggattacaaaatggaattctctgcttcggtactttgatttgtttatttctgagatgggttctcatgcggtccaagagctgggatcatggatgtgcgatgctgtgctcagtttatgctggggaacaaacccagagcttcatgcgttctaccaagggagccgtaggtactcctggtagacgctgctttaggcttgaggtgctagtgacattcatacaattcagctccatgaaaagaacattccagaactgacgagagctgtttccttcctactaccatgagtgtcctgagatcaaactcacggcatctggcccagcgacacttcttccaccccactgacctgcaagttggaaaaaaaatatgcataacataaaaggatgtggttgggctggtgagatggctcagtgggtaggagcactgactgctcttctgaaggtcctgagttcaaatcccagcaaccacatggtggctcacaaccacccgtaatgagatctgccgccctcttctggcgtgtctgaagtcagctacagtgtacttacatataataataaataaatcttaaaaaaaacaaaaaacaaaaaacgatatggtctggggctgagccattggtagagtgctcgcctcacatgaacctgtgtggtgacacacgcctgtaaccccagcgttcgggaggtgcaggctggaggtcaaggccagccttgcttacactgaatctgagaacagctctcataaaaaaaaaaaaaaacaacaacaacaataaagcacatttctttttttttttctttttttaaatgttaggtttttgctgtttgttcttttgtgctgaactcagggcttcccattgctaggctgagttacttgttgcttttgcctgctcaatgccatgctgggcatggtggtagaggtctatagttccagcaatctggagcctgagataggaagcaaacacacttgcaccagcctggacca

SEQ ID NO: 34621 - DNA, 1109 bp, Mus musculus
tgagccacacactccagcgctgaagtgtaatcttaccgcgagcaggcaaaccctgtagctcaggccctcctgactgttctttgcctctcacagtgacacagtgtgatggccccaacaagttcaagtgtcacagtggggagtgcatcagcttggacaaggtgtgcgactccgcccgcgactgccaggactggtcggatgagcccatcaaggagtgcagtgagtgttggggagccggggatagcatcagtgtgtagtcactgtggggctgtgagcccagccagcgcccccgcagcatgtaaaaggctcgctgtgcatcatagatgtgacagagctttggctccagggcaggacaggcatgggaggcaggggtggctgggagatgcagcctggattcagatccctggcacttatataaatacattcttcgtctggagatggcttagcacctaagagcactggctgttcttccagaggactcaagtctggttcccagaacctaagtcaggtggctcagaatcgcctgtaactctagctacaggggggatccatctcttggcttccggtgcctctggcttctgaggtcatctgttctcacagtcacatgcagacacgcttatacacatgattaaaaataataaaaatgaatgatcttccaagtgttttgcgaaggcagtgcagtagcgtagtgttccccgtggaaagtgtacggcgctaggacagccagtctgctttctcaatcccacgcagagaccaacgagtgtttggacaacaatggtggctgttcccacatctgcaaggacctcaagattggctctgagtgcctgtgtcccagcggcttccggttggtggacctccacaggtgtgaaggtgagtctgcagcacattcagccacccagtgaacccgtgcctcagtttccccatgtgctcagtggccaggagtgcagtccccactgcttagggctcttaggagagttccaggggtgaacactgggtcctggcctgactgttaagagcaaagtgtatcaatggcaggtcctgcctttggggatcctcatcacgaatcgaggttccagctcgagcaagggctccgttgctagaactcttgcctt

SEQ ID NO: 34622 - DNA, 1132 bp, Mus musculus
tctgctgactgatcagggcctaacacagggcaactgacattatctgttgggaagtacgccccacccgcctctgcctccgccccagaggttctgtccccgtggggccatgtccgtgtccacattggagtggtttcatagtgtttgtctgcttcctgcataccttgcacttagcatgtgccagcacctctgaaagctctggggtgactagtgtgcatcaccacaccgggcttaaccctagacttccagatggcttccactgccatctgcggtggcagcccttgactgggagaaccctgaagaagctgtagttggtgttggtggaagggtggagtgctgaagggaagatgtggctgcggccttgcaggcatgaggctctgagttccatcctcatcagtcaaagagatgggtgtggttccaaactgagaactatttaaacagactcttgtcaacattagtgggagcctgccatctgagagccctcatctctcttctgtttggtctgttgtctttcccagcttcatgtactggacagattggggaacacccgccaagatcaagaaagggggtttgaatggtgtggacatccactcactggtgaccgaaaacatccagtggccaaatggcatcacactaggtatatctgaggggtggtctagcctgatgggggtgggcacactgaagaggacaaagtacatagttgagaataggtgataggtattaattaccctcttcccatgcagctggaagggtcactggattaaggcagaagccacaatgtagccctcagcttcctatgtagctagagagatcccccaaagctataccctttaccctaatctagtgacctgaattttttcctggcatgttttgaaactttctggaacattttagaatcttctaaagcatactagaatatttaggcaattgaataatcttatctcacctctggcctctccatattttcgtatgtgtttgtgcgttttagatctttccagtggccgtctctattgggttgattccaaactccactctatctccagcatcgatgtcaatgggggcaatcggaaaaccattttggaggatgagaaccggctggcccaccccttctccttggccatctatgaggtgaacc

SEQ ID NO: 34623 - DNA, 1825 bp, Mus musculus
actactgaccgggtcctgggtaccatagccagtccctaacctcaggacttcctgcattgaccttcatcccagagccttcctgcctgactctgccgcccccatcagaagccaggaaagtgactcgtgacattcggtactgatcttgctggatcttgaggccggcagctgccagtgatggatacccgctcatgcctttgccaaaacgtcacccgttcctggagggacaagcccaagtcgccattctcccttaatatttatcaagtgcctgagacaactggttgccttgctcaggagtcctggcctgctcagtgtcctgctgctcaggggtggccggcaggacccctgtcctgtgcccagcccccgagtctccgagtgaggcttgcacttctctctgcgcacttttcccgttctgtgctgggcacccacgtggtccacatttgtactcctaggttgcactgaccctggtgcattggatgggacctcaggccggaagtggccccgaatcattgaccacagaagataattgccaggctccaagcatccattgccttcttcagtactggggggaactcagggcctctgtctggtgtttagttagtctgtttgtttgtttgtttgtttgtttgtttggtggtttctggctctgcacagcagagttgtttagctcctctggtaacgtcatcctctctcacagagacatccagcctgctgaaggggagagatggggcgaggggagggatacacgcatggtttctcaggtgtggtggcacttggctttaatcctatgctcaagaggaagaggtgggcacatgtctgaggtccaagcctacatagtgagaccttatatatctaaaaaccaaaagaaatcccagactatttggtgggacttggaagaatacttagaaattgccacagatttgtcacatgggtaacctaagaagacagtggtggccttacttggattcctgggtagatccacctgtccactactcaagacacaagggcacactgcccagcccactgggacacttgtaaagagctctgtaatgtgccgatggcacctggctcggttttcattctgtatattcaaggatatcacacatatgtattaaatctatttatttttgcaaaccctgattgctgcacctctctgcaatttctccaggttaggctggggtgatactctgggatgctctgtatacaaagatgatttgaatgggctgatctcaggcctgtcctgtgcgttgctttgagtgggtgggaactgctttgaaacccttgttcagatgtttttataggctgaaaatatcatactgtgatggattaaattcttttttggaaactttgtcatccttatgtgtgtgaggtgtggggtgcagaggaggcatcgggaggcttggaggatagctttgtgaagccacttctctgtattcacccaggcttaggaacaggcttgtgtgtgtgtgggggggagggggtcacgcacctctctccgtgtgggtgtcctgaaactccaaattgttcctttgaggcaaagttcttccctgaacctggggccccctcagctatgtctaatgccaacaaggcccagcctggctctgctctgctcagagtcaggggttacaaggttcagagaactcccatcttgctaagctggtgctcgagtgtgcgccgtgcccctggtgacaaagtgagcgtccttagctgctgagtccaccatttcgctagctgtgccttctgtttgagttgcgtggttttggtagtttggagccaggatctcacaatgtagcctgtgttgggttgcagggccaggaagagtagctga

SEQ ID NO: 34624 - DNA, 1270 bp, Mus musculus
taggcacgtctcaccgagcctaatgactggaattcaatccctgggacccactggtgggagaacagctatatacgttgtcatctgagtccacagggacactgtggcatgtttgcactcacacacacccagataaataaacataaaaagaaattagcctgatatcatcccagcacttgggaagctgaggcaggaggagtcaccacagttcaaggttagcgactggacctgggaggaccgaaaacactttcctttcatctcgtcctcagtccaccacggccccacagtggcccagcccatccacttggacagtgcacagctctcgccgaagttcatcagtgactacctctggagcctggtggacaccacgtgggagccagagccttgacctcataccttgcacagaactggggttgagggagccaaggaggggatcactctaaaattaaatgtctgtatgtgagtgcgttcattgatttatctacttgctttgagacagcatggagtccaggctggcctgcagcttcttttttatttgtaattacatttactgtatgaatgttttgtctgcatgtgtgtctgttagctgtgtattccaggagaggttagagagggcttcagaccccctgaaactggagttatgggtggttctgagctgccatgtggctactgggaatcgaacctgtattctatagaagagcagccagtgctcttaattgttgagctgtctctccatccccttaattacaattttaaaaaatgtgtgcctagccgggcgtggtggcgcacgcctttaatcccagcacttgggaggcagaggcaggcggatttctgagttcgaggccagcctggtctacagagtgagttccaggacagccagggctatacagagaaaccctgtcttgaaaaaacaaaaaaaaaaaaaaaacaaacaaacaaaaaaacaaaaacaaaaatgtgtgcagttggggctggagagatggctcagtggttaagagcacactgattgctcttccagaggttctgggttcaattcccatctgtaatgggatccgatgccctcttctggtgtgtctgaagacagccacagtgtactcacatacattaaataaatactctttttaaaaaaaagtgtgtgtgcagcatggtgggtgtgtatgtgtgtaacagcttgctggagttggttcttctgtgggggtatgtgcatgagtatgcttggtgcctgaggaggccagagttgtcagatcctctgaaactgaagctacagctggtt

SEQ ID NO: 34625 - DNA, 2591 bp, Mus musculus
agagtccggcttcgtcttcagccgaggagtgaatacagggaggagccagtgagtcccccaggacccaccagccacaagccacgcatcaaaccgtccctcctccatccctctgtcccattctgcctcggcattcctcagcccctgaacttccctgagggagccctgacatctaccaggctcaagctcctggaagcctttcccagcaccctgggttcaaagccagaaagccaagctacattctcctcccagttggcaccagttgacaacgccttgggtgtgggtttcttgtaaagaacatagagaacaatcagccggcaattatgggaggaggaagggggggcaagaagagaaaatactgtattcttgagtcattgttaggggatgggaggggtcagaattcagttgctaaatttgaatgtcactggaatgttacagtgtctattgtctcctcatctttacagcaggtctccacaaagcctgctcaccaccctttgtcacctcatttcattgtctagtgtacaatagggtcttgtccactgccctccacctccagactgtgtcttcagggcctggggtgtctcttgtgattgctttacagaataagattgccgtaccttagccgcctgcctccagtcagaaagcagtgttttcatttgcctttttcctttctctctctctctctctctctctctcacacacacacacacacacacacacacacacacacacacacacacgcacgcgcgcgcgcgcacacatgcacagggcttgtcatcttgcagctgatagctgatgtcctgtgacttggaaatgaccaacttacaagaagttatgctgacctccctgttccccacggggagtgcttggcagaggagactacttctagaaatactttcagacctacagacaaaaaagaaaaaaggccattccggagtgactcccagcatcacagcccagaacctcctcctcaaaggagagtaaacagagactgtgatactgaccaagtacaggcgctcgctatgaagcccatatgttcctgattaagagctggctggcctcagagcactcccagaactagcttaaagtgacaggctttgctgaaatccaaagggacaaaagagtagttttatgtttgtgtgtttgtttttaatgccctggagctcctgctggtgacaggagagacagacaggctgcacctttctctaactggggttcctttctggccccaggatctcagtgtggttcgtggggggattttgttgttgtttctttgtttcttttcttcataaagaagaaaaaggaaacaacttctagatgtgccttgcgatagggaggactttgtcctctcaagtctccctgtcgtatccagatcacagctgaacccactgggccttggcgccaaacctcagcagggcagcattgagactcatggactaaaggaaagtgttcactcttctagacaagtgggtctcttggtttgatggagtcttactccgcttgagttttgtagaaggggtttgtctaaggcatagaggcttggttggcataagaaaataagatggacagatggatgggtggatggatggatggctgattgagtgggtgggtgggtggatggatgcataaatgaatagatggatggatgaatgaacagatagatgaatggatggatggacaggtgggtggatggatgggtggacggatgagtgtggggtgggtggatggataaatgagcaatggatgagaaactgggttggctggtgggtagatgtcatgatggagtctttgcacgtgtatgaaacagaaaaccaaacttcaggacagacagctgctggtgtctctggatgctcacagcctagggcacatttgaaaggtcgtgctctgagctgagccctgagttccagccttgtagccagcaagggagtttatttaaggttctggaagcatcagctatgacccaaagcacacgctcctcagaaaagcccctgtttctgtcgctgctgctttctgtttctctgtcggggccaccagggccaaacacccaccagtctctcctctccttcccgctatactccagttttctttctactctgtgaccacggtacatccatgaagacagtgttacacgtaaatgaagtattcttttcttgtaatcatattttagaaagtaaaaggacttaataaagctacaaataaaaacattgcctcgtgtctgtttgttctccttctttttaggctagccttgaactcctgatcctcctgccttccatctcccaagtgctgggatgacaggcacgcacctccacaccaggctttcttccctaggaggatgaaagccggggccttgggcatgctagacaaccactctgatagctgagcgccagcctcagcctggatctctggttgcttagcacgtacttttgtgcagcaattgcatgcacaaggggacagtgccatgcagctcaggaagactcgagacgcacggtccagccttctccaagcagcaagaacttctaccagctccaccaaattctgggaacggaacttgggccctctaaagagcagcatgctacacggtcctacctgagcca

SEQ ID NO: 34626 - DNA, 1197 bp, Mus musculus
ctaatgtgaggtctgactgagggaaggacacctttgttcttggcattgatgggtgacatgaccagacaagaccttgttgatctacaatgggctgccagcactaacaaaagccacttgtgtccctgggctatcagctgggcagaaagggacacagcagtacttaaaggccttggctttccccaactccaggaacccctggtcaggcctccccagcggccttccccagcaaggagccagacccaccgtactcagtggaaacgccctatggctaccgcctggacctggattttcttaagtacgtggatgacattgagaagggccacacactgcgcagggtggcggtacagcgccggccgcgcctgggttccctgccacggggcccgggctcctggtggacgtccacagagtctctgtgctctgatgccagtggggacagccggcactcggcctactcctactgtggccgcggcttctacccacagtacggagccttggagacccgaatcggctccaaccctcgtgtggagcgcacgctgctggatgcgcggcgccggctggaggaccaggcggctgccccatcgtccggtggcctgggctccctcacacccagcgccgcgggctccaccagctccctggcaggcgtgggcctgctgccccccacgcctcgcagctccggcctgtccaccccggtggcacccagcgctggtcacctagcccacgtgcgcgagcagatggctggagccctgcgcaagctgcgccagctggaggagcaggtcaagctgatccccgttctccaagtcaagctgtcagtgctccaggaggaaaagagacagctcaccgtgcagctcaagagccagaagtttctaggtcacccctcagggacacggagccggagtgagctctgcctggaccttcccgaggcccctgacgaccctgctgcactagagacccgctcggtgggcacctgggttagagaacgggacttgggcattccagatggtgaagctgccctggtagctaaagtggccgtgttggagacccagctcaaaaaagcgctacaggagctgcgggcggctcagacccagcaggtcgacctccagccccaggcctggccaccaccagacacccaggtccgcgtggacaccgtgcgagtagtggagggtccccgggaagtggaggtggcagccagcacggcag

SEQ ID NO: 34627 - DNA, 1176 bp, Mus musculus
ccaccactgagccatgtccccagctttcagccagccatctgagcctcagtttccacacctgtgaaatagacatgattctaacatgctgtgaatcttctggtcagggaaagcaaaatggctaagtgattaaaggtgcttgcagccaagcttgaatacctgggtttgagtccccagaaaccacaaccacatggtagaagggaagattcggttctagtaagttatcttctgatgtctacacacacacacacacacagagagagagagagagagagagagagagagagcaaaaataaatgtgatttctttaaaagaaaaagatcaaatcgggctggacagaagaaaggccacacagattcttggaagggttttctgatgctggatgaagctgttggggtggactgtggagctggggtcctggggcctgctaacctgccttctgcccccaggagctccatgaacagatcaagtttcaggaaggctgacctctgacaaggctaagagccacacccagaagaccagcacccacacctcagctgcctgtgcctttctggagttatagctgccccgagtcgaagtcctaggagatgagccccctgtctgtctgcactgatggattctaaattttgtttttgtttgtttttaatttaaagtgagttttatatacaacctgtgtggtgtgctgacagttgacatggcccctgccctgggggcagtgacgttcattcagtgggagaagagaacacactcacattgtaacatggccatgggaaagagtgtttcctgtgtgcgaggtcacgtgtgtccacctgtggtgagggtttgcgtgtgcaagcgtgtgatgtacgagtattcctcagtctctccactttttgttttgtgtttactttgcttcccagcctggccttgaactcacaaagacccatccacctcagcctcagccttttctactaagtgctgggattaaatggtttatcatttttaattgtatttttttctcctctttctctctttctgtctgtctgtatgtttgtgggtgcatgggtgccatgacacacatgtggagtcagaggacagtttgcagaactcagttctccccttccactgtatagatcgcaggcattgagctttcaggcttgcagcaggcaccttcgtcttgacatctgacgagcctcccct

SEQ ID NO: 34628 - DNA, 1731 bp, Mus musculus
ggaactcagaaggctgagacaggaggataccctggtctacatagtgagttccaggtcagccagggttatgtagagagatcctgtctcaaataaataaacaagcaaacaatttttttaagttaaaaaaaaatttggctggggtcttagcaaagccatagagtcccaagctggaatcttgcagtgagaagctggggtgttactcagccctggagtgctcccttaacacggggcctctgagttcaatcgcagcacacatatacacgtgaaaagccggtgaccagcctttgtgatccgggtcccctggcatgttcctctgtctcacccctgtgtctgagatccccagacaggctcctgaggttcagggttccccatcccagcttggttccctctccatcccaccctgagtgtgtctggagtagaggccatctgcagagaggcctccatgccaacaccactggcttctctcagcccagcgtgtatttgggacatatttccgagtgggcttctatggcacacgatttggtgacctggatgaacaagagtttgtgtacaaggaaccgtcaatcacgaagcttgcagagatctcacaccggctggaggcacgtcctggcgctgggaggtgggctaggcaatgtgagttacagtgggggctgccccagctgacccggagtcaaccccgtgtctttaggagttctatacggaaaggttcggggatgatgtggtagagatcatcaaagattctaacccagtggacaagtccaagctggacccacagaaggtgggtcctctggtccctccctgcccccaaaatccaatattggcgtttgcatggtgggggcaagtccggtttcttgggagagtctggtacatccagttataggaagagctgggcctttcgattcaaagggttcaggcctgcagggaccaggacctcaggctggagctgtggtgtcaggtggaccccgcaccactcccatcctcttactcggccccgtgttccaggcgtacatacagataacctatgtggagccacatttcgacacttatgagctcaaggatcgggtgacctacttcgatcggaactatgggctgcgggccttcctcttctgcacacccttcacaccagatggacgtgcgcacggagagttggccgaacagcacaaacgcaagacgctgctgagcacggagcatgcctttccctacatcaagacacgcatccgagtgtgccaccgtgaggaggtgggaccccagacccctagggaggggagggagattcggggactcaaggtccagggggagacttttccagggaggaaaaggcagaggaaccccacaaacagtgcatttcagggatgctggatttgggaagaaagagatggggatatagcagattgggtttgggcagtagaaggacccaggctgtaggctccagatgcaagcctctaccatccagcctggagaaatgtggatatctcaactgtagagtccctagacccgagggcaaacagcaagtgaaacagaccagaaaccccagctgagtcaagacccaccagggagcacagatctccagcactgatcatagcctgggaccctcctgccccacagaacatcacaggccccagcaggtgtatccagacacgcagacacatgtactcatgatacatgtactcatgtacacgcagacacatgtactcatgatacacacaccccactcactccacagacagtgct

SEQ ID NO: 34629 - DNA, 1239 bp, Mus musculus
catctcatctctccagtgcctcacctctgagttaaccctatgcccatcgacagtactgttgcactgacattgtcaacacaccataagtgagcagaataatatcgtgatgatgccatgctgagccctcttgctggccccttctgaggcacttttaggagaggaaaatgggaaatagccggatttcggatatgtgtctctatcccaccccaaccagccacctccagctcttgatgctaactaactttagttatctccatggtagccatggtggtgagctttcacttctgacccttgacctgggcatccactctaccgtctgcagagctccaccttctccagccaggcccccgatccgaaggtgaccagcatgttcgagctgagcgggcccttcaggcagcagcacttcctgtccggactcctgctgacagagctggccctggccctggatccggaagctgaggggtgagtatggggcctgggcgcggcccagggacagtggcaggggccaggagccatgtctgcaccacaatgaacacctcgtcattccacagggcatcccttttgcacaagaaggctattagtgccgtgcacagcctgctgtgcagccacgatgttgactcccgctacgcagaagctaccgtgaaggccaaggtggccgagctgtacctgcccctcctctcccttgcaagggacacactgccacagctgcatggctttgccggttagagggctggggatgatggggtttcatgattgtggggtgtggggccagcctcaggctgagcagcttgggccagactcaccacagtgtctacatcaggccagtctcaccgggaaagtggaacagtgctggtatccattatgatagagaaacacgcatatggagaactcttgatgatggcagcccatgtccagaggcctcctgatgacatgtgttgtgttactctctgaggggaaggcgagggctcagtgggaaacagcggacgagaaaactggggcctgtgccctggggagcagtctagggcattgcttatgtggcaggacctgtagattcaggcctttctttagcgtagaggaattctcagctctgatcctctaagtgttttcctgcctccttccctttctccctggactccagtgacgtatgttagcgagtttctttgtataacatgtctgctgttttcccatgctttctgttctctgtgcctcttctgggtaacagcctgttggtctatttgg

SEQ ID NO: 34630 - DNA, 1502 bp, Mus musculus
cttccctgagtgagagaggggatgttcatgccttctgccttagaaccatttcccaggtctactcttcatatcgctggctgaagttgtcacctggcgtgggttgctgtccaacttagtcctggcagcctctctatctcaggtccaccagtttggccttgaaacctgcctgtgaactgactgctagccaaggacacaggcagggctgcagtctccatcctctgcctccctggcgtctaccggaagggaaaacctgttttctggttaaagaagggacagagttggagctacccctggcaccgggaactctccaaagtgccttcccagcttcccctgagtctatccactcagtgtgggttaatctactcccagaattaaattttggagtattccagggcctgtcacatggggctgagaatcgcccaccctagcagtccagctttctgtcagttcacctcagagccagggaactgaggccgcctgcccaggctcccatctgtctgcctggtggtggcttaggcaagagctttacaaaccttacatcctgtgtagaaacggaagtggagaaagcagcccacagagggtgtgcccttgctggtcagtttcttatgacaggatttgggcttctccacatgaggactcttgtgtagacccagtgtcagcatcatggccgttgcccagggacactggggctgtggggaaggactgggggaaggcactagtgggcaacccagtccgtcatgggagcaggagtccttcctgtgaattagggatgggctgtgggttgtgactgctttctctacaaagcttgagacgtagcccctaggaccctgggttctatttctattcactgaccagactcccctaaacactatctgacatttcatggtccaggtgacagatgctctgtgtcacacacccctgactctgtatggggggtggagtgtactccttcagcccccacagccagaatcacttctgcagccttcctgagctcagcaccctccctgactgtgtatgacctacagtgcctggttcagatgtatttctagccctgccagtggctgtctttgtacagattggacaagcagagtgaaggtgtctaaacacttagaggaaagactcaattttttaaaatgttgctttatcattaaatagtcaaaacggtgcaaattatgttcttaagattcagcaacctgcagggcgttgtggtggtgaaaatttttgatcccagcattctggaggcagaggcaggtggatctctgagttcgagaccagcctgatctacagagcaagttccaggatagccagggctacacagagaaaccctgttttgaaaaacagagagaaggagagagagagcaagagagaatgatgcagctagtctggaaggaacctggaactagctctctcgctagcatttgcctactgttttgcacagggtcctggcttgaagacccagcactgcacaaactaggcacgtgctccagggatgtcattctagt

SEQ ID NO: 34631 - DNA, 1337 bp, Mus musculus
tatttttttttttttttaatttatttttatttatttattttattttatgtacgagtacccagtccttgtcttcagacacaccagaagagggcattggatcccatcacagatggttgtgagccaccatgtggttgctgggaattgaactcaggacctctggaagagcagtcgcactcttaactactgagccagctctccagcccttcccccacctctccccaagtgcttcttaagagagttttgttacataggccaggcagttgtcagtcctgcctctactacaccacatgcccaggaggtcgtggtgctgaaggctgaacccaggcctgtttgcgtgctaggcagtccgcctgccagctgaaccccactgttgtccagtgctggggctggctcgggcttccgcatgctcttgcagtgactccatcccagccctatctctgtcttctctcctagaacctcaaggcctgcaaccagtctactgatcctgaagtctgcagaccaaggcctgcccaccctgggcttcctggccatcctctgggaagcaggaaccctgaggggctctaagccccacttctggcccaggcttgccaagccatgttcctgaggccccagtggcctccagagatgaataatgagctcgcctaccttggattcctaaggggagttagtccctgcacccacctcacccctgcctccccggctggtgggagataaatggatgacttgacctgtgacctcagaacaataaatgtgacttgtccacattgtgtggctgttttttaatttcattttttctgttggtttcactatgtagtccaggctaacctcagattgtctcctgccctagtctcccaaggcatggatgggccagtaagccaggctaggcggcctgccttcataagggtgagaactggacaggtgagcagacagtagatgtggagtgcggtggagactgctgtcacctgacagcacctaagttgcctaagagacaagccagggatgaagctgagatcaggcctggggtaagcactctaacccgatagctatcgctgcttcctgactgcaggtgcactgtggcctcaggctcctgccagatggactggactttttttttttccctagtttttcaagagggtttctctgtgtagccctggctgtcctgggaactcacccggtgttgtagaccaggctggcctcgaactcagaactttgcctgcctctgcctcccgagtgctgggattaaaagtgtgtgccaccactgcccggtagactggaatcttgaactgcgtcaggcccacatctcttctgtcacatctacaacgttaacatttgggaag

SEQ ID NO: 34632 - DNA, 3221 bp, Mus musculus
aggggacacaatggtgccctactcaggcctcccttgcccaggcctggcctatactgagagaaaggggagggaacaggtttaaaaatccccaaaacggcaaaaaaaaacaaaaaacaaaaaaacatgaaagaggggagtgggcgtccccatcccccgccccagtccctgagcagagaacagggagcagagttggggcagagcaggaagcagaaaaaaaaagggtggggtggggtgggaggggaagaaaaactctatttttgtaaaaagggaaaaagacctcgtggagaatttttactggggattcttgaacttgaaaaaaaatcacaaaaaaaaaaaagacaaaaaaaaaaaaaagaaactattttggcaagttatgtttaccaactactggggcaggggtgtagggagcagggctgagggctgagagtccatagggccagcatcacaggtacacacacacacacacacacacacacgcacgcacgcacgtgcacataagcaaacatggccacaggaaaggaaggacatgcacttggaccttggggacacagatacacaacacatagatacagaaacatttcaggatacattcaggatgaccaaatccacaccagagaacagagacacagacagacccttggcgctgcataaacagagatacagacgttggctgcttgtccacaaaaccatgtgatgtgtgaaatgcactgtgacagatccatttggatgtaagtctggacgccagtccccagtgagagctggggaggtagctcagttggtaggacacttgtccagctttcctgaagcctgggctcttccccagcactgcacaagcctggtgtggcacacagacctcattcattctagtgctcaaatggtagagtcagatcagatcaagactagccttggctacatagtgagtttaaggtcagcccgggctacataagaccctgtctcaaaatgcaaaaccaaataggtcacctagaagcatacaacaccagggacaaaagcccatgtccacagcatcctataggcccagacaaggtgttcctacttaagaccctggcccagttacttcctccagccaggctggtcccaccacttctccctgggtccccaacaagccccacccttgggttctctacacaaactccttagcccaccaggggcctccctgctgcccaacacacagacgtacacacatggcgtccatgcatccaaacacacgatacctcgttctactttggcatcaccgtgggctggagggggctctcactccccacaacactgaggccaaaggacccccctgtccctgggtctggggagaggtctgcagtcctcctccctcaagtagggacagagtgctccctacctgcaagcaagcacccagcacactccagcagacccaggggtggatggacccaaggtgtcccccaccccatccacttgtcgccctcttttgattgttgggtttttttgtcttttccggattgtgggggaatcatggatgcagccttcgtgagccccggcccggcttcggaatggattttgcagccatgccccacacacaccctgacttttcattcttttatgcaagttccaacagaagccacaggctggagccctgggagccccaaaccttcaacccaccccacagtgggcccagtcacaaccaagaatggtgaagcccctcccccactctacactctaggttctagttgctttcttccggtgtcctctgcgtttggtgtctggccacggccccatttgagcgtccaactctctctccccacccctcctggtgttgttcttaaccgtctgtggagtttctgctgcaaggaacaaaaagaaaaaaaaattttaaaaaaagaccaaaaaataaaaaatgaaaaaaaaaaagaagggaagaaaactcaaacagaagatgaaatatagcaaaaggaaagaaaagaaaaaagaaaaaaaccacaaagacgatttaaaaaaaaaaaaaaggaaaaaaaaagataaactgtcaccagttaactttcttgtacttttttgctgaatttagcttcatgtagttttaacttattgctgtgtttaactatttattctccttgttggcctgtaaggacctttgtgtatatttctgttccttcatgagtttgcaggttgaagggagctgttccttttctttcagttttgctgagatgtggttatgcctaatttatttatacaaaggggaagtggagtcattaaagtaataattattaataacagtaatggtagcagcgtgccccccgggggtgccgtgggctccgaggggtggggtggggtccccacagctggcggtgcccggggctctcaacgggattgttttgctattgtcttgagaagtttttctgtctatttagctggtgaactctagcttgctcacgatacaccgaacctatttattctggtggtttctaagtctgcccttccactccccactccctcccagcaggacagggactcctcacctccaggagggtccagccccttcttcccctgctgtttctggggtctcccctgccctccgcacatgcaggaggcatccgagcaataagggctgggtttgtcccccaccctggggggaggatgggctctgaagagggggcacctccccccaccccctcccaccaaggcctaggtccctgctgcctccaagactgggaggggggactttttttctaggacacaaagcttagcccagccaggtcccctccctggaggccagtcccccaagagggccaggccaggggctcccagggagaggggcccttgggtcttccaaagtccctggggggttggggcagggccagtgggaagagggctcagccctctaacccttccttcatcctgttgattgggaaagtttcaaacatgacagtctatgttggaggtgatataaaagaactgtagaaaaaaaaaaaaaaaccataaaacaaaaaccaaacctcaacccgaacccaagaacacttcaagttgcgttagacatttcttaccgagccccaggcctggccgcggtaactgacttttacatgggattctttaactatttgtacttttcatgccagaaaataaaaagttcagaatcttaagtctcaggtgctctgtgtgccactgtggcggggtggcctttgcgctgcaacaccggggaaggatggcatctgtccctgggccagggtctctaatga

SEQ ID NO: 34633 - DNA, 1500 bp, Mus musculus
tcttctataattagaactttccccatagctcaccttctatagtgtggatagtataccctagggagaggcagagtggtgtttcctcatcacttcacacaaaaggccgcaccagtaagcctttgaacttgctgagaatgttttaagcacctaggctgttctcatgggttaaagaaagaaaaagaaaaaagagagaagagactcaaatctcccaggggcagtccagcacttgagaggcatcagccaactttgtgctctggagcctcggtttcctcccaagtactgggcaggagcctaccgaggttaactggaactgggccaggactggaaaaactgctttttgaccccagtactcctgtccaagctggacactaggatgcctctttcacttcctggtctaggccagctatggcttatgtcctggctacctgcatgtctccccactttaacagccccttcccccgtggacccatggcacccactcctgcccctctcacccctagaaccacgtcaaccttgtgcaccgaaaagggaagaccaaagtgtgtcctcaccctggctgtggcaagaagttttatttatccaaccacctgcgacgccacatgatcatccattcaggtcaggccctgccagctagaacccataggccaggtgtagtgcacatgtgtaaattccagcgttcaggaagcctaggctgtacccgtgaactcccacatttatacctatacccggcactggtttttatgtgcagttgtcctgagtcccgacacgagtcatatgcaagctcattttagcttggcagttgacaccttgtgtcagaagccctcttcctacctgctgtcactccagtggatgttggtgcccgggtgggggtggggagagcttgctccttgtagccacctctactgggcggggtcctgaggccgctgccacctgcaggcgtccgcgagttcacctgtgagacctgcggcaagtctttcaagaggaagaaccatctggaggtgcaccggcgcacgcacactggggagacgcccctgcagtgagtgtccagcgctagggagggaggtgacctgagcgggttgcaggggaggctcagcccgcggtgaactgcctttgggccccctctcctgctacgcaggtgcgagatatgcgggtaccagtgtcggcagcgtgcttcgctcaattggcacatgaagaagcacacagccgaggtgcagtacaacttcacgtgcgatcgctgcgggaagcgcttcgagaagctggacagtgtcaagttccacacgctcaaaagccacccggaccacaaacctacctgacgtgcccatgcccatggacctcagcctctatttatttgtactcttggacattatgtccagacgatcagagccctagatagccagccacaggggctgccccaaccgcaggccggaaggaggcattcccactcttccctgggcaggtgccccaccctgccccatcacatcccacccatggagctggcac

SEQ ID NO: 34634 - DNA, 1180 bp, Mus musculus
tcagtttcctctctgcaaaatgagagtgggattcaagaggctgtctcaaactgggaattgttggccccagggggagtggagcacttgtcctcacatctgcctggggccctgtgtccacagggcggcggcgcaatgtgaactgcctgaagaacgtggtcatctggtatgaggaccacaaacaccgctgcccgtatgagccacacctggctgagcttgacccaacctttggcctttacacaacggctgtgtggcagtgcgaggctggacaccgctacttccaggatctacactccccgctcaagcccctcagtgactcagagcctgacagtgacaaaggtgggtctgcagggcaagggcactgcgtagcaggcacaggggcctctgcacacttcccttgtgggtcaggcaggactgtggcactggtggctttaggacagtagcttggacaagcccttttcaggacttgcagcctaagtccctgccaagttgagcagaattttgtcctcgtgtgtactagcaacctttttaagttccctccggcctttcagctctctcctgctcactctctttcccaccctttctcatcttgctcccctccattctcatcagctgggttactcactggcttccttgtaagagtttatgctttgtggttttgtggtgtttgtttgttttccatttgctttggggacagggtcccattatatagctctggctggcctgatttggtattttagacatgctgacttgagacttacactagtctgcctgtctctgcctcctgagcgctggaggtaaggtgtgcaccaccacactcagccctgttttgtgggtgtttgtttgtttgttttttaagatttatttctttattatacataagtacactgtagctatcttcagacacgccagaagagggcctcagatcccattacagatggttgtgagccaccatgtggttgctgggaactgaactctggtcctctggaagagcagtcaatgttcttaacctctgagcaggctctctagccccttcagcctttttacttttgagctatggtctcactgagtcacccacactggctgttaactctctagctcaagtgaacctcaagtttgaacttgaaatcctcctgcctcagcatcctaagcaactaggattacaggcctgggctgaactcag

SEQ ID NO: 34635 - DNA, 1184 bp, Mus musculus
ccttttgctgctaaggcaccaacaggttctcatctctacaccaggaatccagagtccagatcagcaagctgccctggcccgccacaacccatccaggcctgtttttgttgagggccccttccctctctggcttcgtaataagtgtgtctactatcacatcctaagagctgacctgccacctcctgaggaagaggtgagttactggccaaagcatttgctgccaagccagaccacctgagtttgacccccagggcccatgtagaaggagagatctcactcctacaagttgtcctctgaattacacaggggtatgcataaatgtttacccaaaaaaaaaaaaaaaaaaaaaaaaggcaaggcaggccgagctctctgagtttaaggccagcttggtctacacagcaacttccagattagccagaactacagattctgtgttgggggtggggctggcactgtcctgaaggctcagctgagggacaggttttgtgttctggcctctaatcctgcctgctctcttgcctgaggtagaaagtagaggagatcccagaagaatgggagctgtactacccacagaagctggacctggaatattcaaggagtggttgggacgactatgagtttgacgtggatgaaggtaaaagcaggtctcaacacagcacatctgtgtggtggccatttgtccacgctccacaggatgaggggtcatatgccccccagggtacctctccttggctactccctctcccctttgtactatcttttaaggagcattctatactgactagtgatgtgaccagaatacgcgcaagcctcaggtcagcagggaacagtcaagttatatgtggggagttgggaggaggcacatggtagcctccaagttagggctcaaacttagtctcttgatagtatctgagcagcgggtggcatggccaagggaaatgtagaacatttatgtggcacagggagctggctgtgaactcatggaggtgctcagagtacgtcacagtggtgagacacaaactcttctcctaacagtgacagaaggccctgtcttcgccatgtgcatggctggtgcccatgatcaggcaacattgatcaagtggatccaaggcttgcaggagaccaacccaaccctggcacagatcccagtggtattccgcctggccaggtccacgggggag

SEQ ID NO: 34636 - DNA, 1360 bp, Mus musculus
agaggtagagagtggccagctgctgccagcctctgacccctgtcctctgcaccacaggttttattccctctgcagttatgggacgaagaaagtccaaacggaagccgcccccaaaaaagaagatgacaggcaccctggagacccagttcacctgccctttctgcaaccacgagaagtcttgtgatgtgaaaatgtgagtgggtgttcagggtgggcatccaggctccccacttgcttcccctgggccttcctactgaaggggtcatctccagaggctcagggctcgcttctcatgcatacctacaccttgtctcactgcagggaccgtgctcgaaacactggagtcatctcctgtactgtgtgcctagaggaattccagacacccatcacatacctgtcagaaccagtggatgtgtacagcgactggatagatgcctgcgaggcagccaatcagtagcaaagtcagggacctgctcctccacagcccccatctggctaccaatccagagacattccagggctaggacagcccgccctctgcagatgggatggatgtgagtgagtagatttcgtggctgcagatgtgactgtagggatggaggcgagcgacactgggtctcaccaagcagcccagggtggcctcatggaaccctgagcctcaggtgactctacaagcctttgagttgctcccatcttcagcccccaccctgcccccacacttcaggctcctgtcttctctggtgacggttcctgacatccaggcaaggaatagctgtgggacctcctgtctcctcagccacctcaccagcaccttgcccttgggacctagactttctgtccttcccagtctcctagtgcttgtggtcgaggctactggccacccaggtcccctggctgggctcggctggggaacaccattttcttggtttgcctttgtagacaaggtaggggctagttggggtacagctgtcattcattcatgagcccatcaataaaacagccagtgtgtatccccgccgctgtacttcttggatatgaggtagctccagtatcagaaggggagggaggactctatgatgtatggtccagtcagtttttcttggatggatggttggttggttggttggttggttggttggtttagttttggtttgaggggtaaggtgacataggaccaggttggcctctgtgctcagagatcagcttgcctgcccaagtattgagatgaaaggtgtgagccaccatacccaaccagtggtagtgtttaagacaagatctcactgtgcagcccagaatagtctcaagttgatccttctgccccagcttctaaatggcagaattacagagatattataccact

SEQ ID NO: 34637 - DNA, 1103 bp, Mus musculus
ctcttcacccagctcactaagttcctacgggtgggctgttactacgccagccccatgcttcaactcccccaagacctttgcagtggacctcaggcaaacccacactttgctgccatacctttctctcttgaacccagataagccaccacacgaaggaaaacgcaacacaaatgcagttcagaaacaatggtaactcaattgctgagcacaacaactaaaatcctaacttgtaagccttattcaatctaagtcctctggtggtccgccactgaaaccaggaggcacttttaattacatcttgtcctcagctatccccgtccaaaaagacctaactctctcctgcttcctctcttccccatccaacccagaagtccctcctccttgcaccgtgattggctcctttattcattaggggattggttcacaagcagtcacctgagtacttaactccttgtctgaagcccctcccaggagagcggagttagcatcaaaatacaaacagtaccaggcccatccacaatagttatgctcatgtatctgtagaaaatgataaaatatagttaccaacaaaacttaaagattacatctgaccagggaaaagctcttatcagctgagacatgaatgtcttcacaaagcaagtagcccgggtgatttactcttacagactgtctcagttactgatttctcccccaaaatgcatgcacatcaccctcaaaagggctagcccgagtaaccaatcacacaaaaactggataataaatacatagacttgacaacacaaagactgggtagacaacactgagaatacacaatgcaaaaaaccgggcaataaatgctacagctagctttttaaaaaaaaaactaaccatttcaagctgggcatggtggcgcacgcctttaatcccagcactcgcaaggcagaggcaggcggatttctgagttcgaggccaccctggtctacagagtgagttccaagacagccagggctatacagagaaaccctgtcttgaaaaaccaaaaaactaaaacaaaaacaaaacaaacaaacaaacaaacaaacaactaaccatttccctctcctcaggccccaaacagaaattgt

SEQ ID NO: 34638 - DNA, 1293 bp, Mus musculus
gccttaaaaaacaagggtggagggagagtactgacttcagaaaattgtctcctaaggggctggcaagatggctcagtgggtaagagcactgactgttctcccaaaggttcagagttcaaatcccagcgaccacatggtgggtcacagccacctgtaatgagatctgatgccctcttctggtgcatctgaaaacagttatagtgtacttacatataataattaataaatctttagaccagagcaagcagggccaactgaagtgagcaaggttgagcagagcgagcagaggtcctaaattcaattcccaaaaaccacatgaaggctcacaaccatctgaagagctacaagtgtactcatatacataaaataaataaataattgtctcctaaatgtgcacgcatacacacaataaacaaaagcctaaatccattccttagttagttccaaaaagttaatataataattctcactattaaatgttatttagtaactaacactctcctgtttgttggttatttatgcatttttcaggggtaacgtactttcaagaggtagttttccaacagatcacagtatctgactggactggcaatttgagtgagaatggtcctcatagaccaacatggacttgggcatatggcattatggactttgtgaaggcgtggagcaggtgtatcattgggggtgggctctgagatttcaaagactggaactatccccagtgtgttctctgcctttatgtggatcatcatcattgaatgaacctgttgctgctaccatgctttgctctgccgtcctggactctaaccctctgaaccgtaaggctaaataaacactccattttttttataagttgccttggttgtgttttgtcatagtaatagaaaagtaactaaatatacctgtcattcttcattgtaccccagtgatcaccttgcacagctgtcacctagaatacatgaggttcatcccttctcccttattccctgttaccttttaaaaatgcatcatgtgcccttgctccttgcctacagtctcacttgcctatactgtattcaaagtggagttgaacagctttggtctaggaaaccccacatttactgtggtttttgtgcatgatctttttttgttttttgtttttttgttttgtttttgttttccgagacagggtttccctgtgtagccctggctgtcttggaactcactttgtagaccaggttggcctggaactcagaaatccgcctgcctctgcctctgcctcccgagtgctgggattaaaggcatgtgccacta

SEQ ID NO: 34639 - DNA, 1178 bp, Mus musculus
agatgcagagttgggagtttgccagctggttttcagtcctgctttggtccagtcttttctcactaggctctcttccctatgttttagaatggtgatgtgtatcctgtgccgtgatacattgaaagtatgtgctctgctttttatttatttatttaatttgaattttattttattttataggggattacaattaagaggttgtacaaacctcagaagagactttgaactttggactttaaaacattgttgagactgatagactgtggggattttttgaagttggactaaatgcattttgcattatattatggttacaagcctatgggggaaggaagtagaatgtggcagtttgaatagctatggccccattgtcaatggcctgaaaaccttttgataatcatgatctctattgggaagttaaggcaggagaatgaattcaaagccatcctcagccacatggcatgttccaggttacataagaccctgtttcagaaagcaaaaatagagctggctcaatggttaaaaaaaacagatgtccttccagaggatctgagttctatttccagcacccacatgacagctaacaactgtctataactccaattctaaatccaacaccttttgctggtctctgacagcaatgtacacgtgtggtccacagatatccatgctggtaaaatactcataacacatgaaataaaaataaataaataaacaaataattaaaatattttctagtctgagatgtaggtcccattgaggagtaaggaatgcatcaccacaaagcctgtacggtggtttgcataagaaatgttctcgcagacacaaacattcgaaccctgggccccagctgctggtgctgtctagaggaggttatggaaccctgcaaggttcagccttactggagaaaacacatgaggcagtcaggctttaaggccatatagcctatcaccacgtgttcactctgcttcctgcgtgtagttgaagcgtgctctctcagcttcctgttcctgcacttgcaaacatacacgtctctccaacagggtggactcttatcccttcaagaccaagttgaaagaagccttgtccgacattgcttttggtcatagcaacatagcactccccagggagacacagacataatgatatttgttgatgaattagtgaaaacaaatatg

SEQ ID NO: 34640 - DNA, 1651 bp, Mus musculus
taggcagcaagtcttggttcattgagggagttatgttttccaagcaaaggcattagggggctggtggtagggtggggtgcgtggaatggggggatggaagctgacctctgtttgcccttgcaggaactggctctctgcagatactaaagaagagcgggatctctggatgcagaaactcaaccaggtcattgttgatattcgcctctggcagcctgatgcatgctacaagcctgttgggaagccttaagccgaggagcttctgcaccgtgagagactttgctagctgtgtcttcttaagaagacagttagaagcagcagatttgcaggttgtattctatgctttaaatataaaagggtatgtgcaaatattcactacatattgtgcagtatttatatcttttctatgtaaaacttcacccagtttgtcttgcattcgtacatgtttgacagtcaaatactaacaatattcatgagaattgatatccatgctaaatataacattaagagtcttgttttatagaaacctcactagccagttattcatgacaaaaactattataatcaagttctgatttgtcctttggagctgtgggtttgaaggtattaaggtctcaaacagaaacatttcaggacatgtttagtaaagagatgagaaaaggcagcaaacactagtttaagctgctcagagctgctttccgcagagctgtgggcaggacaccgtaacatttgggcctgcatagtctatgctgaagggttaagagtcacacagctagtgctcactctgaccctacgtgtgcagtgtggggcaccttctcacagtgctcaggctttactaaagagttctttccatatggcttagagtcctcatattaacattagcttttctcttacaataaggacaaatgtaagttgaagagcacgtgcataagagcctgtaccaagctgctggggctactcctttgcttcccagagttcctgtctgaggtcctttcatgtttatctatgacactttctacaactctgttctgagatcactgaaaaatacagtaagctacgtgttacctttaaaagcccaatgcctccttgaaatttaaagatattgaatgcatggcttcagtttttaaatagtttgtatttcttctctgacttaattattgatggtttcatttataaacactaagtctatcacttgccattatatttcttactcatttaaatgtggattttcttatgtatattataaaagtattttatgacataaataaataattgtaaattgtcaaaagcatcagttatttaagaaattctctgtgtgatgtattgctgtgtatgtcctggttgtgtggggggcattgtgctgacactaggccatccatatcttcatatctagcccagtctctgtcttgctgaatgttcttggggttggtgttacatgagcaggtatgtgaaggaccctttctgggggtttcagcagaatgtgatgatgggtgcacatttgaggaggtgatgggtgagactgagtggtcagcagctagaacaggcaggcgcgaggtgaaaggagcgatgaggtggttctttgtacaaggctgttggctcacatttgcaacagctggagagcacaaagacgttacacagatatcttctcctgttc

SEQ ID NO: 34641 - DNA, 1147 bp, Mus musculus
aatgcagttcttattcttgggagtgaccacagccaaaggaaacagtgcagtgaatttgttgtgatttttcttttcccccaaagctttgagaaagagggtagttgttttccattctcagcattatcacttagcatacgtttgggtaaataagctaggatgcagtgtatcatagcatggaggctcttctcttctctcagcagacgcccagttttctcttctctgtagcctacttgtcctgtcctcatttcctttccccaatgtctcgctcactttaaaaatatcatgtgcaacatttaagggtttactctatattttatatacagtcatgtgtgtatatatatggagagagttatagttatgtatatagttatatacaaagagttatatagagtcagaagcctctcatttgagagatattctaactggaactagatgggggatttgtatcctggctgccaattacttaccatgtgtgcaggcctcctctgcctgatttctcattgacagaacagaaataatatgttctgatcaggagggctgggagggttgggtgagccaatgacatgcttggtaagtgacaggtcacatcctaagcctatacgtgcgtcagctgctgttgtttacctgatggtttctggtatttctgtagttataaagtgtgctcttggtttttgagacaaggttttgctggtagcacctcctgctctggaatgcactgtataggccaggcaggctccaaacttacagtgccttttttttttttaaacctgcctccagaatgttggtaatatagatgtgtgccactgtgcctggccatctcagggcaagaacagcacagtgagtgcattgcacattagcgggctgggtagtgacgaggcctgtccgtcgtggagctttaacacggaaaacaacgcatgctttcctcttaccttcttccttattattgcatttgcttttttccttcttgttttatttgaattttatcctttgagtaaatgataattaaacagaatcttcatgtcagagctatctctagattgtatagtcaagggctgataaaaatgacaggggaaattgtttttctttggcttttactttggtttgtataaaactgaactctgaaatgaattttcattctttctcctca

SEQ ID NO: 34642 - DNA, 1162 bp, Mus musculus
gatagtacagttgtcttcagagcccacttcttgcctacctcaagtgaggtgtccttccactttgttttagttactgtccatggcaggctgtttcaaaaacaaacaaaaatcaaattccagaaaaccggtgttctataacctaatttctctaggcttgacccttcttccttaaggagaagtgattccgctgtgtgagccttagacttctgtagaaggcgaggttattgtagtgaatgcgctgctcactttcctgctgtctgaaaattgcataaactcttatacatacatcttgaaaatatttaaactggttttcattgacttaacagaaaaatgacatgttcacctaaaaaaaaaaggtttgttttcctgtcatattttgaagttaatggaagaaagagtattgcatttttcttagaagtagctaaagcactagagagatttgattccttattagttgttaagcacctacctctggtttttaggctgtgaaaactgcagaggtctcactgtgggcttttgttgttcttttggatctagaaaaatcttgtacaaaaccatcaccatcaaaaaaacgttgttctgacaaaattgaagtgggagctccggacttagaaaatacagaacctattgatgttgcaaagccctgttctccgatgcctgcaccccggcaggcgaagcccccagcaccagctgccatcagcgagtctgtggctgccccagcagccctgctcagcgcggacagagggctgaactcaggatccgaagcatctgcaacctcctcagttaaaactcgaatgcaaaggcttgctgagcagcggcgccattgggatagtgatctcacaggtataaatgataggatgggtggcccctgaattgtttttgtaagattcagcatgtatagctggggtggtggtacacgcttgtaatcccagctcctgggaggctgaggcaggaagattatagatttgtggcctgcctggagtcgcatgacaggaaagggcttttgttttatctgtgtatgtgttctttgcttatagttgtttcgtgtaccaggagtatagccacaatcaaacaaacaaacagcaaaacaaaaacaaaaaaacaaacagtgagtgagaagagacgtttttccttaggtagatgatgaggttcttgaaccagg

SEQ ID NO: 34643 - DNA, 1166 bp, Mus musculus
tgatgccgattacctttgtatgagtatgttggcatagctgtgtgcgcaggtgcgcgggcacacacgtgcatgtggagaccgggttgacatcacacgtcttccttagactttcccttatgttctcagataggatttttcacctaacctgactcactgattggcctgattggccagccactgagtttcaggaatgctgatgtggccaggcttggctttttgtgagtactgggggtcagactaagctatcacttagtccctgattgtaccttttgattgtaacagacagcacacagcatttaaaatcttatgtaagtatctctacatgcttcctatttatatttaaactgactgtagtaattttgatatgcgtacttggtaaatcttggttcggttacttgagattttatctttgaaatgtatttgactgttctcctaacagttgttgattttagaaggcatctgaggttttatgagccttcagctaacattgtgttttaaccctggtataatatagaagttgctagaacgaactcgtgccagacgagagaatcttcagagaaaaatggctgagaggcctacggcagtagcgagatctgccccgcatgcgaagagaggcagagagccactttcagaagcaagtaatcagcagcagcccctaccagggggcgaaggtaagcgactccggaacagtacaacaggctttagagtacataaacccatgtagaagaaccagtctctgggagacacatgcaacagacttgggcaggaatagccttctgttacatttcaaggttgttatatcagaccagacagagaacttggttagatagccagggagactgacttttcataaattcacacttatcttaaacattttttttaaagatttatatattattatatgtaagtacactgtctgtcttcagacacaccagaagagggcatcagatctcactagggatggttgtgagccaccatgtggttgctgggatttgaactcaggaccttcggaagagcagtcagtgctcttacccgctgagccatttctccagccctatcttaaacatttttaaaccttttttgaaatacatttatttttatcttatgtgcctggatgttttaccttcatgtgtgtgtgtacagtgtctgtgggaggccagaagagg

SEQ ID NO: 34644 - DNA, 1193 bp, Mus musculus
taagattagcatatttttcttcttgggaagtctgttatgacagactaattacagttattttttgctgtttgtcacagtttcatatctgagtgtattagttttgaagctattacaagttattataagtttagggacttaagctgggcattgtgttgtacacctttaatcccagcactcaggaggcagaggcaagtggatctcttgtgaatctgagaccagcttggtttacatgatggattccaggaaaaccagggctacagagaccctgtctccaaaaaccaaaatattagtgacttaaagacttgatgtctgaaatggattttatcaggtcagtaaacgtgtaggtaggctcattcctgtcatgaggctctagttgaaaatctatttcctagctgtttgcagcttgtagatcttagataagatgtcttgtcttctgaccccttcatccctgctcagagcttcagttctcatcagtctacctctgcctctgccattatctttcctgactggtcctccttctccctttccccactgtacaccactgtgctaccctgtaggaaccattgtgattttcttgggtctactcagataacccaggataacgtttacatgtctaagattcttgatcacattaacaaaatttcttttgctataagataacacgaacatttgtaagtccaagtcaggagcacaggcatttttgtgggacttatttttctacctagcccactgacatacttaaacaacttccttctgttaattttttgcttgtttgtttttaagatttattttatatatgtgagcacactgtcactgtcttcagacccaccagaagggacatcagatcccgttacagatggttgtgagccaccatgtgggtgctgggaattgaactcaggacctctggaagagcagtcagtgctcttaaccactgagccatctctccagcctcctctgttaattttttgtttaatgggggaggttggagagatggcttagtagtgaatgaagagcatatgttgctcttacagagagagagagaacttggtttagttccccatacctatatgataattcacagccatctgtaactccagttccagggggtctgtcatcctcttcagacacaggtagcacattgttcatatacatgcacacactaattttttttttctaatttaaattcactcttg

SEQ ID NO: 34645 - DNA, 1147 bp, Mus musculus
caccaaacaaagaactagtcactggctgagagtgtggggacccgccagagtggtctctcaggaggtcaagctggctgtctagtcccacttctggtggcaggatcaggcccaaaggccagagggccggaccgggttcgtaaggcccacggaggaagaaggcagggcggcgggagctgacagagtcaggaagggacccgctacggcgtgcgtgggtgcgtgcgggatggcagggccctctccctaggcagttcaacggcagaaccgtctccacccaagcggaggagagagagcagtgctcgcagctccggaccagtcccaacttggccgcatcacgtgacctagctcaggggcgggggcaagcggcccgcccggccccgcccaccccgcgcgcatgcgtgtcgtccggggcgctgaaattcaaattttgaacggccgtggtagcctaccgactccgtgggtgcggagggcagagccgactgggtgtgagagcgcccgccgcctcgactgcagtcctcctccaggagctgcgccgagcctgcactcacttctttcctcttcctgagtttgaaccgtcggacccaccgtctagccgtccactggtgaggcctggggcgatggacccgtttaccgaggtgagagactctgcgggcgctgtgaaccatgacccctgccgactccgggacccccgcccgcgctgtcagcctgcggccagcgtggcgcgtgcgcacagcgagcgtgcagccggacggaagccgcggggtcgcagccgccccggcttcgctgctccgtccctggctctggggaaggcagggcctcaaaaaccccatgcaaaccccgagctctgtagtcgtttagccttcctccactcccccaagtgctggctcggggtgtgagcgcctgggcgctctggcttgagcctgcccccccggctcccgggacttaaagcacgcttccctccatccttcatccgtcttgctgtgacccgggagagtgccgctcaggggcctagtgggacaagccctgccctaaagctggaatagttggcagggtggagtcggcccagtgactcgtactgtgtgcttggaatctgatggaagtgataaaggacttcacaggcccagaggagcttgagcgcttaagaatcctg

SEQ ID NO: 34646 - DNA, 1168 bp, Mus musculus
ggcagagcttggaacttgctgtgcagtgggctcacagaggctcagacctggttctttagggccctgagtttcgtctcctcttccgtcagctccccctcccccccatccctgctcttcttactttttttttgagacaggtcttgctatgtatcaacagtatgtagactggcttggcctggaactcacaggatctgcctgcctctgccctcagggctgtaattaatgttgtgcccaccatgcctggctgcccccttcatcctctctcatttagctccctctgtagacctggctggctctgacgagacgctggctgccccaactgagccttgcgcagcttgagtcagtggcaggtacccactggtgtggttatttctcagcttagacctatgtctatgaagtgttctattaactcttagtagctgcagttatgagaccttcttgaagataatttgtaactttgagattctatctgaaataacacttaaaggcttctgatactgtcccttccacaggggcaccgagatgcttcatctggccgtgctgcactcccggaagctctgtgtctactccgtctcaggtaagaggttgctcttctctgtgggaggtatgtcacaagctgggtgcttggtggaagagtagatggtgtttgtgcgagggcttcctagtctctgttagcctccctgccagccattattcttgtctgtacatttcctggtccactattcttatgtattcctgtttttatcagagggtttcctataatctcgccattgtcaggaattgtgtccagaattgcctgtgactaactgcaggaggctctggttccctaggacccctgaagcttaagagatgctcagccatggcgacaggtgattagctgttgagtcacaggtgtgaaatgtctgttcattggtcagcctcaggtgtttctcttttagttcctggcttcttgtcctcactcagtcagacctcaagacccttgagtttgaggcaaaattggttttgttccatgatttggtcctgtgggtacgagtttagtgtgtcttggctttttagcattttggcccttattaaaattcaggatatttcaggggcaaatgtctgttaacttttaaaggcagccttggtacctaggggcatggtagatggtagaaaacaactagaaatt

SEQ ID NO: 34647 - DNA, 1112 bp, Mus musculus
tcataaatggatgcaaactgcagtccactgtggagaacagttacagcaagagaggccgtgaacggcagggtgcttgggagagactgaagggagggacggagcagggaaatgatgcaattataatttcaaaaaatgaaaaactgaggcagtgattgttgaaattataagcactgaaataacttctgctttttattacatttaggattgaacttatttgttagaaactttcttggatgaatgtgcttatttgtaaaggatttcactgctcctttaatatctctctttcagtgactgagaagcactggattcagatcaagcagatgcaattatccttaacagcagcctttaactcagaaaccaacatgcagtatttcctgtccctcccacccacttggcagccctggctctaccttgttcattatgctctaatcctaaacctgcacttcctgcttatacctcactgatttaggggggcacctagttgatttagtttaatgtttctctgtctgtctgtctgtctgtctgtctgtactcacatgcacccctgcatacacacacgtgctgtaatctgcaggcagataaagatcgccatgtattggtagcctccctctctcttgcactgtgggatatcccacggtgagaagcatttgaagtgacattgggcgtgatgagcctttccaggctgcagccacagccccatgttctatagtcagtgatgctcactccttctaccggaaaacagtttttagaatttcggttttctctgaagctctgtccaaatagactcttactttaacttttggcatctgtgttttaccctgagtgtctgttgatgtttttgacagagtgttttctatctcttttctagatttcctaatttcttttatcttaaatcttagaataactctttactatgatttccttctacacattgcttttgcatttataattttgttggtgacgtattctccagccattcaggatactctttctacatttgtatttcatccagaatagttattcaggaagacaaacttctacctattaacacgcatgcctgtggatagccatgttagtcatcttctcatccagcctgtcagccttttagaaat

SEQ ID NO: 34648 - DNA, 1167 bp, Mus musculus
agcagctgtttaagtgctaggaaattgcgttctattttttattagtaaattagcagattgattttgtgtagatttgtatatgtttgtgatgtgtgtcagtggcttttgtttcaaacaataaaagtggaggttataaaactaatttacttctagtgctttggtgtctaaacctcagttcactttgcgattctgtttgttgcagtgaaaaagagaaattcagctttttctctgtagcctgtcttcaggaaagatgttaaagataatccgctctccacagtgacacattgtgacacattgtgacacattgtgacacattgtgacacattgtgacacttggctcagccttcactgactggttttgccttgtccctgtagtcctgagccaagtcccatgtgctcctaatgcctattactctgttcacgtctgtccaactctttcacagcgtttaatgcattgtttgtactttaatataaacatcctttatagtttctatttaacaccaatgtaagacatttttccttatagctgcggataaatggtaaaaaattggaagaacttttatctgaaagagctgtacaatttcgggccattcagcgtcggcttctgacaagattcagagacaagacccctgccccactgcagcacctggacaccctgctggacgggacatacaagcaggtcagtgccatgtcggggcaaatgtgtgtcagtacacctgtctcttccttcccgagggtcaggcgccagggcactgacatatgctggacagtaggatcaggatgcgtgtgtgatgcttttggtgtagcctataagtattccttttcttctctgttttcccaagaaactaccacatgctcccagtatttgtatgattataatgaagacctcggccttcttgtgtcttcttgggtttctacatgggatcactactttgttttaaaaataatattggcagtatttacactgtgaattttaaaactgagattttagaaaactctaataactgcatattcctgtgtacttgtgacaggtaatttagacatatccacgtgtcactgctctagcttctcccagcggtgacactctagaaagctccagcaggatggtgccagcaggatgtgggcaccaattaaaaccctgcttgcctttagggttggctgtttttc

SEQ ID NO: 34649 - DNA, 1230 bp, Mus musculus
tctgcggctgaacttttcttctgcttcttgtttgatcttttgtcttcaagttggctctttgagatatactcagacataagatgtttctaatagtacaataaaactattgatggttctgttataagaaaatgaatatcttacctttttgtgtcagtgatgagtgaagaaacctagaagtgacctccagttttctgtaaccgtatgcgggttgctttcatatatgttatctgtttccatgtttgaccccatctagcacaattatcccgcatatctgctttctctaaattgagttctgaatggtttgattgctagttaatgatcgttacatgccttatagacctctcggtctgccctcttccatccctttcctacatctccttggtccttctttaaataaagggacacagtctatttccaaaggacatcattttgtgatctttcacaacagagagctgtgccctctttagaagaacatctgtgcacagcttcactttgtctaagcctagttgtgctttttctgtgtcagggatctcatgactcagtgaaccacttaaagtattagtgtagtccagggcccagggaggaaggaatcttcatcaaaggtgttcctgttagctctctctctctctctctctctctctctctctctctctctctctctctctctctcatccagggcccagggaggaaggaatcttcatcaaaggtgttcctgttatctctctctctctctctctctctcacacacacatacacacgtatatgtatatgtaatatgtgtgtgtgtgtatatatatatgtgtgtgtgtgtgggtgtgcgtgtgtgtgtgtgtttgtgagcaagtaggtaaaaataacttaatataactaaaagaaatgccatttacatatttaattgccattaattcaaaaccttttcactctttatgaaagccataaatggagtgttattcattaagatcagcagctattcagcatctgacttcactgtctcctaatggcacgtgtgtgtgtgtgtgtgtgtgtgtgtgtgtgtaaaatccagggcccagggagctacatacatagttttaagtttctctttaaatgattcctaaattcctatatcaggatgttaaactccagggaaatcctatctcccatccaaacttgcttgggtgattcctcagtcaccaagccatgctctgttgaatttttagggtcacttaagtccataaatatcaacttagt

SEQ ID NO: 34650 - DNA, 3230 bp, Mus musculus
tgtgtgacttaagagctatgctgattaatggaagtaggaaaagggtgatgagacaagaagtatagacactgctgtgctatctccacttggataatgtgcattgaccttaaactgtgctacttccctaggcctggatgcagcatgcctgaaatctgggatgtagaggatccagacaacgctgggaaaactcccctgtgcaacatcttggtgaaggattccaagcctcactttaccacagtgttccagaacagtgtttacaaagtcctagaagttctcagacagtgactgcacgtgcatctgccagagacgcaccagtaatggctttactgctttgccactaactcagagcgcaaacctttagaaagtctttgaaagtaactgtttcgaatggcaaacatttgatttggtcagtttgtcagtctgactgtaaaatggcttacatcagatcgattagttactgtttcactgcacctgttaaaatttgctatgcaaatgagtatatgtgtgtacttggtttaaatatttgtgttatggtgaacaaagccatctgtttagaaatacatcatgggtcatgacagatgatatgaaactacagtcacttctggactgataggggcctgttagcaccttgcttcctatttacctcctgatcttatctttgaacactgtctcagctctcagtccaggcgtggttggcctgtgggtcacctgttcacctcgcttccgggtgctccttttgttgtttgttgctctcgtgaatcaagtgtttcctgcctgttgttacccagactcctgggtatggtggcgaggaccagttccttaagtttccagctatgtgctgtgtgtttctccccacgcaggctggtttcttttccacataaatactgtcttgtctttaggttgattagcaagtgcttattcttggttaaaaaattagtaattgtgtatttttctcatttttagtattaatcaaatattatattttaatacctttaattcatttaaaaaattttatgattaattacgctgttaggaaaaactattttggacaaactcaaatatgatgcatctatagcttgatatatatgtacatatggagagaggggggagagagagagagagagagacatagcttgtggtggactgtagtctttgctaattttaccttcactattagaataaaataaaacctaagtaacctctgttaatgtaaatgagatgaatagagtcttttattttgctttcaaaattgcctatctttaataagacaaagccttaagccttataattttgcctcaaaaaaaaaaaaattcagtgtgtagagtgagtatgctctcagtctttcccatttttttcttgttttttttttttgaaaaattcctaaacttgctttgaatttcttatacaaattttgtttcttgaaagttaatttgtgtgaaatgagatacttcaaaactataatcttcattgttgcaagtaatggttttgaggttttaaattctaagtaaactgtgaccatggctgactacccattttttatacagtcttctctttattaaccacaggcagattaacctcagtgtggattgtccttgagacctgaaccctcagggatggcttccggtgcccactccagtcctgacagccacggaaggaagagctgttctttctgccttcttcccagagccgaaggacaagcttgtctgggggacattggtcacctgcaaagacagcacttgcaactgaggagtgtggcctcagtaaggagccagcctcaccagccagggcctccctccctgaagctgcccggggactgccattcccactgttgcagactgtggccaggcttcctcatctgatgcttagttttagttcccaagcttttacgaactccgaaaataggggagcaactggaggtcatggtttaggggtgtttgagtgatagtgtggcaatgcagggcaatgtaaagaaaggggcaggcatgggagtgagggacacatgccctgcctgctccgcagctcttctgcagcccaatatggctgctgtgtggatacagcagttagggttttttttttttatcaccctttaaaagttattttctgtccttaccctctaacaattcccttcataataagttcacatgtaatgattggaaattctgtacagagaaacaaaacattaaaatactgttagagccagttcacatgctgggaaacattaaaagtagtctaaattaggtttttttgcagaaaccttttgtaacaaacagtatgtcgtaatgtaactccagcagcaagctttgcttgtatttagtcaagtcagcttggaaatgcggccttggggcccactgcattctcagtccagcacatctagtagcagtgtggcggaaacacttttatggcaacatggagcagtattagattttatgtagctgacaatgcagtattaaagctcagtattttgcatatttttagcatttacaaatatttttgctttagtgtgagaaaaggaaagaaagacagaaggcagttgaatagttattattgtgacattaaacaaaaaataagctgggtaatatgtccattaaaagctaaacctctaaaatgcctgtcagagtgtgtgctgttctggtaggccagcagcatggatgagaagacaaaaggatgtgtctgagctaaagcgatcctgcacaggagtgttgtatttttatgaattttatgccccttgtttacatgtactatatatgttaaataaaaaaaaaaaacatgaaaaatgtgccatgtgttttctgcctgctactgttctctgcacccatctgtggctgcgcacattcccatctgtagtcagacggccgtgagctgatcgacatcctcttgcagtcttcgctaaaatggggaaaggtaacaacctggggcccattgttgatggtaggggctcgaatcatccaaaatggtatggtatttatggtcaaagccacacgttcctttgtccttttcatcaagggacatatgtattggtataattacagagttgctaacagcttttctcatacattacaccaaagaccatttgttgtaaaagattccccaagttatagtacatttatttgtgcattattgcttttgctgtttagggaaggcagtttagctgtgttcacccatatagaaactaacttacttttttcttttgttttgttgtcattgttgttagatttgtttgttcatttgtt

SEQ ID NO: 34651 - DNA, 1197 bp, Mus musculus
ttaaaaaaaagagttcacatcttgaaaaattagatacacatatatttttgtttaggtcttttatgtttcctttgtacaattttaagttttttaaaatgtaaatcttgaagatttcttatttcatttttttcttacctatgcatcaccagtaagacttgactacagaagagtctgtgggagaggctgagcttcgtttaactagatagagaaggagccaaagagcaggagcatgaaaagagagtttgacaattatgaaaaactctaaaatatatctagtaatgataacatttcttttcattttgtttgcttttttttttgtctttgtaaattttcaagacagggcttctctggggaaccccagacttttctggaattcactctagaccaggctggcttcaaactctgaaagatcttcttgagttctggaattaaaggagtgtgccaccactacctaccttggaaattactcatgacttctttattttctttaaaaaggtgatcttagccagctggtaccggatttataccaaaataatggatttgattggtattcaaaccaagatctgctggacagttacccgaggagaaggactcagtccgattgagagctgtgagggtgagcccctttccgtgttgtcctgttgtctgtgggactacagaagacttactgcaatcttagtgatacgagtagcaaacattttattatgcttttggattttgcaagtctcaattttgggcgggctggtttgcttccatggtcacagggcaatcgcatggctgtgcaaagtggactgaacaggaagctgctttgatcacattttgacccttgggctggattggttcaggtgttacctgagatgtctagatgccacctttccatagactttggttttttttttaatatactttttattatgtattttcctcatttacatttccagtgctatcccaaaagtcccccataccctcccacccactcccctaaccacccactcccactttttggtcctggcgttcccctgtactggggcatataaagtttgcgtgtccaatgggcctctctttccagtgatggccgactaggccatcttttgatacatatgcagctagagtcaagagctccggggtactggttagttcataatgttgttccacctatagggttgcagatccctttagctccttgggtactttctc

SEQ ID NO: 34652 - DNA, 1201 bp, Mus musculus
agagctacatcgttaaccctatctcttatctttttgtctcatgtcgtttcacctttgctacagtccttttcaaagtagcatgtcaagttctctcaaaatgcagccctcccagtccccagtgtcagctcctaggctgtgttgctatgggggaaatgatctgaaaaattattgtttaataggaatgtgaataatgtgcagtctttttaaaaaacacatttagatttttgagtgtaaatttggaggaaataagactgatatcatttcaggtaatgaatagactcttcatacatggcaaatgcagaattgcatgtatacatatttaaattctgatactatttttgaagctatttttccattaaattattttaattatgatgaaattcttctaaaatgtactttttttaacctaagaatttataaatgatcagaaacctgtgaaattaattgtaggtattacctgcttgagtgctcagtttttcaaagccagtgttttttaaatatttgtaatctacgaaactgagtaacgatggacttttattataactggagcatatcctcctttcaggggctgtattactcttacttcaagactattgtggaagcaccctcatttttgaatggagtatggatgataatgaatgacaagctgactgaatacccccttgttattaacacattaaaaaggttcaatctttaccctgaggtaagtcactgctgtgatttttcatgaaaaaaaatgctttttaaaaattaaatgtgagtctaacttttaagttctgatttaccatactaaattttatttcaccttttaataaaaaatatgtaccacatgaaggagggggaggggattttgaatctctgggatctataattgtgatggcattattagaaaatgagagacttctttacatttggtgactttatagctagagacggccatgattggcatggttcatttgtcagataacaactcttttctctacatcccttccctccctagggtaacattctcccctccctaggatagcatccttccctcacttgggtaacagctcttgggttcctcttttcattgagaacattttcttggacagggctagaaggaaggtgggctcatctaggaggtaagggagaaagactgtggtaatggtaacatttttagactttcattatcttcctgccttcatttgactaacttgac

SEQ ID NO: 34653 - DNA, 1216 bp, Mus musculus
ttttcttcaatgatacgtattatgtaaatgttcataactaaccaaagctatagctcatgtatttaaaggcatagcttctgtgtcataggatggatgtatcttatttataccatagtcttctcaaagattagtttatttgataaaccaggatcagaataataaaactgttgtatgaaattatccattattaaagaggctatatttgatactctaatttgtgtaacattaatatggtatacatgttgaatgttagattgatgtttttaatcttctgggtggagagatgtatgaattttgtgaaccaggcagtttctgaatggtacccaatggcacattcagtatgatctatatttttatagtaaatcacttaaaatatcgttatcgtttattttaatgttaaaatctaattggaatgtgttttcttatggagaggacttttagtagaattgttaaaacctggtagaaaacaaatacagatataatggtgtttcagttttgttgcaaagggtctgcagtctgtagaccgttccctttgcctttgaagtagctctctcggcctcagcgctgactgccgtgctgttgaatatttccaggagccacataacgcacctctttgaaaacgatcggcatttctctcacctctcaacgctggaaagggagatggctttccgcactgaaatggttagttctgtgtgtggatagtatttcattgtagtattttgggtctctaaatatttcaaagcttttttggcatgaaaagtttcaacaagacattcccaaagaaaaggagtagacagttctccctctttatcttgtagcttcaacaacagataatacctagtcatccatattccttaccaatgtctgcttaaaggaaattagacttaactcttgtgctgccgcatttgaagttcctcaaaggactttttgtccctagtaatttcttagcatcatcaaatgaaaatgtttgaaggagctgattatgattagcacttgatagcagctgatgtccttaactgaagatgcaaactgtctgtatttatgtttacctgctgtattgctgggtcttctaatctgtagacccctctttcttttttgtttttctgccctttatctattgaggaaccatatacccatatctatatctatatctctatatatctatctatctatatatacatatacatatatatacatatgtgtatatgtgtgtata

SEQ ID NO: 34654 - DNA, 1246 bp, Mus musculus
cctggggacagagtgtagggggttgatggagacatcccatttaggattgagtgctcaaggcctcactctgcacattgtcataatgttggtcttgtgttcattttcatacacttgcaagaagcttctctaatgtgggttaagtgaggcattgggtatataggtataggagtaggtaattttttctgctatgttccttaagcagaataatagtactaggctttcccttaggcctatgatctatctagtctcaggcgcttggccacttaagcaatggcaggtacaggtatcatctcatttattgtgtcaaaacatgatcaaaagaacaactcgggtcttagcgccatcttccttgagactcctgcaccatgagagcgaagtggcggaagaagagaatgcgcaggctgaagcgcaagagaagaaagatgaggcagaggtccaagtaagccagcccgtgcacctacgacgcctgcaggagcagaagtgagggatgctgagggccgagacaagctatcggactgtgtgctgccatgagtctcaatagacctggaacgtcacctcgccgcgatcgcctggagaaatgaccgcctttcttacaaccaaaacagtccctcagccctggacccccggcactctggactagctctgttctcttgtggccaagtgtagctcgtgtacaataaaccctcttgcagtcagctgaagaatcaaaaaaaaaaaaaaaaaaaaaaaaagaacaactcatggtgaacagtgccttggggatctgtaagagaggctcctggagaaaagcagagggctttttacctcaagtgtattttgttccttggatcattcttggaagtgatttagcacctcctgtgattcagtttatgtgatatgcttattcttgttggatgtaagagcatagggtattcttgcccaatcaggtcagtgtaccctgagcctggatatggtcttctgccttgcttttgagctttctcggatataatctataggatatgccgcacaattgtagaattggtctgtcctaagaaagctctgagaaaggaccgctctgttattaggtgcttactgacatttatttacatgctttcctgaacttgaacaatcttcctgggatcgtcgctttctttgttacagtcatgtataaaaggacactgaagttgaagatgcctacagcatcagactgtagtcttccgcattctttcaggtccccagataccaggtccagcagacaagatccgca

SEQ ID NO: 34655 - DNA, 1550 bp, Mus musculus
ataattcaagtttttttttcttttcagtgaaaatacattgcttaaaatgacagcatagttctatatggtccgctactgctgccgtttgttgtctagtatttatagtgctccttaccgcattgttttcttatcccttagaaccttggaaaagaacaagaagaaaggcaagatcttttaaactctattgaccaccagttatgtattagttgccaatatgccagcttggacatcagtgtttgttggatccgtttgaccaatttgcaccaattttatccataatgatggatttaacagcatgacaaaaattattttttgttgttctcgaaggagattaagatgccttgaattgtctaggatattgtgtacttagaaattaacagctctaagtacctttctacattttttttcttttttttttaaattaaaagatgtcttcagtttaatgcaagaaaacattttactgttgtacaatcatgttctggtggtttgattgtttacagaatattctaaaataaaaggactctggaaggttttcattgaggataaattgccataatatgatgcaaactatgcttctctatgataattataatacagaggttccattcgatgcagcctatacaataatgtatttagtctaacacagtggaccctattttttgacacttccattgtttaaaagtacacatggaaaaaacatatatgcttacagtgcacctagagctttttataacagccttttttgtttgtttgtttgttttggattctttaaatatataaatatattattctcatttagtgcccctgtagccagaacctcattactgcttcatttttgtaataacatttaatttagatattttccatatattggccctgctaaaatagaatatagcatctttcatatggtaggaaccaacgaggaaactttcctttaactccctttttacactttatggaaagtagcaggaggagaaatgcatttgtagatcatttctaggcaaattgtgaagctaacgaccagcctgtttcttcctatactcagtcttgttttactagaaatgggaatcatggcctcttgaagagaaaaaagtcaccattctgcatttagctgtatctatatattgcatacctgtatttttttgtttgtattgtaaaaaaaattcacataataaacaatgttgtgatgtaacagagtgcagtgtcttgtatattctgtagttgggaagaaacttgaattccccctaaggggtctgctgcacatctgtcttggtaagtatgtgcataagccagttctcagagcgccagcaccctcagctcttccgagttagtgctcattaataagttacttccaggaacattttcccattcatttggattatatctaccctggaaactattgcattttacttttaagagtgtagtgcttttttttgtttgtttgattggttggttggttggtttggttttctttttttttttttttcttttaataaagtcaaaatacttgactgagcttagatttttaaattattgaccaaagcagaaat

SEQ ID NO: 34656 - DNA, 1234 bp, Mus musculus
tcatagcaggtcctgcactgcgattgcacgcggatgccatccaccctcctagactgaaggttttgcaaggggaggggctgggttctgagtcatagttttggcacagcagcactagaaaattcatagcaagaatatgatagtcatatttattatttaatttgattcaagtgctattgtaagcattttatattcagtaactaacttcattctcacaccagcgagtgactaccgatgtccactatacacgtgaggacttccttgaagtatgtaagcacgcttgcagaagtcactcggctgctgaggagggagcaggccctggctcctttatggattagagaatctgaaaatgatgagagcccacatcaggcccaggacgggacagttctatacccagagaggctgtagagacagcatgagttgtgggaagggaccatgtgtctttgagagagctcaaggtggttgtcattccattgggtgccagccaggaagtcacccagtctgtcacagtgaggccagcagtgctgggctgtatggcagctgggtttgttttgaaattgaaatacatttttcaccttatgcagctcgttgcagtaaagtgatggttagtagtttttttttttttattcgaaatattttgctatagtcacaggtgagagttgtacaactgtcacccacggaatttcagaacatgtgcatcagttcatatgtattagccgtcacttcccattgcctgtcctttcttcttctgggcacttggctgtttgaactggactccttgcacttcgcatgtttcaaggttcatctacgttgtaacatgtgttagcaatccattttttttcccctgggagttgagtagtaaatttcactatcttgatggatactagttttttccgacctttaggctctgatgaataatattgacttgactatagaggaagacatttctatacggaaggtattttcattgctcttcacgatattcagagagtcaggttgctgggtcctagttaattctatgtttaacattctgaagaactgccaggctgtttgctcgagcagctgaatgatttcccacttctgtcagcagtacgtgagggctcaggttttccaagtgcctgccaacacttattattgtcttttggtttttaaccatagccatcctattggctatggtatagtgttgtcaggttttggattccattcccccactcgccagtgatgcttagcatcttcc

SEQ ID NO: 34657 - DNA, 1193 bp, Mus musculus
gactgaaggttcttgttcaagggatcaagtgcaatggtttggcttgggcttgtcattctaaattgcaatacatttgaagcaaaccttctttgtggatgtctcaagcttgtctgcgccactctcagccatgggaggtgacccttaaggatctagatactgatggtacccagctggcaagtggcacagaccactggcttcttaccacttttcctgatttcaattctccttggcatgtcattgcattcagagcagtccaatctcatgctggtagttaagaataagaactttctagaaagcgaaaccagaacatatcattgagctatagaagatagttttgcttcataaattacagctgaaatgtactgctccaagtaatagtgcccacacagaagcccagtgaagatgggctaggcaagaacaggccaacggagaggcttacagactgacagggtggctccctgagtaaggccaagactactgtagtcagggctactacagccactgagctaagcgcccagctaacttacttgtgagtggtcataggggcacaacccatgtcccactgggtctgagaaattgaggttgtgtctgtctgtctgtctgtctgtctgtctttttctcgatgtctctaagatggggtcatattataataatccagtctggccttgatcttctggttctcttgccttagcttcccaacttctgagattacaggcttgtagcatcatgcccaactcaaaggaaccttttttaaaaagccttttatttgtcttaaaaatttaaaataaaatcacttgataattatctgtttttgtgtctggggaaatgaggtgtatgagagccatgatgtgatgtgtgactgttcagagggcaggctgtgggagttggctctccttgtgtcccagggaacaaagtcaaattgtcagggatggtggagagtgcctttacccactgagccatcctactcaccctcagaggaagcctttcaaagtgaaacttgtagctgatgcctacagagcaaggcctgccaagcccccaagtttccccactcttgccaatttcttctgcgatgcccggaagatgaagcatcctgctaagatgcagaggagtccagggctacttgagcagagccagagccagagagcagtgtcatattgtcactttgtcttgcattacataagagcgggtttctg

SEQ ID NO: 34658 - DNA, 1234 bp, Mus musculus
cagccatggtgatgtcaaaaaactaaactgtgctttccattacaccagaagccactatgttgatggactcttcatacctccaagcaaaactgtgttacccactgtgcctgagtctcaagaagaagtaaagattagccagctttacagttcaacagaacaaattgttcagtctaacccctcccctcagctgcggagtgtaatgaaagtagagagctcagaaaatgttcccagccccacacatccgcctgttgtaatcaatgctgcagatgataatgaagatgaccatgatcagttttctgaggaaggtgatgagagcaagacacctgccctgcaaccaactcctgacgtccataatggattacgagtggcttctgcccgcaaacctggagtcagtttaaagcaaggtgaatgtttgaattttggaataaagactcttgaggaaattaaatcaaagaaaatgaaggaaaaatccaagaagcaagatagctcctcgggagtttccagggttttacatcagcctcagtccaatccaggccctgagaggagaatgtttgggctgtgatgaggatggtaactctatcaagcaaaccagaagagcccttggttagactgagtctttctgagagactggggaaacgaaaactttcagtaggtggtgacagtgaccctccattaaagtgaagccttgcacagagactggggaaaaaagtggaagcgccagaaactaacattgataaagcaccaaagaaagagcgaggtcataaagctggggagatccatgtgaagacactggaagaaattcttcttgaaagagccagtcagaaactggagatttgcaaactaaactgaggacagaagaaccttcaggagctgatgattctccatcgggaacaaaaagttcttcttcagtgcggatcaaaaccttctttgaagtcctgtccgaaaagaaacatcggcagcaggaaatggaaagacagaaatccaaaaaggatacaagttgcctcatgctaacagaagacactgaagtgaaaaagacagtgagtctgccgactgttgctgatagcaaaggacaaccagaggagtctgcaggaagagccaggtctaagcaggaggtgcatattaagccactagaggaaattaagctggagaaggcccagagggtgcagcaaagctctgagagtagtggcaactcctgacctcaagctgaggctgcctcagggacaaagaggctgca

SEQ ID NO: 34659 - DNA, 2626 bp, Mus musculus
ggaacccctgagaaaagcatccccgagcctctctcaagtactgttttgccctttcttccaactctgtaggaagtggtgttgtggcggaagggtgacatcgtacggaagagcatgtcccaccaggcagccattgcctcacagcgcttcgagggcacaacctccctgggtgaggtgcggacccctggccaactgtctgacaacaacagcaggcagtaggcccctggggccaagaagttgctgggcttccaccacagaacccccatctgccgaataccagccactgcgggagggggaggatggtgtgaggttcaactggctgttacttgcaaccttggaaacaaatcatgttttttacttaaatttttttctctgaagaacctaaggggcttgggttgggcagcagtctccccgggatgctgcagcctaggtagggataaggagaggaaacattctggaagctaatctcttccttgggaatgagctctgtgtcaaggctgtctcaagccttaaagcagagttgagagcacacatccttggctccaggttctctgggcttcctgatacagaagctgagtgtgtccctggcatttacctgccaccagggctctgggtagtcgtgtcttatactccctgtgactgttctgagatagtgacagaagggcctgtctcatctaacttggaagaacactcaagaacaggaagctacctctcggggtgtccgggacgtggtgctctcgagtttctacagtcacctctggcctctcactactgggaccagacccttctcttcttcatcttctctagcttgtcaagaactatacaggagcagaagcttaaggaagggtctgtgtctgactcctcttacttgtgagaaacaggcacagagaagccctgattcggtgtcacacatggatggcaaggggctgaactaggtctcctgagggggaaaaagaaacatcaggcaaggcaaccgtctgccttcaccacatgactcctcttggcaacccagtgtctgggttgttgtagggaattactttaagttatccaacaagccctaagcagagggtctgtttcctttagcctagatcctagaagaggctgggctccacttgcctcctaaagcagtttgtcctactccttgtcttctgcttgatttctggaactgggctttgtttcaagcatgtataagttttgtccttactcccacccaaaccctttcatcccaccatctacaaattaggggaggaaggacctctgcacagggctctgctactgtgactagagtaattctgcttgccaaatgacatctatcttcaccaattcactgactcaagtttaggaccactattttgttttgttttgaatttaaaaacaaaataggacaactgtggtggatgttgttatactagagaagaggtagttcttcctcctgctctatgcttggcctgcaagtagaaaaggggttgactgtctttctaccttgtctggaaatgactagaattaccatctcctgttggctgtcctcccctgtctgagaaagatcaagcagacctgatgttcaacaagtagtgttcgctggtctgtgttccttgtaatttggaaagtaaaggatttgttcctgtgtcatctttcagttcatgtagaaaatgggactcttgcaatctctggctttgacagggcgggccgttggatgaaagactcttggaatgactgggggtagcagagctaaggaaagtaaagttttctccatgcacaaccccaggtttaggtgtgacatacaatccccatgggaacaggttcacccatccagctgtccttggctatcaaggctgggccctagcatatgagggagttgggttctgggctcttgcccttttcaggatatgagactagactctgccgtgcctccttttaatatctcattaaaaagcatttgtcaatttctctgcctcccagccgacaacacaaaattattttccaacttttgctaatatcataagcctttcttctgggagaactagaaggtagaatatgctgtttctctcaggagctgtgcacaagccaagtatgttttctctgcctgtcccccgttctcctttctctgccaactgtgaaagtatgggaaggttcccatccccatcctttaaggttcccaaacctggagtgcataggtactaaaccaagcagtgcaacttgtaattaagaagctgcagtgtttacatgtttcttaatgtgttgtcttttcaatggctgtattttaaaagaacatttgttttaatgatgtctctaattaaaggaagccctatggctttggaggcattgtgcccgtgatccaccagattctgtggtctttccttcttaacactgtctcatctctgacacagtatgcagcatgcctttaacactgccttcttttccagtggatggtaaacagtaatgagcactgtactaaccacccattataggcaaacatggcccagttctggccacactgtctggcaatgtgcctgaaaccccgttttccaccgtggtgggacaaagaagactaaaagtagcatggaaagatcaagacatagatttactgagtgttcaaagaacaagagactcagtcctacattttgctgtt
